(19) United States
(12) Patent Application Publication
(10) Pub. No.: US 2004/0031072 A1
(43) Pub. Date: Feb. 12, 2004

(54) Soy nucleic acid molecules and other molecules associated with transcription plants and uses thereof for plant improvement

(76) Inventors: Thomas J. La Rosa, Fenton, MO (US); Yihua Zhou, Ballwin, MO (US); David K. Kovalic, University City, MO (US); Yongwei Cao, Chesterfield, MO (US)

Correspondence Address: Lawrence M. Lavin, Jr., Patent Department, E2NA; Monsanto Company, 800 N. Lindbergh Boulevard, St. Louis, MO, 63167, US

(21) Appl. No.: 10/424,599

(22) Filed: Apr. 28, 2003

Related U.S. Application Data
(63) Continuation-in-part of application No. 09/985,678, filed on Nov. 5, 2001, now abandoned.
Application No. 09/985,678 is a continuation of application No. 09/304,517, filed on May 6, 1999, now abandoned.

(51) Int. Cl. A01H 1/00; C12N 15/82; C07H 21/04; C07K 14/415

(52) U.S. Cl. 800/278; 530/370; 536/23.6

(57) ABSTRACT

Polynucleotides useful for improvement of plants are provided. In particular, polynucleotide sequences are provided from plant sources. Polypeptides encoded by the polynucleotide sequences are also provided. The disclosed polynucleotides and polypeptides find use in production of transgenic plants to produce plants having improved properties.

[0001] This application claims the benefit of U.S. applications 09/198,779 filed Nov. 24, 1998, Ser. No. 09/199,129 filed Nov. 24, 1998, Ser. No. 09/206,040 filed Dec. 4, 1998, Ser. No. 09/210,297 filed Dec. 8, 1998, Ser. No. 09/227,586 filed Jan. 8, 1999, Ser. No. 09/229,413 filed Jan. 12, 1999, Ser. No. 09/233,218 filed Jan. 20, 1999, Ser. No. 09/237,183 filed Jan. 26, 1999, Ser. No. 09/244,000 filed Feb. 8, 1999, Ser. No. 09/252,974 filed Feb. 19, 1999, Ser. No. 09/262,979 filed Mar. 4, 1999, Ser. No. 09/263,191 filed Mar. 5, 1999, Ser. No. 09/267,199 filed Mar. 12, 1999, Ser. No. 09/283,466 filed Apr. 2, 1999, Ser. No. 09/300,482 filed Apr. 28, 1999, Ser. No. 09/304,517 filed May 6, 1999, Ser. No. 09/306,349 filed May 10, 1999, Ser. No. 09/333,535 filed Jun. 14, 1999, Ser. No. 09/371,146 filed Augu. 9, 1999, Ser. No. 09/391,630 filed Sep. 8, 1999, Ser. No. 09/421,106 filed Oct. 15, 1999, Ser. No. 09/440,687 filed Nov. 16, 1999, Ser. No. 09/521,640 filed Mar. 10, 2000, Ser. No. 09/531,113 filed Mar. 22, 2000, Ser. No. 09/552,086 filed Apr. 19, 2000, Ser. No. 09/552,087 filed Apr. 21, 2000, Ser. No. 09/565,240 filed May 8, 2000, Ser. No. 09/615,606 filed Jul. 13, 2000, Ser. No. 09/663,423 filed Sep. 15, 2000, Ser. No. 09/733,089 filed Dec. 11, 2000, Ser. No. 09/733,370 filed Feb. 1, 2001, Ser. No. 09/733,370 filed Feb. 1, 2001, Ser. No. 09/754,853 filed Jan. 5, 2001, Ser. No. 09/760,427 filed Jan. 13, 2001, Ser. No. 09/816,660 filed Mar. 26, 2001, Ser. No. 09/826,019 filed Apr. 5, 2001, Ser. No. 09/826,019 filed Apr. 5, 2001, Ser. No. 09/855,768 filed May 15, 2001, Ser. No. 09/874,708 filed Jun. 5, 2001, Ser. No. 09/922,293 filed Aug. 6, 2001, Ser. No. 09/938,294 filed Aug. 24, 2001, Ser. No. 09/955,216 filed Sep. 19, 2001, Ser. No. 09/975,254 filed Oct. 12, 2001, Ser. No. 09/978,703 filed Oct. 18, 2001, Ser. No. 09/985,678 filed Nov. 5, 2001, Ser. No. 09/987,899 filed Nov. 16, 2001, Ser. No. 10/155,881 filed May 22, 2002, Ser. No. 10/219,999 filed Aug. 15, 2002, No. 60/067,000 filed Nov. 24, 1997, No. 60/069,472 filed Dec. 9, 1997, No. 60/074,201 filed Feb. 10, 1998, No. 60/074,280 filed Feb. 10, 1998, No. 60/074,281 filed Feb. 10, 1998, No. 60/074,282 filed Feb. 10, 1998, No. 60/074,565 filed Feb. 12, 1998, No. 60/074,566 filed Feb. 12, 1998, No. 60/074,567 filed Feb. 12, 1998, No. 60/074,789 filed Feb. 19, 1998, No. 60/075,459 filed Feb. 19, 1998, No. 60/075,460 filed Feb. 19, 1998, No. 60/075,461 filed Feb. 19, 1998, No. 60/075,462 filed Feb. 19, 1998, No. 60/075,463 filed Feb. 19, 1998, No. 60/075,464 filed Feb. 19, 1998, No. 60/077,229 filed Mar. 9, 1998, No. 60/077,230 filed Mar. 9, 1998, No. 60/077,231 filed Mar. 9, 1998, No. 60/078,368 filed Mar. 18, 1998, No. 60/080,844 filed Apr. 7, 1998, No. 60/083,067 filed Apr. 27, 1998, No. 60/083,386 filed Apr. 29, 1998, No. 60/083,387 filed Apr. 29, 1998, No. 60/083,388 filed Apr. 29, 1998, No. 60/083,389 filed Apr. 29, 1998, No. 60/085,222 filed May 13, 1998, No. 60/085,223 filed May 13, 1998, No. 60/085,224 filed May 13, 1998, No. 60/086,183 filed May 21, 1998, No. 60/086,184 filed May 21, 1998, No. 60/086,185 filed May 21, 1998, No. 60/086,186 filed May 21, 1998, No. 60/086,187 filed May 21, 1998, No. 60/086,188 filed May 21, 1998, No. 60/089,524 filed Jun. 16, 1998, No. 60/089,793 filed Jun. 18, 1998, No. 60/089,810 filed Jun. 18, 1998, No. 60/089,814 filed Jun. 18, 1998, No. 60/099,668 filed Sep. 9, 1998, No. 60/099,670 filed Sep. 9, 1998, No. 60/099,697 filed Sep. 9, 1998, No. 60/100,672 filed Sep. 16, 1998, No. 60/100,673 filed Sep. 16, 1998, No. 60/100,674 filed Sep. 16, 1998, No. 60/101,130 filed Sep. 21, 1998, No. 60/101,131 filed Sep. 21, 1998, No. 60/101,132 filed Sep. 21, 1998, No. 60/104,722 filed Oct. 19, 1998, No. 60/108,996 filed Nov. 18, 1998, No. 60/109,018 filed Nov. 18, 1998, No. 60/110,108 filed Nov. 25, 1998, No. 60/110,109 filed Nov. 25, 1998, No. 60/111,033 filed Dec. 4, 1998, No. 60/111,742 filed Dec. 10, 1998, No. 60/111,981 filed Dec. 11, 1998, No. 60/112,221 filed Dec. 14, 1998, No. 60/112,229 filed Dec. 14, 1998, No. 60/112,808 filed Dec. 18, 1998, No. 60/113,224 filed Dec. 22, 1998, No. 60/124,269 filed Mar. 11, 1999, No. 60/125,816 filed Mar. 23, 1999, No. 60/125,817 filed Mar. 23, 1999, No. 60/125,818 filed Mar. 23, 1999, No. 60/130,174 filed Apr. 20, 1999, No. 60/130,463 filed Apr. 22, 1999, No. 60/130,464 filed Apr. 22, 1999, No. 60/130,465 filed Apr. 22, 1999, No. 60/133,690 filed May 10, 1999, No. 60/133,691 filed May 10, 1999, No. 60/133,692 filed May 10, 1999, No. 60/140,769 filed Jun. 23, 1999, No. 60/141,128 filed Jun. 28, 1999, No. 60/141,129 filed Jun. 28, 1999, No. 60/141,132 filed Jun. 28, 1999, No. 60/141,134 filed Jun. 28, 1999, No. 60/141,135 filed Jun. 28, 1999, No. 60/141,136 filed Jun. 28, 1999, No. 60/141,137 filed Jun. 28, 1999, No. 60/141,139 filed Jun. 28, 1999, No. 60/144,084 filed Jul. 16, 1999, No. 60/154,375 filed Sep. 17, 1999, No. 60/179,730 filed Feb. 2, 2000, No. 60/179,730 filed Feb. 2, 2000, No. 60/211,750 filed Jun. 15, 2000, No. 60/228,466 filed Aug. 29, 2000, No. 60/312,544 filed Aug. 15, 2001, and No. 60/324,109 filed Sep. 21, 2001, hereby incorporated by reference herein in their entirety.

### Incorporation of Sequence Listing

[0002] Two copies of the sequence listing (Seq. Listing Copy 1 and Seq. Listing Copy 2) and a computer-readable form of the sequence listing, all on CD-ROMs, each containing the file named pa_{—}00561.rpt, which is 294,817,960 bytes (measured in MS-DOS) and was created on Apr. 28, 2003 are herein incorporated by reference.

### Incorporation of Table

[0003] Two copies of Table 1 (Table 1 Copy 1 and Table 1 Copy 2) all on CD-ROMs, each containing the file named pa 00561.txt, which is 57,461,037 bytes (measured in MS-DOS) and was created on Apr. 25, 2003, are herein incorporated by reference.

### FIELD OF THE INVENTION

[0004] Disclosed herein are inventions in the field of plant biochemistry and genetics. More specifically polynucleotides for use in plant improvement are provided, in particular, sequences from Glycine max and the polypeptides encoded by such cDNAs are disclosed. Methods of using the polynucleotides for production of transgenic plants with improved biological characteristics are disclosed.

### BACKGROUND OF INVENTION

[0005] The ability to develop transgenic plants with improved traits depends in part on the identification of genes that are useful for production of transformed plants for expression of novel polypeptides. In this regard, the discovery of the polynucleotide sequences of such genes, and the polypeptide encoding regions of genes, is needed. Molecules comprising such polynucleotides may be used, for example, in DNA constructs useful for imparting unique genetic properties into transgenic plants.

### SUMMARY OF INVENTION

[0006] This invention provides isolated and purified polynucleotides comprising DNA sequences and the polypeptides encoded by such molecules from Glycine max. Polynucleotide sequences of the present invention are provided in the attached Sequence Listing as SEQ ID NO: 1 through SEQ ID NO: 142,842. Polypeptides of the present invention are provided as SEQ ID NO: 142,843 through SEQ ID NO: 285,684. Preferred subsets of the polynucleotides and polypeptides of this invention are useful for improvement of one or more important properties in plants.

[0007] The present invention also provides fragments of the polynucleotides of the present invention for use, for example as probes or molecular markers. Such fragments comprise at least 15 consecutive nucleotides in a sequence selected from the group consisting of SEQ ID NO: 1 through SEQ ID NO: 142,842 and complements thereof. Polynucleotide fragments of the present invention are useful as primers for PCR amplification and in hybridization assays such as transcription profiling assays or marker assays, e.g. high throughput assays where the oligonucleotides are provided in high-density arrays on a substrate. The present invention also provides homologs of the polynucleotide and polypeptides of the present invention.

[0008] This invention also provides DNA constructs comprising polynucleotides provided herein. Of particular interest are recombinant DNA constructs, wherein said constructs comprise a polynucleotide selected from the group consisting of:

[0009] (a) a polynucleotide comprising a nucleic acid sequence selected from the group consisting of SEQ ID NO: 1 through SEQ ID NO: 142,842;

[0010] (b) a polynucleotide encoding a polypeptide having an amino acid sequence selected from the group consisting of SEQ ID NO: 142,843 through SEQ ID NO: 285,684;

[0011] (c) a polynucleotide comprising a nucleic acid sequence complementary to a nucleic acid sequence selected from the group consisting of SEQ ID NO: 1 through SEQ ID NO: 142,842;

[0012] (d) a polynucleotide having at least 70% sequence identity to a polynucleotide of (a), (b) or (c);

[0013] (e) a polynucleotide encoding a polypeptide having at least 80% sequence identity to a polypeptide having an amino acid sequence selected from the group consisting of SEQ ID NO: 142,843 through SEQ ID NO: 285,684;

[0014] (f) a polynucleotide comprising a promoter functional in a plant cell, operably joined to a coding sequence for a polypeptide having at least 80% sequence identity to a polypeptide having an amino acid sequence selected from the group consisting of SEQ ID NO: 142,843 through SEQ ID NO: 285,684, wherein said encoded polypeptide is a functional homolog of said polypeptide having an amino acid sequence selected from the group consisting of SEQ ID NO: 142,843 through SEQ ID NO: 285,684; and

[0015] (g) a polynucleotide comprising a promoter functional in a plant cell, operably joined to a coding sequence for a polypeptide having an amino acid sequence selected from the group consisting of SEQ ID NO: 142,843 through SEQ ID NO: 285,684, wherein transcription of said coding sequence produces an RNA molecule having sufficient complementarity to a polynucleotide encoding said polypeptide to result in decreased expression of said polypeptide when said construct is expressed in a plant cell.

[0016] Such constructs are useful for production of transgenic plants having at least one improved property as the result of expression of a polypeptide of this invention. Improved properties of interest include yield, disease resistance, growth rate, stress tolerance and others as set forth in more detail herein.

[0017] The present invention also provides a method of modifying plant protein activity by inserting into cells of said plant an antisense construct comprising a promoter which functions in plant cells, a polynucleotide comprising a polypeptide coding sequence operably linked to said promoter, wherein said protein coding sequence is oriented such that transcription from said promoter produces an RNA molecule having sufficient complementarity to a polynucleotide encoding said polypeptide to result in decreased expression of said polypeptide when said construct is expressed in a plant cell.

[0018] This invention also provides a transformed organism, particularly a transformed plant, preferably a transformed crop plant, comprising a recombinant DNA construct of the present invention.

### DETAILED DESCRIPTION OF THE INVENTION

[0019] The present invention provides polynucleotides, or nucleic acid molecules, representing DNA sequences and the polypeptides encoded by such polynucleotides from Glycine max. The polynucleotides and polypeptides of the present invention find a number of uses, for example in recombinant DNA constructs, in physical arrays of molecules, and for use as plant breeding markers. In addition, the nucleotide and amino acid sequences of the polynucleotides and polypeptides find use in computer based storage and analysis systems.

[0020] Depending on the intended use, the polynucleotides of the present invention may be present in the form of DNA, such as cDNA or genomic DNA, or as RNA, for example mRNA. The polynucleotides of the present invention may be single or double stranded and may represent the coding, or sense strand of a gene, or the non-coding, antisense, strand.

[0021] The polynucleotides of the present invention find particular use in generation of transgenic plants to provide for increased or decreased expression of the polypeptides encoded by the cDNA polynucleotides provided herein. As a result of such biotechnological applications, plants, particularly crop plants, having improved properties are obtained. Crop plants of interest in the present invention include, but are not limited to soy, cotton, canola, maize, wheat, sunflower, sorghum, alfalfa, barley, millet, rice, tobacco, fruit and vegetable crops, and turf grass. Of particular interest are uses of the disclosed polynucleotides to provide plants having improved yield resulting from improved utilization of key biochemical compounds, such as nitrogen, phosphorous and carbohydrate, or resulting from improved responses to environmental stresses, such as cold, heat, drought, salt, and attack by pests or pathogens. Polynucleotides of the present invention may also be used to provide plants having improved growth and development, and ultimately increased yield, as the result of modified expression of plant growth regulators or modification of cell cycle or photosynthesis pathways. Other traits of interest that may be modified in plants using polynucleotides of the present invention include flavonoid content, seed oil and protein quantity and quality, herbicide tolerance, and rate of homologous recombination.

[0022] The term “isolated” is used herein in reference to purified polynucleotide or polypeptide molecules. As used herein, “purified” refers to a polynucleotide or polypeptide molecule separated from substantially all other molecules normally associated with it in its native state. More preferably, a substantially purified molecule is the predominant species present in a preparation. A substantially purified molecule may be greater than 60% free, preferably 75% free, more preferably 90% free, and most preferably 95% free from the other molecules (exclusive of solvent) present in the natural mixture. The term “isolated” is also used herein in reference to polynucleotide molecules that are separated from nucleic acids which normally flank the polynucleotide in nature. Thus, polynucleotides fused to regulatory or coding sequences with which they are not normally associated, for example as the result of recombinant techniques, are considered isolated herein. Such molecules are considered isolated even when present, for example in the chromosome of a host cell, or in a nucleic acid solution. The terms “isolated” and “purified” as used herein are not intended to encompass molecules present in their native state.

[0023] As used herein a “transgenic” organism is one whose genomic has been altered by the incorporation of foreign genetic material or additional copies of native genetic material, e.g. by transformation or recombination.

[0024] It is understood that the molecules of the invention may be labeled with reagents that facilitate detection of the molecule. As used herein, a label can be any reagent that facilitates detection, including fluorescent labels, chemical labels, or modified bases, including nucleotides with radioactive elements, e.g. ³²P, ³³P, ³⁵S or ²⁵, such as ³²P deoxycytidine-5′-triphosphate (³²PdCTP).

[0025] Polynucleotides of the present invention are capable of specifically hybridizing to other polynucleotides under certain circumstances. As used herein, two polynucleotides are said to be capable of specifically hybridizing to one another if the two molecules are capable of forming an anti-parallel, double-stranded nucleic acid structure. A nucleic acid molecule is said to be the “complement” of another nucleic acid molecule if the molecules exhibit complete complementarity. As used herein, molecules are said to exhibit “complete complementarity” when every nucleotide in each of the molecules is complementary to the corresponding nucleotide of the other. Two molecules are said to be “minimally complementary” if they can hybridize to one another with sufficient stability to permit them to remain annealed to one another under at least conventional “low-stringency” conditions. Similarly, the molecules are said to be “complementary” if they can hybridize to one another with sufficient stability to permit them to remain annealed to one another under conventional “high-stringency” conditions. Conventional stringency conditions are known to those skilled in the art and can be found, for example in Molecular Cloning. A Laboratory Manual, 3^{rd} edition Volumes 1, 2, and 3. J. F. Sambrook, D. W. Russell, and N. Irwin, Cold Spring Harbor laboratory Press, 2000.

[0026] Departures from complete complementarity are therefore permissible, as long as such departures do not completely preclude the capacity of the molecules to form a double-stranded structure. Thus, in order for a nucleic acid molecule to serve as a primer or probe it need only be sufficiently complementary in sequence to be able to form a stable double-stranded structure under the particular solvent and salt concentrations employed. Appropriate stringency conditions which promote DNA hybridization are, for example, 6.0× sodium chloride/sodium citrate (SSC) at about 45° C., followed by a wash of 2.0×SSC at 50° C. Such conditions are known to those skilled in the art and can be found, for example in Current Protocols in Molecular Biology, John Wiley & Sons, N.Y. (989). Salt concentration and temperature in the wash step can be adjusted to alter hybridization stringency. For example, conditions may vary from low stringency of about 2.0×SSC at 40° C. to moderately stringent conditions of about 2.0×SSC at 50° C. to high stringency conditions of about 0.2×SSC at 50° C.

[0027] As used herein “sequence identity” refers to the extent to which two optimally aligned polynucleotide or peptide sequences are invariant throughout a window of alignment of components, e.g. nucleotides or amino acids. An “identity fraction” for aligned segments of a test sequence and a reference sequence is the number of identical components which are shared by the two aligned sequences divided by the total number of components in the reference sequence segment, i.e. the entire reference sequence or a smaller defined part of the reference sequence. “Percent identity” is the identity fraction times 100. Comparison of sequences to determine percent identity can be accomplished by a number of well-known methods, including for example by using mathematical algorithms, such as those in the BLAST suite of sequence analysis programs.

[0028] Polynucicotides—This invention provides polynucleotides comprising regions that encode polypeptides. The encoded polypeptides may be the complete protein encoded by the gene represented by the polynucleotide, or may be fragments of the encoded protein. Preferably, polynucleotides provided herein encode polypeptides constituting a substantial portion of the complete protein, and more preferentially, constituting a sufficient portion of the complete protein to provide the relevant biological activity.

[0029] Of particular interest are polynucleotides of the present invention that encode polypeptides involved in one or more important biological functions in plants. Such polynucleotides may be expressed in transgenic plants to produce plants having improved phenotypic properties and/or improved response to stressful environmental conditions. See, for example, Table 1 for a list of improved plant properties and responses and the SEQ ID NO: 1 through SEQ ID NO:142,842 representing the polynucleotides that may be expressed in transgenic plants to impart such improvements.

[0030] Polynucleotides of the present invention are generally used to impart such biological properties by providing for enhanced protein activity in a transgenic organism, preferably a transgenic plant, although in some cases, improved properties are obtained by providing for reduced protein activity in a transgenic plant. Reduced protein activity and enhanced protein activity are measured by reference to a wild type cell or organism and can be determined by direct or indirect measurement. Direct measurement of protein activity might include an analytical assay for the protein, per se, or enzymatic product of protein activity. Indirect assay might include measurement of a property affected by the protein. Enhanced protein activity can be achieved in a number of ways, for example by overproduction of mRNA encoding the protein or by gene shuffling. One skilled in the are will know methods to achieve overproduction of mRNA, for example by providing increased copies of the native gene or by introducing a construct having a heterologous promoter linked to the gene into a target cell or organism. Reduced protein activity can be achieved by a variety of mechanisms including antisense, mutation or knockout. Antisense RNA will reduce the level of expressed protein resulting in reduced protein activity as compared to wild type activity levels. A mutation in the gene encoding a protein may reduce the level of expressed protein and/or interfere with the function of expressed protein to cause reduced protein activity.

[0031] The polynucleotides of this invention represent cDNA sequences from Glycine max. Nucleic acid sequences of the polynucleotides of the present invention are provided herein as SEQ ID NO: 1 through SEQ ID NO: 142,842.

[0032] A subset of the nucleic molecules of this invention includes fragments of the disclosed polynucleotides consisting of oligonucleotides of at least 15, preferably at least 16 or 17, more preferably at least 18 or 19, and even more preferably at least 20 or more, consecutive nucleotides. Such oligonucleotides are fragments of the larger molecules having a sequence selected from the group of polynucleotide sequences consisting of SEQ ID NO: 1 through SEQ ID NO: 142,842, and find use, for example as probes and primers for detection of the polynucleotides of the present invention.

[0033] Also of interest in the present invention are variants of the polynucleotides provided herein. Such variants may be naturally occurring, including homologous polynucleotides from the same or a different species, or may be non-natural variants, for example polynucleotides synthesized using chemical synthesis methods, or generated using recombinant DNA techniques. With respect to nucleotide sequences, degeneracy of the genetic code provides the possibility to substitute at least one base of the protein encoding sequence of a gene with a different base without causing the amino acid sequence of the polypeptide produced from the gene to be changed. Hence, the DNA of the present invention may also have any base sequence that has been changed from SEQ ID NO: 1 through SEQ ID NO: 142,842 by substitution in accordance with degeneracy of the genetic code. References describing codon usage include: Carels et al., J. Mol. Evol. 46: 45 (1998) and Fennoy et al., Nucl. Acids Res. 21(23): 5294 (1993).

[0034] Polynucleotides of the present invention that are variants of the polynucleotides provided herein will generally demonstrate significant identity with the polynucleotides provided herein. Of particular interest are polynucleotide homologs having at least about 60% sequence identity, at least about 70% sequence identity, at least about 80% sequence identity, at least about 85% sequence identity, and more preferably at least about 90%, 95% or even greater, such as 98% or 99% sequence identity with polynucleotide sequences described herein.

[0035] Protein and Polypeptide Molecules—This invention also provides polypeptides encoded by polynucleotides of the present invention. Amino acid sequences of the polypeptides of the present invention are provided herein as SEQ ID NO: 142,843 through SEQ ID NO: 285,684.

[0036] As used herein, the term “polypeptide” means an unbranched chain of amino acid residues that are covalently linked by an amide linkage between the carboxyl group of one amino acid and the amino group of another. The term polypeptide can encompass whole proteins (i.e. a functional protein encoded by a particular gene), as well as fragments of proteins. Of particular interest are polypeptides of the present invention which represent whole proteins or a sufficient portion of the entire protein to impart the relevant biological activity of the protein. The tern “protein” also includes molecules consisting of one or more polypeptide chains. Thus, a polypeptide of the present invention may also constitute an entire gene product, but only a portion of a functional oligomeric protein having multiple polypeptide chains.

[0037] Of particular interest in the present invention are polypeptides involved in one or more important biological properties in plants. Such polypeptides may be produced in transgenic plants to provide plants having improved phenotypic properties and/or improved response to stressful environmental conditions. In some cases, decreased expression of such polypeptides may be desired, such decreased expression being obtained by use of the polynucleotide sequences provided herein, for example in antisense or cosuppression methods. See, Table 1 for a list of improved plant properties and responses and SEQ ID NO: 142,843 through SEQ ID NO: 285,684 for the polypeptides whose expression may be altered in transgenic plants to impart such improvements. A summary of such improved properties and polypeptides of interest for increased or decreased expression is provided below.

[0038] Yield/Nitrogen: Yield improvement by improved nitrogen flow, sensing, uptake, storage and/or transport. Polypeptides useful for imparting such properties include those involved in aspartate and glutamate biosynthesis, polypeptides involved in aspartate and glutamate transport, polypeptides associated with the TOR (Target of Rapamycin) pathway, nitrate transporters, ammonium transporters, chlorate transporters and polypeptides involved in tetrapyrrole biosynthesis.

[0039] Yield/Carbohydrate: Yield improvement by effects on carbohydrate metabolism, for example by increased sucrose production and/or transport. Polypeptides useful for improved yield by effects on carbohydrate metabolism include polypeptides involved in sucrose or starch metabolism, carbon assimilation or carbohydrate transport, including, for example sucrose transporters or glucose/hexose transporters, enzymes involved in glycolysis/gluconeogenesis, the pentose phosphate cycle, or raffinose biosynthesis, and polypeptides involved in glucose signaling, such as SNF1 complex proteins.

[0040] Yield/Photosynthesis: Yield improvement resulting from increased photosynthesis. Polypeptides useful for increasing the rate of photosynthesis include phytochrome, photosystem I and II proteins, electron carriers, ATP synthase, NADH dehydrogenase and cytochrome oxidase.

[0041] Yield/Phosphorus: Yield improvement resulting from increased phosphorus uptake, transport or utilization. Polypeptides useful for improving yield in this manner include phosphatases and phosphate transporters.

[0042] Yield/Stress tolerance: Yield improvement resulting from improved plant growth and development by helping plants to tolerate stressful growth conditions. Polypeptides useful for improved stress tolerance under a variety of stress conditions include polypeptides involved in gene regulation, such as serine/threonine-protein kinases, MAP kinases, MAP kinase kinases, and MAP kinase kinase kinases; polypeptides that act as receptors for signal transduction and regulation, such as receptor protein kinases; intracellular signaling proteins, such as protein phosphatases, GTP binding proteins, and phospholipid signaling proteins; polypeptides involved in arginine biosynthesis; polypeptides involved in ATP metabolism, including for example ATPase, adenylate transporters, and polypeptides involved in ATP synthesis and transport; polypeptides involved in glycine betaine, jasmonic acid, flavonoid or steroid biosynthesis; and hemoglobin. Enhanced or reduced activity of such polypeptides in transgenic plants will provide changes in the ability of a plant to respond to a variety of environmental stresses, such as chemical stress, drought stress and pest stress.

[0043] Cold tolerance: Polypeptides of interest for improving plant tolerance to cold or freezing temperatures include polypeptides involved in biosynthesis of trehalose or raffinose, polypeptides encoded by cold induced genes, fatty acyl desaturases and other polypeptides involved in glycerolipid or membrane lipid biosynthesis, which find use in modification of membrane fatty acid composition, alternative oxidase, calcium-dependent protein kinases, LEA proteins and uncoupling protein.

[0044] Heat tolerance: Polypeptides of interest for improving plant tolerance to heat include polypeptides involved in biosynthesis of trehalose, polypeptides involved in glycerolipid biosynthesis or membrane lipid metabolism (for altering membrane fatty acid composition), heat shock proteins and mitochondrial NDK.

[0045] Osmotic tolerance: Polypeptides of interest for improving plant tolerance to extreme osmotic conditions include polypeptides involved in proline biosynthesis.

[0046] Drought tolerance: Polypeptides of interest for improving plant tolerance to drought conditions include aquaporins, polypeptides involved in biosynthesis of trehalose or wax, LEA proteins and invertase.

[0047] Pathogen or pest tolerance: Polypeptides of interest for improving plant tolerance to effects of plant pests or pathogens include proteases, polypeptides involved in anthocyanin biosynthesis, polypeptides involved in cell wall metabolism, including cellulases, glucosidases, pectin methylesterase, pectinase, polygalacturonase, chitinase, chitosanase, and cellulose synthase, and polypeptides involved in biosynthesis of terpenoids or indole for production of bioactive metabolites to provide defense against herbivorous insects.

[0048] Cell cycle modification: Polypeptides encoding cell cycle enzymes and regulators of the cell cycle pathway are useful for manipulating growth rate in plants to provide early vigor and accelerated maturation leading to improved yield. Improvements in quality traits, such as seed oil content, may also be obtained by expression of cell cycle enzymes and cell cycle regulators. Polypeptides of interest for modification of cell cycle pathway include cyclins and E1F5alpha pathway proteins, polypeptides involved in polyamine metabolism, polypeptides which act as regulators of the cell cycle pathway, including cyclin-dependent kinases (CDKs), CDK-activating kinases, CDK-inhibitors, Rb and Rb-binding proteins, and transcription factors that activate genes involved in cell proliferation and division, such as the E2F family of transcription factors, proteins involved in degradation of cyclins, such as cullins, and plant homologs of tumor suppressor polypeptides.

[0049] Seed protein yield/content: Polypeptides useful for providing increased seed protein quantity and/or quality include polypeptides involved in the metabolism of amino acids in plants, particularly polypeptides involved in biosynthesis of methionine/cysteine and lysine, amino acid transporters, amino acid efflux carriers, seed storage proteins, proteases, and polypeptides involved in phytic acid metabolism.

[0050] Seed oil yield/content: Polypeptides useful for providing increased seed oil quantity and/or quality include polypeptides involved in fatty acid and glycerolipid biosynthesis, beta-oxidation enzymes, enzymes involved in biosynthesis of nutritional compounds, such as carotenoids and tocopherols, and polypeptides that increase embryo size or number or thickness of aleurone.

[0051] Disease response in plants: Polypeptides useful for imparting improved disease responses to plants include polypeptides encoded by cercosporin induced genes, antifungal proteins and proteins encoded by R-genes or SAR genes. Expression of such polypeptides in transgenic plants will provide an increase in disease resistance ability of plants.

[0052] Galactomannanan biosynthesis: Polypeptides involved in production of galactomannans are of interest for providing plants having increased and/or modified reserve polysaccharides for use in food, pharmaceutical, cosmetic, paper and paint industries.

[0053] Flavonoid/isoflavonoid metabolism in plants: Polypeptides of interest for modification of flavonoid/isoflavonoid metabolism in plants include cinnamate-4-hydroxylase, chalcone synthase and flavonol synthase. Enhanced or reduced activity of such polypeptides in transgenic plants will provide changes in the quantity and/or speed of flavonoid metabolism in plants and may improve disease resistance by enhancing synthesis of protective secondary metabolites or improving signaling pathways governing disease resistance.

[0054] Plant growth regulators: Polypeptides involved in production of substances that regulate the growth of various plant tissues are of interest in the present invention and may be used to provide transgenic plants having altered morphologies and improved plant growth and development profiles leading to improvements in yield and stress response. Of particular interest are polypeptides involved in the biosynthesis of plant growth hormones, such as gibberellins, cytokinins, auxins, ethylene and abscisic acid, and other proteins involved in the activity and/or transport of such polypeptides, including for example, cytokinin oxidase, cytokinin/purine permeases, F-box proteins, G-proteins and phytosulfokines.

[0055] Herbicide tolerance: Polypeptides of interest for producing plants having tolerance to plant herbicides include polypeptides involved in the shikimate pathway, which are of interest for providing glyphosate tolerant plants. Such polypeptides include polypeptides involved in biosynthesis of chorismate, phenylalanine, tyrosine and tryptophan.

[0056] Transcription factors in plants: Transcription factors play a key role in plant growth and development by controlling the expression of one or more genes in temporal, spatial and physiological specific patterns. Enhanced or reduced activity of such polypeptides in transgenic plants will provide significant changes in gene transcription patterns and provide a variety of beneficial effects in plant growth, development and response to environmental conditions. Transcription factors of interest include, but are not limited to myb transcription factors, including helix-turn-helix proteins, homeodomain transcription factors, leucine zipper transcription factors, MADS transcription factors, transcription factors having AP2 domains, zinc finger transcription factors, CCAAT binding transcription factors, ethylene responsive transcription factors, transcription initiation factors and UV damaged DNA binding proteins.

[0057] Homologous recombination: Increasing the rate of homologous recombination in plants is useful for accelerating the introgression of transgenes into breeding varieties by backcrossing, and to enhance the conventional breeding process by allowing rare recombinants between closely linked genes in phase repulsion to be identified more easily. Polypeptides useful for expression in plants to provide increased homologous recombination include polypeptides involved in mitosis and/or meiosis, including for example, resolvases and polypeptide members of the RAD52 epistasis group.

[0058] Lignin biosynthesis: Polypeptides involved in lignin biosynthesis are of interest for increasing plants' resistance to lodging and for increasing the usefulness of plant materials as biofuels.

[0059] The function of polypeptides of the present invention is determined by comparison of the amino acid sequence of the novel polypeptides to amino acid sequences of known polypeptides. A variety of homology based search algorithms are available to compare a query sequence to a protein database, including for example, BLAST, FASTA, and Smith-Waterman. In the present application, BLASTX and BLASTP algorithms are used to provide protein function information. A number of values are examined in order to assess the confidence of the function assignment. Useful measurements include “E-value” (also shown as “hit_p”), “percent identity”, “percent query coverage”, and “percent hit coverage”.

[0060] In BLAST, E-value, or expectation value, represents the number of different alignments with scores equivalent to or better than the raw alignment score, S, that are expected to occur in a database search by chance. The lower the E value, the more significant the match. Because database size is an element in E-value calculations, E-values obtained by BLASTing against public databases, such as GenBank, have generally increased over time for any given query/entry match. In setting criteria for confidence of polypeptide function prediction, a “high” BLAST match is considered herein as having an E-value for the top BLAST hit provided in Table 1 of less than 1E-30; a medium BLASTX E-value is 1E-30 to 1E-8; and a low BLASTX E-value is greater than 1E-8. The top BLAST hit and corresponding E values are provided in columns six and seven of Table 1.

[0061] Percent identity refers to the percentage of identically matched amino acid residues that exist along the length of that portion of the sequences which is aligned by the BLAST algorithm. In setting criteria for confidence of polypeptide function prediction, a “high” BLAST match is considered herein as having percent identity for the top BLAST hit provided in Table 1 of at least 70%; a medium percent identity value is 35% to 70%; and a low percent identity is less than 35%.

[0062] Of particular interest in protein function assignment in the present invention is the use of combinations of E-values, percent identity, query coverage and hit coverage. Query coverage refers to the percent of the query sequence that is represented in the BLAST alignment. Hit coverage refers to the percent of the database entry that is represented in the BLAST alignment. In the present invention, function of a query polypeptide is inferred from function of a protein homolog where either (1) hit_p<1e-30 or % identity>35% AND query_coverage>50% AND hit_coverage>50%, or (2) hit_p<1e-8 AND query_coverage>70% AND hit_coverage>70%.

[0063] A further aspect of the invention comprises functional homologs which differ in one or more amino acids from those of a polypeptide provided herein as the result of one or more conservative amino acid substitutions. It is well known in the art that one or more amino acids in a native sequence can be substituted with at least one other amino acid, the charge and polarity of which are similar to that of the native amino acid, resulting in a silent change. For instance, valine is a conservative substitute for alanine and threonine is a conservative substitute for serine. Conservative substitutions for an amino acid within the native polypeptide sequence can be selected from other members of the class to which the naturally occurring amino acid belongs. Amino acids can be divided into the following four groups: (1) acidic amino acids, (2) basic amino acids, (3) neutral polar amino acids, and (4) neutral nonpolar amino acids. Representative amino acids within these various groups include, but are not limited to: (1) acidic (negatively charged) amino acids such as aspartic acid and glutamic acid; (2) basic (positively charged) amino acids such as arginine, histidine, and lysine; (3) neutral polar amino acids such as glycine, serine, threonine, cysteine, tyrosine, asparagine, and glutamine; and (4) neutral nonpolar (hydrophobic) amino acids such as alanine, leucine, isoleucine, valine, proline, phenylalanine, tryptophan, and methionine. Conserved substitutes for an amino acid within a native amino acid sequence can be selected from other members of the group to which the naturally occurring amino acid belongs. For example, a group of amino acids having aliphatic side chains is glycine, alanine, valine, leucine, and isoleucine; a group of amino acids having aliphatic-hydroxyl side chains is serine and threonine; a group of amino acids having amide-containing side chains is asparagine and glutamine; a group of amino acids having aromatic side chains is phenylalanine, tyrosine, and tryptophan; a group of amino acids having basic side chains is lysine, arginine, and histidine; and a group of amino acids having sulfur-containing side chains is cysteine and methionine. Naturally conservative amino acids substitution groups are: valine-leucine, valine-isoleucine, phenylalanine-tyrosine, lysine-arginine, alanine-valine, aspartic acid-glutamic acid, and asparagine-glutamine. A further aspect of the invention comprises polypeptides which differ in one or more amino acids from those of a soy protein sequence as the result of deletion or insertion of one or more amino acids in a native sequence.

[0064] Also of interest in the present invention are functional homologs of the polypeptides provided herein which have the same function as a polypeptide provided herein, but with increased or decreased activity or altered specificity. Such variations in protein activity may exist naturally in polypeptides encoded by related genes, for example in a related polypeptide encodes by a different allele or in a different species, or can be achieved by mutagenesis. Naturally occurring variant polypeptides may be obtained by well known nucleic acid or protein screening methods using DNA or antibody probes, for example by screening libraries for genes encoding related polypeptides, or in the case of expression libraries, by screening directly for variant polypeptides. Screening methods for obtaining a modified protein or enzymatic activity of interest by mutagenesis are disclosed in U.S. Pat. No. 5,939,250. An alternative approach to the generation of variants uses random recombination techniques such as “DNA shuffling” as disclosed in U.S. Pat. Nos. 5,605,793; 5,811,238; 5,830,721 and 5,837,458; and International Applications WO 98/31837 and WO 99/65927, all of which are incorporated herein by reference. An alternative method of molecular evolution involves a staggered extension process (StEP) for in vitro mutagenesis and recombination of nucleic acid molecule sequences, as disclosed in U.S. Pat. No. 5,965,408 and International Application WO 98/42832, both of which are incorporated herein by reference.

[0065] Polypeptides of the present invention that are variants of the polypeptides provided herein will generally demonstrate significant identity with the polypeptides provided herein. Of particular interest are polypeptides having at least about 35% sequence identity, at least about 50% sequence identity, at least about 60% sequence identity, at least about 70% sequence identity, at least about 80% sequence identity, and more preferably at least about 85%, 90%, 95% or even greater, sequence identity with polypeptide sequences described herein. Of particular interest in the present invention are polypeptides having amino acid sequences provided herein (reference polypeptides) and functional homologs of such reference polypeptides, wherein such functional homologs comprises at least 50 consecutive amino acids having at least 90% identity to a 50 amino acid polypeptide fragment of said reference polypeptide.

[0066] Recombinant DNA Constructs—The present invention also encompasses the use of polynucleotides of the present invention in recombinant constructs, i.e. constructs comprising polynucleotides that are constructed or modified outside of cells and that join nucleic acids that are not found joined in nature. Using methods known to those of ordinary skill in the art, polypeptide encoding sequences of this invention can be inserted into recombinant DNA constructs that can be introduced into a host cell of choice for expression of the encoded protein, or to provide for reduction of expression of the encoded protein, for example by antisense or cosuppression methods. Potential host cells include both prokaryotic and eukaryotic cells. Of particular interest in the present invention is the use of the polynucleotides of the present invention for preparation of constructs for use in plant transformation.

[0067] In plant transformation, exogenous genetic material is transferred into a plant cell. By “exogenous” it is meant that a nucleic acid molecule, for example a recombinant DNA construct comprising a polynucleotide of the present invention, is produced outside the organism, e.g. plant, into which it is introduced. An exogenous nucleic acid molecule can have a naturally occurring or non-naturally occurring nucleotide sequence. One skilled in the art recognizes that an exogenous nucleic acid molecule can be derived from the same species into which it is introduced or from a different species. Such exogenous genetic material may be transferred into either monocot or dicot plants including, but not limited to, soy, cotton, canola, maize, teosinte, wheat, rice and Arabidopsis plants. Transformed plant cells comprising such exogenous genetic material may be regenerated to produce whole transformed plants.

[0068] Exogenous genetic material may be transferred into a plant cell by the use of a DNA vector or construct designed for such a purpose. A construct can comprise a number of sequence elements, including promoters, encoding regions, and selectable markers. Vectors are available which have been designed to replicate in both E. coli and A. lumefaciens and have all of the features required for transferring large inserts of DNA into plant chromosomes. Design of such vectors is generally within the skill of the art.

[0069] A construct will generally include a plant promoter to direct transcription of the protein-encoding region or the antisense sequence of choice. Numerous promoters, which are active in plant cells, have been described in the literature. These include the nopaline synthase (NOS) promoter and octopine synthase (OCS) promoters carried on tumor-inducing plasmids of Agrobacterium lumefaciens or caulimovirus promoters such as the Cauliflower Mosaic Virus (CaMV) 19S or 35S promoter (U.S. Pat. No. 5,352,605), and the Figwort Mosaic Virus (FMV) 35S-promoter (U.S. Pat. No. 5,378,619). These promoters and numerous others have been used to create recombinant vectors for expression in plants. Any promoter known or found to cause transcription of DNA in plant cells can be used in the present invention. Other useful promoters are described, for example, in U.S. Pat. Nos. 5,378,619; 5,391,725; 5,428,147; 5,447,858; 5,608,144; 5,614,399; 5,633,441; and 5,633,435, all of which are incorporated herein by reference.

[0070] In addition, promoter enhancers, such as the CaMV 35S enhancer or a tissue specific enhancer, may be used to enhance gene transcription levels. Enhancers often are found 5′ to the start of transcription in a promoter that functions in eukaryotic cells, but can often be inserted in the forward or reverse orientation 5′ or 3′ to the coding sequence. In some instances, these 5′ enhancing elements are introns. Deemed to be particularly useful as enhancers are the 5′ introns of the rice actin 1 and rice actin 2 genes. Examples of other enhancers which could be used in accordance with the invention include elements from octopine synthase genes, the maize alcohol dehydrogenase gene intron 1, elements from the maize shrunken 1 gene, the sucrose synthase intron, the TMV omega element, and promoters from non-plant eukaryotes.

[0071] DNA constructs can also contain one or more 5′ non-translated leader sequences which serve to enhance polypeptide production from the resulting mRNA transcripts. Such sequences may be derived from the promoter selected to express the gene or can be specifically modified to increase translational of the mRNA. Such regions may also be obtained from viral RNAs, from suitable eukaryotic genes, or from a synthetic gene sequence. For a review of optimizing expression of transgenes, see Koziel et al. (1996) Plant Mol. Biol. 32:393-405).

[0072] Constructs and vectors may also include, with the coding region of interest, a nucleic acid sequence that acts, in whole or in part, to terminate transcription of that region. One type of 3′ untranslated sequence which may be used is a 3′ UTR from the nopaline synthase gene (nos 3′) of Agrobacterium tumefaciens. Other 3′ termination regions of interest include those from a gene encoding the small subunit of a ribulose-1,5-bisphosphate carboxylase-oxygenase (rbcS), and more specifically, from a rice rbcS gene (U.S. Pat. No. 6,426,446), the 3′ UTR for the T7 transcript of Agrobacterium tumefaciens, the 3′ end of the protease inhibitor 1 or 11 genes from potato or tomato, and the 3′ region isolated from Cauliflower Mosaic Virus. Alternatively, one also could use a gamma coixin, oleosin 3 or other 3′ UTRs from the genus Coix (PCT Publication WO 99/58659).

[0073] Constructs and vectors may also include a selectable marker. Selectable markers may be used to select for plants or plant cells that contain the exogenous genetic material. Useful selectable marker genes include those conferring resistance to antibiotics such as kanamycin (nptII), hygromycin B (aph IV) and gentamycin (aac3 and aacC4) or resistance to herbicides such as glufosinate (bar or pal) and glyphosate (EPSPS). Examples of such selectable markers are illustrated in U.S. Pat. Nos. 5,550,318; 5,633,435; 5,780,708 and 6,118,047, all of which are incorporated herein by reference.

[0074] Constructs and vectors may also include a screenable marker. Screenable markers may be used to monitor transformation. Exemplary screenable markers include genes expressing a colored or fluorescent protein such as a luciferase or green fluorescent protein (GFP), a β-glucuronidase or uidA gene (GUS) which encodes an enzyme for which various chromogenic substrates are known or an R-locus gene, which encodes a product that regulates the production of anthocyanin pigments (red color) in plant tissues. Other possible selectable and/or screenable marker genes will be apparent to those of skill in the art.

[0075] Constructs and vectors may also include a transit peptide for targeting of a gene target to a plant organelle, particularly to a chloroplast, leucoplast or other plastid organelle (U.S. Pat. No. 5,188,642).

[0076] For use in Agrobacterium mediated transformation methods, constructs of the present invention will also include T-DNA border regions flanking the DNA to be inserted into the plant genome to provide for transfer of the DNA into the plant host chromosome as discussed in more detail below. An exemplary plasmid that finds use in such transformation methods is pMON18365, a T-DNA vector that can be used to clone exogenous genes and transfer them into plants using Agrobacterium-mediated transformation. See US Patent Application 20030024014, herein incorporated by reference. This vector contains the left border and right border sequences necessary for Agrobacterium transformation. The plasmid also has origins of replication for maintaining the plasmid in both E. coli and Agrobacterium tumefaciens strains.

[0077] A candidate gene is prepared for insertion into the T-DNA vector, for example using well-known gene cloning techniques such as PCR. Restriction sites may be introduced onto each end of the gene to facilitate cloning. For example, candidate genes may be amplified by PCR techniques using a set of primers. Both the amplified DNA and the cloning vector are cut with the same restriction enzymes, for example, NotI and PstI. The resulting fragments are gel-purified, ligated together, and transformed into E. coli. Plasmid DNA containing the vector with inserted gene may be isolated from E. coli cells selected for spectinomycin resistance, and the presence of the desired insert verified by digestion with the appropriate restriction enzymes. Undigested plasmid may then be transformed into Agrobacterium tumefaciens using techniques well known to those in the art, and transformed Agrobacterium cells containing the vector of interest selected based on spectinomycin resistance. These and other similar constructs useful for plant transformation may be readily prepared by one skilled in the art.

[0078] Transformation Methods and Transgcnic Plants—Methods and compositions for transforming bacteria and other microorganisms are known in the art. See for example Molecular Cloning: A Laboratory Manual, 3^{rd} edition Volumes 1, 2, and 3. J. F. Sambrook, D. W. Russell, and N. Irwin, Cold Spring Harbor Laboratory Press, 2000.

[0079] Technology for introduction of DNA into cells is well known to those of skill in the art. Methods and materials for transforming plants by introducing a transgenic DNA construct into a plant genome in the practice of this invention can include any of the well-known and demonstrated methods including electroporation as illustrated in U.S. Pat. No. 5,384,253, microprojectile bombardment as illustrated in U.S. Pat. Nos. 5,015,580; 5,550,318; 5,538,880; 6,160,208; 6,399,861 and 6,403,865, Agrobacterium-mediated transformation as illustrated in U.S. Pat. Nos. 5,635,055; 5,824,877; 5,591,616; 5,981,840 and 6,384,301, and protoplast transformation as illustrated in U.S. Pat. Nos. 5,508,184, all of which are incorporated herein by reference.

[0080] Any of the polynucleotides of the present invention may be introduced into a plant cell in a permanent or transient manner in combination with other genetic elements such as vectors, promoters enhancers etc. Further any of the polynucleotides of the present invention may be introduced into a plant cell in a manner that allows for production of the polypeptide or fragment thereof encoded by the polynucleotide in the plant cell, or in a manner that provides for decreased expression of an endogenous gene and concomitant decreased production of protein.

[0081] It is also to be understood that two different transgenic plants can also be mated to produce offspring that contain two independently segregating added, exogenous genes. Selfing of appropriate progeny can produce plants that are homozygous for both added, exogenous genes that encode a polypeptide of interest. Back-crossing to a parental plant and out-crossing with a non-transgenic plant are also contemplated, as is vegetative propagation.

[0082] Expression of the polynucleotides of the present invention and the concomitant production of polypeptides encoded by the polynucleotides is of interest for production of transgenic plants having improved properties, particularly, improved properties which result in crop plant yield improvement. Expression of polypeptides of the present invention in plant cells may be evaluated by specifically identifying the protein products of the introduced genes or evaluating the phenotypic changes brought about by their expression. It is noted that when the polypeptide being produced in a transgenic plant is native to the target plant species, quantitative analyses comparing the transformed plant to wild type plants may be required to demonstrate increased expression of the polypeptide of this invention.

[0083] Assays for the production and identification of specific proteins make use of various physical-chemical, structural, functional, or other properties of the proteins. Unique physical-chemical or structural properties allow the proteins to be separated and identified by electrophoretic procedures, such as native or denaturing gel electrophoresis or isoelectric focusing, or by chromatographic techniques such as ion exchange or gel exclusion chromatography. The unique structures of individual proteins offer opportunities for use of specific antibodies to detect their presence in formats such as an ELISA assay. Combinations of approaches may be employed with even greater specificity such as western blotting in which antibodies are used to locate individual gene products that have been separated by electrophoretic techniques. Additional techniques may be employed to absolutely confirm the identity of the product of interest such as evaluation by amino acid sequencing following purification. Although these are among the most commonly employed, other procedures may be additionally used.

[0084] Assay procedures may also be used to identify the expression of proteins by their functionality, particularly where the expressed protein is an enzyme capable of catalyzing chemical reactions involving specific substrates and products. These reactions may be measured, for example in plant extracts, by providing and quantifying the loss of substrates or the generation of products of the reactions by physical and/or chemical procedures.

[0085] In many cases, the expression of a gene product is determined by evaluating the phenotypic results of its expression. Such evaluations may be simply as visual observations, or may involve assays. Such assays may take many forms including but not limited to analyzing changes in the chemical composition, morphology, or physiological properties of the plant. Chemical composition may be altered by expression of genes encoding enzymes or storage proteins which change amino acid composition and may be detected by amino acid analysis, or by enzymes which change starch quantity which may be analyzed by near infrared reflectance spectrometry. Morphological changes may include greater stature or thicker stalks.

[0086] Plants with decreased expression of a gene of interest can also be achieved through the use of polynucleotides of the present invention, for example by expression of antisense nucleic acids, or by identification of plants transformed with sense expression constructs that exhibit cosuppression effects.

[0087] Antisense approaches are a way of preventing or reducing gene function by targeting the genetic material as disclosed in U.S. Pat. Nos. 4,801,540; 5,107,065; 5,759,829; 5,910,444; 6,184,439; and 6,198,026, all of which are incorporated herein by reference. The objective of the antisense approach is to use a sequence complementary to the target gene to block its expression and create a mutant cell line or organism in which the level of a single chosen protein is selectively reduced or abolished. Antisense techniques have several advantages over other ‘reverse genetic’ approaches. The site of inactivation and its developmental effect can be manipulated by the choice of promoter for antisense genes or by the timing of external application or microinjection. Antisense can manipulate its specificity by selecting either unique regions of the target gene or regions where it shares homology to other related genes.

[0088] The principle of regulation by antisense RNA is that RNA that is complementary to the target mRNA is introduced into cells, resulting in specific RNA:RNA duplexes being formed by base pairing between the antisense substrate and the target. Under one embodiment, the process involves the introduction and expression of an antisense gene sequence. Such a sequence is one in which part or all of the normal gene sequences are placed under a promoter in inverted orientation so that the ‘wrong’ or complementary strand is transcribed into a noncoding antisense RNA that hybridizes with the target mRNA and interferes with its expression. An antisense vector is constructed by standard procedures and introduced into cells by transformation, transfection, electroporation, microinjection, infection, etc. The type of transformation and choice of vector will determine whether expression is transient or stable. The promoter used for the antisense gene may influence the level, timing, tissue, specificity, or inducibility of the antisense inhibition.

[0089] As used herein “gene suppression” means any of the well-known methods for suppressing expression of protein from a gene including sense suppression, anti-sense suppression and RNAi suppression. In suppressing genes to provide plants with a desirable phenotype, anti-sense and RNAi gene suppression methods are preferred. More particularly, for a description of anti-sense regulation of gene expression in plant cells see U.S. Pat. No. 5,107,065 and for a description of RNAi gene suppression in plants by transcription of a dsRNA see U.S. Pat. No. 6,506,559, U.S. Patent Application Publication No. 2002/0168707 A1, and U.S. patent application Ser. No. 09/423,143 (see WO 98/53083), Ser. No. 09/127,735 (see WO 99/53050) and Ser. No. 09/084,942 (see WO 99/61631), all of which are incorporated herein by reference. Suppression of an gene by RNAi can be achieved using a recombinant DNA construct having a promoter operably linked to a DNA element comprising a sense and anti-sense element of a segment of genomic DNA of the gene, e.g., a segment of at least about 23 nucleotides, more preferably about 50 to 200 nucleotides where the sense and anti-sense DNA components can be directly linked or joined by an intron or artificial DNA segment that can form a loop when the transcribed RNA hybridizes to form a hairpin structure. For example, genomic DNA from a polymorphic locus of SEQ ID NO: 1 through SEQ ID NO: 142,842 can be used in a recombinant construct for suppression of a cognate gene by RNAi suppression.

[0090] Insertion mutations created by transposable elements may also prevent gene function. For example, in many dicot plants, transformation with the T-DNA of Agrobacterium may be readily achieved and large numbers of transformation can be rapidly obtained. Also, some species have lines with active transposable elements that can efficiently be used for the generation of large numbers of insertion mutations, while some other species lack such options. Mutant plants produced by Agrobacterium or transposon mutagenesis and having altered expression of a polypeptide of interest can be identified using the polynucleotides of the present invention. For example, a large population of mutated plants may be screened with polynucleotides encoding the polypeptide of interest to detect mutated plants having an insertion in the gene encoding the polypeptide of interest.

[0091] Polynucleotides of the present invention may be used in site-directed mutagenesis. Site-directed mutagenesis may be utilized to modify nucleic acid sequences, particularly as it is a technique that allows one or more of the amino acids encoded by a nucleic acid molecule to be altered (e.g., a threonine to be replaced by a methionine). Three basic methods for site-directed mutagenesis are often employed. These are cassette mutagenesis, primer extension, and methods based upon PCR.

[0092] In addition to the above discussed procedures, practitioners are familiar with the standard resource materials which describe specific conditions and procedures for the construction, manipulation and isolation of macromolecules (e.g., DNA molecules, plasmids, etc.), generation of recombinant organisms and the screening and isolating of clones.

[0093] Arrays—The polynucleotide or polypeptide molecules of this invention may also be used to prepare arrays of target molecules arranged on a surface of a substrate. The target molecules are preferably known molecules, e.g. polynucleotides (including oligonucleotides) or polypeptides, which are capable of binding to specific probes, such as complementary nucleic acids or specific antibodies. The target molecules are preferably immobilized, e.g. by covalent or non-covalent bonding, to the surface in small amounts of substantially purified and isolated molecules in a grid pattern. By immobilized is meant that the target molecules maintain their position relative to the solid support under hybridization and washing conditions. Target molecules are deposited in small footprint, isolated quantities of “spotted elements” of preferably single-stranded polynucleotide preferably arranged in rectangular grids in a density of about 30 to 100 or more, e.g. up to about 1000, spotted elements per square centimeter. In addition in preferred embodiments arrays comprise at least about 100 or more, e.g. at least about 1000 to 5000, distinct target polynucleotides per unit substrate. Where detection of transcription for a large number of genes is desired, the economics of arrays favors a high density design criteria provided that the target molecules are sufficiently separated so that the intensity of the indicia of a binding event associated with highly expressed probe molecules does not overwhelm and mask the indicia of neighboring binding events. For high-density microarrays each spotted element may contain up to about 10⁷ or more copies of the target molecule, e.g. single stranded cDNA, on glass substrates or nylon substrates.

[0094] Arrays of this invention can be prepared with molecules from a single species, preferably a plant species, or with molecules from other species, particularly other plant species. Arrays with target molecules from a single species can be used with probe molecules from the same species or a different species due to the ability of cross species homologous genes to hybridize. It is generally preferred for high stringency hybridization that the target and probe molecules are from the same species.

[0095] In preferred aspects of this invention the organism of interest is a plant and the target molecules are polynucleotides or oligonucleotides with nucleic acid sequences having at least 80 percent sequence identity to a corresponding sequence of the same length in a polynucleotide having a sequence selected from the group consisting of SEQ ID NO: 1 through SEQ ID NO: 142,842 or complements thereof. In other preferred aspects of the invention at least 10% of the target molecules on an array have at least 15, more preferably at least 20, consecutive nucleotides of sequence having at least 80%, more preferably up to 100%, identity with a corresponding sequence of the same length in a polynucleotide having a sequence selected from the group consisting of SEQ ID NO: 1 through SEQ ID NO: 142,842 or complements or fragments thereof.

[0096] Such arrays are useful in a variety of applications, including gene discovery, genomic research, molecular breeding and bioactive compound screening. One important use of arrays is in the analysis of differential gene transcription, e.g. transcription profiling where the production of mRNA in different cells, normally a cell of interest and a control, is compared and discrepancies in gene expression are identified. In such assays, the presence of discrepancies indicates a difference in gene expression levels in the cells being compared. Such information is useful for the identification of the types of genes expressed in a particular cell or tissue type in a known environment. Such applications generally involve the following steps: (a) preparation of probe, e.g. attaching a label to a plurality of expressed molecules; (b) contact of probe with the array under conditions sufficient for probe to bind with corresponding target, e.g. by hybridization or specific binding; (c) removal of unbound probe from the array; and (d) detection of bound probe.

[0097] A probe may be prepared with RNA extracted from a given cell line or tissue. The probe may be produced by reverse transcription of mRNA or total RNA and labeled with radioactive or fluorescent labeling. A probe is typically a mixture containing many different sequences in various amounts, corresponding to the numbers of copies of the original mRNA species extracted from the sample.

[0098] The initial RNA sample for probe preparation will typically be derived from a physiological source. The physiological source may be selected from a variety of organisms, with physiological sources of interest including single celled organisms such as yeast and multicellular organisms, including plants and animals, particularly plants, where the physiological sources from multicellular organisms may be derived from particular organs or tissues of the multicellular organism, or from isolated cells derived from an organ, or tissue of the organism. The physiological sources may also be multicellular organisms at different developmental stages (e.g., 10-day-old seedlings), or organisms grown under different environmental conditions (e.g., drought-stressed plants) or treated with chemicals.

[0099] In preparing the RNA probe, the physiological source may be subjected to a number of different processing steps, where such processing steps might include tissue homogenation, cell isolation and cytoplasmic extraction, nucleic acid extraction and the like, where such processing steps are known to the those of skill in the art. Methods of isolating RNA from cells, tissues, organs or whole organisms are known to those of skill in the art.

[0100] Computer Based Systems and Methods—The sequence of the molecules of this invention can be provided in a variety of media to facilitate use thereof. Such media can also provide a subset thereof in a form that allows a skilled artisan to examine the sequences. In a preferred embodiment, 20, preferably 50, more preferably 100, even more preferably 200 or more of the polynucleotide and/or the polypeptide sequences of the present invention can be recorded on computer readable media. As used herein, “computer readable media” refers to any medium that can be read and accessed directly by a computer. Such media include, but are not limited to: magnetic storage media, such as floppy discs, hard disc, storage medium, and magnetic tape: optical storage media such as CD-ROM; electrical storage media such as RAM and ROM; and hybrids of these categories such as magnetic/optical storage media. A skilled artisan can readily appreciate how any of the presently known computer readable media can be used to create a manufacture comprising a computer readable medium having recorded thereon a nucleotide sequence of the present invention.

[0101] As used herein, “recorded” refers to a process for storing information on computer readable media. A skilled artisan can readily adopt any of the presently known methods for recording information on computer readable media to generate media comprising the nucleotide sequence information of the present invention. A variety of data storage structures are available to a skilled artisan for creating a computer readable medium having recorded thereon a nucleotide sequence of the present invention. The choice of the data storage structure will generally be based on the means chosen to access the stored information. In addition, a variety of data processor programs and formats can be used to store the nucleotide sequence information of the present invention on computer readable media. The sequence information can be represented in a word processing text file, formatted in commercially-available software such as WordPerfect and Microsoft Word, or represented in the form of an ASCII file, stored in a database application, such as DB2, Sybase, Oracle, or the like. A skilled artisan can readily adapt any number of data processor structuring formats (e.g., text file or database) in order to obtain a computer readable medium having recorded thereon the nucleotide sequence information of the present invention.

[0102] By providing one or more of polynucleotide or polypeptide sequences of the present invention in a computer readable medium, a skilled artisan can routinely access the sequence information for a variety of purposes. The examples which follow demonstrate how software which implements the BLAST and BLAZE; search algorithms on a Sybase system can be used to identify open reading frames (ORFs) within the genome that contain homology to ORFs or polypeptides from other organisms. Such ORFs are polypeptide encoding fragments within the sequences of the present invention and are useful in producing commercially important polypeptides such as enzymes used in amino acid biosynthesis, metabolism, transcription, translation, RNA processing, nucleic acid and a protein degradation, protein modification, and DNA replication, restriction, modification, recombination, and repair.

[0103] The present invention further provides systems, particularly computer-based systems, which contain the sequence information described herein. Such systems are designed to identify commercially important fragments of the nucleic acid molecule of the present invention. As used herein, “a computer-based system” refers to the hardware, software, and memory used to analyze the sequence information of the present invention. A skilled artisan can readily appreciate that any one of the currently available computer-based systems are suitable for use in the present invention.

[0104] As indicated above, the computer-based systems of the present invention comprise a database having stored therein a nucleotide sequence of the present invention and the necessary hardware and software for supporting and implementing a homology search. As used herein, “database” refers to memory system that can store searchable nucleotide sequence information. As used herein “query sequence” is a nucleic acid sequence, or an amino acid sequence, or a nucleic acid sequence corresponding to an amino acid sequence, or an amino acid sequence corresponding to a nucleic acid sequence, that is used to query a collection of nucleic acid or amino acid sequences. As used herein, “homology search” refers to one or more programs which are implemented on the computer-based system to compare a query sequence, i.e., gene or peptide or a conserved region (motif), with the sequence information stored within the database. Homology searches are used to identify segments and/or regions of the sequence of the present invention that match a particular query sequence. A variety of known searching algorithms are incorporated into commercially available software for conducting homology searches of databases and computer readable media comprising sequences of molecules of the present invention.

[0105] Commonly preferred sequence length of a query sequence is from about 10 to 100 or more amino acids or from about 20 to 300 or more nucleotide residues. There are a variety of motifs known in the art. Protein motifs include, but are not limited to, enzymatic active sites and signal sequences. An amino acid query is converted to all of the nucleic acid sequences that encode that amino acid sequence by a software program, such as TBLASTN, which is then used to search the database. Nucleic acid query sequences that are motifs include, but are not limited to, promoter sequences, cis elements, hairpin structures and inducible expression elements (protein binding sequences).

[0106] Thus, the present invention further provides an input device for receiving a query sequence, a memory for storing sequences (the query sequences of the present invention and sequences identified using a homology search as described above) and an output device for outputting the identified homologous sequences. A variety of structural formats for the input and output presentations can be used to input and output information in the computer-based systems of the present invention. A preferred format for an output presentation ranks fragments of the sequence of the present invention by varying degrees of homology to the query sequence. Such presentation provides a skilled artisan with a ranking of sequences that contain various amounts of the query sequence and identifies the degree of homology contained in the identified fragment.

[0107] Having now generally described the invention, the same will be more readily understood through reference to the following examples which are provided by way of illustration, and are not intended to be limiting of the present invention, unless specified.

### EXAMPLE 1

[0108] A cDNA library is generated from Glycine max tissue. Tissue is harvested and immediately frozen in liquid nitrogen. The harvested tissue is stored at −80° C. until preparation of total RNA. The total RNA is purified using Trizol reagent from Invitrogen Corporation (Invitrogen Corporation, Carlsbad, Calif., U.S.A.), essentially as recommended by the manufacturer. Poly A+ RNA (mRNA) is purified using magnetic oligo dT beads essentially as recommended by the manufacturer (Dynabeads, Dynal Biotech, Oslow, Norway).

[0109] Construction of plant cDNA libraries is well known in the art and a number of cloning strategies exist. A number of cDNA library construction kits are commercially available. cDNA libraries are prepared using the Superscript™ Plasmid System for cDNA synthesis and Plasmid Cloning (Invitrogen Corporation, Carlsbad, Calif., U.S.A.), as described in the SuperscriptII cDNA library synthesis protocol. The cDNA libraries are quality controlled for a good insert:vector ratio.

[0110] The cDNA libraries are plated on LB agar containing the appropriate antibiotics for selection and incubated at 37° for a sufficient time to allow the growth of individual colonies. Single colonies are individually placed in each well of a 96-well microtiter plates containing LB liquid including the selective antibiotics. The plates are incubated overnight at approximately 37° C. with gentle shaking to promote growth of the cultures. The plasmid DNA is isolated from each clone using Qiaprep plasmid isolation kits, using the conditions recommended by the manufacturer (Qiagen Inc., Valencia, Calif. U.S.A.).

[0111] The template plasmid DNA clones are used for subsequent sequencing. Sequences of polynucleotides may be obtained by a number of sequencing techniques known in the art, including fluorescence-based sequencing methodologies. These methods have the detection, automation, and instrumentation capability necessary for the analysis of large volumes of sequence data. With these types of automated systems, fluorescent dye-labeled sequence reaction products are detected and data entered directly into the computer, producing a chromatogram that is subsequently viewed, stored, and analyzed using the corresponding software programs. These methods are known to those of skill in the art and have been described and reviewed.

### EXAMPLE 2

[0112] The open reading frame in each polynucleotide sequence is identified by a combination of predictive and homology based methods. The longest open reading frame (ORF) is determined, and the top BLAST match is identified by BLASTX against NCB1. The top BLAST hit is then compared to the predicted ORF, with the BLAST hit given precedence in the case of discrepancies.

[0113] Functions of polypeptides encoded by the polynucleotide sequences of the present invention are determined using a hierarchical classification tool, termed FunCAT, for Functional Categories Annotation Tool. Most categories collected in FunCAT are classified by function, although other criteria are used, for example, cellular localization or temporal process. The assignment of a functional category to a query sequence is based on BLASTX sequence search results, which compare two protein sequences. FunCAT assigns categories by iteratively scanning through all blast hits, starting with the most significant match, and reporting the first category assignment for each FunCAT source classification scheme. In the present invention, function of a query polypeptide is inferred from the function of a protein homolog where either (1) hit_p<1e-30 or % identity>35% AND query_coverage>50% AND hit_coverage>50%, or (2) hit_p<1c-8 AND query_coverage>70% AND hit_coverage>70%.

[0114] Functional assignments from five public classification schemes, GO BP, GO_CC, GO_MF, KEGG, and EC, and one internal Monsanto classification scheme, POI, are provided in Table 1. The column under the heading “CAT_TYPE” indicates the source of the classification. GO_BP=Gene Ontology Consortium—biological process; GO_CC=Gene Ontology Consortium—cellular component; GO_MF=Gene Ontology Consortium—molecular function; KEGG=KEGG functional hierarchy; EC=Enzyme Classification from ENZYME data bank release 25.0; POI=Pathways of Interest. The column under the heading “CAT_DESC” provides the name of the subcategory into which the query sequence was classified. The column under the heading “PRODUCT_HIT_DFSC” provides a description of the BLAST hit to the query sequences that led to the specific classification. The column under the heading “HIT_E” provides the e-value for the BLAST hit. It is noted that the e-value in the HIT_E column may differ from the e-value based on the top BLAST hit provided in the E_VALUE column since these calculations were done on different days, and database size is an element in E-value calculations. E-values obtained by BLASTing against public databases, such as GenBank, will generally increase over time for any given query/entry match.

[0115] Sequences useful for producing transgenic plants having improved biological properties are identified from their FunCAT annotations and are also provided in Table 1. A biological property of particular interest is plant yield. Plant yield may be improved by alteration of a variety of plant pathways, including those involving nitrogen, carbohydrate, or phosphorus utilization and/or uptake. Plant yield may also be improved by alteration of a plant's photosynthetic capacity or by improving a plant's ability to tolerate a variety of environmental stresses, including cold, heat, drought and osmotic stresses. Other biological properties of interest that may be improved using sequences of the present invention include pathogen or pest tolerance, herbicide tolerance, disease resistance, growth rate (for example by modification of cell cycle, by expression of transcription factors, or expression of growth regulators), seed oil and/or protein yield and quality, rate and control of recombination, and lignin content.

[0116] Polynucleotide sequences are provided herein as SEQ ID NO: 1 through SEQ ID NO: 142,842, and the translated polypeptide sequences for these polynucleotide sequences are provided as SEQ ID NO: 142,843 through SFQ ID NO: 285,684. Descriptions of each of these polynucleotide and polypeptide sequences are provided in Table 1.

TABLE 1
Column Descriptions

SEQ_NUM provides the SEQ ID NO for the listed polynucleotide

sequences.

CONTIG_ID provides an arbitrary sequence name taken from the name of

the clone from which the cDNA sequence was obtained.

PROTEIN_NUM provides the SEQ ID NO for the translated polypeptide

sequence

NCBI_GI provides the GenBank ID number for the top BLAST hit for the

sequence. The top BLAST hit is indicated by the National Center for
Biotechnology Information GenBank Identifier number.

NCBI_GI_DESCRIPTION refers to the description of the GenBank top

BLAST hit for the sequence.

E_VALUE provides the expectation value for the top BLAST match.
MATCH_LENGTH provides the length of the sequence which is aligned

in the top BLAST match

TOP_HIT_PCT_IDENT refers to the percentage of identically matched

nucleotides (or residues) that exist along the length of that portion of
the sequences which is aligned in the top BLAST match.

CAT_TYPE indicates the classification scheme used to classify the

sequence. GO_BP = Gene Ontology Consortium − biological
process; GO_CC = Gene Ontology Consortium − cellular
component; GO_MF = Gene Ontology Consortium − molecular
function; KEGG = KEGG functional hierarchy (KEGG = Kyoto
Encyclopedia of Genes and Genomes); EC = Enzyme Classification
from ENZYME data bank release 25.0; POI = Pathways of Interest.

CAT_DESC provides the classification scheme subcategory to which the

query sequence was assigned.

PRODUCT_CAT_DESC provides the FunCAT annotation category to

which the query sequence was assigned.

PRODUCT_HIT_DESC provides the description of the BLAST hit

which resulted in assignment of the sequence to the function category
provided in the cat_desc column.

HIT_E provides the E value for the BLAST hit in the hit_desc column.
PCT_IDENT refers to the percentage of identically matched nucleotides

(or residues) that exist along the length of that portion of the
sequences which is aligned in the BLAST match provided in
hit_desc.

QRY_RANGE lists the range of the query sequence aligned with the hit.
HIT_RANGE lists the range of the hit sequence aligned with the query.
QRY_CVRG provides the percent of query sequence length that matches

to the hit (NCBI) sequence in the BLAST match (% qry cvrg =
(match length / query total length) × 100).

HIT_CVRG provides the percent of hit sequence length that matches to
the query sequence in the match generated using BLAST (% hit
cvrg = (match length / hit total length) × 100).

[0117] All publications and patent applications cited herein are incorporated by reference in their entirely to the same extent as if each individual publication or patent application was specifically and individually indicated to be incorporated by reference.

[0118] Although the foregoing invention has been described in some detail by way of illustration and example for purposes of clarity of understanding, it will be obvious that certain changes and modifications may be practiced within the scope of the appended claims.

The application's sequence listing, which the Patent Office published only in electronic form, follows.

SEQUENCE LISTING (285684 sequences)

SEQ ID NO: 1 - DNA, 407 bp, Glycine max
  Clone ID: PAT_MRT3847_100000C.1
tttcttttttagacgccacgaacgccgtaaagaaggctgtcagaccttcaaaacaactcacagatctccagactactattatgggcacattcaacccaacatatgcctacccacgcttcgatcatttgggttgacacaaagctctgagcgctatagagctaaaggaacaactctaggcctccacttaacccataggcatatgcgctggcaccagcggttcacccatcaaaaaatctggatgacctgcttttgactccgccgcgggcgaccattgatggctcaacaacgatgagcaagtatgcatgctcgcatggacgcctgcccaaccatgagtgatggataatatgaaaactgagctgggctttgcccaggcaacatggaaataagctagggcaagacacggactt

SEQ ID NO: 2 - DNA, 270 bp, Glycine max
  unsure (1)..(270): unsure at all n locations
  Clone ID: PAT_MRT3847_100001C.1
cctttcagccaaggctatccctngctngcgctgtctcncgtcactctcgggcgacgtnatacgagcttcagcttggtgtangacgaggctcaggatcggaancctnattcaagagatntctcgtcggttcgaagataanagatggggagcccgataagcgtgccggattcggaggttacatcggacnanaangatatgcatcngaattncggaatnggatcgcttngnngaangccttattgcgnaataaaancgctnnctggcggnnnt

SEQ ID NO: 3 - DNA, 740 bp, Glycine max
  Clone ID: PAT_MRT3847_100002C.1
ctcaagaatatcaattgtgtcatttgtgttttttgctttccattaccagtatattgcagataatcgagtggagaacatcccatggaatggagtagacgagtgggcactaaaggttccctggggcatgcagaggattgttttaatgcatgttgtcctttaattctcagtatgttgattatttttaagtatatgtatattgattcggagtcattggacaaaaacaaaataattttcagttttcagtggacaatacgatgtattataaatgtgctattttagaaactacgaagtatattaactgaactgtaatcaatcatttcagataagcctgcatagtaatagctcttctgtttttatatgttgtttcttaaaatttttatgggccatgctaacagaatttttttttattgaaagagtggcatttcattggaaatcgtggtgggaatatattgataactcacctctttgtcctaagagctccattttcgatttcttaacccgtggcctaggatcccttgttggcattatcagtgctcaatgttataaacttccctattggttaataccacttggttgtttgttcccagggtggaagggacagacctcttaatgggaccccttggggtcgggggagagaaattatttggcttttttatgggctgggtaaggatgttttacgggggaggcctttgccgaccggggggggccgccggtgtcctatgccgttttttgttgggggg

SEQ ID NO: 4 - DNA, 427 bp, Glycine max
  Clone ID: PAT_MRT3847_100003C.1
aaaaaccaccaatttatatattccttactaattaatggggggcatctgttaattagtaaaaaagaccatgaaaacttgccccacataccttttggatattaaaaaaaaaggggctaataataacaatgaccaccctcatttgcccaacatttggcaaacaaccaagcaataatttaaattttttagtaaaaaaataaaccaaaggattagtccaactaaccggaaccaagaaaatgaactaacccccttatcattgtagatgaccaaggaaaaattgggagaggatgggggatacctcactcgggggaaattcttcccacataatctttggaccttcttcaatcccgctttacctggtggtatacccgacaatgtaaccgggagcctatatgatacgggtgtttgaaccccaaaatcaattttattt

SEQ ID NO: 5 - DNA, 481 bp, Glycine max
  Clone ID: PAT_MRT3847_100004C.1
aaacgggaccgggccccataaaggctacttttggaccaaccttcaaggcgggagggaaaaaaacaaaaattttttcccagactttggtttattttggcaagggttattaagggggcccaaaaaaagattcaccccggcgcggaaaaaaaaaacaggtcttcttaagggggcaaggctggaaaaaaaaaaacccggaaaaaccccagtttaggaaaggctaaaaaataaaccccaacccccgcccggggaaccaaaaccctcggggggttttcagtcgggccagaaaaaggatagggaaccctttgaggaccttcgaaatcggacaaactatgtaattaataagaggaccctttacggaaacaattcctaacagaagggtcccccttgaaatggctcccctccgggcggcgccatagcccattaaatcttcggggcctcttttttttaaaaagaattcccccaagaaagccctcagctgggg

SEQ ID NO: 6 - DNA, 335 bp, Glycine max
  Clone ID: PAT_MRT3847_100005C.1
tggaaagggatacaagccgtccacgtggctttgggtttagcacatttgcagaccgtatgggaatggttgatgcaatcaacgaaatgcattgcccggaaattggtgatcatttcatctcagtcaacaaagcacagcccacaatcgggggtgatgatacagaccaatgttacagatgtggctactcatcacgtggtacgggaagctatagtgctggatatagggtatgacatgatgactgcttcatatgtgggcgtctagtgcattgtgcccaatattgtcctttggcaagatgtggtcgttgtcacagtggtagttcatatccttcacgtcctaag

SEQ ID NO: 7 - DNA, 435 bp, Glycine max
  Clone ID: PAT_MRT3847_100006C.1
atttggccctcgaggccaagaattcatctaatttacaactgataagccagattaaatccttggacattctcaattgccagtgactactttctcttctttaacacaatcatcttcatcaataaatctcttccatagccaatgctgcttccacactctctccgccatctcttcaatggggacattatttgtctctgggaaaaggaaaagcacaaaggtggacatgatcaagatccatccatagaagaaaaagaagatgccaaacctgaagagacacaacattgagaaaacggcttgcccaatgacaaatgtgaagaggaagttgacacacactgataaaccctgtcctaccgagcgagtctcgagtgggaatatctcacttgggatgaaccaaccaagaggccccatgaccatgcaaatgcaaaccatcacaaccac

SEQ ID NO: 8 - DNA, 419 bp, Glycine max
  Clone ID: PAT_MRT3847_100007C.1
cctttttttttttttttttttttttttttttttttttttttttttttttttttttttttttttttttttttttttttttttttttttttaaaaaagggaaaaaccggtttcggatttcggaaggttttttaaacaacccccccccgggggggaaaccccccgcttcccaacaaaatttaaatcggggccccccacaagggggggaatagtcaaaaaacccaaaactggccccccggaaacgttctcaggcgagggcaatccccccataaatttaagcccccaacaacatagtcccccccaaggactccaaacaaaacccttcccccccaacagggggaaaacccctcccgcccgaatatcggaatcattttttggccccccccccaccaaatccttaatcaagaacgccccccaatgcc

SEQ ID NO: 9 - DNA, 424 bp, Glycine max
  Clone ID: PAT_MRT3847_100008C.1
gttattggaaaattttagaaaaactaggcatgcatgcggactatttgatgtcacaattttcaaaggcttcggatgcccaaagcaacaatcacgggtgtcaatttgctctgaacttaatctaggaaaaaattttgacatcgtcatcttacagatattaaaagctacatgaacacaaatgccaaatggtcctaaaattaacctaggtctggcccgggacatcatcatccttgcaaatcttaagctggtgaacctacttttggtcctatttagcaccatggacacggacttcaggaggaaaaaggggataacttgttgcatacccatattacttctgggaaggactaataaaccaatttgtttttacaccagcagggctttgggagagggcctggacacatattctattgacgtattactcgcatga

SEQ ID NO: 10 - DNA, 960 bp, Glycine max
  Clone ID: PAT_MRT3847_100009C.1
gtacctttatcaaacgcaccctatatactttactagtattattacaaacagaatgcttcacaagtatgcttgttggcagtaatagcataaaataatgtaccctaataatatgcaaaactataaccttattccatatccatatatagaaccgtaatataaagaaaagaaaggaaaaaaatacaagtaaaataaagaaaagggagagacaataattcaaacagggaagaatataaactaaccatgaaaacttattctaagtttctaacaactttaactacctcagcttttagctaattcaagatcatcctgaagtaatggagcaagcatatactccacggctgatctctgtttggtaatttcattcagaatcactaaatgagcttcctcacaagctcttgcattcgggaaaccaagggtccatctcccatctgccaaatgatcaggcatgctcaggtggtttcctctggctttggttgaataaaactgtgggtcaaactctctaatttgaagatgcaaccatgaagggtggtcctcatctattttaggaaataaccctgccaatggagcaatggcaatcacaactccatgtcgactgcggaatgggtgcttctccgccagaagcaattttccaattattccacttgccactggtattacatatatatccctaatttcagaatttgaaaacgcaattccacatggtattccagactccaatgaaacatttgacccaaagctagcagatgaaacatctgatgcacggattactctagaatcattggtagaactggaaatcatgttcaataatggcttgtcaaccaacacacctttcaaaataaatgtcttcaactggaagtggagaataaaagccttaattgaccaaccctcctttgcccatgcttgaggtgtagttgtgtgtccatgggaaataattaacagcagcaactaaaatcatggaac

SEQ ID NO: 11 - DNA, 650 bp, Glycine max
  Clone ID: PAT_MRT3847_10000C.1
atcagcaaaaatagatatgtattcatatgaagtaccagaggtacatacaatacataaggaattagaccatatagatggttccagaatcagactaaaacacagtcttgataggaaccaaccaatggctgagaaaacataggctgaaagattgatttgttatgtgaactcctcaactaaacaaaaccattcctaaggttacttgaccactgattaaaatgtattgtaaaattcctctctaaaccttctaagccaggtccagagaagaaaaactgcgtcttcaaacactttgttgccattgaacactgcattggaccatgtcagggccaaccaccaacattgccacctatttacccttatgaccttgtccagacctgaaccatgttggaggaagtgctgtcttggagtttgtggggtagcaccttgaatattcagccaggacatggattcccaccagagaggttggattttactgcagtgaatgaataaatgggcttcatcctcctcggaacatctgcagaaagggcaagacatatcgatgatctgcagctgtcttctgtgtaaatttgttcttgttggcagcctgtttctaagtaatcgccaagcaaagactgagattttgcttggaacttttatctttcatagcatctcaa

SEQ ID NO: 12 - DNA, 492 bp, Glycine max
  Clone ID: PAT_MRT3847_100010C.1
accacgcgttctttttttgcttgtgagcgtttccacacaatcccactcgtgtaagacaatatacactgggcttagtctgttatatgataaaaacaatcaggccggccgtgaaaatctggacttcttgtgaaatcagaatgctgcacaggatgcctggctttaatgaacagacccacgtgtccgtttggactaatttcaaagatgcgtttaccgtattggacaatggaacatgttaacagtgacgacagcttataaagtgaacgcagttctcaaatcaatcaaaagtggactctatggggatggtatcaaatggaacttctccaagtgtcttgttgataaagagggatccgtgggtgatcgttatgcactccactacttcttctctgagcatttagaaggactcgctgaagctgtgggatgcctgattgatcctatgaatgactggagcggtcaatggatcaattgccattagaatatggattatgaataaga

SEQ ID NO: 13 - DNA, 200 bp, Glycine max
  Clone ID: PAT_MRT3847_100011C.1
gtttatgactatgtcaggcctgactttagtggttctaaacggtagagctttcgagctggtcataataggaccattactgtgggccttgacaaaactagggccagtctacaagataaaaagcacacctattgtgattgtctcaagagaaactgtaaggagatgtcttatgattagtgggtggctcctgaggacacggccag

SEQ ID NO: 14 - DNA, 669 bp, Glycine max
  Clone ID: PAT_MRT3847_100012C.1
gcggaagttgctgagggacccacgcagaagatatagaagttagggtttcttgtgatgaatgttcagagcaagctgttcccccactgggtggtgtattattgaatgtgtgaatgaactagtaacatgatggcaaaagaatcatcatcaacatcaacatcaacatcaacatcaacccctctcctctccagcactaacccttcttccaccactttcacttcccgcattctcctcttggtcgcctccatgttcctcctcgcagccttcgttctcgccctctacttctcctccccaacgtcgtcgtcgccgtcgctgcctccgccacgcgccaagctcccccacccggtggtgatcctcatttcctccgacggcttccgattcgggtaccagttcaagacccccgctcccaacatccagcgtctgataaaaaacggcaccgaggccgagaccggactcatccctgtctttcccaccctcaccttccccaaccactactccatcgtcaccgggctctaccctccccaccacggcatcgtcaacaacgtcttcttcgaccccctcaccggcgagaagttcaccatgcaatcccaccaacccaagtggtggctcgcccagcccctctgggagaccgtgctcctccacaacctctgcgcccgcccctacttctggccc

SEQ ID NO: 15 - DNA, 1235 bp, Glycine max
  Clone ID: PAT_MRT3847_100013C.1
ggccccttctcggttcggacgcgtgggctgagaaaccctccactctcgagtccaaactctcctcctacccaaaatggatgcaagggcatcatcttcttcagcttcctcgattcttttccttgcagcaattgtagctgcttatttctattcatcagaagcagctgtgtccaaaggatcttttgaggacaatttcagcataatgtggtctgaggaccattttactacctctaaagatggacagatctggtatctctcactagacaaagacacaggatgtggatttcaaacaaaacaacgctacagatttgggtggttcagtatgaagctgaagttggtagcaggtgactctgctggtgttgtgacagcttattatatgtgctcagaaaatcgtgcagtgctgtaaagagatgaacttgatattgagtttttggggaattgaacaaacaaaccttagaagattaattttattcttaataatgtgtacaagaatgggactggagggcgtgagatgtgccatatgctttggtttgaccccacagaggactaccacacttattccattctctggaactaccacctgatagtggattttgtggatagagtatcagtgtgggtgttcaagaacaatggggaaccaaacaacttcttcccgaatgagaagcccatgtacttgttctccagcatatggaatgcagatgagtgggccacaagaggtgggcttgagaagacaaactggaaattagccccatttgtgtcatcctacaaggacttcagtgtggatggttgccagtgggaagacccataccctgcctgtgtctcaaccacaaccaaaaattggtgggatcagtatgatgcttggcacctttctgatgatcagaaaaaggattatgcttgggttcagaggaaccttgttatctatgactactgccaggattctgcacgttatccaactaccccagaggagtgttcattgagtccatgggattaatatgtctaggggaaaaaaaaaatccttattcttttaaatctctcttttttgccttataattttttagttaccatgagaatgagaataatgtgcagttttgtatgtcgtaagttttttaaagtttggcaattaattatatattgaaacatttatttaattcgttacccaaaaaaaaaaaaaaaaaaaaaaaaaaaagggcgagtgaggactagtgagcgggaattatctgcgaatcggtacggcaggg

SEQ ID NO: 16 - DNA, 537 bp, Glycine max
  Clone ID: PAT_MRT3847_100014C.1
tcgttttctctgtctatctctcgttgtagcgtagcgcagcagttgaatttggaaaacaagatgtctcaccgcatgttcgagcacccgagacacggttcccttggctttctcccaaggaagcgagcttctcgtcatcgcggaaagggtgatcctctttttttttgttttgttttgttcgtttctgttgtttactttcagatttaaatgatgttgttaagggttttcttttcagatctaaaaacatttaaactgatttgttcgttcgaaagttttttttttattcgtgttatcgtcacttccttgtgttgagtgaatgaaattgcttgcgtaaaaaaagtgactaatcaaggctggaatctcagaaacggctcgtcttgccaaaatcctataaaggtttttggaatggaaaacatatgagctcgagaattggcatacattttgccataggcctttggcttggaagcatttcttcatcactagccggatttggcactgacacgtggaaattttaacagttttttctatttattcactgaa

SEQ ID NO: 17 - DNA, 1104 bp, Glycine max
  Clone ID: PAT_MRT3847_100015C.1
ccattccagctggctttcaattcattttctccattaccccaaaatttgggctctttcttatcctttctaatctaatcccaccatcatctcataaccaataaacaacaaaaagaacatcagcagcagccatggccctgaagtttgcacctttctgacacacccaggttctcccaatttgggttgggcaccatggaaactggaataatccagggaccttggggatttcgctctctatccaaattcgttttatgcaccatttctggggcccttaccgtgtgttttgcccttgctggggccctgacaggagctatagctggtgctctagcagctaaggccactaagagtggtcttctccggggagtttcattgggtgccattgccggctctatactctctgtggaggtgttggaagcttcccgtgcctattggtgtatggagcaaactggctcacggagtgcatcatctatggcagatttcatagaggaacttgttcgtgggaggcttgttgaggaatcccttacacctgctattttaactgcttacaatttgcagtttgagcaggttggcattgcgaatacaggctatgttgagactcatgatgttcatggcttagttgcacccagagaaacctgctgtgcctttgagatcatatgatggggtaacccctccaatgatctcaaaggcagagaatacctgctgtgcaatatgtttgcaggatattgaagtaggggaaattgcaagaagcttacctcgctgtcaccatacatttcacttgatatgtgtggacaaatggcttgtcaagaatgattcttgtcctgtctgcagacagaatgtataacttgttccttgggcaatttgagattatctttatgggcggatgtatatgttttattatttgtttctttacatacaaactgagattaccattaagttttgtatagttgacattggcattttgtactattctgcgatgtaattgttaaataatactatttggtatgaaagccaatgcccaataacaaatgttttgggagaaaaaaaaatgagaaaatggtaaactttgaaaagtatatcaatgaatgatttttctttctttattgaccc

SEQ ID NO: 18 - DNA, 288 bp, Glycine max
  Clone ID: PAT_MRT3847_100016C.1
tccactaggagcctgtcggtttcctttcaaggagaggccttttcgctgcccgttagcaagaccaaggccgccagcgccaccccgacgccgaggaaggccgccacgccggagagacggagggccactccggtgaaaggggagaattcccggccggcggatcagcaccggtggccggcgaggacccggcatgtggatcatctctccaagagtgtggatataattgataataagaagaaggttgttggaaatgggaaatgggaatgggtttgggattgtggtcttttcttt

SEQ ID NO: 19 - DNA, 308 bp, Glycine max
  Clone ID: PAT_MRT3847_100017C.1
aatattatattcaaaggaaaaaaaaagatactaaaagatactaattataagaaaaagaaagggaaaccataaaggccttaaatgacgaatcaatggtttactacccgcgcctggggaaaaagagttccatctgggcgggaaccgctaccttcaaaagggctcctgcttccccaaagaatggcttgggaaaacacatgatttccccgaattgagggccattcgggaaaaagcaagcgcgtaactcagcaggaaatcaccttacccgtccaatgtctaatgaaccaagataaccattcgttccagggtaa

SEQ ID NO: 20 - DNA, 537 bp, Glycine max
  Clone ID: PAT_MRT3847_100018C.1
agatttcattcaacaaaaccatttttttctctctcactcactcacttcacacaatgaagcacccaaggggctgaccctgtcgtccgcaacgcttgccgcgacaccgtgggtgccctcgctgcacagtatttgaagggctgactctgccgtccgcaacgcttgccgcgacatcgtgggtgccctcgccgcaatttttgaagggaaacgatagagggggtggcgggggaggtgtagggacggtggtggggctgttcgtgaagccactgattgaggcaatgggggagcagaataagggggtgcaggcgggggcggcggtgtgcatggccaagatggtggagtgtggcggtggcggtggaggaggggaggcggtgtcggtggcaacgtttcagaagctatgtccgaggatctgcaagctgctcaacagtagcgtatccgagccatattggagttgtattgaagtcgtgtctagccttaggaagccgtatctaagtcgtgttccagccgtatcttgtattttaagaaataaaaaataacaaa

SEQ ID NO: 21 - DNA, 188 bp, Glycine max
  Clone ID: PAT_MRT3847_100019C.1
gcggaggctgatggaggcggacatttggctgtatctgcggatcacggtgaatctgaggcggcggaagatgtggaggaggagagaaaagcaaccagggaaccagtgaaaggaccctggtcaaaccaaatgcaccctatgacgggcatcatccaaacactagctgcaaacatactgaccttgcctgccta

SEQ ID NO: 22 - DNA, 505 bp, Glycine max
  unsure (1)..(505): unsure at all n locations
  Clone ID: PAT_MRT3847_10001C.1
ggtccgtgaattcctcgggtcgactccacgtcgtctcgtaccggcttgcgtgaccgactagaagggggggattttcaatttgacctgannattgcattaacccatttcccctgcgttgttcgtgttttcttnnctggtcattgggttgatnnatgtgcatttgcnccattgcncnnacccattgaaatnngtgaatcnnattcaatnncccaggccatttagcccattagcacctttagtgagtnngccactttagtttgcttaattnncctcccnttttccannatacttaatnnctcatgccaagcataatnncaaatcaaatcaaaaagtgaaaagggttctgattcttcgtgccctgttgttgcccattataacacactttttcctgcacaaggaaagcatttcgcgtttacccttttcctcatnaatacgtaaaaggcttctattnagaaattgatttttttttttaaaatcttctaaattcaacaatcttattaaatca

SEQ ID NO: 23 - DNA, 369 bp, Glycine max
  Clone ID: PAT_MRT3847_100020C.1
taattctaaagaattttcattttaaagttctctaattattactagccatgccgatccgtaggattgcaattggaaggcccgaagaggctactcatccagatgctttgaaggctggattggctgagtttatctccaccttgatttttgtttttgctggccaaggttccggcatagcctttaataagctcaccaatgacggcgctgccactccagctggtctcatctccgcctccatcgcccatgcctttgctcttttcgttgccgtctccgttggcgctaacatctccggtggccatgttaaccccgctgttacctttggtgccttcgttggcgggaacatcacccttctacggggtatcatctactgga

SEQ ID NO: 24 - DNA, 2581 bp, Glycine max
  unsure (1)..(2581): unsure at all n locations
  Clone ID: PAT_MRT3847_100021C.1
ttcttgctcagaaacacattctaatggcatagcgcgtaggtggccaacgtggcagctaccgtggcggtttctgacactgaattcagctgtcagaagactcgacaggtgacagggatctaggtcgtctccgaggcccccttcgtgagtgtagaagataagtgtgtcccagagaccaaactgggccgcctggtgaaggagggtagaatccgcagccttgaacagatctacctgcactcgctcccgatcaaggagcacctgatcatcccgattcccggggcgacccacgcgtccggtgcttctcattctcttctaacacgcgtccgctaaaggctgcactctcttttctccctcagaaacaaaccctaatggcagagcgcggaggtggcgaacgtggcggcgaccgtggcggtttcggacgcggcttcggcgggcgagggcgcggaggtgacaggggccgaggccggcgccgaggtccccgccgcgaggaagaggagaagtgggtcccagtgaccaaactgggccgcctggtgaaggagggaagaatccgaagccttgaacagatctacctccactcgctcccgatcaaggagcaccagatcatcgacacgctcgtgggtcccaccctcaaggacgaggtgatgaagatcacgccggtccagaagcagacccgggccgggcagaggacccggttcaaggccttcgtcgtcgtcggagacaacaacggccacgtcgggctgggcgtgaagtgcagcaaggaagtggcgacagctattcgtggcgcgattattctggcgaagctgtctgttatccccgtgaggagggggtactgggggaacaagatcgggaagccccacaccgtcccgtgcaaggttacggggaagtgcggctccgttaccgttaggatggttcccgcgccgagaggttcggggatcgtggcggctagggttcccaagaaggtgctgcagttcgcggggattgatgatgttttcacctcctccagaggatccaccaagaccctcggcaacttcgttaaggctacttttgattgcttgatgaaaacctatggattcctgacaccagaattctggaaggagactcgcttctccaaatctccattccaagagtacacagatctactggcaaaaccaacaggaaagactctaatcttggaggaggaaagggtggatgcttgatttgctagttttgctttatggatgttttaggaactttattactttacatactttgttggttctgtgctttacttttggttttgatagacggtatgtctctgtatgcattttgattgtttccaagttttaattgactgcagttgagtaccatagatttctacctgtttaatttggttgttgcatccaaataacagaactgcattgccccgtctagcttctcagtggaaatataaaagtgatttaaaaaaaaaaaaaaaaaaattttattataaaataataaaaaaaaaaaaaattcccctttcaagaactcaataattatcttcccagaaatatgtcaaagtactatgcatatctagccagttgcatggccattaatactcttagcccaggcatcttcagccttggttagaggatatttggagtccacaactgttttaagctttccttccttgactaaatgaataagatgttgaaggtcctcacctttaggaaataaaagcaaaggcacaagttgctttttggagaaggtaagttttttcagagcaaatgtcagcattgaagcagagcttggagttatgtctacaacctttccagtcacggtcaagttaggctcaaaggtggaccatggaaagcccattgcacagtgaatcacagcatcatatttcttaccagatggactcttcaaagcagcgccatctggggtcttatagtcaattacctcatcagcccctaaacttttcaccaattcaatattgcgagctccacatgttgctgtcacatgagtgtttcctagctttgccagttggacagcatagtgaccaacaccacctgatgcggcagtgaccaaaatgcttttcctttcaccactcccatcaagttttatccctatggatttggtgagagcttgaagagctgtcagacctgctacaggtagggcagcacattcagatgctgaggtttctgatggtcttgatgcagtgacactctccttagcaaccgcaaactcagccagtcctccgccattaaatgggttaacaatggctaccactttgtcaccaggtttgaacttttggacaccttgaccaacctctgtgacctctccagttatatcagtgccaggtatatgtgggaacttgcgaggcaaaagtggccacaacatgcgtttctgtactttccaatcaaatggatttatactagctgcttcaaccttaatcaaaacctcatctttgctgggagtaggtatgggaacttcaacatgctttaagccagcaggtcctccaccgtagctatcatactgaaccgcatgcatgagtttcttccccatatccgcagttgagaatgtgagaaactatcagacgcgtgggtcgacccggaatncggaccgaaaa

SEQ ID NO: 25 - DNA, 967 bp, Glycine max
  Clone ID: PAT_MRT3847_100022C.1
ttgcatggataaaaaaattccccgaccctctttctctctctctctactccaactccttgatgccaattttagcatcagcgttgttgcctccattcttcttcttctcttaatgggttgcatttactcgcgagtctgcataggcgacaattgcagaggctcaagcatcaacggagaccccattatcgcccgaaacgacgtcgccgaagtcgcgaatttctccccttcctcttcggatgttgaagaaggcgaaatcagagaccaattgaaccaattgagcatcactcgagactctgaagctggaatccgaagactcgctagggtttccgcgcagtttcttccaccggacggttcccgaatcgtgaatgttccttccggaaacttcgaattgcggtactcgttcttgtcgcaacgaggttactaccccgatgcactcgataaagctaaccaagacagtttctgcatccacacaccttttggtacgagccctaacgaccacttcttcggcgtcttcgacggccatggcgagttcggagctcagtgttctcagttcgtgaagcggaaactgtgcgagaatttgctcaggaactccaaattccgtgctgatcctgttgaggcttgtcacgcggcgtttttagcgacgaattcgcagctgcacaacgatgttttggacgacagcatgagcgggacgacggcgattacggtgctggtgagagggaggacgatatacgtggcgaattccggcgattcgagggcggtgatcgcggagaggagagggaaggaagttgtggccgttgatttgtcgattgatcagacgccttttaggagtgatgagctggagagggtgaagatgtgtggggcgagggttcttactatggatcagattgaggggttgaagaaccctgatgtgcagtgttggggcactgaggaaggtgatgatggtgaccctccgaggttgtgggtgccgaat

SEQ ID NO: 26 - DNA, 370 bp, Glycine max
  Clone ID: PAT_MRT3847_100023C.1
gctacaccaccaccaaaccttaaaatcattggggcgctataataaaatatctgggggtatcacaaaacatctcaaaacaaccaaaatcatcattcatattcacacacagcctatctactacaccaaatccctattccttgagggctatccttatcatcccaatcttcaacttccacatcttcaaaattataacaacccttactttggcgtcaaacccatctctctcttctcttaagatactaccatgcttctcaaagatctcacctttaccctagatcataatgctgttgactccactacaaatgatgctcatgtgcaccaaataaaatctcgccattcaaacatatacgcaccaatggctaaaaatgcc

SEQ ID NO: 27 - DNA, 445 bp, Glycine max
  Clone ID: PAT_MRT3847_100024C.1
gggtaaagcgggccctcattacttaaaattcccaaaatttaaggggaaaaaaaaaaaaaaaaaccaaaacccggggtggcaacagggttcctctgtttaacaaaaccaaaaaaaaaaaaacccccccccccagcaaaagcaaattagggcattaccccccctaaaaaatttcccttaccccaaaaaaatacccagaaattcccgaatttttttttggggggggggggggggggaaacaaactggaacccccacaagcctcagctaaaaggaaattttaagccccgaaacaaaccccccattttttcaaccccaacccctgggggggacggccctcccccttttttgaccccccttttttccaaacaggggaaaacccgggcccctttgaccccaaaaaaaaccggcccaagggcccccccagggccccaagggcatttggggaaa

SEQ ID NO: 28 - DNA, 1167 bp, Glycine max
  Clone ID: PAT_MRT3847_100025C.1
ggaaatcctaaaagcacacccccttaaactatctctgtttatttcttcactcccttttttcttcttcaagggcaatggacagtggaggacactacaacccccgcaccgtcgaagaggttttccgggacttcaagggccgccgggctggcatgatcaaagccctcaccactgatgttgaggaattttaccagcagtgtgatcctgaaaaggagaatttatgtctgtatggattccccactgaacaatgggaagtaaatttgcctgctgaagaagttcccccagaacttcccgagccagcactgggcataaattttgctagggatgggatgcaagaaaaggactggctatctttagttgctgtacacagtgatgcatggctacaatcagtggctttctactttggggcaagatttggttttgataaagctgacagaaagcgcctgttcactatgattaatgatttgcctacaatatttgaggttgtaactggatctgcaaagaaacagacaaaggagaagtcatcagagaacaatggcaacaaatcaaagtccagttcaaaagggcgaggatctgaacccccaaagtattcaaagcaagtgaaggatgaggaggagggattggacgaagaagacgatgacgagcatggggagaccttgtgtggagcatgtggggagaactatgcatctgatgagttctggatttgttgcgacatatgtgagaagtggtttcatggcaagtgtgtgaagatcactcctgcccgggctgagcacatcaaacactacaagtgcccctcatgcagcaataagagaccaaggccttgatatcatagggatgtggggttagttatcacggccctgtaaatcatgctggactgctaactagttagtggcttaggcattctgtattgtgccatgttggtgcatcgtaggtattcactagtttggtcttgtcaacttcttaatgtggatagaattatttaatatttgatggtttctgattctgaacgtctctaacatttgtcctgcattgggatatttatgttcttagtacctgataacatattcgtgcagcaggcttcatttgtgcttggtatattgatagtttgcaggttttgaacaaaaaaaaaaaaaaaaaaaaaaaaaaaaaaaaaaaaaaaaaaaaaaatga

SEQ ID NO: 29 - DNA, 2044 bp, Glycine max
  Clone ID: PAT_MRT3847_100026C.1
tcacggctgcgagaagacgacagaaggggacgcaaatgattaaccatggcttcttctacatcacatccatccttttggtccctcctgaacctgtctgcatccattcccatttcttcttccgtatgcatgttcccaccgtctaaaaaacctagcaaagcaacaaaacggcgtcatgcttgggaagtagcatgcaatggtaaccctagaaataggagggacattctgatcggccttggaggactctatggtgctacaacaagtctcacaagtaacaacactggttctgcatttggtgcttcattgtcgcctccagatccaactaactgcgttcaaccggacccagaaaaagaccctttttgcccaccaccccccttcaaagactacgagctccctccacacgatgacaagacattaccccttcgaattagaccagctgctcatttggtcactgatgattacatagccaagtacgaggaagccgtgaggcgcatgcaagaccttccacctgatgatcctcgcagtttcatgcaacaggccaatgtccaccgtgcctactgcgatggtcgcggctataatcaaaagggcttcgctgactacaagcttgacgttcacggctcctggatattctttccttggcaccgctggtatctctatttctatgagaaaatcttggggaagatgatcgatgaccccactttcgctcttccgttttggaactgggacaatcccgccggcatgagaatccctcccattttcacagacaaaagttcacctctctacgacgaacacaggaatagcgatcatgtaaatgctttcatcgacctagactacaagaaggaccattctcctgtgaaacctcctcaaacaattatatggccgccagtggtgaaaaagaataactcgatcgtcgacaacttgatcgtcaacaacttgataaaagtttatacggcagttgcaagcaaaaccaactctagcccagactccttcctcgggccagcattcgaagttggttctgatcctaagaaacactttggatctctggaatctttgcacaatactgtccacagctggaccggtgaattagaaaaacctaaccacgacatggggttgttggctacggctgcaagagatcccattttctttgctcaccattcaaacgtcgataggatgtggaacatatggaagacagaattgctggatggaagaagatttgatcacaaaagtgacgaatggttggaatccagtttcttcttctacgacgagaacagtaactatgtgcgtgtgaaggtcaaagactgcctcgactccaagaagatggggtatgattaccaacgtgttgaccttccatggctgttggctggggaactcatcaaaccaaagaaggagattattccccttcgttcaaaaccagaagcttcaacattcaagacattacagctccctctccttctggaatccattgagcgtacaaacgtgaagaggccgaagccgcgatccaggaacgagaatgaagaagaagaaggcgtagaagaggtgttagtgatagatgttgagtacgatagcactgatggtgtgaggtttgatgtgttcatcaacgaccaaggcgataatgagattggaccccaggattcagagtttgcgggaagctttgtgactttgcctcactcgccgcatgtcaaccataacaacatcaccagagcttctttcaaattgccattaacgtatcagttgaaagacttgggagtaacaaaagacgatgatagtatttctgtcacactggctcccatatatggagacaagcctgttacaattaaggacgtaaggataaagcgtgtttatcctgaggtagacgatgaataaatctaaattatgtgtgtgctactgctagggtttgtttctccggggatactctatttgtcatttgttgtttcttaattagtgtgttgtagttatttgccttggaacttaatagatccctttcatctttgagggatactatgatattgttataataaatgtttgttaaattgtttgttttattgtt

SEQ ID NO: 30 - DNA, 509 bp, Glycine max
  Clone ID: PAT_MRT3847_100027C.1
taatattcagtttttccttttctccatttttctctcttccgctttttccttttctccattttctgtcttccactatctgcttcccttgaccttgaactttattcttctgcaagctttgcatccattcattcacggcagacatgagatttattatggtatcagagctttatcatttcctctccgctgccactattgatcaacctctccgttcattgccgtcgccgtcctctgtcatgagacaccgattctggtcaacacctaccttcgttcaatccttattcatcttctcatatttccctttttcattttttgattacattttcctaaattttttttctccaaaacacaaaacttaacattttccctttcctttgatttctggcctatttgagccgcgattcgtgaaaccaccactaccaatcaattcctctccgcatccgcgacaaaacccctaaacatttgtcgccgccgccacgctggtgatttccgatcaccgtgctttatcacac

SEQ ID NO: 31 - DNA, 236 bp, Glycine max
  Clone ID: PAT_MRT3847_100028C.1
tgaagattccgcaacagagagtagaaaagatggctcggttgatcacagcggtgtggtgcgcggtggctgtgctactgtgcgccgctgcactcgcatcgtggttggaggaagcggccaaccctatacgaatggtggcggaggtggaggaccgaagaattcaggtgtagggctgtgccagcacaggctggagacaagagtgtttactatcattttcaggatctagtccccactactgg

SEQ ID NO: 32 - DNA, 166 bp, Glycine max
  Clone ID: PAT_MRT3847_100029C.1
ttgtggatatgttctgctatgcatgcttccgatctttcgagtgtgtaatctttttattgcaattgcatgaaaatgatggtattactcgttccttttcttgattgaacgaaaagtgaaataattgtgagtagtagttgatgtagttttgcataactgagtgatagtg

SEQ ID NO: 33 - DNA, 591 bp, Glycine max
  Clone ID: PAT_MRT3847_10002C.1
gggacgagttatctgtgtatgactcagatgactcatctgataagtccaccactacaaccacaagcagcagcatgcagcgcaagtgggtgggaaactagggaacttaggagtagagatgcgcaagcaatgctcaaaactaatgtgttctttgcttcctttgaccaaaggagcaaacaagcatgtggtgagagtgcatgtacagcactagcagtgtgcatagctcactggcttcattccaaccataacatgccaacaaggtcccaatttgacagcctcatcaaaaggggttcctctgaatggagaaggctaagccacagtgatcactacctaaagctgttcccagataagcattttgatctagagacagtcttggaagccaacattaggcctctagttgttacccctcaaaactcctacacaggattgttctgccctgagaagtatcagagcttggaaggagccatgatctattatgacatctgggatgagatgactagaaatgatgatgtggtagatcatgagccatgcaatgacatagtgacgaggaatgacgcattctatgttctgatggcgcaagctgaggctgtatgt

SEQ ID NO: 34 - DNA, 354 bp, Glycine max
  unsure (1)..(354): unsure at all n locations
  Clone ID: PAT_MRT3847_100030C.1
aggaggccgccctcgcgctttttttttacttcaaaacctttttcttttactacagnccngnanaaaaaaggcgagaagaaattccaaaaactccaaacactaaaccccaccatcaaaacttaaaaaccacaacaagaaacaaggatctataacagcacacaaaaattatatctaacactgaaacccctaataaaaaaaataactcattcagacaaatgtaaaactgcttcccaaacgtcatccaatccaacagcgaaaaaaataaacataacgagccttgaccaaaaaaaaaaccggaaaacattcttatctaaaaccggacatattaatagtgcatacacatactgcaatcac

SEQ ID NO: 35 - DNA, 489 bp, Glycine max
  Clone ID: PAT_MRT3847_100031C.1
gatcttcttgatgatgtatcttgaatctcttggatttttgtctttatcttaacttgagaagtacatgttcacatggcatcaaaacatcatgagcatatggcatcatcaaaacatcaaagtcaaagtctttgcttctacagctcagaaatctagtgatgaggacagcttgcacacaatttcttgaatctttcccagtactcatacaagctctctccactaagttgcctgatgcctgaaatgtcttttttgatggcagtggtcctagatgcagggaagaatttctccaagaacaccctcttaaggtcatcccagctggtaatggacctgagagcaaggtagtacaaccaatcttacgccactccctcaaaagaataaggaaaagcttttaaaaagatatgatcttcctggacattagggggtttcatggtggaatagacaatttggaacttgtcgcaacctacccttctgcgggagggcgacgcgtgactc

SEQ ID NO: 36 - DNA, 371 bp, Glycine max
  unsure (1)..(371): unsure at all n locations
  Clone ID: PAT_MRT3847_100032C.1
tcggccaggagatcgactaaagggggagttgtgcagcgattgtttttaccagggaatcaacttggggggagtggcacagaatgacaaaacaaggtggagtagaattgatggcaactgagatagaggcataacatgggaatttgaaatcttaaagagcggggaatgaagccattgtgcaacaaaaactggttgatccctttaagagtgaccaaaaccataaaaaacnggtgacacaacgccttctaagaacaatatttaactttgtgatatcttaaagtttattacaggcatacctttattatggatatttagtttgtgtagatgagtaaattattcaattttgagaaaagaaaagagatatttttctttgt

SEQ ID NO: 37 - DNA, 772 bp, Glycine max
  unsure (1)..(772): unsure at all n locations
  Clone ID: PAT_MRT3847_100033C.1
cttcacttgactgacgtccgctctaggtatcgcagcaggaaccgaagtacgcccgaggacttcaggaaccatgccgaagccacacagtgaagcagggactgccttcattcagacccagcagctccatgcagccatggctgacaccttcctggaacacatgtgccgcctggacattgactctgcccccatcacggcccgcaacactggcatcatttgtaccattgggcctgcttcccgatctgtggagatgctgaaggagatgattaagtctggaatgaatgtggctcggctgaatttctctcatggaacccatgagtaccatgcagagaccatcaagaatgtccgtgaagccacagaaagctttgcatctgatcccattctctaccgtcctgttgcggtggctctggatacaaagggacctgagatccggactggactcatcaagggcagcggcaccgctgaggtggagctgaagaagggagccactctgaagatcaccctggacaacgcttacatggagaagtgtgacgagaacatcctgtggttggactacaagaacatctgcaaggtggtggaggtgggcagcaagatctacgtggacgatgggctcatctcactgcaggtgaaggagaaaggcgctgacttcctggtgacggaggtggagaatggtggctccttgggcagcaagaaaggcgtgaacctgccgggcgctgctgtggatcntcccgctgtgtcggaaaaggacatccnagacctgaagttggggtggagc

SEQ ID NO: 38 - DNA, 521 bp, Glycine max
  Clone ID: PAT_MRT3847_100034C.1
atcatgtcatatcataccaatttgaatgtatgggaaaagaacatatcatgtgtgttgctgcaacaagtactgatgagtgatgataatgacatcagcaactactacaggaatgcatcgaatacaaatgcagactgaaaacatagatttgattttccttttatcaatctaccaaactttctttttgtgtttggttttccttataactaaaataaaaatacataacgatggatcaacagaaaaataactagtctagaagttcaacaaatttatataagtttatagacaataatacccttgtattaatcatctaattttcataacctcctttctctacaaacacacaatcactgccgaaattactgacttaatgatctttaggtggcataccgcataccacataaaattagagaaatttggatgtaaaaactttgataaattgataccgtgtttgcaagcctagagaagtagaccaatgccataatcattcattttcagatgttctataaaagcacagaattaaa

SEQ ID NO: 39 - DNA, 589 bp, Glycine max
  unsure (1)..(589): unsure at all n locations
  Clone ID: PAT_MRT3847_100035C.1
gcatttttttttgcagaaactgtagnaaatcgatgaaaananacgcagaatcagccgcttccgcttgttcgaatcactacagaacgcttgttatcggaatattcatgaatgaatcataagcagcatgttcttcctccggctatagttgttgcagaattcggaagntgtaaaattantgttatgatgntgaanctatgggctggaaaatgntggatgttangaaaattcgggaanaaaaggnctcaaaacgcttcntcntttgtggttactgantcctganttgatcttgtcatccgacctttgccatgacaggttgcgcttgcttggcaggtcaaaatatgtttaataaaaaaaaattttattggtttanggaanaanaatcccacgggaatttgcccggggttctctctctccntgtngtgtnttggtgttttgctgttgctccccttttccttatgccttttattattacctatctgtccctccactcccttattacnactccggattcnnaaggatacatccnaagattccctcccactcccnatcnaataangtattatctgtccatttacattggaaaaggttt

SEQ ID NO: 40 - DNA, 351 bp, Glycine max
  Clone ID: PAT_MRT3847_100036C.1
acgaacgacagagaagactggctccaggctaacgctattcgttatcttttgggagactggggggcgtacatacgaggagtactgcatatactaacttattatattaactcaagggatggctggactcgcacctgttgtatcacaaggcgatgctcgagcatatgaatatagaacgagagacttacttttatatgatggacatgactggcacacatgctatgactagggtaatgatagctattacactatctgtctgcacgataatcttagcaagtgaatggacacatatgattgttagaagccatttttcattcagtaaacggggatacttccctcttgcaagggacttga

SEQ ID NO: 41 - DNA, 991 bp, Glycine max
  unsure (1)..(991): unsure at all n locations
  Clone ID: PAT_MRT3847_100037C.1
ctagaatnnnaaatgctaggagnnnacagaatannnnganntcgccnnnnnccnnnaagtggcgcaatatttcaacgattccaagggaatggaatccttagcctaaacaaaatatattcaaattnnngatgtgtcacgtcctctccacgcatgcagcagaaaggattggagaacgtgacagtgtcagaggtactaatgacaaaaggggaagaaaatgttggttcctggctttggtgccgagctgatgatgctgttgtaaatgcaatgaagaatatggctgataataacattggatcattggtggtactaaagccagaggggcagcacatagcagggattgtcacagaaagagactgcttgaaaaaaatagttgcnnaaggaagatctcccttacacacacaagttggtcaaataatgactgatgagaataacctgataacggtgacctctgacaccaacatccttaaagcaatgaaaattatgacagagaatcatatccggcatgttccggttatagatgggaaaatagttggtatgatttccattgtagatgtggttcgagcagtgatggagcagcagagtggagaattgaagcgactcaatgactacatcagaggacaatactattagcaaaagaattcaagcatggatacggatttgatgacacgaacgaaattcatgtaccaaaacagaatacacctttatatttcataatagattgaatttgattatattttataaattgctagtaacaggtgaataagtttccttttatttttttagaagaaaatcttttccgaaaacgtaaattataaattataaagttgataatctccattcacaccaaaacatgtaacattcgagctgtgacactaagtcagttgaaaaatgatattcaatattctctttccccttttccctcagtcccaagccttagtatgaatttgttagtcatcaccccacactaacattgggatttctatctagcccc

SEQ ID NO: 42 - DNA, 486 bp, Glycine max
  Clone ID: PAT_MRT3847_100038C.1
ctctcgagccgaatcggctcgagcttcacatcttagacataatgtctatgtctgaatatgttgttgagcttcctattttggacatttctcagccattacagccatcttctctaacctctctctctaaagcctgcaaagattggggatttttccacataatcaatcatggaatctccaaagatctttgcagccagatccactacttatccaaataccttttcagcctcccttctgaggctaaacttaaacttggccctttctcctctataaagtcttacacccctcacttcattgcttctccattctttgagagcctcagaattaatggaccaaacttctatgcttctgctaagagttctgaagacatcctctttgacaaacagacttccaaattcagtgagacactgcaagaatattgtagtaagatggttgatttgtcagagaggattctaaagcttgtattgatgagcttagaggatggatttg

SEQ ID NO: 43 - DNA, 426 bp, Glycine max
  Clone ID: PAT_MRT3847_100039C.1
cccacgcttccgaaatttttaattccaattgttccaactagctggttggacggaaggattgttttttttggtaaagttttttttgaaatggttgtggtttacaagatggaagttgaaggaccacaaaggggccttccaaaaaccagggtggtgatggtggacaggggggaactccttttataagggaccttctggattttaaataaggactggtggaaggggttcccagttttaatttaaattccttttccgagactactaatttttattaggcatgttttaatagatcaagacttagttggttgttggggatactaattaaataaagtttttccccctattgatattatggaaatgggcattggggaaaacttacagttaataaactatttttcccgaaaaaaaaaaaataaacgattttggggg

SEQ ID NO: 44 - DNA, 858 bp, Glycine max
  Clone ID: PAT_MRT3847_10003C.1
accagcattgatttaactaacatctaaaagaagaaactgaaaatatagaattccatttcatctttgtacttattctcatattgtttttttatgtatagaaagtcaatatttttagatttactttataacattaacaaaatggtagcaagcagcgtgcactttgactcttgattccacaacattgctatataagctcaaactcaaagcagtttgaagggtatgctttttaaaatcaagctgtgaccttaaagttcaatgaaaatgtttctgtgtagaccaagatcttcttatcttataattttctgggatgaaatttactatatgctacagtccttgttatattcaatccagagttaaaatcatacatatatctaatttccatgctgtataagcatcacctggcttcctgtttttgtgccgtatgatgattataacaaggtaaatgatttctttagagaaaatttattcaattgcacaaacctttgaaccatacagagtacagactactcaaagtgttatgaataaaacctgcatgaatgtactcagattacaaggatgatacgctggcaagtttgagcactcaagtttgatatttaatgtttaatatgattttcttcggtgttaatatgtgactttttcattggaaaatgttccgtttaaaacttcaattgctttgatttctggccatgtgattggaaatatgaacttttgccgtatattcttaagtatgagataatagttgtttcaacaatcatgacttgtaaaatacaatataatcatgattttaggcatgatacacttaaaaacaatgttgtagttagactcaaatgtggtgaaaactccaatgaaaacccatgt

SEQ ID NO: 45 - DNA, 266 bp, Glycine max
  Clone ID: PAT_MRT3847_100040C.1
tctgagaggagacgacaggaggcggggttctcaaggaaccagctgggttaaggtcttagtgcgacgcatcagatcaaagtgcagggacaccatcaccataaccttgtacaccacgtgtcatctgcatcaccttggagtatcagactcaggaacacgtaacaagcaaccgcagcagtctctgtcgtcatgtccgggtgctactcgatgtatctctacgattcctcactctagcaggagaagtatgggtgctgcgagagaccttggga

SEQ ID NO: 46 - DNA, 620 bp, Glycine max
  Clone ID: PAT_MRT3847_100041C.1
caactacgaagatgagagctctgttatgaatgtgaggtgcgggagcctgaactcggttccttactctcagctcgttgaaatatcacgcgcgctcgaagattcggagcatgattttatctgggtggcgaggaaaaacgatgggggtgaaggagataactttttggtggagcttgtgaagagaatgaaggaaagaaacataagacatttaatatggggttgtgccccacagtctgttgatactggatcaatcctgcgattgtagggattggactactcactgagagttggaacaccgaggaggaaagcgtgcactgcagagcgtgccttatgtgcaacgtggcctctgcaagcgaagcatttattcaacaagaagctaccggtggatgtgcagaagattgtggtgccgtaccacgcaaaagagtgaacgaactgacacgagttcatgagtgatagatctaaacgctaggagattggaaacacaactgattgcttgacgagcgatgaaaactaatatggatgcatgaggactatgaaccaagaactgatcaatggattgaagactgcttaaaagctggtggatctctatacaagaacatgaaggaattgattcttgagctcat

SEQ ID NO: 47 - DNA, 820 bp, Glycine max
  Clone ID: PAT_MRT3847_100042C.1
caaaaagctctacttctgattcctccaccttatccccctgaagtttgcgtgttgcttgagccggcatgtttactcctgattgcaccctcagtagagcaataccagaaaagaataaatcaacttatttgtcacctatgcaatagaccctcaatatttttcctctaatgtggggtccaagcacaatcttcacaattctaggttcatgagaaactcataacaatccttttggaataaacaactgctccccttgtaggaactcatcttcataggaatttaagttatttggtatccacattagtttcatattttagatcaaggcctttcaatgttgtgttgctataaattttaatttcgactgaatattttaatcaattagacgcttacagatcaagaccacgcagaatatgaagttctgtgcagaacatatttcccgtaaccacaaagcgaacctaaattcaaattttaccaatgaagaaagaaagaaatatttataaaaaaatttatcttcccaacccttttctcactaggtggggtggaaaacaaggttattcataccagtagtactaatggaaaagaagaagctagagacagatatttgttatacctttttaccacctcttagtgttattcgatggagaccaaagaattttgtaataagagtattctcataacttcctacatgatgatagtatttaggaagcatattgagcataacctacaagagaaaaaatatatgtataaccacgaacatatggaaattgtcatttaattgggtaaatcaaattcattatttactgtagagatggaaacataaacaacc

SEQ ID NO: 48 - DNA, 1524 bp, Glycine max
  Clone ID: PAT_MRT3847_100043C.1
cggacgcgtgggcaagaccatccggggtcaactgttagggggagagtgagaaaaaacaaaagggtcataattgttaatcaccttcatccattcttgatgctatcaatttgtgccacaaaaacaaaccttcagcatttggattggttttcagttaattttcgggacaataataaaacaatattcttgctgttgtaatcaaccttttctgagtgtggggccttatccaatgcaataagagaaagatctatgacacctaactaaattctttattgttttagaaactggtgtactatgctatgtagcttggagcggtgttacggtgacagagtgagaaatgggtctgctttctaacagagtggagagacatgagatcaagcctggcgatcacatctacacatacagagctgttttcacctattctcatcatggcatttttgttgggggaagcaaggttgtacatttcagacctgaaagaaacttaaagtcaatgactgagacatcatcaaactgggatgatccaacatcaaacccatgtccaacctttcctgattgtggattcagacaaccaaacagtggagtagtcctttcttgcttagactgcttccttcgaaatgggtctctttactgttttgagtatgaggtttcaccatctgttttcctcagcagaataaggggtggcacatgcactactgcatcagctgacccaccagagactgttattcatcgagctatgtatcttcttcaaaacggctttggaaattataatgtttttcagaacaattgtgaggattttgccttgtactgcaaaactggtcttttgatacaagacaagcaaggggttggaagaagtggccaagcttcttctgttattggtgctccattggctgcaatgatctcttctcctctcaagttgttaatgccaagtcctgttggtgttgctactgtaactgcaggaatgtactgcatgagcagatatgcaactgatattggtgtcagaagtgatgtgatcaaggtgccagtggaagacttggctgtgaaccttggatggatttgtcaagaggaggaggaggtagctgaacatgaaaatccagacagacagattaccaccagatgatctagcattgctcttcatccttactatgcacatgaaactgttgcatgtgtcactgttagttatacactagttcatagcagatatgtcttcattcatgttatatcttctgtgattggtgtctagttattcaagttgtgtctgggatgaaaatggaacaatattattacttatagtagtaactataatgtgatgtattcctttgagacaaattttcttctagttgcctataataatgcaacattctacccacaatagtgatagaaccatcttgttgtgcatctccgaaaatcgaaccatcttgttgtgtatcatagaaaatcaagttgaattctattttgctatatttctaatcatgcttttgacaaattgtcaaaagtgtttgagtgtaatgaagatattaatgttatggc

SEQ ID NO: 49 - DNA, 337 bp, Glycine max
  Clone ID: PAT_MRT3847_100044C.1
gctatctcgatcgaactgtccaaggtcctgtcacactgttgtggtgtcaggttctaagtttgaataagccatgttcaggagagcatgacgccgtctggcagcgtgggcccccgaacatggggccatggtaaagagtgagacgccatcgcgagctgcgagaatgcgtaaaggcaaagcgcaaagggccacccaaggcgtgaaatgagggccacgaaagaggttttcgactggttcccgattgcggaaggatgggtgggtgttcgcacgttgcagtggccaatggcgagcaaaaatagcgcagtggggtgcgcataaagggaaatacgtggtagtgttt

SEQ ID NO: 50 - DNA, 301 bp, Glycine max
  Clone ID: PAT_MRT3847_100045C.1
gtcgcatgcacgcgtacgtaagctcggaattcggctcgaggaggtgggtggagcaacagaggagggcttcctaaagcacaatgggccctgggaatcagtcctctgtcttcctaccagaccctgcccttgaaggcctcttataaactctcagactgtgagctatgccatcactgaggatgaaaaaccaggaggtgactagttctagatcgcgagcggccgccgactagtgagctcgtcgacccgggaattaattccggaccggtacctgcaggcgtaccagctttccctatagtgagtcgta

SEQ ID NO: 51 - DNA, 815 bp, Glycine max
  Clone ID: PAT_MRT3847_100046C.1
ctctgcattcctcaattaatcaatatggcttcatgtttaccaaatgcatctccatttttggtcatgctcgcaatgtgcctcttaatttccacctctgaagctgaaaaatatgtggttggaggcagtgaaaaatcctggaagtttcctctctcaaaaccagattcactcagccattgggccaactctcaccgatttaaaatcggcgacactctcatatttaaatacgaaaagagaacagagtcagtgcacgaaggtaatgagacggattatgaagggtgcaacacggtggggaaataccacattgtgttcaacggtggcaacaccaaggtgatgcttaccaaacctggattcagacacttcattagtggaaatcagagtcattgccagatggggttaaagctggctgtgcttgtcatatcgtcgaacaaaaccaaaaagaatcttctttccccatctccttcgccttcaccgccaccatcatcgttgctatcaccatcaccttcgccacttccaaataatcaaggtgttactagtagttcaggtgcgggattcatcggggttatgatgtggttgatgttattgctttaaattgagagtattgtgtattcgcaattttgcatgttaatgcctccgtcactaatcactatatatgcaatatatatatttgtggttgtggggttagttattcaggtcaagcatgcattttcgctttcatttttgtaattttttttaaaagtttggacgttttcttttgattgcgcaattgtgcccttaaactcaatgcccgtcttggtaattttgagattgaataagtc

SEQ ID NO: 52 - DNA, 375 bp, Glycine max
  Clone ID: PAT_MRT3847_100047C.1
ttctctcccaccactttttcctctctcttcctcgactagctagccacacaaaatgaggatgggcttcagatccagtgcctccctgtcccaaatcacgagaccattcattttaatcacgtgtttgatacacataaattgggctctcgctaaactcttccaattttttctataaactatatgaccttacgaccaatccttatgcttcactccttcttcgtcccttctctcttctgtgtctactttgtcgcataaactctctcccaaatttcgaattcattatatctttcttccttatttcctacttgttctttccatttagataattatatatgcatcttccaattttacattatttatctttttttttcctatctt

SEQ ID NO: 53 - DNA, 372 bp, Glycine max
  Clone ID: PAT_MRT3847_100048C.1
tggatgcgattggcaacatgcttgtgaagtttcctcctctactcacttacagtctgaacaagaagattagaccagtggtcatattcttgatgaccaaagctggagtcagtgagaaagatatcgccaaggttgtagctcttggacctgagctgttgggatgcaatatagcacataagcttgatctaaatgtaaaatattttttgtctcttggcatacgtcttcggcaattgggtgagatgattgctgattttccaatgctgctcagatacaatccagatgtccttcgtcccaaatatatttatttgcgaaaaacaatggtccggcctttgcaagatcttactgagtttccaaggtttttcagctattctcctg

SEQ ID NO: 54 - DNA, 337 bp, Glycine max
  Clone ID: PAT_MRT3847_100049C.1
ccctgttttaacagccaccagcaagcacaaaagcaggggcccaaatcaaaaaaaccagacccgaccccccaagcaaggagaaaggaaaacccgaagcgcaccggacacaacagcgaaaaaacccagcggcacaggaaggaccgccaccccaaagcaagacagccagggacccaaggaacgggcaaaccacccccaagaaagaggcccccaagacccaccgagaccaaaaccccaaaaacccccaggggcaaaaacggggaagggaaaaccgagcaagccccaacggaccccccccccgagggagaaaaaaaaaagcccccaaccaaaaagggggagg

SEQ ID NO: 55 - DNA, 439 bp, Glycine max
  Clone ID: PAT_MRT3847_10004C.1
ggctcgaggactcatggtaccctatttgtagttctatcctgtggtttattactttatgtctttgtgcatgacatcagaattcgcactgaactggaaaccttggacttgtatgctctgcaactgtgtcactcacacaggtatttgaccaaatggcttacaaccaacaagaaccatgggtattggagagtgggaacaccaagggttatgaccactgagaccaggcttggccactctgaacacagaaagtgctccacctgtaggcgcatgaaatcaagccgagctcttgtatcacaggctgcatgagccactctgagaaactgacttgcacattggcactgggctcttcttggaaacacgctctgcattctcatccctgcttgtccaggtgacatcggtgctgagtggattgactttggcggaccgtgcacctatatatgaa

SEQ ID NO: 56 - DNA, 230 bp, Glycine max
  Clone ID: PAT_MRT3847_100050C.1
tattctcaaaccactcaaaccgaatcggctcgagctcgaaactgacaaacataaccgataaaccataaaacagagtcattacacaattccttacaccgaaatcatattttgattttgataccccttattttatttatttccatactatattcacttctactacacattttctgaacctgacatcttctctccttaaagccacacttctgataccttttgatcatcaagtg

SEQ ID NO: 57 - DNA, 500 bp, Glycine max
  Clone ID: PAT_MRT3847_100051C.1
gaacataacttatcgtgcaccagccgaattcccttacacaagtggtatagttccaggtgctggcttggcatttggaagtgagatgtctgggggaatatctgttattattgcagaaaagcttcatattctcaactctcctattggcattgaactgaagacaactaggggtagaggtggctatgagaggcatcttcatttctgatgcagaattggaaaatattagcttgggagtaagcatgacaggatactccggtttccatccagatgacaagtatgacactagttcacttccagttgttggtgacattactttcaagaatgtgattggggcaaatattagtgttgctgggaatttttcaggaatagttgaatcaccattctcaacaatctgtctttcaaacgtgactttttctctcagctccgagccatctccttcatggttctgttctaatgtaattggtttctctgagcatgtgattcctgagccatgtcctgatatc

SEQ ID NO: 58 - DNA, 308 bp, Glycine max
  Clone ID: PAT_MRT3847_100052C.1
gggaaacaatgaacattttattcattcctttaaggcttaaagttctataagagcttttaaatgatcttgggacaaaatggggaatttcctttctccacacaaggggaggatgcaataaagatccttaaaattttttataaaggttgggggatcaacgctcctgaacatgcggggggccagaaaaagagatcgtttttttaatttacctgggctggacaaaaatttcgaaccaattgtagaaaccttaacgagggaaaaggggtgccaggcatcttcttttgggggggggttccaaggatccccaaaaa

SEQ ID NO: 59 - DNA, 368 bp, Glycine max
  Clone ID: PAT_MRT3847_100053C.1
caaaaaagaaagggacgactcttccattttaaaatagatttaatttatcttggaatcctaaattaagaggattcactataataagcattcttaaataacaagattaagaaggtaatgctctataatatcattagcatgaaatatgatgcaagggagcctccgcggaaaataatgaggatgtataatgttaacattttctacgctgagacggatttcaaaggccataccctatgagaacttagtccagcaacctgtttggcagatcattggactggaataggatgtccatgctgaaaatgcaatattcaaaccatggccaagtgcttgccatattttgccacaatatgtatatttggttttgtgaaata

SEQ ID NO: 60 - DNA, 373 bp, Glycine max
  Clone ID: PAT_MRT3847_100054C.1
tttgctcacttaaaataaacaaatcctctgtgtgtggatatgttctctaatttctgtatgtacgtttatgttttacagaatattctttcgtatgttaaaactactttttgtgtttctaattttgttatagtaaatgttggactcctattaatttgtaaattgctgatgagatgtgtttcaaactctcttaacagttgtctgagagtgctggaaactacatactgtactgtacagttcaatttcttgtatatgaaaggagttaaggagatagctgaagaatgtcagagatggctatgtgttctaactgtcatgcttgtgaagtgtaaaacagaaactaaccatctacctagtgtaaaatcatttattgatgtat

SEQ ID NO: 61 - DNA, 364 bp, Glycine max
  Clone ID: PAT_MRT3847_100055C.1
ctcagccatattttatctcatgctctgcgattatcttatctaccacgattccctacaccctggaacactagtcgaagtgctgcaacacagaactggagaagggataaggtcaactttgactctctcacacacacctttacgctgcatgcaagaagagaacgaatgagtcggtgacagaagccatggagtactagttgctccacttaatgccaatgaagaagagagaattgcatggatgagagggaagcttcacgagttcaagattctcaattcatacaagttgagcaggcgattccatgctcgggtactgcgattgttcatccacgaatgcgaatctcgactgttcatgatttcggaagcccct

SEQ ID NO: 62 - DNA, 445 bp, Glycine max
  Clone ID: PAT_MRT3847_100056C.1
cgaagcaattaactaaaacccaaatacttcagaattctctcctacaaaatctcatttcaccccatccctagcaacagggggtctagcttagctgtttgttgagcaggtgcataagttgttgtaaattcctagaatttgccttcgatttctacttgttagaaaaatccctaccaacaccaataacaaaacaccaaagcaagaaaaaaatatacaatcttccgcaaatgtttctatctttctttctttctttttatgaaacgaaaccaaacgagagagaaagcactaaattatttcctctccagtatccacttgctcgctccaacaaacaccgattcaagcaatcacaaaaccattcatgaaacaagaaccattccacataaaaacacatacaacaaatttatcttcttcctccatttttataatagtttcagtgagtaaaagcata

SEQ ID NO: 63 - DNA, 319 bp, Glycine max
  Clone ID: PAT_MRT3847_100057C.1
gcgaccttgttcgagactttttattttattttttttcggtgtaggacaacactttctagatcattagaatatggcttccattgttctggaacttattaagatgaccctgccgcacatctgggtaccaattgtctcgtgggacagaaaaggcggagatgccaccctcactttgataagccctgctttcgtgatttttaagagccagaacatccacgttctggaacaactttagcattttgttgtgaggcgcaccgacaactttgccttgcgcttcactgtgagcccattgctggttttttgagaaaagaaccattacgac

SEQ ID NO: 64 - DNA, 163 bp, Glycine max
  Clone ID: PAT_MRT3847_100058C.1
gcgcaccttcaggccctgggcggcatcgcgctcgaccgagccgggctgcacccagccgcccacgcgcagcagcgcgccgcgctcggcctggccggcggcgatctgcgccggcgtgacgaagaagaccaggttgctgcggaaggcctgcagggccagcgtggtg

SEQ ID NO: 65 - DNA, 175 bp, Glycine max
  Clone ID: PAT_MRT3847_100059C.1
ggaccatgcatggtgctctggtcgatgccgtacgtgtgtccctgatacaatactattagtactgatgctagtcatcatatatatcgagctcgccactgcgaagtctgggagataatgcatgtatgcttgacggcgagatctgaggaaaaataatactatatatgcatgtttcgag

SEQ ID NO: 66 - DNA, 1306 bp, Glycine max
  Clone ID: PAT_MRT3847_10005C.1
tacggctgcgagaagacgacagaagggggattcatgggatttagagagagagagaacttcaactgagggtgagagtgacacaaatctagggagcactactctaaaagttctattagattcttcaaaacatgaccatgcatcgcgagtcttgggcttttgtcttcggcgttatgggcaacatcatctcctttggagtgttccttgctccattgccaaccttttaccaaatctacaagaagaaatccactgaagggttccagtcacttccttatgttgttgcactgttcagtgcaatgctttggatttactatgctttcgtcaaaagggaagctgccctccttctcattaccattaacacatttggaattgttgtggagtcaatttaccttgcaatcttcctactttatgccccaaggaagcctaggcttacaaccatcaagcttcttctcttactgaatgtgtttgggtttggagccatgcttctatcaactctctacctgtcaaagggagcaaagcgtcttgctatcataggatggatttgccttgttttcaacatcagtgtctttgctgcgcctctcttcattattaggcgtgtcataaagacgaggagcgtggaatacatgccatttactttgtcaatgtttttaaccatcaatgctgttatgtggttcttctatggccttctcctcagggattattacgttgctcttccaaacacacttgggtttgtcttcggcataattcagatggggatgtatttgatgtacagaaacgccaccccagtggcactagaggagccagtgaaggctcaagaattgaatggccacatcattgacgttgggaagatgggaacaatggaaccgaatcacgcagctactgctggtgctgttggcaaagtttgaatatcaccattgagattatatgaatgtggagaaacaagggatcaatgacaagaaaagttaaaaaaagggaataacctaaacttcaattactttactgagtgaggtcacatctaatatcactcatatctacaatgcaagaatagtaagtagtatttggtataagtgttaatttagttcgattaatgtaaaggtgtggttttaatttgcctgttcgggtagatgtaactgttggccacaacacttagtctctcttaatttggcccatatcactctcatattgtactactacgtgtaacgtagtatattctcttctctcggtgtatcccccagtcaaactcatttcaattcacttttcccttgtattcgtaattaatgttcgggtaatgaaaatgaattactttagt

SEQ ID NO: 67 - DNA, 123 bp, Glycine max
  Clone ID: PAT_MRT3847_100060C.1
aaaaaaatactgggagctataaaaatagagtgaccaagtaccatagttatttgctttcttaataggagtaatctaatgatttactgaagtagtaaaattatagaaagagcttggctaaaagtt

SEQ ID NO: 68 - DNA, 2189 bp, Glycine max
  Clone ID: PAT_MRT3847_100061C.1
agaaaatcaagggcagaacaaaatttagatggacaatgaataaatagcataacttaaaatgaaatgtgaattgaacattgcactaactgcgtccaaggaattgattttacataacagaactcacatgcataaaaagcctctcccaagtgaagaaccgtacagaatgtgagtggatcatgcggttgaaatatatggagcgtctacttctggaagatcccagttatcatcatcctcttccttcttggttgctgcaacatccggcttgttttgtggttgaaatctcgattgagagcgcctgcttctgctcttacgcttggcagcttcgcggttcttgcgcttcttttcctcctgcttgttctcgaagaaccgtctccgcttgcactcctgaatgactccggctctcatgacctctctccggaaccggttgaggagcctctcctccggctcgttctcgtccaccaccacctgcacgttgtacgccgaccggaagaagagcgtgttcgcatgcgcgtgggacgggttcgccacggcggacagctccgccgacgagtggtggtcctggtcctgatgcttggcacgtagcttctggagtgggaagcgagtgatgatgggaggagggtgtggctttggagggaggaggaaggagaagagggtggagaaggaggatgaggaggggaacggatctgctgggtgggactagataaagtgaagcaagctgacaagactaagggaagattggatggtggaaatggaatcggcagctgaaaaccctaattacccggcggtggactacaagcgaccttccatcttgtcatttcctcggaggcccgccctcagagttacatccgagttcgatagtgaaagcgcagtcttcttccataagatttcctgcaagttgttggacagccttgccaagttcaagttttcgttcaaccacagcggtaagggcggcgacatctccgaacctcaattcagctttgtctccaagcaccttagcctccactacgacctcgaagaccataatgctctcgttaagacctccatcgatcttgctcccagtttgcaactcactgcttctcatgatctcaaggctcaacaaggagaggttaccgtgcttgcaaacctcgccgatcctgcctattcacttcaactatctactccacttccatccgttggattgccaaaagctaccttcagatttcctctgggtgaactttcgctgcaggagaaacaagaggaggaagtcaataatttgttgtcagtcgatggggttcttaaaggacaattgtttaatgggctctgctctgcccattacaaggacgaagaactgaaattaagatatggctataaggacgatgaaatctcatttcttccaatactttcacttccttcaaatgccctgtcatttgcatttaagcgtcggtttggtccttccgacaaattaagttactggtacaattgcgattccaactattggagtgctgtctacaagcgcacctatggtaaagatttcaaatttaaagctggttatgattcagagattcgccttggctgggcatctctttgggttggagatgaaggtgggaaagccaaaacagctccgatgcagatgaaagttcaattcatgctacaagtgccacaggacgacataaaatcttctgctttgatgtttcggattaagaaaagatgggacttttaaggctctactggtgactttacctgttttttatatataaaaaatgggtatttgactttgggcagttccattgtgttttagtttgttgcatccacagtccactctttgcaaaagggggtattgactatttgacaggttgatatttctccaagtcagctaattgcttcgtggtgtgacaagtaagaacaattttcaatcgtacaaaatttgtaaagatgattttctgatttgtaagttggcagattatggttatcgaatgcagacagtgctgaaattggttatgcatttggctaaaggccattcaactttgcaaaaaaaaaaaaaactaaacaaatttctttcaactttttggtgggatagttgaatctggcgtagagtagtcttttaacgaaatgctcagcggctttactactctgaaccccatcaaatacaaagctgatttaggacatgagttttaaaaaaaaaaaaaaaaaaaaaaaaaaaaaaaaaggaa

SEQ ID NO: 69 - DNA, 632 bp, Glycine max
  Clone ID: PAT_MRT3847_100062C.1
catttgctcatggaaggatgtattttcaatgccagtgttagagaaggttgctctagatgaacttttgtgcggaaaagttctacctcacttaagagtcatatcagaaaatgttcaagatgcaataacaagaacagaacgaattattgcttccctatctggggtctggtctggtccaagtgtcattggagacaaaaagtatgttgatgccgcaaattgcagcctctgctgacttatgtgctgtcacttggaaggattctagagagaagaaatgcgccagagagtgacacaagtcatctagctcgtcgattaaagaaaattcttgttgacctcaatgaatatgatcatgctaggaccatggctagaaccttccatctcaaggaggcattgtgagctcactgggaagtgggaattcatgtttcattatacttattctcttggtttgtcgttgaatctgggcctaaggttgccccttctcgcgtgcaattttttgtaaatgaacacaaactattcatgtgattaattatgaggcttgaagttgaaacatagttgttggttattcatgtgaatgaagtaggcatgcccttttgggatcctatgttaagggggaatttgaaaaaagttttttttttttt

SEQ ID NO: 70 - DNA, 428 bp, Glycine max
  Clone ID: PAT_MRT3847_100063C.1
tcggaatgtcctattcctggcgaaaggagggaggcgataagacatgataatcaggtgcttaggagcctattggagtgaccctggccatcccaagctatacaaacacgtgtatatgactagttagcatagttcctatgaaccgggacagagctgactacgaggaagcatgagaaagctatgacgttaaaagattatataaggaatattaagatctgcatacacactagactctaccagtttggatattacactgccataaattgacgctgctacttatcttatagataaactagctctgaaggctggcaatgagaatgatgatgatgaagctgataccgttggatactgcacattcatcgtccagaatgtgacatgagtacccgacaactgacttaagtttaactttcttggtaaagaatctatcaagt

SEQ ID NO: 71 - DNA, 286 bp, Glycine max
  Clone ID: PAT_MRT3847_100064C.1
ccccaaacaatgacaagggctatactacaatatagggtttggtggaatcatcaaaggaatactttccaatcaaacccaactttccttttttaaaactatgtacacaaataacttttttaattaaggcaaacccctcaatagcagtaaaaaaataaaagcttgcccccaagggcaattaacttttatcattgggacatcaacatggcctttccacaaagtcttattagcattcccccccccattgtttgacccctggaccattttgcttgggcaaaaagggatcaat

SEQ ID NO: 72 - DNA, 354 bp, Glycine max
  Clone ID: PAT_MRT3847_100065C.1
atgtcagaaaccctaacccaccccactaatgaaatcgaagttgcaaaaaacacaacacactacaacaacacaacaccaacacaaaacaaagaaaccctaaacaccaaaagaaaaaccaacgctaggaaccctaacccacccattggtgaaatcgaagccgcaaaaaacacaaaacaacaacacaacatggggaacaaaataaaaacaaaagaagcgcaaaagcaagccaaagtagaagagaaaccaacatcagaacctctaacccaccccactggcgaaatcgaagccacgaaaaacacaacacacaaaagaaaccctaaacaccaaaagaaaaaccaacatcaaaaaccctaa

SEQ ID NO: 73 - DNA, 327 bp, Glycine max
  Clone ID: PAT_MRT3847_100066C.1
cggacgcgttcgcccacgcgttcgcccacgcgtccgataaaaaaaaaaaatggaaggctacaaaaagcaaaaaggtgctactcttgataaaggcccataaaatttggagccttaactaattaattcatctgattgtgggcccgggatacatcccttcgtgtgggctagggagcgcacacgtggcgcttctggcagtgcctgttactttaccactgaagaccaagtggataacattgtggtcgacaaaaacactcgtacaactcctcgagaccttcgcaactatggtcccacaaatctcgctctctacactgctggtcagtttcccta

SEQ ID NO: 74 - DNA, 609 bp, Glycine max
  Clone ID: PAT_MRT3847_100067C.1
atggcgcggacgaacttcagcagccgcgccgctaacttgaagacgacagaagggggtattcggcagccgcgatatcatcttcttatagccactcgaaaatgaccaagagaaccaagaaggccggtattgttggaaaatacggcacccgatatggtgctagtttaaggaaacaaatcaagaagatggaagttagtcagcacagtaaattcttctgcgagttctgtggaaagtatgctgttaagaggaaggctgtgggtatttggggctgcaaagattgtggaaaagtgaaggctggaggtgcttacacattgaacactgccagtgctgtcactgtccggagcaccattcggaggctgagagagcagactgagagttgaaagcagtttacacttttcatttgttttcaaatcataaattttgctgctgtttattttgaaattagcatacttgctttggatagttgatggaattttggcaggtctttgttaagaatattagtaatgtaactttgaatgatatttagttttgtattcttgagtcatttgatggtgagtgagttggtaatttttccttcctaaaaaaaagagacgagtgcctcgtgaaacttgg

SEQ ID NO: 75 - DNA, 541 bp, Glycine max
  Clone ID: PAT_MRT3847_100068C.1
agctggtactggtgtacacagcatcgggatggatcaggaaaccgcgtataccagactggttaagtagaaggaaccccatgtatggatgcttgacataccctaaagctaaattccctggaatggatggtcctgaaaagaggtgcactgacattgcatactctctatggtatactgacagtgatgatagcctgtgataataacatgcattgcaggtggtaagcatctcgctcatctgattattgctaaactggatgtgaacaagtgaaactaatatacgtgcccctgaatatgtccgcctttatggattttgtaccacgatgcccctgaggttcccaagcagtttaaggtgccactcaaagacacaatgctttatgagtggaatcatgcatgttaaaaatcactatggaaagaagacttgagaaaaaaaaatatatggcggacgaactatagtataatggggtaatacttccgattccgatgcagaaaaatcgaaacactagtaggaaacacacccttagtggagaagcttcatatatgagac

SEQ ID NO: 76 - DNA, 1350 bp, Glycine max
  Clone ID: PAT_MRT3847_100069C.1
tgtgagcttgagattttagcccacgggcagcgtcttcttcatcaacggtggcgtagggatcaatccgtttgatagaaaaaccatttccatttccaatggctaacgaaatccctcacgatgaggtagtgtgcgttaccggcgccaacggtttcatcggttcgtggctggtccgaaccctcttggagaaggagaacccacgctacaccatccacgccaccatcttccccggctccgacgcctcccacctcttcaacctccacccctccgccgccagccgcctcaccctcttccccgccgacctcctcgacgccgccgccctctcccgcgccatcaccgcctgctccggcgtcttccacgtggcctccccctgcaccctcgaggaccccacagacccccaaagagaccttctcgaacccgcggttcagggcaccctgaacgtcctaaccgccgcaaggcgcgtgggcgtgcggcgcgtggtgctcacctcctcgatctccgcgatggtgccgaacccggggtggccggcggggcgggccgcggacgaggcgtcgtggacggacgtggagtactgtaagggaagggggaagtggtacccggtggcgaagacggaggcggagagggcggcgtgggcgttcgacggcgtggaagttgtggcggttctcccggcgacgtgtttagggccgcttctgcagccggatctcaacgcgagctccgccgtgctgcgggagctgatgatggggtcgagggagacgcaggagtatcactggttgggtgcggtgcatgtgaaggacgttgctaaagctcatgttttgttatatgaaacccccactgctgctggtagatacctctgcaccaatggtatctaccagttttctagttttgctgccatggtctctgaattgtaccccgaattccctattcacaggttcccagaagaaacgcaacctggcctgacagcatgtaaagatgcagcaaagagactaatagacttgggtcttgtcctcacaccaattcaagatgctgtgagagaagcagtggagagcctcatagctaaaggcttcctgcaatgcacaccctcacagagttagtatttagatttcatttagtttttctcgtaggcataaataaccactggtttattttcttttccccctttgatacaaggtagaagtaataatgaatataaatatgccaagtttattgaggtagaagtagagtaattaatctcttcttttgttatatttatcggcttcgtttggaaagtaacattcattatcacttgtcaagttgtcctgacatggtattgttgtgactgctcattttatgtacaagagttatggttgagacttg

SEQ ID NO: 77 - DNA, 1849 bp, Glycine max
  unsure (1)..(1849): unsure at all n locations
  Clone ID: PAT_MRT3847_10006C.1
tacggctgcgagaagacgacagaagggggtgggattttgagagagagaaatagagagagaacttcaagtgagggtgagagtgacacaaatctagagagagcactagtactctaaaagtctattatattcttcaaaatatgaccatgcatcgcgagtcttgggcttttgtcttcggcgttatgggcaacatcatctcctttggagtgttccttgctccattgccaaccttttaccaaatctacaagaagaaatccactgaaggtttccagtcacttccttatgttgttgcactgttcagtgcaatgctttggatttactatgctttcgtgaaaagggaaactgccctccttctcattaccattaacacatttggaattgttgtggagtcaatttacctttctatcttcctaatttatgccccaaggaagccaaggcttacaaccatcaagcttcttctcttactgaatgtgtttggattcggggccatgcttctatcaactctctacctgtcaaagggagcaaagcgtcttgctatcataggatggatttgccttgttttcaacatcagtgtctttgctgcacctctcttcattattaggcgagtcataaagacgaggagcgtcgaatacatgccatttactttgtccatgtttttaaccatcaatgctgttatgtggttcttctatggccttctcctcagggattattacgttgctcttccaaacacgcttgggtttgtcttcggcataattcagatggtgatgtatttgatgtacagaaacgccaccccagtggcactagaggagccagtgaaggctcaagaattgaatgggcacatcattgacgttgtgaagataggaacaatggaaccgaatcacggtggtgctgttggcaaagtctgatatgatttcgtcattgagattatatgaatgtggagaaacaagggatcaatgacaagaaaagttaaaaaaagaaaataacctaattaaacgttcaattactttactgagtgaggtcacatctaatatcgctcatatctacaatgcaagaatagtacgtagtctttggtataagtgtttcgtttgattaatgtaaaggtgtggtttaaatttgcctgttcgggtagctgtaactgttgggcgcaagaattagcctctctaatttggcccatatcactctcatattgtactactacgtgtaacgtagtatattctcttttctcagtgtatcccccagtcaaactcattttaattcacttttcccttgtatacgtaattaatgttcgagtaatgaaaattaattattttagtaaaaaaaaaaaaaaaaaactcggagagatagagagggtttgttttgttcttattgtgttgtctaattgagaatagagaaaggaatgggttcagcgacatcaaggattgtgttccgcattgtggtggtggcgcttctgcttcttcttctcttctacatcggtcgccctctgtattggaaaatctctgccaccgtccacgacatccgcaacaacaagcaaactgtcagacaaggtctttcccaaatcgtcatggaggctcagaaaacggtgggttggtatcacgacgagtctgactcagggattcgtgctaataacagaaagttgcttcttcataaacccctttccacagtttttgcttagttagataaatacatgtaagccagattttcttttttttttcctttcatgattctgtgatttgcttatctggtttgtatcttatacggacaataatgaggtagacgaatcgaatcttattcaattacataatgaccatcatattctagatttangggtttaaaaaaaaaaaaaaaaaaaaaa

SEQ ID NO: 78 - DNA, 351 bp, Glycine max
  Clone ID: PAT_MRT3847_100070C.1
tagagtcggcggccgctcgcgatctacaactagtagcaccataacatatttcaggcttggaattgatggcaacattagggggtacacttacttccttgatgcgcgtgatggagaatggtaagtgacctactctttattcttataaatattcccgatgagaagttagcgcctaaatgcctggagagactgaggggaaatttggtgttcgtgtgaattataactcaattgtgtgcgattagtcctattgaaaaattggactacttttggttggacgcaacatattgcacttggcaaagcttgtgacaattatgcaaaggctattgatttctcacctactacaataattgaagg

SEQ ID NO: 79 - DNA, 384 bp, Glycine max
  Clone ID: PAT_MRT3847_100071C.1
accgttcgatcccggtcgacccaccgtcccttgtgtgatttggatcacattcttctttgcttcgggtggcgggggagatcccagttatttaatgtgaagtttctgttacattggtcataatagtcttgtaagtttattgtttttctgggttgtagtgagcatttttgggctgttggtctagctaaccataatttctgtattctaccattttcttgataaatgagttagtctagtttgccttcaataattttattgtttttttattttttatttttattgtctttctctttacttttttcattcttttttaatcttctcttttttctccatatttttttttatttttattctctctttcttttttcttttttatttgtttttttt

SEQ ID NO: 80 - DNA, 932 bp, Glycine max
  unsure (1)..(932): unsure at all n locations
  Clone ID: PAT_MRT3847_100072C.1
attgagaaagtaacagtggatagtggagcacgagcccatatcatggcatgggaccaagagaacaacaaaannnacatggagatccaaatccaccaccacaaaccttacaatgggaatcaaacagaaaattttaatggtttgactcaagttgtgagagttagcttcaataattgcattcaattcaatttctcagtataataggagggcccaaaggcacctttctcctttgaaaatagatgtgacattagagctaacaaaagaaagaatacacaaccccttttttcccctaaattttttaccatctagattgaaacaaatatctacatctatctatactactactactgtacaagaatttcttgattcttcaatccaatcaggtgttaattaatggttgttacactaattgggagtttcctcttcatcttcactgttggaaagtaaataatttcatcctcctcagcaacccatctgtaagttgtaacaagatgatgaaggaaaatagagagctctagccttgagagttctatgccagggcatagtctctgtccaccaccaaatggtgtaaagcaattgttattagtcccagtcccaatattctcccatctccctggattaaactcaaaaggattttcataattcatgccatccatgtgaacagaagtaagagatgccacaacacaccagtccttaggaattaggtaccctttaatatctacatctttgactgcttttctccaaatggcattgacaatatttgccattctaagactttcgctgataacattttgtgtaaatggcagtgaaaggtagtcattccatgcataatcatctgaattattcttccgcctcttcaattccatgttctcctccagtaatttggatagagcaacgggatagttactgagaaacttgacagaccggacgcgtgg

SEQ ID NO: 81 - DNA, 436 bp, Glycine max
  Clone ID: PAT_MRT3847_100073C.1
atataattgacacttatctggcatcacatgagctgaaggccgaactggatgttgcagggatccacctaactgcgtactctgcgaagactacactgcactgaatgtacagatccttagcaccacagacgcaagtcttgcctatgtgagatataaagtgtctcatcgtgttgagcaccgcgtgcactctaccttaaattcatgtcagagcaccgactgcccttggatgtaaaactactgatccatgtgctgactatatcgcgtacaggctaacggaccctctaggtggaaaattaatgagtctatatgatatcaaccaatggactatggctgtccgctcgagtttgactagaacacctttttcaacggaagcacattaccaccactgggtaaagcataccttgcaagggatttggcaatgaccgatttaaccgcttct

SEQ ID NO: 82 - DNA, 449 bp, Glycine max
  Clone ID: PAT_MRT3847_100074C.1
cggaaagagagagagaagctagagagagaaagagaccaatctaattagtgtacaataaacagagacgctgtgtgggtgtggctctggttgtactagacagagggatagcctatgctgcactaaagcccacaccgtcaaaccttacgtctcatcattgcctcggctctggaactcaattggcctgaaccatctcctgctcacatgcctctcatacgctcaggctaacataccgctgggactccgtcacctggggacatgtacttgagctcgaccattcctctctaatcctccattacctgacacactatctcatgttacccatgcttgcagatgactgttaacgtcacatcctatccgattcacaacactatcatcataccctatgatgctgccaccatccatggagaacacgaatccattgatgctgccgctctacatcaatgctctct

SEQ ID NO: 83 - DNA, 335 bp, Glycine max
  Clone ID: PAT_MRT3847_100075C.1
tctcattcacgcctgcctaaactctcaatttctttccagcacaaccacattctcacaaacattaattactcaatttacagacgtgttatcttcctatcaaaaagagattgcataaacaaaccttttaaaaccttccaatacctttcaaaactcgtaaacttgcaccttgaaaccactcacccctacacattcaatatgttcaatcaattttaaatttccttctgccttaacataaaatcctttataaccttaaattttccttatccgctttaacatttctttcaaaaacccatgcttcaccctttctttaaactactaacaatccttttaattct

SEQ ID NO: 84 - DNA, 405 bp, Glycine max
  Clone ID: PAT_MRT3847_100076C.1
acctgatggccgctgcgtcttggtatgcttaccatcagcgagaaagatggcaagggagccattgaggcttgcccgccaggaggagcgcccacagcctctgcacatgatatgagcagagatgctgctttcattgctataagaatagctcagacccaggcttatgcttacagctgacgatcctcactccttaggccgtgtgtggaccctcgtgggcatggggaggagctctcaatgagtacgcatgcgcctgtgccgcctgtactgctgcggcagcgagctcaccagctaccgagaagactactgtagctccaaccgagatccagaccacacagctcgcccagctctgcctcgaccttatgctccgagccccctcgcaccaagaatagctggatgctgatgattgat

SEQ ID NO: 85 - DNA, 265 bp, Glycine max
  Clone ID: PAT_MRT3847_100077C.1
atgaaatgagtaattattagtgcccaaattgcgataacttcatgtctattgtcttgcaagatgggtgacgcgtacaaaatgaaggtgaatgatctagttaaaaaactaaggcaagtgttgttgaatcacacgaacgtcaataccaatccgtactagtgtatcaaattattcaaacagattgtcgtgcattggctcatcctttttttcttctttttgtggatcaatcgtgttggaagtatgaactttgaatttatgaaggtttgac

SEQ ID NO: 86 - DNA, 280 bp, Glycine max
  unsure (1)..(280): unsure at all n locations
  Clone ID: PAT_MRT3847_100078C.1
ttagtggaaaaggtcgggcgaaatatgtttatcggtctttatgggaacaaaactggattaacatctcggtttttccactctggcaaatgttgaaatttgactaaaaaaggatttcagaaattttctaagtgctggctgtggctcnctnnncntgggcccgaacggaatttaaataaaaggggtgctttttgtccagtccatcgagcagataactaaaaagtggcatttggatgtatattccagtgccaagagagaccctcagttcattattttcccaaac

SEQ ID NO: 87 - DNA, 525 bp, Glycine max
  unsure (1)..(525): unsure at all n locations
  Clone ID: PAT_MRT3847_100079C.1
gtttccgtcatcactgtatgacgtcctccttctttgggggaggggggggggtggttataacgaagcggtgcagtggctagataaccataaagacaattagctaaagcgagcgaaggtacgaaagaggccgctgattggcgatgatggcagtgaaggccgaggcgacttgggatatttagcacggataacggtgtacgagctagaataaatcagggagacccaataatgatgattaacgtgccaaatgcaaaaggtaacaagtgctaagccccaaaatacagttaaggtcagtatttaagtcagcctatgcgagaggaattttagagcgattaagtgcaagcgccggagttgtttgattaatagacaaatatacccgagataacctaagggtaaaggtaccttgtatgttaattaacacgtgcgagatacaggggaccatattaggttaggtaaatgcaagangtacaantgcaatggtacacgtaccacgggtgttttcgtcatccccaaaaagagagttggcag

SEQ ID NO: 88 - DNA, 211 bp, Glycine max
  Clone ID: PAT_MRT3847_10007C.1
gaacagcgccatgtagttagctctctttctcttttgtgccttcaccacctgatacctaccttcagccatcgctgatttcatgctcaataatgaaggtgaccctattgaaaatggtggcacatataatatgttgtaagacataaacagaattagggggagtaggaacagccggcgactagcaaatgaaagatacgctgtcactgaggtgcat

SEQ ID NO: 89 - DNA, 599 bp, Glycine max
  Clone ID: PAT_MRT3847_100080C.1
gaacagtgaaggatttatcttccagaaaggctcaccagtggccagagatttttccaaagctatactgcgtctcttggaggatggaacagtgaaggaattagaagacaaatggttgaaacctgatggagactgccacaataattcgacctcacagggtacagaaagtttgaggcttgaaagtttctgggttctgtatgtgatctatggtgccgcttctactatttgttttctacttcatacaatcctgtcgctgaaatctagacaaacaacccgggatgaggcacgagaaggtaatgccaacccaggtgaggaaagccgatgaaaaacgatagttataatagccaagcagatttatagcagaaataatgcaacagcgacacccgtgcatcactagccacaggctccacaattgccagatatggtaacagtgtattcacccccaacggttactagtcgcagctcttaatcaactagcagctttttcatctctagatctaggaaggtaacttacgaagaaaagtatttcagttatcctgcttttgtaccttggtcactaactttttaaaaattctaatcatatactgaacttcagaagtttt

SEQ ID NO: 90 - DNA, 333 bp, Glycine max
  Clone ID: PAT_MRT3847_100081C.1
gtttcgctttcggggttgattgggatgatgaggaggatgtctttttggaagctgctttaaatgcagcacttagtggggactatgtttaggactatattgaaggaatatctgttggcacatctgatgggcttcctcacgtgctttgacacaaaagtggagagagaggcaaaaggagagatggttctgaggatgcagaagagacgacaatcattgcgggaaccactgtcgacaaggctatcaacaagctaatagaaaaacttgctacaattgttgctacattgtgtggcattgaatgtaccattgatgagaaacttactcgtgacaaaactatta

SEQ ID NO: 91 - DNA, 196 bp, Glycine max
  Clone ID: PAT_MRT3847_100082C.1
attaattgtcccgacccacgcgcccaccaacccgcgggcgtcctttgtttttttttgtttttccccccggcaaccaaagagggggggagcgtcctttataattggtgaagaactcctcgctgctagctcaatgtcgatcaaatatctgcgcgtgctctcactcgacaacacagttgcctattgcatctggattcca

SEQ ID NO: 92 - DNA, 389 bp, Glycine max
  Clone ID: PAT_MRT3847_100083C.1
taatgggccagctgaatacgagcttttatatgatgattatatcgcgctagccaatctaattgtagacagtttgacaacagatgaacgtgtaacaccactctcactaactaagttttgctgtcctgcttgtaatagtacaactaaattgaactcaagcttagatgtgcagcatcttccctactttatgaagatgaatgcaattctaccactcctcacgccatactctcaaaagtgccattctaatatttagaccatattaggcttgtctaactttaactcccctcccatcaacaaaggactctcaaggtgttttacatggacgctagaaagtaggctcgttatcacagcatgcctctgcatcacgttccgaataccctggttcaaatgaa

SEQ ID NO: 93 - DNA, 343 bp, Glycine max
  Clone ID: PAT_MRT3847_100084C.1
acgcacgcgtccgagatgtctcacaggaagttcgagcaccctttgcatggttccctcggattcctccccagtgagcgtgcatcacgccaccgcggcaaggtgaaagcatttccgaaggatgacccatcaaaagcccctcatcttactgccttccttggttacaaggctggaatgactcacattgttcgtgaggttgagaagccaggatcaaaactccacatgaaggagacttgtgaagctgtgacaatcattgaaactccacccatggttatagttggagtggttggttatcttaatacaccacgtgtccttcgctctcttgccacagtatgggctgagcatt

SEQ ID NO: 94 - DNA, 348 bp, Glycine max
  Clone ID: PAT_MRT3847_100085C.1
acgctgaagaaatgaaatgaagaatgttcataaaaccggaaacaaaaggatgaaacatcaccgggtcgggtcgggtcatacaaaatcaacggttatggttgttgactcgtccaaaatccgcaagcttcctggaacggttggcgcaaaacgacgccgcggcggaaagatgaggcttcgccgccgcggctctgacctccgccgctgccgccatctccggcggcaatcccttgtggttccacctccggttcggactcgcccgaactagaggactcagccaaagcgccatacccgaaccaaacgagctctttgtgtgccctaacctcgaccgccgcgccgacggggccaccg

SEQ ID NO: 95 - DNA, 1336 bp, Glycine max
  Clone ID: PAT_MRT3847_100086C.1
ggctcgagcagcaagggatggcatagtccttctaaagaacacaaactcactcctcccactcccaaaaacaaaccccactattgccttaataggccccaatgccaatgcctcatcaaaagttttcctaggaaactattatgggcgtccttgcaatttggtgacactcttgcaaggctttgagggctatgctaaggacacggtttaccacccggggtgtgatgatggcccacaatgtgcttatgctcaaatagaaggggcagtggaagttgcaaaaaaggttgattatgtggtgttggtcatggggttggatcagagtcaagagagggagtcacatgatagagagtacttagggctgccagggaagcaagaagagctcattaagagtgtggctagggcttcaaagagacctgttgttttggtgctcttgtgtggaggcccggttgatatcacttgggctaagtttgatgatatggttggagggatcttgtgggctgggtacccgggtgaacttggaggagtggcactggcccaagttgtctttggtgatcataacccacctggaaaactaccaattacttggtacccaaaagatttcatcaaagtaccaatgacagacatgaggatgagagcagatccagcatcaggctaccctgggagaacctacagattctacactggtccaaaggtgtatgaatttggctacggcctaagctacacaaaatattcctacaagctcctctcactctcacacaacaccctccacatcaaccaatcatccacacatttaatgactcaaaattctgaaaccatacgctacaagctggtttcggagttggcggaagaaacatgccaaaccatgttgttgtcgatcgcattgggagtcacgaatcacggtaacatggcggggaagcatcccgtgttgctgtttgtgaggcagggaaaggttagaaacaatgggaatccggtgaaacagttggtggggtttcaaagtgtgaagttgaatgcaggggaaacggttcaagtggggtttgagctaagcccttgtgagcatcttagcgtggcgaatgaggctggttcgatggtgattgaagaaggatcttatttgttgcttgttggggaccaagagtacccaattgaaatcactgtttgatcatgcaacaattggagtgttcaatcaatcaagtaatgcattaaaggaataaaaactattttgcagcttctttatgaccattctgtatgttatatatccgaatcctctgtatttcaaaacaataggttgttttacatgcatcaagaaaaaaataataaatagataaaaaaaacaattttataaaaa

SEQ ID NO: 96 - DNA, 480 bp, Glycine max
  Clone ID: PAT_MRT3847_100087C.1
ccacgcgttcgtcctttcgttctatttgtattatgtctttgaatacatttgttttttggagaagaaatgttccttacgtttttttcaaaaacacaaatgattgtcatttactgctgcttgattaggtctccaatcaggctgagctacgcctaagactttgtccaactggatgggagaaaatagcagctgctatgatgagacattgtttgttatttatagaaaataacggaggggcctttttttttccaaaggacaatgttttcaaagacataatacaaataaaacccgtgggcggacccggggggcccccctggaattccagactggttcccgcgggcgtcccactttttcctttttggagagggaaaaaaacttggggtaactgggggcatatttgctccctggggaaagagaaaacccgggcgaaacccacctaaaaatactggccggaagccttatttgacaagctgggggggccca

SEQ ID NO: 97 - DNA, 250 bp, Glycine max
  Clone ID: PAT_MRT3847_100088C.1
gtcctttttttttttttttttttatattgttgtttttttttttttgtcttttttggttatggtttcttttgtttcactttttttgtttttttcttttacaaacgcgagaaaaggtggcctcccctttggggggatcaagggccgggatggatgacacccgtgaaagatgattggtgtgctattagggaatagcgggcctctctttatctcttgaaaaggggattctggacctctggggtcaccatagggc

SEQ ID NO: 98 - DNA, 593 bp, Glycine max
  Clone ID: PAT_MRT3847_100089C.1
gcgatatttaaatttgtttggtgcaagaataaaatctctgcctgagtcattgtgtaattagcacaatctacaaactctggtgtttgatgattgcgaaatgttgaccaggtgtcctatgtgacatgcaaaatctatgtatacttgtgtcatattcatatggatggtactcgtatagaagagatgtctataagaatgggaatgatgagtcattctcagacaataggatttgttcattgttggtgaggataaaaagaccatagtcgaagaactgggaatggatgcgatttctattagggatctgtaaaatgtaacacccagcagtgattcattgtatgcgaagatgaaaggtgctaagaacatagatgattgatcagatcaagggactaatggcaccgacttcgaaattgaatcatacgtactgtgcaagattgaaacctcgcccaggcaagcgatgacttacttcttaatcgtatatataattagtcctcccatgcattacatcagattttataacctatgcgaaactggaaagagttaaaacactatagtaacattgaccacagaagataaactctagggtctatggtcataga

SEQ ID NO: 99 - DNA, 881 bp, Glycine max
  Clone ID: PAT_MRT3847_10008C.1
tgactgatagctacaatgatggaattggaactgtcacatattggtggagccattctatgatatctgatcagtcatacaaatctatcctcaaatactgcaatttcacagcagaagaaacatctggaaaatgtgatgatgtttatagttatgcggttaactatgaatttggaaatatagaccagtacagcatctatacgcctacgtgcacagcatcacaaaacaataccgttaggcacatgcgattcaagaatcttcatctgatttctgggtatgatccgtgtactgaaaattatgcagagaaatactataaccttccagaagtgcagaaagcaatgcatgcaaatgttaccaacattccttacaaatggactgcttgcagtgatgtgctcctgaaaaattggaaggattctgcaatttcagtgttgcccatatacaaagagttaattgccgcgggattaaaaatatgggttttcagtggggacacagattctgtggttccagttactgccacaaggttttctctcaaccaccttaacctcagcatcagaactcgctggtatccatggtactctggtggacaggttggtggatggacagaggtgtatgatggactaacttttgcaacagtaagaggagctggccatgaagtacctttatttcagccaaagcgagcttacattcttttcaagtcttttttggcagcaaaggaactgccaaaatattgacatgtagtaacacgttaacattaattaaattgcaaaattcattagtgttagtatttctttcggctagggtgttaattttttaaatagagattctagtaacaatttttttttttttcaactaattatttgatgaaattaacatgaatctcattggat

SEQ ID NO: 100 - DNA, 1127 bp, Glycine max
  unsure (1)..(1127): unsure at all n locations
  Clone ID: PAT_MRT3847_100090C.1
cgtaagnctcggnaattcggcttcgagggaaaagtcgtacttaaatagacagaacaatggacatggaactatgttttcaagacgatttatccatgcaggaccatatgataatctgaaagatattgccatgaagatcttgcaaaaggaggtttcaacagttcctattatccattcatcttctgaagatgcttcatttccacagttactacatcttgcttcactttcaggaatacttaaatgcatttgtaggtattttaggcactgctctagttccctgcctgtacttcaacttccaatctgtgcaatacctgtgggcacgtgggtgcccaaaattggggaatcaaatcggcagcctctagcaatgttgagaccaaccgcttctcttgcgtcagccctaaatttattagttcaagtgacataacagctttggcaaagaacagagcatatgcacatattaatcttgatgaaatgacagttcatcaggctttgcagttgggccaggacgcatatagtccctatgagcttagtagtcaaagatgtcagatgtgtttgcgtactgattctctgcataaagtgatggaacgtttggcaagtccaggtgtgaggcggcttgtaattgtggaagctggcagcaagcgcgtagaaggcatcatagcactgagtgacatattcaacttcttccttggttataacagttagtgtggtggtcatgacacttaatgcatatagtcaggcaaccatctcggcccagccactaaaaagagattccagagcttttacacggtgatttgatctttatttcattgaaaatacaattggattggcctcttgcttcattgccttgttttaagattttaggcttgagaaagaggcctgtaaattttagtctgattgccccaaatttattcatctcacccccagtcatgttatgttcaaatatgttgtgctcctgatatcgatacacaagcaaaggggaagtgcacaatgtctgtaattgtttcatatttgtgaagatacaaatttcggaggggggggggggcgcggtcatgggaggaccaatattcgtcaaaatattattgttttgttgactaaaaatggttctcgagggatacagcgtagttattctc

SEQ ID NO: 101 - DNA, 1225 bp, Glycine max
  unsure (1)..(1225): unsure at all n locations
  Clone ID: PAT_MRT3847_100091C.1
gcttgaaacacataccatatcagcttggaaatcatgggtccaatctaacagaagaggagcttgaaacacataccatatcagcttggaaaggaggaaaatggacaggatttacacaatgttttatccgtgcagggccatacgataatttgaaagagattgctgtgaagatcctgcaacatggaatttcaacagttcctattattcattcagaagatggttcatttccacagctactacatcttgcttcactttcaggaatccttaaatgcatttgcaggtattttaggaattgttctagttcattgcctatacttcaacttccaatttgtgcaatccctgtgggcacgtgggtgcccaaaattggggagtcaaatcgccggcctctagcaatgttgagaccaaatgcttcacttacttcagccctaaacttattagttcaagctcaagtaagttcaataccaatagttgatgatagtgactcattactggatattntattgtcgaagtgatataacagctttggcaaaggacagaacttatacccatattaatcttgatgaaatgactgttcatcaggcattgcaattgggccaggattcttataatacttatgagctgagttgtcaaagatgtcagatgtgtttgcgaactgattctctgcataaagtgatggaacgtttggcaaatccaggtgtgaggcggcttgtaattgtggaagctggcagcaagcgcgtagaaggcatcatagcattgagtgacatattcaacttcttccttggttataacagttagtgtggtggtcatgacacttatgcatatagtcaggcaaccatctcggcccagccactaaaaagagattccagagcttttacacggtgatttgatctttatttcattgaaatacaattggattgacctcttgcttcattgccttgttttaagattttaggcttgagaaagagaggcctgtaaattttagtctgattgccccaaatttattcatctcacccccagtcatattatgttcaaatatgttgtgctcctgttatagatacacaagcaaaggggagtgcacaatgtctgtctgtaatcgtttcatattgtgaagatacaaattccggggggggaaattatgggaggaccatattcgaaatactcttgttttgttgactatctttagttcccgatggatagtgcgtaattggcattgtcaagtggtgatggg

SEQ ID NO: 102 - DNA, 637 bp, Glycine max
  unsure (1)..(637): unsure at all n locations
  Clone ID: PAT_MRT3847_100092C.1
agactgtnnnnnnnnnnnnattcaataaggtgattnnagnnnagtatttcgtnnngnncttttgcttgttgnnnctaatacttccttggagtaaaatgaaacttagatgggatggattatcttgcatgctcgagtggattggggctcagacccattggttgatgtggggctacctgcttgagttcaagggtaaaaatgtcttcttacagctttgggcggcaggcttactgtttctagcagccaacatatttatcctcgtcatgattattcgtcaccataaatatgcttcagttttcaaagctttagaatatgctaactccaagaatgcagctaagcttgaatgatggagagggacatagaagaggaggttaccgtacaggcattctgctctaatgaaataatgaactaaatacagaagacactgatcgtccaaggatttttcttaactagttagcgagttggccatacataaatactatttgacaatgttgtttttctttcagtttcagtggagagtgaattgtaaaagttacttctatgcttatgcttacattgctgagctctagaattttcagagaaattacacaccttttttgaggtatgagaaacatataatataatgtactgtttacaaaat

SEQ ID NO: 103 - DNA, 275 bp, Glycine max
  unsure (1)..(275): unsure at all n locations
  Clone ID: PAT_MRT3847_100093C.1
gagaaatgttttttactgataatttaaaatttttatttctctaggataatatacaatcaaacataacccaagtagcggggttacaaaccaaccaaaccacagactaatagcactcgaattagcaaccagatacacgcacaatnncttcctccttggggggggctccnaaacagancacaagaaagggaaaaaggaaaaananagagagagagagagagagagagagagagagagagaaacnaaggcgcagcccccgctactatgggcccacaaac

SEQ ID NO: 104 - DNA, 719 bp, Glycine max
  Clone ID: PAT_MRT3847_100094C.1
gccagccccagtctttgcgaccgggttggccaccagagtcaacaacacaagctaggccacaaccgaggcagtcttttattttatatagtataattcattctgtcatatatatctgtgtgtgtaacaatggtggtctttatttgcaaggaagaatatggtgttcccttgagcaatggctgggctgcaacacatgaatttggccacaagttttgcatctcaaatgaaggtgatgatgacgatgatgataatggcgtcatcgatgtggccccagctgcatagaagaatttggcagaaaaacatgcatagatgaggaggagggatatagtagctagcttagtagtcactgtaagcttcattctgtcgtcttgcttagttacatttgtgtttactcttggaatatataggttatagtgttatgcttgtgtgacataatagaatttatattagtaattatggcttagttcctctctctcggacccaataattttcttgtcgatcgtctttgacaatctattatctgatcatagtttttgtatatatagtgttgatggcaattggcaatgtacttgtaatgaggtgcaagcaaatttgatatatttggcataaactaattataaatggtttcctttaaaaaaaaaaaaaaaaaaaaaaaaaaaaaaaaaaaaaaaaaaaaaaaaaaaaaaaaaaaaaaaaaaaaaaaaaaaaaaaaaaaaaaaaaa

SEQ ID NO: 105 - DNA, 1879 bp, Glycine max
  Clone ID: PAT_MRT3847_100095C.1
gtcagcatctatttcaaggtttcgtcttttttgtgccttttttcccccagaaattcataaattcgtggaagttcgaggctcgatttgtccaagcatggattctgcaagggatgcgagtggtgtggcagggaccgtgctaattcccatgcggtttgtgtggccgtacgggggaagaagtgtgtatctaagtgggtctttcacgcggtggtctgaacttctacaaatgcgtcctgtggaagtgaagttggctcatattcaagttattcatatgatgcaacctgtttgaaatatattccattttttcaatttattcccacccctggaaaattaaatacctgcatttcctttttactcagataacttccttgcatctctaaagatattgattttaagctgcatcatgtataatatgttctggattccagaaatcatttcatgagaatcaatatcgacattttccagatggtgataaactgcacattctgattgtaaacttcatctatcttcaatatttggtaatgcttgttaaaacttgttgtccttttcttttgaaacacaagctcggaaatcatgggtccaatctaacagaagaggagcttgaaacacataccatatcagcttggaaaggaggaaaatggacaggatttacacaatgttttatccgtgcagggccatacgataatttgaaagagattgctgtgaagatcctgcaacatggaatttcaacagttcctattattcattcagaagatggttcatttccacagctactacatcttgcttcactttcaggaatccttaaatgcatttgcaggtattttaggaattgttctagttcattgcctatacttcaacttccaatttgtgcaatccctgtgggcacgtgggtgcccaaaattggggaatcaaatcggcagcctctagcaatgttgagaccaaccgcttctcttgcgtcagccctaaatttattagttcaaggtgtgaactttttgtctgaccttgaacatagtgtatcaaaaagaaaagcaacagagagaaagaatgaagaaattggtatcctattatacttctgagcccaagtaagctcaataccaatagttgatgataatgactcattactggatatatattgtcggagtgacataacagctttggcaaagaacagagcatatgcacatattaatcttgatgaaatgacagttcatcaggctttgcagttgggccaggacgcatatagtccctatgagcttagaagtcaaagatgtcagatgtgtttgcgttctgatcctctgcataaagtgatggaacgcttggcaaatccaggtgtcaggcggcttgtcatcgtggaagctggcagcaagcgtgtagaaggcattgtttcattgagggacatattcaagttcttcattggtgattagttttggattggtgaatggaaaagtaaaatggtatgtgctgtggttatgatactagagcatccatacaaccagccaccatcacttgtccaaccattgaaagtgctttctacacggtgattttatctctcatttcattgtaatacaattggattggcctcttgctttattgccttttttaagattttaggctgagaaagaggcctgtaaattcagagtatttgattgccccaaatttattcatctctccccattcgtattatatcttcaaatgtattgtgctcctgacatagataccagcaaggtgggggagcacaacatctgtaatcattcccatctgtgaagatatcaagtttgaagggggaaattattgggaggcccatattcgaaaaactcttgttttgttgactatctttagttcccgatggatagtgcgtaattggcattgtcaagtggtgatgggc

SEQ ID NO: 106 - DNA, 424 bp, Glycine max
  Clone ID: PAT_MRT3847_100096C.1
gaaggtttcccgtcatcactgtatgacgtcctccttctttggggggggggggggggggatagaaaatagcaaggcaaggaagcacccaataaggtaaccgctagatactacccacgtatgaccgtgaacgcaaagcggtaaccaacttaatgtagataaaaaaatagtaaacaatggagtcttccgataccagttttaggggtaacgcaacccaagtaaagcaagatggccagtatgtcagaagtttacagataggaaaagcgcaaaggtggaaagtagtggcgcaaaccaaaaaaaaaaaacgtaatgctgacacaaccaaaggtagtgcaaacattaggccagggtggtaagacgggggtttgggcgtgtaccgatttaaagccgaataaagatgatacgtaacgtatagataatggtagag

SEQ ID NO: 107 - DNA, 305 bp, Glycine max
  Clone ID: PAT_MRT3847_100097C.1
ctctctctctctatcccctttctgccgacgattttgtttgtccccttaggatcacaacgagcccttgttgttggtttgtagcttttgctgaaatccagctataatgaataaggttattgggcaacctgttaggggccttaaaagagaagtaaataagaaaagtgctgaaagttcctgggattgaacataaggttcttgatgctatcaacaatgaaccatgggtgtcctccaaggatcacttcttgcatatattgctcaggcaacgcagaaacccttatgaataccagatgataatagcaagaatc

SEQ ID NO: 108 - DNA, 192 bp, Glycine max
  unsure (1)..(192): unsure at all n locations
  Clone ID: PAT_MRT3847_100098C.1
cccaaanaaccggcgagaccaccgacaaccaaaacacancaccgaaggaaaacacgncagaaagcaagacgacagcancgaacaggaggcacgcacaaanccaaangagngcggaacaaaggaagaagccaagggcggaaaacacaaacaaaacgngggaaaccacgaagcaggaagcaaaggaagacaggg

SEQ ID NO: 109 - DNA, 113 bp, Glycine max
  Clone ID: PAT_MRT3847_100099C.1
gctataattctgcatcgaacatgaatccgtttttggtaccccatcttagagaataatggggtttgatcagctcatgaaccgaattcttcaatacgatccaattttcatagatt

SEQ ID NO: 110 - DNA, 149 bp, Glycine max
  Clone ID: PAT_MRT3847_10009C.1
tttttcatcacgtctgagtcaatttgactctcggctgcaaacaatgagttacagaaggaatttacattacatggcatcaatgcctcatgagaaacaccagacttccatgtacagctggtcaacaaaaatataaagaccgactctcaccc

SEQ ID NO: 111 - DNA, 325 bp, Glycine max
  Clone ID: PAT_MRT3847_1000C.1
tcgcacggctgcgagaagacgacagaagggggaggctgccaatgtaagttctttagactactctactacaggactaccaccgatctttgcattattcaccacaatgcgtacattagatgttcatgatgattttcatactgatcatcatgcccaagaatactcatagttagaggatcaagaatcatcacaggcagcacaattgacaaaccattactcatcacatcacaggattctccttgtttggagaccggagactttccattctttctttgctcggccacaccctttagttctgctaacaaactagttgccacttcctttgatt

SEQ ID NO: 112 - DNA, 283 bp, Glycine max
  unsure (1)..(283): unsure at all n locations
  Clone ID: PAT_MRT3847_100100C.1
atggantctacattgctccagcttttatggncaagcttgtngtncncatnttccaagaacttcatgaccctgcccaacatcaaggtncctctcatncttggtatctggggaggcaagggannangaaaatctttccaatgtgancttgtctttgccaagatgggaatcaaccccatcatgatgagtgctggagagttggaaantggaaatgcagganagccagcaaaactgntcaagcagagataccgtgaagctgcagacatgatcaagnatggaaagatgt

SEQ ID NO: 113 - DNA, 176 bp, Glycine max
  unsure (1)..(176): unsure at all n locations
  Clone ID: PAT_MRT3847_100101C.1
aaagcggggaaagaggctagagatctttgaaattcaagaatatcattatcgacagattcncancgaaaaacatctcacagcatggtttatcgccatttggattattagctcttcctctgtttcctctgtttagagatctctgtatcgtcccttcgattgcacggtttggaccaaga

SEQ ID NO: 114 - DNA, 3336 bp, Glycine max
  Clone ID: PAT_MRT3847_100102C.1
cggacgcgtgggcttttcagctactttagggctctctctctttcttcttttctttaatacttaattcggcttttttatatttcttttcccctttttctcttttctgactaacttaatcaatttattgtggcttccgggaacagcctacctccctctccctcctcccccaagcacgcccttctctcttccaatttctcttctctgtccaactcaatcgattagtttagcttccgcggacagtttcagggatcatggctagggttttagttcagtctactggtatgcctggcctactgagtgggcaaaggcacgggaagcataagggatcaggaaaatcgaaaagatctgtcaaaatgatgagcaccttacgaatgacggcattaagaatgtggagtttctccggattacgtactcttaatcctatggattctttgtcgagaccacgccacacttttccgttgaagagaacatctgggcgagcgagggctaaaagatgtgtacctaaagctatgtttgagcgtttcactgataaggcaatcaaagtcattatgctagcccaggaggaagcaagacgactgggtcacaattttgttggaacagagcagattctattgggtcttattggcgaaggaaccggcattgctgctaaggttctgaagtcaatgggaattaatcttaaagatgcacgggttgaagtggagaaaataattggaaggggtagtggatttgttgccgttgagattccgtttactccccgggcaaagcgtgttttggaattctcactggaggaagctcgccaacttggtcataattatattggatctgagcacttgcttcttggtctccttcgagagggtgagggtgtagcagcacgtgttcttgaaaatttgggtgctgatccaaacaatattcgtgctcaggttatccgcatggttggtgagggtgctgacagtgttggtgctactgttggccctggaagtagtaataacaataagatgccaactttggaggagtatggcacgaatttgactaagctagcagaagagggaaaattggatggtcccatgggcagtgaagttgacattgaacatattgtctaaattttgggtcgtcgtaccaaaaataatccttgtcttattggggaacctggggttggcaagacggccctggctgaagatcttgcccaaagatttgaagatggagacaaattttaggtcgtcggactaaaaataatccttgtcttattggagaacctggtgttgggaagacagcaattgctgaaggtctcgctcagcggattgcaaatggtgatgtacctgaaaccatagagggaaaaaaggtcataaccctcgacatgggtctgcttgttgctggaactaaataccgtggtgagtttgaggagaggttgaagaaactgatggaagagatcaaacaaagtgacgagataatacttttcatcgatgaagtgcacactttgattggagcaggagcagcagaaggggcaattgatgctgctaacatactaaagccagctcttgcaagaggtgaactacagtgtattggagccacaacattagacgagtacaggaagcacattgaaaaagatcctgctttggagagacgattccagccagttaaagtgccagagccaactgtagatgaaaccatacaaatactgaaaggacttagagagcggtatgaaattcaccacaagctccgctatactgatgaggctcttgtagctgctgcacagctgtcctaccagtatatcagtgatcgatttttgccagacaaagctatcgatttgattgatgaagccggtgcacgagttcgagttcaaagagcacgataacctgatcatgcaggccagatagctgaacttataagacaaggcaaggagatgagtagaagaggctgtgcggcaccaagtaattggaaaaggctggagggctacgagatagagagttgtatcttaaggcacagagctcaacacgtgtagaaaaaggcaaggggatgagcagggcatagactgaggcaggggatgaaggtcctattgtgactgaagctgacatacagcatattgtctcatcctggactggtattcctgttgagaaagtctcaacagatgaatctgatcgcctcctgaagatggaagagactttacataagcgagtcattggtcaggatgaagcagttaaagccattagtcgggctatccgtcgagctcgggttcgatgattcagcttgacatcagtgcattcatggaaaggcacacagtctccaaactcattggttcacctcctggatacgttggttacactgagggtggtcaactgaccgaggcagttcggcgtcgtccctacactgttgtactctttgatgagattgagaaagcccatcctgatgtattcaacatgatgcttcagatcctggaagatggaagattaacagacagcaaaggaagaactgtggacttcaagaacacgcttcttataatgacatcaaatgttggaagcagtgtgattgagaaaggaggccgtaaaataggatttgaccttgattatgatgagaaggatagcagttacaaccgaatcaagagcttggtgactgaggaactgaagcaatacttcaggccagagttcttgaataggttggatgaaatgattgtcttccggcaactcacaaaattggaggtaaaggagatagcagacataatgttgaaggaggtgtttgatagactgaaagccaaggaaattgatctctcagtaacagaaagatttagggagagggtggttgacgaaggatataatccgagttatggggctaggcctctaagaagagctataatgcgacttttggaggacagcatggctgagaagatgcttgctagagagattaaagagggtgactcagttatagttgatgctgactccgatggtaatgtgattgtgctcaacggtagtagtggtgccccagattcattagaagaagctcttcctgtgtaacgtggttgtcttagttagttgagttgtatttttttctctcttttatttgttaaaagaaaacatagcaatagtttgtttaagttgccaatagacatcaagcttttaattgaatgctgatggcctcagccacgtttgcccataacataatgaacacagcaaggtttgggtggaatgaaaaaatgacattatttctgttggtcctacccttgatatgttgcattgtgaacaattttaatttattgaaagcaagttgttttgtagttttcaccgttctgtaaacttattgttatagcttcattttaaataagttgcatgacatccaatgatcccc

SEQ ID NO: 115 - DNA, 371 bp, Glycine max
  Clone ID: PAT_MRT3847_100103C.1
ggctcgaggttgctatcgcgacactcttccttcgattaccgtttccgatggccggaaaaccgacattgatctctctctgcggagatcaccggccatgcctccggcacgagttgcgaggagatgatccacatacagccagaggcgcagcaggttccatttgattagacgaagcagacatcgtgctatacgcagtagtctaacacgactgacaacgatgaggctgtgagggccacgactcctgatcctgagaagtaacgtgttcgacctaacactggcttggagatgcctagggctgctcgtgccgctatattgaccatgcacgcccaagaggaggcacctgcagacaagcggagcgggcctgagtaccacct

SEQ ID NO: 116 - DNA, 762 bp, Glycine max
  Clone ID: PAT_MRT3847_100104C.1
ctctctctctctctctctcttctctctctctctttcttcctttctttaatacttattaattcatcttttttatctttctttctttctttccccttttgtatttctgggttcgatattgttatcggttatttgtgcactgcttccgccggggctattcaggaatcatggctagggttttggctcagtctgttaatgtccctggtctagtggctgagcataggcatggtcagcaaaagggatcaggaaaattaaaaagatcgaccaaaatgatgagtgctttacggacaaatggattaagaatgtcaggtttctcagggcttcgtactttcaatcctttggatactatgttgagacctggcatagattttcattctaaggtatccattgcaacgtcttcgcggcaagcaagagctaccagatgcgtgcccaaagccatgtttgagcgtttcactgagaaagcaatcaaagtgattatgctagcccaggaggaagcaagacgtcttggtcacaattttgttggcacagagcaaattctattgggtcttatcggcgaaggaactggtattgctgctaaggtgctaaagtcaatggggatcaacctcaaagatgcacgagtggaagtagaaaaaataattggaaggggtagtggatttgtggcatttttaaattccctttactccccgtctttcccgtttacctgtacccccactccaaaaagctcgccaacttggtcacaattatattgggatctgagcacctgct

SEQ ID NO: 117 - DNA, 339 bp, Glycine max
  Clone ID: PAT_MRT3847_100105C.1
ggctcgaggacttagtggtggcagtgaagcaccaccgtcacatgggaggaggtacaggtggagttaatctctcatttggaagcaactacccgtacttaaagatgtcggagtgcactgagcgggcgaagacatgtcatcacacatcactgagatcgctacatatgcatagagcgattggatgtgacgagagaatcaagttctattgctagagacgtcccaatgagatgctagtcgggcgtgatacgcaaaacatatcactatcaataaccggctattgtaacacatgtctgaggcctacggatgaccaaatgacaccattgctcactcagggctaggatg

SEQ ID NO: 118 - DNA, 2284 bp, Glycine max
  Clone ID: PAT_MRT3847_100106C.1
ccacgcgtccgcggggaaggttagcgcctattcctcaccacaattttattccttcctcttctcttcttcgctcactatataattcattcatctctctcttttctcttttcagctactttagccggccggctattcaggaatcatggctagggttttggctcagtctgttaatgtccctggtctattggctgagcataggcatggtcagcaaaaggaatcaggaaaattaaaaagatcgaccaaaatgatgagtgctttacgaacaaatggattaagaatgtcaggtttctcagggcttcgtactttcaatcctttggatactatgttgagacctggaatagattttcattctaaggtatccattgcaacttcttcacggcgagcaagagctaccagatgcgtgcccaaagccatgtttgagcgtttcactgagaaagcaatcaaagtaattatgctagcccaggaggaagcaagacgtcttggtcacaattttgttggaacagagcaaattctattgggtcttatcggcgaaggaactggtattgctgctaaggtgctaaagtcaatggggatcaacctcaaagatgcacgagtggaagtagaaaaaataattggaaggggtagtggatttgtggctgttgaaattccgtttactccccgggcaaagcgtgttttagaactttcactggaggaagctcgccaacttggtcacaattatattggatctgagcacctgcttctgggtcttcttcgagagggtgagggtgtagcagcacgtgttctggaaaatctgggtgctgatcctactaatattcgcacacaggttattcgcatggtgggtgagagtgctgacagtgttactgcaactgttggctcaggaagtagtggtaataagatgccaactttggaggagtatggtaccaatttgaccaagctagcggaagagggaaaattggatcctgttgtgggaaggcagccgcaaattgaacgtgtgactcaaattttaggtcgtcggactaaaaataatccttgtcttattggagaacctggtgttgggaagacagcaattgctgaaggtctcgctcagcggattgcaaatggtgatgtacctgaaaccatagagggaaaaaaggtcataacccttgacatgggtctgcttgttgctggaactaaatatcgtggtgagtttgaggagaggttgaagaaactgatggaagaaatcaaacaaagtgatgagataatactttttatcgatgaagtgcacactttgattggagcaggagcagcggaaggggcaattgatgctgctaacatactaaagccagctcttgcaagaggtgaactacagtgtattggagccacaacattagacgagtataggaagcacattgaaaaagatcctgctttggagagacgattccagccagttaaagtgccagagccaactgtagatgaaaccatacaaatactgaagggacttagagagcgatatgaaattcaccacaagctccgctatactgatgaggctcttgtagctgctgcacagctgtcctaccagtatatcagtgatcgatttttgccagacaaagctatagatttgattgatgaagctggttcacgagtccggcttcaacatgcacagttacctgaagaagcaagagaacttgacaaggaggtgaggcagattattaaggagaaagaagaagctgttcgcaaccaagactttgaaaaggctggagagctacgtgatagagagatggatcttaaggcacagatctcaacacttgtagagaaaggcaaggagatgagcaaggcagagactgaggcaggggatgaaggtcctattgtgactgaagctgacatacagcatattgtctcatcctggactggtattcctgttgagaaagtctcaacagatgaatctgatcgcctcctgaagatggaagagactttacataagcgagtcattggtcaggatgaagcagttaaagccattagtcgggctatccgtcgagctcgggttggactaaaatcctaatcgtcccattgagcttcatcttttccaactgtgaattggcattggcttactactttggattcggtgagtgaatcatggagaagaggaagaacaaaggatggagtggaggattgaataacctaccctattattatcacactgcaagttacagaaaagggagaaaaaatcatgacccataatgatgcaaaacacttctcctgctatcttgtcataattgtttgcttaatacttctagtacatctatct

SEQ ID NO: 119 - DNA, 298 bp, Glycine max
  Clone ID: PAT_MRT3847_100107C.1
ttgtttaggccatcgaggtggacaattaggcggtggcttctacattaacaacaggagttaccacaatacataccgcggcacatgaggacgtagctgaacaccatgctgccatacattctcacagctgaaattactgctgagcgtaattataagcagaatcagagttacagctaattttacgactgatgatacaacggctgaaacaaacactggactaaacacgctaaagacagttgctgagacagaggaagagattatggatgggagcataactacaggcgttcctgctaagggagct

SEQ ID NO: 120 - DNA, 456 bp, Glycine max
  unsure (1)..(456): unsure at all n locations
  Clone ID: PAT_MRT3847_100108C.1
cgcgaaatgncccgggaatgacccacgcgtccgaccacgcgggcgtttctttattttggatacccgcacctgcaactgcacctgcaccagcaccgtcgtttgaatgtcaaccggaaaaggatgcggcgcccgtcgcggcgaaggctgcagctccggtcgtagcgtccagtgcatactgcttctgagggagggaagaggattgttgcttcaccttatgcgaagaagctcgccaaggagcttatgtttgataccaaaagcaactccttgcctttagctattggaagtgctgtggctaaagatgttgaggcatatgcagctgcagggtatgcttggccgacggtagcaccagaactgtggaagattgcagcacctgccggagtagagttggtatccggggtgcctttcaccacaatgcatacagctgtgagtaggaacatggcggagagtctgggggat

SEQ ID NO: 121 - DNA, 193 bp, Glycine max
  Clone ID: PAT_MRT3847_100109C.1
agctgacacttcgaggaatgttcagatcccattggtgatgaattcagttgtgatcatattggtgaagaggccataaaagtttaggagcaagaaggataaagaatatgaagaggaggttattgtgattgaaggagtcgagtatgacagcatcataccaccgaaatatgatgtgctaatagctgatgaagatgat

SEQ ID NO: 122 - DNA, 575 bp, Glycine max
  Clone ID: PAT_MRT3847_10010C.1
cagattaaacggtaaaaagtttattccacaatgagaaggccgagaaaatagatggttttgttcctcagtacaggttttaaaaggaaatatgaagccacaagggtttgtggtggtagcagaagtgggagaaaccatacaaaactacactgggatggaccatccatacaataactgaattaccaatacaaagtttgagggctctcacttccacttggtggccacaatgggcgccaaatccacaacctttggggagaagccccactcattgccataccaagcacgcaccttaaccctgtcatctcccaggaccatgaaccacgaggagtcatcggttgaggacacatctttgcaccagaggtcaaaaacacctgggtctcatcacacccagggaggattccctggacccaattgtctgcactctatttgaatgctgctttcactttgttctgcaaaggtcttttttgaaacctgaacaacgaggcccaccactgacacgtttggtgatggcacacggagagcaatgccattgattttgcccttaagggggggaaggacaagggccactgcctttgctg

SEQ ID NO: 123 - DNA, 369 bp, Glycine max
  Clone ID: PAT_MRT3847_100110C.1
agccgcaaaccgctaggggtttattctggatccttccctcgaaatatatcccattaaaatacctcttttacgggggaaaaaccgaacttgaacatttgaagggcatgggccttttttaattggggagaaaaaacctttttttttaaccaataagagcttttttactttttaaaaccttcccttcctggattggagaaacccccaccttaattaattggttggttggattccctttcccaacctaggcctaaacctgaggaaaaacaaccttttaatgggcgggcccggttccatattggcaaaaacccccttggttgggtctttctccacccccaataccctaaaaaccttggttcctccccaaggttt

SEQ ID NO: 124 - DNA, 274 bp, Glycine max
  unsure (1)..(274): unsure at all n locations
  Clone ID: PAT_MRT3847_100111C.1
cgngnnttaatgaaatttcaatcnctataagtagaggttatgatgtactcantttaccttgaagttagaagtgattgcctcatgttagaggatgggttgtccaaatcctgtcattttactgaaatgatggtgcctacatggaagtggcattttatttacagttttacttaaacatatttttgttcacccttactatacatgtttacatgtgctgctcttacactggtaattgtacatatatttttccngtatatgcagaaatattgtttttggt

SEQ ID NO: 125 - DNA, 552 bp, Glycine max
  Clone ID: PAT_MRT3847_100112C.1
gacacatggtgtgtaaaggacagggtgctaaattagttcctgatttatcactagtgcaccacaaatcttgaaaaaatgttaaactatattcacatctgattcatgataaatctgaaaactttgttccaaacaattagcttgtaattccaaaaattcaggtgtacattatcataaataatttcagaatgaaactgactttaccggcaccagcttggtctggttctggatgcatgattagttaccaagtgttcattatccatctgggcattttgattcactgcataaatactaatagtgaaactaacttcttaccgtcagcaatctgggtttatactgtaacttactcgtgatcgctagtattgctaggatgacagttgtctgaggaagggtgatgaaagttatgatggttgatcaatagttcacagtctttgtttatcatgagttatggtgctgtgtggaaacaactggctgtctagtttctcaattatattctgcgttcatgtgtggaattctacgtagttttaccaatttgtgtgtgacaaattgactgac

SEQ ID NO: 126 - DNA, 340 bp, Glycine max
  Clone ID: PAT_MRT3847_100113C.1
agcgaccgaagtatcacatcaaccttatcctgattagggttccggttacttaccctacctgtgacgttgcgaaaccttaaatttggcattaggtctgagcaatctggttggcagaacctttggtcttacagagtcaagtattatgtctggattaaacgatcaaattcatactgccttcgatactttcgctgatgcatatgctgatgactctgctgctgactcaaaggattatgtacatattcacgttcatcagcgaaatgagtagaaaagcctgacgaccggtcagggattgaaacaagaattgagctatgacaagatacttaacgacgttctgaaagac

SEQ ID NO: 127 - DNA, 417 bp, Glycine max
  Clone ID: PAT_MRT3847_100114C.1
gttttatatttttttttttttttttgttttttttattgtttatatttgatctggttgttttatatgtgaaaccaaagagatgaacacgagataaaaaggagaccagaaaggacacgaaatcatcaaagcgatctccaagataaggacgcaaccggcgactctacaaagaacggaacagacaagaaaaaagaagcaaagaagcggaaggagggacccggaaagacaaagactagcgaagcaagcataaaagacgatgtgacgaagaacgtgctgaagacccaagcggcagcgccggtagagctgaacacgggcagaacccgcactgctgatgatgtcgaaggtgctgatgcaggaggaaaagcgaatgcccagcacatagccccagggaaagcaagaccccgcgggaagcaatcacac

SEQ ID NO: 128 - DNA, 270 bp, Glycine max
  unsure (1)..(270): unsure at all n locations
  Clone ID: PAT_MRT3847_100115C.1
cgcanccatgagngcggagacctgcgnnngtgttntaggnaaattaagancaagccananccccaaagtgagcgtttctgccgtagtgttcctnatcccaagatcangatttatgatgttggtatgaagaagaagggtgttgatnagtttcctttctgtgtncatctngttagttggganaaggaaaatgtttcaagtgaggccctggaagctgctcgcattgcttgcaanaagtacatngccacatttgctggaanggtggtttccact

SEQ ID NO: 129 - DNA, 155 bp, Glycine max
  Clone ID: PAT_MRT3847_100116C.1
gataaacttaagttattttactatcttctttttcgagtgggtattgagaaacttattcttacatgacctaaattttgtgtttatggggcctaaaatcgtatatatcttgacctttcaattttgaagaactactatatatgcactctctaatatga

SEQ ID NO: 130 - DNA, 511 bp, Glycine max
  Clone ID: PAT_MRT3847_100117C.1
aatacccaacacaaaaacaattttttaactggaaaaaaggcactgattaaaggtgtaagaaaatcaaattttagataacactacaaaaaaaaaacaaaatacctttaaaactgaaaccgattctataaagaacttcaccctttaaatagaaaacaaaaagcagggagaaggggaattaccttattggtatatgaacaaaaaccaatcaaaaaaaccccctgctctaaacattaaaccttattaaactaaccctacccccaaatgggaacagggcaccccctaaaaccaaaaggcttggaaccaaaaccctaacgcccaaatccgaacttacaaacccctgcctgcgacatcaaaactcttttatttggtcaccggaaaccaaattacaggccgggggtttacaacgtccaggctgggaaaacgctgaggctacccaactcaaaacccttgcggcacaaacccctttcaccagcgggcgttttagcaaaaaggccagaacccctcgcccttc

SEQ ID NO: 131 - DNA, 240 bp, Glycine max
  Clone ID: PAT_MRT3847_100118C.1
cggccgcgcactatgttctggtcttgtgactcaaaccttactcagctggacgcagatcgtgagccaacgggagctggcagctgatccacatccaaataaatcatacccagacaccataggctcaaccttctacagaaacactgtctaaaagcgtcaccgatacagatatttagtccggcgaaaccacaaagaaccccacgtggctggtagacattgttcctaaaaccaacccatcctacg

SEQ ID NO: 132 - DNA, 475 bp, Glycine max
  unsure (1)..(475): unsure at all n locations
  Clone ID: PAT_MRT3847_100119C.1
gggtgctgctgttgcagccatagcttgggcaggtgttcggaaaggaagattctaaatcctttttcataccctgcaaatgtgtgtttattactgttcaataagtttatcttacgtatcctattgaagagtgaagacattggttcagcagccgcgcataggacaagttactgtttttcttttcagatttgaatgatatattattgttaacccctttagtcttccaaaatgaaaaaagagaatgccagccactttatcatccattagagaaatatgttaatcccgctcaatattttacagaagtataatactagatgatatttatcctacattataaatttgaatttacattcttgaaccaaagtagttttatgtgttatttttcttattcattcacgtagttgtttgactgtttctcttttattgagtattntatttcttatttatatttatttcttttaaatattatcacttaatt

SEQ ID NO: 133 - DNA, 377 bp, Glycine max
  Clone ID: PAT_MRT3847_10011C.1
atgtcacaggagggcaaaggctgccgcacaagaggggaattaacagatattattgatctactgttgcacattgatttgctgggctaacaaggagcaggtgaagttttaccaaagaagaatgtttttaatgataagctagagtagataacacacgagaattctttgatggcaatcttccagaggattttgggataccaatatttgctaattgtctttatcctgtaagttaattacctgtagaagctgtagttgtaaatgttacatgtggtagcggaagtggaggattacacaccactgcttgcattagttctggagttaacaatcggtcctcagacatcatcaaaaagatttgtacagcaattggtaaagagaagaaa

SEQ ID NO: 134 - DNA, 417 bp, Glycine max
  Clone ID: PAT_MRT3847_100120C.1
atcccaaagataacttgttcttgctttcataatttaacatcaaattcagttttactataaagcacataataaccagcatgcatttttttggggcaggggaggggttgagaggggaataaaagaaagtgagaagttttaatttacctttgcaccagggttttcagaccactatgacttccttttatggaatccatatgcaatatacagggtaccttaagtgaattgtccaggtccttatctggaatacatatcataacataaatctctgaaaattctttcacaagaacgatcataagctgagacctcaccattaaaattaaccaattcaccaggatggcatatgactattaaactccagtgaagattgaagttcacaggaatgaaatatataatcctttggaaacaaaaatacttttt

SEQ ID NO: 135 - DNA, 497 bp, Glycine max
  Clone ID: PAT_MRT3847_100121C.1
ggtgcttcagtgaatttctctgtgatttttctcccaaaattttcatctctcgccatcgccgttggagaacgctccaattttctctccaacaattcgttctttcccttctcaatttccggcgagttctccctcttcaatttctcgtaagattcatcgatcacaaacttatattgatttcgtttttctgacactgatcttatttttccaatcggttttcttctccaacatttatcgcttccagaatccagatctggatgcacatgaaccattgtttgcatttggggcaaccttgatttgggtttttaagtgctttatggaaactgtggtctttaaatttttaaacttttgtcgaatgacgagtggcgtggcttcaattgcggaggtttgagtaactgggtcgctgctgcagtggtggaagtttgagaattgggtttcgatttgtttgaggaagttttcggggaggactaagtgtttgtcgggtcggcgtcatgttctat

SEQ ID NO: 136 - DNA, 956 bp, Glycine max
  Clone ID: PAT_MRT3847_100122C.1
caggagttcgagaaactttggtgctcccaaattgtgaaagtttatgcattccatggatgttagcagaaaaggatgattgggttcctcgaactgttgctccattcatatggattaaccaagaatatggaaacgagagatccacttcaattgataccaataatcaaccttctggtggagtggaagctagtttggaggttggtgcaagcacctcaagtaatgatccagagcacaaacaacaaaatccagagagtactgaatctagtcaagaagcaactaggacatcatcagattctctagaacttccattaagttcctctaattcagtaacactagaaagcagccggagtttggaagaacagaatacaccattgttagagaatgacaaacctaaaaaaaccagcgatattaaagaatttaggacatcattgatacagaatgacaaactacttgaaactaatgaacaaaatatagagaataattctgagtcccaatcacaacacagtgtggtgatgccgaaacaaaatcattctgttgaacatgaggatggactgccaaagaaaatggggagaagggaaaggatgcttgatctgggaaagaagatgagcgagaaattggaagagaaaaggcgtcacattgaagaaaagagcaggcacattgttgagaagatgcgaggaccataagaaatataaaccaggtaaatgacagaatgtatatgtgtagtttatgatctgttgatatgtgaaagacaagtactatccatagaacagcagaatgtggggtatccttattgttgcaataaatgagttttatattttctgggtgctcataggatcaaaaattgaaatggaactagataatcttcttgtaattttgccattgccacagggtacgttagaaaattcatttaatattgagttctatagattcatcattcatgctcactcttatatttgagg

SEQ ID NO: 137 - DNA, 790 bp, Glycine max
  unsure (1)..(790): unsure at all n locations
  Clone ID: PAT_MRT3847_100123C.1
cggaacttgcccttggtgtagtcgtgcccccttcgcctcggacgattggcattgaggcgtctccgtccctgatgcacgtaatcacggccggtgtatccggctatgctgcgtgttcactgtgctggcgcgcttttgtgtcctcactcgctctgttctgctttttgcgtctggcgtgctgtgtgtgctgtttgacttgcttgccgtgctggcgatgctggtccgtgcaacctgccctgcctcttgtcggtccgccctgccatcggccatgtgtgtcggtgccatctcaatcttttattgactaaatcaagtccaattaatcctgataaagagcgtgtttacaatgctggtgctgttaagagttctgattcgttcattattgctttttgcttgtatggtgcagttaaaacttttagacttgattgaaaagtttgctatgctggtccgttcaatcaggaaagcctcatgtcagtaggttgtgtggaacttttgctggaaaaaatctacccttttcttctggctttgtctttactttcttatgcattgaaaattgtggaaatccttggttcttacagaggctgctaatgtccatgaatatcgattcatagttcaatatcacaaaaatgtcagggctttcaatctactcattctgatacgttggatgtccaagacctagaagcaattttggaaagtgtttgaagaatatccatttttttaattaaatttgactaaatgtaattagaattcagtattgagatgaaaatttaactctaattaaatggaannnnntgat

SEQ ID NO: 138 - DNA, 343 bp, Glycine max
  Clone ID: PAT_MRT3847_100124C.1
attaactattgtgaaaatcgactcaatagacttttaaaccaatatatacattggatcgaattgggtgttgattatgagtgatggggtcggaaatctaataagtttatcgaacagaaaattgggacatatatatttaaaatatcactcttgcttgatgatcggtgaattaatatctgcaacgtgataaggttgacctgtgaaaagggagtggtgattataataaaaagttctagttgactatgatatgcaactaacattctggttgaagaacttatcagaattttattgatgaatgatagtgagaattatcctgcatgcaaagaaaaggaaacagctctattga

SEQ ID NO: 139 - DNA, 342 bp, Glycine max
  Clone ID: PAT_MRT3847_100125C.1
acagccgtcgcccttttttttttttttgtttcaaccccccacgattttgtttaccagaagtacaaccattcgggggacaacaaccaaacactgccttttacccataattttcaatagaattcaacgaccgcaaagctaaaggcttctctctttacccaaaacctggaactgcatcactactgcccacccctggcttccctgctggtaaaataaagggtcaccaaaaaaaatcacccataaactcccaggtggatcccttgctttacaaccgtacagagccctcctcacattttacctaatgcctgctcgaaaaaggaaacatgagaagagctgataaccttc

SEQ ID NO: 140 - DNA, 267 bp, Glycine max
  Clone ID: PAT_MRT3847_100126C.1
gtaatgggccacctgtattttctgctgggcccatgccaggtccccaacgctttccggttagcagtgttccacaacattcagttggcactccaccaacaatgagagctcctcccggccctcctgttcagccccagcccccatatcccaatgtaactcaaggaataatgcagcctccaagttcaccttttggagcacctacttggcagatgcaatctcagcaggtagcaccacctcctccagttcctggtccttcacagggtcctcgga

SEQ ID NO: 141 - DNA, 328 bp, Glycine max
  Clone ID: PAT_MRT3847_100127C.1
cttaatcatacaagtcctcacctactttactcacactacctaccccaaatctcaccggtgcatgtcaatgtagcgcccacagtcaagctttgctcctctgaccatctctagctatagtcacgatagcaggttggaatcatagtgtctggggctgaagctaggcccatagcattctatgtgttcagagattcactggtgcacattgaagatcacaacctcttggccaaccagatacgtgccgatgctgccacttactggaatgaatacccttcctgtcatatgaccaactacttgcttctgcaaggactacatacattcccgatcttat

SEQ ID NO: 142 - DNA, 1026 bp, Glycine max
  Clone ID: PAT_MRT3847_100128C.1
ccagtttggtataatatgttggaaggagggctcatatcccacaaaattttctctctttggctaaatcaagatccatcagaagagatggggggtgagattgtctttggtggtattgactacaggcattttagaggagaacacacatacgttccactttctcaaaaaggttattggcagattgatttgggagatattctacttgcaaataattcaacaggcttatgtgagggtggctgtgctgcagttgttgactcgggcacatcattaattgctggtccaactactgttgtgactcaaattaaccatgccattggagcagaaggatataccagttttgagtgtaaaagcattctccataactatggggattcaatatgggaatccttgattgctgggttatatcctgacattatatcagtgccattggattctgttcaaataatgaatttaatacaatggatgatgttattaaaacagtggtgcataatcaaagttggaatcggtctcaaacaagggagagccccttttgtagtttttgcaatatgattgtcctttggatccaagttcagcttaagcaaagcaatgtaaaggaaaaagtattaaaatatgtggatgagctttgtgagaagctcccaaatcccccgggacaatcatttataaattgcaataggattgctactatgccacacattacattcaccattggaaacaagtcctttcccctctctccagaacaggtctgttgtttaacatgaattttgtagtttatacatcagtgccttagcacctgagcactgcgatcgcgctcatgcttttctatctatttatatctgatacctacctcaattttatttggctctctccaacttctcatatttgcttctatccctttccattaaaaatgcttgacaagtaaacataaaaaagagctggtattgtttgttgtaatccatgattgccatttcataatccttcagacattgaatctcctctttttccttctgagtatgttcttcgagttgaaga

SEQ ID NO: 143 - DNA, 281 bp, Glycine max
  Clone ID: PAT_MRT3847_100129C.1
gggaaattggagcctgcaaaatgataatttcccacggaattttttgaaccttttggaaagttatacccccacattttttttgatctttgacaaaaaaaatgccgtaccttcacccctatattttccttttcacaaaggggaaaaaagccaaatcccctcgggctgagtgatttagaagccacccctaatacgccggggtgccaaaagattccaaaaaatgggattaatttgaatccccggtcttgccacatgcttttaactgtggaagggcaaaaagaaag

SEQ ID NO: 144 - DNA, 670 bp, Glycine max
  Clone ID: PAT_MRT3847_10012C.1
ctcggaatcccctttcttcatcgcatagatactttcgctagcccaccaagtaacccttattccaattcaccctcgccactccttagatcgaacacgcgttttttcgcccggcacatggatcgagatcctctcttgtttctctgtttcaatttggattcgaatttgaatttcagttaatctcgttttcactgccagggttgtgttttatttttatttttttgatttgatatttctgcagagttgggtttttttttatataactgataatgggtgatagcagtgttcaatctgggtctccaaatgcaaaaccagatcttgttgacggagactcggcggtttccaataacgcgacattggaaaccattgttcaaagtttccaagattcaatgtctcttggtaagagacacaagttctgggaaactcagcctgtggggcaatacaaggatgttggggactccagtttgcccgagggcccgattgagcccccaactcctttatctgaggtcaagcaggagccttacaaccttcctaatgcttatgagtggacaacatgtgacatggactctgaggaaatctgtgatgaagtttatgttctgctcaagaataactatgttgaggatgatgagaacatgttcaggttcaactattccaaggaatttctaagttgggc

SEQ ID NO: 145 - DNA, 1476 bp, Glycine max
  Clone ID: PAT_MRT3847_100130C.1
atgaggctgcgcgggctcgaccgtttccactgttgcggctggtttctccgttttgaaattcccatctgtttggatgcactaatcctgcatccctcgaagcgcgtttgatctaaaaccataaacctctgtctcgtcagatctccttcttccgttcagtaaacctgtccttcgatccgatctgatctattttccgaatccaaaatggcgacgatgacaagcttgatcggtctcatcaataagatccaacgagcctgcaccgttttgggagatcacggtggcgagggcttgtcgctttgggaggctcttccctccgtcgccgtcgtcggtggacagagctcagggaaatcgtcggtgctagaaagtgtggtcggaagagattttctgcctcgtggatctggtattgttacacggaggccactagtgctgcaacttcacaagacggaagatgggacacaggagtatgctgagtttcttcacataccaagaaggagattcaccgactttgctgctgtgaggaaggaaatatcggatgaaacagatcgtataactgggaagacaaagcaaatttctaatattccaattcatctcagcatttattctccaaatgttgtgaacttaacccttatagatcttcctgggttaacgattcatgttgcagtagagggagaaattgggtgcaatgttcgacgaagacccggcccttatggataggagaaatcaaatagctaaaaggcttgaattatacaagcaagctagggatgatattgactccgtggcttggaaataatgaaatcccagagtttgcaacagatgtttcgaggaagatttgttatagatttgatcattcttactatttttttaatcaaacacgaacagaaaaatctacggttatggcaagttgaattcgcacttgcgaatgattcttttggtccacagaccacagtgtacaaaagcattggagttctatgttgtgattttatgtaacttacgagtggttcagatatttggtttttacgaccatattgattattttcaaaggactttttccattttattaggaccgtattggcaggccaattgctgtggactcaggggcccaactttacactattttagagatgtgtcgtgcatttgacaaagtgtttagagaacacctggatggaggacgtcctggtggggaccggatatatggagtttttgatcaccaattaccggctgctttaaaaagctcccttttgatcgccatcttctttaaaaaatgtccagagagttgtcactgaagctgatgggtatcagccccatctgattgctccagagcagggttatagaagactcattgaagggtcaattggctatttcaaaggcccagctgaagcctccgtggatgctgtccacttttatttttctccccttttaaaagaacttgtgcggaagtcaatttcagaaactgaggaactaaaaagatttcccacactt

SEQ ID NO: 146 - DNA, 198 bp, Glycine max
  unsure (1)..(198): unsure at all n locations
  Clone ID: PAT_MRT3847_100131C.1
nnannagcgtagtaagncggatnnggtcgagnaaaggagggagtnnatgaagaannantgtgngtgtggatacgagtgaggtgtgagnagaatantatggangnntatgntgctctnnantnnaannnnnaaagtgagtttccctgtctnnnnaanaangnaaagancgntcagntctagagggaggggaagangagt

SEQ ID NO: 147 - DNA, 1027 bp, Glycine max
  Clone ID: PAT_MRT3847_100132C.1
gactcgagccgttcgatcgccatctttccttaaaaaatgtccagagagttgtcactgaagctgatgggtatcagccccatctgattgccccagagcagggttatagaagactcattgaagggtctattggctatttcaaaggcccagctgaagcctctgtggatgctgtccactttgttttaaaagaacttgtgcggaagtcaatttcagaaactgaggaactaaaaagatttccgacactttcaaatgatatagctactgctgcaaatgaagctctggaaaaattccgagaagaaagcaggaaaacagttttacggttggtcgatatggagtctagctatttaacagtggaatttttcaggaagattcattttgaaccagaaaagaatccaaacggaccaccaaatccaaatcggaatggtccccccaatatggatagttatactgacaatcacctgcgcaaaattggatcaaatgtaaattcctatatcggtatggtttgtgatacacttaagaatactataccaaaggccgtggttcattgtcaagttagagaggctaagagatcattgctaaaccacttttatgttcatgttgggaggaaggagaaggagaaattgggtgctatgttggacgaagacccggcccttatggaaaggagaaatcaaatagctaaaaggcttgaattatacaagcaagctagggatgatattgactccgtggcttggaaataatgagatcccagggtttgcaacagatgttacgagcaagatttgttatagaattgatcattcttactattttttaatcaaacacgaacagaaaagtctacggttatggcaagttgaattcgcacttgcgaataattcttttggcccacagaccacagtgtataaagcatccgagttctatgttgtgatattatgtaacttacgagttgttcagatatttggtttttacgaccatattgattattttcaaaggactttttccattttattaaatcactttattttctttctctgct

SEQ ID NO: 148 - DNA, 536 bp, Glycine max
  Clone ID: PAT_MRT3847_100133C.1
gtgaccatttgccccatcacatactcactaaataaagaaccgtttggttcgtctccattaactttatttcattttctgttgatgctggtttcctcgttcgaaattcccatctttttggatgcacattaattcggcatccctcgaagaagcgcgtttgatctaaaaccataaacctctgtctcgttagatctccttcttccgttctctaaacctctcctccgatccgatctgatccaaaatggcgacgatgacgagcttgattggtctcatcaataagatccaacgagccctgcaccgttttgggagatcacggtggcgagggcttgtcgctctgggaggctcttccctctgtcgccgtcgtcggtggacagagttcagggaaatcgtcggtgctagaaagtgttgtcgggagagattttctgcctcgtggatctggtattgttacacggaggccactagtgctgcaacttcacaagacggaagaagggacacatgagtatgctgagtttcttcacataccgagaaggagattcacc

SEQ ID NO: 149 - DNA, 710 bp, Glycine max
  Clone ID: PAT_MRT3847_100134C.1
gtgcggcgcgaccccggcgtgtcctcttgactccattctctcttgatttgttttagcaatacaagttctcacacttacaaaacacgcatcttaagcgcttgaagaatgaaagtctcaagggtgtatggctttcaaagagatcaattcatgaagtttcataggaaaactagattgacctcttcagtgacacttggtagtgtccaaagaagggcatcacaagggtcattagggtgtttccctccatcatgcattttcaggcaagtgttttacaagttgaagagtcgattgaagcaagctttggtttggcaaaggagtagtagtccacagtatagctacgattttcgcagctattctctcaattttgatgatggcctttcaagtgaccacattccacctcgcttttgttgatgatacaaggtgtgtttgggttacagttaggttgaaacccaagtttcaacgagacaaaagacttccttctacgttttgtgcatatggaagtgggaatgtctgtttgaagtatctcaaatggcaaactaaacacactcgtattctttttgttttaattttctcttttatttgttatgaataaattgatctgtaacagtttgttgccattctatatatagccatatgatgaaatactccgcaaactcttatgatatttctaatccaatcagatatttgtcatccaattatttttctttagcccc

SEQ ID NO: 150 - DNA, 567 bp, Glycine max
  unsure (1)..(567): unsure at all n locations
  Clone ID: PAT_MRT3847_100135C.1
aaatagtctattttattactcttttctgagaaaaaaaaatgtaccggaaaaacattactgaaatgttcttcctctagtctagcttattagaattaaaaattacaaaaataaagagacttaacatttaaaacttggtcttagagaaaagaaaaaacaaaggggggggggcatttgctttgatcaggctcagcggaaaagaaggggcaacatccttgctcttccatttgctgacataaagcgagaattcaaattgcagtttgttgttcaacctaacaggcgcttccttacctcaggtagtttctgccggaaaatgacatcaagccgtgcatcaagggtattttccaacacaatcttcccatcctctgaggccaatactattcctccggtgcaataaggttcatgggaatccacggcactgttctttggcgacggtggggaggtaaacacgatcatcaagggcaatcttaggggcttgcatattggctttctccgagtattccttttttggctttcttttatcaatgactcaacaggcttacgggcccctttttcntgcatcttaatagc

SEQ ID NO: 151 - DNA, 265 bp, Glycine max
  Clone ID: PAT_MRT3847_100136C.1
ggcacaagtttgagtttgaaagtgggtggttgagggacggggagaataaagtggtgctgagtttgccgcgcggggcgaccaattatgagagtgccgtgtttccggagagtgtgtatttgcaatattattcctttagggtggaggttatgtgaccgcctttaaaaaaggtgttagagagatttattgggtcaaggcttgtgccttggattaatatttgatgtttgtgaattcactgtagcattgataccaaaaggtgtgggttgtt

SEQ ID NO: 152 - DNA, 1365 bp, Glycine max
  Clone ID: PAT_MRT3847_100137C.1
taaagatgttgttgttggacattgtagttttataatgttacttatttgcacttatcatataatttgaacaaataattttacatccataatcctcgcagatgcagtccaagattagcgctttcttcaaatctactacctccgattcctcttccgtctctgccgacaatgacgacgacttgtccatctgggagaagcagcaacaccatatcatcaacacctacacccgaaggcctccaaaccctaacgccgttattccttcggtggtcaaaaacaagaagaggagctacgcccaattccacctcgatttcggccaatccgatttcctcttacgcgcctgttccacttgcggaatcaatttcactcccggcgacccagacgacgagaaatcccacaaccactttcacaaatcctacacccaggggatacaattcagaggttggaccaaagaaaatgttatccctcttcccaccctcgaagcgggtcgaatcattttggtttcggagatcgacctcacttctcacagaagaatagttgagcaggtcgtgagtatgatggaaattgagcttgggtgtggatggatccttcacgacctctttaaggtgtatctgtttgtttctcttcacagggttgttgggtgcctcgttgcagaaccaattgaaaaggcattcaaagttgtgtctggctctcctgatagcgtgaagaaaagggaagtgaggacgcgttctaccacttttcggtttgggaatgttattttccaaagggaggttgaaaaaaaagttgcttccttgagtgattctgaaaggatggaaggtgcaatcttctgtgatagcaaaccaaccatcgctgcttgtggcattagggccatttgggttgctccctctaacagaagaaaaggaattgcaagcaaattgcttgatgccgtgaggaagagtttctgcaaggatcttgagcttgaacgttctcaactagcattctctcagccaacctcagctggaaaggcattggcaacaagttacactggcactggatcattcttggcgtattaaagccaacaaaactattggttactactactatttcgtactgacagataaagccatgtttagattagtgattacttctattgactgttaattaacaaaaacataagctattattcttgtaaagtataacctttttagcccatataagtatgaatctttgatttcgttgcttcttattgttgtaagccttttgtcatcccgaattgatttacccattaggttcttgagtatcaaagttgtggcgtgtttggaaaatccccagttttaagactattacaactgtggttgaggcattttaaaaaatgtttggttttgttctgcc

SEQ ID NO: 153 - DNA, 275 bp, Glycine max
  Clone ID: PAT_MRT3847_100138C.1
gatccttaataacgcatcagtcatcgacaaggacaatcgaacttgttcgcattaagttccacctttcaatggctgaacacgaacatcaacctttacaaatgcggacttagcataccgaattgtacatacagcagataattggcatctgaccaggtataccagttgatggccgacgctggctcatatacgcatttcaccgcaattggaatccattccaatatcaacgagtggaacttccttgcaggttccacatccactgtgaccttcgagaaacc

SEQ ID NO: 154 - DNA, 280 bp, Glycine max
  Clone ID: PAT_MRT3847_100139C.1
aaagaaacatcaacagctttaacaacaaaataaaaagaccaaaaccagggagcaacaccagaatccataaaaatcacagagggccaccctatagaccggaaaagaacatgaccagcacgaataaaacaaaggaactacggtcgaacaacaacatacaggcgaacccacaccgacaggaaaaccaagagcaagtagaacgcgcaacatacatagaacacacaggtaaaggacacgcaacaataccaaccgcaagaaacccatacacaacaagcgcaaaacc

SEQ ID NO: 155 - DNA, 393 bp, Glycine max
  Clone ID: PAT_MRT3847_10013C.1
cgcatctcggaatcccctttcttcatcgcatagatactttcgctagcccaccaagtaacccttattccaattcaccctcgccactccttagatcgaaatcattttttttcgcccggcacagtgagttaatcttattttcatccactctctaacctgtttcacctttcataactcgattttaattagccactgattgcattattgtttcatcttctgtttccagtggatcgagatcctctcttgtttctctgtttcaatttggattcgaatttgaatttcagttaatctcgttttcactgccagggttgtgttttatttttatttttttgatttgatatttctgcagagttgggtttttttttatataactgataatgggtgatagcagtgttc

SEQ ID NO: 156 - DNA, 714 bp, Glycine max
  Clone ID: PAT_MRT3847_100140C.1
gccgattggcgcgcgacgggaacgaattggggcgctaaactaaattggttcgttcaaagtaaagagaagagaagagagtaatggcttgcaacagtttctcttggctcatgctttcatccaccaacgccaaacgcgttcccttgttcttcgtcccaacctcaacctgcttcaaattcgatgttcctgttgcttcccaaatccaatggcatacccgcagcagaaacatcccccaaatcaaacgccattgggtcgaagcttctgatcaatcgctcgcgtctcaagaaagattcagcgtggcgtcgtacaacatactgggggacagaaatgcttctcaacactcggatttatacgtaaacgttccttctcgttacatcaactggggccgtcgcaagagggttatttgtgatgaactctttggatgggaccctgatattatctgcttacaagaggtggacaagtatttcgaactctcagacattatggttaaagcaggatatgcaggatcttataagagacgcactggagatgcagctgacggttgtgcaatgttttggaaagctgataagttccggttactagaaggagagagcattcaatttaaggacattggccttcgtgataatggtgcccactttcagtttttgagatgtgtgaatctgactcaagaagaatgttagttggtacattcacgtactttacaacccaaacagggga

SEQ ID NO: 157 - DNA, 487 bp, Glycine max
  Clone ID: PAT_MRT3847_100141C.1
taattcgggtcggggcaaaaccatggcgctaacggagttcttccacggcgagatctcgtcggagctatggaaaatgctggtttcaatttcccgaaaagccctccgctgcaagtcgagcgccgagagcctcatcacctacgtccgcgagctccttccgacgatcgaagagatcaaatattccggcgtggagctgccggcgccgcgccagtctcagctcgaccgcctctcggagatcctccgctccggcgtcgagctctcgcaccaggccctctcctcctcccgctggaacgtgtaccgcaacttccagctcgccaaaaaaatggagaagctcgagaagcacgtgacaaggttcttgcaggttcccatgcaggcacatatattggcggacgtgaaccacgtgcggttcgagatggcggagcggttccaccgggtggaggtcgtttacccgaggatggaaccattgattggggagatgaagattgtagtg

SEQ ID NO: 158 - DNA, 311 bp, Glycine max
  Clone ID: PAT_MRT3847_100142C.1
cccacacaacctactacattacaaacaccatcactctatattacatatccactcacactatcatgcacaacgtaaaatttttcaacacatcaaattccaatacatactacatcaacaccatccaaacttaaacccttaaaccttaatcaaccattcaacaacatacccaactacaaacacaacttcacaaaaaactataaaaacaacttaacctacacacatactaaatctcaacataccattacacattcttaaccaaaataaatctcatcattaatataaccaataatatactatatatccaaatcaac

SEQ ID NO: 159 - DNA, 158 bp, Glycine max
  Clone ID: PAT_MRT3847_100143C.1
caccaacgtcaaacaacccatatatctctcttctatttcttcttcttcctttaaccattaggcaggtcttgcaccttcatggaggcccattctctaacccaatcctttccaacctctattaatccatctatccactagcacggacattgatcccacct

SEQ ID NO: 160 - DNA, 434 bp, Glycine max
  Clone ID: PAT_MRT3847_100144C.1
gcaattgctctgagagagaaaagcgcagcttgtatcatccacgttactctctccatctgaaagcagcaccgccgctgagttgagtaatatccgagacgccaccacagtgaatattcaacttggatactctgtagaggttattgcatggtcaccgagatccggatccctaatctatgccctatcagctctaaccaccgacagcaagacgacacattgctgactatccgttgctgtaaagcgttacgctcgcctctcctctccaaatgcgggatgtcctcgatactggctccaattggaagctggtggtccttattcttcttcttattggcggcattcctcgtacattgcctagctcattacgggcccttactatgagcgaatttgcgacacgactctacgcgacggcgagcagtccccgggcgccttcatgacct

SEQ ID NO: 161 - DNA, 408 bp, Glycine max
  Clone ID: PAT_MRT3847_100145C.1
cctaacggcgccttttttttttttgggcctttctgtacaatcacgagcgttaatgatgaacctgccagatttgattatccggccgataacctcgaatgaagacttgggatgtgatcattatcacaagcacgaccatattaaaatactaaaaggacgtcctgcacctgttattttgggccccaacatgacgcatggacttacatctctgaggaaaaatcatctgatattcaccacttattaatatcatcatcactattgctttattagcattatcgttcatgcagcgtgtgttttaaaaatgtgaactacctatccacaggggactgaacaaataaacacaaatgggcttctaggaaaactccctacccttttatgaggggaagttcaccaggtgtgtaacaaccctgc

SEQ ID NO: 162 - DNA, 535 bp, Glycine max
  Clone ID: PAT_MRT3847_100146C.1
aaaaaaaaaaaaaaaaaaaaaaaaaaaaaaaaaaaaaaaaaaaaaaaaaaaaaaaaaaaaaaaaaaaaaaaaaaaaaaaaaaaaaaaaaaaaaaaaaggggaagacagatatagggggcccactgtttacggggcgcctgcttgccgcggcctggcttttttttggggccccttttatttggggcccctggttggggtttccctgcgcggggccggggaaccccctggcgttaccccccttgggggcctcgaagtacttccccttttccccggttgcctttttggcgggggggcccaccccgggggccctcccccactttggccctccctcaatggcccctgtttcccgccctgtagggacccctttggcccggcggttttcctctttccccccggggggcccccccccctggggagggccccaccccccggtcctttaccttccttccttttttttgtggccctttctccgggttcccccttcaggctttaccccgggggccccctttagggtgcctttttagcgctttccggc

SEQ ID NO: 163 - DNA, 262 bp, Glycine max
  Clone ID: PAT_MRT3847_100147C.1
ctctgttctctgcgctcggcgtggtgttcttgtgcccattttcaggagaccgagataggcagtgcgattcgatactgttcttcttcctgatgcttcattaggcgtcgcaatctgggtagtgacaactccatgttccaaccatgtaatggggtctaccttcagtgtgtcagtcttcggatctggtacttcacacgatttgtacaacatgttctgcgccatcgtgtggctgcactcgtcagtcgcggatttgttcggagcgttc

SEQ ID NO: 164 - DNA, 317 bp, Glycine max
  unsure (1)..(317): unsure at all n locations
  Clone ID: PAT_MRT3847_100148C.1
gggaaagggggacgccagcaggaccggaccggaacccccgggccgacccacgcgaccggcttcacctcccgccggacaccagcaagagcanaaggcaagagcagagacaacagacccatccggacacccaacaggagcaagctgcgcaacgccacccccaaacaccgacggcgagacacacccaggggcgcacacagccccggcgagccccccaccagcaacgaccacaccctaggcgccaccgaccgcacccaccgaaaccggcacgcgcacgcccacgacggagggagcccccacgacaagggcggccgggagaa

SEQ ID NO: 165 - DNA, 403 bp, Glycine max
  Clone ID: PAT_MRT3847_100149C.1
ttttgttgttttttttttgagcactgggatgagtgcacatgaaaaacgcagaaacaaattaacacggccacggagacaggaaaagggcacaactaccttacatgctttgcacaaccggggaaagaaagaaaggaccaaagggcccaatcggggggaggcgatcattccaccacaatacaaccaattgctgaacaggaggccaacataattggagcacgagagccgagaggaccaacacatgaaacgacacggctgaatgaactgaaaagggtacgcccaatggaagtacatggccgagaatgtgcaaagccgggactggggaaacccggaaggaacccaacgtaaggtaatggccaaacaatcgcttccaacagaaggggggaaaagggaataggcccccccc

SEQ ID NO: 166 - DNA, 417 bp, Glycine max
  Clone ID: PAT_MRT3847_10014C.1
tgttatttacagccacatttgaagcacgtctctggggggttctctgctcttcctggtggcgaagaaacaaaggcacctgatccaccaaaacagagctagcttagatatctactcttttgtggatgtgaggtctctcaacgactcctccgcgaaagaatatgattcaatatttaggacgggatgcatcccggggccgaagcgtggcagacatcacggctcttctaagagtgtctggctccctcattcatgtccgatctgtacgaccgaggacgggtagttgcgtaactgccgttaacccttagccacacggtgggcgtggtgctttgcacttctgaaggtggcagcccatcagacttgctcttcctgtccaggagggggtacctatggcacctccaccgttcatattactggtaacct

SEQ ID NO: 167 - DNA, 751 bp, Glycine max
  Clone ID: PAT_MRT3847_100150C.1
acgcaagcgagagcttcggatcgaggtttatcataaaattaaaaatagtacaatccatcaatctgtttgagttgaattgaaacttttggagagagaaaagaaaacaaaaacaaaacatcaatctgcattttggcattgggctcttcttgtttagtttgtttgttccaatccaacgttggtttggttgtgtgtgtgtgtttgtgttgggaagaataggaatagcattgggaatcaatcagcgaccccatgagacctcagagaacgtcgatccacgccgtcacgacatgggtgaggcgacagcccccaaaggtgaaggcttttctcgccgtcgtttccggcatggcggctctcgtgctccttcgcttcatcgtccacgatcatgacaacctcttcgtcgctgccgaggccgtccactccctcggaatttccgtcctcatctataagctcatgaaggagaagacatgtgctgggttatcactcaaatcccaggaattaacagctatctttttagctgtaaggctgtactgcagttttgtcatggaatacgatatccacaccttacttgatttcgctactttcgtaacaacagtgtgggttatatatatgattcgttttaagctcaaggctagctacatggaggagaaggataactttgcaatatactatgtggtggcaccatgtgctatgttagccttactcattcatccatcaacttctcatcatttattaaacaggatttcctgggcattct

SEQ ID NO: 168 - DNA, 480 bp, Glycine max
  Clone ID: PAT_MRT3847_100151C.1
gttgagttgaattgaaacttttggagagagaagagaaaaaaaaaatcaatctgcattttggcattggggtcttgtttagtttgttccaatccaacgttggttgtgtgtgtttgtgttgggaggattgggattgggattggaatcagcgaccccatgagacctcagagaacgtcgatccacgccgtcacgacatgggtgaggcgacagcccccaaaggtgaaggcttttctcgccgtcgtttccggcatggcggccctcgtcctccttcgcttcatcgtccacgatcacgacaacctcttcgtcgctgccgaggctgtccactccctcggaatttccgtcctcatctacaagctcatgaaggagaggacatgtgctgggttatcactcaaatcccaggaattaacggctatctttttagctgttaggctgtactgcagttttgtcatggaatatgatatccacaccttacttgatttcgct

SEQ ID NO: 169 - DNA, 728 bp, Glycine max
  unsure (1)..(728): unsure at all n locations
  Clone ID: PAT_MRT3847_100152C.1
gcaccagtgtttctgtgctcaatgactgcatataccactggtcgttgtccgccgctgtccactgctgtcctccgtcgtcaaccaccttccgccgcaaaactgatcggagaacccaccaggagaagcgctttctccagatcggcccatccctgaagtttcaccgccaaccgccatcggacgcgctgccactcgctgtttttgtctccggcgtgtgtaagccacgcgccaccgtgcaggccgggctcgaggacggcaccgccacagaacaggtcaccagtccacctcggttctgttccaagggttattttgccctaaaacaatgtccttttgtggctgttaagaaaccctagctcgagaaggttacggttaccgttctacgttttttctctatcttgtttgtactcctacggaggatgacaaagaccttgaactagcatcatcaccagttcatcataaggaggatagacgctttgagaatcagtactagcgaagaaaaaaaacccgacctagtccaacaacaacttcaatcatccgaactggaggtaagaactcatactcttgaggacaccttagatacctcttgtgaatctaacctagatagatgatttgccaattgccttgagaaaagaaaaaagatcttgtgcaaaatatcttatatcccaatttgtgtctactaaaaatctttctctacagcactagagttntatttcaactattgattctatcaa

SEQ ID NO: 170 - DNA, 145 bp, Glycine max
  Clone ID: PAT_MRT3847_100153C.1
agagtcagaggaagtgaaaagaaggttaggcggtgaggatgtggagacacagacaaagtcccaacagatgtatgtgaataccccacggacaggtgtggttgacaagtttacaggcatggttgcctactggctttacccacccacc

SEQ ID NO: 171 - DNA, 963 bp, Glycine max
  unsure (1)..(963): unsure at all n locations
  Clone ID: PAT_MRT3847_100154C.1
cttttgagttttctctctcacaaacacactccacttctcttctcgccgtcgatctcacgcgctgccgcgcatggccgaatcccacagaacccgaccctcccgccggcagcccagccgcctgcagagccgcgccccgtcgtcgctccagataaaccgcaccgtcgagtggaacgtcgcgatcccgctgctgtccccgctggtctcgtcgccccctccgccgccgcagaaggacgagccgccaccgccgcagcaacaacgcccgccggaaaaagttgtcttcaaaaagtggcagcaccccgccgcaccgttttgctacgaaccaccttcgcgggttcctcctttcgttaacgtgtaaataataaataaaaaaatgaagaaaaattatgaatatttcttctaacatcttttgttcattttcattttcactttttttttacacataatatacccttatcgtaagtaataagagtaagacccagtatttttttttaactttttttctttttttatttgtggctttaattactgaatagaagtgtaagtttgaaacccttattattattattattattattattattattattattattcaatttttgtaatcgttttttgagcatataggagggtttaattcgtgtgtgtgagtaactgattccttttgcagggattttgattcaattcaacgttttatttcttatataaacaaatttcgttttcgaaggttgtaatgaatttatgaaaatcatgagtatataatatgatggaggttttttcttttaattaaaaagtaaaaacgaaacacaagaagcttatatagcatgaaggaatgcaattggtattttatatgtttatgaatttgggggaaaatgttgatggaatcgtttttattcaagatgcatcgtgtttgtataaatatatttgacatttgtggcaatgaaattgaaaggntcatgtgtttcc

SEQ ID NO: 172 - DNA, 498 bp, Glycine max
  unsure (1)..(498): unsure at all n locations
  Clone ID: PAT_MRT3847_100155C.1
gctgaatgatcccatgcggcagcggcagctttttgaagaccaggccaaggccaaggctgcaggtgatgatgaggccatgttcatagatgaaaacttctgtactgccctggaatatgggctgccccccacagctggctggggcatgggcattgatcgagtcgccatgtttctcacggactccaacaacatcaaggaagtacttctgtttcctgccatgaaacccgaagacaagaaggagaatgtagcaaccactgatacactggaaagcacaacagttggcacttctgtctagaaaataataattgcaagttgtataactcaagcgtctttgcatttctgcgaaagatcaaggtctgcaagggaattcttgtgtgctgctttccatttgacaccgcagttctgttcagccatcagaagagagacaaggaattaaaaatttctttttaatcctgtctcccngtgaaaaaattaaaaaagcaaagaatgctgcagaaataa

SEQ ID NO: 173 - DNA, 255 bp, Glycine max
  Clone ID: PAT_MRT3847_100156C.1
gttgtgttgcttttccctcttgtagtggttgtagtttgaacttgaaataaatctcgagtggctatatttttgaagataacatccataattccatattatagaccaaaatgatcttacttacaaaatatagccactcgagatttattttgtgagtaagatcattttgctctatgatatggaagcatggatgttatctgcagaaatataggcactcgagcacgatctcgcggtcaaactaccaccactacgagaggg

SEQ ID NO: 174 - DNA, 355 bp, Glycine max
  unsure (1)..(355): unsure at all n locations
  Clone ID: PAT_MRT3847_100157C.1
gacnccnaggaccacacgaggaaaaagcagctgtgacgcnggaggaanccgagacgcagcgacgaggagcgcagggaagcgcaaggagaccgnncggaggcgcaggcaagcaagngccgcaggagaggaccacgaaacaccacaaagcatcaanacaggagcgcaaagaaggccgacaaggacgggnacgagacgccagaatccaatcatgtgctaccagactaagcactcaaaccgccggaggcaggacaccacgagtaacgtctcaatgcagctcatgatacgtggcagatgcaagcgagtcgtgcgccaacatctgcagactaccactggaactggtatgaatgcagaaaaa

SEQ ID NO: 175 - DNA, 330 bp, Glycine max
  Clone ID: PAT_MRT3847_100158C.1
cgaatagtataaaaatagatattccacctccttcatgctcacttaaccatacctaatatggacgatggggaccacacaaagcaggtcacagcaacctgtcttgtacatgcaccaaactatatatgctatcaaaaggtttggaaatgtcctagggaaggaaaaaacatatcatgaccaaccacaatgaggtgacttcataagcaatgaacacgtacacagacaccatcattggcaaaaaaaactctatcgagtcttcgagtgcaacattggcataaaacaaaaccatgccccgcagagtttgggggcctgcccataataaaaaccatgcga

SEQ ID NO: 176 - DNA, 628 bp, Glycine max
  Clone ID: PAT_MRT3847_100159C.1
aatcttacatattctctctctctttctctttctctttctctctctcttaagttctgaaagaagaattcataggactagtctttcactccagagattccattcaatcgctgatcttaatcactctttcatctttcagtctcacacccaaaagaaaaaaaatgttttagtttcataagggttggttctgacttgaattaggatctgattcaaagagaggaatggagggtggctcattcaatggtgctcagattgatgccaagatcatgcagacatttaagaagaactttgttcaagtgcaggacatttttgatcagaacaggctactcatcaatgagataaaccagaaccacgagtctaaggtacctgataacctcaccaggaatgtggggctaattagggagctcaataacaacatcagaagagtttatgacctatatgtcgatctttcgagttcctttaccaagtcgatggaagttacttcagagggggattcaagtggtggtgctgtgaaatcatcagatgggaaagcaggccacaaaagacacaggcctgtgtagaggagagtttggttggtttctttgtgattctttttgcttggtggaagaagttcaatttgtgttgaaaaatg

SEQ ID NO: 177 - DNA, 2144 bp, Glycine max
  Clone ID: PAT_MRT3847_10015C.1
agaatgagtcattggttaacccgtcgcgagggataagtagccataataaaaacactcgtgccgcaccttcgtcttccccaatgcttctttccacacgcatctcggaagcccttctcttcatcacatagatactttcgctatcgcaccaagtaacccttattccaatccaccctcgccactccttcgatccgaatcatcttttccgcccacacacaagttgggtttttttgatataattgataatgggtgatagcagtgttccatctgggtctccaaatgcaaaatcagatcttgttgacagagacttggcggtttccaacaacgcgtcgtcgttggaaaccattgtgcaaagtttccaagattcaatgtctcttggtaagagacacaagttctgggaaactcagcctgtggggcaatacaaggatgttggggactcaagtttgcccgagggcccgattgagcccccgacacctttgtccgaggttaagcaggagccttacaaccttcccagtgcttatgagtggacaacatgtgacatggactctgaggaaatctgtgatgaggtttatgcccttctcaagaagccagtttgttgttgcacctgattttgatgaaaatgatgttgaacattggcttcttcccaatgagaatgtggtggatagtttcttggtggagagtccagagaatcatgagatcacagacttctgcagcttctatactcttccttcttccatccttggaaatcaaaattactcaattttgaaagctgcttattcttattataatgtttccaccaaaactccgctgacccagttgatgaatgatgtgctgattgtagcaaagcaaaaggacgtcgatgataacaatgctgaggatgatgagaacatgttgaggttcaactattccaaggaatttctaagttgggctttgcgggttcatggctattaccagagttataggattcgcattggcgtgaaaccatctggacagggacttgtgttcttgtagtgtgatactattcggtttaggtttcattatgaggttgttaaaaccattcatttgctatgttctattagcttgttaattcaccaaggtcaaagggacctgtcacttataggaaattagcatactcggtgtggatggattgggagaatacatcgcaggcggcttatacggctaaagttgttcttccaacgccgatcacaacttgtcagtattggcaccgatcgttgaatccgaagaagctaattgatgttggattttcaaggcttggggctaggatgacgatgagccgcactataaaactttacaaattgcctgattcaacggttactcctggattcaggaaaatggagcttcgggatgtccctgctgttactcggctgcttaggaactacttgagccagtttgttgttgcacctgattttgatgaaaatgatgttgaacattggcttcttcccaatgagaatgtggtggatagtttcttggtggagagtccagagaatcatgagatcacagacttctgcagcttctatactctcccttcttccatccttggaaatcaaaattactcaattttgaaagctgcttattcttattataatgtctccaccaaaactccactgactcagttgatgaatgatgtgctgattgtagcaaagcaaaaggattttgatgttttcaatgcattggatgtaatgcacaatgagagtttcctcaaagagctcaagtttggaccgggagatgttgagacagctccattactacttgtacaattataggattcgtagtgccttgaaaccatctggacttggacttgtgctcttgtagtttgatactattcagttttggtttcactatgtaattggtaaaaccattcatttgttttgttttattagcttgttgtttcaacattatttcttgttcctttcaaatattggcaattaacatattaggttttcagggtatgtgagagcccatcttatggcagactttctgctaatgtgcttatactgcaaaattctgaagttgttatggtctgctacttcagtttcctttttgctctatttccttctgaattctctctctctctctctctctctctctatgcatgattgtatgtaaaagtagttcacaattctgac

SEQ ID NO: 178 - DNA, 329 bp, Glycine max
  Clone ID: PAT_MRT3847_100160C.1
aggggcaagggaaattgcgttcttaattttttattattgaagacaagcaaagggggctggtgggtacaattcaaaagccagacaagcctctaaaaaccagggcttgttttaaaagggaagaaaaaaaatagccccaaaggggtgccctggtaccacaccaaaggccttggatatgaggtacctagccctaaaattggacaacataaccaccctgacaagaccgggggaaaacaaggtaaaggctcttccccacttttaggtatggggaaaagcgattgtggttaacttaaaagaccgaagactttaaaagacatgaactctagctttag

SEQ ID NO: 179 - DNA, 121 bp, Glycine max
  Clone ID: PAT_MRT3847_100161C.1
ttgattcacggacctgcaaaagggttccttttgagatttgttagactgcgggacgaggtttcaggagtgaattggcggggtgttacgagaatggccctttcaacattgctaacaacttgtc

SEQ ID NO: 180 - DNA, 154 bp, Glycine max
  Clone ID: PAT_MRT3847_100162C.1
tggtggttgccctaggcatggtcaaaaagcctttcattgcttcataatcagaatcaaaacaccatccataatccgcttaatcattacggtaacgagcgcaaaaattgccacttcctttctttctgccttcctcatcacagtgccataacgttgg

SEQ ID NO: 181 - DNA, 312 bp, Glycine max
  Clone ID: PAT_MRT3847_100163C.1
cgggcccggatttccgggttcgaccacacccgtccgggttcttgggagaccaatggagcgttttcttggaaggccacaaaggcaaaagcaggacctttaagcttcttaatcccctgtcctacattaagtagttccttaacctttaaacattctagctggctccaatctatctatttgtaataggaggcgtccaattgggggccctagcttaactttatgtggtttaagctgggggcaaacaagtcatgtaagaaactcaactatgtggtttctttttccggggcttaattaaataatgcgccctggttccat

SEQ ID NO: 182 - DNA, 365 bp, Glycine max
  Clone ID: PAT_MRT3847_100164C.1
cggaataccaggaacgacccacacgtttcatttaacgccgacgctcgcaacaaaaacaaggggcgataatgcaacaacacacggaagcaacaccctaccctctacttacaagaaggccaaaatcaacctcgataaaagggcggagtaggcacacaggacaagaagcagagcgatgaactggattccacaggcagagctagctgaatacaaccgcacaaagatcaacaccaggcggacacactcatgagcgaaggcaccttgatcaaccccacagctccagggaacccccatgatcccgggatatataccagaagaacaaggggaggcgtggcgaaacataaaggatgccgagcaagacaaaggca

SEQ ID NO: 183 - DNA, 462 bp, Glycine max
  Clone ID: PAT_MRT3847_100165C.1
ctgcacatgatgtatcagatattctggtcacaagagcaactacagtggttgatattattcaaaatgtaatagacaatcttcatgcgactaaggacatacaagtagctagtttctatcttccagacgatatcaagggagccattgaaaaggctgaaaaattttccactcaaactgattatattaagaaccaatcagaggaaacagcaagaatctcaatggaattcctgggcgctataagtgaaagtcttatcattgttggtactatgatgcttatcttggctgcggttggcttcgtaatctcaattttggggtggaaagtgatcgtttatattttacttttctttgggtggatcctcgtcacatgcacttttatattaagcggtatatctttagttgttcacaatggggtaactgacacatgtgttgcaatggaggaatgggttcagcacccacgagataata

SEQ ID NO: 184 - DNA, 250 bp, Glycine max
  Clone ID: PAT_MRT3847_100166C.1
gttgagctttaacctttatcagaatcaataaacgctcgttgttcttgattaaccacaggatacactggcctatgccattatatttttggttggattacacatactatacctgttggattctgtaacaaaaccatgaatacggctctgctaatctacgtgataggtattggcgaaggctttgtccacttgcagattccatttcctgcagcaattggctgaccaaaagatttagtgaaagcttccatgtctc

SEQ ID NO: 185 - DNA, 550 bp, Glycine max
  Clone ID: PAT_MRT3847_100167C.1
ttttctgttttttggataaaccgcgatcacaggttgccgttccttaaaaccgtaaacaaaagcaatcgttacttgatttcaagaatctatcaaattcttcttacttctttgtgtacgacttctcaagggaaagaaaatcactctctgtgctggccacagaccgtagtgaatcattttcttttccactcttagtttatttgctgaacactctcctatttgatataggacttcgtgtcagactttaactttttctgtctctttctcagttctctgttcaaatctaagttcaagctggtgaaattctggattagtgcttccactttcctatttggtataggactttgtgggtagactctacttattctttcctttctttcactctctaattctaactgatccgcattgccgatcaatgtgttcttatttgaaaaacacttgggcgtctgcgcaaatgttttgtttgtttaattttctatggagacaacaggtttactgagaaaaccaattttacttgcacagatttgaccatcttggttgtttctattcaaca

SEQ ID NO: 186 - DNA, 420 bp, Glycine max
  Clone ID: PAT_MRT3847_100168C.1
gggtgctaccttaattatagctctaacaccacacctctgcctctggatcaagcaccttcacagtcaccactgaaacaaaaacaccataataccaaaaaaaaaaaacagaaagaagaaagatctcttatctttctttttaactacccttcattcaaatccttttttttcttttccatgtctcgcactcccaactacgagttccaggaatggtggaacaagcagcgcgaaaagaacaccaataccaacaacctcgaccccctcgacgacagccttaaaaaactcgagtacggccactcctctccgccgccgttcacggcgctagacgtggactcctcactgccgcgaactccgccacctccgaccacgaccgctccggcaggaaagaacgctcccgaagcgcacggcagctcacatgggtct

SEQ ID NO: 187 - DNA, 1023 bp, Glycine max
  unsure (1)..(1023): unsure at all n locations
  Clone ID: PAT_MRT3847_100169C.1
agaggattttaaatgtgattgcttctcctgtgatatgaataggaaacataaggagaaaaaaagactgaaaaattggcacacaaaaatttgtcacaagattgcagaggagccaaactttcccaagaatgaaatcattgatatgtatttgtgcaatgacaatgcaagtgatggcccacacattgtatggggaaaaccgaatattgagatgctgattgattttttaaacttccatcagcattgggaaccagcttacgttcgacggatgatgtttcctatgatgtcaaccatctttatgagagatatgacaacaactaccgaagagactatgttatttgggcaatatcagtttgattccatagaacgtgtcaagatgagatatggataccaattttttgtggtcaagtggaaacatgcaggggttaacannncctgtaaagttccattgaaggaatcaagtgtgcaacacgatgctataatagagcttgatgaaacggtggatctactggatgactgtgatgttccagagattcatgaagacagtgggtgtcgttttctgcttacagatgaaaatatggaccttgtaggtgctgcttttccagcagaagtcaaaaggttttggcaagagcaggaactgaaaagaagaaagaactcaacatcaagatctcaagaaaatgaaaaatcaccatcaccaaactcaagaagtattcagctaaacattacagagttctacccatcaaccaaagttaaacatcgtcaatcaaaacaaggaggaggagagtcatccaagattgctgatagtcaaggcaatgagggctcaaaaatgaaaaggaaaatgtcaagtcctgataagattccaaaatctgtgaggcgtcgccttttgtttgattagtatgtatatatgcttgagttatgatatctactgacttagtgactatagagttgtattgaccttataattttgttacggttgaatacaggtcagtgagtatatatttaacataatataagtttgcagtcgtatat

SEQ ID NO: 188 - DNA, 181 bp, Glycine max
  Clone ID: PAT_MRT3847_10016C.1
gccgccttccaccgttgtctgtaaagctgcctccgttaagccccagacctaaatcgaatgtctcaacagtggtgaaaatgtaacccacctcatatgtaaatctctcttggtttacctgaacaatctcgccaagggttctgaggccaatattgctggcacgctagcgattatggacccctgt

SEQ ID NO: 189 - DNA, 383 bp, Glycine max
  Clone ID: PAT_MRT3847_100170C.1
gcgcgagggaatccaaagccatagataatactattaaaatcctctatagctacggcggaaagatccttcctcgccacaccgacgccaagctccgttactacggcggccacaccagagtcctctccctccatccttccacttctttctcagagctgatactaaagcttaccgagttgtgcgcttcgccggtcacacttaagtgtccattgccgaacggagatttggacaccttgatttccgtcaccagcgacgaagatttggctaatataattcacttatacgatcgagcttcttcgtcgttgcctcatcgcttgaagatcagagccattctttcgccgccgaagaaactgtctccttctccgtcttcaccttcttccagcgca

SEQ ID NO: 190 - DNA, 463 bp, Glycine max
  unsure (1)..(463): unsure at all n locations
  Clone ID: PAT_MRT3847_100171C.1
ttctccgcgtccgcctttgcgtccggtcttagttcatactctgaggggttgatctctcgcgatgatggctgtcacaaccagggcaactcctccagagccttctcgctctttctccttgatatcgggattgctgagcaacataggaaaaaggataccactggcctngcaaagtagatggggaaacttaaggttgacacagggggcatcaactggatggtgctaattgaagtgaatgaaacctaacatgggggctgcaacggtgctgtacgtgtagcactgtagcttgaaatatcttcctgcgggaatccaagtcttaaccaaaaacggttatagcccctcttttggatagcccttcagagctggccctgtcaaagttatcggaactctaaatggggagagtgaggctaaagccttgaggaattggttggcaaccatctggtgctgaaattgtgccactatatgt

SEQ ID NO: 191 - DNA, 842 bp, Glycine max
  unsure (1)..(842): unsure at all n locations
  Clone ID: PAT_MRT3847_100172C.1
ttcacnncttctgcacatgggaataaattaatactttggcctagtgcacttagtgatcacgatgaaaggattcacatgaaccctgaatgctttaaatatttaggaaacagccattacacgcatgaaaattccctgaaaatgtttgacgtctttccaaaatatcttacatgatgaagttgagcttaaacggtccatttaaaagcaagtttaaaaatgaacccaccagactgaaggtgaccttaaatactagatgttcaaataaaataaaggcagcctaacagtttgtaaaaagaatgaaacataaacaaaagatggaatcacttttataatacaactgcatggtgacgatgtctgatgagatggccgcctgccacttctgtccggcacacccgttgccataggaatgtagatcaataatcttagagtcatggtgagagaatttagaagcacttcctgtggacaatggaagggccagactcgtcgtactcttgcttggagatccacatttgctggaaggtggagagggaggcaaggatggaaccaccgatccatacggagtatttcctttctgggggagcaatgatcttgatcttcattgttgatggggcaagggcagtgatttccttctgcatacggtcagcaataccagggtacatggtggtaccaccagacaggacagtgttggcatagaggtccttacggatatcaacatcacacttcatgatgctgttgtaggtggtctcgtggataccacaggcttccatacccaggaaggaaggctggaagagagcctcagggcagcggaacctctcattaccaatggtgatgacctggccgctcgt

SEQ ID NO: 192 - DNA, 475 bp, Glycine max
  Clone ID: PAT_MRT3847_100173C.1
ggtcaagttcaactgaaacttactcagctcaagataatggtcaatttcgaagaccatctaaaaatggactcatgaggccactccgactttctaattctccaaagatctctttgaaagacccgacttccccaaggcgaaagaatcctgatctggttatgaaacccatctcaagttcaagggttcccattgaaccagcaccatggaagcagcaagatggaaatcaaagctcccagaaacctaatttaaggggcataaaagctccagcgagagcaccggattcctttccttctgtttatagtgagatagagaagagattgaaggatcttgagttcaaacaatctggaagggatcttcgagcattaaaacagatacttgaggcaatgcaagaaaagggactattagagagcagaaaagtagaacaagctccaaatgttgttggaagtcaaagtgactatgaaccaaaagctaccaatcc

SEQ ID NO: 193 - DNA, 143 bp, Glycine max
  Clone ID: PAT_MRT3847_100174C.1
cccacgctttcggagggaaaggcccggatgcccgaggggtgtgcgaaaacttctctaccaccatgagagaagtcgagtctacctgatcacccaaagggaagtggacataaagaaagagatggcccagataaaaaaggtatatc

SEQ ID NO: 194 - DNA, 553 bp, Glycine max
  Clone ID: PAT_MRT3847_100175C.1
atgcacgctgaccgcagacgtaagttcggctttatgaacacgccttaaggatgcgctctatacttaataacataattctgatagggtcacgggatcgagatattctaaacttgtactgacaaatatggagggaaaagaataggacgtacgagttggagccaacaggcacagagagaggcagacaatatggaccgctgctcatgctatagactacagagagtcaccgtcggcgcctatcttagaaccgggaaagttgtaatcgcggtgtctctatagggctggcatagcatagttagaggtcactgtcttggaactctacatcacattgctgactgtgatgggagtgttcaaatctaagagcatgtgttacactgtggatgttcaaggcattgcttgggctattgggggaatgatctatggtcttgtatatatcactgctgcagtattagggggtcatattagcccagcactgactgtttgcacttgttttggcacgcaagctctctctgacaatggcaagttgttacataataatgcattgctagggagctat

SEQ ID NO: 195 - DNA, 389 bp, Glycine max
  Clone ID: PAT_MRT3847_100176C.1
atcagttacaaggccagattcccaccagccttggccagatgaagaacctgaagtttctttctttggctggtaataggttaaatggtttaattcctaccagcctggggcagttgtactctttgaaagtcttggacctttcgtcaaactctcttactggtgagattcccaaggctattgagaacatgagaaatctgactgatgttttgctcaacaacaacaatctttctggtcacattcctaatggtttggcacatgtcgctacactctcagcattcaatgtgtctttcaacaacttatctggatccttgccttcaaatagtggcttgattaaatgcagcagtgctgttgggaaatccgttctaagtccctgccatggagtttctctgagt

SEQ ID NO: 196 - DNA, 136 bp, Glycine max
  unsure (1)..(136): unsure at all n locations
  Clone ID: PAT_MRT3847_100177C.1
cctctgtcgccgccagatctcagacgagactcagtcacactttctcngctttctcttccacaaancanangancggggcggngntgcgnggnggggntgctncncntcgccactntntccggtgcccacaagatca

SEQ ID NO: 197 - DNA, 435 bp, Glycine max
  Clone ID: PAT_MRT3847_100178C.1
tccttcttcgaggacacaaccaaaacggcaagcagcacgctccgagagcgctctcgtgtcccgcttctctcccaccccctttgagcaagtctcaatcaagcaatatatcgctcgagcagcgctagacgccgtcgagctcccccgagtcgatctcgaacctctcacacacaggtgggagcgaacgaccgaaaaggctcaatcgccactctgagctagactcgggtactcgagtcatctgccgccgctccaatcgccatcgttcctcttcatcgcccccgtccagaacggggtatcgaccgcgtggacatccccacccctcattcgagcccgctagccgggctcccaattcccaaacttgggtggcagacaccaagccaacaggctagacgcccataaaggatcccccctcggcccgcattggctcatacaccaact

SEQ ID NO: 198 - DNA, 511 bp, Glycine max
  unsure (1)..(511): unsure at all n locations
  Clone ID: PAT_MRT3847_100179C.1
catcgctggaacttccatttccggtgaccggaaaaccccatcaccgtcgccgaaatgggaaccgttaacaacaccgtcgacaccgtgaatgctgcggcctccgccatcgtctacgctgaatccagaatccaacccaccaccaccgtcccgaaaaaacgctggggaagctgctggagcttatgttggtgttttggacctcataaaaacagcaagagagtgggcaatgctgtccttgttcctgaacctgttgaacctataggcccagttggatttcatcctgctactgctgcaccaaatccttcaactgctattgtaatgccattcattgtccctccctcttcacctgcatcttttctccaatctgatcctccatctgctactcaatcaccggttggattattctccctcagttctctcactgttaatgcttctggtggacctgcatccatttttgccataggcccttacacctatgagactcagttagtctcgccacctgtattntctacct

SEQ ID NO: 199 - DNA, 2480 bp, Glycine max
  Clone ID: PAT_MRT3847_10017C.1
atcttattagttgcggaacctcgtacgcgctttcatgcctatagctgttcttgggtctaaagaacatggtttggagattcctttggcctatttgacaatgttttagcaatttcccatcttttgatactttcaaagactgattcttttggattcaaatcctttcaatttcgttccattgaagaaaaacttaatctggttcgtgcttttcttgcccgagttgacgtttgcaggcaacaagaaaatgagcaaaaactggaaatctagctgctttcgggatcctgggggagttcttttccttcttgagttgtgtttattgtttcggaactttagtttgtgctgctctttgaatgaattaggtaaagctcgttttgaagttcaaacaggtaatagtaaacgacccttttgatgctgtgtcgtattgggttcttgttgaagtggaagttaacccgtgtaattggtttggagttgagtgctccgatggaagagtagtggtcttgaatttgaaagacctttgtctcgaaggaaatctggtacctgagcttgcaaaccttgttcacataaagtccataattttgcggaacaattcttttcatggaatcatcccccaaggaattgcacacttgaatgaaatggaggttttggatttgggctacaacaactttagtggaccgctacctacagatcttgggaataatattccgctgacaatccttttgctggacaacaatgatcatctttgtggtttctctcccgaaattaatgaattgaagatggtttctgaatatcaagtagatgaaaaccaactaagtagtgcagaaaaagtgccaataagatccatcaaacgccatgctggccaaaataatggtgttcggaagctactgcaagttcgtactcgtgaaggtggaagtccttttaatcgggtttttcctgatagtcctgctccatttccttcagctccctcacctgccccagcaacgccaccagtggttcagaagccagctcccgttgaccgaaataattctgcttctccttctcccctgcctgaaccacgctctgcaccgctatctaaaagtagctcatcaaagaaccatctagttgttattttggctggagttatgggtggtgttgtatttcttctcatttcaatcattggcctatatctctgtaaaacaaacaaggtagctactgtaaaaccttgggcaacaggattaagtggacagcttcagaaggcatttgtaacaggtgtgccaaagctaaagagatcagagcttgaagcagcatgtgaagattttagtaatgtaattggcacttcatccattggtacagtttacaaagggactttatctagtggtgtcgaaattgctgtggcatctgttgcagcgacatcatccaaagattggtcaaagactctagaagcccaatttaggaacaagatagatacattatcaaaagtgaaccacaagaattttgtaaatcttcttggacattgtgaagaagatgagcctttcaccagaatggtggtttttgagtatgccccaaatggaacactctttgagcatttacacataaaagaatctgagcacttggattggggaacaagacttagagttgccatgggcatggcttactgcctacaacatatgcaccagttggagcctcctatggtccttagcaacctgaattcttcaggtgttcaaatcactaatgaatatgcatcaaatatatctgatttaagattttccactgaaataaccactgatatgaaaaaatctcctgctagaaaaaacattgacatgacaccagcaagtaacatatacagctttggtgttatattatttgaaatggtaactggcagactcccttattcagtggacaatgatggctcacttgatgactgggcttcacactatttacaaggggatcagcccctcaaagaaatggtggatccaactctagcatccttccaagaagaacagctcgaacaagtcgatgctttgattaaatcttgtgtccatcctgatcaaaagcaaagaccaacaatgaaagaagtttgtgtgagattaagagagataacaaaaataacacctgatgcagctgttccaaagctttctccactttggtgggcagagcttgagattgcttctgtagatgcaagctgaaatcgctaattcgggttgtaagtatggagttcttaccatcctcatcctttttccatcggtgaaggcacagaaaatgtattcacctgtagattaatacatcttgtgttaattatagaagagtggcaaatcacatgtacataagggagataaaagaatgtgattttttcttttcttttcctggggtgcttcgtttggttatggtttatgaaattacactaacaaaaaaaagtttcacatcagtaaatttcatttgctcagtcagtttatttgatgaattaaaaatgtttttaatttttccaaatcttctcatcctaaaaaaaa

SEQ ID NO: 200 - DNA, 366 bp, Glycine max
  Clone ID: PAT_MRT3847_100180C.1
ggataggcggcccacggcgcctaccacatttagagactctacggataactcggggtcttggactgaagcagcctgagatggagtgtccatctttaattctaagaatattccgggagatcattgatctcggtctaattgccgtgaaggtcgcatggatgccattcatgtatccactgccttcaccatctacgacatttacatgacccatcatgacaggggtgtgcgtccggggcacagctgatcggtacactcaagacagaggacatgcaagacactatgacataccatcatctgagagaaagccttgtacactgaatgccgtggtgtagacactgatggcttcatgtggtgaacacctactacacc

SEQ ID NO: 201 - DNA, 154 bp, Glycine max
  Clone ID: PAT_MRT3847_100181C.1
acgcgcacgcgtccgatcgtgcgccgcctaagtgtgcaacccaacgcctgagaaggggctgagcagtacacctgttatgtgtgacccaatggcatagaagttgagacagaagtcagaagcatggccagaaaggtcacaaggagctgctatagtg

SEQ ID NO: 202 - DNA, 259 bp, Glycine max
  Clone ID: PAT_MRT3847_100182C.1
ggaccgccctttggttgaggctcactttgagacatctcatgtatagcatctcgcgtctctgctgacgccacgtctaaaggcgtattgccatcactgtccctcacggatggatcagctcgatgtcggatcaacgtcttatagatgtcgatgttgtcggtgatcgcggcgtaatgtaatggtgtctgaccggcttcatcttgtatgtctatatcggcaccgttgtcaagcagtattttgagcagttgttggtgacctctgt

SEQ ID NO: 203 - DNA, 274 bp, Glycine max
  unsure (1)..(274): unsure at all n locations
  Clone ID: PAT_MRT3847_100183C.1
atccaattgaaattttaaaaatncactgggataaactncaaganttcaattantgaaattgaataagtaaacaatttaattggantgntngaatngnatcanaaaaatggagtactaantcccatcctcttatttattattnanttaaccgattcaacttgctttgtnatcgaacatttctttttgatttcaaaaattttccggaananatttgaatctattttnanatgcgagtcantcctannacttcnggtccngaggtttctgngcttga

SEQ ID NO: 204 - DNA, 315 bp, Glycine max
  Clone ID: PAT_MRT3847_100184C.1
aaaaaccgggttttttatttgggggttttttttttttttttttttctatttttttttttttctattttaggtttatcttttttttttgggtttttttaaccaagacgggggctaactcccttttttaatggctccttttcccatctaaacgcaatggcaaaaatggtttggttcaccaaattgggcaaaaaggggggggccggcaaaacggacccattatttccacgccaccccctttgttccgggcaagaagaaggggaccccctaatgtcttgatcaacacgaagaaggcaaagaagaggaacaagccgaact

SEQ ID NO: 205 - DNA, 941 bp, Glycine max
  Clone ID: PAT_MRT3847_100185C.1
caggcaccgaaaccttcttcctttgctggcccacgtgtctaggccgggatgccactaccttgtttacgagttcatgaagaatggcagcttgcatgacaccctgagcaaggttgaggtgggcgagttcgagttggattggttgtcaaggcacaagatcgctctcggtgtggccgctggactcgaataccttcacttgaatcacaaccctcggatcattcatagggatctcaagcctgctaacattcttcttgatgatgacatggaggcccgaattgctgatttcggcctcgccaaggccatgcctgattacaagactcacattacaacctccaatgtggctggaactgtgggctatattgctcctgagtatcatcagatactcaagttcactgataagtgtgatatttacagctttggcgtcatacttggggtgttggtcattgggaagcttccttctcatgagttttttcagcacactgaagagatgagtttggtcaagtggatgaggaagattttgagttccgagaatcccaaggaggctattgatacaaagctgctggggaatgggtatgaggaccagatgcttcttgttttgaagattgcatgcttttgcactatggatgatccaaaggaaaggcctaacagtaaggatgtttggtgcatgctgtcacagattaagcactgactctgttggattactaatgtgtaccatatttgtgccaaagtgtgtttgtttaagaatataatcttgcttcataaggtaaattatgaaccgatgcaatattgtttccttcatcataccttgctgaatttccttggaaaatagaaagaaaatttcagcaatgcaatgatctatctataatctagtctgtcacaactagtttgcactttatatgtttatgcattcaccctgcaaataaaatagttttatgttgttaccc

SEQ ID NO: 206 - DNA, 327 bp, Glycine max
  unsure (1)..(327): unsure at all n locations
  Clone ID: PAT_MRT3847_100186C.1
gagaaacaaagaaaggaaataattgatctttgaaaatgcatggaggaaagaaagctggagagtccatcaaggaaacagctgcaaacattggtgcttatatgcttttcatttgctgttactaattacagatatgcaatttggaatttactcaaaacattttgttttaggaatgtgtacgagctttcataacagaaagcacagatggagatattcttgaactacatattcaggatccttttcatagattgttactgcatggagtttgtgaggtaatataacatatgcttctccctgtgtnaatggtgaaaactcgatgtgctattaact

SEQ ID NO: 207 - DNA, 2246 bp, Glycine max
  Clone ID: PAT_MRT3847_100187C.1
ctcgagccgcggattcgggcgatccccagagtgtaacaatggctgggaaaactcaaactcactactttcttctcttgtttctcttcttaatctccatcaacgccaaacttgatctctacccttcagactacaaggcactcctaactctgcagaaggacctcggagtcaacggtcaagtctccgcaactctggcttgcgaaacagagggcgtgttctgcgagcggaggaagctctccggcaaggaaacctacgccctccgaatcaccagactcgtcttcaaatccaacaacctcaacggtgttctgtccccttccattggacgcctcacggagctcaaagaactctctctctccgacaacaacctctttggccgactccctccccaaatctttgactgcagaaagctccaaatcctcgacctcgccaacaacctcttctccggcgaggtcccccccgagctctcctccctcacgcgcctccgcgtgctggacatctccaccaacaggctctccggcaaccttaattttctcaaatactttcccaatttggaaactctttcagtagccgacaacctcttcaccggaagagtccctccctcggtccgctccttccggaacctacgacactttaatttctccggcaaccgcttcctcgacccctctctacaatcatcctcaccagacacaattctctctagacgttttctatcagaagacggtgatggtgatgttcctgcacctgctcctgcacctaataactcacagaagaagaaatccaatgcttctactcatgctgctgctgctgcacctggtcctgcacctaaccataccaataagcacaagcacagtaagagaaaactcttggggtggattctggggtttgtagcaggggcactggggggaaccttatcaggattcgtgttttctttgatgttcaagctcgctctcgcgttgatcaaaggaagaggaaggaaagcggggcctgatatctatagtccattgatcaagaaagcagaagatttggccttccttggaaaaagaagaaggaatcgcgtcgttggagatcatcgggcgcggtggctgtggagaggtctacaaggcagagttaccgggaagcaacgggaaaatgatcgctataaagaaaatcgttcagcctcataaagacggtgctgagtcagcaattgaggacagcaaggttctgaacaagaaaatgaggcatattcgatcggagatcaatacagtgaaacaaatcaggcaccgaaaccttcttcctttgctggcccacgtgtctaggccgggatgccactaccttgtttacgagttcatgaagaatggcagcttgcatgacaccctgagcaaggttgagatgggcgagtgcgagttggattggttgtcaaggcacaagatctccctcggtgtggctgctgggcttgaataccttcacatgaatcacaaccctcgaatcattcatagggatctcaagcctgctaatatccttcttgatgatgacatggaggcaagaattgctgattttggactcgccaaggctatgcccgattacaagactcacataacaacctccaatgtggctggcactgtgggctatattgctcctgagtatcatcagatactcaagttcactgataagtgtgatatttacagttatggagtgattcttggtgtattggtcattggtaagcttccttctgatgatttctttcagcacactgaagagatgagtttggtcaagtggatgaggaagactttaagctccgagaatcccaaggaggcaattaattcaaagctgctggggaatgggtatgaggagcagatgcttcttgttttgaagattgcatgcttttgcactatggatgatcccaaggagaggcctaacagtaaggatgttaggtgcatgctgtcacagatcaaacactgaatctgctgtatgtttaagtatgtgaaatattgtgtaccatatttgtgccaaagtgtgcttgtttaagaatatagttgataactagaggatcaatgttggttcatagggtaaataatgaaccgatgtaatcttgtttcctttatcacggattgctgaatttctttggaaaaagaaaaattcagcactgcgatgatctatgtataatctagtctgtcacaactagtttccactttacatgtttatggatacaccctgaaaataaaatagttttacgttgtttccaaaaaaaaaaaaaaaatagccctaagaag

SEQ ID NO: 208 - DNA, 531 bp, Glycine max
  Clone ID: PAT_MRT3847_100188C.1
tgtggagtgccgcctgcttggggggggggggggggctagcatagcatgaacgggagtgactaacgattaaattagatactaggaggagtacggaaggaaggtaaataactagaccaaccggcagccgagccaccggggtgctactgcagcaagttgctttagaaataacagtgtcagattggaaagagtaaaataaaactctaaggagaatatttgggtatggtactgctcatgggagagtgccggcaaggtcgggggccataacagtacaatggcggcagaaaagtcgagagcgaagtagtcagggttgagctgctggtggcaggaggcaacgcacttatgttgggtgctataagtatggcggtgaaagggcctatagtggctggcaatttgctcgtcgccagagatgttggtaacggtactcacggcgagattagcgttaatgtattgcggagcgaggagatccctattggcagggctttgttgcgttagccgcttcgtaatgattaagggaacggcagagggtgcgac

SEQ ID NO: 209 - DNA, 556 bp, Glycine max
  Clone ID: PAT_MRT3847_100189C.1
caagagatattgttcatggtacccatgtatgttatactactcaagagatattgttaattacatatgcaatgatgaagatataaaagctgtatcgtttgttggtccaattacagctggaatatatgccacagcttctgctagagggaaacgagttcagtcaaatgcaggtggcacaaatcatgtacttgtaatgcccgatgctggcttggatgcgactttagatgcccttgttcctgctggctttggtgctgcaggagagaggtgcatgacttcaagcatagctatttttgttggaggttcaatgcaatggtactaaaggagttgaacctatacctaccgttcagtactaatgtgttacccagtgaaactataatgatgagtttttcagatcttaagtttaacttcaacctaaattgttaaatatttgaattgaataggagaagctttaaaagttaatggaaagttggatcgttcgaagatttacatagaaagaaaaactcgtaaaaaaaaatcattttttttccctttcctccgttaaatctctccaagattttta

SEQ ID NO: 210 - DNA, 2031 bp, Glycine max
  Clone ID: PAT_MRT3847_10018C.1
atgagcaaaaactggaaatctagctgcttcagggatcctgggggagttctcttccttctggcgttgtgtttattgtttcagaactttagtttgtgctgctctttgaatgaagaaggtattggaattttggtttgtggaattttgtattctcgtgaggttaattgtgtgtatctgaggggaattaaagctgagaagggagttctatgtgcaggtaaagctcttttgaagttcaagcatggaatagtaaacgacccttttgatgctttgtccaattgggttaatgatgaagtagcagttaacccctgtaattggtttggagttgagtgttctgatggaagagtagtggtcttgaatttgaaagacctttgtcttgaaggaaatctggtacctgagcttgcaaaccttgttcacataaagtccataattttgcggaacaattctttttatggaatcatccctgaaggaattgcacacttgaatgaattggaggttttggatttgggctacaacaacttcagtggaccactacctagagatcttgggaataatatttcgttaacaatccttttgctggacaacaatgatcatctttgtggtttctctcctgaaattaatgaattgaagatgctttctgaatatcaagtagatgaaaaccaactaatccgtgcagaaaaagtgccagcttgtagaagatccatcaaacagcaatcaaggcatgttggccaaaataaaaatggtgttcagaggctactgcaaactcgtactcacgaaggtggaagtccttttaatcgtgtttttcctgttagtcctgctccatttccttcagctcccccacctgccccagcaacgccaccagtggttcagaagccagctcctgttgaccgaaataattctgcttctccttctcccctgcctggaccacgatctgcaccgctatataaaagtagctcatcaaagaaccatgtagttgttattttggctggagttatgggtggtgctgtatttcttctcatttcaatcattggcctatatctctgtaaaacaaacaaggtagctactgtaaaaccttgggccacaggattaagcggacagcttcagaacgcatttgtaacaggtgtgccaaagctaaagagatcagagcttgaagcagcatgtgaagattttagtaatgtaattggtacttcatccattggtacagtgtacaaagggactttatctagtggtgttgaaatagctgtggcatctgttgcagcgacatcatccaaagattggtcaaagactttagaagcccaatttaggaacaagatagatacattatcaaaagtgaaccacaagaattttgtaaatcttcttggacattgtgaagaagatgagcctttcaccagaatggtggtttttgagtatgccccgaatggaacactctttgagcatttacacataaaagaatctgagcacttggattggggaacaagacttagaattgccatgggcatggcttactgcctacaacatatgcaccagttggagcctcctttggtccttagcaacctgaattcttcagctgtccaactcactgatgattatgctgccaaaatctctgatttgagtttcttaaatgaaatagcttcagctgtgataaaatctcctgctagaaaaaacactgacatgacaccagcaagtaacatttacagctttggtgttatattatttgaaatggtaactggcagactcccttattcagtggacaatgatggctcacttgatgactgggcttcacactatttacaaggggatcagcccctcaaagaaatggtggatccgactctagcatccttccaagaagaacaactagaacaagtcgatgctttgattaaatcttgtgtccatcctgatcaaaagcaaagaccaacaatgaaagaagtttgtgtgagattaagagagataacaaaaataacacctgatgcagctgttccaaagctttctccactttggtgggcagagcttgagattgcttctgtaaatgcaagctga

SEQ ID NO: 211 - DNA, 361 bp, Glycine max
  Clone ID: PAT_MRT3847_100190C.1
aattcggctcgtgcctatctcgctcttgcaatggccgaatttttttttataatcgccgccggccgagatggggatgagtgttggaaccttgaacaagattcgaaagcacttgagctcttgcactcagacgtggagctgctgacgggagattttagcgaaaaggaccttgaagtcatgcagagcgttgagaaattcaacttggacaacacacacatgttagctcaacctccaatgattgacgacgaaaccattgatgatgatgctggagaatgatcccgaagggcttttgctgaagctgaaaacaaaggaagaagaatgcttatgaagactgtacttgatattgatctagaagatcagacta

SEQ ID NO: 212 - DNA, 189 bp, Glycine max
  Clone ID: PAT_MRT3847_100191C.1
gcgccatttgtcttttatccatgtggacacatcactcgtgactagatatggcggagtgagcctcgctgagatctaatatacgcagtgctgtatcaggaccataaagttgacactttcttgtgcagacactggacatcttagaagtgtgtcgctcaggcacttgcgttttaacctgctgtttacagcact

SEQ ID NO: 213 - DNA, 534 bp, Glycine max
  Clone ID: PAT_MRT3847_100192C.1
gttttagtatgatttttattctcagaaaacaaaaaaccaaaacaacaatgaaaaacaaaacaaaaaaaaaaacacaaaaaaaaataatatataaaaaactgtaaatgtggtaagaaatggtctaactctacaaaaaaagaaataaactaaaagggggggcactgcataaagtatcgctgattattaaagaacaaactaacgtcaactgctttatatggagcaccctaaattaaattcggctgccatgtcttaaaacttcaatagctgaaaaaaacccacgctctccccagaggaagctcgtgaaaaaaaagcccggtttgacaatgtggtgaccaatcaaaaagggccacacctaattgcccttcaaaaaaagttcctaacagaataggaaaaggcgaccccccctgttttggcccataaacccaaactgattgggttgtaacaccaccgcggaacctaacaataaccggcgtcagagagacccgtattcttccattgtgaccttaattttaacgcccggcccggagttttttc

SEQ ID NO: 214 - DNA, 390 bp, Glycine max
  Clone ID: PAT_MRT3847_100193C.1
gaacactaccaatagaaaggtgacctttaataaaccaaagccacacaacgcagcaaagtcctgaaactcgctgcgcttaacaaaaatggaatcaggggttcccaccaaccccacccctttaaaccccgattaattaaagccattttgccaccggcgatcaaaaacccaattctgggaaccaccattgccaaaagaagggggaaacttcaaactttggcccaaaaaccagcttccttaaaaagaagaccccagagttccgaaaagaaacccacctttattggaacccaccttccctgaagaaccaacccggaccaatcaattttttttttgggcaagcctggtgaacctggcttccggaggaaccctctttttaaccgtcttgaagacctc

SEQ ID NO: 215 - DNA, 1233 bp, Glycine max
  Clone ID: PAT_MRT3847_100194C.1
tgaatcatcaagtgacaaagaggtaagtgatcaacacatgaaaattactttccctggaaagaaaatgcagaccattgcagaacgatttgaagaagctttggggacatcctctgttatcactgaagggacacatgttggagcacctaattcattgagacctggaatatttgggaaacttccagcttatgatgctgaaagtgaaagaaacagacatggagttctggaaaaagttacaacctgaagctaggccagatggtgaacttggctgcattgatgtaaaaatcatttcaagataccgcgatggaaagctgactgtttgccattgctcctttagcaagtccacagaggttgtttttgcagaattttctgttacaagataactccaaaggaatgggttgtggtggccgcaaaagcagtcaaagcaccattatctttagtccaagggtttgcaacaatgttgaccttgaagttgggaacttgatccaaattcaccctccatggaaggaggctcaagtgggaaatgataatattatcgtgtgcacttatttctctgaaattttattccagtttgattcactgtgatcaaaaagctcactatcaacaggtagcatgttcataagttcattttaatttcttataaagcaaggataattatgcaaaccacagtttgcagtggatagaatatcaaacaaatatggtgctgttcggctttaggaactaggaaagggacagctcttctttcttctggctcatgagtcaagaagggacctttgagtttgagttacggtactactagagttgaagttcatggtagagaaaaattagaagagaattaagggagaatcagaaagaatgcctaatgttattcatatctgatatctgatatctgatattgatattgatacagttagaaggtaatttttttttttttggaaggcacaattagaaggtattcatagacgtctaatgctaactttattccgttacagttgcagtggactaactaacgtctaacttcaatgaacttagccactcaataccaaactcaccgcaacaccgcaccctttccatgatagtgatgatacccactgactatataggttgcaaattgcaatctgtgtgggttaagtgcatttttttttttatcttcgtcaatttaaatcatgggttaaaagacttgttaacaaacatacgtgtgggtaattttttttaaatacacgtaatttcatggac

SEQ ID NO: 216 - DNA, 194 bp, Glycine max
  Clone ID: PAT_MRT3847_100195C.1
tttttaaatttcgcaagaccaactggggaagcggtgtattaagagatgactgtatattcacttttaatacaatgaattattcaacccaatcaaaacttctcaacgaaatattaggcggatacaaacaactgggctcaatagtaaaagatacaaacaaattgtttgtttcctaacactatatcgaaaaacataaa

SEQ ID NO: 217 - DNA, 421 bp, Glycine max
  unsure (1)..(421): unsure at all n locations
  Clone ID: PAT_MRT3847_100196C.1
catatatacctctcctcctaatttatatcccaattttccacctatcctatttcacacttactaactcctggttggttcttttttgtcggggaagatgatcattataatctcnncttatgacacacaccaaaatttctttttctcataaactgcatcctccttcgtgaaggaacttacggacaacttctgtaaatgaaccactccaaattaccaatttacagtgtctcaagtgaaagctctattcaatgcaattgttgaaaaccaccaccagatcatctcttctcttttttccgacctatccaaaccttctctctaaacccacctctaccagatttataatcttaaaaactcatatgaactcatacttaactaattcaaacattctatcactccacaaataattaatacttaaatcataact

SEQ ID NO: 218 - DNA, 575 bp, Glycine max
  unsure (1)..(575): unsure at all n locations
  Clone ID: PAT_MRT3847_100197C.1
acggcccgncctttttttttttttttgttttttttttaaaatnaattatctatatataaaaggtttttttgtttttttttttaaaaccgttttaaatctgaccgatttttcattaaactcccattttgggaacattaaaaatttttcttttccaaaaagaaagctcccaaaggggcccaaaatcataaaataacgtccaaattaagttcccccattcatgggaaacaccctttaaaggcaaatttttttaacacaaatttaaacaggatttttttttctctcaaaaaaaacaaaacagtttaacgttttgaggccggttgttcttttgccttgggggattaaaaccccttttccacaattgttggtttttcaccagggaaagcgcgaatattgcttttttaaacagctcccccggaaaaaacacctccataggctaggtttacgggccgggggttcaaaggaaaaataaacctgtggttttcaggggggtttaaggggggaatccctgggacccgggggcggccccgtggaccaacccggaattttcgggccggggcctggaggggtcccacctt

SEQ ID NO: 219 - DNA, 618 bp, Glycine max
  unsure (1)..(618): unsure at all n locations
  Clone ID: PAT_MRT3847_100198C.1
catgttttaagcaacatggtgaatatcaagcaaaaatattgagttgcatcaaacctctactgttatttatattagatgatttactcttctctcgtgactcatatcatatcaatagctcagatgacacaaaaaacataaaccatctagattacatctatatttaatacagttggtatgtgtatcaagaaaagtgattgctcaataaatacgttttggaagaagtggtgttcggtcaatatgtttaagaaaaaaaaaatagtctcagacaataaatgaacaataaaaacatcacaatggatttaagatttcattgtgaatattttttgttaacaaatattccattttaatagagggatactataaaatataagaacctagagcaattaccaagagatgaataataactcccctaaaccaatttttaactttgacccacttatcagtttggttcccagttagtccggatttttttttttatccgagctttaaaattatgtttgtgcctatgtaangggttgttaataaatgttttaaatttgcttatataaataatggtatctatcaagggatcatgtttttttaaagttaatctaaacacacgataccaacttattcaat

SEQ ID NO: 220 - DNA, 800 bp, Glycine max
  Clone ID: PAT_MRT3847_100199C.1
ctgcgagaagacgacagaaggggatcttgattgtttttttcctaacaggatcatttcgttcggagctgaggaggcagaaacacaacaacatatgagatggaagctgcaaagggaaccgtcaaaggtgtggctatcatcatcggagacaacaacattagaggctctcttcagtttcttcagcaccccaatgggaccacccatgtgacagggagagtgacagggttgtcccaaggctttcatgggttccatattcatgcttttggtgacaccaccaatggctgcaactccactggtcctcacttcaatccgttcaagaaggatcatggggctccttcagatgataagcgccatgctggtgatttgggcaacattgctgcaggccctgatggagttgctgagatttctattagagatagacagattcctctaactggagttcactccataattggaagggccgttgttgtgcatgctgatcctgatgatcttggaaggggtgggcatgaactcagcaagactactgggaatgctggtgcaagagtagcatgtggtatcatcgggctccagtcatctgtttaggatagtttacctaaagatgatgtattaacagatggtgtatgcaatgtcatttgacttatgtgttagatcacagtcatgctgtaactacttttacagtaactctaatgacaaactaaagttgtactacagtgttacttgggtggagttgctatgcttgttgcgtttagtacatataatataagctataagtgcagcaaaagattataatcaagtttatggtt

SEQ ID NO: 221 - DNA, 227 bp, Glycine max
  Clone ID: PAT_MRT3847_10019C.1
tctaatacgatttattgttacagcaaaaacaattaataaaggtgagtgtttatatcaacatgggggtgctaaatgtgtgttagttgcttcttttcctttctgttgttacatcttcacgcatggaactgatctttttcaaaagttatcagtcatcaatttatgatgattattagtattccaaaccattctttgatctcttcatttgcacactctcaatgccttcttaa

SEQ ID NO: 222 - DNA, 463 bp, Glycine max
  Clone ID: PAT_MRT3847_1001C.1
cggcttgagtgcattcttacagagtgggatgagttcaagaacattgattttcaaagagtgtatgacagcatgcagaaaccagcatttgtgtttgatggaagaaacatattgaatgctgagaagttgagggagattggattcattgtgtactcaattgggaggccattagagcaatggctaataagcatggcctaacaggcttgaagattatgaattgagcagagctatcaattatgttatcctttgtgacatttcaccacttgctatttttcatgatttcaagcgtttttctgatatgtaatacggtgaaatgaaatctgccttcttctgtgttgcaaaataattcatgtaagcattaggcgggctttagttgttacctgttgctagctcctatacatactattcaaataaaaatgcagctgccttgaggctgtactgtagtatttgagataattaaaaacac

SEQ ID NO: 223 - DNA, 2043 bp, Glycine max
  Clone ID: PAT_MRT3847_100200C.1
ggctcgagctttgccgcgcgtttggtatgtctggaattccttgacataagttacaactatttggatgatgctggcattctatcttgtttggatgggctttcatctcttaagtctctatatttaatagataactggttgaatatatcttcattccacggagaggctagcaacatttgtctttttttattttaaaatgatgtcatcaacctcttctaatttttggtattgtttttccacaatttgttggcttcttccacaacacatgtgcatatatacctatataagtttttgaaactctatcttcaaagttgcgtaatctggagctccttgacataagtttcaactatttgactaatgacatcctgccaaccctcgggggatttacatctttgaaagagctgtatttggttggaattcatttggactcagatcttcatttccaagagaacgatggatttacgtggccaaccggtttacaagcccttgatctggtgggaaacagattaaataacaagtttcttccatcattaaatgggttagaaagtctcaaacatctttatttaggcttcaatcagttagaaggatcgctgaatataggcggattatcaggtttgactagcttggagattcttgatctaagttataataatattagtgattttgtggtccatcaaggcttaaaaagtctacgcagattggatgctctttatttagatgggaatatgatagatggaagcaagttaagaaagtcgttgcgagctttttcatctgttaggatgctttcaatgagagaaaatgaatttaaaggaacaattgttgttggagattttctggatttaagtaacctagaagatttgacaatggacctcagtaataacatggagaatgagtttctcaaaagtattgagaaattgacatctttaaaagttctgtctctttatgattgtaatataaatggcacccttcctcctgcggattggtctaagttaaagaagttggagttgttagatctatccggcaacaaatttgagggaccacttccttcgtcttttgttaacatgacgtctctcttggaattggaaatttctgataatcacttcattggaaatttcggttctaacattgcaagccttacatcacttgaatattttggttttacagaaaaccaatttgaagttcctgtctctttcacaccatttgccaatctttcaaagatcaagttcatctatggtgaaggaaacaaaatcttattggactcacaaaatagtttgccaacttggattccaaaatttcagttacaagtgcttagtgtgtcttcaacaactaaaactaaatctcttccgctccccaattttcttctataccaaaacaatttaaccatactagatttcagtagttggaagttggaaagagactttcctaattggttgttggaaaacaacacaaaaatgatggaagttctgtttagaaattgctctttaactggtactttccagctacccatgcgtccccttcctaacataaggcaaattgatgtttctgacaatatcatagttggccaaatccctatcaacaatattagttcaatttatccaaatttgcaatctcttaacttgtctagaaacaacatccaaggttcaatcccttacgagttaggccaaatgaactcattatattcattggatctttctgacaatcaattgtctggagaaatgccagaggacatatttggagttggtcaccaactcaacttcttgaaactatcaaacaataagcttgagggacctattttgaatatccctaatggtttggagaccttgttattgaaccataatagatttactggtagactcccaagcaacatttttaatgcatccatcatttcattggatgtaagcaataatcatttggtgggaaagattccaagccttataaaaaacttgtcaggattgaacgaactttgtttgtctaataaccattttgaaggatccattccattagaacttggagaacttgaatatctaacttctttagatctctccc

SEQ ID NO: 224 - DNA, 362 bp, Glycine max
  Clone ID: PAT_MRT3847_100201C.1
aggaaagaaaaaaaaaattcactcaattattatacatgcaggtttttttttgtcccgcccaaaaaaaggaaaaggggggcgggcctttccattatccatccactccaacattttaatattttttcttttcactgccacattggagataattactttttattatttgaaaccaaatttgaacccccacatttttttttttttaaatatttgacaaattaacagggggactttttttaattgggggacacaaaagaggggcgggaataaaatggtggacaaagccccttggttgattgatttatttgtgggaatccaaaaccataatggtgctaaaaatcattggatacaaatactctgggggg

SEQ ID NO: 225 - DNA, 312 bp, Glycine max
  Clone ID: PAT_MRT3847_100202C.1
agagacacagagggggttgttgtgtgtcattttcggggcgaattttgggtgcagaggcagagaaggagcacccacaccgaccactctactctgcaacacccgaatctcgttacctaaacacctgtttgcgttcttttcccttttcttttctgattagttcaagagaaaaaaggacacaatggactctgcacgtataatctgcaccgcaaaggttttaggatttcaaggccgaaagctgtctataaaccctaaccacgatttgaaatttctacaaccaattgacctgaaagagaattgtgcttgatggctttc

SEQ ID NO: 226 - DNA, 359 bp, Glycine max
  Clone ID: PAT_MRT3847_100203C.1
acaaaaccaaaataccacctgcgtccccaatatcacttcttctctctcaattagggtttgcgtttttacactctctccgacacccccccccccctctctctgcttctcctcgatccctcgcgtttcaatgcctgccaaatctttcagcaaaatccaaacagtgccaagcagttccactttcgagcaaattcggcgttcgattcagttcatatcagttcctccccttatttgactatagggcccctcccatggcgcctagccgcagaaggggcgtcagtaaggcggcggcggccgccgcagcttgccgccagtttcaagtcggcgatcttgtacttgccaaagttaaggggttccctgca

SEQ ID NO: 227 - DNA, 232 bp, Glycine max
  Clone ID: PAT_MRT3847_100204C.1
gcgatgctcacctacgtatgctcgtcgaggttgtcgagcttcaaagagggagtctaagagatatgtaggtgggctatgagcttatggagtgggctctccatgaggtggtcatagctaatgactacttgacccgcgaacgccataggcttgttctttatcagatgctgcgctcaatgtaccatatgcatacagctactgtgtatggcatagaccttaaccccaagaatatact

SEQ ID NO: 228 - DNA, 658 bp, Glycine max
  Clone ID: PAT_MRT3847_100205C.1
gctacggaaacccttcatcgattcaaaaagcattcgaattgctgcttatcggctccttccttctcattgaatggaacaatcttgctcttccaattccatctcatttttcgtacgcaacgcatagttatatattgattttgtcccaataagaatggcagagagtacagatgatgaatcattgttggctcgtatacaacaattggaacaggagcgtgatgaattacgcaaagatattgaacagttatgcatgcagcaagctgggcctggctatcttgctgtggctacccgaatgcattttcaaaggacagctggattggagcaggagattgagagtttgaaaaagaagttggctgcatgcacaagagaaaatctaaatctacaagaggagctttctgaggcatacagaattaaaggtcacctggcagatctacacagcgctgaggtttcaaagaatatggaagctgagaagcaggttaaatttttccaaggttgcgtggctgctgctttctctgaaagggatcaagcaataattgaggctgagaaggccaaagaaaaggaggagacaatgttgcaacaaataaatggcatccataagagggtagaggagctcacctcagattgtcttaagctaaaggaatttaatgatgctctgcagatt

SEQ ID NO: 229 - DNA, 510 bp, Glycine max
  Clone ID: PAT_MRT3847_100206C.1
ggggggaagggcccaaaaagtaaaagggggcaaatttagggcccttgaacaaagaaatgggcccccccaaaggggtaaaacttaaacccaaaacatcaaaagggggcagggggccaaaaaaaaagggcccaacaaggggggaatttgaaagccccaagggctttaagtaggaaaccctaaaaaaaccaggaaggggcccactacaaaaggggttcgggccaaaaccccacaaccctaaaactttttgggggaaacacaatttttggaaggaggcattgaaacccaaaaacaactttttaagaagggggccaaacaaaaaaagctttcagcaaaacacaaccggggtggaagggggaaaaacccattctcaagcggggtttgctttcgcaagggcccccaaaaaaaaatacttaaccttattcgggggaaccggggtatttcccaattctaggcaaaacgttactaagctaggcgaaccccccctcacccaaaattttaccaaaaaaggga

SEQ ID NO: 230 - DNA, 429 bp, Glycine max
  Clone ID: PAT_MRT3847_100207C.1
agataatgggccgtttaattttttacattttatttattaaatgtttttgagaattattttgaatgaaaaagcttatccagaaaatcttgttttaaaggtgacggattttgatttggcctgattacgaaaactatggaatttttggctttgaatttattttagcattgggtcattaaaaagttttaataactggatcaattattataattaagattttattagccttaatttcaaactatcacaaagtgttagcattgttgatcctatcaagctttttgaaaaacgtgtgagtaaaaacaaagcacgttaaaaagttttgatagtcattgattctaggtgtgaagtgtcaaagtatgaagtgttataatgtgtgagccatcaaggagtcgataatcaggatgttacatttgacaccccgagaaaaatctc

SEQ ID NO: 231 - DNA, 143 bp, Glycine max
  unsure (1)..(143): unsure at all n locations
  Clone ID: PAT_MRT3847_100208C.1
cccggnccggaattnncccgggtcgaacccacgcccgtccgtaccggcnttgtcgagaagaaacgacagaaggggtgatgtgtaaaatttggtcattaccttgcaccnaacttttttcgaactgatgtttttgggtattaccg

SEQ ID NO: 232 - DNA, 193 bp, Glycine max
  Clone ID: PAT_MRT3847_100209C.1
cacgcgtccgcttaacttgctccctagaagcgaagaagaagcccagagaaccgtctcctactctctctacccaaagaaaaatggatgtcacatcggtggatacccccgcatgggtgccaagagagagctcaaggtcggtgtcgaggctttctgggatgggaagagcagggccgaggattgcgggaaggggggt

SEQ ID NO: 233 - DNA, 705 bp, Glycine max
  Clone ID: PAT_MRT3847_10020C.1
atcacacacatgcaacagcacaaaggtaacaaggagctttaaaaaacaaatgatgaagaaccgttatccgttgccggagagacggtggttcgtggctatggccgtcgtgggcttgatcgccacggcgatgttcctcaccaacgcgatccgaacctcggaaacctcgtacttgtgcccgggcgcgctcgggatccgaagcaaaacccgaaccgaattcagctacgacgcgtcaccgatccagctccgcgcgattctccactacgcgacctcgcgcgtggttccgcaacaatcggtgtcggagatcaagatcagtttggacgtgattaaatcactgggccggcccattaacttcctcgtcttcgggctgggccacgactccctcatgtgggcctcattcaacccgggcggcaccactgtgttcctcgaggaggaccataagtgggtccactcgatccttaaagacgcgccgggcctgcgtgcccatactgtgcgttaccgcacgcagctacgcgacgcgaaggggcttctcacctcgtaccgctccgaaccttcgtgttctcccacgaaggcgtacctgcgaggcaacgaagcgtgcaagctggcgctggagaatcttcccgacgaggtttacgagaccgagtgggacttgataatgattgacgcgccgaaggggtatttcgcggaggcgccggggaggatggcggc

SEQ ID NO: 234 - DNA, 1212 bp, Glycine max
  Clone ID: PAT_MRT3847_100210C.1
gcatgccactcgagcccgcctcttgcactcgtctggagtcaagactctggaggagccttatcccgatccgcaagaacacgcaaacaccgatcaattaattttctttatgctagatggggagtgcatcagagttcgacccagcgcttgcgctttcccacaaattccctgatactacgtactcttataccgaaagggatgcagcactttatgccctaagcgtaggggtgtgtttgtcggacgctgttgacgctgatgagcttaaatatgtttaccatgaaaatggtcaggagtctatcaaggtcttgcctacgttttctactctacttgtacttagatctggggcgagtggttataatctcccaggcttgaaatatgatccacgtcttctgcttcatggacaacaatacatagaattatacaaaccacttccttcaagctgtcatatacacaataaagtaagccttgccggattacatgataaaggtaaagcagcaattttggagattgaaacaaaaagctacgagaaagaatctggtgatttattgtgcatgaacaggacaactgtctttctacggggttctggtggcttctcaaagtcatctaagccattttcttatacaaactaccctgtgaatcagaatccagctgtgaaaattcctgaaagtaaacctttttcggtgtttgaggatcgaacccaaccatctcaggcattgctctataggctatctggtgattacaatcctctgcattcagatcccatggttgcaaaggttgccggattctcgcggccaatattgcatggtctgtgcacattaggatttgcagttagggcaatcatcaaatgcatatgcagaggagatccagacttggtaaaaagcatagcgggcagatttcttctacatgtctaccctggtgaaactctggttactgagatgtggcttgaaggctcaagggttatatttcggactaaggtgaaagagcgaaagcggacagtcctttctggctacgtcgatctgcgtggtttgacttcgtcactgtgaaagaattcaaattcatttacatgtaggctgtaggtcgataatatttgcagaggagataattttaaaacgtaattaagtgcgatatcgatgattaaattttacaaaatgggtatctatgtagaatagtaaggtgatatttcccttcaaaaaaataaaagcagtgttatttaga

SEQ ID NO: 235 - DNA, 413 bp, Glycine max
  unsure (1)..(413): unsure at all n locations
  Clone ID: PAT_MRT3847_100211C.1
gaaggaaacgaatttattcttctcttgcactcgtctggagtcaagactctggaggagccttatcccgatccgcaagaacacgcaaacaccgatcaattaattttctttatgctagatggggagtgcatcagagttcgacccagcgcttgcgctttcccacaaattccctgatgtaatattctttgcgtaatctttttcttttctttttagtaggttttcctaatttacaacaaactgaattctgaatttctgttatcattttgatcgtgcgagatgctctgcagactacgtactcttataccgaaagggatgcagcactttatgccctaagcgtangggtgtgtttgtcggacgctgttgacgctgatgagcttaaatatgtttaccatgaaaatggtcaggagtctatcaag

SEQ ID NO: 236 - DNA, 646 bp, Glycine max
  Clone ID: PAT_MRT3847_100212C.1
cccacgcgttcgcttgtaatcaaattacagaagaaaagacttaagatatgggttcagaagccactctaaagcttccggtcatcgacttcactaacctcaaattggaagccaacaatcctaattgggaggcaataaaatcccaagtccacaaggcactagtagattatggttgctttgaagcaatttttgaaaaagttcctttagaacttcgcaaagccatatttgctgcactacaagagctctttgatctccctctacaaacaaagatactcaatgtgtctaagacgccttatcatggttatgtcgggcaatatcctatggtcccactttttgaaagtatgggcattgatgatgcacatgtctatgaaaatgtagaaagcatgacaaacatcatgtggcctcatggaaacccaagttttagcaaaactatacaatccttctctgagcagctatcagagttggatcagattatcaggaagatgattttggagagtttgggtgttgaaaagtacttggaggagcacatgaactcaaccaattatcttctgcgggttatgaaatacaaggccctcaaaccagtgacacaaaggttggcctcacaacacactcagacaagaacatagtgaccatattgtaccaaaatgaa

SEQ ID NO: 237 - DNA, 414 bp, Glycine max
  Clone ID: PAT_MRT3847_100213C.1
cggccgcccctaattcatgcgtgtgtcactatcacattgcactgaatgacacgaatcactgaccttctaaagcgctcaaaagagagctcaaggtggtttcctggcacgccacatctagatgcctactacctacgaccctacatatataaccaccgctaacgacacgtctttacgatatcacttccgtctacgtaagacagcgacgcaccaagttggtgacacttacataaacacttagatttatctcaggagctccttcgtactcttcctaggaagagacccttccatgtcaattcctatctcgtaagtgcacccaccaagtgtgagcaccttacgcggctatacactataacaaaacactgcaacaagaagaagcatggcacctgaaaccactatcatcgtggaggcatactt

SEQ ID NO: 238 - DNA, 338 bp, Glycine max
  Clone ID: PAT_MRT3847_100214C.1
tatgacggaaagcgcacgcgcccgcaagctccgatcctgtatagcgggcgcgatccacgcgttcgtccactcgaacgaatcagatgcctttgggactatcgcgctctacactgcatgatatacacagtatataacactcgcacgacaggtgcacatgatatatgaagcctcatcagcgagggcactatgatcactacttagtgtcggtctgcaactagaaacgacgagggagcgctagaaagcatgcttggagacctacgagactagcttttgtgcacagaaagcacgaaattctactgagtgactggagcggcaatgagacttgctggctgggacac

SEQ ID NO: 239 - DNA, 1161 bp, Glycine max
  Clone ID: PAT_MRT3847_100215C.1
agacccaaattgttttagtacattccgatgattatcctcatcttccatcaacagattatgcaaatccgcatgttattctttccatacacaattatgttgtctaaatttcttgcccaaaggtacaactgtagttgttttttgacgtgttcaacatagcaccacagcaatgctaatgctgtattgattccaagttcaaggacacacctgatgctaaaacagtctaatgtcatcgtattgtaggaacccgttacattagtcaaaactgatagacaatagtatcatgagggagaaggagcactgatatcagtcatgagaaaatggagttggtctcgcaagaacaaaacctcttcctgaagtaggggagggagatcttctgttgctagaaggctcaaagcttccacacgcagcttttcttctttaatgccagaccacgtatgcaagggcaaggccaataaaagcaccgttaagacatctgcagtagacgggtgcatgccaatgcagtgaccttcattagaaagacacaacctacttggttccctttgacacaaagggaccaacacatcaactccttgttcactaccaccaccagttgtaacaattcctgaaactaatgttactggattttcactatcagcattcagatgttttacatctatttgactacagcattttccacctgacaaacctagcctaccacaaacagtcaaaagatctgccgcttggcaacaaacactggcagcaagtgctggtaacatatctttgtcaccaaggtttgctaaagtattacaacatgaactttcagaatccaaccaccttgtcacgtgtttgaagagtccagttgttcgaatctgttccagtatgtcagccttgatagctagccttcctttctcctcctcactcagtgtgagattcccatcttcttgcctgcgaacttcagcaatccatgttattaaccctctcaattcactgggaggagatttaaaagcaagagagagtacttcctgaatgtcttttagatcctctgactttagaagttgagggacatcttcggttagaaatttggcaacactgctccaaccttcatgtctacaactcacagtataaagtatagatggtgctctgttaagcctcgaaataatcatgtaccccctacgaagtctg

SEQ ID NO: 240 - DNA, 343 bp, Glycine max
  unsure (1)..(343): unsure at all n locations
  Clone ID: PAT_MRT3847_100216C.1
gcttggatcctctagagcgggcggttttntttttttttttttttttttttttttcaaaacttaaccaagggtttaaagtttaaaaattccgttttttagggaatattcctttgggtcgggatgctcctataccgaaccaaatgtcatctgcggttcctctcaaaaaaatggtgtttgcttatgtacacaaaacagggggctggaatttattaacattttcaaaaaggggtcctgtttataatcctgaaagtgccctaacctttgggataactccctatgtcttgttggtccctgtcctaaccattgggcatccgcggaaccaataccattggggttatatttt

SEQ ID NO: 241 - DNA, 549 bp, Glycine max
  Clone ID: PAT_MRT3847_100217C.1
attgtttatggaattggaatcttgtttggaactatacttggtgtgattgcatttttcacaaccaaaatgtcagggccaccaaataagtgcttatttccttggcttgcaggagggtttgtaatgagtgtgacatggagctacatcatagctcaagagttggtagggttgcttgtttcaattggctacatatgcggaataagtccttcaatgctagggctaacagttctggcttgggggaactcaattggggatttgatgacaaatttaacaatggctttaaatggtggacaagatggtgctcaagtagcaatgtcaggttgctatgctggtcctatcttcaatacccttattggtttgggcttgtctcttgtaacttgtacatggtcagagtaccctcaagctgttgtgatccctagagacccatatctctgggagacaatggtgtttttggtggctggattagtttgggcacttgtggtgttgataaaaagagatatgaagcttgacggacttttgggaggaggacttttatctgttacttcctttctc

SEQ ID NO: 242 - DNA, 623 bp, Glycine max
  unsure (1)..(623): unsure at all n locations
  Clone ID: PAT_MRT3847_100218C.1
gtacaacttcaacttctgaaatgtaccccacttgagggcctcgatccgaaacatttctactccaaattgcttagtttccaaatggcagaaatccgagcacaaggatgaaactcgcaacagttacttgaccaagagaggaattgggcttgtcgctgtgtcaccctctgcgcgtgtcgtcgtcggcgccggcgccgatgccttacccaaacgacaagatctactgattcacggcctctgtggccagatctgtggtcttcacggccagatctgcgacccttagatatcagatctgcgacccaacaaccttcgcatcctcgcttcactcacctcatgtggtgaaggtggattcgtgaatttgaggtaacggattgtcggttgtcaaggtagctccagagagtgccatccagttttatgcttatgaaatgctgaaaaatgtaaaatgtaattgaagatagtcaagacagcaagttagatattgagtagccaccccgtgcaaattttctattgattcacggtggacttgtagtacatggtcatcgatcctctcgattgagttgattaatttattgtttggttcagtactggttattgggtttttttaattttaaaaaaaaaaaanaaaa

SEQ ID NO: 243 - DNA, 281 bp, Glycine max
  Clone ID: PAT_MRT3847_100219C.1
agcctctagcgggaggatagatatgcataataaaggacttctatgaacgcccaagtgacaatgtgtgaggaaaataaagtagatatgttgaagtaaaattcgtatcatcaagagagggacacaaacttgttgcgttgagtgtgtgatcagcttcaagccaagaagcaacaatccctttgagatattgggtggacaatgaacaaaagcgtgtagttatggcagaagcaagtggagactttggtgatgttctctttagtttcctgaccccttccattgggaac

SEQ ID NO: 244 - DNA, 214 bp, Glycine max
  Clone ID: PAT_MRT3847_10021C.1
ccgaacacccagctcccataatacataccatttaaccacacccacccatcaacattgcaaaattcggcaatcttcacctccaaaaatccaccaagaatcatcctcctcttaacactcttatccacacaaatgcttacccacctcgatccaaagatacaatctactacctgccctcgaatcgtcaaccccttcatttcttatgactatgaaccca

SEQ ID NO: 245 - DNA, 521 bp, Glycine max
  Clone ID: PAT_MRT3847_100220C.1
ctttttttttttttttttttttttttttttttttttttttttttttttttttttttttttttttttttttttttggaaccaaacaacccctttaaggggacaaaggaaaccgggaaaagccaaaaaaaaaacaccaaaatcaacggcccccgttaattacttgggggggaaaacaaaagggggcccacccccaacctaaaatagacggggccccttccccctaaaaaaaataagaaccaatatttccaaaccggttaaaaaaatttttatttttgggggctgggaaaaaaaactggaacaaggggcccttaaaaaagttaaggcctaacttggggctgatgtatggggtaaaaaaaattgcggcaacaggggcgggggggggggaaattggtgtcaaaaccccgggggctggggctggggcttttaaagggcccaacccccaaagggggcttaaaggcccaaagttgacagcacttccaactttggaattggcgcaatggcagggactgggctttcatggg

SEQ ID NO: 246 - DNA, 469 bp, Glycine max
  unsure (1)..(469): unsure at all n locations
  Clone ID: PAT_MRT3847_100221C.1
nagccaggttcccaatctccagacctgtgctgttgtgttggatgggttgctcaagtgctggcttgattctgaggcggtgacattgtttagggcgatgatgaagagtggtctagatcttgatattgtgatttacaatattatgcttgatggaatgtgcaagatgggaaaactgaatgatgcaaggaaacttctttcttgtgttctggttaaagggttgaaaattgattcatatacttataatataatgattaaaggtctgtgtagagaaggactgctggatgatgcttaagagttgcttaggaaaatgaaagagaatgggtgcccgcctaataaatgctcttataatgtctttgtccagggacttgtgcgaaaatatgatattgcaaggtccagaaaatatcttcaaataatgaaagacaaaggcttttcagttgatgctaccacagtcgagttgcttatacgtttctta

SEQ ID NO: 247 - DNA, 688 bp, Glycine max
  Clone ID: PAT_MRT3847_100222C.1
ccgggggaaagaaaattgagacatcaaatatagagatagaggctctttaggagtgacatattattgctctgtagtgttggacagcatgttggaaggtaaagctgtgatagaggatactgacatgccagataagatgcagatccaagccatggcatccgcttatgaagctctggatctctatgatgtttttgattgcacatccattgctgcccacataaaaaaggagtttgatacaaagtatggttctggatggcagtgtgtggtgggatcaagttttgggtgttttttcacccattccaagggaacattcgtctactttactctggagactctcaatttcctcatcttcaaaggggcttcttatcttatctaatcgttatcgagtatccccgggttatgtctggctgtaaataaagttccactaggggcaatggatgaaaaacagttgatgaatgctggtattcgtgggaacaaaatatgagcagtgattcctgagtctttatgaattggacccttttaaagttttgaagggtcctttgttatgtgatcggtgctcattttgattttgtatatatgataaatattttttgcttacaatgtttatgataaagttcctcttcagttctaaaaaaaaaaaaaagaaaaaaacaaaaacagcgcccgctctaggggctccctgcttacgtac

SEQ ID NO: 248 - DNA, 424 bp, Glycine max
  Clone ID: PAT_MRT3847_100223C.1
accaatcttacgtttacatagcataaaataaaagataaattaggagagaaaaaagaagaactaaagaatgaacacagaactattaggaaaaaatttagggggagggatgttcggtttggatgcaaaaagttttgttaagcttttttagaatttcatgttaaatttcatggggcggttttgttaatagacccttattgtagggatatggcttcggttttgagttttgatggttatagccaatcgttgggtactttgagcgtgtcagtttataaaataggggataagactgtatgactgcatctgcattatatgttaaagattctgcggttgctttattggggaataaaaaaaaagggggccccgcacattccttcccaacagatgggcggccaccatggggggggggggtctccctgttccaggc

SEQ ID NO: 249 - DNA, 290 bp, Glycine max
  unsure (1)..(290): unsure at all n locations
  Clone ID: PAT_MRT3847_100224C.1
ttttgggtggttttttttttttttttttgggtccacaacttccaatgaaatttgaatagaaattcaaatttctctcccattttgggggcacccttaggttctaaatagagggcatatgggtgccttttttcaactttaatcttttgagaattacccttgaaaggggagacctctttgtggtggaccacccggantccatgctctttttctccctttcctttggctcctcttgtcttacctttaaactcttatccctggcttcctttgggagaggaacttctttttggact

SEQ ID NO: 250 - DNA, 433 bp, Glycine max
  Clone ID: PAT_MRT3847_100225C.1
tcatgctgtcacagttatccaacaaacccggaaagtgggttggctaaattaaggttagcttctgaagaaggctggtcaaatttggctcacaatcttgggatctcaccgcttttatttcgactaggaggtatctatggccccggtagaaggtacttaccttttgttattgtaatttatttttcaagtaatgcttctattattagtttctttctaggatctgcaaaagcctataaaagttttgtcccagctggttgccatgacaatcaattcaagcctgtcattccgaggatataccattcaataagtgtcatatgacattttgacactcatcctgaatttaaattataagtttgggtttatgtttacatggcaagttggtctgtcacttatctgtcaatttagcatatatatctttgtcttgaacatttttttt

SEQ ID NO: 251 - DNA, 231 bp, Glycine max
  Clone ID: PAT_MRT3847_100226C.1
ctcgagccggggggaattcaacctcgatgatgttgaagttgccttaaaggattctgaggagatcagttgccggggaaaaaggaggagcagcctacagccatgaatgcatttgagttaatctcaatgtcaaaaggattgaaccttgaaaccttgtttgatactgacaggggttttaaaggggacacaggtttcccctaaatatcctgtggggatgagatactcaacaagttt

SEQ ID NO: 252 - DNA, 543 bp, Glycine max
  unsure (1)..(543): unsure at all n locations
  Clone ID: PAT_MRT3847_100227C.1
ccacgcgtccgcttcgtctcttctcttgcttccttcttcaattcatctccgaaccgcgtttctatttttgactctctctctctactcaggttccttctttcttaactttcttctatttttttttcttccttctcctcatttcaatcatagatcgttttttttttcttttatttttttctgcgcgcctttgtttgctttaaagcttagaaattttggctccgttacacctctttgctattgggttgttccctgatttgcgcgcatctccaatatctcactgctttttctatttggttttcttcaaccctatgttatcatgaaaataaaaacgaacctctctttcttctccgagtgttcttctcattgttgatgattgcttagcgtgctggtttaagtaattttttttttcaaacgggtatcaataatccccattntctctaccttgtttatgtttgaatgttttagtgaagcaattagaagttcgtgttgttctttcttacccccgtgaagaaatgactaaataagtgaatgattttttttttt

SEQ ID NO: 253 - DNA, 383 bp, Glycine max
  Clone ID: PAT_MRT3847_100228C.1
gggatccagatatctagaaacagtgtgataaacatgcacgaacacgaactgggatttggaatgaggagatcactcgacataggccagcgtaatctccgagacgagcgtgcgagacacctgtgggaacatcgcctgtctctaaaaggataaggcactggttgccggcatcttcagggacctcaccaccattgagcagtagagccctgttattgttaagggtgtacacggccaccttaccaaaaaacctgaagaaattggtgctggtgaccagggtcaaatgtttggctatgccactgatgaaacacctgaattgatgccattgagccatgttcttgcaacaaaactcggtgctcgtctcaccgaggttcgcaagaacggtacct

SEQ ID NO: 254 - DNA, 496 bp, Glycine max
  unsure (1)..(496): unsure at all n locations
  Clone ID: PAT_MRT3847_100229C.1
cgaacatcaacggaccaggttggccaaagttgatgtcttacttgggcattgactgctgctcaggagttacagcgaaatggcccaagagttgtcttgcatgatttaccctgcaaacaaggagattgataaggcttatgctcattagggatgctatggatctaaccttacagtataagcaacttccttatgcaggcatacaacgcatagtctgctctgccaacaagatgccagcatatgataacattctataatgagctgcaaatctaccctccgagtctgaaaggttaaccctgatgacatctacgaaccaacctaagtccactgatgagagtgccactgataaagagactaacacctctgatgacaaagacctggatgcatgaacgggtttaatctcataactaggaagggaatcatgcacatctctaggatgaagagactctgaggaaagatccactgtgcagagtgctangatactagatgaatcaacccatgc

SEQ ID NO: 255 - DNA, 568 bp, Glycine max
  Clone ID: PAT_MRT3847_10022C.1
agaactagtctcgagttatttttttttttttgattgagaattaatttctattaattcttgtattttttctatatctattttgttagattgaatatctttaattttcataagatgtgtattaataatttcttctatagtagtgttttacagacattcttatatattttctgattttaataaaattcgttttttatttttagttttaatgtttattctttctataatgtttataattattagtcctgacttggttagaattcttttaggttgagatgggttaggtttagtttcttatgctttagtaatttattttcaaaattataattcttataattctggtatgttgactattttaactaatcgtattggtgatgttgcaattttaatttcaatcgcttgaatatttaactttggaggttgacattatattttttatcttaattatttaaataattacatattaataattttaattttattattaattgctgcttttactaaaagagcacagattcctttttcttcttgactgcctgctgccatggccgctcctactcctgtttctgca

SEQ ID NO: 256 - DNA, 332 bp, Glycine max
  Clone ID: PAT_MRT3847_100230C.1
ggggcgttgtttttttttttttttttttgtcagatagaagaagcaaacttttgataaatttgcgaaccattatcacataatattaaaattttaaaaccactgtaatggctactggtaccgcattaagaaagcacaaagatagaaattcttttttatgaatagtctagcatcaatcactttatgcattacacgcagatcccgggacttcgcatactcacgagaatattatatccctgcaataaaagtattccatctgaggtcgatgcaaaaactggggcggatgccaacgaaatatgcgcctaaacgcgacataagggtgggattataaaccc

SEQ ID NO: 257 - DNA, 457 bp, Glycine max
  Clone ID: PAT_MRT3847_100231C.1
aattcgcaccagcgaaatctatgccctattcaacaggctgcttccaatgtgagaaattctgttgttaggacactgttccaaactttaggaatgcatggacaaaagctttcaaagagcatgtgggaagattgcctttgtaattacgtatttcctacattggatcgtgcttctcatatggttgctacatcatcaaaagatgaatggcaagggaaagaacttggaactcgaggaggaaaagcagttcacatgctcatattgacattgagcctgtattatgtattttgtttatttgtagcctcagtgatgtgatatatttgtttgagaaaatggggagaatgaaaggtggagaaaaaaataagctttagcaactacatgaagttcctaatctagagaaaatatggtggaaaaaatattaactaaaaatagtctcgaacagtgtgcataatgttgatccctg

SEQ ID NO: 258 - DNA, 412 bp, Glycine max
  Clone ID: PAT_MRT3847_100232C.1
tttgggtttttttttttttttttttttggatagaaaaaaggcatttctcaagactggttaagctttataaattacctctgacaggtcttcagcataatacaataacctgggggtcttcttataaaaaatcctatacataatagcaattgctgtctgaaatttcataaccccaatgatgacccctcttccaaatccatttcttggctttccaaggctacaaattgcatggcttcagactgattgctaaataaattaaacctgttgatgaaaacggatcaaatgaacagtatgcttggaacataacatgttatttgggagttgagacacttgtggaattggtgcaccttttggctttttcattcctgataaatcggggggcgagaaaaaaatgggaattccaaaattgcttgaa

SEQ ID NO: 259 - DNA, 480 bp, Glycine max
  Clone ID: PAT_MRT3847_100233C.1
acggctgcgagaagacgacagaagggatcgttaataaaatagtctacgtgtcacggatggatgaatttgttaatgaaatgattgtcaatgtgaccatctctaattgccaacataaggacatatttgtcatataatattttcttgacttttcattttcccactctttaggaatatgaataggtaaatagtcatttttgtctcagaatgtgtaatttgttaacaaacgcatccctgaaagatgaaaatacaaaatttagtcctcgaaagtataaaaaatgcgacaaatgtatctgactattaacttttgcccattactattaataaaatagttaagatttgaagaagtgaaatatgagatatatttatcttttatttatagtagattatgactaattattataatttgataaactggtacaatgtttattttagataatttctattatgacagaaaaattatggtcgataatcaatattatc

SEQ ID NO: 260 - DNA, 466 bp, Glycine max
  Clone ID: PAT_MRT3847_100234C.1
ttggttaggcatttcttccatcccctaaatggtgtgtgtaccaaggtcagaagtgtccaattgatgtgacaatcccatcattggcaatgcctttattgtgtcgtgggttttccctttttcccctccctccagccctcaccatcccctgctctacctccaatttttttcaaagtataatttgtttgacaatttcactgagataaagcttaattttaggtccccttctgatccacctcttttcctctcccattactttttctccccataccgggctttcggcttgtaaatacccagttagtttttaaaaacaagtctgattttttctaattccataaacaaatcctacgaccttgtattttgatttgcagtgtaaaaaccccttcgggataaagaagtgtataactggaaattatatgcacacttttctgcacatccatcatggaaagtgaatatgctgtctttgttc

SEQ ID NO: 261 - DNA, 368 bp, Glycine max
  Clone ID: PAT_MRT3847_100235C.1
cccaagccctatccttcattcacgagatcgaagctctcgtctcctataaactttaagtggttccctacaaatgggtgaatcgcaattatatggtatgggacgaggaagcaataattgcgcttcacaagtttgtgcaaaaacatccgggtgggttggaggtggtgtatgctttgtctgcctgggtaaagagcaaccattctaacctccacgtaaagcttgctaccgccccaaatcttgcagaaacacaacaagattgtgatggcgattgctccgatcagatatatagtgcgcatgctagcattcccaaggatccacctgctcttaggaatgcttagtgcattcaagcatatgagctcttcacgcaacct

SEQ ID NO: 262 - DNA, 308 bp, Glycine max
  unsure (1)..(308): unsure at all n locations
  Clone ID: PAT_MRT3847_100236C.1
ggacctggggggtgttaaacttctagagcgtgtagagcttgaaatggctcttacagtgattatgacgtcggtggatggggaaacatgcacggtgatgatgggtgtccccctggacctgaatttctccttaagcctttaggatgaagactgagaacctatggcagcctgtctttataaaaaagattcttgaggcaaaagaatttgaaagggtcgagagcgttcactcggtgagaattggatcagagctctcagatgatgggatacctgattgctgtcaacgatgtntcctcatcaactaagagaaaaga

SEQ ID NO: 263 - DNA, 171 bp, Glycine max
  Clone ID: PAT_MRT3847_100237C.1
tctctctattatatccttgccagctgtactttggtggttctttcttgatccggggccttcttcatcatcatcggcgccagtctttaatcctggccaaaaaaaactactctgctttcgctgcgatcgcgtccaatgtcatgcgctttcttgtgtggggcggattggcggcgg

SEQ ID NO: 264 - DNA, 1276 bp, Glycine max
  Clone ID: PAT_MRT3847_100238C.1
tctaacagtcacattgtttcttctgagggagaaatggaacaaagttctaacccagaccctccaactccacctgttgaatgtgctgttcctggaccccgacatcattcttgctcctcgctgccatccccgactaagcctccgcgtctcgccaggcctgggccgggtgcggtgttgatgacgctgcggattggagcgattcttgaatttactgtgagaggtgttctcagctggtcgatgttttgatactctggttctgaaagtatcgagcctaatcagagtttcctgccctttgaggggggaatggagatgtccttggatacgtctgatcatacatcagatcttgagagtgaaaggacaaatggaaaaccaaagaataaacttcctcgtcctcgtaatcctctaattgatgctgttgctgctcatgacaaaagcaagcttaggaaggttactgaacgggttatgcctcaaattgcaccaaaggtagatgaaagagattctttactagaacagataagaacaaagtccttcaacttgaagcctgctgtgactacacgacctagcattcaaggtccaaaaacaaatttgaagtttgctgccatcttggagaaagcaaatgcaattcgccaggctttggctggaagtgatgaagatgatgatgcagattggagcgattcttgaaattactgtgagaggtgttctcagctggtcgatgttttgatactatggttctgtcttgagccaggtttatctagtcgtgctcccctgtaatgaataggaaatctacctgaaatgcaaaattctttatcctggtgtgttcatacatgatactgtgaactccatataggatatagctcctgctcttagtattctttgttcacatatatatgcatgaacatttatactagcatgcagattgatgcagatccaatttcggaggcgaaactcacttcaagacaactcgggttcagcgtgcaagcgctgtacaggtccagatccaagctatcaacaaatttccccatgcctcccgttcatataagcacatgtatatttgtgttgtgtcataattttttgatatatagttatgattatccaattttggaattctgtgatgtagtgtttcgagttagtttccccatttataatgcagttcatctgtgtccagtatagtaacatgtatacgtgagtaaaatcatttcagtgtacagttttcaccatcaactttgcccatcgatttactctttctttatgataattgttcttgttatggtgagcaagc

SEQ ID NO: 265 - DNA, 251 bp, Glycine max
  Clone ID: PAT_MRT3847_100239C.1
taacgacctagtgctctctctatgcgactttatatattccgtattgcacacactgaaacaagttctggtccttaatctaagtagatatcattatgctaaatcactattaaaccatatccatcatcgtcagctttcattaaacacatatctcaaattgattatacatacacattttcttgttgcatacttatccactcaccattaatatgtgcattatacaatatacaattccttaactgtcaataaaatga

SEQ ID NO: 266 - DNA, 146 bp, Glycine max
  Clone ID: PAT_MRT3847_10023C.1
tccacgcgtccgcttgattattatttcattaatgctcttacggagattgggcatttttgaagaacagatgttgttgaagcttaggctggaaagtgttctgcaactttactcaacggcctattctgttgccctctatgctcatgctt

SEQ ID NO: 267 - DNA, 216 bp, Glycine max
  Clone ID: PAT_MRT3847_100240C.1
gggttgtttttttttttttttttccaaaccctctaatctcttatcataggacatgttgattggatatacagataaatttccggtgaattcttaatttaaaaagtacactgcaaaaaaatttcaagcagatgacccctagaagcatcatcttttgaaactgaggtgattgattctagataaccaagagaaaaccgtttacctggagcgaaatttggg

SEQ ID NO: 268 - DNA, 505 bp, Glycine max
  Clone ID: PAT_MRT3847_100241C.1
ggccgccctcagtacaggaaggaatccccccggtaccatcaacgttttcattttgcgccggtaaagcaacttgaggacgggcgtacccttgctgactacaacattcagaaggagagttctctggaccttgtcctccgcctccgtggcggcatgcatatcttagttaagacactcaccggcaagaccataaccctagaggttgaaacctccgacaccatcgatgacgtcgaggccaggatccaggacaaggagggtatccccccggaccagcaacttctcatcttagccggaaagcagctaaaggacggccgtaccctcgccgactacaacatccataaggaatcaacccttcacctagttctccgtctgcgtggtggcatgcaaatcttgggtaaaccctcaccgcaagactattaccctagaagtgaaagctccgacacatcgacaacgctaaggctaagattcacgacaagggaggaatccccccagaccaggggaggctgat

SEQ ID NO: 269 - DNA, 459 bp, Glycine max
  Clone ID: PAT_MRT3847_100242C.1
gcgaccacgcgtccgaattatttgtgaaagccggatttaagaatataaatcatcttcttaaagcaagtgggtccgtataattggtcatgagattttggcaaatcgattgttacaacggttcttacatttcttacttaattattcattctcgaacgcacatggagatgtataaaatgctttcttacttattgtcttctctgtttgtgtgcgagactgtgagtgcatttgtatttgtgcacaccgatatgtaaatctggactgattattggcctgccaatgttttaagaagttcatgaactgttcactgattggaaaccttattttgatgcttccaattgcatttttatacatgcaccttcaagtagtcgtcaactgctttatgatggagagagatcgtactttaccaatcagcaatgtgctattagaaatattgcttttactgttcggaggcctactttc

SEQ ID NO: 270 - DNA, 995 bp, Glycine max
  Clone ID: PAT_MRT3847_100243C.1
ccacgcgtccgcgtcactccgattccgattccaagcgatgccattctagattcgattcagaccccaacaagagatatagaagggatgaatatggaaaagaagacagagagagagtgtcaagtagcactgatgttcaaaatgaagctcttttcgctaagcacaacaaaccaaatgatcctatccaacttccaacatctctctcttattttcagcacaatgaacaaggtggcactgggcaggttggccgaagctctggtcaaaggaaggagcgtggacggtggaaggacacaaagaaacggtttaatattaatgaaagggaagagaaaaatcatggtagagagcagagaaatgagaaatcacaagctaaactggatgataatactttccagagaagagatggttttaccggaaggtcgagaaaaagagcttcatttagagagaagaagattgtagcggattcaggtgatgctaatgtggctgcagtaaagtcaggccagaaggaggaaagaaacagcaatccacagcatttggatagacctgagaagcattttgcagatgacaagggtgaagctaggaggggaagaaggtatggaggcaatgacagttacaagggaagagataaatttaatggaagacgaggttatcgtcctgagaagtggaagcatgatttgtatcaagaggtaaataaggatcccattccacagaatgaggatgaccagattgcaaagctggaagcactcttggcttcataatagctaacagcagccaatatcatgcatgtgtaatttattataagcatgcactgctctaagttgctgagttcgtctcttacaatatatcaagttatcaccattttcaacatgccagggatgttgagcagaacaactgtcagttttagaagatgcaaactggattcaattgaggcaggcaggttttaaaattggaatggaggacagagcaatttgcaattgcaataaagcatttttgcttgtttt

SEQ ID NO: 271 - DNA, 396 bp, Glycine max
  Clone ID: PAT_MRT3847_100244C.1
catttttccccctgagtcccctgaaagtcacacgacacagaaaaaccgaagaaaaggaaccgacccctcacggaaacttgattccgattgtagtttagaatttccctttgatgagtgagagagtgaagaaagaaaaacaaacgggggacaaaagggagaggatgaagaacatcttcaagaagcttcacataggtagcagccacgatcctcatcgatccaatgagccttcgcctcctgtgccgtcgccttcgtgcgccaccgatcagtcttagagctccgccgccactccgccgagttcttcttcggcgtcgccgtcgccgtcgccgtccacgctggtggtaactcccagctgcggcggcggcggcgcgagtccggtggtgaatcggcaggactttt

SEQ ID NO: 272 - DNA, 197 bp, Glycine max
  unsure (1)..(197): unsure at all n locations
  Clone ID: PAT_MRT3847_100245C.1
agggagnataccaaagaatggaggngnnatatacgtctgagatcactcttttctctttatacctaagcggtataatttctaatttttttcaacaaaagtaatagctgaacaatttctatatttttaaccaaatactttttactctacttttctaacgagtattcttgagtactcgccattaagcgacccttaacttt

SEQ ID NO: 273 - DNA, 1836 bp, Glycine max
  Clone ID: PAT_MRT3847_100246C.1
gtaacctggcttcgtgcctatcctccaccctcaacacagccttcctttcctcttctccttttctttaccaattttataataatatatttatatcttttcttttcctttttaccatttcgatcccaattcttcctcacaccattttcagttcacagggttaggtttaggtcccttgtctggtctggtgtgcaattctccccatacaataacaatacacccactttatcaaccaatcaatcaatatacctagtagtgattagatttagtgatcgatcctctcctttcgttctcaaaccgtagatttagattttagggtttctctcttaatataatcttttgacacttccgtaacaaacaaaaaaattacataaattttcccttataattattattatttggcttttatctttggattaactaggcttgagctatcacaaataattgtttcggagaatggaaaagaaaaaggtggcagttcccctcgtgtgccacggtcattctcgccctgtggttgatctcttctacagtcccgttacgcctgatgggtttttcctcatcagtgccagcaaggattcgagtcctatgctcagaaatggagagactggagattggattggaacatttgaagggcacaaaggtgctgtgtggagttgctgcttggataccagtgccttacgtgccgcaactgcttctgctgatttctcaacgaaagtttgggatgctttaacaggagatgaattgcactcttttgagcataagcacattgttcgagcatgtgctttttctgaggatactcaccttttgctcactgggggagttgagaaaattctccggatctatgatatgaataggcctgatgcgccacccagagaagtggataagtcccctggttctgtcagaactgttgcctggcttcatagtgaccagacaatattgagttcatgtactgatatgggaggtgtcaggttatgggatgtaagaagtggtaaaatagtccagacacttgaaactaagtcatctgtgacaagtgctgaagtgagtcaggatggccgttatataaccactgctgatggttctactgtaaagttttgggatgcgaactactatggattggtgaagagctatgatatgccctgcactgtggaatcagtttcactggagcctaagtatgggaacaagttcgttgccggcggagaagatatgtgggttcgtgtgtttgatttccatacagggaatgagattgcatgcaacaaggggcaccacggtcctgtccactgtgttcgtttttctcctggtggagaatcctatgcctcaggatctgaggatggaaccatcagaatatggcagactggccccttgaccctcgatggctcggagactgtgtctgcaaatggttcagttgataaggtgaaggaaactgcagatgaggtttcacgcaagattgagggttttcaaattgcagatgaggggaaatctaaagaaaaggatgaggctgtggaggaatcaagctaatatagtctcgcattttgtctggcagagtgttagaattaactagatcaagtgcctactactcatgtacgtgattagtaaagtaaattttgtaaattttagtttgtttgagattttactgaattgaacgagcttgttgcatctggcttaaataagttctgtttgcttttatttcaattctgacatgggagtttatggaatataggtaatgacttggtatacttgttcaagaatcatggccactaaaacggctttaatctatagattctggccagttcaattttggccgggacttgcgctctagtaaaaaaaaaaaacaaccccgcc

SEQ ID NO: 274 - DNA, 281 bp, Glycine max
  Clone ID: PAT_MRT3847_100247C.1
ggatcgacccaccaagctacgctctgccgtcttttatgggccacgcaccgccggagttaccagatatcagcccgtgtctgtggctgccctgtgatcggtcgacaactggcgtatatggccctcggccattgttcttgggaggagtcctgacaagagaactgattgccgctcgtcgtggtgacactgaccggatgcgctgacggacaagagactggctcggtgcaagtgaagagacttgagaccaggctacttgcctggcgcgttacaacgtcggatggaaa

SEQ ID NO: 275 - DNA, 195 bp, Glycine max
  Clone ID: PAT_MRT3847_100248C.1
aaataaagttgacatgcagtgaaggggggacatattaaataaaggactacgtctcaaaacattaacttgtgctcaacatatagaacatcctaatgctatcataatacattccacacgacctgccacaaataaccatatgtaacatattctaaaggctaaaaaaagactaccccactttccagtgctagagttcaa

SEQ ID NO: 276 - DNA, 635 bp, Glycine max
  unsure (1)..(635): unsure at all n locations
  Clone ID: PAT_MRT3847_100249C.1
ccgtaatacaaaagtcacacatatttccattaataataaactggaaaaaaaaggcagctatcttttttgacaatgtttgaatacaatattaataaaatacattgtctggaaatcataattattaaattacaattttaaactgtcaaaataaagtaacataaaaatttattcatcaattaaatggggttatcatcactccaattttgctgcttaggctgattttctgtcaagatttcctgccattgctatagctgaatgcaaaaatgcaacgcaaacaaatatattgaacctttacaccaccaaaaaaaggaagaaagcacaaaggtggagatgggtgaggaacacaaaagtcagaaaaccaaaaaaggcagcgaaagatttaaccttttctgtttggataccccattacaacaaagaaatgaccaacgaaggcagcacaataaacaaatgatggaaaacaaaggtgtaaacagactaaagtgtatgtttgtttcagaaattcacataaccaaaatagacaccgaaagataaagatgaaaacggactcaaaacaaacaaatgaagaaatggggaagaatgatatagnaaacaaactttgagtacagttgagggatacctatgactggtgttctttg

SEQ ID NO: 277 - DNA, 918 bp, Glycine max
  Clone ID: PAT_MRT3847_10024C.1
cgtatccgtaccaagtccaacatggcggtggcgggtgtgtcccaagccatctcctccaccaccgccaccagaaccccctcttgcatcgatttccactccaaaaaacctttccttttgggcctggcccactctccccagcccaacctctcaatctccgccagaaggagccgcaacacccactgttgccgctgcaccctcaattccgacgacacctctctcagctgggattggaaccgatggtgccgccacttctccgacattgaacaggccgaaaactttgcctctgtcctcaagtttcaacttgatgatgctattgagaaggaggactttgaagaagcggttaagttgaacagggctctatcagaagcaacgtccaaggacactgttgctgaaattatggatcagttgaagagtgctatagatgatgaacggtatcatgatgcttcgagattgtgtaaatgcactggaagcggactggtgggttggtgggtagggtactcaaaagcctcagatgacccctttggtagaattatacatataagtcctggtatgggtagattcattggcaagagttacagtcctagacagttgatgcgagcatctacggggactccaatttttgaaatttatgtggtaaaaaatgctgatgacacgtatcatatgcaggtagtgtatttacgacaagccaaaggaaagtcaaggagaaaccctcaatctatacctgctaaaggcccatccaaacctgaggtggagaatgcatcttcagttgaggtgcaagaacctgaagagaagattgagagaaatgatgagaaaaacagtaatatcgagggagtaactgaggagggcattaaaagtgtcataaattttcttaaagaaaaaattccaggattgaaagtcaaagttatgaatgttaacgtt

SEQ ID NO: 278 - DNA, 281 bp, Glycine max
  Clone ID: PAT_MRT3847_100250C.1
tttttctttttggttttcttatatccgggaagggtcctgggaggccccaatgggccggaaaccaagagcttgttctccctataatgagcagtaaaaaacatataagggcgattaatctaggaacaccaatggggaccggaagtcttggggtggtgaattggccttaccacatttaattccgtaacaaatttttaaacccaaaaataatcgcttaccgggattattttctccaccctaattttctaaaataaccacggtgctaaccttttggattttttcat

SEQ ID NO: 279 - DNA, 268 bp, Glycine max
  Clone ID: PAT_MRT3847_100251C.1
aattcggctcgagtacggctgcgagaagacgacagaaggggttcttctaccagtacccagacaacgagtatacaaaattgacttaataatatgaaacttttttataaggataaaagatgaaaatagaatcatttaaaaattaaatcttaaagaattaaaatagtgtcacttaaaccaaagtgattttaattaacatgtcattttattactttaatcagcgttaatgaatatattacatctttatattgatatatttaatgttcttgtt

SEQ ID NO: 280 - DNA, 462 bp, Glycine max
  Clone ID: PAT_MRT3847_100252C.1
ttaatattctactatttcttgcgtctccatcaaataatgtacatgatcaaggcaaaagcagagttttgttttgattatagataaaattggaaggatttttctctcctgttagagttttttttttaatggattttgctagatcttgctttcctttgatgtgtatttacttgttttgtttctgattaatgtatttgttatactttcaatcaaagtcgcttttgactctccatcgtgcattgtacctgatcaaggcaaggaaaaactagcttttaattatagatttagttaactagtaaggttcccccccttaggagcactactgttcggaagtttttgccacttgtatctcaaagcgggattggcttgcgttcctctgtggttcgttacctttgtctgtctgtatgagtagatttgtaaattgtattctgcatgaatgaaaatgactacacatatacgcgcatt

SEQ ID NO: 281 - DNA, 202 bp, Glycine max
  unsure (1)..(202): unsure at all n locations
  Clone ID: PAT_MRT3847_100253C.1
gttggtgcaacgctnncggggganacttatcataccaaacttgaaaaagcagcccgcagnacccccggcgcgcccnccagaggcggaaggcccacccgggaggggacacngccgaagaccancgngcaganngaaccagacangaanncaagganncagcacccgagcaccaccaccaaaggnganncngnacaaggaaaag

SEQ ID NO: 282 - DNA, 434 bp, Glycine max
  Clone ID: PAT_MRT3847_100254C.1
atacttgatgcgcttcttggcggggacacggcagcagtggcgtcttcgccggacagcactacttctacagtgatctgcttccaattgatgcccatctggcagatctacttcgacgagagcatagataccgattagctcgttatgatagagttctcactgatgaggtgcgtaacttgcaaattcatacagccagccactcacgccatggccgactagtctaacgacgtcgacttggtcaagatcgacgtctacgaatgacctgatgtggcgcaggagtgtcacgtgcaggcgatgccgactgtcgtgatgaggtataacgggatggaagtcgacgaggttgctggcgcagagtaggacgagctcgagaagatgattgagatacatggatcgtgagcttagctctgtaatactattcatgcagctagatatctttc

SEQ ID NO: 283 - DNA, 497 bp, Glycine max
  Clone ID: PAT_MRT3847_100255C.1
aacaacaaccaattcccagggaccaaaaccaaccaactaaaacacccactaatttaaacaaacaccccccaaaaaaacttcaaaaaaaaaaacattattttcctggaaagcaagcaaaaaacaaaccttgaaaaggggccaaaaaaggaaaaaaactctaaactttttgggaaaaatgggggcccctctctgaaacagcctggaacattccaaacatcttcggaacggttttctaaaaacaagtcttagggccacccaaaaaaccataaaaaaacccgccaagggaaccctaaaagccccccaaaaaaggggcttcttcgttcttcttcttccaacagaaaaaaacaggggcacccaaaaaaaacggccctttctgagggcccaaactctaaaactttccccccaaggcaatgtttggccgaacccgggggccaacccggaaattccgaaccggaacccgaaggcgaaccatttttcccaaaagggagccgaataaa

SEQ ID NO: 284 - DNA, 469 bp, Glycine max
  Clone ID: PAT_MRT3847_100256C.1
aatgaaaccaattctcactcctcaaatctcaaacaccctctccaacccctctacatgaaaacctgtcaccaccacttcacagcctttccttcactcagttcacaccatcaagcccgaaaatggtgctgacatgctcattcaagctctccaacgccatggtggtgggattaccaatgtctttgcctactcgggcggttgctccatagatatccatcaagcgctcaaacactccaatatcagaatcattgtcccgtggcactgacaaggcaaagattcacaggagaagcctaggcacgctctaccggccttctctataccacttatagtcatcaatttagtgggtgagtgggacgagttacacttcccaattcacctttttctttggataaaggttattagaacaagaagtggcttagcttgccttgaaaagtcttcttcaaattgcaagaaatgaatgggcttcaaaaac

SEQ ID NO: 285 - DNA, 268 bp, Glycine max
  Clone ID: PAT_MRT3847_100257C.1
gatagactaaacaaccaaatagtgtaatcagacatacctacttttttcttgtttaaagtgagaaggaaaaatggatagataagaaagggaacttctcttgtatacccgttaaggctgttaaatgaaatgacgctaattaagagtttccaatgagaagatatagagatcaaattaatattggtacttcacgcaagaaatgaatcaattctcttaatgagattaaaatgatatgaattacgaacgttacatcaaaatttactatgcaact

SEQ ID NO: 286 - DNA, 1247 bp, Glycine max
  unsure (1)..(1247): unsure at all n locations
  Clone ID: PAT_MRT3847_100258C.1
tcgacccacagacaccaagtttacatctgatgaaaaaatgattgccctgaaagccattcaagcgtcctccttcgctctccaccacaacaacgtaagactccctcacacaagagcttcttctgttctgtgcttttgcagcaagtcgaacaagaacgagcctgataattcccaaccaccacccgaaggagatgctcagagtcaggagcttctggcacaaatcgcgatgcttcagacgcagaaggttcgcctcaccgactttctggatgagaggtccgcgtatttggcccagttcggggaagaggccaaggccgagttcgacaagattggggaagatgcactcaaaggattggatgaagctggtgccagagtatgtctccttcagctttttttttcttttttttaatttgattacttatgcaactttctaccatggataagggagagtgaaaacaaaatagtggagtttgagggccaaatggagaaggatagaaacgaagggctattctttaagaaccttggacagaaggcacctgtttacaaagcaaaagccaaggaggaggaggaggttgaaaagatcaaagatgtgaacagtgaaagcagtggtagcaaaacaaggaaaaatgtttacctcttcttcattggcttgctgacttttggaatagttgattctcttgcctcatcctcaggtgctgattggaaaaaagttgcagttcttggaggtattcttgtggtcttgttttctctgttcatcaatgaacaaaacaaggacaacaagaaagactaacaatgaaaaaaaaaaactcaagttcatttcttatgttgatcaaataataagaagtttcttgggggaagacattgggaataggtattgcatgattggatatatggccccaagtgagagcttacaacttggacttgatgcatcagccagcttgcttgggcatcaactacagtctacagctgatgcattggtgatatcagtcatcaccacaatattgtccagaatttgagtaaactaatgagcatgagatgctgcacaaatgctgaacttctttaaatcttctgttgatacagaaaatatatacatagctttttcctgcctatctctcttttgtccacctttgaagaggaaattactaaactgctccattccatgcacagtacactcgtatggtttatcatacttttatatgataganagattagaaacacgttgtgctctaaatacacattgtaatagccagaag

SEQ ID NO: 287 - DNA, 249 bp, Glycine max
  Clone ID: PAT_MRT3847_100259C.1
tgcacaatgaattctttctttaatttcttcatggcatgcattaacaaagaggggtatcaatgttagcgccatcgggctatttcttcccccatcaatacatgttcgtcactaataagctctccacaggccatgcgactacgaacacacagttcccctcagtcttcataacgaggtccaccatggacaaaattatgtttatataaaaattgctattgtcgaaaatcaccataaatttgtgacctatcatca

SEQ ID NO: 288 - DNA, 166 bp, Glycine max
  unsure (1)..(166): unsure at all n locations
  Clone ID: PAT_MRT3847_10025C.1
cgaggtgaatgagtatccctgcgttattgtaactagggtgtttctcttggagtctatgtttctatcatctttcccaataggtagtatcatgtggctcatttaatgtagaaatgttttacatctatggtggatcaaaattaaatgcttgatcattttgnncgtaata

SEQ ID NO: 289 - DNA, 683 bp, Glycine max
  unsure (1)..(683): unsure at all n locations
  Clone ID: PAT_MRT3847_100260C.1
tggttcagaatattcccagattgtgttggtttcttcctatgctaatttctccaacaggatctatatttgagtcaccatgggcaagtttctttacaaacctttttacctttatgctatttggccatgttgttgggtcgtggtggtacctctttggtttgcaagtatatcaatgacttcttttttccagttgtaactgtgtttattaccttcaagcgcattatgttagtatatttgtgaggtgtgtttttactaaagctcgcatattggtgaaaattgaggcaaggagtgaggcatgaaaacatgcacacttcaatcttttagagccagaaattcctaagtcattattcattaatgttaaaaaacgacatttaattatctttggaacaagataccacggtgttgtatataaatggcatgccttttgattatatatatatatatatatatatacttttttttccaaaaaatgaaatcctactaatgttatacatgttttttttttctagaaaattagtactctggctagcaatttaatccccagctattttgtagtttgatacaatatatatgtatttaaaatttaaatcaaattacttagtcatannnatattagacttgtatttttttcttcagaaaacaaaatatcttcttaacaaaaaattatgagaaccattgaggcatag

SEQ ID NO: 290 - DNA, 490 bp, Glycine max
  Clone ID: PAT_MRT3847_100261C.1
tattataatttaaacatattattagtctaattacaaaaagacatgttgagttattcaattcattaccgtggtcatcaataaacacttcacttgacttatgtttaataagaagttagttaattgtatcatgattttataaaataataaataattgtttttgtgatgatttaaccatgattttattctgaaagtgaaattttgttacaatctaaacatatttttaggctgatgacgaaaaaacatgttgagttattcattttattattgtgatcacaggtagacactacacttgacttatgtcatttagaaatctaaataccaaatgtcgaattttacacatttcttgaaacattcgatcatcataagttatgaaattacttattgacacaaatatggacaattcctttatgtttgggttatgtaaaagcaattaatagacagacaaaacttgtcatcattttgcttgacctgcctcataaatcacctccat

SEQ ID NO: 291 - DNA, 246 bp, Glycine max
  Clone ID: PAT_MRT3847_100262C.1
gtattcacctgtactgttgttgctattgatatctttttttaattctgcttttatgctctgtctctcttggtcatcggtttaatatgctttgatatttatccattatgccaaggtgttctacagtatgcaatttggatgtatgttgtttcatattgtaatttcacctctcagcatcatgtctattatgtgatggttaaaaagtattctcaagaacgaatgttgttcttcgaaagctgatcgagaaaa

SEQ ID NO: 292 - DNA, 242 bp, Glycine max
  unsure (1)..(242): unsure at all n locations
  Clone ID: PAT_MRT3847_100263C.1
gacccacgcgaccgacgaaacaaaccaaggctgaaaacaacaatgtttacaacgcgaagcatnactaccctcggtcgattttcaaacgaataccgcccacccaatcctacaacttggaatctaaccatctccaaaacaatctcaagggactacacctcaactctgttagcctcacgtaaaacaacaccatgaacaatccctatctcacgatgcactctgacaaaacctaaaacaatgcctat

SEQ ID NO: 293 - DNA, 514 bp, Glycine max
  Clone ID: PAT_MRT3847_100264C.1
aaaacccataacaaaaaacattttttaataaacaaactttttttacaaagggaaaccaaaaatacaggaggggaaaatttcatccttaaaaaccaccacaagaacaaacagataacggaatttattatttctcaaaggcaaggcaagctttatgatacattataccccaaaacaccaacaacagtactcaggggagcagtttttacatgggactttcaaaagaacgcggtataaagggggataaaagcaaatccctacaacacaggaccttaagggtcaagcacagcaaaattctttgggacttaaacggggacacaattcaacaattttttttaaagcactacgggttgggggaattgggtaaaaatttaaaagccttggtaggggaaaaacacacattttggggaaccagctaccaccacagggagggggttcgcttgggctgactgaataaacttttttgacactttaaacggggacatcctccaattcaccacagccaaggggttaaaaa

SEQ ID NO: 294 - DNA, 144 bp, Glycine max
  Clone ID: PAT_MRT3847_100265C.1
ggactcttgggtttttcttttatattttggactggttcttgtaggggaacccggtttccctaccgggaagttcatcaaagcttgccgaaagcatggccatagccgctccggggaaaaatgaaaccggggacaaagccagagaaa

SEQ ID NO: 295 - DNA, 236 bp, Glycine max
  Clone ID: PAT_MRT3847_100266C.1
ccacgcgtccgaagatagtctccttcagttgaactgataggaaaattttctttgccttttcttcttttttgtaaatgcactcaccatgtagctggttttcaatagttggtctagaagggaaaaaaggtagatagaagaaaagttgcttagagatcaagttttaccctccacttgatagcagtagctaaaagttaacattaatgaattcagagttaatgatattgttcttgcccttc

SEQ ID NO: 296 - DNA, 428 bp, Glycine max
  Clone ID: PAT_MRT3847_100267C.1
cggctgcgagaagacgacagaagggatatacattctgttttgcagtcacatgtctggcgatccttaagcactcctcgatcacaatgtatgcttctgtttcctcagtgactaccctcaggttgatcaagcattccaacctttctgttattgcttggcaagcctcctacgacattgacaaggaaaaaagtaaacacttaatgcgtgacacataaaatgagtaacagtgacaattcaaaatatattataccagtgcatgtcgagaccagtctacatcaactgattcagatgtaggtggttctacatagtcgttgcgacgatcgattgctgaggaggatctagttccacaaatgtttcattgtgcaccacaggtggatgtctagcaggattctcaagttgtgccagactcatgaaggggtgagatatcatgt

SEQ ID NO: 297 - DNA, 166 bp, Glycine max
  Clone ID: PAT_MRT3847_100268C.1
ttgtaaaacacctcccaagggggcaccgtataagttaaaaactgaaaagtcaaagggcgggcttccttaacatcaatctaatttttttcaccaaactctctcttcctgtttctgttatttccaaccaggtttaatttcatttccccaaaccctccattttaaattt

SEQ ID NO: 298 - DNA, 469 bp, Glycine max
  Clone ID: PAT_MRT3847_100269C.1
gccataaattagctgaaactatattaaaccaggaaaaaagattgtgatgcaccatcagctaaacctcgaggctactttttcttttgggtacataaaacagacaacctactttacattcgaataattgatgccgagtggtgtgagaatcaaaatacataggcactggcttcccgtgacagttctaatagttaattgtctctaatttatgtgttattcaagccctaaacaagcaaatgttaatttcattttttatttatgattccatgtactgcgagggtggaggtcttgtgttggtcttctcaggaccttcaacaccacggatctacacttctctccttttttgccaagggcacagcatcaacacatcaaatgagaaagaaaatcatcaataaagccccccctgatggttaacatttttcgaagctttctccttatgcagcaggtatagcaacagcaagataaaataatg

SEQ ID NO: 299 - DNA, 359 bp, Glycine max
  Clone ID: PAT_MRT3847_10026C.1
cgatatactaccaagttatctgaagcttgcgataggattttactttacgtataatgatctccacatgtcattatgtactgagggacataattgcggggtacggtcatactttagcttctttatattacctatcactaatgcactgccttggtttgatcctagataatctcactatgtattaaaccaaattctatcatgttgtcactaaatgtatgtgaacctttatgctttcgaaaagatacaattaaatgtgattaagcaagaaaaattcctaattaattatgcacgccttttttgcctggttccattattatgcgaatataatatttgaaatcaatttagtatgatttatttaacta

SEQ ID NO: 300 - DNA, 1599 bp, Glycine max
  Clone ID: PAT_MRT3847_100270C.1
gcttatcatttgaagtaaaagggctttttcactttcggccataattggatggagaaatgaatgtgcaatctaaatcctggcctttttaaatcctgatgtgcaactccgattacaaaccataatttcaccttgacatatgccataaaaggcttgccatactaaatttgcactgggaagaatcgattgagctgattcgctgtggagcatcagtgagagaaactgtttagaaacaatcaggaatgttgctaatgtcggaaatgttcagttctctgctcattcctcccatttgctggcctttggatctgcggattactcaacatattgttatgatcttcgcaatctcagaagtccctggtgtgtactggctggccatcgtaaagctgtgagctatgtcaaattcttggactctgaaacacttgtttctgcttctactgataatacattgaagatctgggatctcaataaaacctctcctgtgggtgcatccattaatgcttgcagcctaactctgtcgggacatactaatgagaagaattttgtgggtctatcggtggctgatggatatattgcatgtggttcagaaacaaatgaggtttacacctactatagatcgcttcccatgccagtcacttcacacaaatttgggtccattgatcccatttctggtaaagacactgatgatgacaatggtcagtttgtttcaagtgtgtgctggagagggaaatcggacatgcttattgcggccaattcaagtgggtgtgtaaaagtgttacagatggtttaaaggaaaggttccctgtggcggcaactttcttgcagttttgcgagttcctggagttttgcacttgtcgcccttgcactcaggctaaatcccatcaacctgctgggagcatataaaaaaatattttgacatcttgagctctggcttataatttgaagtagaagggcttcttcaatttcggccataattggatggagaaatagatctgcaatctaaatcctggtctttttaaatcctgatgtgcaactcggatttcaaaccagaatttcacattgtcatatgtagaaaaggcttgttatacttaaatatcactgggatcaatccgagaagcagattcaatatgaaacagattaagctccactttagataaacttctcaacgagaatttactggagaagaaaataaatcaaatttctcttatgaattaaaattaatttatgtacatcagtcttttttagaagttctttcatttaatttttcagaaactgatgtgcgtaatttaattttaactttttagtagaaatttgattcaatatctctatttcttctcttttttattgataaaattatctaaattgggtttaatattttagaattgggatggctggtgctaaattggttcttagctcgagaatttaccctgtatctatgcaaagcttgtccgtgccaatgtaaattgtattactgtccttttcagatttttaaaatttatgaaggacaagcaattgtacggttataggaaaaattgtaaagcaactccattaccatgaatcgaaagcatataaacttcaggtgtaaaaaaaaaaaaaaaaaaaagt

SEQ ID NO: 301 - DNA, 317 bp, Glycine max
  Clone ID: PAT_MRT3847_100271C.1
gcctctttggttgatcttttcctacactgttggggcttttagtctttggggtggtggctttctctaccaatggggggttattgactattctggcggctatgtcatccacctttcttctggaatcgctggtttaactgctgcttactgggtacataaattttactcttatcatatttgcttcaaatatctaaaagctagctagctcccttagccaaagttttaaattgcggtggcggttgtagttttggtcacgatttttaatatcgtgataaattgtggaaagaagatgtgggcatgtgactctggttttattacga

SEQ ID NO: 302 - DNA, 388 bp, Glycine max
  Clone ID: PAT_MRT3847_100272C.1
cgcgcccgggatagtgccccaggcggcctaacacagggagagtgttcatttttatcgattattcctggggtttcctaagaacatcacaggagaagcctatcctgcaaggacaccttagacctaaagaggtggttagggaccgtttctacgagccgaacttatcggatagggggctacaattggggcggggtcctactggaggccaagaaatgacttgagaggctcgcgcatcaggggatacaaggcacccgagccaacgaaccggacgaggcgagtgaagagccgactgttctgatcaagaacgagatcacgacactgaactcggctctgtacgaaccgaaaccatgagaacacggatatgggtgacggcggttactcgcaggatacg

SEQ ID NO: 303 - DNA, 204 bp, Glycine max
  Clone ID: PAT_MRT3847_100273C.1
ctgggagcgcaaaaatcattgctcagtgttagtttgagtgacaacaacaaggggcgaattgaattgggagatgtcattctcttatccatgttggggtaacagctgcacgaatagaactgaccgtctgcatctatgctcactcaccacgttagcaagaaaatcattatccatggggatgcctggtatcttcacacctacatacag

SEQ ID NO: 304 - DNA, 319 bp, Glycine max
  Clone ID: PAT_MRT3847_100274C.1
ggcatgcaagaaaagttccgcttgcaaattcaatgctataggccaaggccaagcaagttgtagccacatgacaattgtagaaccattagcaagaagctaaatgaaccagaaatacacatgcacatgcaggtggtctgcattaagtacatactgcccttgacgtacatcaacagatctgaatcatagattgccttaaaacacttgggaacattacaaagataaattaagtagcattatacataagggcttttagaatggcatgcccctttttggttaccctaaaatgcaaatataagtacccatatataataggatcaac

SEQ ID NO: 305 - DNA, 358 bp, Glycine max
  Clone ID: PAT_MRT3847_100275C.1
ggttgttggatgagattgagggggaaggcttggagtgtgatcagtatacacatactattattgttgatggattgtgtaaggctggtaattttgatggggctcaaaggcatttgaattatatgaattcgttgggttttggatccaatttggttgcgtttaattgttttctcgatggtttggggaaggccgggcatattgatcatgctttgagattgtttgaggtgatggaggtgaaggattcttttacttatactatagtggtgcacaccctttgttggacgaggcccgttcttggcacatccaaggctgtggcttcatgatcgacgtgtgggtatcaagcaatacggcccactcaacg

SEQ ID NO: 306 - DNA, 681 bp, Glycine max
  unsure (1)..(681): unsure at all n locations
  Clone ID: PAT_MRT3847_100276C.1
ctcttatttcttatatatttatcttcttttctcttctatttccttattttctctcctcacaaccatacataccctacgtgactaaagtatagacatgtgtaattgtgaatacaattgattttagttaccataatcctaagggtttgctaatgaaccctaatccttcctagataggtagaccaacttccttacacgtggaacaatcctaaacacaagaaacttctagaatggaaaatttaacatattaataatccttgtatttcttagggttctttgatgtttcatttaggccacacatcaccccatttcttcctcaacttctcattagtccctttctccgatctcctttattttccaatacaaggttctggtataaaaagggacagactttgtcatcaaaacacttattagaagtagttgatggaactattacttgtaataagagctcnnnggacgaagttcaaccccatcatatagatcttgtccatatgtcactagagtctggatccctctccattagatacatcttgatttcaatggtgatggttttgataccaatcaagaggaaatactaattttgagtaatgttgattatgtatttgtctggagtggtgtaggcacttcttatgttgtgtcctcatactattgcacaagtaaatgaaaaatagttgttatgaattt

SEQ ID NO: 307 - DNA, 385 bp, Glycine max
  Clone ID: PAT_MRT3847_100277C.1
tacggctgcgagaagacgacagaaggggaacttataagatgaccagctcgccaatgtgaccacctgtcgacgtcattcagcagcttctcgtcgagtggacagcgagatcgcatcctcagataagactcgaggaggaccaaggtggatatggcatcgtgcaatgacaccatcagggacaatcaggagaagaccaagctcacatagcagacgtcctatctctctgagatcatcgtggagatattggacgcgagccctgagaccaagctgatgacgatggtgccttatggatcttgactcacaaggagccggaacgtgtgttgtgctaaagactcctactagacagacaatcgattctacctgttgatgggctaggcgaccctgacaa

SEQ ID NO: 308 - DNA, 268 bp, Glycine max
  Clone ID: PAT_MRT3847_100278C.1
agggtgctcgaatgggcgaggtgactcaaaaaatgcggggtttatgagaacaagggtggagctgttgttggtgctgctatcggggttttggcgcgtatccggtgtgaaacaaagaaaaagaaatgcttacgctacgatgatgttcgtatgaacgccgtgggactactaattctacataggcatactcgtgctggtcatatcgctggctacgctcgacactcaagctgatcttgttgtctttgcttcctttggagcatctcctcgatgg

SEQ ID NO: 309 - DNA, 311 bp, Glycine max
  Clone ID: PAT_MRT3847_100279C.1
gagggccaaactaaacattacatttaaccagttacaaagatgcaatgagttaatatcatgactattcactaaggttacattatgcactaatcgcgatgaaacttacattatccggggcccactcatgaatgatgaaattaagtcgcaagctcggcacttgacatttctaaaactgtaaccaggggcatattacaaatatttcacatggtcaaagaggtttaccagtgccacgcttcactacaggggagtggtttttgggccttacaaactgcatacgttgagggaggttaagtgggtgaccatttttgagg

SEQ ID NO: 310 - DNA, 540 bp, Glycine max
  Clone ID: PAT_MRT3847_10027C.1
ctaggaaggtgattattatcactcgcattgcatcaaacaaaaacccaaactaaaaccaaaaccttgagaaaactgaacatggcagagagtggcggaggaccccgtcagagagaaccgcttctggtgtcgccgaaggaagaggttgcaaaagcttggtggagacttaatgtgaaagagtttcatttgccaaaccaaacaaatgataatcaaaaccattgacccttcactctccgtggctttcttcataagcccagatattctttcttccttcttttttctattgaaagtttaaacgtttattttctttttatgttgagttgtgcaaacccagttagcattcttcccctttttcctctttttctttctttgaatgtcttaagtttttgttttgtgtaatgggtgtggtttgtttacaatggtgtcgtgttgaattgtgatggatttaattttgtttcaattgctggtgtgttgctttgtgcaaacccaatatacctttgtttttccttttaaacttaagaagtaaaattatgtatatattat

SEQ ID NO: 311 - DNA, 239 bp, Glycine max
  Clone ID: PAT_MRT3847_100280C.1
attacatagcattctacaactacaattcccgacctaaacaaacccacaacgctctagtcatctttacttaataacactctcaactttaactgttctcctctttaatacatactgtactctcttccatttaatggaacatttcaagaatctgatcacttgctaacccaacttctcatatagactactaataatttaaccttaaaaatatactaaataccactctcctgaaccccccattc

SEQ ID NO: 312 - DNA, 340 bp, Glycine max
  Clone ID: PAT_MRT3847_100281C.1
gcacgtgtgtttttttctggaaattccgggggggcacccggaggatatccagctttccctatgaggaggccaattaatgcttatagaagtttgttaaaaaaaatttgcctgacgaaaaaatttctccgccacagggaaacacaaaatacgacccaaaagcaaaagggcaaaaccgggggggcaaaaaaagaaaacccagtgacaataaaggaaagggccaaaccgcacaaattgaagggggaaaacccgcccggacaaagggcaaaaacaatcagccaacccccggaaaaagagcggccaaaaagggggcaaaaggggggtttttatttggaccaaggag

SEQ ID NO: 313 - DNA, 306 bp, Glycine max
  Clone ID: PAT_MRT3847_100282C.1
cggccggccttcattctttttttttttacggcatctccatgatgacctggtggcaaaatgctattgcagaatactgcatcacctcttctaaaaggagatgttggcacacttggtgcatcccacgtacgccctgaagctcagtacagccgccacggctcgccaattagtacaaccggagggcactgaacacgcaatgaagtgatgactaataccgaattcatatgcggcccatgggctcagacctcctactgctagcaggagtaaacggcgaagtacatgtagttgctaagacaaacaaactcttgt

SEQ ID NO: 314 - DNA, 512 bp, Glycine max
  unsure (1)..(512): unsure at all n locations
  Clone ID: PAT_MRT3847_100283C.1
ctaccatctctaatattccaccaagcaattgaaaatgcaacatatcctctcattacagacacacagttgcaaatcctcccatagcacgaaagtaagctaaagacaactttccagactcaacccaaccatacatcaagagtgaaaatcaaggcatttctatctcacttcattttcacttccctcatttttctatcttctctaacaggctcaaccataattattcagcagatatggtaatataaccatccagaaaattcagctagggaataatttgaaagacaaagtgagcagaacaagttcatcattatatgaaagttatgtttaagagagagagagcatactctttttagaagtacagcagatatccaagtagagaccttagtcaagaaaaacattttctttttcttttccacaaacacccaattctcgttatattgacaagaattaagcttgaaatgaaagcacgaaaatttggagaagaagaagaagaagaagaagaagaanaaaaacca

SEQ ID NO: 315 - DNA, 142 bp, Glycine max
  Clone ID: PAT_MRT3847_100284C.1
ccccaacagtagttcttgttgggaacagttacatttattcacaagagatgaaaacggagtggtttttgatcccagagtatgcaatgactgcacaataacaattgagtaagatgcgatgtaatactaggatatgagagtatga

SEQ ID NO: 316 - DNA, 576 bp, Glycine max
  unsure (1)..(576): unsure at all n locations
  Clone ID: PAT_MRT3847_100285C.1
tcacccccgcgccccaacccttacaaactgtccattttcgggaaatatggctgcttctgagggaaggccattggtggaggcagtggaacacaaggaggatttctatgagcaccaagagccaagtggatgtgggtatggatgctttcagggttttgggttgagttggtgtagaagccatgaagaaggtaaaggcctggtggagcagaagggcaattcgtggctgagttgcaagttgaggaagataaaggagttttcagaagtgattgcaggccccaagtggaaaacattcatcagaaagataagcgggtatggaaggaagcagcagcagaagaacaggtttcagtatgatgaacacagctatgctctcaacttcaatagtggggataaaagtgaagatgatgacacgccccccagtttctctgctagatttagtgctccttttccctctgctcgtcgccaaactgaataatgatttgtgcatgctcgtttctgaagaggtgttattgcttaaatgtcttcttagtatttttcatccgtagaatcattaattattcgttcnntaaagatcattctttt

SEQ ID NO: 317 - DNA, 829 bp, Glycine max
  Clone ID: PAT_MRT3847_100286C.1
accacgcgggcttcaattggccggttcggcggttcggttccgatccgattggctcgtcttcagtgtgaaattcctcgctcatcgcgttccgaatcttcctctcttgttatccagcaaccggtttggcggcgcggcttttcacacgcgtctcacaattcgtccacgtttttgttttttttgttttttggataacgagaattctagatctcttgaacgcaccgtttttggcggttatagaggatcgggacgcgaggcggatgacggcgaggaggttatcggatgtggtgctggactgcgtgatgccatacatacacgactccaaggaccgcgacgccgtgtcgcaggtgtgcaggcggtggtacgagctcgactcgctcactcgtaaacacgtcactattgcgctgtgttacaccaccacgccggaccggctaaggcggcggttcccgcacctggagtcgctgaagctgaagggaaagccgcgggcggcgatgttcaacctgatacctgaggattggggaggtttcgtcacgccttgggtcagagtgatctctcaatactttgattgcttgaagtcgcttcactttcggcgcatgattgtgagggattcggatcttcaagttctagctcgttcgcgcggtcacgtacttcaagcactcaggctggaaaattgctctggattctccactgatggcctctactatagtcattgcaatttaagtgtttaggctcacttgttgatactggctccatggaggttacgtcacgccttgggtcagagcgatctctcaatactttgagtgctcgaaggcgctccactttccgcgcatga

SEQ ID NO: 318 - DNA, 177 bp, Glycine max
  Clone ID: PAT_MRT3847_100287C.1
tacggctgcgataagacgacagaaggggcgagcatcaatatctttacgtgtgcagttactcatgacatttgttcctatcctttgctcacacagggagtcttttgctaggagcatgagacacatgcttgcctgtgttctttttgagcgccttgagagccggcgcgtgcatgaggatgc

SEQ ID NO: 319 - DNA, 193 bp, Glycine max
  Clone ID: PAT_MRT3847_100288C.1
agtgttgggcggcacgaaagttcttatttataccatggctctgtcacgccactcgacaaaccttcttgtaactgtagaggatgctgaagcactccaaaagaccaaaggcggagagggcacatactccaaccatggcaatggggttcagcacattactggcactgagacctaatgtggagcatataatggtgat

SEQ ID NO: 320 - DNA, 428 bp, Glycine max
  Clone ID: PAT_MRT3847_100289C.1
cccacgcgtacgcttagttctagatcgcgagcggtcgcccttttttttttttttgctagtgaaattgtatgttaaaatacaatttataaaataattaaaaaaaacatgttgaaatcgtatggtaaaatataatttccaaaatattaaaaaaatattaaaattgtatgtgtagtatacgatttcaaattttaataaaaaaattaaaaaattaaaattgtatgtgcatatagtgtaataatttttttaaaaacaaaatcgtgctttgaagtattattatggtaatttttttaaaaaaacaatatctcattatggtgcaagagtagactatattagtatcaagatggttagtttggcaatagaaactctcacatgatgaattaatgcttggataattttttttcttatttgaatcattggtaaaaggtaaa

SEQ ID NO: 321 - DNA, 240 bp, Glycine max
  Clone ID: PAT_MRT3847_10028C.1
ggctcgagggtgaattcttggttctccgatcatccttcgacccaattatttttctctgcgtgcagcaacggaaccaggtcactctgctccctctcagctcttctaaccagaaccactgctgtgacgcagcgcagagaagttccgagaatccgtgtgtttcaaggccaggtcccagatctttatcgagggcgggctcgactacttgggcaacccaagcttgacccacgcccagagcatcct

SEQ ID NO: 322 - DNA, 324 bp, Glycine max
  Clone ID: PAT_MRT3847_100290C.1
gactctcttagcgctcaagcgggggattcccaataacaataatatgcgcatgttcaattaagctccttctactatacccatggctgctactaagctcataattgcttccctacttgcgtcgattctacttcttgatttcgtagatgctgatcaatgggaacatgcacaaacgcacgggtctattcttcatcagatagattgtaacggagcatgtgctgtgaggtgccgataatcatctcgtgcacgcctttgccaaagagcttgtagaacttgtggtagacgctagaactgcgtgccacctggaactgttggaaaccaagaagt

SEQ ID NO: 323 - DNA, 479 bp, Glycine max
  Clone ID: PAT_MRT3847_100291C.1
gccacttcgcttaaaccctgatgccctctgtctcttcttatcttcacatcacgaaagcaccataatgcacttctgctttcatgcaggaaatcgtcatgacgaaagtggctgctcgcatcacacaagtacactgtgtacatccatagcttacttacatctcgctgcatgtcctcacgccagattcttactgcatgcctgtcatatgccattgacgatccgactcataaacaggcattatccgctttcagagaggtgggtgatgcaaaaactatcactgacagatactccggacgatcaaggggatttcgatgtgaccccttctccgctgctgagacagcaaggtcgacactctctgcaatggacgagactgatctatatgaatgaatcattatcgtatcctatgaaaatgatagaccgtctgccactccctctgtggtatattaacgatgatggatatcacaacgatatctctctcagcc

SEQ ID NO: 324 - DNA, 319 bp, Glycine max
  unsure (1)..(319): unsure at all n locations
  Clone ID: PAT_MRT3847_100292C.1
cctccccccccccccaccggccccctttctctctctctctctcccacatctagcaagagagagaaacatgagagatagcaagcagcacagcagaatgtgcagcagcagcaccaccctcgcattcttccttctcattgcaccactcctttccacttccacagcctgcgtgggggggaacggcagaagaatcctacaccaaccccttggccccaaaaagggatccccttgtccctaacaacccccacgccctgctgcgttgtgagctntaaanggaaagtaccngttatgaaaaacacgaaaaaaaaaaggtagttattaa

SEQ ID NO: 325 - DNA, 374 bp, Glycine max
  Clone ID: PAT_MRT3847_100293C.1
caaaagctacgtcgatacattgtttgcctcatcggagtacattataccaatcttaagagcaatccctccattgtgcttgctcgctgcaccctcccaccctactgcccgggccaacgcctagtgcttggtggcggatcccgggccctcaagctcgggcctgtggacgtacttgcccgggctctcctggaagacgagcgagtggggtcctcccgagtcgagggccttggggtccgagaccggcgcgccgcgctcgaagccctcctcgaccgtgccaaatcggccggccttgccgttcgagccaccgttggtgcccgacgcgctgtccgaggtcgagccttggtggcctgccgaagcgccggctccgagagctcccg

SEQ ID NO: 326 - DNA, 560 bp, Glycine max
  Clone ID: PAT_MRT3847_100294C.1
gtcccagataacaagatagagagttccttgttcctctttctctcccccccccccccccccccccttatatatatataattactctttttttatttttctttgttggaagaaccaaagaaatgggagttcttgattatatttcaaaatttttctcagtgtcacctgccactggaaagaaacgcaaagcaatgccgacagtggaaatcaaagtgaaaatggactgtgatggctgtgaaagaagagttagaaattccgttgtccacatgaaaggtgtgaagcaagtagaggtgaacagaaagcaaagcaaggtaactgttacaggttatgtggaccgaaacagggtcctaaagaaagtgcagagcacaggaaaaagagcagatttttggccatatattccttacaacttggtggcttatccttatgtggcacaggcttttgacaaaaaggcaccatcagggtatgtgaaatacgctgcacaagcactacctgtttctaactcactcgatgagaaactcacttctctatttattgatgataacccaaatgcatgttcaataatg

SEQ ID NO: 327 - DNA, 161 bp, Glycine max
  Clone ID: PAT_MRT3847_100295C.1
ggatcttcagctaacgcgcaagaaactgtgttggcttattctaacccactaaccgcgaacgcgaactctggagatagcaattgactactaaagcctgagatactaagatctctgctacccttctgtctgatgcacatcgtcttcaaaagatttactaaaaa

SEQ ID NO: 328 - DNA, 1292 bp, Glycine max
  Clone ID: PAT_MRT3847_100296C.1
gagaaaagaggaaggcgaagaccgcaaagaaagaatagttttcagaagcagaaagaggttttccgtcgtttcgcgtttagcgttttgcgttttccgttccgaaacgatgtcctccatggccatcaccaccagagacagagatcgagagcttctcatccccgtcgccgacacccccgccggcgatgccgccgtctccccttcccccaagccatcgtcgtcggcgtcgtccccgcatcattccggacgcgagactttttacaaagttattagaagctgggcatcaaaaaagtttatgactggatgtgtcattctctttccaattgcaattaccttctatataacatggtggtttattcatttcgtggatggatttttctctcctatctatgctcagcttggaattgatatttttggtcttggattcataacttccataactttcatcttcttggtcggggttttcatgtcatcatggttgggtgcatctgtcctgggccttggggagtggtttatcaagcgaatgccacttgttcgtcatatttataatgcctccaagcagattagtgctgctatctctccagatcaaaatacacaagccttcaaagaagtagccatcattcggcatccacgtattggagaatatgcatttggattcatcacctcatctgttacccttcagaactattctggagacgaggagttatgctgtgtctatgttcctacaaatcatctttatattggtgatatatttcttgtcaacaccaaggatgtcattaggccaaacttatcaattcgtgaaggaattgagattgttgtttcgggaggtatgtcaatgccacagatcctatcaacgatcgattcacgcatcagactaggggaaataagtagaatcaacagaagctgagtgaagggctatattagtttttcatgttatagttccttggtatcttgtgaagccatcagaatgacaatgcaatcattggtttggatgcaagtattgaatatacgtgattgattgctctgagaaagtcagactctgatggcttgtgtaacattcgtttgagtaagaatgtaggatttagcatttgtttgacaaccttacagaattttattctctgcttcgagtctcgaatttttacctgtgtataatgtactactactggttctcactcgttatagcaattcaattttgtagtgctgattgattgattgttggttcccggccctcgtgccgaatccggcacgagctaaaaagccaacactcatatataaagaccaaaaaggtggttgct

SEQ ID NO: 329 - DNA, 258 bp, Glycine max
  Clone ID: PAT_MRT3847_100297C.1
ggatgacatacttatatgggacagtcagaatagttggaaccgtctactggcacatcacatcgacgcatctcgagagctgtcactcttctcagatcacaatgactctattccatcgatcatgtagaactggggatgttagggcttccacgatgtgttatggtaaggtcggaacctccaatgtgccattctcggcagaaggtgctttatattcgccaagtgagctgtttgctgctgatacgggtatccacagatgcggtt

SEQ ID NO: 330 - DNA, 395 bp, Glycine max
  Clone ID: PAT_MRT3847_100298C.1
cccacgcgtccggcttgtaaccgctttcatgatggtgtggtgtcaatggttgttgataagccagtgacaaataattttggacatctggggcgaaattctactatcatttgtctaaattaaattgcatcgtctttcttgcaaatttcttcttgatatgctcactatcaaatcaaatgagtttgctttaattcaataatgctgtcatttcctgcaatattctctctaaatcaagttaatctgtttatgtagataggatccactgagtgggttgaacaaaaccttattaatctaagttccaaagctgtagcataccttaatgtggactgtgctgtgcaaggtcctgaattctttgttggttcaactcctcagctagacaatcttattcttgaggtcac

SEQ ID NO: 331 - DNA, 1129 bp, Glycine max
  Clone ID: PAT_MRT3847_100299C.1
cgtcagcggacgcatgggaaaacaggcttgtaacagcattcatgatggtgtggtgtcaatggatgttgataaaccagtgacaaaataaatttgggcatctggggcgaaattctactatcatttgtcgaaattaaattgcatcgtctttcttgcaaatttcttcctgatatgctcactatcaaatcaaatgagtttgctttaattcaataatgctgtcatttcctgcaatattctctctaaatcaaattaatctgtttatgtaccacgcgtccgctcaaagccccattcggttagtggataagataacacctcagtaagatggcacacaatttgatggaaatgaggtgtggggagttgaaaaggaggaatggcaatggttaagctaaagctcgatagtgtttggtgtgtatgtttctgttggcttttggtttatgtttttcagggtgaaaagaaggtggccacaaaatgtttttgctgtcataaagggatctgaagaatctgatcgatatgttctgcttgggaaccatagagatgcatggacgtatggtgctgttgatcccagcactggaacagctgcactactcaacattgctcgatgattttctgctctattgggcttggggtggaagccaagcgagactatcattctctgctgttgggatgcagaggaatttgggatgataggatcaactgagtgggttgaacacaaccttattaatcttggttgcaaagctgtagcataccttaatgtggactgtgctgtgcaaggtcctggtttctttgttggttcaactcctcagctagacagtcttattattgaggtcaccaaaaaggtatttagttgaagttattatcatttataaatacatgtgcaaacatacatatggatgattcttaacatatatatcatgcttactcctagtttttttttttttttgatcagccatgcttactcctagtaattcagaacatcaatcagtttttgctttaattactactaaaaaatgtttgtccaaggatcctgactttgagggggtatcattatatgaaaaatgggctgctgctgctgggggaggcaataatattcaaaggctcaatggagtaaatttccattttgctccatttgtgc

SEQ ID NO: 332 - DNA, 320 bp, Glycine max
  unsure (1)..(320): unsure at all n locations
  Clone ID: PAT_MRT3847_10029C.1
agagttgatcatttcttgatcaacattttttccttctcttatatttatcatagttttatattggaaatccttgaacatacaccaggcctataggaataataaacaacactataaaaatatttacattcccaanggttcattcaccgactcctttttgtttctacagaaacacgtatacatcacataattgtacagattactaccaatgtctacctatgtttacaattttttattattctacgtattgacatgttgaaaaaactatcttaaaaaataaaaaaagtggcttctttttttttagggaataaaaacaaaacttt

SEQ ID NO: 333 - DNA, 278 bp, Glycine max
  Clone ID: PAT_MRT3847_1002C.1
gcggaaacttttagtgcggacaagagagtctgcttttttctgatagtatgaccgacaagatctaccgagctaggctgaataatagcagtgcccagctatgcgacgtcggatctatctcatgagttggctgcagtactaatgatggtcgattaacgcgtggatgagatagcgttgatcctgtacatgaggtattggtagagggtatcttttttcttgacccatcacagcagttaatactaaagttcgttgtgaagatatcaatattgttgcatgcagcc

SEQ ID NO: 334 - DNA, 374 bp, Glycine max
  Clone ID: PAT_MRT3847_100300C.1
aaaaaaaaccccttgggggtttattttaaaattggcccggggtcacccccctaccaagtttccccgatttatttattcccccctttaggggaatttttgccccttggacccctgtgggggaagcccgccttctttttatttggtcaaaaaaaaaagaaaaaccgggggggccccacacatggctaaacttatttttggatccctggggtgaattttagttaatcaacaaggcccccggcaggtttttttttccacaagaccggttattataggggttaaccggcaggcatgccgggttttattttctttcccttccccccatttgatcccggccctggatgggaccccgtgttttaacccgctttaaaaccccc

SEQ ID NO: 335 - DNA, 463 bp, Glycine max
  Clone ID: PAT_MRT3847_100301C.1
ctgctctctctaaccttttccccaaaccaacttacactcaaagaaagcttgttctccttctgcctagtaagaagcaacttgttttagaaagaaaagaaaaacagtgtcattgctctttggcacaataagataatagaaaatggaaagcgacaggaattgggagcagaacgcactcatcagtgagctaattcaggggttggaggtagcaagaaagttgaaggaagacttgagttcagcctcttcggttgacgctagggactcacactcactactgcagaggatattgtcttcttatgacaaggctttgctttttctaagatggaatgaatcagtgtccatgcaacaaccaactaaaacttcttcaccacagtcaccctatccattgacaaaactcctctgagggaagacgctgaacaagatcatcaagaacttgtacacagttcggagaaaagatagatgatgc

SEQ ID NO: 336 - DNA, 426 bp, Glycine max
  Clone ID: PAT_MRT3847_100302C.1
ccggacccattttataatatatttaacatggggaactagaaccaggagtggggcaaggaagacaaaagcatacatgcgcgacacccaaggaacatacaggccaacataatacactggggggatacaggatgggacaacgatgcagatcaaaacgaaagcaaccgccataataatctaaattgacctacaaaacccaccaacagaaaactaaattcgcaacacaaacacatatcaccactcagacctccctgaaaacacttaaagcagaggctacgagattcaaaacgtcaacagaggactgagccacgcgggcgaagacagccacaaacggggaaggtgccaaatagacacctcccgtccacattccccaaaagaaccaaacaaacttggacgcacacacaggggtgacagcagcaaagaaacaca

SEQ ID NO: 337 - DNA, 781 bp, Glycine max
  Clone ID: PAT_MRT3847_100303C.1
ccctcgcgttttatcgatgcgttgtgttgtgtcctgtgctagttgaatctcatctaaccccaaatactaagatcctatcctactactcatttgcttaggcatcatcaacaactctcatttctcatcatcacttcccacttacgctcggtaatgtctcatttctcacgcatcaacccctaataataatcccccaaacagaacctttcccacccaatccaaacacagccctaaacccccccaccatcatcatgagtgccgtgaatttgaacacatggccacgccccagcttcattttgaaccaaaccgccacaagaagatccagatcctccccaacctctcatttctttcacggcgtcaataagttaccgtcacccatttcctccctcaccgttgccaaacgctcatttacgctctcggcggtgctgacgaaagaggacaccgtggagacggaagagaagccaccgattttcgacttcaagaactacatggtttccaaagcgagcgcggtgaacaaggccctcgacgacgccgtttcgctccgcgagccgcagaagatccacgaggcgatgcggtactcgctcctcgccggcggcaagcgcgtgaggccggttttgtgcgtggcggcctgcgagctcgtcggcggcgaggaggccacggcgatgcccgccgcctgcgccatcgagatgatccacaccatgtcgctcatccacgatgacctcccctgcatggacaacgacgacctccgccgcggtaagcccaccaaccacaaggtcttcggcga

SEQ ID NO: 338 - DNA, 387 bp, Glycine max
  Clone ID: PAT_MRT3847_100304C.1
ggatagatttactacaagataggttttttgtggttattgaacaacggacactttaattcaagtggattaaataaaaatttatatgggaaaagagaactaaacagaagagagagaatttattagatataattggtagttgtaagaagggacagaaataataaatgtaatagataaattaaagaaaaaaataattactactctgtatcaacaatgattacccattgaaacaaagacaataaattttacttgattgattggtttcaatgataaatttaccttgaaattttacagagaccaaatttttttatatgttgttatcaatcaattatatgattaagatttgaatttttggagaataggtagtcttgggtgttaagttatatcact

SEQ ID NO: 339 - DNA, 532 bp, Glycine max
  Clone ID: PAT_MRT3847_100305C.1
tataggtcctgaagaatgaatatttaaattcaaggtcatggctaaacattctgaagttcatttgccatggactgtgtatggtctcagcgagtgggaacgtgtgaagtgtgccttacaggtactccttgaaacataatatctcttcatccatccggatcgggtctgatttagtacgttcatgatatagcgctcgatcgcctaccaactgatgaatagcccttggcccgtccgtccgctcagagtgtgagatgcctatgtataacacggccgaggagtgatcctacaaccatgtgataatgggcctgcgaaaagtaattaacctttccttggaatgccgataagcatacccgttgacaagacacccattgggctgggggcctggcttaaaggccttggagccccacctttggttctcttacgttccaaacttcctgttttttattgcaaccatatttgtctgtttacctttttcttccacaattaaacttcaattcacaggttgaacctagaaaggaaaaataaaaaaattact

SEQ ID NO: 340 - DNA, 104 bp, Glycine max
  Clone ID: PAT_MRT3847_100306C.1
ctgctcgaggttctagatcgcgggcggccgctcgcgatctagaaccggctcgagccacaatacctaagtctatatctatcggtgtagtgtggggagaaaggtag

SEQ ID NO: 341 - DNA, 223 bp, Glycine max
  Clone ID: PAT_MRT3847_100308C.1
gaatgatccaaataatacaactatttttgatggtaatttggatcctaccgtcactgatgatcatgtgaggcaggttatcagcccttatggagaattacagcctgtgaatatatcaggaggcaagcgatgtaggtttgtccaatcggcaaacggtaactgcaccaacagatgggatgtacgtttgttgaatgggaccctggtggcaggtcaggatgtacgaatt

SEQ ID NO: 342 - DNA, 171 bp, Glycine max
  Clone ID: PAT_MRT3847_100309C.1
ctcaatgctgacaatttagcatggtttgagactattgttctaattggttgcaccactactactgctggaatgctagacaacattcttctatcatttccaggttcatctacagtagacattagacggtgcagtagtttggagagctgactccaaagttactatgtgaaatgg

SEQ ID NO: 343 - DNA, 221 bp, Glycine max
  Clone ID: PAT_MRT3847_10030C.1
aacaagtgaaaaatttgcagaaagaccacctccatggtaacaagtcttctatggtggtttcagtctttgttgatcccagagaggctggtgatggtgatgttgatgttgatggcatgatgaggccgaggatgaaagctcagtttgtaatttcatctagtgttggttctataattatttttccttgaatacaagcccttgtaatttttttcctgaaaaattgt

SEQ ID NO: 344 - DNA, 477 bp, Glycine max
  Clone ID: PAT_MRT3847_100310C.1
gaaacttattaaatatttttaaactttactgggtgtggaaatcctaaaaatttaaaatggcttagttatctaatttgcttggtctatttaaggcctgttttttacatccaaattatccaattgccatttatttataaataaaaatttaaaattagaatttttagttgacatgagttgagttcaattaactattttttttcctctattctcctgcctatatttttctctccccaactctttttccctttcccttgttgtactgtttgtccaacatttcaaaaacagattataagatatcctccccaaacaaaaacaaaaaaaaccagacagctaaaggattagaaacaaattacatccaaagtcagctcaagaagactctcttttccttttcattgttgataaggaaaacattacacaaaaaaacaccatgatcagcttaaaagaacttctacttcccaagcttttaatgatatactt

SEQ ID NO: 345 - DNA, 529 bp, Glycine max
  Clone ID: PAT_MRT3847_100311C.1
tcggtttcaaagaatggccaaaggcattcacttctaccgcttcggacattgagcggaaagacaatgaaaacgaagagactgaagaggacgacggacagtgggggactgaagcgacggcggcgagcagttcagaggaggaaaaaacgacacaaagaacgaagaaccgacaaatcggagaatatctcaaaaaattgggagcggagaagacacacaaacacatgttgaaattcgcaatgggaacgattggaaatgacgaaaacaggcgtgccgagctaacgctgaacactctctgaagacggtcgcttgcgcttttgcgctttgcgggccaaaactgaacagtccgtcgtgggcagtcagcggccacaatggaaagcggatttgcgagtgcaattccttttcccagagcaggcgcccgacttggagcaggtcggacagcacaatcgaacggaatcggaacagcagcagaaaatgtttatgggaaggaccgaatttgaatggaaaggcgactgtttgtcaaacagacaataat

SEQ ID NO: 346 - DNA, 530 bp, Glycine max
  Clone ID: PAT_MRT3847_100312C.1
ggggaacccgttttggttaaaaaaaataaaaagggggggaacaaaatccaattttctttttaaaaaccggaattttccccccccccttggggggacccggaaaaaaattaaagccaaaccgcggcggctttcagggaaaaaaaaattgaaattttgggggtaaaaaaacccccctgtttggggttgttagggccctaaaacagggcccggggggggccccccgaaaccacaaaaaaagttttgccaccccctttttgcccaaacaaaaaattagggtttaaattgccccccaccctacctatttgggacttcaaaaagcccaatttgtttgccaaaaaaaccaataaaaacggggggggttttccaacaactaaggggtccggggggggaaaccccctggttggccccacccttgggcccccccccgcccctttttgggcatttgggaaaagaaaaacacccttttggtttgtaccaaagaaaaaacaccccgggttttaacggatacagaggggccccaaccggatttt

SEQ ID NO: 347 - DNA, 223 bp, Glycine max
  Clone ID: PAT_MRT3847_100313C.1
tttttggacaatgggggcatcgtacactcgatgggggagcttgaaagtataagcgggctcttacatatacatacactggtgtcgacatgcatacgttgagcgcagacacacatgggtatctattgaagccacagtagattgataagactttacatgcttagaaaggctcgcattgccgatatatctaatcagttgcaggggggcattaggggtgcttaacaca

SEQ ID NO: 348 - DNA, 182 bp, Glycine max
  Clone ID: PAT_MRT3847_100314C.1
aagtggctcgaggaaaaagcttctcaatagagtttgagggagaaagattcattcatgatcattgtatccttttgcccttcgtaaccatcaagtttctgattctgtcttttcacttcctttcgctatcgtcattcttctggctcttgtcaactatgggctgtacatttttaacggagtagctc

SEQ ID NO: 349 - DNA, 326 bp, Glycine max
  Clone ID: PAT_MRT3847_100315C.1
taatgagaggaagaagacggatcatggccatgggcatggccatgacagctacagcagtctccacagcgattaaactgctgcatgagctacttatctaggaggactatggcaccatcgtagccagggctgtgcactagttcctctctgtctaactatatatttagctccctatctatgctagtactttatccctagctggggaactacttatgaaggataaaaacaacagtgagaacatgtgcgtatatctggttgctaactttacggctattactatgaggtttgggtcagttgaaaccgcgatgatcgcggtatggctgcatgca

SEQ ID NO: 350 - DNA, 463 bp, Glycine max
  unsure (1)..(463): unsure at all n locations
  Clone ID: PAT_MRT3847_100316C.1
aanatctcattcaccttgtttttttttgaggcgacgagggtgcggagttatatggaggctaacttctgaatatagtaaacactggcttcactggtgtatggcgcgcttggcggaaaggtcgaagcagcactttatcccatctatatgctaacagccataatttacttcttcttctgggccttctcggcagccttggagaccttgcctgccttctcggtcttgtcgacggccttgatgacaccgacggcgacggtctgtcgcatgtcacggacggcgaatcgtccaagaggggggtactcggtgaaggactcgacgcacattggcttggtggggaccatcttgacgatggcggcgtcaccagacttgacgaacttgggggtgtcttcgatcgacttgccggatcgtcggtcaatcttctagaggagggtgtccaatttgcatgcaatgtgggcggtgtggcagt

SEQ ID NO: 351 - DNA, 164 bp, Glycine max
  Clone ID: PAT_MRT3847_100317C.1
agtacggtcaggaattaccggctcgagcgacgcgtcagcccacgcgtccgacgacagaaggggggacaggtgtacaagcaaagtgtatgacatgtttcggcgttagaaggaacatgggagttcacttcagaagatgataatcaacaaggcagatgctgtagcca

SEQ ID NO: 352 - DNA, 487 bp, Glycine max
  Clone ID: PAT_MRT3847_100318C.1
ggctcgagggctcattctaactgcatgcttggaatctcgatcgagcacactcagactgtgcgctgcctaacacaactgatataccatgcggaacactatgtaccagcaagaatgtattgcttggcctcgtatgtaatgcggtggataccatcgcatactgcaacaaatagattaatgaactactggccggaagggactgcttggaacatgtcagtttcagatagaaacacagtgatgcttgcataatagcagtcttaaataaggtgtatggatcatgtgcatcttggagtaacacgctcagagagcctacactcggtcacatgccgatgctacgaaactgaatgcactaatagggcctaatatgaagctcgcttatttgcatagagagctgaagcagtactgctagatgatcattattgccgcgactatattaggttacatgactgcaaatacattgattgctgctttgacttcatgggcatatgac

SEQ ID NO: 353 - DNA, 1343 bp, Glycine max
  Clone ID: PAT_MRT3847_100319C.1
aacacacacatttctagtccccaaaccctaaactagaagagaaaaagagaaagtgcaacatcataacatcaaattcgtatgtgcttttgcttaccctaaaatctccatccctacaaaaagaagaagaaaaacaagaagaagtttaacatgtcagctgccgtggccgcttccgctgccgccgctaccatgtcgggttaccaccacaactcctcctcgagacaacaacaacacatagaccatgaattggccttaacaccacaacgagtgtgtgtctctccacctctgagcaggtacgagtcacagaagcggcgcgattggaacaccttcgggcaatacctgaaaaaccaccgaccacctttgactctctcacgctgcagcggcgcgcacgttctggaattcctccgctacctcgaccagttcggaaaaaccaaggttcacgccgaaacctgcggatactttggaaactcccaccctccgggtccctgcgcgtgtcccctgaggcaggcgtggggcagcctcgacgcgctcattggccggctacgcgccgccttcgaggagaacggcggcgcgccggagatgaacccgttcgggacacgcgcagtgaggttgtacctcagggaagtgagggacgcgcaggccaaggcgagaggcatagcttatgagaagaagaaacggagaaaaccacaacaaagtggacatgatcatgatcatgatgcgatgatgatggtgggttctacgagtgatgtgaattattcttcagggtatagtggtggtggtggtggtgcctttgttcctcatcagcaaatgttgtctgattcgaatgggacagcttctacatctgatggggtttcttatttctcatcatcatcccagtgtggtgggtttaattgattgcgatcatgcgtgttatttgatccctaagaatcaaaaatagtgtcaaaaatttacaataagtggcacatccttcttcaaccaactgaactacgtctttaacattattcgtgttatatgttatgatgcatggtggaaaattaacgattaatgatattattctattctattctatggttagcgatgtggtagggctcaaggattcaactagtgtggtcattattagaagcttgtcagggtttttttttcttttctttctgaatagaagcctgtcagggtagtgtctaattaatatcgtaatttcgttctatatggaaaagtattgtgaaagttgaaggaattcctgcatatggagcttgcaaaagtgcatacagcaaactattgtataattaataagtgtgactctgattaataacaatagtatttatagtcctcgtttactcaaaaaaaaa

SEQ ID NO: 354 - DNA, 2062 bp, Glycine max
  Clone ID: PAT_MRT3847_10031C.1
aaggcagaataacaatatatacaaaattctctaatccaacgaccacaaagtcttgtacgtgaacatatgtgtaattatcagtacatgtacagaagcaaagtgattaaaatactaacgaaagcgatgacaagttgtgaaaaggaccctgtatataatttcaaaatcacggttttgtgttggccatttgagcggcgaagagattggaattaacatctccccgaggactagcctccatccaccttttgagttcaaaggggtagggggtgtcaatagtcaaaggaggaggactagtccattgctgtccataatagaaattaagcatcaagatggacataagtccttacactactccaaagaagctatcaccacactccaataaccataacaacatcattgccgatgaggctgcagcgttattagatcacaacaacatgcaccgcagcaaccacagccacacttccacgagccgttcctcggactcaagtgagcctagtgaagacggtaaatgggcacccaaacttctcagagagtgtgcaaaagcaatatccgagagagactcaagcaaaacgcaccatcatctttggatgcttaacgagcttgcttcgccttatggggattgtgatcagaaactcgcctcttatttcttgcaagcgttgttctgcagagccactgagtctggtgagagatgctataaaactctttcctccgtggctgagaagaaccactcgtttgactcagcgaggaggttgatactcaagtttcaagaggtaagtccctggaccacgttcggacatgtggcctccaacggggcgcttttggaggccttggaaggcgagccaaagctccacatcatcgacctcagcagcaccctttgcacgcagtggccaacactccttgaagcgttggccacgcgaaatgatgagacgcctcatcttaaactcacagtggtggccatagctgggtcggtgatgaaagaagttggtcaacggatggagaagtttgcaagactcatgggcgtgccctttgaattcaacgtcattagtggattaagccaaatcaccaaagaaggcttgggggttcaagaagatgaggctatagctgtgaattgcgttggagcattgagaagagtccaagttgaagagagggaaaacttgattcgtgtgtttaagtctcttggtcctaaagtggtaaccgttgttgaagaagaagctgatttttgcagctcgaggggggatttttttaagtgctttgaagagtgtctcaagttctacacactttacttcgagatgttgaaggagagtttccctccaacgagtaacgagaggttgatgttggagagggagtgttcgaggagcatagttagggttttggcttgttgtggtactggtcatgagtttgaagatgatcatggagagtttgattgctgtgagaggagggagagagggattcagtggtgtgagaggctgaggaatgcgttttcgccaagtggattcagcgatgatgtggtggatgatgtgaaagcattgctcaagaggtaccaatcagggtggtcacttgtggtgactcaaggagatgaacatatctcagggatttacttgacatggaaggaggaaccagtggtttgggcatcagcatggaaaccctagaatatacttacttgaattcaatgaatgtgtgtgtattgatgatcattgtatctatatatatatatatatatatatatatatatctgtgttttggtgtatggtaccattactatatatatatattggggggctaggctaaagctaaagctagctaaccttaaaaccaagggactgaagagaagtacactggaaattaaggtgctctctggggatatataccaataccaagagtattattattagatggagctagcaatggatggatggatctggatttttcttttaactttctcgtatgattcttgcacactttgtaatttttctcccgtccaagtctcctttaaagggcaagactttttgcttgggagtttgtgttgttagacttttacacctttttattatagttaagttaatat

SEQ ID NO: 355 - DNA, 348 bp, Glycine max
  Clone ID: PAT_MRT3847_100320C.1
aagagaatctctctcacgggtcaaaaccagaaggctgggactggcttctaactactgacactgacatcgatgcatcgcgggtgaaaggaactcgtgctgaacccacacatggaatcatgcactcaggctgtagtcttgctccaggagcaggtcgcgcttctttacatgccacccaagagcactggaaactactgactcaaaaacatctagcatgactgtgctgatcaccaaagtgaagctagactgttgtttgacttcactagaaggagctagcttgattacgaaacagatggaacctatgacttgacataccataggtacatcctgaccatcaaagaatctaaaaga

SEQ ID NO: 356 - DNA, 434 bp, Glycine max
  Clone ID: PAT_MRT3847_100321C.1
gtaccgttccggaatcgacggacgcatccacgcgtcctgcgagcatactaccgaagggggtacaaacaacacagatgtcactgacacatatgccaatgtctcagatgcctctggaacggatacaatactttgaataacgcgtggtattaattgttaacgctctatcaccattcctcttctcatattccatactgctacctgaacatgaagaagctaaaccctcaacgattgcctgtgttcaagtaccgaatagacgttctctacctcggcgagactcacgccaccacacatcatagtctgcgacactctcaatggataaaccactcaaattgcttagtacctgaaagaaacacgttgagcctgtggtggcagactcaatgcttggacttaacctaaaggactttacactcaggctgatgctttcatagttgcct

SEQ ID NO: 357 - DNA, 438 bp, Glycine max
  Clone ID: PAT_MRT3847_100322C.1
aacagccgcaactttcaactaacacaatatagcatcatctccgatgtaacaccttccgtggaggttacaactcacatttgaacttcaaaaatatctcaaccacttcactttgcaagacgtacgtgcagcatcatcgatcagaatgaacctctggatatactactggttctcactcgatttcaatccattcacaacgcatacgatcatgaacactagctcatgcatacggatatcaccctcatcaacttggaccacccatatacagagagcttattgcaactcattgtcatgccatcatgcctgatccaatcgacagtcagagccttattagccaatcacgctctcagcatactcttcaggtccatcgcgatgaaactcaacctcaccactggtatcattacttcactcaaaatctctgctcgccttgtcgatatcttc

SEQ ID NO: 358 - DNA, 251 bp, Glycine max
  Clone ID: PAT_MRT3847_100323C.1
aaaatttgtcgagatacttggatttatcatataatcctttgactggcagagctcctgagtgttcgaagaataggacaggataacttttccttatcctaaacagcaataagcgaagtggtggaatccccccatcaatcgggtagatagatggatcattgtaatgaatctgcaggagaacaacttgaatagtaaattgtcaatagacatagcaaactctacatcattggaaatcatcatatctggagagaata

SEQ ID NO: 359 - DNA, 2285 bp, Glycine max
  Clone ID: PAT_MRT3847_100324C.1
acgagggcacactcctcctttgataattttataaagagcccctaacggttttgttggagtgagatcaaggaaacctggcggttttgttggattggaacagagcgagcgagatcaaaaaatggcatcctctgcttgtaccaaacccatcttcccctctgccttcaccgtctctaagtcaaagctctctcgtcatgttcatgtctccttcacctcccccaaacccatctactaccactacagaaagctctctcatgcctctcaacgttccttggtggtcaacagcgttttgaaaacagttgacccgacacaaacctctttgcggagatccaactccgaggatgttgggtctctgggagaaaagcccaccatcctggtctccgagaaacttggagaggcagggctgcaggtgttacgtggcgttgggcacgtggaatgcgcgtatgagctctcacaggaggagctatgcacgaagatctcgtgctgtgacgctctgatagtcaggagcgggacgaaggtgacgagggaagtgtttgaagctgggaaagggaggttgaaggtcgtgggaagagccggcgtggggattgacaacgtggatctgcaagctgccactgaatttggttgcctggtcgtcaatgctcccactgccaacactattgctgctgccgagcatgggatcgctctccttgctgccatggcccgcaacgttgcccaggctgacgcctccaccaaagctggaaaatggcagagaagcaagtatgtgggagtttccatggttggaaagacattggcggtgatgggttttggaaaagttggatctgaagtggccaggcgcgcaaaagggttgggcatgcacgtgattgctcatgacccctatgctcctgctgacagggcacgtgctattggtgtggatctggtgtcctttgatcatgccatcgccactgcagatttcatctccctccacatgccactcactccaactactaacaagatcttcaatgacaacacttttgctaagatgaagaagggtgttcgcattgtcaacgttgcaagaggaggtgtcattgacgaagacgcattagtaagggccctcgacactggaatcgttgctcaggctgctcttgatgtcttcaccgaggagcccccatccaaagacagtaagttagtgcaacacgagaatgtcactgttacccctcatcttggagctagcaccaaagaggcacaggagggggtagctattgaaatagctgaggctgtgctaggagcattgaaaggggaactttcagcaactgctgtcaatgctcctatggttgctcctgaggtgttgtcagaattggccccatatgtggtgctggctgagaagctggggaggctagctgtgcagttggtgtgtggaggaagtggaatcaaatctgtgaagattgtgtatcgatcagctaggggcccagatgacttggacaccagacttctgcgagccatggttacaaaaggcctgattgaaccaatatcaaacaccattgtaaaccttgtgaatgcggatttcatagccaagcagaaagggcttcgcataagcgaggaaagagtggttgttgattcatctcctgagatgcctgttgattcaatccaggtacagatatccagtgtggactccaaatttgcgagtgctgtatcagagagtggtcagatcagcattgacggaagagtgaagtttggagaaccccacctgacatgtgtggggtctttcgatgtggatgtgagcttagaagggaatctaatcctgtgccggcaggtggatcagcccggcatgattggccgtgttggaaacatactgggtgaacaaaacgtgaatgtgagctttatgagtgtgggaagaacatcgcgtaggaacaaggctattatggctattggtgtcgatgaagaaccaaacaaggaggctcttgacaatattggagccgtgcctgccattgaagagttcgtcttcctcaagctctagcactagttgagtaatggtatacaaacaaacaaataaataatgtatgcgtatctactatccatggatggtacgttttagaaagtaaaatagctactattggttaaaaagaaatgtttttttttgacaattctcaagtgcacatgcacttcagatgatctagatctgtttttacaccgtagaagaggtattttgatgtgatatatttggatggaatgattcagaataaaacactagctgtttgcggctagtagtgtgctccttcctgtggcctgtgcactgtttttccattgcgaac

SEQ ID NO: 360 - DNA, 226 bp, Glycine max
  Clone ID: PAT_MRT3847_100325C.1
tttcattctaatattctttccataaatattataattaattcagtcagcttcgctgaattggggggcaagattgtacattttgggaccagacctgcttttaaatttaattcccccaattttatataaaaccaaatacccatccaccttgatgcatgcttgcgttgcatgttcctatattacaaatacaagtttcaaagacttacatgtaccgagaatattgactgca

SEQ ID NO: 361 - DNA, 845 bp, Glycine max
  unsure (1)..(845): unsure at all n locations
  Clone ID: PAT_MRT3847_100326C.1
ccacgcgtccgcccgcgtccgggtaattttataaagagcccctaacggttttgttggagtgagatcaaggaaacagagaaaaaatggcatcctcaagagcttgtaccaaacccatcatcttcctctctgccttcaccaagtcaaagttctctcatcaatatcatgtctccttcatcaacaccacctcccacatacccatctacccaaagctctctcagcaacgttccttggtggtcaacaacgtattgaaaacagttgagccgacagaaagctctttgcggagctccaactccgaggaatttgggtctctgggtgaaaagcccaccatcctggtctccgagagacttggagaggcaggactgcaggtgttacgcggtgttggacacgtggaatgcgcgtatgagctctcgcaggaggagttgtgcacgaagatctcgtgctgtgacgctcttatagtgaggagcgggacgaaggtgacaagggaagtgtttgaagctgccaaaggaaggttgaaggttgtgggaagagccggcgtggggattgacaacgtggatttgcaagcagccaccgaatttggttgccttgtcgttaatgcgccaactgcaaacactattgccgctgccgagcatgggatcgctctcctcgctgccatggcccgcaacgttgcccaggctgacgcctccaccaaagctggaaaatggcagagaagcaagtatgtggggtgtttccatggttggaaagacattggcagtgatgggtttcggaaaagntggatctgaagtggccaggcgagccaaagggttgggcatgcacgtgattgctcatgaccccctatgctctgctga

SEQ ID NO: 362 - DNA, 751 bp, Glycine max
  Clone ID: PAT_MRT3847_100327C.1
cataagtgaggaaagagtggttgttgattcatctcctgagctgcctgttgattcaatccaggtacagatatctagcgtggactccaaatttgcgagtgctgtatcagagagtggtcagataagcattgacggaagagtcaagtttggagaaccccacctgacatgtgttggatctttcgatgtggatgtgagcttagaagggaatctaatcctgtgccgacaggtggatcagcccggcatgattggtcgtgttggaaacatactgggtgaacaaaacgtgaatgtgagctttatgagtgtgggaaggacatcgcgtaggaacaaggctattatggctattggtgtcgatgaagaaccaaacaaggaggctcttgacaatattggagccgtgtctgccattgaagagttcgtcttcctcaagctctagtactagttgataatgtaatggtatacaaacaatcatgcgtatctacctaccatctatggatggtacgttttagaaagtaaaatagctactattttggttataaagaaatgtttttgtttttttgacaattctcaagtgcacatgcacttcagatgatctagatctgtttttacaccgtagaagaggtattttgatggacaatttgaggaaacttgaagctatggtatgcgaatgtaatataatttggattggatgattcagaataaaactagctgtttgcagctagtagtgtgcaagaaaaaataaaaaaaattaaattttttt

SEQ ID NO: 363 - DNA, 986 bp, Glycine max
  unsure (1)..(986): unsure at all n locations
  Clone ID: PAT_MRT3847_100328C.1
cccacgcgtccgcccacgcgtccgtacggctgcgagaagacgacagaaggggacagttgcaagggatgacaagggtggtcccacaaaggtgtttaaggagacaggtgcaaataattgtgtgattttctgagtttctttatttctatttccttggagtggttgtagtgtggttgaaggagtcacaagtagaaggagaagaagctaagtgtggatcagtcacgagtcagcgttgttacttgttagaagaagtacagtagatgaggaaaagggtctgtgggggaagctttttgaatcaaagaatcgttgtgaggggaaaaaaagtgaaatggagccactgaatcataagtcttttgagagagtggtttcccagaaagccttgcaaatgggaaactcgtttccttgtcaaatttgtgtggtgggatttctctgcggtgtatgcctcacctctctgttcatggctgctctcacttcctttggctcctttcagtttagtcccattttgttttcaaccatgtcgatggctagtaattcatcagggaattctacttttcctaatgatatcaacaaggttacacgttcggactgccagtttaagcttaaggaaactgagagattagaggattctaagagcagcagagagcaaaataacgatgagagagtctcattgctttattcagcttggagttctgtgttgaatgaacctacaagtggtggtaaagagcacttgcagaaacatggaattagtgggtccagtttgcctaatgccccacatttggaaaactgcaaggtgaaaacgcatctatatgattatcttgataagcgtaaaggatatgaggttttcccgccatggacaacttggaagggatctttgcagacattccctgtggcggcattcaatgagcagattcanaatcttaggcacgaggctgtatctgagggggcttatccaccatggattgcagggcccgatgaagaaaactatccct

SEQ ID NO: 364 - DNA, 388 bp, Glycine max
  Clone ID: PAT_MRT3847_100329C.1
gagtgggagagcaaggagaaactataccctgacgttagtcatgcatggactgtgggctacatggatgatgaggaagcaactgatgcaagtgcaactgatgacacgtcacacatgttagacataggtgtatcactcactgcaagagaacattggttgctccaccacaagaggccaaggatcgatatgaccttgatggggctagttccaactcaatattgcttattattgacatgggccaatgtcatgtacaataagtgaacaaagcggcccaaccaccattatacaaaaaagatgatatcctaccagaatatcactgacatatctcttattataacaatgctacaactgtctaagagaaagattccgcatagacaaaagctgcactatg

SEQ ID NO: 365 - DNA, 335 bp, Glycine max
  Clone ID: PAT_MRT3847_10032C.1
ttccaatctctgttacaagtttcgtttctttcctccggcgcaatcggcttctgcttcaaggaaagagagcttgttattctctatctaaaactaaaatgtaaggtgcaaagggtgtcattgcaattgtaccagctgctgctgctgctgccctcccaggcgagccaatgaatatcatgactgccttaccacttgcgctcacaaaatctctgctctatgccgccttgtcgccgcgcccttcatgaacgtgcaaaagagcatgacaaatatgctgcacaattctgcgatcttgcataagactgcgaccaccctgcctatgctacaccgattaaggccct

SEQ ID NO: 366 - DNA, 259 bp, Glycine max
  unsure (1)..(259): unsure at all n locations
  Clone ID: PAT_MRT3847_100330C.1
gaaaacctaagcttagaattagaaacaaagaaaagaagaaaggaaagaattgatccgttgaaaatgcagggaggaaagaaagcgggagagtccattaaggaaacagctacaaacattntgcttctgccaaggctggcatggagaagaccaaggccactgtccaagagaaggcagaaagaatgannccacgtgatccggtgcaaaaggattggcaccccaaagaaagaggcaaattgacccagggggactggacaagcng

SEQ ID NO: 367 - DNA, 223 bp, Glycine max
  Clone ID: PAT_MRT3847_100331C.1
acagtacttaggatactttctttcaatggcaagccacctcttgatgttaaaaaaatgcggaaccattgacgaaagctataacccaggcaggttattatttccagtcactggacacaccatctgatgctgagagccctacagaaagggagaccgcaacagagagggtaccgactatttataacgggagatacacgtgcgtcacactcgtgtactttacagcaaa

SEQ ID NO: 368 - DNA, 273 bp, Glycine max
  Clone ID: PAT_MRT3847_100332C.1
tttttggcaaatttctactatttcaattcaatagcgacgggggccttaaggcaaaaatttctacaattaatattgttccatacacactttccgatgcctaattcaatcttaaatcattttggtgatgactggaccacatagagttaacaaaacgaaacctatgatgtgcctctaaagcccagccaaaaatacttgtaggaattctaaactaagccactagagaactataatattacggatctactactatgggtaacattgctgatttgctta

SEQ ID NO: 369 - DNA, 641 bp, Glycine max
  Clone ID: PAT_MRT3847_100333C.1
cgaaattcaagctacaaacttaccatagcgaattagcatcactgttgggacactgttcgggagtcaattgttgtttggtcgtgtttaattgtcttgcacctgacctggttctgttgcatgtgatggaatcttggagctatgtccctgaagaaaaggagtgtgtctccaatgaggcactctcacctcccaacactctcgggaggagtaaaaattctttcttgggctgggaactcaaaaccccatgtggtttttccaacgacatgttgggtttgggtcaccacagcattgagaatcaaggttttgaggaattgggttttcctgaaatgttgggaaaacacatgtccgcggctccgagtgggcgtctgccggccagaaaggtgaatggtaatagacaacaacaacacagtgacagaatcactggcactgttgtggatgccccaagtgggttttctcaaagaggggactcaaattcaaagctttcaaactcaaattccctcattgatttgaagctgggtcgatttgctgaccatggagatttcactgatcgggcgttttccaaagttttgtcttcttctgagtcatcaacgcctcctaagagagtgagagcttcagggttgcactctcagactgcatattgccaa

SEQ ID NO: 370 - DNA, 1218 bp, Glycine max
  unsure (1)..(1218): unsure at all n locations
  Clone ID: PAT_MRT3847_100334C.1
cccgcgtccggcggtgcgagaagacgacagaagggggacccattcgacgggaatacttcgggagaatatgaacatttggtttggaaattaaccccgcggcgcctgcaatgattattgtcaaaccaacaatagagaatccgactcaccccgttgtatttgccctttttttgtcttgaaaagggtgaagttcaaggcttcagttcaatccaatgctaactataaagtagctatttaagagctttggagctggttcttcttttggactgaaataaagattacctttttttaaatcttaatatttggtggttcccaaggccccaatgaggacggcatcctatacaaaagagtatagaattatctatattcttccccggctcgaatcttagtgtggccgtcttcagagaatggtgtacgagaataagaagcagcaccggcgcagctcctatttccagcgtcttttgaaggttaggagggatttaagacttctgcaatcggcaaacatggaggagcttgtatcatcatgtctccttgttatcaaaggagatagaccaaaacagaagcttcatcttttagggagcttaaaaaggagaaaatgtgatggtgataaacataattttatggagcgtctgttaggagctgcacgcttactagctgagatgaaagttttgattaattcttagtatttttaattatgattccagtttggggcttaccttggttataagtagttgaggggtttgtcgcattttgaatcaatttcatattcaatctaaattttgaagagttgttgggtttttctctatgctttctcagtagtttttattgtaatatggttttgtttgaatttagttatgaattatgggtagatttaggcatttgctatgaaattctgactcgtagtaattgtacaggtgaagttcaagtcttcagttcaatccaagtctaactatagagtagctatctaagagctttggagctggttcttcttttggactgaaataaagattacctgtttttatatactgagtattgggttgatccccaggttntgattcacattctcactgaaaccattcactctgttattctgttttcgtgtaactggtgactgatttttcgtgtttttccttttcagttttattcaattctcaatatgcttacaccggtttgtagttctattctaaagtattattcgcttaaacagncatatacatggac

SEQ ID NO: 371 - DNA, 420 bp, Glycine max
  Clone ID: PAT_MRT3847_100335C.1
cttcacccttttttttatttttttacttttaagttttaatcttttctgtcctaatctctaaaatgccacaattgcgcacggtggcgcaatacaacccacaactctattcccaattgatttcaacccacctcgagagataggcgcacagataccctttgatctgggggatcacgtcgaataactctctccccttgccttatgtagctgtacaagataatttttctaagccacctaaggctgttgaggaggagcccgagcagctactctcctttctccagcaagttcaaggttttatacccgtgcaaagaagtgctttccataggtgccccttgttaatgcatccaaatgaaccttaatcctgtgcagactctgctcacgttgaagatcaccacaagtttccagtacctcttctcgagccgt

SEQ ID NO: 372 - DNA, 572 bp, Glycine max
  Clone ID: PAT_MRT3847_100336C.1
acggtgcgagaagacgacagaagggggacgcattcgacgggaatacttcgggagaatatgaacatttggtttggaaattaaccccgcggcgcctgcaatgattattgtcaaaccaacaatagagaatccgactcaccccgttgtatttgccctttttttgtcttgaaaaggtgaagctcaagtcttcagttcaatccaagtctaactatagagtagctatctaagagctttggagctggttcttcttttggactgaaataaagattacctgtttttatatactgagtattggttgatccccagggactcaatgggaaccgaatttgaaacaatagaggcaagaattacatctatgcttccccagctccaatctgagtgtggcatcctacagagaatggtgtacaagaataagaaccagcaccggcgcagctcctatttccaacgtcttttgaaggttaggagggatttaagacttctgcaatcggcaaacatggaggagcttgtatcatcatgtctccttgttatcaaaggagatagaccaaaacagaagcttcatcttttagggagcttaa

SEQ ID NO: 373 - DNA, 426 bp, Glycine max
  Clone ID: PAT_MRT3847_100337C.1
aaaaagggggaaaaaaataaaagttttttttttaaaaaaaaaaaggggaacttttttaaaaacaagttccccaatccatgtaaaaacaggggaaaccctttataacaaactatttattctttaaagggagaaaatatggaaaaaatttgttaaaacaaagggcctttgattgtaaaaaaccaagttgtctccggggcttattcccataatttggcaatccctttggaaaaaccccaccccattttgaacccaattttcctggccggggccctattcaaggccaccgttatttattttgggaaaaacaccgtaaccaaaaaccccacccgttaagctgtcaacactaaatggagtccattggacccgtgggcgaacccttgggcggacccttgggcgaacccttgggcggacccttggttcaacccg

SEQ ID NO: 374 - DNA, 544 bp, Glycine max
  Clone ID: PAT_MRT3847_100338C.1
agacaatagccgtaaatattgaaatagtcttattctttgtgtatttaaggaggctgtatattcacaaaaggtttaaatcatgatatataaaaaaggggagatttttagtttgtgcatgatttactggaccagattcctagaaaaaaggatagagtatctggtatggtgtaaatgagcatttggtgggtgtgctgaacttgaattgtgagtaagaatattaggaccaacctaagtttttttaattcaatgttagtatattgatttagttgtggctattagcaaatgcgcaaaatgataaactggtcttagcatcataaatgattgaagtttaggaattttatgttagttttccgagtgtacttgaatttggtgtcagtggatgctcagcaggtttatccttttcagcgagactgtagggtgtagaacatctctgttttataaatataaagtgaagaaatgcaatagtaactactcgtgcttcgagtataaaattagaaattttgtgatttcctgctacttcactagggagcaaaactttgttcaa

SEQ ID NO: 375 - DNA, 140 bp, Glycine max
  Clone ID: PAT_MRT3847_100339C.1
ggctcaatggtcccttaaccactattaagccttaaccttggccaacctagttttttcccttggtttccggcttttaaggggctgttgcttcgctttaagttccagagagcagcctaagcaaaacgagtgccagatccaaa

SEQ ID NO: 376 - DNA, 818 bp, Glycine max
  unsure (1)..(818): unsure at all n locations
  Clone ID: PAT_MRT3847_10033C.1
ctaatttttaaagatttttgaccagcccatctgttggagtgcttaatgatggctatgataatgtaaactcggatcttattttgacagtgaattttgtgttgatccatttagagaaaaataaaagatatattgtcaaagatctccttggccacgggacatttggacaagtggctaaatgctgggattcagataccaacagttttgttgccgtgaagatcattaaaaatcaacctgcatactatcaacaggcgctggttgaagtaactattttaacaacgttaaataagaagtatgatcccgaggataagcatcacattgttcgtatatatgattattttgtatatcaacgacatttgtgcatttgctttgaattgctggacacaaacttgtatgagcttatcaagatgaatcattttaggggattatcacttggtattgttcagctattctctaagcagattttatacggactggctctactaaaagaggctggcatcattcattgtgatctgaagccagaaaacattcttttatgtacgagcactgtgaagccagcagaaataaaaatcattgacttttggatcagcatgcatggaaaaccgcaccttttactcttatattcagagtcgatactatagatcacctgaggttcttcttggatgtcaatacacaacagctattgatatgtggtcctttgggtgcatagtggcagaattgtttcttggattaccattattccctggggcttcagaatntgatcttttgaacggatgattgaaattcttggnagacnnaccactgatatgtactaagggatg

SEQ ID NO: 377 - DNA, 422 bp, Glycine max
  Clone ID: PAT_MRT3847_100340C.1
cacggaatatgcccccagcagacttgaatagggaaaaggattttaaatttttcttgtgatctgtgtatctctagtggtatgaggcttttgttgttgttgttgcatctgtatttatgtgaatagcttgccctgtttgggaacatttcatagtcctgtacttttaggaatttattttgttccactaaaccaaaccaaggacgacatatgtacggaagtgtaatacatctgcacacattttggtatataaaataaattcttaaagtctatgattaactattacatgttaattattggacagtgatgttttgccaccttttcaatcccctttcccatgccccgtattgcagcattagaagttcacatacagaggaggaactgggagaatgaactgctttcatcaatcgggaccaacgatgatgttc

SEQ ID NO: 378 - DNA, 362 bp, Glycine max
  Clone ID: PAT_MRT3847_100341C.1
gggtccgcgagctacgtattactcggcgcggccttttcttttttttttttttagtcacaattggcatattttagatgggggcaataacattgaagtttgaggatacatgattatcacaaatgacaacacaatcgtagggaccccaagtgttgattactttctttatcttggtcattctatttctctaaaccacattgtattccgttggaaatatatggaactggaaactggacatatgacgcacataacttttttggttgcttaaggatatggaaacatgaaatggtctatgtatcgagatctcactgtgatgatgccttacacttgttaacagggtcagcaaagtacttctcttgatgaaa

SEQ ID NO: 379 - DNA, 702 bp, Glycine max
  Clone ID: PAT_MRT3847_100342C.1
aattcggctcgagcaatagcatatctatggcttctacttgttcttcctctttttccgttaccaaaaaatatgatgttttcatcagctttagaggagaggatactcgcgctgacttcactagccatcttcatgctgctctgcgcagaaacaacatcgatacatacatagactacaggatccacaaaggagacgagatctgggtagaaatcatgaaagcaatcaaagagtccactctcttcttggttattttctcagagaactatgcgtcttctagttggtgcttgaatgaactcatccaactaatggaatacaagaaacatgaagatgttgatgttattccggtgttctacaaaatagatccatctgaggtacgcaaacaaagtgggagttatcacatggcattcgcaaaacacgagaaggatagaaaggtgacggaggacaagatgcaaaagtggaagaacgctctctatgaagcagccaatttatcaggcttcctttctgatgcgtacaggtgcatgttgtgtccatatattatagtgtttcagcttttgtttatataaattctaatgtttaaggattattttcacatactacacataactcatgtctataagcaaacctcaaaccaattaaatgtaactaattttacaagacaaagtgatgtagtgaaacgtaagggaaaaggaaatgaggattcaaaaa

SEQ ID NO: 380 - DNA, 190 bp, Glycine max
  Clone ID: PAT_MRT3847_100343C.1
gggataatgatgatactgataatgagattgatgatttggatgcgaagatttaaaatggtcgtaatgttcaatacggggagactagaaatgggattgaactgaatgatgaagatgagtttactgatgcctcacatgtgaaagaatgcgaataggcccgtgtgtctgttagctttgatgaggattgcaatga

SEQ ID NO: 381 - DNA, 264 bp, Glycine max
  Clone ID: PAT_MRT3847_100344C.1
ctttcttcatcggatcagtaactttggctgtggacaccatcagttgtgaggcttttccccacaggttggtgcaacttgcagagattcacgacaaagacgcctctgaattctcacgagggggatccgttaccgctgggtcaaattaggagcgtactgcaacaactatgtcagctgatgggggtccatatagggatgctacggcgcatgaaagaacagcgtctactgtaccacgtgattctgttattggtgttacgtcgacaacca

SEQ ID NO: 382 - DNA, 426 bp, Glycine max
  unsure (1)..(426): unsure at all n locations
  Clone ID: PAT_MRT3847_100345C.1
ggggcnnaattggcncggatccgctgagaaaactntcgacgtattttgcgcgcgtacgtgctctctagattggggtcgagcctgatacttgatactggaaaaggaacttgtttttcttgaatagataagtactaagcgtgtcgaagtatgatgccacacctatggacccggtgcatctctatgaggaacaaatcatacatcaatgaatcgcttctagcgatatttcatagaggctgctcacactatctgatcttaaggtaccaaagaaaacctgaggtgcggtccatggtcaatatttctacactatgcaactttttcaggttagtggacagcgttggttcgctccatactcgctaccaggggacaaggaagcatgtgttatgcaacagtttacacacattgtgccattctgttggctaatgctat

SEQ ID NO: 383 - DNA, 287 bp, Glycine max
  Clone ID: PAT_MRT3847_100346C.1
aaaaactacacacgggcaggtgattgattggcaagatctgatgaaaatccaagacgggaatgagactgagttgctgggaggcgtttatgcactgatgaaaatacagagtgttatgagaggaagccaggaatgccaatcacctgtgataagaaacgcaacaattttcactaaaaaacaaaatcaccgatctaggacctttaaaggggaagaaaacctgtaatttaacattgagacaagccgaaggcatacatcaacaggctactaaacacaccagggccttgggaggg

SEQ ID NO: 384 - DNA, 708 bp, Glycine max
  unsure (1)..(708): unsure at all n locations
  Clone ID: PAT_MRT3847_100347C.1
gaaaagatgactcaaattatgttcgagaccttcaacacccccgccatgtacgtcgccattcaagccgtcttgtccctctacgcttctggccgtaccaccggtatcgtcttggactctggtgatggtgtcacccacactgtccccatctacgaaggttatgcccttcctcacgccattatgcgtctcgatttggccggtcgtgatttgactgactacttgatgaagatcttgaccgagcgtggctactctttcaccaccaccgccgaacgtgaaatcgtccgtgacatcaaggagaagctctgctacgtcgccttggacttcgaacaagaaatgcaaaccgccgccacttcttcccaattggagaagagctacgagttgcctgacggtcaagtcatcaccatccggtaacgagcgtttccgctgccctgaggccctcttccagccctctttcttgggtatggagtcctctggtatccacgaaactacctacaactccatcatgaantgcgacnttgatatccgtaaggacttgtacggtaacgtcgtcttgtctggtggtactactatgttccccggtattgccgaccgtatgcaaaaggaattgactgctcttgctccttccaccatgaagatcaagatcatcgctcccccanaacgcaagtactccgtctgggatcggtggttctatcttggcctctttgtccactt

SEQ ID NO: 385 - DNA, 421 bp, Glycine max
  unsure (1)..(421): unsure at all n locations
  Clone ID: PAT_MRT3847_100348C.1
aaaaaaaaaaaaaaaaaaaaaaaaaaaaaattnttttttaaaaaaaaataaaatttttttgaaaagaaaaaaaaaaaaaaggagggggaaaaaaaaaaaaaaaaaaaaaaaaaaaaaaaaaaaaaaaaaagggccgccccctttaaaaaaccaaacttaacttccccttccatccaactaaaaattttttataaagggcccccaaaatcaaattcattgcccccggttaaacaacatagaaactgaaaaaaccttgccttaaccaaattaaatccctttaaaaaaaatccccttttccccagctggctaaataccaaaaagcccccaaccaatcccctttccaaaaatttccccaccctaaatgccaaaagaaacccccccttaaccgccccataaaccccgccggttgtgttgtttaccc

SEQ ID NO: 386 - DNA, 243 bp, Glycine max
  Clone ID: PAT_MRT3847_100349C.1
ccgctgtgcgctgataatctcattcactacacctcacagcgctactttctctctctcactttaggtcgtgagtctcatctcgattctcagatatgtggtgatctgcttagtgtgaataggtggggaggggtcaccaggattaggagcaccgcggggatggtcaagacgacggaaagtctgaattctctaagagggtcacgagtttctttcgtgattttggtgagaattttggggaggtttttg

SEQ ID NO: 387 - DNA, 129 bp, Glycine max
  Clone ID: PAT_MRT3847_10034C.1
cccacgcatccagagacgcgcacagtcaacacgaatctagcaacggtatgtgcacgctcgcggaagcggacctacgattgagtaggcgacactgcctggacgagctaggacgatacaaagccctacata

SEQ ID NO: 388 - DNA, 291 bp, Glycine max
  Clone ID: PAT_MRT3847_100350C.1
ggcagaaagcaagctcatcctagagttttaaaaatgtcagcagcctcctccatggctctctctatcccatccttggctgggcaagccgtgaagcttggctcatcagcccccgaagtcgggagggtcagcatgatgaagaccgtcaccaagcaggcctcctccggaatgccatggtacggctcagaccgcgtcaagtacttgggcccattctctggcgagcgccgtcctactcatggcgagtaccagtgactacgctgggacatgctgggcttcggcgaccagaacttcgca

SEQ ID NO: 389 - DNA, 323 bp, Glycine max
  unsure (1)..(323): unsure at all n locations
  Clone ID: PAT_MRT3847_100351C.1
gnngcgtacgtaagctcggtcttcaattngnctngagngtgattttgatntttngngtctagntnatnctncntgnagnnatnnatgtgcattaggggctncnaaccnggtatttcgngtncncgactttggngcnncatancntacagtccatnttcacnnnnaaactgnggtngananngaatgcgcaanngtgtnnaanaacccagtgaaattatgnattcttagtcganncaggangnttttggncnangtagncctanntggancntactancgngtggnaggntagttttgaattngcncanatncnnggagattng

SEQ ID NO: 390 - DNA, 179 bp, Glycine max
  unsure (1)..(179): unsure at all n locations
  Clone ID: PAT_MRT3847_100352C.1
ggaaactcaatcantnaagacatttgnatgcanttggacctatcangcnacgaggccactgtncaggtncaaatgaggttatgngggcacgggagannagntctgccattgtantcgatcgacaaacaatanctcnganaaagaaaggaaggntcccaanctgaaaaaattaggggcgc

SEQ ID NO: 391 - DNA, 267 bp, Glycine max
  Clone ID: PAT_MRT3847_100353C.1
accgacgagtcctcccacgcctccgactattaccagccttcaaactttgctatgagataacatccatactaacggggctctgtacaaaaaatggtgttacaacgctaatattactccgacttgttcatattaatgccataagacgaatctactttgatgttcagacacctcgtttgacccatgaatacagccacattgtaccttccataattactattctctgttgaaacaaataagcacctttatacgaacccttattcccaacat

SEQ ID NO: 392 - DNA, 1379 bp, Glycine max
  Clone ID: PAT_MRT3847_100354C.1
cgtacagagagagagagagatcccgggggagtgtacgagaaaaagaaaacaaacggcgtagcttccctaagagaagtggcggtgaagttgagactcagagcgcgcgatccaaaactcgagaaatcgaaacactctatgatcatcatctcttagtatatatatatacttccacaatcgagagaaagaaaaagaagaagaagaagcagcaataagcactactcataggtattattattcttatcattgccgttttatcatcatgagcaccgaaaaggagaaaacatcttcaccttctccttccgtcgagctctgcaagggcttcaatggcctcgagaaggttctcctccgcgaatcgcgtggttcctccgccgaggtgtatctgtacggtggccacgtgacttcttggaagaacgaccatggcgaggaattgctttttctcagtaataaggctatatttaagcctccaaaggcaattcgtggagggattccactatgctttccacaatttggaggccttggtaccctggaccagcatggatttgctagtcgaatgattaagatgacttcttccgttagttcttgtctttagtcagattgcttaggtttcatttgagtgtcctgtcatctaccagttcgatgtttcactaatcatttaggaaatatatgcgcaggtagcttgttgccaccacgatgaacgttgaaaggaaagtgtctccaacaatttccccccttcatgttccacttaaaccttcttcatgttggacggatgaactcatgtatagagttttgttaaataatattttcctgtaactgatgactagttcggtcataattgacgtataagtagaatagccttcagttgtttatggaaaatcgaaactaaaatctcaaattttatttgattttcacgttgggttctcgtactcatatgaaatgtttgttatcacatatcataggcaatgaatgcatgtatttgacaacgggatcgttttacaacactataagttggcctgtatgtcgtaagttgttgctgttatctacattttcaagtaatgaagataattattaaatatataattgttatttcaatgatgtaataaaaaaaaaaaaaaaaaaaaaaaaaaaaaaaaaaaaaaaaaaaaaaaaaaaacccaaaaaaaaaaaaaaaaagggggccctgaacccccacttttggtccctttaagggggggtaaatggccccctgggggaaacaagggcaaaagctgttccctggggaaaattgttttccgttcacatttcccacaaaaatacaacccgaaaccaaaaagggaaaaccctggggggcctaagggggggcctacctccctttaatggggtggcgctcacggcccgttttc

SEQ ID NO: 393 - DNA, 680 bp, Glycine max
  unsure (1)..(680): unsure at all n locations
  Clone ID: PAT_MRT3847_100355C.1
ggctatgggacacaagcagggattgataatgggggtatggaactcgcattaccctcacttggaaatatcattggttaggttgtggcttcgggggttttggattttggctggggttgtgtcatttgtggtgcctggaatcctgatacattttggtagggattttggagttacttgtttcttgttgagaaccctgaggataaggcatttgtacattctgggatggacatcgaaatgagtgttgaaacggatagtgcagagaatcggcagaaagttgaatcggaggaagcaaagctgattgcgtctgaaatttcagattcttcatctgcaattggatttttggaagcatggaagttgccaggagtggctccgtttgctttctgtctctttttctcgaagctagaggcttacactttactgtattggttgcccttctacataaggcacacagctgttgcaggtgtgcatatgtctcacaaaactgctgggttactttcaaccatatttgacattgngggagtcctaggtggaatcacagctggtttcatttctgacctaatagaagcacgggctattacttcaattctgttcttggttctatcaattccagctcttgctttgtatcgcatttttgggagcctctccatgttgatcaacatcattttaatgtttctgtcgggatt

SEQ ID NO: 394 - DNA, 158 bp, Glycine max
  Clone ID: PAT_MRT3847_100356C.1
ggttggttgattggtcccattgattcccaaaagaaaagaaaagatggttgggccacaacagctatacactcgcgcggagaccgagggattcgaccttgaattaagggaaaccctttacccaagggttagcgttggggagaaccaacttccattggggt

SEQ ID NO: 395 - DNA, 290 bp, Glycine max
  unsure (1)..(290): unsure at all n locations
  Clone ID: PAT_MRT3847_100357C.1
cactcgtggccacagttggtattcctnagaatatttgtatatcattggcgcgtgtgctatgaatagctcttttagggggcgtgccagttctgatatttacaccatctgctgtcaagactgggaattatggaatcctgcttgcacaaaagcaatgactatgtcatttaatccaaatgcttattatgatgcatggagaatggaatctgtgcagcgtaccggatttaagtgtgatatcatatgcgtcacaggattgtctgtcacctcaatgcatgatgatcaggacacaattg

SEQ ID NO: 396 - DNA, 355 bp, Glycine max
  Clone ID: PAT_MRT3847_100358C.1
gttaaatctcaggtttgacagtaacacttttaatgtctaaatggcgtggttccttggcttggcgctgaagatcttgctaggtttcaacgcggcaggatttttgtacttatttttgcgcggcccatgggactaaatagcagcccttgataacgcaatggacaagggtccatggcttacgatcgatctttggaagtgcatcgtgtgcttcggcagctatgcccacacgactagaagaaggcttgcgcatatgttagtccgctcaacaagaacatcttgagacgcgtggctctgttatataaccgttgatatgccgcgaacaggaaaactaactgcactggttcgtgtgcactccggt

SEQ ID NO: 397 - DNA, 342 bp, Glycine max
  Clone ID: PAT_MRT3847_100359C.1
aaaaatactaaagtattccttattgtctatcataagcacaataacatttattatctataccaatagataaaggggatacctcttttggtaattaccttttggtctccacctttaataaaccattatgctcttaattaacaaaatattaacaaatatgaatgtaatcaaactcatgaagaggagaggatccatcttttcctctccatttttttaactcctccaccgttctaccatcaactgctaagcaactcctttatacattttttttcttcttattttacacttgaagatgtaactgctccaatgtggtcattcacgtttttgtgcttagcagaacatatt

SEQ ID NO: 398 - DNA, 352 bp, Glycine max
  Clone ID: PAT_MRT3847_10035C.1
gaggaatcacacaagagaaatttggtgtggatcttggcaatttatatttggtggatgaatcgttagaatgaaaaccatcgcttatatagttcgcatgtacttgctaacggtggcgcaccttagggggtcacgtgagttcatgcgggtctcggaaagacatggcggctaattttgcagtgacggctatggtcaatatggctatggacatgacgatcgtagaggtgctgggtgtgatgagctccgctcgtagtacacgtttcatgtgttgactcatggtgatgaataccttctaggtggcactattagattctcaggagttcaatcggttatacgcctataaaaataacttttt

SEQ ID NO: 399 - DNA, 748 bp, Glycine max
  unsure (1)..(748): unsure at all n locations
  Clone ID: PAT_MRT3847_100360C.1
catgcttggtgcggaaaatctggggggcncagctcctcctcctagacttgatcatgttgctgttagtcttcccggtgggagaattctaatatttggtgggtctgttgctggtcttcactctgcctctcagctttacattcttgatccaactgatgagaagcctacatggagaatcctaaatgtacctgggtgccctccgagatttgcttggggacacagtacatgtgttgttggagggacaagagctatcgtactgggtggtcaaaccggggaggaatggatgctaagcgagctccatgaactttccctggcaagttctgccatctaattccagtgaataaactctattgtagtgaagggaatactacatggctctgcttgaagtcgtgaatttgaacataagtttgcgggaaaggttgtattggtcactaactcgacaagcattggtctggtcagaatgtgtatattaagttgttacgaatatgcatttgcttgaatggttggttctggctcgttgagagtgacatgagacgaagttttttgtgaggttgtgtgagactttgcccttccagtacgcataaagaattattcttcctgaacagaatattagtggtaatatattaggctagtttctacttgattttccatgtcttgttttgttcaaattctgtaatttgaatcacgacaaagaggaaaaaaaagaaaaaatgtatgttatttccgtaattagatctattatatttgatgg

SEQ ID NO: 400 - DNA, 472 bp, Glycine max
  Clone ID: PAT_MRT3847_100361C.1
ccacgcgtccgatggctctcagggtttaactcttagtggctgtgtttatatgcagtaatcatcactgtcactgagtccttctgctgcggaggaagggcaaaataatggatcttgcatatgaacttttacaagtgaataactcgcacctcaggtctgcaagacatggatcatcagcaacgacgctcaacgcttatctacaagcgaccacaagaacgctgctttctaactggctcaagaacatcttcacatgtactgcgctgctcagcagtatgatgcttcactgttgctggactccacaggtaaggagcttgtctgagacggaaacagatagaagctttgggcttgagaaacttcaagtacattgagaccatcaaagaagctgtggaaagagaatgcactagagatgattgatctgctgatatcctctttctctctgacagagatcgcattgtttcgctaggaggtgcccata

SEQ ID NO: 401 - DNA, 791 bp, Glycine max
  Clone ID: PAT_MRT3847_100362C.1
ggtccggattcccgggtcgacccacgcgtccggaaaaattggccagatttttttctaagaaacgaaaggcggtgacacttgtatgtggaagaaagtagcaccgtctcttctccactttagctaaactcccgaaacgcagctgcgccactcgtttctctggcctcgccgtgattgctaccactccgttcgcttcatccatgtgctgttgtatgggttgaacgaggaagataagaaattgcttcgggaatggagtgggacagcaattccgatctgagcggggacgaagaggaggaagggttcgtcttcaacgacgccgacgacgctggccctctcccgttccctttccccgtcgtcgaaaacctcctccaaacggcgccctgcggcttcgtcgtcaccgacgcgctcgatcctgaccaccctatcatttacgtcaacaccgtcttcgagattgtcaccggctactgcgccgaggacgtcctcggtcggaattgccgtttcttgcagtgtcgaggtccatttgctaagagaaggcatccgttggtggactctacagtagtttcagaaattagaagatgccttgaagaggggattgaattccaaggtgagttgctgaactttaggaaagatggatctcctctgatgaacagattgcggctgacacctatatatggagatgatgagactataacacatgttattggaatccagttcttcacagaggcaaatattgatcttggtccctgtccgggttctacaattaaggaatctgctaaatcatctgatcgatttcg

SEQ ID NO: 402 - DNA, 1333 bp, Glycine max
  Clone ID: PAT_MRT3847_100363C.1
tgcactcgaagaggctgcatgaaaatcgaaaaattccccaaacttcacaccgtacaaaaaccctaacccaatttcaccattccccaaattcaattccctcaaatcccttccctaataatcgccattttgcttcgtgcaatctctctgcgatcccaatagccatggacgacatggaagacgacgcaaggtaccctcccaagtccttctctctcaaccgccagaacccctcccaccgccacaaacaccccatacgcgccgccccctaccaccgcccaatgcccacgcgctaccaggaacccgacgacgatgatgatgacgacaacgaacccgacgatttcgacgacggcgaagccgaaaacggttacgacgacgataacaacgtcgccgcgtatcctcggatcccgaagaagcgcaaggtagtcggcactgcagcggcaggaggttcttacgagttcgcgccacgtgtcaatttctcctacggaaactcccgcggttcgggttcgggcgaggagtggaacgagcacgagactttcgtactgttagaagtttggggagacaagttcctccagctcgggaggaacagtttgagatccgaggaatggcacgaggttgcagaaaaagtttccgaggaattgaaaacagagagaacggtgacacagtgtagaagcgtgttggacaagctgaaaagaaggtacaggaaagagaaggctagaatggacgaaattggccttggctcttgtaaatgggccttcttcaagaagatggacatgttgatggcttcctccgcaagacaagagtatgggcttgcttgtggcgtggattctggggagtatgtgtttatgaacactagggtttacttgaacagttccaatgggtttgatgagatgagggacagtccaggggagtctgagagtgatgatgatgacgatgaagaggaggatgttggtggtgggggtggggatgaggatgaggatgaggacgacgagatgtcgtgccgcgtgttggcggattcgattcagaagtttgggaagatatatgaaaagattgagaatagtaagaggcagcagatgatggagctggagaagatgaggctggattttaacagggagctggagctgcagaagaagcaaattcttgagagggcgcaggccgagattgccaaaattcaggatgtggatgaggaggatactgacacttccggtggcgagaatctcagtgaatgatctaggtaggtcagtcattcaagttgcaattggaagaacttatttaatgatataagcaagttatgtaagtatttgggaattgggagaaattatgaaaataacttttgata

SEQ ID NO: 403 - DNA, 2592 bp, Glycine max
  Clone ID: PAT_MRT3847_100364C.1
ccaggcgtccgaaaaattgtccagattttttccaacaaagcaaaggcggtgagacatggtatgtggaagaaagtagcacctcttctgcttagctaaacccccgaacgcagctgcgccactcgtttcatgcctcagcctctcgcctcggcgtgattgctaccaccttgttcgattcattcgtgtgatgttgtatgggttgaacaagggacagagattgcttcgggaatggagtgggacagcaattccgatctgagcggggacgaagaggaggaagggttcgtcttcaacgacggcgacgacgctggccctctcccgttccccttccccgtcgtcgaaaacctcctccaaacggctccctgcggcttcgtcgtcaccgacgcgcacgagcctgacaaccctatcatttacgtcaacaccgtcttcgagatcgtcaccggataccgcgccgaggacgttctcggccggaattgccgtttcttgcagtgtcgaggtccatttgctaagagaaggcatccgttggtggactcaacagtagtttcagaaattagaagatgccttgaagaggggattgaattccaaggtgagttgctgaactttaggaaagatggatctcctctgatgaacagatagcggctgacacctatatatggagattatgagagtcaaacacatgtcatgggaatcgatttattcacaaagtcattgaaaggcattggtcctgtgagggggtctataataaatgtttatgattattcgtctgctcgaatggtttctgttctttcctcgttgcagactcgtcccgtggtttgcaggaaggtttttcgtggagtttgccgtttcattcaactgagagaagtagtactgtcgctcaagatacttgttcaaataaatcctagagatattgcatcagttagctctgtctgtagacgattatatgagctgacaaaaaacgaagacctctggagaatggtttgccaaaatgcatggggcagtgagactacacatgttttagagactgtgcctggtgcaaggagacttggatggggtcggctggcaagggaattgaccactcttgaagcagcagcatggaggaagttgactgttggaggtgctgttgaaccctcacgctgtaattttagtgcttgtgcagttggtaatagagttgtgctttctgcgagaagacgacagaacgggcaacccatgaatgacacctttgtattggatctcaattctagtaatcctgagtggcaacacgtccaggtaagctctcctcctcctggtcgttggggccacacgctttcttgtgttaatggttctcatttggttgtatttggaggctgtggaaggcagggcttgctcaatgatgtgtttgtcctggacctggatgcaaagcctccaacttggcgtgaaatttctggattggcacctccacttcccagatcatggcacagctcctgtactcttgatggtactaagttgatagtttctgggggatgtgcagactctggagttctcttgagtgacactttcctccttgatttgtcaatggagaagcctgtctggagagagataccagtggcatggaccccaccatctcgtctgggccacacattgtctgtttatggtggtaggaaaatactgatgtttgggggtctggccaagagtgggcccttgcgttttcgttccagtgatgtattcacaatggatttaagtgaggaagaaccttgttggagatgtgtgacagggagtggcatgcctggtgctggaaatcctgggggcatagctcctcctcctagacttgatcatgttgctgttagtcttccaggtgggagaattctaatatttggtgggtctgttgctggtcttcactctgcctctcagctttacattcttgatccaactgatgagaagcctacatggagaatcctaaatgtacctgggtgccctccaagatttgcttggggacacagtacatgtgttgttggaggaacaagagctatcgtactgggtggtcaaaccggggaggaatggatgctaagcgagctccatgaactttccttggctagctctgccatctaaatccagtgaataaacactgttgtattgaagggaatactacacggctctgcttgatgtcgtgaatttgaacataagttagcgggaaaggttgcattagcgggaatggatgctaagcattgctctggtcagaatgtgtatatcaagttgttacgacaatgcatttgcttgaatggttggttctggctcgagaataacttctcgttgagtgacatgagacgaagttttttttgaggtttgtgagactttgcccttcagtacgcataatgaattattcttcctgaacagaatattagtggtaatatattagggtagtttctcacttgattttccatgtgttgtcttgttcaaattctgtaatttgaatcacgataaagagaaaagaagaagaagaaaaaaaaattgtatgttaatttccgtaattagatctattatatttgatggaaaaatctactgctattttatgtttcttaacacggtgatctgacagttatggaagactaaacccacgttgtt

SEQ ID NO: 404 - DNA, 609 bp, Glycine max
  unsure (1)..(609): unsure at all n locations
  Clone ID: PAT_MRT3847_100365C.1
ggctcgaggtttgaagttcattgacactgagcagtttcagaggcacgtttgaaactttttgtttttcttttgttccgtttggttatttgttaattgtgtggctttgtcttttttttttttttgtttatattgcaggcttcgcgagttgaaacaactaggtgagttaatccacgtttcttgaatccaattaataagataaagtggtttagaaactactttgaaattaaatactcttgcattgtataattacttgttctaggttatgttttgtggcattttgaagttttattttccgtatgaactttaaaataatttgtttgcttttagatgattgaattgtttttgtaatgatggagatactgcttggaatttgtgtaccttatgaaggaacttaagttagagagtggaccgagattttcaattgtagttgcaggtgcagttttgttgccatccttgacactacgggacattataggcaaatgtggttcatgtggctgcaaatgtggttcatgtggctgcaattgcggntgtggtgagtcaaaagaccctgaggttgaggcccaaatttcagatgtggaccattttttaaaaccactagtggaacatttt

SEQ ID NO: 405 - DNA, 205 bp, Glycine max
  Clone ID: PAT_MRT3847_100366C.1
ccacgcgtccgcacaaccaaattggcccatctggcttgcaatatatatttaattaaccaccagcgcatggtattatataaatgcccatcattttgtgctgaacacctaaaacactttaaaagggagggtgcacgttggcatcatcaagctataaaagaaaagaaaagaaaaaaagaaggttggagttagatacacacacatcaca

SEQ ID NO: 406 - DNA, 514 bp, Glycine max
  Clone ID: PAT_MRT3847_100367C.1
ggaacccgggcgcaacccacgcgtccgcccaggcgtttgaccaaattttcggcgaaaagacgaaagagaggcggctccctgtggaaggaagagaaagggccctggaccccgcacaacagataaggtccccgcggcagcgataccagcgatgactgaagcaacgtccaatccacggacaggatgccgctgcctgcaagacgtgccaatacttatcctccgctgaggcgagctccagctaaaacatgcacacgggagctgcgccagcaaagggtaaataagaagttgctgaaaacgatgtaccctcgccggaaccagccctgcaaccgagaagcaaacttgctccggcaaacaaagaactttcgaacgaagtgtgggaagagcaaactgcaacagacatcacccctagtgatgaatgagagaaacaaattgacgccggataaagaacggatgctaaaagagcgcaatgagccactggcacagaggcggatcgacataaatcgaacaacctgaaaat

SEQ ID NO: 407 - DNA, 473 bp, Glycine max
  Clone ID: PAT_MRT3847_100368C.1
gggggggtgggttttttttttatttttgttttgtttttgttttttgatcttttgtttaattttttatctttttcatggtttttctctttctttttttgtagtatcttacgaaaaacacactcccctgggcccctttataaggaaactttcaccccctttctgggggggggggggcaaaaattccaactcaaaggtggggaaccccagacccggctggggggggggcaaaaaaaaagattcccccacttggaggagacaaataaaaaacgtgtatgaccccaaagtatgatgggctttttggctgcccaagaggacagggaaacaaccccaataaggcggacttgggggggtcctagcgccccccccttttttttgagaataaccatctttttgtaaaaggggtatgatgacccggggggcaatctttttttttttagtttaggggggggaaaaaaaaacactaaggggccttc

SEQ ID NO: 408 - DNA, 245 bp, Glycine max
  Clone ID: PAT_MRT3847_100369C.1
gcggaaataatcaatgtctgcacactattttaagagtggatggcagcttgagttagaaatttgaattttttcattctttggcattgtagtagtgtgactacccaggaaaagagtaacttattgatggcacaagacaaggcaacttgattgatataatataataatatgcgggttggtttatgcttcatggagttgcttatttttacttctaatctaataattccttgatcttctagacttctacc

SEQ ID NO: 409 - DNA, 337 bp, Glycine max
  Clone ID: PAT_MRT3847_10036C.1
cacccaaatcaacatcaaactctggaatctctagagcttcaaacatattggaattaataatatgggtctaactaattacattaaattatccccatcaaagcatactacatatattgctcacactactagtgaatactcagtaaagaaagttcaaaaagcgcattaccccattagtgagaaactcaccagctctctaatgatacacagaaaaaacaataaaaacaagctcgatgctatcacaattatcaaacataccataaagatcatgcacttactcactaacctgaacccaattcatatcatgagggataccatcatcaatagtagtccccatgaa

SEQ ID NO: 410 - DNA, 165 bp, Glycine max
  Clone ID: PAT_MRT3847_100370C.1
ccatgatggttactggcggaggcggtccatcacctacagccgccatgtcggaggaggaagctcacggcgtggcggtagcaccagcacctgccgggcaacacgactcttttattttgacgccggaggctggggttcgcggaggcggagcgcctgtacttgccgcga

SEQ ID NO: 411 - DNA, 282 bp, Glycine max
  Clone ID: PAT_MRT3847_100371C.1
tacagacgacagaaggggggggacacaatcaaattttcacatctaaaaataataataaacactaagacgggctttttttagtgactatgaagagtcccataatacttaacaacatatcatcttcgcatgacaaactgaatctcgtattcactatctatttttccacaacaacaatatgacattttctacacttttccttttgtcattcaccctatccttgaaccttatttctcctttgccaaccttaagctcaagcttgtatgtatcactatgcgaataatg

SEQ ID NO: 412 - DNA, 1358 bp, Glycine max
  unsure (1)..(1358): unsure at all n locations
  Clone ID: PAT_MRT3847_100372C.1
cccaagacacccttcagaaccttcctcactctttctctcttccttctttttcgctcggtttttctataaacctaacctaaccaaaaaacccttgtcattcttcttcattcatttattcttattcatcttttcattcactcactctcactcatggctgaagatgggaacaacaacgatgtacccttacacaaattcaaagacagcaatccaaaccctgaagagttcgatgcaaagggttacagcctcagcggaaaaatcatgctttcagcaataatccttcttttcttcgtcgtcgttttgatgttgtgccttcatatctacgcgcgctggtacctccggcgtgctcgccgccgccagctccggcgccaacgcgagctccgccgcacccagcttgtcttttacaacgacgacgccacccccgcagccgtgtcacgtggcctcgacgccgccatccttgccacgctccccgtcttcaccttcgacccggaaaaaaccgggccggagtgcgctgtttgcttgtcggagttcgaacccggtgaaacgggtcgggtcttgcccaaatgtaatcacagtttccacatagaatgtattgacatgtggttccattctcatgacacgtgtcctctttgtcgcgccccggttgaacgcgcgccggaaccggaagttgttgttataacagtacccgatccggtttccgaaaccggttcaggcgaaaatgagaaccgaaccggttcttcttcttcttcctcttcggttggattgagtaagcctaagccttcgttggttggtgtgacaattgaggtgcctccgagggacgagaattttcaaaacgagttgcaaccgagttgcgactcatcctcctcgtttcggtcgccgatgagtcgcatgctgtcgtttacgaggatgctcggcagggaaaagaaggggaacgtgtcgccgtcgtcgtgcggcggcggcgattgtagctccgccgcggagcgaggtgagcgagaggagactcagtgagtcggtgactcgggtgctgacgtggcacttgttggaagcggaaaaacttgggttgttggcgcgtggcggtgtgtaatagtgacgtttctggattttaatgtaggcggtgagcggcgcgtgagttaggtggcgcgagatactgacgtagaatggttttgggatgaacataaatgatgtacttattcgttgatatatatattttttctttatttgtttcttatcttcgggttccaaaaatagttaaatagaatacgaaaattgctaattgtaatgcttgcttacatagaaatgaaaccaattttaaagaataaaatattttttaaaaaaaaaaaaaaaaagggcggccnccgcct

SEQ ID NO: 413 - DNA, 611 bp, Glycine max
  Clone ID: PAT_MRT3847_100373C.1
attttattttattttctcaattctgttcaacaatctcagagcgctcttctgctcccaacgcatatgcatactgcacaatcaccaccaccacccttcgagtaatatggagatcacgagcagccatagcagcggcagcatgatgtggcttttcaaagatcagggctctgatgacaacagcgcgcaaggaatgatccgaaagtgccggcgcctcgagggtgtgcatcaggaaagagcaagtgagaattgggactatttgagaagcattggcattgatagaaaggaaactgccctcaattgtttcgaaatgccccaaaattcttgcactagatctttatgagaagattgagcccactgctgagtgtctcaggacattaagaacaacacctaatgaggttgcttctgccatagcaaagttccctcacatactctcacacagtgtggaagagaagctatgtgcccttttggcattctttcagactctaggtatccctgaaaagcatagtgcgaaaatgatactgctcaaccctaggcttattagttacagcattgaaacaaagctgacggaaattgtgaacttccttgtgaaccttggtctcagtaaggacggaatg

SEQ ID NO: 414 - DNA, 235 bp, Glycine max
  unsure (1)..(235): unsure at all n locations
  Clone ID: PAT_MRT3847_100374C.1
aattcggctcgaggtgccacactagatatttttatacncatacatatattcgttctatcatggcacttatcttctagaagagtagtgcttctctacttgcaccctcaatactccatctcatggtgtgctattcaacacaagggccaataatccccttacttaatactatttaagttgcttgttgcaaatccgccattctttggagccatagagctgtccttcctctacaacctta

SEQ ID NO: 415 - DNA, 521 bp, Glycine max
  Clone ID: PAT_MRT3847_100375C.1
ggtgaaaattctatattaaatgcataattatattattctgctacaattctatataacaaataagtaaatttagcatgcttagagatattaaatacagaattatttcagtggccaactacatttttctttttctttatacttttttgatttaaataccttcttattccagtaatttagtttttttttgttccggtaaaaaaatatctttataaaatatgtttgttttatttttcgtccttaaagttctttagataatactttaaacaatgaaaaaaaaacattatttaaagtatattaaggacgaaaaaacaaaacaaacatgttttaaggattaaaatgaaaaaaaatagaggaacaaaaatggaaaaaatattaaattacaatgaaaaaagtgtttaagcctattttttttattagttggaattctctttgacttaaaagtcacatgttcaaatcatataaatagtttttttttattcacaaagataaagttacacgcaactaccctactaaaattggcc

SEQ ID NO: 416 - DNA, 507 bp, Glycine max
  Clone ID: PAT_MRT3847_100376C.1
cactgatctgtttcatgaagacaatagtacaccaaatgtatatcaaagtgccagctctcatggttcaaatccaactccacagacagctgaaaatggtaaattatttgaaattggtgacgacaaggaggttctgctagtagcttgcgtgaactgttattcaagggaagtgctgaacttgggagatcaagtcgatgcagagaacaattttaaaaatattgaacctttcaaagtgcacaatgacaagaatggtcaattggacacgataaaaaaagaacatgaatctcaaggcatagtaaaatgtaaggacatgccgtatcaaatcatttctagcacaggatattcttattctgtaaagaaatttgaggaaactgagcctttgttatattcacctgattgttacttctgcaatactaattctctggatacagttgttcttcatagcaatgacactagctcaacttcactgaaaaaatttctggcatatgaagagagagattctcaacttga

SEQ ID NO: 417 - DNA, 1653 bp, Glycine max
  Clone ID: PAT_MRT3847_100377C.1
cagcttttatattttaccctttatctatttgttgatattgttttcatcccttgtgccttttcattccttggcgattacgaaattggggtttgatccagagaaagagagagaaaggcataaaatttaaggaagaacagagattgattttccataggaaccctaattttctctttcttgttcttttggggttctgcaatttgttggggttttgtgaagcggtgatcggaaagtctcgatctttgatcggttttcgtcgatggagggcgaggcttgttcagagggagagaataatctgaaaaggggtggctctgatgatgatagcaatgagaataacaacaacaacaataacggaagcagtggcaagattgtgaattctaatgaggggcagagcaagcccaagcgccagatgaaaaccccttttcagcttgaaaccctcgagaaggcttatgctgtggataattacccttcggagacgatgagggtggagctgtctgagaaattggggttgtcagatcgacagcttcagatgtggttctgccacaggaggttgaaggacaagaaggacttgccgtctaagaagccaccacggaaggtgctggcagagccattgccggattcgccaagggacgaccccaggttgagccttgagcttgctaatgaatatggatccgggtccggttcaggttccagcccgtatgcccgagtggagcccctgaatgtggttcctcggtgtgtgcctggttattatgagtccccacaggctaagttggagcttagagcaattgcttgtgtcgaggcgcagttaggggagccattgagggatgatggaccgattctagggctagagtttgatccattgccaccagatgctttggggcacctatagcagcagttacagaacagcagaagctacctagttttgcctatgacagtaaaatatatgaaagacatgatgctagaacaaataaggctttggcaaggacattccgtgacaatcaatttctaccaaacaagtctggcattaggtctgatgcttctggacagttcagccaatctcatttacacgatccaattgaaggttttgtcagaaatcctccttttgcacatggaaatgaacatctacctagaattcatgctactaaaggtcattcttctcgtgttcgtctcttgtctcaacaagacaagcaattgattccctatcaatctccttctcgggatgatgatgctgcccctcaaagggaattgtacccaaacatagctaatgctggaaagaactctcactctactggtcaccaaattgttgggccagaaaatctccatgctctacctagtgtacaagttttgcataacaatgctacatggattgagaagaaacgaaagagtgatgatgcccacgatgttgaagcccacgagatgaaaatccggaaagagcttgagaaacaagacaacctcagacgaaagagtgaagagcggacaagaaaagaaatggagagacaggatcgtgaaagaaagaaggaagaagaaaggttgatgcgtgagagacagcgagaggaggaaagagcaagacgtgagcaaaaacgtgaaatggagcgaagggaaaagtttctgctgaaagaaaatttacaagcagagaaaaccaggcaaagagaaaag

SEQ ID NO: 418 - DNA, 1198 bp, Glycine max
  Clone ID: PAT_MRT3847_100378C.1
tcccgtgccgattctttggggtttctctcttcaaactagggttttacagaatataagctctctctatctttcgctatctaagaaggaactagggttttacagaatacaagctctctctctctctcgtcggttttcgtcaatcaaatccaatccaatatcaaatatgagtcgtcatcccgaggttaagtgggctcagaggcttgacaaggtctatatcacggtgcaattggctgattcaaaaaatgcaaaagtggatcttacgccagatggtatttttaccttctccggtagtgctggtgctgaagaccatcagtatgagctaaaactggagctctttgataaggttaacgttgaggagagcaaaattaatgtaggagagcgaagcatattcattgtagtgcagaaggcagaggatggatggtggaaaaggttactgcgtggagaaggcaagactccacattatgtgaaagtagattgggataaatgggtggatgaggatgaagatgagggtaatactggtgaagtggacttgggagggatggatttctcgaaatttggggggatgggtgctgatgcaatgggagggatggatgcaatgggaggcatgggtgggatggatttctctaaatttggtgggatgggtgatgcaatggatgacattgatgagagtgacgatgaagagcaagaagtgtcaaagcctgttgaacaagatgcaggcgaggggtcgaccgagaaaaaagaggctgctccaagcacataatgttgttgcaatcaagacgctaccctagaatatgtgcatgaaaattctcgagtgaaattttctctatccttaccattaattggtagttttttaagtagagacgttcatgtgtctctcccgtgttggctagacttttagcacttattattttaccaccaaaaaaaatctcctttagaatattgtataattgagatattttcatgcttgaatggcggtatccggatttctacatttttatgtgttatgtatgttttgaacttgtttggatggattaatttggtattctctaactagaaagtgaaacctccaaattgccatgtactgtagacttccgacttgagtgtgtgtgtgcaatggttaggaaaagtatcaaactagtgtttgttcaaaaggtaaattacaacgaccctcacgaggtttggattaacccctcgtctc

SEQ ID NO: 419 - DNA, 945 bp, Glycine max
  Clone ID: PAT_MRT3847_100379C.1
ggctcgagctttggggtttctctcttcaaactagggttttacagaatataagctctctctatctttggttttcgtcattcaaatccaatccaatatcaaatatgagtcgtcatcccgaggttaagtgggctcagagacttgacaaggtctatatcacggtgcaattggctgattcaaaaaatgccaaggtggatcttacaccagatggtatttttaccttctctggtagtgctggtgctgaagaccatcagtatgagctaaaactggagctctttgacaaggttaatgtagaggagagcaaaattaatgtaggagtgcgaagcatattctgtgtagtgcagaaggcagaggatggatggtggaaaaggttactgcgtggagaaggcaagcctccacattatgtgaaagtagattgggataaatgggtggatgaggatgaagatgatggtaataatggtgaagtggacttgggagggatggatttctcgaaatttggggggatgggtgctgatgcaatgggagcaatgggagggatgggtgctggtgcaatgggagggatggatttctctaaatttggtggaatgggtgatgcaatggatgacattgatgagagtgatgatgaagagcaagaagtgtcaaagcctcttgaacaggatgctggcgaggcatcaacagagaaaaaagaggctgctccaagcacatgatgccgttgcagttcaaggcgctaccctagaagatgtgtatgaaaattctcgagtgaaattttctctatctgtagcttggattggtagttgttttaagtagagacgttcatgtgtctctcccgtgttggctgaacatttagcgcgtattatttaccagaaaaaatctccttctagttgttgacttaggatattgtataattgagatattttcatgcttgaatggtggtatccggatttctat

SEQ ID NO: 420 - DNA, 563 bp, Glycine max
  Clone ID: PAT_MRT3847_10037C.1
aatccaaatttatcattattcaccataataccaaattcctgtcacaatcttcttggtatgtacagtaataaaaataaagtcaaatacggtctacaaaactgtttatttggagaaaatttaaaaaagcaacgatgatgatttacataatcaggtttcaggtacagcgaagccatatgagtgcatgctgatctcagaatatatgttatgtatagagacacacacatatatagagtgatagatactattcacaaattcacattttgccgcaaattaatccgaacacagtgacaaaagccattataagagaatgatctattccgccctctacatccaacgttaaaacatcattacccagaacaactcccgatgacgagtgtttttgctttgcataggcaactatgtctccatctatgttgacaatctgaaatgtcgttttgccagcgattttctttattgcagtactttttgcacgccactgtaatctgacacgttacttttctttgaacatcttatagcatcttttaacttgaaccccagcttctcctggatttttaaggccaaat

SEQ ID NO: 421 - DNA, 773 bp, Glycine max
  Clone ID: PAT_MRT3847_100380C.1
ctcgagggttggtgttcttcatagttcagtgtgtcgtttaaaaatgtcgcagttgctggataaagccaagaacttcgtgtcggagaaggtaaatgatatggccaagccggaggcgagtgtcactgacgtggacttcaagcgcgtgagcaaagataatgtcgagtacttggccaaggtctctgttcgtaacccttattcaacttccatacccatttgtgagatcaactactctttcaaaagcgcatccagggagatagcatcagggaaaattccagacccaggatcgttgaaggcaaaggacacaacaatggtggatgtgccagttaaggttccatacagcatattgatgagcttggcaaaggacattggtgctgactgggacatagactatcaattggatcttggtctggttattgatgttcctgtcattggcatcttcaccattcctctctctcagaaaggagagatcaagctaccaaccctctctaccatgttcgcctaatcgcatccacaaagcttaggataaaataaatgcattgcacactccatgatcgatgtgcatgttttacttttatgtaaattttggaccgttttagttctaccttttgttattcgtgtatgctctctaaaactatacatggctttcgtagtagtagtattacttatcatagttgtgaagaacatgttttaggatgtccatccatatactataatggataataaattccaataatagactacaaattccaaaagggaaaaaaaaaaacacaaaa

SEQ ID NO: 422 - DNA, 400 bp, Glycine max
  Clone ID: PAT_MRT3847_100381C.1
tcgattacgagtgggatcacgcttaaccgcactgcgtgcgctcactcggtcctccacgcatgcgtcaaaccacgccgagcactgagttaccttccacagcaactacgacatcatgaacctccacaagatgaagacattcgcgaactatgaagaatactcagttgaaaggtgattagacactcatcaacaaatataggacgaaagcgtagagaatggagaacttgaggatgcaccgaagctcacattacagacgactgatcaagaattggtgaatgattactggtgtaagaagtgcgctgtgcaaccaagctgggttccgataatcaactacgtcgatgtcaacaagaaagatccatggaagcgttcataaatgggttaatacagaaagatagaatggtac

SEQ ID NO: 423 - DNA, 572 bp, Glycine max
  Clone ID: PAT_MRT3847_100382C.1
tgttggttctctgtttagggtctattgttaaaaaatgtcgtcgcagttaagccaagaactttgtgaaatgatatggccaagaactttgcttgatacccatctgtgagatcaactactctttcaaaagcgcatccagggagatagcagcagggacaatagcagacccaggatcattgaaggcaaaggacaagacaatgggggatgtggctgcatgttaaggtgccatagagcatattgatgagcttggcaaaggacattgactatcaattggatcttggtctggttattgacgttcctgtcattggcaacttcaccattcctctctctcagaagggagaggtcaaactaccaaccctctctaacatgttcgcctaatcgcatccacagagcttataattagaatcaaataaatgcattgcacactccatgatgtgttttacttttatgtaaatttcgccctttttagttgtacttgttattggtgtatgctctaaaactattcatggcttttgtagtacgtagtattacttatcatcatagtttgtgaagtgaagaacatgtttagtatgtcc

SEQ ID NO: 424 - DNA, 174 bp, Glycine max
  Clone ID: PAT_MRT3847_100383C.1
attggtgtcccgtcaagaactggacagttcacattctcaataagctctacactcgttttggagacttcaaactgcaaaaccccgcaaatagaccctttgctcaaatcgtttcacatgcattatgcggggagtattttagagtgccattcaatctgttcaaatgtcatatcgtgt

SEQ ID NO: 425 - DNA, 280 bp, Glycine max
  unsure (1)..(280): unsure at all n locations
  Clone ID: PAT_MRT3847_100384C.1
ggaaaaaaaaaggccctcgccattaaaattacgtggttacttacgaacgaacataagttcccgggggtggtcccatttggtgtttggaacaaaggggtgggaaaaggatcaataactggggtttttaaaggaacaacctttgtaaaaaggccccgcctaaattaaaatttcttcttcctttataataaaaagaaaaaacttcctcgccaaagaattttagtacattaacgggtccttttcgttttttattacaccctggagaagnctgacgttttttaca

SEQ ID NO: 426 - DNA, 177 bp, Glycine max
  Clone ID: PAT_MRT3847_100385C.1
aacaagcgaacgactaatcttaccagctagttctaatattactactattgtcctgttgacgttttgcaacctatgtggacaatatgtcctctcaccatatctacataccctataattttaggacttgattacctattaattgtactactatcacttcaaactccattaagcttttac

SEQ ID NO: 427 - DNA, 268 bp, Glycine max
  unsure (1)..(268): unsure at all n locations
  Clone ID: PAT_MRT3847_100386C.1
ctcaaaggggcctgtnggacggcgggaagggggaggaaggggcggtgtttgaagttggcagggtgtgggaggtgctggagatactactcgagaccgagacgctgctcatcacgaccctcttcccccagcctccctcgtcactcctcgcctcgaccctctcatcgtccctctcgctcgccacttccccctttgcgggcatcgtcagcaacatcaaacgcgccgtatcgtcccgcgccttcctctccctgggattgtaccgcttcctcgt

SEQ ID NO: 428 - DNA, 578 bp, Glycine max
  unsure (1)..(578): unsure at all n locations
  Clone ID: PAT_MRT3847_100387C.1
cccacgcgtccgactagctagtgttctataagttcacggtcagttctgaaaaatgggttccaaggttttgcttgttgtagttatgttcatagcggctatacttctgatctctgctgaggttgcacccaatgaatacgaaaattttaacaaaaaagatgggaagcatgctccaaatgggttatatgatagcaaatggggttacggtggttggggtggtccttggtatggcggctggggtggcccttattatggtggcggctggggtggcccttattatggcggtggttggggcggtccctggcgtggtggtggcggtggtggctggggaggttggcgtcgacctaatggcaaccctcacaactaagaagaaaacttgctaaagcttctttacgggtttaggttttcgcaataaataaaacttcatgagaagtgtagttgtaataaaagtggaagtctctcttctcttgtgatataaaggaataatagttttatatatgtaaaaaaaaaaaacaaaaaaaaaaaaaaaaaaaaaaaaaaaaaaaaaaaaaaaannnnaannnnaaaaaaaancccccccc

SEQ ID NO: 429 - DNA, 123 bp, Glycine max
  Clone ID: PAT_MRT3847_100388C.1
gggcatgatatgattatcttggcttgtgcttagtattggagtgggagctctcgtgattgggcttgaaaagggccaattctacttggcgtgaaagcttgcatagcaaaaagttttggaaggatt

SEQ ID NO: 430 - DNA, 294 bp, Glycine max
  Clone ID: PAT_MRT3847_100389C.1
gttgtgggggcaaacaatatcctttttattaatatataataaaataatttaatccaaaacatcccactttttccggcctacaaaaaatttaatgaactccttaaagcccgaattataaagcaaaaaagcaggggggccctggtaattaataaattaattacatgatcctgcagttttaaacattttaataactgaaggtttgagaaataggaccggcaattgggggagatggcataggaggggggggcatgtaattaataaatggatgcggccaaccaaacatcatgggtgggg

SEQ ID NO: 431 - DNA, 1223 bp, Glycine max
  Clone ID: PAT_MRT3847_10038C.1
cccacgcgtccgcccacgcgtccgtattattttacgaaaatacccagttttgattaaaaaaagaaaagagtaacagagatcctagatggggccgctagtgtaagaagagaaagaacatgatatgatatggtagtacaaataaagggacatacatagtcaaaagttgaagttagctcagttccgaaccgaacaagacaagtgaaggagcggtttatcgtactgggctgggcagcattcgtttctactcctcattgaaaagataacatggctttcacaggttctggttccgggcagccacaattcatttccagcactggcaaccgaagcttttccaatgcgccactcattgagaactccgatactaatcaaattgttgtgcctgataggagaagctggaaaaatttatttgcatacatggggcctgggtttcttgtttccattgcatatatagatccaggaaacttcgagacggatcttcagtctggggcacaatataaatatgagttactttggatcatattgttggcatcatgtgctgctcttgtaattcaatcaatggcagccaatcttggggtggtcactggaaaacacttagcagagcactgtagatctgaatatccccgggtgcccaacttcatactttggattattgctgaaattgccatagtggcttgtgacattcctgaagtaattgggacagcctttgcattgaacatgctcttcaacatacctgtttggattggtgttcttctgacaggactcagcacattgatcctcttagcattacagcaatatggggttaggaaacttgaattcttgattgcatttctagtatttacaattgctgcatgctttatggctgagcttggatatgcaaagcctgtggccaaagaagttgtgacgggtctttttgttccaaaacttcaggggcatggtgccactggtcttgcaatttcactccttggggcaatggttatgccccacaatctcttcctccactcagcgctggtgctttccaggaaaataccgcgatcagttcgtggaatcaaagtcagagagtattgtgaaagaataaacttgtaggagacagcacaaacaatggaggcttgcagattttatatgatagaaagtgcctttgctcttacggtggcctttctcataaatatttccgttatttctgtaagtggtgcagtttgcaattcttcaaatttaagtgctggaga

SEQ ID NO: 432 - DNA, 452 bp, Glycine max
  Clone ID: PAT_MRT3847_100390C.1
tccctcgcgtccgattcaaccgcctccactctcacgcaaaccatttttcttttctttctctccctctgagcctttcatcgctgcctcggagagatggcagtgtcggaaggatcaccaacccccaagttcacagattttaccacgagtctagcatcctaagccgacctgaagaagatggtaccatgactatggtgactactactttggaaattaataaaaagatactctctctggattacacaagctttagggtggaaattctgagtgctgatgcacagccttcttacaaggatggggtaattgtcgtagcgactggctgcttaactggaagtgacaatctgaaaaggaagtttactcagtcctttttcctagctccccaggacaaaggctactttgttctgaatgatgctttcagatatgtcgatgagtataagtcagttgatattgagtct

SEQ ID NO: 433 - DNA, 365 bp, Glycine max
  Clone ID: PAT_MRT3847_100391C.1
gagacctcaggtcaggcggggctacccgctgagtttaagcatatcaataagcggagcaaaaaaaaaaaaaaaaaaaaaaaaaaaaagcgggcggtccaaaagattcaagcttaaatacccctgcaagccaagttaaaacttctccaaaatgtcaactaaattcaattcaatgggcgtccgtttaaaacgtcctgaatgggaaaaacctggccttaaccaacttaatcccctttcaacaaaaccccctttccccaactggcgtaataaccaagaagcccccaaccattggccttcccaacaattgcccaacctgaatggccaatgggaacccccctgtaaccgggcaataaaccccgccggttttg

SEQ ID NO: 434 - DNA, 555 bp, Glycine max
  Clone ID: PAT_MRT3847_100392C.1
tgaagttgccacggcccctgaagtatccatttctatcattcctgtaaccgccccttcccgatgaatacctccccctatcattattagctcgcctttcttcaattgaaagtctacggccatccaaggtaacgggaggagaggcctcaagtgcactttgcattgaagtagccgattcaaattccacaaaaccaaaacaagattgctgttgcttattacttctaacttgaataccatcctgtttaatgggcccaaatttcttgaaagcacgttccagctgttccactgttgcattcatgggcaaatttgcaacaaatattgcataagccttgcctccattctcattattcttttctggtggactttcaatgctaggagctggtgcttctggtgcaggtatgctagaaacacgtggttgttcaacaagtttcacgggggaaaccctcacatggaagggagcagcattttctttcagtgcattcccaatggatgcaaaagacttctttggagtatcttccagtgcattatttgaagcagctttctcagcatgataatgac

SEQ ID NO: 435 - DNA, 1787 bp, Glycine max
  Clone ID: PAT_MRT3847_100393C.1
cctgctcggctgcgaaagacgacagaaggggagagatctcactcaattcaatcgcctccactctctcccgcaaaccattcttcttctcttctctccctctgagcctttcatcgctgcctcggagagatggcagtgtccgaagaatcatcaaccactcagatgattggcaatgcttttgttgagcagtattactccatattgcatcaaaagccagaccaagtccacagattttaccacgagtctagcatcctaagtcgacctgaagaagatggtaccatgacaatggtgactactactttggaaattaataaaaagatactctctctggattacacaagctttagggtggaaattctgagtgctgatgcacagccttcttacaaggatggggtaattgttgtagtgactggctgcttaactggaagtgacaatctgaaaaggaagtttactcagtcctttttcctagctccccaggacaaaggctactttgttttgaatgatgttttcagatatgttgatgagtataagtcagttgatattgagtctgtgcctgcaaatgatgctgctaccgctgatgaaagtgctccaacagatgcttttgtccccgagcctgaggccattcatgttgctgaagatgttcccgctagtcaaactgatgttgttgatgctgacattggtgtcagtaaagaagtgagtcaaccactagagaatggaaatttatcagttactgaaaaggtggtgcctgttgatcatgttaaagaatgcagtcatcaggaacatcattcacacgctgagaaagctgcttctaataattcactggaggatactccaaagaagtcttttgcatccattgtgaatgcactaaaagaaaatgctgctcccttccatgtgagggtttcccctgtgaaacttcttgaacaaccacgtgtttctagtatacctgcaccagaagcaccagctcctagcactgacagtccaccagaaaagaataatgagattggaggtaaggcttatgcaatatttgttgcaaatttgcccatgaatgcaacagttgaacagctggaacgtgttttccagaaatttgggcccattaaacgggatggcattcaagttagaagtaacaagcaacaacaatcttgttttggttttgtggaatttgaatctgctacttcaatgcaaagtgcacttgaggcttctcctcctgttaccttggatggacgtagactttcaattgaagagcgacgagcaaataatgatagggggaggcattcatcaggaaggggcagttaccggaatgacagaaacgataacttcaggggccgtggcaacttcggtggtggccatggtggcggttatggaaacaggaaatgatagtttcgagaagcgaagcgagttctctggccggcctcgtggtggcaacaatggtgggcgtagcaatggagaagctgttccaaggagttatcagaatggaggagcaaaagtcactgtcaaccagtgaaagttcagtaaagtgattcattttgttgggaattgagtgacaacggcatttttcttatagatagcggcatctagggattctggtttgcaactgcattaagagttttttttctctattcctttatagctgtcatgatccttttgcttcagagtttttttggttaaatcacatcattccctatattcctttaaatcacattttgtatctaatattccggaataattgttttggaactgcccacaattatgccatttttttagaagtcatatgcttcttgtttgtcttttgc

SEQ ID NO: 436 - DNA, 874 bp, Glycine max
  Clone ID: PAT_MRT3847_100394C.1
tttccttaggatttcaagcctaaagccttggttgatccagggaagtcttttgtgtatcatgttgatcctcaatgtaaatccagttgtaatatgagttaagtgagagggtgagccttggtgcaatggtaaggttgctgcttgggaccgataggtctttgcttccaagggcaaggttatgtacatttacctttccctagaccacacctcactagttgggagccttgtgcaccagatcctccttttgtttgagtgttaagtgaagtcagcagaggtgtttgataatgcaatttaatatacttttcagcatagtgaattgttaggaatttttacatggagagaaagtactaaaccaacagctagcacagctaactgtaaccacctttcttttacattaaagaattggtttgatgctttaggaatgagcttttcttatggtaccgaggaattgttcttaattgttgttttgtgttgggtgcaggatcggccatctaccaaggttcatgctgccccaggtggcggatcttccttgaattacctctttggtggtcctccagggaactaattcatcattgtgattcaaacctaccatgtgatgtatcatgtgtaaaatagatagctgcattgttttagtccagtggactttgtttcttgtgcaattgaacctcttgacaatgttggtgtggcttgatggccaaactaagctgattcataggtttgttgttctgtgctattgtgtgggtttcgattaatgaaatttactgctcataatcgctctcttatctttattattgtgttcatttcatgatgctgactttattgaaatgactcgggtttcatatatatcattggtcctgttccatgtgatggaattatt

SEQ ID NO: 437 - DNA, 911 bp, Glycine max
  Clone ID: PAT_MRT3847_100395C.1
ggaaccaaaatcatatatacgattaaaatattttctgttcacatttggattggagtaatgattaaaatattttctgttcacatccacacttaattggaagacgatgtacaatagtgtttttttttttttgccagactaacatcttcatttagcattttcgaaagcaacgagcttttgaacgagtcctccaccactccacttctcggactcttgcttgttaatgatgcaccagaacaccaagtccatttctttcgcatatggataaaaaggcgtttgatgggaaaattcaagcatattatattagttaaattgggtatttttccctaaaaaaatgttaaagttgctggtagtttaaactaataatattaaggggagatttcataaatcaatgattcaagggaggaacattcacacacagctccctgctcaaaaggaacgcgtacaaatagtcgaccatgcaaactaacaacagcagatgtctgaagcgaatcaattcttgcaggtaagttcacaacctttttgaagggggtaattccccatggattgtcaaggtgttctggcacaccagttataacaagacgtccaactggatctgattggactcgcacctcctcacgaaggagcccaggaacaagggcatacacctcaaaaccatccttagtttcccgcacattgatcttcacccagtcagctgggggtccaacatccactactgctgtgaccggtcccgcagttgaaaaactcaattagccttggttcatttgatacactgaaactttatcatatctcacagtgcacatgtatccttttcagattgaaatagggattgtatgtggttgaattgattgaagaatcagtaataatgaagggaatcctcactgacattaagaaaatgccaaaggattcctcgt

SEQ ID NO: 438 - DNA, 2231 bp, Glycine max
  Clone ID: PAT_MRT3847_100396C.1
ctcgagccgatttcctgcaaattaccttttcaatcattttgattaccactaaatgcatggatttaaaattttgcctatcctcaagcttttcattgttgacagctgcatttttcgtttatgcacactgataagcttacccgtgaatgtaattgaaagatgaaagatggagactgtatgtgattgaaactttatgaatgctcttttattaatgtaaaataatcatctgtgtgcaataaaaactaataaacttattactttggggtgcttggtatataattgtttcttttttgttgagttctgatagctcatggttctgtctgctgatgctattggtttgttattttccatgaatgttggttgttgaattccttgtggcaaaaaaaatgttatgctgctatatacgacagaaggggatagtgggttaagcctcgcttctaacgtcaccgactcagttgttgtatcggctcgagctcgagccgaatcggctcgagtacggctgcgagaagagtgtgttaagcctttgttgtctcgcttctaacgtcaccgactcagttgctgtcagcgagtgagtgagtcgtttctctgcagcaacaaggtttagccactccaaacagacgggaaatgggtcgtggggtcagtgctggtggtggtcagagttccttaggttatctctttggcagtggggtgcctgccagcagtgcaaacagtcagcctgcaaatggtgctcgcactcaaaatgctagtgctccttcaccaccagtcgataagcaaagtccagcaccagcaccagcaccagcacctgcatcatcaccaattgataagcaaattccagctggaattcctggaagtcttaaaaacaattaccatcgtgctgatgggcaaaactgtggcaactttcttactgatcggccatctaccaaggttcatgctgccccaggtggcggatcttccttgaattacctctttggtggtccgccgactcggttgctatcagcgagtgagagtgagtgagtggttctcttgcagcaacaaggtttagtgacaccaaacagacgggaaatgggtcgtggggtcagtgctggtggtggacagagttccttggattatctctttggcagtggggtacctgccagcagtgcaaatggtgctcgcactcaaaatgcaagtgctccttcaccaccggttgataagcaaagtccagcaccagcagcagcagcagcacctgcacctgcagcagcagcagcaccagcacctgcaccagcaccagcaccagcaccagctgataagcaaattccagctggaattcctggaagtctcaaaaacaattaccatcgcgctgatgggcaaaactgtggcaactttctcactgatcggccatctaccaaggttcatgctgccccgggtggtggatcttccttgcattacctctttggtggtcctccagggaactgattcatacctaccatgtgatgtatcatgtgtaaaatggatagtgttgcattgtgtttagaccagtggactttgtttcttgttcaattgaatctcttgacaatgttggtgtggcttgatggccaaactaagctgattcataggtttgttgttctgtgttattgtgtgggtttcgattaatgaaatttactgtgcgaatgagctaaagtggctcataaatgttctcttatctttattattgtgttcatttcatgatgctgactttattgaaatgaccctggggatcatatatagcattggtcttgttccatgtgatggaattattaagtaaagcagcattggtcttgttagttttctttgtttctagaaatgtacgagagtatttggtttttactcatttctacttctcaatgcaattattaagtaaagcagcattggtcttgttcccaaaggcttcagatggaaatgacaagtagttattaaagcagtgagttcaacttgtttgaaagctcaatgttccaagtccagtagtacactgctttgaaccagtttcccacccctaggaagttgtatatattatcacttcatgtgtcacacaccccttttacaaaggactcgagctgtattgtcatatcatttcattatttttgctgtttcagcaatatatggagaagggctttctccaatttttcgattatactgtcaaaattgtttactcgggacctttattttactagaagataatccactaacaaatagttataaaaaaaaaaaaaaaaaac

SEQ ID NO: 439 - DNA, 470 bp, Glycine max
  Clone ID: PAT_MRT3847_100397C.1
ggtgacatcaaaaacaccaaaagcaagaaaaatcatcatccattgtcaagcaatattctcctcaacaacatcaacaatgtaccaaatcttctacctgtcaagacagacccttctcctccagcaaccaaaattccttccaaacagtcacaggtctgtgatacttgtcatcaagagtccaaaagcagttcacagttatctagttgtgcgcgccagaggtacaaacaagaaggaacaacaaccacactactcgctacccgagatagatcagagaacaagcctaacaacggtgctttctccttctcctccaccaccgtcgtccaacctcacaccccacaagagcttcagtacatcacagcaatcctagcccgtaccactgccctaaagtcacagggtatccccacaacactgtccttaaaccaagggtggttctctccgaccaacccactcgacccatcaatcttccaccacct

SEQ ID NO: 440 - DNA, 181 bp, Glycine max
  Clone ID: PAT_MRT3847_100398C.1
ggctcgagctccaattattgaatgcttgacctctgttctaactaaacgcgatgatcatcaaccaaggatgaagcaatggagcaagcatttgtgaagctggactacattgagagacggataacgaggatagtacactacggagttgttatcagagatctctgaaggacaggcatcaacacta

SEQ ID NO: 441 - DNA, 1307 bp, Glycine max
  unsure (1)..(1307): unsure at all n locations
  Clone ID: PAT_MRT3847_100399C.1
ggctcgagtttttatggtggcttccaaaagaaattttccttatgatttcatgcctaatgctttgttgatcatggaagtctttgtgtatcatgttgatctttaatgtaaatacagttgtaatatgagttaagtgagagggtgagccttggtgcaatggtaaggttgctgccttgggaccgataggtctttgcttccaagggcaaggttatgtacatttacctttccctagaccacacctcactagttgggagccttgtgcaccagatcctccttttgtttgagtgttaagtgaagtcagcagaggtgtttgataatgcaatttaatatacttttcagcatagtgaattgttaggaatttttacatggagagaaagtactaaaccaacagctagcacagctaactgtaaccacctttcttttacattaaagaattggtttgatgctttaggaatgagcttttcttatggtaccgaggaattgttcttaattgttgttttgngttgggtgcaggatacgaaagaaggggatagtgggttaagcctcgcttctaacgtcaccgactcagttgttgtcagcgagtgagtgagtcgtttctctgcagcaacaaggtttagccactccaaacagacgagaaatgggtcgtggggtcagtgctggtggtggtcagagttccttaggttatctctttggcagtggggtgcctgccagcagtgcaaacagtcagcctgcaaatggtgctcgcactcaaaatgctagtgctccttcaccaccagtcgataagcaaagtccagcaccagcaccagcaccagcaccagcacctgcatcatcaccaattgataagcaaattccagctggaattcctggaagtctcaaaaacaattaccatcgtgctgatgggcaaaactgtggcaactttcttactgatcggccatctaccaaggttcatgctgccccaggtggcggatcttccttgaattacctctttggtggtcctccagggaactaattcatcattgtgattcaaacctaccatgtgatgtatcatgtgtaaaatagatagctgcattgttttagtccagtggactttgtttcttgtgcaattgaacctcttgacaatgttggtgtggcttgatggccaaactaagctgattcataggtttgttgttctgtgctattgtgtgggtttcgattaatgaaattactgctcataatcgttctcttatctttatccccgcctccatttcatgatgctgaccaaaaaaaaaaaaaaaaaaaaaaaaaaaaaagcggccgctctacaggatcca

SEQ ID NO: 442 - DNA, 554 bp, Glycine max
  unsure (1)..(554): unsure at all n locations
  Clone ID: PAT_MRT3847_10039C.1
gaacaagacatgngatttgtcggtttatcgtactgggctgggcagcattcgtttctactcctcattgaaaagataacatggctttcacaggttctggttccgggcagccacaattcatttccagcactggcaaccgaagcttttccaatgcgccactcattgagaactccgatactaatcaaattgttgtgcctgataggagaagctggaaaaatttatttgcatacatggggcctgggtttcttgtttccattgcatatatagatccaggaaacttcgagacggatcttcagtctggggcacaatataaatatgaggtgccatgacatattcttatgatactcaatccttccttcatctctttttaacctttgtttttttttttctttttttccagttactttggatcatattgttggcatcatgtgctgctcttgtaattcaatcaatggcagccaatcttggggtggtcactggnaaacacttagcagagcactgtagatctgaatatccccgggtgcccaacttcatacttttggatttattggctgaaa

SEQ ID NO: 443 - DNA, 371 bp, Glycine max
  Clone ID: PAT_MRT3847_1003C.1
atcgatctcgaggtgatcgaccgtgagaccgaggcatcgctcgccgtgctcggctgctcgccgctggttgaccccagggggcgcggcgcgatcctgttcgacatcggcggcggctcgaccgaactggtgcggatcgagcgcgatccggaaaatccggagccgcgcatcaaggcctggatgtcgatcccgttcggcgtggtcacgctcgccgagcagttcggcggccgcgacgtgacgccggagatctacgacgcgatggagcgggaggtcgcacaccacgttgcgccgttcgccgaacagcacggcgtcgatctcgccgacatgcacctgctcggcacctcaggcacggtgacgacgctcgccggcatatc

SEQ ID NO: 444 - DNA, 482 bp, Glycine max
  unsure (1)..(482): unsure at all n locations
  Clone ID: PAT_MRT3847_100400C.1
tgtcttggcatagctaaagctttggcttatcttcattaagagtccagaataaaaatcatacaatagggatatatatgcaagtaatgtattcttagaccttctctgctttaacaatggcatcgccatcctctcctttgaatatgactgcatcatgcacttcactaccctctccacttccctttccgttcccattttgttcacccctggttccttgattctcttgtccggaaaagcaccctaccattggaaacaccagattaattgcacaccggagtttcagatatggcacagtcaaccattgactcaatccaaacgcagctctatcactctcgggaaactttgcccctcctctccctgattccacacttaacctttatttctttctgttataacttcaatgtttattattcagcattcaaaacaaaattcaatattcaatactaataataattatagtaataacagtnaaaaaaaaaaaaaaa

SEQ ID NO: 445 - DNA, 405 bp, Glycine max
  Clone ID: PAT_MRT3847_100401C.1
ggctcgagcttgcaccatccaagactggttttgcaacataggccatacattgtccagctattgaggctcctggaatcttctatactaatgaggcaagctactcatttgctggttaccctctgcatatcctgtcacaacctgtagccacagctgtcccctgaggcttgatgatcatcgtcggagatgcaaaccccaaagctgggttcaacacggctgacgatatcggaactcatacaatcaattctgcacatgatcctataaccttgcaaactttccttttcatgagaccaccagcagataccttgacgcatgatgagctagttactctatgagaagttaagatcggctaacctctagaacgaacttacgttccagatgcacaacttctgaagcacatcgaacaga

SEQ ID NO: 446 - DNA, 647 bp, Glycine max
  Clone ID: PAT_MRT3847_100402C.1
aattcggcaccagcggcaccagtttgtaaaaaaatgtttttggctagttgtattatagtgtgacagcattggaagctgtgcatgtctattacgtgagacaatgcctagctggcgcgcgggcagatcgagaaagtatgctgctgaagcagatttagacagctagggctattgtgcactgatcgaaaaagtaaagctgcacaaataaaaaaaatcaagtttggaaactcggttcaataaccagtcactacatctatcggtttgccggttcatttggaaacttggctggtttgctcccgttcccaacaagtcaaggacacgaacgatccaataactggctcggaccggctgtatcagtggttttggttacctgtccaaatggtcggtccaagtcggtttttaaaactatgctctagattgtatatgacatagactaaactactaaaatgtgtgattcttcctttgatggaccttttcatggacaaatcctgaattgattttcaacctcaatatgggtacaaattttgataaacaagattcactcactaaggtggacataagttcagtttttcatgtttcactgccaacccctttcctttttcgattgttcttgtggttgcttttttgtaattcaaactgtagaggattcc

SEQ ID NO: 447 - DNA, 163 bp, Glycine max
  Clone ID: PAT_MRT3847_100403C.1
aagcttctgcttcttttgtagtcatttgacatctggacaaaaagatggtgatgacttaccgagaacttcaaatgtattggaaattcttacaaagacaaggtttccccctgtccatgacatcggtgattagtattctcctcagacaattctataacatgatcga

SEQ ID NO: 448 - DNA, 586 bp, Glycine max
  Clone ID: PAT_MRT3847_100404C.1
gaagtgtgaaactttatgtcactgaaaatatgcaaggatatcaaattatgccctacatataacatatttataagccaataatattcataccttattggccgggcattaataattgggtgcagcgaacttatattttgggggatctataaacaaaagttaacatgcattatgccccactgaatacctaaggaggacacctccactgtacttcatgaaaagaaccccatcttctaccattattttcttgataaataccatacataagtgcatactgtgaacgcatagaggccttgctgacaactaaatacccttctctgctctgaactgaactctttaacaagacaacatatacaatctgaccatcacttacatcaatcacatcaaggtctttacttttatgaatatgctgaccgctactaatgtcaactataatgacaccaacactatttctatcaggatatggcgccactactgccagaagcaacaacctgtcttgtttaaaaggatactgaagctagaacgatgtccggccttgattatattgtaagaccaattcttgtctacctagaattgccctcttattgaa

SEQ ID NO: 449 - DNA, 921 bp, Glycine max
  Clone ID: PAT_MRT3847_100405C.1
acgcgaaggtaggctcctctacagcggccgccgccaggcattgacgttcgcggatctcggggcacgggcccccctccagctgcggggcacggacggccagaacggcatcgcgttctcggtccgtcgcgacgaggtcgtcacgggcgcgacgctgcatctggtttacagctactcgcccgcgctgctgccggacctgtcccagctcaaggtgctcgtcaacggcgaagtggcggcgacgctgccgttgccggccgctcaggccggcatgacggttgcgcgcgacgtgttgatcgatccgcgcttcgtcaccgaatacaaccatctgaatgttcaactgatcggtcattacacgaaagactgcgagaaccccgccagttcctcgttgtgggcaacggtgagcaatgcgagccggctcgacctgacctatgcggcactgcccgagcggccggagcttggcatgctgcccgcgccgttcttcgattcgcgggacgtacggcggctcgagctgccttttgcattcgccgcacgaccgtcgcgggagacgctggaagcggcgggcatcgtcgcttcgtggttcggcgcgctggcttcgtatcgcggcgcgcggtttcccgccaggctcggcagcctgcccgaatcgcgcaatgccgtggtattcgcgacgaccgacgatcatccggacggcgtgacgctgccggccatcgacggaccgatgctcgccatcgccgagcggccggcgcctgccgaaggtcagctattgctggtgctcggtcgaacgccggacgaagtgaagactgccgcgctcgggctcgcgctcggcagcaaggcactcgcgggcacgcacgccgcggtgaaccgacttgcgaacgtcgcgccgcgcgtgccgtacgacgcgccgaactggctgtcgtcgaccccggg

SEQ ID NO: 450 - DNA, 469 bp, Glycine max
  Clone ID: PAT_MRT3847_100406C.1
aacagaatgcttttttttttttcattgttcctaacagaaagcactaattgggattcatttgtaaatggctgacatggtcttttggataagtttacaaattgcaaatcattttaaaacactggggggactatccccattaaaacaggcaaagcgaacgcatcgtacatgcatatttatttcccttattaaccatcattagctaattggccagtggttgttcatttagcatatacctaaggccactggaacaaactaaactatgttctcatgcttctaatcaaatgctaattaaacttgtttaatttattacaagaaaaagtttaatgggaaaagagcttcaatctaaccttggaaacttagctatgagaatattcttttggccatattttgtccaggtatatacatcatccaatgacccttcaaggcctcttcttgagcaaatatttacttgctcggctcatttgggcat

SEQ ID NO: 451 - DNA, 145 bp, Glycine max
  Clone ID: PAT_MRT3847_100407C.1
gctcgtatttgttattccacaagcaactacctatttctctatcagctagcatttaatttgataatcggtccttatcctttgcaataataacatgaaagcatatacatgtctgcagtaaaaaaaaaaaaaaattaaaaaaaaaaaa

SEQ ID NO: 452 - DNA, 358 bp, Glycine max
  Clone ID: PAT_MRT3847_100408C.1
aattcggctcgagaagaaaatggaagcaccagaaactttctttgagagcttgccctaccagtttgagggttcaccttgtagggcaagctctcaaacaaaatggcagcaccaacaactttgctatctaataaaccaaacctcgccacattacttctcttcattcttcttctaaactttctagaatcttcactttagaaccgaacccatggcggatcgcttcttccccaacccgatgcccgagatctcacccgaaacgacgcctcccactcctcacgaagaagaataagccctcacagtggtcgacttgctcaccaagctcctttccatgccccacgcgccacttttggagcgtctcaaa

SEQ ID NO: 453 - DNA, 267 bp, Glycine max
  unsure (1)..(267): unsure at all n locations
  Clone ID: PAT_MRT3847_100409C.1
ngnttnnnannannannnnanagngaaannnnnnnntggnnctttttttttttttcgctccaaagataattggttaaattttttacaccgatcaagacctttacagattttaatccacttttccttaaagaaaaaaaagattttctaaataacatctttggtttttggcttttcccctctttatgggggggtacccctcccaaactaaactgaataactttatccataaaaggcccaacccgaaattttcactttggccatcgtttt

SEQ ID NO: 454 - DNA, 478 bp, Glycine max
  Clone ID: PAT_MRT3847_10040C.1
taccagagtcctgtcactggtggtgttataagagggagcgaggggtcgaataaattaaatttaataaaaatggtggtatgtggacgggtgtagcctagtagtgtacaatcgacttactaggcacttagccagctggtctttattgcgtattcaggtagcctgtctacacggtggtctgtctcatcttcagatttgaattaccctgtggtacaacgtgtgtgttcctctgcggtgcttctaccataattattgggtgttcgggtgctattactttcttcttcttcttcttatttttattcgcgttacttgtgttcctgttcagtaccacgtcctcttctcttcttcgctcctcttgttctttgtgcccaacagtgttaacaccaacgtctctcttgtcaactctgtctacatcatcggtagtattctccattttcttaatggtttctacagccgttactaccggattcctcgctccggt

SEQ ID NO: 455 - DNA, 579 bp, Glycine max
  Clone ID: PAT_MRT3847_100410C.1
caaaagttgttcactcattgagtgtatggccgatataaggatgctgatatatattggtggcaacaagtttagattagtaataataaaaagaggacaaatgttagtgagaagggaaattatgatgggactcttttaagtgatagacatttgacagtgtataacttgggtcaatatgacatggattctctgcaaaggatgtggtgaatgtaagtgtaacccccagattggttgactacaaaaatgtatttatagagcatttcttttttgtgggttgtaagatttgcctttctaaatagaagaaaagcaggggacgatacacaaatgaaacaatagaaagaaaacagtcaaatcttttagcttttccttgaaagctagcatttttttggttcttgaaacctattaggctctgttctttacattattaataattaaaaatgttaatagtattttgctcttgcctaatataccaaataactcattttatagttttgttgttccctctgtagaaggacttgcttttagtttgtgtttggtcaaagtaatctttcattcctaactaaataaggaagacttattccc

SEQ ID NO: 456 - DNA, 270 bp, Glycine max
  Clone ID: PAT_MRT3847_100411C.1
tctaccctcccaggcacggtctcttacctcacccaaccgggttacccatgggccgctatgaaggaccctcgcgcgccgctcgggatatgggggaccctcacgcatcgcgcacgtcgcgatgactctaccaggctacttgacacggcgtcacgcacctcgcgcgactaccatacagacgggacatatacctcacgaggcccgggctttcatctgcgggtgatcgacacttgctgtgtggtctgagagtgtgctttatatacacacaaagtg

SEQ ID NO: 457 - DNA, 396 bp, Glycine max
  Clone ID: PAT_MRT3847_100412C.1
tttttgttttttttggagggttattgtttgctttcaaaaccccaagtggtcttgaaattcttttcagattaaaccatgaagccaaattaaattttttctagagcacacgcaaaaattctttaaaagaaacttccgggaatgtagcaccaccaaaatcataaatcgatgaaattctaccccatcgtttttgaaattggatgggaattatgatgttgctgtcgcacacgttttgccattaaaacctaaattccagggcatagtttgaagctacttcgggcaggacgttgaaaaaagctcggtaaactgagtcgatggcttggcacaataaaggccttagaacttgaccttttttggggtttcgccctgtgcatgaatgttggtcatctgctcccccct

SEQ ID NO: 458 - DNA, 390 bp, Glycine max
  Clone ID: PAT_MRT3847_100413C.1
tggggaaaggggtcgttgagtcgaagtgagccacaatggctggtgggtgagaagaagaagagaggtattgaggccggcaagacaagtgctgaggtgacgcagaaccgaagagaggagaggaagcagttcaagctcgaaagagcgagggcgcaacgggaagcaatcgagcagcagttgaaggaggaagggaagttggaccctgacggaagcatcgaagagctggtcgatgagggtcaggctaccgaaagtccaagaggaacgatatacacaccggacgcggaacatgtggtcaccgtgcatggtgactcgatcacgtctgagctcaacaagactctcgcacaagatacacctccatggggtagaagtgctacaccggctcctgccatggat

SEQ ID NO: 459 - DNA, 1309 bp, Glycine max
  Clone ID: PAT_MRT3847_100414C.1
cccacgcgtccgtacggctgcgagaagacgacagaaggggccgctgacttgggtcaactctatgatctcttcgtgcaactcaaggtcaatcttagagttaatctcatgggatatgactactctggatatggagcatctactggcaagcctagtgaatccagcacatatgctgacatagaggcaatatatgaatgccttgaaactgagtatggagttagccaagaagatgtaatcttgtatgggcaatcagttggaagtggaccaacactgcacttggctgctaaattgccaaggttgagaggtgtggttcttcacagtggcattctttctggtcttcgagtgctctgccatgtgaagttcacattttgctttgacatttataagaacatcaacaaaataaagaaggtcaagtgccctgtacttgtaatacatggtacagaagatgatgttgtcaattggttacatggtaatggactttggaagatggcaagggagtcatatgaccccttgtggatcaaaggaggtggtcactgcaacttagagctttaccccgattacatccgccatctttgcaaatttatccaagaaatggagagcatgacaactgagaagcgcctcaaaaagattcggcaaagtgcaaaccaatcaaagtcaaacactggttgcacctgtagtagatgctgtagagtgaagtgttgtagagttaaatgtcctgaatgctctaattgctgttgctgcatgaatgtttcctggtctatcaactgtcctgaatgctgttggagacctagctgcaagtgttgccgcctccccaagttccctagttgtttcagatcaatctgccgcacaaaatggtcgtggcctagctgttgtgcaacaaaatgttcattgtcattgcctagctgctgctgctgctgctacccgaagcgtgcaagaccaagttgctgttgcatgaattgtttctgttggcaatgttgtgtaggaaaacacagtgatggcacaaatggaaaacagaatggctaatggttaaaacatggttgtatagaatggccaagtcttgcgaacacacccttcaatattgtgcagtggtgttagtgttacaaagaggaagaggaaatagtggatgataattgtaggaaagtgatatgatccagtgtcctctattatttttggtttatttggagttattcctgaagttctattggaattttttactcataaaacattggtgttttaattaactttcctggcaggggatgaaagacattgttgtatccttttaaagttttgaagtgcccttgtcttggtgtct

SEQ ID NO: 460 - DNA, 510 bp, Glycine max
  Clone ID: PAT_MRT3847_100415C.1
aatgttcattgtcattgcctagctgctgctgctgctaccctaagcgtgcaagaccaaattgctgcatgagttgtttctgctggcaatgttgtgtaggaaaactcagtgatggcacaaatggaaaacagaatggctaatggtggttaaaacatgcttgtatagaatggtcaagtcttgctaacacacccttcaatattgtgcagtggtgttacaaagaggaagaggatgccaattgtaggaaagtgatatgatccagtgtcctctattatttttgggtttatttggagttattacttaagttctattggaattttttactcataaaacattggtgttttaattaatttttcaggcagtggatgaatgacatcattgtatccttctcattctgtagccttttaaagttttgcagtgtacttgtcttagtgcatgtttgtttctccattacaaaattgcttttgaggcaaaagtctttttgccaaaaaaaaaaaagtcttacttttgcaaaaa

SEQ ID NO: 461 - DNA, 678 bp, Glycine max
  Clone ID: PAT_MRT3847_100416C.1
cgtcgccggcaccgccgcacgtaagccttggacgcctctagaagcggccgccaccccccccccccccccccccccccccccccccccccccctccccctctttttaaaccacgcacccgttggggcaaaaaggggaactgctactgccactgcctttgcagccataaaaacataagctctcggattcatccctatacatacaatttttttttttttgcaacctactttttttttggcatccatttttatttattgataacatttgaaatcaatatgtatggagagagactttttttctcctcttaccctcgttttttttaaacctttttgacgataaaataaaaaacaaaaccttggcgaacgttcttttgttctagaaattcataaaaagcgacgaaagaaagtcccataacgttccttcctttggagagtattagggaaaaaagggccccaattaataatacaagcgggagggatgagtattgttggtcaaaaaaatcaataaaagggggggggggggggcgacccgtacgggagtccaacgatagggggcaatggcccttcatatacaggggcgggtgggggggccccaaaaaactgaagggggagtttcccacggaggcggggaatggtataccggggggggcggcaaactgttttgaactggggggggggggg

SEQ ID NO: 462 - DNA, 281 bp, Glycine max
  Clone ID: PAT_MRT3847_100417C.1
gttgggtttttttttttttttttttttcttttttttttgggatgccacccacgggcaattattttccctggagacctattgatggggggaatcaacttaacatagccacactcataaattttgaaggctaacttccctttttctaaactcctgaataaaaaagaaaacaaatggttttttctgttttcaaagcccttgggggaggggagggggaacatatttacccattaacaaaaaaaggtttttacccaaaacaccagaagggattttatacagatttc

SEQ ID NO: 463 - DNA, 458 bp, Glycine max
  Clone ID: PAT_MRT3847_100418C.1
aaaagatatgcatgaggcccttgtgaatagttaaactcataagttttagctactttaagttgataataggtagtaccgtagtagtgtaatggggaaacaagggtctcataaaagtctgcgtccagagtttcagggttggcattccaaaactttgttgcttcatggcctgaaaagtgattcttcaaaatgcagttactgtagggggctctatgtagggaaaaagcacatcagggccattgttgtgatgtttggattgttgggttgcctttttcttcttgactctcttatcatctcttattttgagttcacaaatcttcaacccagtacagcctcaaataattcaattgtgtttcagggtagagattcctacatctacagcaaacgatcgccagtatatatgtatgaacggcttctaaacttggcttccagtgctcttgcagagaaggagttcaagcaag

SEQ ID NO: 464 - DNA, 315 bp, Glycine max
  unsure (1)..(315): unsure at all n locations
  Clone ID: PAT_MRT3847_100419C.1
aggatcctatccagcggacggtcctttccacctttttatatttcccccagaaagggaccaacgaaggggaacctttaacaaaccactcaggagaaaacccgcaaacgcaaaagccaaacggcgagggccaccaaggccacacaacaagaatccnggggggaaaggaaaaggaaacaaaggggggggggggggggcagacaaaaagaaaagnccgcgcaaccagccacagcagcaagggcaggcaggaaacaccaaggagacgggacgcgccccccagcaaaaaaaaagaaaagagacgcaagacgaacaacaagc

SEQ ID NO: 465 - DNA, 382 bp, Glycine max
  Clone ID: PAT_MRT3847_10041C.1
gtaatatttcgagtccaagcttctcttggtgctctgtaagggaccaaaaaccaatggcatccactcgtaacatacgcctatcggttttagaaaagccaagaaagtttgtgtccaccaacctctattttacacgagtctctcatactatgatactatagctacacttcccactgtgtctcagggtctgtgacacacacagactcacttcaagttcccagcttttgccatttttcccactgtttattgagaagaactgcagaacatggcacagattttggctccctctacgcaatggcagatgagaatctcaaaatcctctcccaatgcaactcccattacatcaaacatgtgggttctttattgtggaacaaaataagaaagt

SEQ ID NO: 466 - DNA, 1009 bp, Glycine max
  unsure (1)..(1009): unsure at all n locations
  Clone ID: PAT_MRT3847_100420C.1
ttatggaaacctagtaactattcttagcatcgatgggggtgggattcggggcatcatccccgctaccattattggtttccttgaatcccagcttcaggagttggacggtccagaagcgaggcttgcagactattttgatgtgatatcaggaacaagcacaggaggtcttgtaactgctatgataactgctccagacaacaataatcgacctcttttcgctgccaaagatatcaagcctttttacatggaccactgtcctaaaattttcccacagcatagtggccttggtgggacgatattagcaaagatgataagatctctgggaggacccaaatacgacgggaaatacctgcatgaggtcgtgaaagagaaacttggagacattcggttgcatgagacactcaccaacgttgtcattcccactttcgacatcaagtctttgcaacccattattttctcatcttataagcttaagatatccccttgcatggatgctaaactctcagacatatgcatcagcacgtctgctgcacctacctatctccccgctcacaatttcaacaatcaagattcaaaaggaaacgtacacgaattcaacctcattgatggtggtgtttgtgcaaataacccgaccttagttgccatgaacgaagttacaaagcaaatcattatgcaaaatcctgatttctttccaattaagccaatggaatatggtcgcttcctaataatttcaataggcaccgggacagcccaaaatgaggaaaaattccatgcacaaatggcagccaaatggggtttattggattggctaacccaaagtggtagtaatcctttaattgatgttttctcccaatccagttcagatatggtggattttcatttatctgctgtgactcaagcacttcattcagaagataattaccttcgaatacaggatgacacattgaccgggacagattcttcagttgacattgctancaagggagaacttggagaagctttgccacgn

SEQ ID NO: 467 - DNA, 264 bp, Glycine max
  unsure (1)..(264): unsure at all n locations
  Clone ID: PAT_MRT3847_100421C.1
tattcatgncgnnnagtnagattcgaattcnntcnnngtncntttatantcctatanngagtaantgnananantaatattctnaagncaaancngtaatacnnacannaagtagggngagggnantnnagacaatnaanaanctgntcnntnnnccncattataggntanagaanaaatnnggtgnnnttcnnaantaanaaanntanntgnagnacagannncaaanncannnnngatagannagacanaatcaaacaaann

SEQ ID NO: 468 - DNA, 399 bp, Glycine max
  Clone ID: PAT_MRT3847_100422C.1
ggctcgaggttcattccagcttgtgtaagatttgcctggctttattggcgtgctattgctccgaatagttgatgcataagatataatgagactgaccgacatgaatgctcaagcctgtcaacatccatgatacgcaaagtaatctgaagacgattgaagtaggatactgtccggagacctgtcaatgaactatattctagttaatagaaagctactttcttcgattagaagcactggaggtcactcgctgttataccttaatcggactattgtatgggagaacctgaatcatatatgcggctcctgacttggggaattttgggcacatctgcagagcatgtaattgaatagatgagagcacatggctacttcgcgtaaggatcttatcctatcacacta

SEQ ID NO: 469 - DNA, 246 bp, Glycine max
  unsure (1)..(246): unsure at all n locations
  Clone ID: PAT_MRT3847_100423C.1
gaccaaactccatttctcactctccagtcgtctcttccgactattttttttcctcttcacaaaaatagntgctgaagaaatttctatgaagacccgggagagcatcttcatctctctctctctcgtcattaatagtgtcaaattcaccctctattacaaaactcatacttaattttattaattgctccaaattgaaattaattatcatttctaacaactaccccccctctgatcaaatcttttatt

SEQ ID NO: 470 - DNA, 604 bp, Glycine max
  Clone ID: PAT_MRT3847_100424C.1
gactagttgatctatgctagaatgtccaggtccgtcatgtggctcgtggcgcggcgcgtttgtggggaactgagggttggtgtggaatataaggccggcgcttaaggcttagacgtattaattaaggaataaaccgagagagagtagtagagtagtattaaagcaaaaagaggcccggcggggggtggcaccgccgcctgatggggcgccgcctacttatactgccgactggggattaacatgggcaaagaatcgccccgccgcactcgcttaaaagtgagcacaagccaaattggtgtatatgtgtttggcatacacttgtgcctgtgcctgggtcggttaaaaaacacgatggcggtccaaaaaggcatagctactgtaactggcgcttgccgaatgtgctgccaatacgaatgcttgaggagggagtggtgtgccccttgatgtagcatcaaagacatgggcacgggggcccgaatggcacgccgcagttggatatgtgttatatcaatcgaggtacttaaaccaaacccaatacacaataatacggttagtgagccggtcattttattaccatggttatatagatgttcgataagccaag

SEQ ID NO: 471 - DNA, 328 bp, Glycine max
  unsure (1)..(328): unsure at all n locations
  Clone ID: PAT_MRT3847_100425C.1
aaacccccgggcggggcccgacccggaacacccgggacgacccacgcgaccgatcgaaacnggggcgccaccaacgacccccagggcccattaaaagcccaaccccgccgacccacccccgcccgcaggaagacccgaggcagcaccgcgcacaacgcaccaaaaaggaaaggcacggaaacgcaacgccaaaccccaacacccggaggcgacccgggcaagggacagcagccaaggaagaaggaggagaaagacacaacagcgaggcacagaacagcaaaccgcacagcgaagcgagagaaggcacccacagacccaaagccaaccg

SEQ ID NO: 472 - DNA, 149 bp, Glycine max
  unsure (1)..(149): unsure at all n locations
  Clone ID: PAT_MRT3847_100426C.1
ataatatattaccaacnataaattctaggcggtaatatatataacttgttatctttataaaagctgcagggggacttaaaaaatattatatactcatcatgtcttttttctaaataaatcacccaatttttactttccattccaaataa

SEQ ID NO: 473 - DNA, 254 bp, Glycine max
  Clone ID: PAT_MRT3847_100427C.1
gttggggaaaatttaaaacctcaaatccccgtaaaaaaatgttaattatacaaccccaaagacccattggggcatacccaaattcccttaactaagtaaaagggtccccagacccccaattcctactcaaattggtcatcatccgcgccaggaaggggcttactaacaattggaaaaaactcaacccttggctgggggtgggccgcttaaaaaaattgaacctttgggggggcccatgggggggaattttccaa

SEQ ID NO: 474 - DNA, 119 bp, Glycine max
  Clone ID: PAT_MRT3847_100428C.1
catgcgcgcgtacgctcggacagcggctgcgaggcagcaactaccttggtgattgcctatgctgctgttctgaatttccatcatcgtcttcttcgtccttacattctatcatagtaata

SEQ ID NO: 475 - DNA, 217 bp, Glycine max
  unsure (1)..(217): unsure at all n locations
  Clone ID: PAT_MRT3847_100429C.1
aactggagcgaccacacaaggggggtcctttttgatatgtnnnnttaatattttattctaaggcttagtgtgccatgcgcaagaatgatgataagaacaatattgttccaaccaacgcgtaacactaaactaaagagggttgtacaaaacaataaacttgtcaacaaatagtcacacgatggttatccaaaatttgccattgatgaagtaagtgaat

SEQ ID NO: 476 - DNA, 3174 bp, Glycine max
  Clone ID: PAT_MRT3847_10042C.1
cttccctttttaatagtacttgattcatagcaaataggtgcgaccatatgcatggcaggccctttgcccatgttcttaaagctagaggtttctgtgtaaaaaggtgtttgacttgtatctatttttctttggttcatctcagtatttgaatagtcatggacagggaatcagcttgcaccattctcagttaataacaatgagtattatatgagtcatgagttctaatattaaatttgctcatggtaagtaatatgaatcatcatatgtgtttttccctagcccaaaggggagtgatctcataaattgcagtcaggggagtaagctggttctccaatggtatttgtatgtgaggatcagattcaagaggtgagggattgagagatcgcatcaaaccttaaggcagctatgtttagcctttttttttttataacttccttccttatccttagtcttagtgcatttcctgatattcgtctttttccttactattgctaccattaattttatgtctgttcatgaataaatttttttgaagagcccccagagaatgcattagtatacacaggaattggacaataaggtttgctagtgacagaccaggagaaaaggagcaaaaagaatgcgtatcacccttatactgtattttattcgacatctgcatactgattgacgggaaatgtggtaatacgggacaaccgaccctcgccgtggaggccggttgacgactgcaacgggggcggaagggtcggagagtgccgcagaacccgccactatcggctgaagacaagaaagatgctataacaaagcatcaaactgatggcagcttgaagagcacaaggagtactgaaggatctttgtccaacttagaatctgaagctgttgtaaatgatgaatgtatatctaattctaaaggggacgattcacattctgtgcaaaatcaacatcagagccaaagtctttctaccaaagcaaaaacttttattggcaatgaaatgtttgatgggaagatggtgaatgtggttgatggactgaagttgtatgaagatgtaagtggttgcacaggaagttaggaaacctgtttctggataccaggatcggcggaggtttgggaaaaaaaaggaatgtcatggttctagtgcatattcttatactcatagggcaatggtcgcggttactgggggcacggtgaaagggactccagttgttgagaagagtgaagaacataaatcaggtggaaaggttgagaaagtgggggataagggtttagcatctgttgaagagaagaaagatgctataacaaatcatcaaagtgaaggcagcttgaagagtgcaaggagtactgaaggatctttgtctaacttagaatccgaagctgttgtaaatgatggatgtatatctaattctaaagggaacgatttacattctgtgcaaaatcaaagtcagagccaaagtctttctaacatagcaaaaacttttattggcaatgaaatgtttgatgggaagacggtgaatgtggttgatggactaaagttgtatgacgatttatttgatagcactgaagttgcaaatcttgtttcactggtcaatgatctaagggtttctggaaaaaaaggacagttacaaggaagtcaggcatatatagtttcaagaaggcccatgaaagggcatggaagggagatgattcagttgggtgttcgaattgctgatgccccagcagaaggggaaaatatgacaggagcctccaaagatatgaatgtagaatctattccttccttgtttcaagatattattgagcgtatggtttcctcgcaagtaatgactgtgaagcctgattgctgcattgtggatttctataatgagggtgatcactcacaaccccacagttggccatcatggtatggaaggcctgtttatgtgctttttctgactgaatgtgaaatgacttttggaagagtaattgcctcagagcatcctggggattataggggcagtatcaagctttctctagttcctgggtcccttctggttatgcagggtaaatccagtgattttgctaagcatgctcttccttccacacgcaaacaacgcatactggttaccttcacaaagtcccaaccaagaaagtcactatcaagtgatgctcaacagcttgcctcggcagtagcatcttctcattggggtccaccgccaagccgatctcccaatcatgttcgtcatcacgtaggccccaagcattacgctacacttccaacaactggggtactgccagctccacccattcgaccacaaatggcagctcccgttggcatgcaaccattgtttgttgctgctccagttgtacctcccatgccattttctgcacctgtgccaatcccagctggttctaccggatggacagctgcacctcctccaaggcatcctcctcctcgagtccctgctcctggaacaggagtcttcctacctccatcgggctcaggtaattcatctcaacagttaccagcaagtactttggctgaagtgaacccaagcacggaaactccaaccatgccggagaaggaaaatgggaaaattaatcataatagtacaagtgcttcaccaaaaggaaaagtgcaaaagcaagaatgcaatgggcatgctgatggaactcaagttgaaccagctctagagacacggctagatagcaatgacaaagctgcaccaagtcattgagctgtaccataattatagagagagagagagagagagaggtaaagcttatcacacgaacacgataggctgtgaacttaacttgagtttgaagcaaatgtaaagcgcggcaacaggagatatcactatatatatactgcagaggagaacaagggaaggaggtagaacttttggttctctctgtaatcctttctttgctccattccttttttgttgtcttaaaatattaactattacaggaagggaaacccattcttaattctatttttggcctttcctatcttaaatattttattttattttaattaatgcatcttgctgttaatattgatcttgtgggagggggtatgtttcccctggatttgttaaaactaatttaatgccaaagtggcatgtttggaatcaataaaagttggcaacatatttttgttctagaaaagaccaaaaaatttaaaaaaaaccccaaaa

SEQ ID NO: 477 - DNA, 244 bp, Glycine max
  Clone ID: PAT_MRT3847_100430C.1
tgaataaaagactcaaataactaattaacctttttcaaattaaccaaaaagctttgccatggaggccctagttaatgctacaattggttccggttttatatacagctgctccatcctggggggaagcaattctttactgaaaaattatggggggttcttcacaaccaaaatctcaaacccttcggagggaaaatttttacccaagaattgaacccctcggaacatccggctcaccaccaaattt

SEQ ID NO: 478 - DNA, 377 bp, Glycine max
  Clone ID: PAT_MRT3847_100431C.1
gttgggatttaacagatcattaagtatatcaaatgtggtgacagtggcaatatttgtctttgttttcatatctacatttatgtaattttccttttctatttccccttatcggtaagtgcaggttatgaatttgattatgtatttgattggactattttaaagtaccagcaggcacaaaagaatagagtccagtctcgtatatctgtgagtatatttgctctacatgaagaggtttgagtcttcccatgcttataatactaatttttgtcatattgcagacagtccctggaacaagcagtagtcctgcaatgccaatggatgtagacaaccaatgaggttggtgcatctgaaattatttacataattttttgtgattc

SEQ ID NO: 479 - DNA, 693 bp, Glycine max
  Clone ID: PAT_MRT3847_100432C.1
gctttagagagctggatcgaaaaggaaatagaagctgattttgagacagttagcacaacaccagttttgaagacgccttcgccaatggagaaacaggctgctaatctttatacaagaaaaatattttcaaagtttcaagatgagcttgttgaaacttttgtttatactgcaaatagaattgaaggagatgggccaaatagcacatttagagttgcaaaatttgaggatgaccaaaaggcatacatggttacattaaaccattctgagttgaaagctaactgtagttgccaaatgtttgagtatgcaggcattctttgcaagcatattttaacagttttcactgtgacaaatgtacttacattaccaccccattacatcttaaaacggtggacacggaatgccaaaaacagtgctggattggatgaacatactggtgaatcacatgcacaggagtctttgacagcaaggtatggcaatctttgtaaggaagccatcagatatgctgaggaagggtcagtaactgtggaaacttataatgctgcaataagtggtcttagagaaggtgtaaaaaaggttgctaatgtgaaaaaaagtgttgccaaagttacgcctcctaataatcaggccagtgggactgcatatgatgacaggaaaactactccaactttggatacaactcctcttttatggcct

SEQ ID NO: 480 - DNA, 376 bp, Glycine max
  Clone ID: PAT_MRT3847_100433C.1
gccgggccgcggatctacatccagatcatcaatcaactcttcaacactctcaacaactcttcagtcttcacgacaacctttcgatacccttccaaccaaacagccaaccattcactccaacaatcaaaatggccgctccccagattcccgagaagcagtgggctcaggttttcgagaagaccgccggtcctatcgagtacaagcagattcccgtccagaagcccggtcccgatgaggtcctcgtcaacgtcaagttctccggtgtctgccacactgatctccatgcctggcagggtgactggcccctcgataccaagctgcctcttgtcggtggccacgagggtgctgatgctgccgatgccccatatcgaccttg

SEQ ID NO: 481 - DNA, 400 bp, Glycine max
  unsure (1)..(400): unsure at all n locations
  Clone ID: PAT_MRT3847_100434C.1
ggttgtttggcttctccttccttattcctttcttggcgttctcccgttgtttcttttcttgggaggggccccttgatttctttttttctttttcccgtcaattctacttgttcttaaattctctcttttcatctttctttattgccttacctttttcacgatatttttgtacccatacaatttctcttctaatttttttttattaaataaccttttttctttttgataccatattttttaaaaataaaaacttgatttttttgtatttttaacatgtgttgatgatccatgaatatacttaaaattcataaacaaaagctctttttagaatcttttttgcacttgngaaaaattaaacgcaagaactttgccttaatttgagcttcaaagaatttcctac

SEQ ID NO: 482 - DNA, 316 bp, Glycine max
  Clone ID: PAT_MRT3847_100435C.1
gttttttgtttttttttttttttttttttttttttttttttttgtgtttattctttggggggtggtcttgtttcaaacccaccaagagcggcgggaattttccgccccaaaagaggataaaactcgaagccggggaaagaaaaatgctttttcgggcgcccatgctaaaagggggaaaccaaccatacacgggaaaaaaggggttgatggaaaaaaaaaaagaatccgcgcacttccccagaggttagaaatagaaacctttttagctttttttgtgggagacacacaaaacggatgggcccattccccgttgttg

SEQ ID NO: 483 - DNA, 294 bp, Glycine max
  Clone ID: PAT_MRT3847_100436C.1
gaattcaaatcactcagcgcagacagcacagcacaaccctcatccttgagttaatggatggcaccagcgtcctccatggctcgctcatgaccatcgttggctggcaaggccgtcaatcagggcacatcatccccaggactgggaacggtgagcatcacgaaaacagtcaccacgcaagtctcgtcatgaagcccacggtaccgcccagaccgactcaagtacttgggaccattctctggcgagcccccgtcctacctaagccgtgagttctcatgggactacgggtgggacacg

SEQ ID NO: 484 - DNA, 471 bp, Glycine max
  Clone ID: PAT_MRT3847_100437C.1
cggaaaccttggtcataggattctcccacccgctcgatgggaatggcactttgaggcttctaatggggttattccgcctgacgaggctaatcaataccgcgtgcctttggtgggccaaattgctatactgatgattagaaaagagaccgctgacgagcacgtcgataacatcctccattcggacttagaggcgtttacgcctcatcctaggtacggtgtgtctttctactggctattccatcacgctcgatggcccatctgtcgaatatactgaggctctctacctaggctgtattactatttcgactctcgagtctgtgagcataacctaagctgacttatgatctaattatcgcaaataacgttgcctagaccttgatgaacatctcactaccttaggagtactggattacaatgctaccaactacgacatgttaaagcctcatacggtttacctctttcatctcgcag

SEQ ID NO: 485 - DNA, 469 bp, Glycine max
  Clone ID: PAT_MRT3847_100438C.1
gccgggcccccccggtccggattcccaggtccggcccaggcccccgcgttcgggtgttcacatctcccactctaacaaacgcgggcggacaaaggtgttgcccacggccggaggggtctcggatcaatgcggggaggaatcggcgactacaaatcggggcgctacaacgcgagcgcgacaagatggcgagcaaaaacgggcgcaggcatggggacaacaagaagctgacacgctgagctcaactgattgaggagctactgtgcagaatagagctagaagatcgaagagctgcacagagaagtgtttctaccacgcgatgctgttaaagggacagagggtatcgcctcaagggcagcagtcctggagacggaggtggctagggttcaccacgatacggtatcagaaatgactgctgcagacgaggcgagggcagacgccgacgaattgaggaaggcatttggggagaaag

SEQ ID NO: 486 - DNA, 430 bp, Glycine max
  Clone ID: PAT_MRT3847_100439C.1
acggctgcgagaagacgacagaaggggaatcgtgaagagtttgttcatcgaagctgccatctccatgaatctttcaccaatcttggaactgagacgattctccacgcaatcttcaatttcatgctcaagagcacgatttcgtgtagcatctgccatgtctggtcacacttggaaggttataggctgataccacttgttaaggtaattctagaaggagactcgaagaattacagagaagagtagggaagccaatgaaagaacgacatccgaatcttattaggaaggaaattgagatacaagagtgtttttacaaaattctaatccaaactgaatcaaagggatcaacctctatttatgtctaacagcttccccattgggaaattctgttattctaactactcatccctctcttgaattacttacaaaaata

SEQ ID NO: 487 - DNA, 437 bp, Glycine max
  Clone ID: PAT_MRT3847_10043C.1
ggctcgagctaacattcctcagacctcgacccgggctctgatacatgtcaacttctatatccatgagacaaatatcatttactggcctgtgcacagtctctctaatgcagaatcgctctctgctcctgatccctcatactcaagaacgttttcggcgtagaccgctcgctattaatggacacgtacaccccgccgggtatgcggctaaaagagcctgcacccataacaaatgctgcgattgcacttcagctgctgagtccgctcgcgctcgcactgttacagccatcatgcacaaagatgacgatcgaatagagatgagctacggaagctacgctgcagctacgccgagggaacccactatgtgatgcactgtctgacttggaggatgccgttcacaggcatagctcctatgcctagcttgcctaacgattggactc

SEQ ID NO: 488 - DNA, 708 bp, Glycine max
  Clone ID: PAT_MRT3847_100440C.1
cccaaaagtcaggcccatcaatgaaatgaagttgttgaacaattggacaagattgaagcacccaatgagaaaccagctgataccagaaaacgggttactggtacccgggtagttcattaacgtggagggcctgatggtggttaattgaattaaacacatctacaccatattctttgcagctgatggattgtggacttgaagagcttattgcactagtggcctaggggggttgagcttgtatagtataacatacacatatatgaaaaggatcagggttgagcctgtgacatttggctttatgtgcaccccaaagctaggagaaagagacttcaaactaggtcgtccccaggcattgataagcaagcaggtgctccttgttcatctctccttttccattaattcttccacttaactgatctcggagtttgtattgtatcaatctatgagtgtttaatagttattcttaatgtaattatttcaatttcttacatggtttagatgtgtagaatgttgaatatagataaggtgttcaatttatactcaacttattacaatataagaacaacaatagtcttgctttgcatgaggtcgattacaaggtcaattaaataatgttgttggactaggtaaaaaaccaaattgccatacatattattcactgtaaaatctcgtttaataatttcattgaattttctgcttgttctatct

SEQ ID NO: 489 - DNA, 576 bp, Glycine max
  Clone ID: PAT_MRT3847_100441C.1
caccggattcagggtcgatagccccaccctatgactatggagcaggggaaattcaacattctaaaccattgcaaccagggctagtttatgaaactaaccccgttgattacttgaactatttgtgttacactggtcataacctaaccacggttaaggtcatctccggaactgtccccgataatttcaattgccccaaggattccacctctgatttcatatccaacatcaactacccttccatagcagtaaacttcactggcaaagcaaacgtggtcgtgagcagaactgtcacaaacgttgccgaagaagatgaaacagtgtactctgccgttgtcgaagctcccaaaggagtatttgtcaaagtgactccaaataaacttcagtttacgaaaagtagtaaaaaattaagctaccaagttattttcgcaccaaaggcctccttgaggaaagatttgtttggatctatcacttggagtaacggcaaatatatagttcgaagtccatttgtattaactaaatagtgaaattaaaagtaacaatgaataaaatgcaaactaaattcttcatggtgaaaaa

SEQ ID NO: 490 - DNA, 585 bp, Glycine max
  Clone ID: PAT_MRT3847_100442C.1
cttttttttttttttttttttttttttttttttttttttttttttttttttttttttttttttttttttttttttttttttttttttttttttttttttttgggcaaaagggaaagggggttttttggttataaaaaaatggcccaaaaacattgtttaggggggggggaaagcctaaaaaaatagatcaaaaccccgttaaaaggggtaacaggcaaaagaaaaacacttttttttggggcaaaacaggcccctcaaaattttacaaaaacaaggggacaacaatcctggccacttttttttgggggggttgatttcaaaaacaaaaactctaactaaatttccaaattccaggaaggggaaaggaaattaaaaatcaacgttcactttaaactccccatgaaaatactttaaaggaaggggggggtgaccttaaacagggggtggaaagaaccggattgcctttttgcaaaaaccaaacattgggggttcgggcccaaaaaccccaagggggaggccaatttcctttccaagggctcgcataaaaactagacccttttgggaggggggaccccctctcctcac

SEQ ID NO: 491 - DNA, 452 bp, Glycine max
  Clone ID: PAT_MRT3847_100443C.1
ttcaatacagaaaaacttcaactgtatgtcccaactccagtgacagttactttttagaacatttttgccccgttatgtctcacagttagcaagttgatggccgtgtttttacttatgatagctttctctttttactctttagaattcacaataagatgatagaagcgtgcctcgtctaaaccagaaaggctcctaggtgccatgagatgctactacccccagtcccttctggcgcctggcctccgtgccttggacgcacctattggttaccttgataactttgggtagaattaaattatgttattccatttggtttaaaatatcagtgtttaagcagtgaattatccattttttatttgaatgactgctaagccatataaaagccttttcccgttggattatatgtacaataaatagggtcgtttttggtttgacatactcgtttcataatt

SEQ ID NO: 492 - DNA, 709 bp, Glycine max
  Clone ID: PAT_MRT3847_100444C.1
cgtacagtaagactcaggaatgtcggcctctagtcgctcgagccgcgctacccaaccacaacagaatctcgactccgagctcacacaccattaaccgcaccaacgtccggcggaatcgccctcttctcgccaaacgccttatccgccccgcccctaatcgccccttcggggatcggatcatcgtgcagatcaaacagctgcggaaacgggtctacgcgcttcctcagcacattcttccgcaagtaccacggcagcttcttggaatagtagcccgcgaactgcctattgccgacatcgaacacggtatccagctcctcgagcgtcagattcttggtctcgggcagcaggaaatagcagtacacccagccgaagaaattccacgctgcataccacccgaacgcgccctgctcgccgaacgcagcgaccagcgcgggccacgtcagagacaggatgaagttgaagccccagcacgtcgcggtcgcgaagctcatgcccacgtcgcgcaggtgcagcgggaacgcctccgcgctgtaggtaaacggcacagggccctcgccgggcgagtacacggccatgaaggtgtatatggcggcggcgatggagccgaggcgggcgggcgtggggcgcgtttcgtcggcggctgcgtcgtagaattgcggcaggtagaagctcatgccgcaccagagcaggcagaggcccatgagcggga

SEQ ID NO: 493 - DNA, 350 bp, Glycine max
  unsure (1)..(350): unsure at all n locations
  Clone ID: PAT_MRT3847_100445C.1
attccccggtcacccacccctcccaaaatgggggacggacacatagttctaaaggggagcgagcgtgatancctaactnagaangcgaaagaggggggggtgagtactanatccaatcctgggcggggatgcctcaccgtaacaaccctggacctctccccctcgtggtgaccctaaactgcgtggagggctgcgccctcnaattcgagccctanccggggtcgccaccctgcancatgttcccctcanctgcctatccgatggcaaaatcgagtccgccggcgccgggctcctccactccctcgcctacctccctcgggcggggcagcgccncctncgnccctaccacc

SEQ ID NO: 494 - DNA, 234 bp, Glycine max
  unsure (1)..(234): unsure at all n locations
  Clone ID: PAT_MRT3847_100446C.1
cttccttgcaggcaganaggaagangcttcaagaagagctcacacaaggngcttcagccaaganagaacttgaggtggctagaaacnngatcaaggagctacaaaggcagatacagcttgaggctaaccaaacgaaaggccagttgttgttgcttaaacaacaagtttctactctactggtgaaagangaagaggctgccaganaagntgctgaagttgaaaagaaattganag

SEQ ID NO: 495 - DNA, 237 bp, Glycine max
  Clone ID: PAT_MRT3847_100447C.1
ctcgagccgaaagaattgaaaattgagaacgaacctggttctggaaagaattgaaaagtgagacgaagagattgagcatgccggcgtgaaccatgaccggctcctccccttcctttgttcggcgggacggaaaccgagggacaacggcggttgttttcaacgggattcaaacttctccaattggggccgaattggcgggccatttggacgccgaagaaggcgcgttaaacgccgggg

SEQ ID NO: 496 - DNA, 719 bp, Glycine max
  Clone ID: PAT_MRT3847_100448C.1
gccaaacccacgtcaagagcacttgggttcccgcagccaagcgccgcgaacgacaccaacaactcgctgcgttgcagcaacaacatcaacatcctaaacgacatcacagagacactactactactcaacttgcctccgctccacaacccatcatagggttagagctgggacaattcccacctgaagtgagcacttcggcggtgtttcggtgtgtgagagtgagcgcagtggacgcttcagatgaacagtgtgcgtatcaaacctctgtcaacatcggaggacatgttttcaagggatttctctacgatcaaggtcctgaaagttcttacactactagtgcagcagctgagggttcatccggtggcgaacctcaaccacttggtttaataactggagccaccacagccacaagtgggaacaacccatttgacccttcactttacccagctcctttgaatgctttcatggctggtacgcaattcttccaacacccaaggtcctaaagacgtgtctttctatctatgcggacaataattgaagaaaccgagtctttttttcctttttcttattttttttgtcgttaattcagtcttgttagaattattgatgattatggttgttcctcggtatatccattgatcctaacgcaagctgaagtagctagctagctagaaggaaaagcagttaagaatttgaaagaaaaagaaaatgattatggc

SEQ ID NO: 497 - DNA, 453 bp, Glycine max
  Clone ID: PAT_MRT3847_100449C.1
gagagagagagaagcattggttgttaatgatggcggaggggaaggaagagagtaaatttagcgaggaaagcgtgaagctgttcgtgggtcaagtgccgaagcgcatggcggaagatgaagtgcttgcaatgttcaaggagttcgctttggttgacgaggtcaacatcatcagagacaaagctagtcgtgcctcccgaggtagtaactagtaaccgttctcaaattcaaattctttgttctctaatgtgcttcagatttgtgtttgtttggtcgcaggttgttgctttgtaatttgtccgtccagggaagaagcggataaggcggtcaatgcttgtcataacaagaaaacgctccctggggcatctagtccgttgcaagtgaagtatgcagatggtgaattggaaagattagaacacaaactctttattggcatgcttccaaagaatatttctg

SEQ ID NO: 498 - DNA, 2505 bp, Glycine max
  Clone ID: PAT_MRT3847_10044C.1
ggctcgagtgttgttgtgccttcatattcgttcaactctcagcagcaacagcgaaccctagacctgaacggctgaacctcgccgtctacggcggcggagctgtttgtccgacgtccttaggagacaagccgtcgtcgggtcggaacttgcgctgtggtcgaagtgttcatagattaagaagagtgatggatgaggcagaggaggagcagcaacgtcgtcgtttaaagcttgaagaggcccttgaaatccaatccctcagacgcatcattagtgcttacctcaactatcctgatgccgcagaagaggatgttagaagatatgagaggtcttataggaagcttccaccttcccataaggctttgttatcccactattctcgaaagtttcaaagattacgctggtgtatctcaatgaatacacatttcatattcggcatgcttcaagcatttgaacctccacttgacatgagccaggacgtagattttagtgaagatccacatcctgaatcgacccaaaaagatcatttagtttctgaagggattagtgcttgttcatgtgagtcagtccctgtgagaataacatgttctgtatctgatcaacatcgttgtgtggaaggtggcaatcatacttgcatatcacaagcacaaatgcattccaatgaggaggtggacattgagagttgccaccagtcaaatactgggagccattctccaagcatgatacatcctaaagaaactagtgaatactgtggaagtcctattgctgattccaatggcaatgtaccggtcacgtcatcacaacaacaatggttggatccatctttaaaattgaatgttcctttagttgatgtagataaggtgcgatgtataataaggaacatagttagggactgggcagctgagggtaaaaaagaacgtgatcagtgctacaatcctatacttgacgagcttaatatgctattccctaatcgcagtaaagatagtccacctgcatgtttagttcctggtgctggacttggtcggctggccctggagatttcatgtttaggatttatcagtcagggaaatgaattttcatactacatgatgatatgctcgagctttattcttaaccattcccaaacggctggcgagtggacaatttatccttggattcacagcaattgcaattcattatcagacagtgatcaacttcgtcctgtttcaataccagatatgcatccagccagtgcaggaattactgaaggtttttccatgtgtggaggtgactttgttgaagtttacagtgattcaagccaagttggtgcatgggatgcagttgtaacttgtttctttatcgatacagctcataatattgttgagtacattgaaataatttcaaaaattttgaaagaagggggagtttggataaatttgggacctctactttatcactttgcagatatgtatggacaggatgatgaaatgtccattgaattgagtttggaagatgttaagagggtcgcattacattatggatttgaattagagaaagaaaggactattgagacaacttacaccgcaaattctagatcaatgatgcaaaatcgttacttttctgcattttggacaatgagaaaaaaaatctgctgcagtgcagcagcaagtgccctgagaatgaggttcaattaagtgccctgagaatgtggttcaattattgtgatataaagtacaaactagctctcttttacttggtcatgccttgtactttttccttgttggagtggggaactttcctgaattcatgaaatcctgacaatttttccatcattgggaagttaatttgcttttggttaacaactgtatatcatgaatgtttttgataatcatatgcttggtcaatagtatatgcattcttggatactgtacgagaaaacttgagtgtggattgaaggttgaacagtcccttgcagttgacacaagcaggagtactattacgtcaaaagatgcacttgtgattttcattcttttgtagttttctttgaattttgaaaacagaaggttttcatattagaagttcacttggcaaggttagaagcaaagtttgatatttgtggaagaagccaggaagctgttacaatagaatttgtgacaagtgaccaactttcacccagtgtttgaataaagaattttaaaatgccatgtaattctaaaattcaaaataaattttgctgtgatttccttctcttgctttctctcgcagttcacattgcaacatcaatctcatgacgaaacttgtgtccttgcaaatcttcaataatagttttgaagttatcttccattaaagcaagttcattcacagttgcttcatgtcactgaccgaccgaggaattgagatggttgaaaaccttgcagaaatcagtgatgatggtggatgggagggatgcttgtagaatggggatacaatgatgaatccctcctcccccatatgcgaacttgccttttagctaccactgttactatattt

SEQ ID NO: 499 - DNA, 1272 bp, Glycine max
  Clone ID: PAT_MRT3847_100450C.1
tgtatttcccctttaacatgctaattaaagtgagaatgtataccaaccatccatcacccgttaagtttacctttagggtatccattgcaccataaacaaatcataaagctatttttgcactcttctgtgggattattcttcaaccacgttcaccaattcatattcaaccagagataggttgttgtcctctttaacttctatttttgcaggatcagttacctcaacacggccccatttgtcaacagccatcctcattgatcccttgaacatgtcaatctttgcattgcgaagaattactgtagctccagccttcatcatatcaacttgttcgttgcgagcggtgaagacgatggttccggtgtcgtcgccgatgaggcactcggcgatgacagtgggtagggcttgtgttgtgatagagtcttacagagaagagtgtgtgtgtgtgataattgggataagctctaatcaatcaatttcaatggcatcatccaattcgactcagcaagaagggaacaaacccgcaaagagaaaacccgtgttcaccaaagtggatcagctcaaacctggaaccaacggtcacacgttggtggctaaggtcttgtcctccgacaccgtcgtacacaaaccgagaccctcttccgcacacaacctcaaacccactgtcatcgccgagtgcctcatcggcgacgacaccggaaccatcgtcttcaccgctcgcaacgaacaagttgatatgatgaaggctggagctacacaaattcttcgcaatgcaaagattgacatgttcaagggatcaatgaggatggctgttgacaaatggggccgtgttgaggtaactgatcctgcagattttgaagttaaagaggacaacaacctatctctggttgaatatgaattggtgaacgtggttgaagaataatcccacagaagagtgcaaaaatagctttatgatttgtttatggtgcaatggataccctaaaggtaaacttaacgggtgatggatggttggtatacattctcactttaattagcctgtatttcccctttaacatgcttgacattttgagttaagtttatgtcacttgaacaatcttgtgtcaagcaatcaatatttgctattatcttcatcagcaactgtattcaatgaacttaagaaaagtataatattttgataatataattatccttatcaaccaaaaaaaaaaaaaaaacaaagaaaaaaaagaaaaaacaaaaaaaaaacaaaaaaaaccttaaaggggccgcccccac

SEQ ID NO: 500 - DNA, 264 bp, Glycine max
  Clone ID: PAT_MRT3847_100451C.1
ctcgagccggttaataccctttttttgggtactattcctagtattccgtctttgtctatcacaggtatgtaggattatatctggtatgactctggtagctgtataaaagtattgattatgtatgagaattatggtgcattgctaatggaaattctgagtaattttgttataccattttaaagatattccttgactcctataaagcatgatctcatttctgaaattctaattcccgcaaggtaggtcctgatgtacatgaaaatg

SEQ ID NO: 501 - DNA, 199 bp, Glycine max
  Clone ID: PAT_MRT3847_100452C.1
ctcacataaacgaagagacgacacttttttttttgcttcatgcacagaacatttttttacctatcggaagagcataagcctgggttttttgttttctctataggaagacaagaaggctgggcttatgagccctttgctattgttacggaaaaggtggggcatataccctatgagcttctaattaacctaaacaagagat

SEQ ID NO: 502 - DNA, 860 bp, Glycine max
  Clone ID: PAT_MRT3847_100453C.1
catttcccacgcgttcgcccacgcgtccgcccacgcgtccgcccacgcgtccgtttccttttctctctttcttccgatccgttaccgcaggaacaaccataactcggatcccgactcgttcttcgagcccgagtcaccaactcatggcgcgggcactcactcaccacctttcactaatcctattcctcatcgtcgccgtcgccggcgacgccactctcctccgcaaccgccaccacggctctcgcccttccatgctccttcccctgtacctctccgcaccgaattcctccacgtcagcgctcgatccccgtcgccagctcaccggatccgagtccaaacgccaccctaacgcacgcatgagactccacgacgatctcctcctcaacgggtattacacgacgcggctttggatcggtactcctccgcagatgtttgctctcattgttgatacggggagcactgttacgtatgttccgtgctccacatgcgaacaatgtggcaggcaccaggatccaaagtttcagccggaatcttcaagcacctatcaacctgtcaaatgtacaattgattgcaactgtgacagtgacaggatgcagtgtgtgtatgagagacagtatgctgaaatgagtacaagcagtggtgttcttggtgaggatctcatatcctttggaaatcagagtgagcttgctccgcagcgtgctgtttttggctgtgaaaatgttgagactggtgatctttatagtcagcatgccgatggcatcatgggtttgggccgcggtgatcttagtatcatggatcaacttgttgacaaaaatgtaattagtgattcattctcactatgctatggtggaatggatgtg

SEQ ID NO: 503 - DNA, 741 bp, Glycine max
  Clone ID: PAT_MRT3847_100454C.1
ccacgcgtccgtttttttctttttaatgtcgtttccaattgttacaatggagttggaaaattttcgccattctagaaatgctactataccttgaactcaagtttaatggtaccgataaagtataaaattaatatataaaatgaagggacacgcacacgcttgtataattatgtgtgaatcatcttgtttttttggctggtaattgatttttgaaaaaaggtagaggcaatggaatgatacccgtattttgtaacaacatccggcatgaattaatttgctaaatgcggtgtcagtgggagcggtggggcgtggcagaccaaaatgattataatggtaagaatgataatgatttcgaaaatgtatttttctatcatttttagcctacgttctttgaaaaatcttaaatcaccttacaaagataaaaaaaagtgcgagtgcagaagagattttttaagtgataaatataaaggtgagtgcagaaaaagttaatgtgagataatcaggttgaataatttgattaatttctagcatcgattaactataaatttgatgaaaacataaccacttatttgtctcgggaactttgcttttggacatggatacaagttgcttggccagcttttctttgtgtaagatggaactcatgtgtgttctttggcctgtgagaaatttcaatttttacataaacaattaaacatcaatttatacttctctttcattggtcttttgacttgattaaaa

SEQ ID NO: 504 - DNA, 832 bp, Glycine max
  unsure (1)..(832): unsure at all n locations
  Clone ID: PAT_MRT3847_100455C.1
ctcgagttttttttttttttttttattataataaaaataacgttagcataaaagaaatgtcttttacaactgattgagaatatgtatgaattatcgtagactcttaatgaataaaaaatgaaaacataaatttcttccacgaagactgcttgaaataacttggatacacaaacaaataaaattgtatccatgggaaacacagatacagcgactttctttgtttgtcctttttccctcattaaagatacacaatcgattgagatattccaaacagtcatgaattggcaaaaccgctcagagacacttctaccacatttcaattgttcttctaaaattaacatgttctcatcaacaatacccagtcacagcaatgttgacctgtaaaagctggcttcctagcccttggctgtgcattatgccctaattcattgccaaagcttgattcctagcccttagctgtgcattatgtaattcatcgtcaaagctggcaaatttcagacggcatagtaccccatctcattgctgacatttgaataatattcattatagtttagataatcccaggaacgagaaagcccaaaattcccatgtttaggtcccttaattaacatatgtgcagttcttttagacttctatcaaacttctgctttatagaaagcacctgngatatattgattttagaaagtttgcctagcaaatcttctggatcacttccagaatcccaagaaccaactngtatacaagaccgnaaatcgagtgcacattgcaaaatgctctcaataatgctgccaactgcctttgtttcatcagacaggaaacatatgcataacga

SEQ ID NO: 505 - DNA, 247 bp, Glycine max
  Clone ID: PAT_MRT3847_100456C.1
acaaattcgagattagactaggttgtttgttctctttgcgctgtcccacaagcaattaagcacagagcacaaagctgtgtggtggtaaagtccaacttggcctagcgaagtttcaagttgctgttgtttgcaggagaaaaatgtggttcgtgtacgtgtgcgacgaggaagagaaggaacttggaaggcaacaagcccctgggtcgtgtccctactgtggagccaaagttgaagccatggatgttga

SEQ ID NO: 506 - DNA, 517 bp, Glycine max
  Clone ID: PAT_MRT3847_100457C.1
gttctggtttacatgccttctgggcagcttgccaaagacgttgaaaagatgtctgatgaagcagccgtcaacttcgctttcatgcagctcaagaagattcttccagatgcttcttcaccggtaaccatactaattttgcttcttattagtttcacttttagccgtgcaagaaaaatgaatgctttcatcactaaaacattgtctaaaatacgtaggcccttatataatttagccttattgcaatttttgtcctagtacaatctgcaattttggtcatctgttttttttttatatataatttttccattttgatctcctttttaaaaattgtgcaatcttaattttccatccaatacttaattggaggtccaatacttaatggaggtgttgacatgctcatgtgtttggtatatgtcaactccacgtgtacttcatctgtaattgctatgtcagcatcttcatcaaggattggatgaccagttaacagatgaaccaaattcaagtaattttagtaata

SEQ ID NO: 507 - DNA, 426 bp, Glycine max
  Clone ID: PAT_MRT3847_100458C.1
aggtcactgctcaagatattgtttgttctcaggtcttcaatcttgttaaaccttctcatttgcatgtatactcttgattcttgctcttcaatgaggaattccattttgttttatatgtaaaatcatttgacagaagagtggtggagttacactgaaagaggaggatgtagctgtttgtaatgtcaaaattgatttgactcgtggaaagcataatcctctggaaaggtattcagcaaagaataatcacgcatgctgaatatagaccttctgtttgttttaacttcctaatatcatatcctaatgtattatttttctatcttctggtgcatatttctgtggcagcatccactttttcaaggtacatcgatgaaccttcctaagtatcttttatcaagatatttcatcaataatcttctattttaaaaa

SEQ ID NO: 508 - DNA, 157 bp, Glycine max
  Clone ID: PAT_MRT3847_100459C.1
cagatttttgctacatacaatagattaactgttcatcatgggcctactgttacgagagcggcacctagtacccatgtgcccattacaaagcgtactatgggcgacgactaatccaactatcatgaacacttcaactaccgaccagcggggcaaagca

SEQ ID NO: 509 - DNA, 987 bp, Glycine max
  Clone ID: PAT_MRT3847_10045C.1
cccacgcgtccgatatgctcaagctttattcttaaccattcccaaactgctggtgagtggacaatttatccttggattcacagcaattgcaattcattatcagacagtgatcaacttcgtcctgtttcaataccagatattcatccagccagtgcaggaattactgagagggtttttccatggtgtggagggtgactattgttgaggtttccagtgattccagccaaattggtgcttgggatgcagttgtaacttgtttctttatcgatactgctcataatattgttgagtacattgaaataatttcaaaaattttgaaagatgggggagtaagttcttgaatccaaaccttcagatagataccatgtttggataaatttgggacctctactttatcactttgcagatatgtatggacaggatgatgaaatgtccattgaattgagtttggaagatgttaagagggttgcatttcattatggatttgaatttgagaatgaaagaactattgagacaacttacaccgcaaattctagatcaatgatgcaaaatcgttactttgctgcattttggacaatgagaaaaaaatctgctgcagtgcagcagcaagtgccctgagaatagctgattcaattattgtgatataaagtacaaattagctctcttttacttggtcatgccttgtacttttccttgttggagtgaggaactttccttaattcatgaaatcctgacaatttttccaacattgggaagttaatttgcttttggttaacaattgcatatcatgaatgtttttgataatcatatgcttgccaaatagtatatgcatatcatgaatgtttttgataatcatatgcttgccagatagtatatgcattattggatactgtacgagaaaacttgagtgtgggttgaaggttgaacagtcccttgctgtgacacaagcaggagcattattatgtcaaagatgcacttgtgattttt

SEQ ID NO: 510 - DNA, 589 bp, Glycine max
  Clone ID: PAT_MRT3847_100460C.1
tccgcacccacgttattagacacacaggggccatatcatacctatccctcattatcacacgtgctatggaggcagagcgtgacactgtacaagaagatcaacttagaagaaaccgagttacgactcagcctcccactcaggggaaacgatacgctcaaaaacactagcagcactggaaagaaggtcttttcggatactgccgtggatatgaagcataacctttcctgaacctcatacaatgcttattgcgacctgactaaagagaagaacacgactgctggtggaccttctgataacgacccatgaaagcctcctgcaaaggcacacgctgcaggttggccaccactgaggcctttcagaaagaacattgttcataggagtcacagcaatgatggcgaataatccgccacaagtagtatctgcaatgctaacactggagcacctatcgagaacgtgagcatgcatggtgctccctatatacgcaaggtggattggaagacgtacaagagctaccaagagtagatggatgcgctggctcatatgctcagttgattcaccattgacaagtgtggatcccattgcatgaaag

SEQ ID NO: 511 - DNA, 495 bp, Glycine max
  Clone ID: PAT_MRT3847_100461C.1
ctcttctcattatcttattctttatttcccatcctttaatttcctttgaagcccgaaaccagaacccaaaaaccaggaggatgaaacctcaaaaagcaaaaacaaaggggaagggagttaaagcccaaacaaacaaagggggggggcggcaacaaaggctgggcaaatttttcacactaaaaagccggggggcttgaaggcaaaaaagcggaggcccgggactggggaaacgggggcaaatccgaggaaacggaggaagccggggggggaggcagcctaagcctctggaagcccctccaacaccggagaagcatcacggcaaccaaacaaaggcagcttccacagggcccaggagcgtccatcgtagaacccgggggacccgtggggctcacggaacacaaaaccgggccccaactcgaattccaggcaaggaacccctcccttccaaaaaaggaattctacttccttggccaatggagcatcatcaaggccggg

SEQ ID NO: 512 - DNA, 1087 bp, Glycine max
  Clone ID: PAT_MRT3847_100462C.1
cgcgggccatagggctgccggtcgtggctccactagggctagcgggtcgtcgtggtccccggacggtgacggggaggagggtggggcaggtccctggtctcccttcctcgcggggcctgcgggctgccactcctgcctcgagcagggggagtctgtcgtcgaggtccatgcatggggaccgggtggctgtgttcgcgcgtcccgggccgcccacccactccgggcctgcgaacccgaggaccagctccgagcagcctgaatctgatgacaatgttcaagcaatggagtctgatgacaatgtccaagcaatggaatctgatgacaacgaacaagctgcagaatctgatgacaatggtcaagctgtggaatatgatcaaggaaactgggaaataggttttaatggtgcccctagcagatggagtagggatttggttggaatgagtgatgatgatgtggaagcttctgaagacgatgatgacaatgacaatgtcattggcattgaaaacaatggagaggaggattcagaggcagatgctatgagtgaggagggttcagatggtacagcaaacagaattgtaaatgaagaaagctcagagtcggatgtctctgaagattcttctgattagaacattgtttttaaagggaaaggatcctctacattttcttttttctctatttcttccatttcacaagtttttggaaaaataaataaaaaaacgcagatgatacacactttatgaagagtatcattattttctcaaaaacttaataattgaagaaatggatagaaaaggaaacaaacaggatcttttcttgttttttaaggctgcgttacatttttccccctatattgcagccagctttacaaggtacctgagctccaaagtcacggcaaggcttcatagttcataatagttttatggttgaatagactaatagtgtataatagatatataaacccgcccattgcgtggattcttaagaaaatttataaaaaaagttaatattattatacaatcaataattcaagaaaaaaaaaaaaaaaaaaaaaaactcaagactagtctctctcctcgtgccgaattcc

SEQ ID NO: 513 - DNA, 366 bp, Glycine max
  unsure (1)..(366): unsure at all n locations
  Clone ID: PAT_MRT3847_100463C.1
ctaagaacacacatccaacactcaatgcacctgaaggaatggcccatactccaatggaagacctagaggtgggggatcctcacacgattgatggtataccatctgatgctaacaccatgctagaggttttgttnataggcaacactgtgatgaatggatatccgaaggacttgaaagcnncacaagagacatttaaaggtcgatagttttatactggtgatttgggagtaaagcatactgatggatacatagagcttaaagatcgctcgaaagacatcattatttcttgtggagaaaatattagcacaattgccttggaaggagttatttttaggtatacagcagattttgaagcaactagtggtg

SEQ ID NO: 514 - DNA, 262 bp, Glycine max
  Clone ID: PAT_MRT3847_100464C.1
gtttctctcaaggatgctgccaactccactgatgaatcagtgtttcatccgcttccaactttgtttcggttgctgggtttaaacccttttaagaaggcggagttaactcctggtgatttctattccaacaaacgtcctctctgtcaaagggtcccattaccacgtaccaagtctgagcatccttctcaaaatggtcaggagaatgacaatgaggattccatttctgaaattgatgttgagaacattgttggtgttggatcga

SEQ ID NO: 515 - DNA, 232 bp, Glycine max
  Clone ID: PAT_MRT3847_100465C.1
ggctcgagctctagccgattttgctcgtttttgagctcgtttttttcagcgccggcgttatcttggccgttctaccaatcctaaatttgattacttgggtcaacgaattattgtcatttttaattatggcaactagcacttaatgtgaaactaatcgtgaaattggaatcttctctaatacttaccaaagcctactgatcggttgccattggaggtactgaaagcttctact

SEQ ID NO: 516 - DNA, 278 bp, Glycine max
  Clone ID: PAT_MRT3847_100466C.1
gcgtacggcaggaagcaagctcattctagagttaaataaatttcttcagcctcctccaaggctcgctgttcctcatccttggctggcagggccctcaagctgggcccatcatcccccgaagtcgggagggtcagcatgaggaagaccgtcaccaagcaggccttcttcggaagcccatggttcggcccagaccgcgtcaagtacttgggcccattctttggcgagcccccgtcctacctcactggcgagttcccaggtgactactgctgggacactgc

SEQ ID NO: 517 - DNA, 478 bp, Glycine max
  Clone ID: PAT_MRT3847_100467C.1
acgaggccaaaaggcctttggaacatctcctaccgtgaaatttgttgttgatggcgcagaagcagggtctctgagcgcctgtggtcctccctctttccttaaggtatatgaggctggacaccttgtccctatggatcaaccaaaagctgcacttcagatgttgaaaaactggatgggagggagtttgacctaacaaaaggagtttagagataattaatttctctcataatttatacattcatcttaaaaccaaaaccataatcaaaatacatgaatagtgatcactattattttgtgtacctgccattggggataatatttggagggtggattttatattttttctgaacctttctgaaatttctgaccttcatagtcattattcgtgttaactatttgtacaatatgtcccgtgatttgaaatatatatatttttctctgtgtgtaaaaaaaaaaaaaaaaaaaaaaaaaaaaaaaa

SEQ ID NO: 518 - DNA, 278 bp, Glycine max
  unsure (1)..(278): unsure at all n locations
  Clone ID: PAT_MRT3847_100468C.1
ganttcgcngangannnggctacattanaggcatcgtaaaggacatcattcatgaccctggccgcggctctcccctcgcganantantctttcgtnatccctatcgattcaagnnncgnacagagctgttcatcgccgnanagggaatccacactngacagtttgtgtactncgncaaganggcccagctgaatatttgcaatnngntgcncgtnggcancatncctganggtactatcgtgtgttgtctggaggagangcctgcggacagggcaagc

SEQ ID NO: 519 - DNA, 310 bp, Glycine max
  unsure (1)..(310): unsure at all n locations
  Clone ID: PAT_MRT3847_100469C.1
nnnncctttttttttttttttttttttttttttggaaccccctctcgaatactactactcatcattccctctatatattttctttggatccaacacaccacatggcaacatttttgttccttatcacaaaccttacaataattgaaatcacatgcaatcctaattacaaaaaacctatccccaaccccccgaaatcatatcataacaagagaaaatggtaaacaaaaaaaaaaaaaaagagttggtttaatgtggtggggatagtattacactgacataaaaatgctacatgaacctcccggagggaaag

SEQ ID NO: 520 - DNA, 464 bp, Glycine max
  unsure (1)..(464): unsure at all n locations
  Clone ID: PAT_MRT3847_10046C.1
tgggtaccctctaatttacaatattaaaacagctgtacagactattcatgataccggtgcaccacatttattgagtgtatggtggaaattaggaagagaaataaatcaataaactaatatatgtaataaagagaggaataagaagaaaaattgggtgtatgtttagcatttttctttgttgaggttacgtgcttcgttttatttattttcaaaaaaactaataattccttgttatcttttagagagagctggtaaaaaaaaaagatctttttttttccaactaaacaaacatgtcatgttttgtgtaaactcagttttttcatggagaatagcacgtaagaacttatgagagaaggtcaaaactcaaaaggggtagaaagaaggggaaaaccggaaaagtgtgactttatttataaagtangtaatggcccatccgtccccacactagcctcaatattttttta

SEQ ID NO: 521 - DNA, 1219 bp, Glycine max
  Clone ID: PAT_MRT3847_100470C.1
ccacggacctcaatcacggcgtggtgaatgctgatgataatagattctcctgaacttgaagtacattgttgtcgtgctgctgatccaacgtttgcagaggtttctgttgtgttcacagttcacacacaaatggaactgaaactacttctaataacggttttaatgatggtgtcactttctgcaactgcagcagctgattacattcgacctcagcctcgaaaaaccttccatctcccatggcattctaaaccctcctcttaccctcaacaggtacacatttctttagcaggagaacagcacatgagagttacctggattactgatgataactctgcaccttcaattgtagaatatggaacatcaccagggcgatatgactctgtagctgaaggagaaaccacctcttacagttatctgttgtatagctcaggaaagatacaccatactgtaattgggcctttagagcataattctgtgtactattaccgatgtggtggacaaggtcctcagttccagctcagaactcctccagctcaacttccaatcacttttgccgtggctggtgatttgggtcaaaccggatggactaaatcaacattggatcacattgaccaatgtaaatataatgttcacctgcttccgggagacctttcatatgctgattatatccagcatcgctgggactcgtttggtaggctagtgcagccacttgctagtgctagaccatggatggtaacacaaggaaaccatgaagtagagagcatacctttgttaaaggatgggcttttgtcctataattccagatggaaaatgccatttgaggaaagcggatcaaattcaaatctctattattcgtttgaagttgcaggtgttcacattatcatgcttgggtcctatgcagattatgatgagtactctgaacaatatggatggctaaaggaagatctgtcaaaggtggatagggaaaggacaccttggttgattgtgttatttcatgtaccatggtataatagtaacacagctcatcaaggtgaaggggctgatatgatggcatctatggagccattgctttatgctgctagcgccgatttagttcttgccggtcatgtgcatgcttatgaacgctcaaaacgtgtatacaataaaagacttgatccttgtggttcagtccatataaccatcggtgatggaggaaacaaagaaggtttagctcctaagt

SEQ ID NO: 522 - DNA, 732 bp, Glycine max
  Clone ID: PAT_MRT3847_100471C.1
ctcgagccgtagagttcgtgagggtgactcttgtttttttcgatctgataggagaatgaatctttctttctggcgtcatttttacttgttccctctttctccattacacagacttagagttcgtggtggtgactctgatttgagaagaagaagaagaagaaaggatgttgcgaagtcgattcttatggttcacgttcggattcgcatccacatacgctgtgctttcccaagttgttttgaaggacctcatgcttgagcgtcacgcgctcacttctcacatggaacgcgattttcgcattctcgaagacagactctccaacatcgaagaatcctcttcttctgttccgctcccgatcgatcaggtcgaaggtgtttctggtccagcgaaatgatttctactaggttctatgggatttatgcttgattcaaaaggtttgtagaggaaatgaccataataaaacagacgatgaggcaacgttaaaattcttacctgttttttttttttcacctgggagattaaccaattgtgaggaaaaaatgaaaaatcaaattggagtttactgtcatgttattaaatatcatgcttttgttgtacagctccaggagcttgaacttttaactctgttttattattgttagcatattttgatgaaatctgatccacctacaatgaaaaatgaagggaccaatcctttgggttctggcaactgcagggtggtgcaattgttcaag

SEQ ID NO: 523 - DNA, 543 bp, Glycine max
  Clone ID: PAT_MRT3847_100472C.1
cggcctttttcatcgccatgcttgctacagctctggtacattctacccttcacctggaccatgttcgtgtcttccccaatggagagtggagggcctcctgtacagtcctacccggtatttcgtgagaaattcaccacctactacgcttgtccctcctcacgatggcgtggattccaggctcttcacccaggaagaggcatgtaccatgatgtccgccgccggttaccatattactggagcgatatcaccgccgcttttacctaccggaccgttgctagtaccgtccgcatgtactttgtcaagcagtttccctccccatcttcttgtcctcctacagtgcgtccactaaaaccatccagcctgctttctgcaatagcctacactttagacatgttccggcgcacaggaaactgctatgggataaacgagtccctcttttcgtcagcactggccgcaacggtgttcagcgtcttggccgccagccattaactatcgttggagtaacggggctgatctcgctcttcaactacacaatgtacgata

SEQ ID NO: 524 - DNA, 217 bp, Glycine max
  Clone ID: PAT_MRT3847_100473C.1
tttttaagcaataaaaagaaatcaattgttcatgaatctacaggtttgcagagagcatgacagtaaagtcaaaaccagatgaaaaagcttttccttaggcaatatcaactgttttggaataaaaattttaattagggatcttcatgtgggagtaattcaattattaaaacctggttggtcaaactttaaaatccgatcccttttcaactaatattta

SEQ ID NO: 525 - DNA, 478 bp, Glycine max
  Clone ID: PAT_MRT3847_100474C.1
gccacgcgtccgccctgttggatctgtatattatctgacgtggtgaagatgaatgatgcactctagaagaaggaccagaactcaaccttatcacttgtttggatgcggggtcatcatccgataatgcaaattcttcatcagaaacaacaacaacaacaacaacaaaccctcttggtaattctgatgctactgagcctagagtgttctcttgcaactactgccacagaaagttctacagttcacaagcactaggtggccaccaaaatgcacacaagagagagaggtcaattgcaaagagaggacacaggtttggatctcagattatggcctttggccttccccttttgcatcataacaacaacaacaacaacaacaatcgttttgcaagcatggcttctctacctctttatcatagcaatagaggaactcttggaattcaggcacactccttgatccagaagccttcttcttcttctca

SEQ ID NO: 526 - DNA, 432 bp, Glycine max
  Clone ID: PAT_MRT3847_100475C.1
gcgagattcgggtccagggtggtgtgtttttttctttcttttctctctctctctctctgtgagatggggccgtgtgcttagagcggcgtcttctgagctttgagtcttgagctagatatctagatacagaattgggaatggggtcaaatgggggcctacgtgctaacacctgggcaagggggtgcgtgcgggggctctcctgcgagtggggtatcctcagatcctctttctttcccagggtttgggttgcggcataatcaacaaaaatggggtgtgccctcaaattcagattttgggatcagggctgaggcacctttcaaagagttcaatcaggcctctcaaacccaggctccggttccttgcgactcaaacaatgagagtgagatccctgggcaaggaaactgtgctctgagtgggtcatcacaaaccaat

SEQ ID NO: 527 - DNA, 389 bp, Glycine max
  unsure (1)..(389): unsure at all n locations
  Clone ID: PAT_MRT3847_100476C.1
agctcggaaattggcccgcgctgttccaaaccaaacgttaaaaccccacaggccccccaaaaacaaanggtcccttttacaacantttcggcactctcacccgggtcacagatttgagagctctttccccacaaagaggaccacggaccccacaccagcgcagtgcaaaggccacggctaaggctcacagggcactgctcctggcacgccgtggcaaacccaggatcacaactcaggctatggcaacagattctgcttaacactcggatggaaggaattatggaccggggaggaccaagagctcacagagccctaccgaatgcacaagaagaagtagccagacacaggaccacaagccctgcaaggtcatccgcaaacaatgccgcaaa

SEQ ID NO: 528 - DNA, 113 bp, Glycine max
  Clone ID: PAT_MRT3847_100477C.1
caatacaatttgtttttccgcacaattgttataagaccgtcaataggcaagaggatgtgaacgacgtttggcttagaatccttatgttaaaaacatgatatatcagaacatgt

SEQ ID NO: 529 - DNA, 351 bp, Glycine max
  Clone ID: PAT_MRT3847_100478C.1
gtgaaactcacatgggtctgatgaagttcgaaaatttgcacgttacactccaatttccatttttgttattggaggatgtgcctttgacacctgtatcactctttatggacagcccttgtgcttaatctatgccatgagccttgccaaggcaagaataaagacgtgctattttagcttgaactcatgaggaactgttacggacaccctggttgcaatatgtaggcattgctcgctgccaaggacaaaagcttgacatgcaaacttggccttactgcatgaagaactggcctaaagccttggtgcacactcagttgcccttgatacaacctaccctccattgacttttcaata

SEQ ID NO: 530 - DNA, 350 bp, Glycine max
  unsure (1)..(350): unsure at all n locations
  Clone ID: PAT_MRT3847_100479C.1
gaaaatgccaaacaatctagcatagcatgaaaacattcattgctcagtcgtcatacttctacaactaacatatatatgtcgaaacaaaaaagtctaacatgtgttgaatctcaatatccaatagtattatttaccagaagctgcagcgaactcaaaactaaccacgatcacctgcctccaaacctgtcgattctccggcggcgcaactcatccaaaggaagcccatcagaacgggagctcctctgaaaagaggacactccattgacaaccctaatcgtnccacacatctcacacactctcagggaaccaatgntgttgtcataggtacacgtctggcatctncacgccct

SEQ ID NO: 531 - DNA, 852 bp, Glycine max
  Clone ID: PAT_MRT3847_10047C.1
gttgttgtaagcacatcatccccacacgatttccacaagctgttatcgttatctatcacaagaacaagcagcattagcaaccaagcaagagaatggcgacgacagcagccttgtgcggcactatgatgagcagctccttcctgaggagaaaagcagtggtcacaagcctgaaggcattccccaatgctaacgcagtgtttggtgtaaagggtggacgtggaggtggtgtgactgccatggctagcttcaaggtgaagctgataaccccagagggagagaaagaatttgaatgcccagatgatgtatacattcttgaccaggcagaggaggaagggcttgagcttccctactcatgcagggctggttcttgctctgtgtgtgctggcaaagttgtatctggcaaagttgacaattcagatgccaccttccttgaggatgaacaattagaagcaggatttactctcacctgtgttgcttaccccacctcagacgttgtcattgaaacccacaaggaggaagacctctctgctgcttaactttcttcctttctcaccaacatattatgcattcatgagcattcattacttccacctgtagtagcaactgaacttcattgttgtattgtaactctataataatctttccttactggttttgcacacaatggttcaataacaactctcattttccttgatactatgtttaattttgtgtacgtcgtgctattttctcgggatatataggcgttacccttctttatcgcctgccagcacatccccctttcgccagctggcgtaataaaaaaaaaaaaaaaaaaaaaaaaaaaaaaaaaaaaaaaaaaaaaaaaaaaaa

SEQ ID NO: 532 - DNA, 387 bp, Glycine max
  Clone ID: PAT_MRT3847_100480C.1
tttgctgatttatgtgcttgcataggtgcgtgattatgttcgtgggtatgtgcatgcttatctgcttgcatcgacgtgcgacgatgatcgacgggttacccgggaataaacgtctttacagttaccggccctaccggtagtgtcaatacccgccgggtcggtgtatctacgcggagtggtctacgagttttgacgcgatacccgggttcgtcggtgcgagtaggattcggattaattatcggactcatcgcatttcattctctactatcagcggaactgtcacatcaggagatgaagaagctcccactagttatatttatgagtagtcctttattatcgatcatcatcagagaagttacgtccatgcatgtgcgtacgtgatgctac

SEQ ID NO: 533 - DNA, 110 bp, Glycine max
  Clone ID: PAT_MRT3847_100481C.1
ccggaaaaggttttaacaaaaattggagggtgattcaataatttgcatgagctgtttctaaaatccttcccacctccaaaatagaatcctctaacctccaatagcagggt

SEQ ID NO: 534 - DNA, 289 bp, Glycine max
  Clone ID: PAT_MRT3847_100482C.1
gatggattactaaaaactttttcatttataaatttatttttttgcttatgaaaaggatgtagttttcaactgtaaggttcttgcagccgcaaacccagcaaacagaatgcattgatcatgaaggaaatcgctacatctataagtgagaagaaaaattcttgaatgactacattgaaatacaacagggcattgagccaaacctcaaaaagacagaccgatagagtttcacaaataaagaatgtaatgatctggggggattactaatcaaccaagtatcctgatgataatc

SEQ ID NO: 535 - DNA, 423 bp, Glycine max
  Clone ID: PAT_MRT3847_100483C.1
tgttttttttttttttttttttttttttttggtttttcaaaagttggtcctttgcaaatcttttttttattagcggaatggtaattgcaaaggaaaatttttttttaccttccatttttggaaaaaaaaaaaaggaaaaaatttccaggaaaaattccctcataaaggaaagaaaaaaaatgggggggaacaacaaaaaaaaaagaaagaaaaaccatgggtttgggtaaaaaaacaattttttaaaaccttaattaaaaaaaaataaaaaaaaccccaaggccaacctaagcaaaaaaaattttcgtagattcccatggccatagaagcccagtaaaatttgacaaaaaggcacgggggggaaacaccctttaggtccgttaaggcctcctttggcgaccatattaaatcttttgggggtgg

SEQ ID NO: 536 - DNA, 397 bp, Glycine max
  Clone ID: PAT_MRT3847_100484C.1
ggctcgaggaagcctatcgccgagacctcactagccctccatgcccaaatatacgacgggcgagagtgccggcaccgaacaagagctctctgtgtccaccgatgctctctccgtcgcttgaacgagctgggctgcctgcgccggatccgtggagaaggccagtacacgcctccccgggatccgggaaggcgtcggcgacgtccttgacagccgagcgcacgtaatcttctacccctgcttcgttaacgtggagactattctcgaggcggtctaggacgctgtgttcgaagccgagtgactcacagacgacaacgaatacggtcaagtgtgccgcacccagatcaaggaatgagctgcagctcctgctcctgcactctggaatcacgagtgcaagccc

SEQ ID NO: 537 - DNA, 454 bp, Glycine max
  Clone ID: PAT_MRT3847_100485C.1
acacattaataaatccatatattatctacatggggttcaacattacttattaccacttttaaatcctcttaagggggtttattcggcctgggccagccccaaaaaacattatggtaacgcactgcaaggaacattatttccctgcttgatcattattccctatgactggaaatgcatgggacaaaggccccattgcaggtgaggcctcctgataagacactaagacctatactagaccatacatttggcattttccatctcttaaaggacattatgcgtttctaggaaagtcatctttgacccatacatgactagcttacaatgatatggggatctgcggatacttcacccagagatttccgctcgtcttacaaaattgtttagcttttctactgcattacacggatgataaggtgaaccttcacaagaggaggaagccctttttaccttacaa

SEQ ID NO: 538 - DNA, 501 bp, Glycine max
  Clone ID: PAT_MRT3847_100486C.1
aaacaacacataaaaaacttttaattaccatatattgaaacataacagtccaaagtttaattaactctacgcaatacacattcacccactcatttaaactaataataatgtaaacttacacgagcaaatgtagacacacaatcatgatatttttatcatccatagtggctacgatctgaaaaccaatgcacacaaagcttaccccttgacaaatttattgatattagtgaattctttgatggattaattctttcactcaagaaggtttgaacattatagactccagccttaacaatattcaggcaggaaacaatatggggcctggcaggaaaaaatcatttatatgcttttggaccagataatcgtatagcgatactatagctgttccctttatgttgttcacagcttattttgcagaagaataactagttcaattgctcaacataacattcttagaatggaggcaatattgatcactatgtccagtgtgaagccctgaca

SEQ ID NO: 539 - DNA, 498 bp, Glycine max
  unsure (1)..(498): unsure at all n locations
  Clone ID: PAT_MRT3847_100487C.1
gcatacgnaagcagggaagtcgagtaagagctcgagcgggtccagccaatatagcggataaggacagatgtaaatatacgacaaattgtgcatgaaccatagtgcactactatatacgtgagtgcactactaaggagacatacacggaaaagagtgagattacaataaaaatactgattcattttgtaaaagaaaacagtgagatttacttcttcatacagcaagcaagagtgtattcaatgttgacaagcatctacattaatcatttttattggtcatgcttagtcaaagtcataggttttctcacttgttaatacagtcagacctctttaacagacagagcatttttattgtggaaaattgtcaatgcaagcaatcacaccagcatatatcaatttgagagaggtttactaagaagtgagaacaggggtaatctattcagttgcctgatacaattatgactagaatcttttaaaatttatattaaagaagttccac

SEQ ID NO: 540 - DNA, 717 bp, Glycine max
  Clone ID: PAT_MRT3847_100488C.1
caaagttcaaaagaagagacccattaagcgcaaatgaaggaaagtgttactgaaaaatgttttagattatcttaaggctgatacttacatgtatgcccctctcctctctcctccaacctctgattttccctcacccaacgccttcccttcctcagctaaaggggtggaatataaaaaaccagtaacagagaagcagtggtttgggaaacaagttggaaagtatctcaaatatgatggttatatgtatgatccgctgcttcgtcttccccattcatctctagaacctttgcaggactgtggaatgatgaggatggatgattcagctagaacgttgagaatgaaagttaaccaacgaactaatcatttaggaaatgcaaaccaaagttctgaaagtcatcttcctcaaacagacctctctgatcagcatattgggggacacacggaaactgtgaagcatactgtgtaccaaagttgtcgctcaacttctgccacaagaattgttaccctcaactcgcagccgagagctcatagttgattgaaacttttggatatagctgtaaacagagaagataataacctatacaggttgtacttgtaggtgtacacattatgtgtgtagaattttactagtaatgtataccgtcttcgttttttgatagaatatgctagtgccatattgtttgtattataactttgacatgcatttgttttgagttt

SEQ ID NO: 541 - DNA, 557 bp, Glycine max
  Clone ID: PAT_MRT3847_100489C.1
cgtaaaagttctgcataacagatcataacaggaagcatacaatgatagatggttcttcctttatcttgtaaagctggtctattttatactcactcgttattgttggttggggttatatagaagataaaatgtcaccaaatataatgagaaatctgtcttaaaataaagattgaaaagaagctttgaccttggtcttaaagttactagcagattatatcatgtacataggatgtgtcgttggtggaactctacacacacatctagggaggaggcatgctctgttgttgattgcaatagaaacttgatttcttagttactcaagatattttaaaaatgtgaggaattctcaactgaagtagttgtagaaataatgacagttttgatactatagtattaatcatcaaatagaccaggaaaataatgctcaggtgttgttgtagttatctccttatgtgtgttgttggagtcatattggtcatcttgtaataagaaattatagaaataaaacaaaagatgaaggtagaagagttgaaattagcacaaaggaattaaaacag

SEQ ID NO: 542 - DNA, 355 bp, Glycine max
  Clone ID: PAT_MRT3847_10048C.1
acgttgctgatgcgtgggcggacgcgtgggcgacccacgcgggtgaaggtttaattatgcatacctcctggacctcgcacggagctaggtacagaagacaacggatccttgagtctcgagatcttgtcagatgggaacgaaatcgcaactgtcaccgagatggttttgtgcgttatgggaagggaaattactgcaatacaggatatggaaaagaagccacatggtgccatatcggcttcaaatggatagttaagagacagaatgcctgtgtctaccaaaactgtacaacagattcaagcaggggatcatgaaacaaaagaatctggtgacgataattaagctgagaaacatgact

SEQ ID NO: 543 - DNA, 428 bp, Glycine max
  Clone ID: PAT_MRT3847_100490C.1
aactggcattccatgttctgtctactcctacttggactcaattttagaattcgctcctctccaattatcatttaagacttagctattgtctcaaaagactctttcaagatcttggaatccaattgggattcaattgaactggttttggtttgatataaacgatggaacataatctttactctgttttttttcctcacggtgcccgtttttccttcttggggcccctgttttcttctttggggctcctagtgtgaaaacattaaataaacccattaaataataaatactaaatgactttgtattttaatataataataaatacttttctctgaataaaaagtttttattttttacttctcatgatgtgccaatgggttgatctaatgcattgttatagggccaaattttaactgtaatatgtattacta

SEQ ID NO: 544 - DNA, 466 bp, Glycine max
  Clone ID: PAT_MRT3847_100491C.1
gatttatttctatcggacggccgaccgttttttttttttttttttttttgaatatctaactgatttttttttttttatttttgttttttgctgtttgttctaactttgtttcttctaaaaaaaaaacattgctgaatgaatattacaagccggactgttactaaagggccccaaatgcccacaaattttttgaattttttgactaaaaaaaaagggaggcatgactgacacccaccatggacctggataaatgcgttgccatgggtggggggcagaaaaagacccctttcttgaaaggggggtggggtagaaccccaaacagaggggggcaggatacacaacacgagcagtgggaaacgtggaaccctaaaattgcggcttgccctcttggcaaagggccctgcttggtggaatcctttgcatcccaaaaacctctttgtaaatgggggggggggggggtatctaa

SEQ ID NO: 545 - DNA, 283 bp, Glycine max
  Clone ID: PAT_MRT3847_100492C.1
aaattaactttgctaacaagaacacccataactcgcctaggttaaatcgaccacaggcgaggcaacgcaacgaggaagaaccaggaacatagcaggcgcaagcaacgccaagacccgatcctaaaccgctacgagaaggacatcaacgagaacatcccacagaaggccaatgaccaggatgatgctgacgacaaccatcacacggacacgaccatgcatgagaagaaccaaacacataaggacgaacgaaggaaaacacaaagacgactaaaaagaaggacac

SEQ ID NO: 546 - DNA, 177 bp, Glycine max
  Clone ID: PAT_MRT3847_100493C.1
gacaatcaattaccatttattactagacacataaccctcgaaaaaggctaagttcacaaggtgatcattacatgagccctattcttcatatacacatttgttagggagaaaaaacaattttggacgggatttaatccgtgccatgataatctagcccccaagataaggagtaagctg

SEQ ID NO: 547 - DNA, 1372 bp, Glycine max
  unsure (1)..(1372): unsure at all n locations
  Clone ID: PAT_MRT3847_100494C.1
tcgaggtcgnnagccgaatcggcttcgagggccttgttattanccagattgctnngcctgcctnngcttcttnnntagcaaattgttgtgatgtggctttnnattcacaacatagagtctgagcatanntcagttgtgttatatttaatttgaatttttnntttgttgtgagaaatttttgcaccacccaatgcttnntattatattggnngttgcagcttagacacccatttgtttctatttaatatctttcaattagtttaaaanagatacctaattatgcatnttttaatttttnntgaatgtgccactggattggatttgacttgtgatgctgcatcactgtttaattttcaaaaataggaggcgtccggtccgcacattttggggtttagggtttttctctctcctctgcaatatccaatttctccctcactctctctccacaatccagtgacaatgatgtacaatgatcagcagcatcagcaccagcagcaccagtaccagcaacaacagcagcagcagcagcagcctttccaccagccgccgggtccggagttccaccgcggaccgccgccgccgtcgcatccgccgccgatgatgcggcaaggctccgcctcgtcgacgaacctcgcccccgagtttcaccatcccggccccggagggcccccgcctcctcattacgatgctcacagtgatagccatggtgcaaaaagaatacgaaagcttactcaaaggaaagctgttgattatacaagcacagttgtgcgttatatgcagattcgtatgtcgcagcgggattcaagggataggacagtactgcaacccaccccggcagcagcaattgatatgttagcagttggcacagacaatccatccacaagcgcttaaatttcatacatctctaaataaaaatcgttgcccaattaatcgtgttctttggactccaacaggccggcgacttattactggttcacagactggggaattcactctttggaatggacaatcttttaattttgaaatgattcttcaggcgcatgatcaagcaatcagatccatggtctggagtcataatgacaactggatggtctctggtgatgatggaggcgcaataaagtattggcagaacaacatgaacaatgttaaagccaacaaatctgctcataaagaatcagtccgtgacttaagtttctgtaggacagatttgaagttctgctcgtgctctgatgataccacagttaaagtttgggattttgcacgctgtcaagaagagtgttcattatctggccatggttgggatgtgaagagtgttgactggcatcctacaaaatctctattagtatcaggtgggaaggacaatctagtgaag

SEQ ID NO: 548 - DNA, 288 bp, Glycine max
  Clone ID: PAT_MRT3847_100495C.1
gattgtctgaaatagtgaactttgctttcaaataaaacggaacatttttttgcaaagccagtccatcatgacagagctcagatggcataaccagaaaacgaagacaagatgtggatggaccaacacttaacacagctagatagagggcctgataaattcatataaagccttgcgtgaaaaacctacacagcaggccaaattcccctttatgatgaccaacgaaggaccgacgactagtataataaactatttgggggctagggcaaccactaatttttgctatggctc

SEQ ID NO: 549 - DNA, 1225 bp, Glycine max
  unsure (1)..(1225): unsure at all n locations
  Clone ID: PAT_MRT3847_100496C.1
ggaggaattccatgcaatgtaaagagataggctatattcatagctagtcgtgtacgcaaaactcatatccatggcggggcaatcgcggaagtggatgattctggtggccaccatatggattcaggcattcaccggcaccaatttcgacttctccgagtactcatcttccttgaagtcccacctcaacatctctcagctgcaactcaactacctcgccaccgccagcgacatgggcaaggtcttcggctggtcctccggcctagctctcatgtacttacctctctccctcgtcttgttcatcgcctcctccattggattcatcgcctacggcctccagtggcttgccatcaaaaatctcatcaccttgccttattatctgttctttcttctgtgtctgttgagtggctgtagcatctgttggttcaacacagtatgttttgttctctgcattaggaatttcccagttaacagaccccttgcattatcactcactgtgagtttcaatggtgtgagtgcagcactctacacacttgctgcgaattcaatagacccttcatctgatgcattgtacctgctcttgaatgcccttgttccccttctcacttcccttgcagcactagtcccaattcttctccaaccccctttagactctctcaatagatctccagaagcttctcgcaggaactcagtgatatttctagtactcaacttcctagccattttcactggcatttacctcctcctctttggctcatcaacttctgatgaatccacgtcgaggctctactttggtggtgccattttgctcctcatttccccactatgtatccctggaactatatatgctcgagattggtttcaccatgccatccattccagctttcggatggaaggttccggcttcattcttgttcatgttgatgatcttgagcttcataaggaactcctcacatgtcaaaacagcgctctaagtctcagtaatggggacagtcatggcctgctgagtgagaatggatccatttatgtaattagtcagagtgcaaaatctagtgatttgtgttgtgacaagatgtttggccaggatcagttggcaatgctaggtgaagagcacactgctgcagtggttggtccgaggttggatttctggctctattatggtacatacttctgtgaggcacaattggacttgtnacagcaataattggggcagatagctcaatcttta

SEQ ID NO: 550 - DNA, 405 bp, Glycine max
  Clone ID: PAT_MRT3847_100497C.1
gggtaactaacaaaaaaatggtgtcattacaagcctaagcattgatagctgttttgggttgccctacccatgaaagtttgttttaacataaggtgcccgttagtatacatctgagtctggcccgggggtaaacctaacagattccaactaaacaagccaacaaattctacatcaacactacaatgagtttcatgccacaaaaaaatttggattgggcacttccatgctgaaacaacaattaagtttttggtttcccacccaaaatgaaaaccccccatttcctcctttattttgaatttggcacaggattgcttaataaagagtttcctaattggttttctcacatttgggctcattggggatggagtgaagccagccattggcaaccttgccctccatttttcg

SEQ ID NO: 551 - DNA, 436 bp, Glycine max
  unsure (1)..(436): unsure at all n locations
  Clone ID: PAT_MRT3847_100498C.1
atctgcttctgggagcaacttgtaggaggatttaatagatgttttcacttcaaattgttaatgcactcaggatgatgagtccttgacagttctttcctgcaaacatctgtaccatcctgagtgcattaacaattggttgaaaataaacaaggtttgcccagtttgtagtactgaggtatctgcttctgggagcaacttgtaggaggatttaatagatgttttcacttcaaattgaagaaaatttatgctaagttgggggctaatatcccttgttctaatagcatttccacattagggagatagtctgtgctattgtttccagctccttcattttaagtgtaacatgtaacttttggaacctgctctctagattgtctttattttaatggaaaatgaatggcatttaagtggccannnnnnanannnannnnnnnaa

SEQ ID NO: 552 - DNA, 1408 bp, Glycine max
  Clone ID: PAT_MRT3847_100499C.1
tacggagaagacgacagaaggcgctcttcaattgattcgatgctctaatctatctcttattcttcttctttaaaatttcatcttcaattcaattctctctctgtcaccgttcctcattcgcatggagaacgacaccgccgccgccgttaacaataacaccaccgccaccgccaccgctaaagcaggttctggaggagtgaaatcgaacaaccataacctagaagaggagcattccaatttgaatggcgaggagcagatggcagaacaagtggaggcagaagaagaagaagaagaagaagaagatcgagaagccgatgatggtgaaggagaagaaactggatctgctgtgcccaacccgcgccaaccttccagaacccctttcactaatctcagccaggtcgatgctgacctcgctctcgctcgaacccttcaggaacaggaaagggcatatatgatgctgagaatgaataatgatggaagtgattatggaagttgggaaggcggaagctatttgcatgatgaaggagatgattttgatgatctacatgatggcactgatgtggatgaggatgaagatgatgatgatgatgaagatgatgatgatgaggaggatgaggatgaagatgcatttgatgtccatgctcatgctagtgctggagaacatgataatcccactattgaatttgacccagatgtattttcaagtgatgaagcatatgcaagagcattacaagaagctgaagagagggaaatggcagctagactattggcttttgctgggataaatgatcgggaagaagaggacatagaggagcatggtgctaattctcaggatgcttgggaggatgttgatccagatgaactttcatacgaggaattactggcattgagtgaagtagttggaactgagagcagaggtctttcaactgatactattgcctgtttaccttcagtcaactacaagactgggagtgatcaacatggaagccatgattcgtgtgtcatttgccgggtggactatgaggatggtgagtccttgacagttctttcctgcaaacatctgtaccatcctgagtgcattaacaattggttgaaaataaacaaggtttgcccagtttgtagtactgaggtatctgcttctgggagcaacttgtaggaggatttaatagatgttcttcacttcaaattgaagaaaatttgtgccaagttgggggctaatatcccttgttttaatagcatttccatattagggagatagtctgtgctattgtttccagctccttcattttaaatgtaacatgtaacttttggaacctgctctctagattgtctttattttaatggaaaatgaatggcatttaagtggccagttcttttaacagggtccgaggggataactgttgtgatg

SEQ ID NO: 553 - DNA, 558 bp, Glycine max
  Clone ID: PAT_MRT3847_10049C.1
ggaagcacaatttgacggcgagtctctgacgaccaacatggcactgactgcagatggagacgagcttaatagaaattttgggttgtagcagttgttcgctggtcactgcactaagtcattaaccacggtcaaccaggacatgggtattgtactcaccgacatgcggacccattcatattgggtcttgtgaaagaaactcggaccaaaggcatggctgacctgtgcttttggtggaaaccaaaccttcacccaggagggacatactagtgatgtggacagggaggaccaaggagaaggatgtcaggttgatgggggtcgtagggatgaggccgtagaggtggtaggtgatgcggtctctgatgaggaggaagaaagaagcaataaaaatgggaatagtggggaagaaaggggctcacacccgaaggagaaattttaattaaaggacagggaggaccaaggagaaggatgtcaggttgatgggggtcgtagggatgaggccgtagaggtggtaggtgatgcggtctctgatgaggaggaagaaagaagcaataaaaacac

SEQ ID NO: 554 - DNA, 531 bp, Glycine max
  Clone ID: PAT_MRT3847_1004C.1
tggtttctgatgctgtgcataagagagaggatgatcctgagagaagaatggaacatcaaagaatactgggaaaggtaactgagtcagaggaagtgaagagaaggttaggaggtgaaagtgtggtgacagagaaaaagtaccaagagatgtatgtgaatagtccagggaaaggtgtggttgataagcttaaaggtgtggttgggacatgctttaccaacccagcagagaatcaatcttcacaagattcatctatgaattatgaggcaggaagggcagaagtggaacaagttaaccaaggtgcagcaggtgaaagaaggctgcaggagtcatctaattgaagaagggctttgaaggagtctttgctttgggtgattgtgtagattttcttaaaagctgtttctatatctgtgtgtcttcttctttgttggaagaaagttaggatgctcaagtcacagtaaaataaaaaatttgtgttttttttaatgtttatgtaaatatccaattttttccgggtttaaaaaaaaggaaaaa

SEQ ID NO: 555 - DNA, 621 bp, Glycine max
  Clone ID: PAT_MRT3847_100500C.1
gggactgtgatctcaattgctggagcattaattatgaccttatacaagggattgcctatgacaagtgatgtgatgccaaacaatgtttttctttcatctcaacaatccaaatggctactaggaggatttctccttgcagttggttgctttttttgttcagtctcgcttgttattcagacatggactatcaaagactaccctgaggagctaatgttgataaccattagtaccagtttctctgttatcctatctttcatagtcgctttcattgcagaagaaaatcctaaggcatggacacttaaacttgatatggagttggtgtgcatattttattcagcaatttttgtgatgtctacacgaaatgtggtgaatgtatgggcgtgtcgaaagaaggggcctgtatatgttgctatgttcagtcctttagggattgtcattgcacttgccatggggattgtatttttgggagatgctttatatcttggaagtttgataggagctgctataatagctattgggttttatgctgtaacatggggccaggctcaagaggaaacaatgggttacgaaaagcatggaacttgtagcattatcttatcgcctttttctgaaacccctcta

SEQ ID NO: 556 - DNA, 252 bp, Glycine max
  Clone ID: PAT_MRT3847_100501C.1
caatgggtacggctgtcattcaatctcattacggtcatgctgctacacaacgactgattgggatatcgtctccatattgatcatgacgggccattccgcgaattgatcattctctaccacagcggtcgctctacacgttccaatcttacatattcgttcatgccatgtctttgctcttcgattgtgtcatctaatttcatctcattggccctcattttaaagtttcttgcctgggacaaccctgccattacc

SEQ ID NO: 557 - DNA, 513 bp, Glycine max
  Clone ID: PAT_MRT3847_100502C.1
tcaccctcccaaacttaagcttggagatggaggtcatgtaagaaatctgactccttcgcgtcacgaccgccaatggaaccttcttgacggccatgtctttgaaggaactactattgaaaggtgggcactaattagttttgggggcacacctgagcagaagtccaatgtccccagatttataaaccagttatgtcaaaggtgtgaacaattgggcatttttctcaacaagaacactgttattagtccccagtttgaatctatccaaattcttaacaatgtcacccttttggaatctaagctcaagagaatccagaggacagcctcaaacaatctccagcttcttatttgcataatggagagaaaacacaaagggtatgctgacttgaagcgaattgccgagacaagtgttggtgtcatgagccaatgcttgctgtaccccaacctcaacaagttgagttcacaatttttggctaatttggtcctcaaaatcaatgccaaaagtggtggatgcac

SEQ ID NO: 558 - DNA, 441 bp, Glycine max
  Clone ID: PAT_MRT3847_100503C.1
ttcggctcgagctcgagccggcttcaaacagtttctattgtattgtaatattttatcagcatgttccaaatgtcctacctgtcattatcttatttgcatctttgcaggcaaagagaaatcgtggcaggactccaactcctggcaaatactgtggtccaagagataagcggggacagggagggagacgatctcatagttactcacctaagcgatggcaggatagaggttaccattcaagggaccggcgaggacgatctcgttctccatatcataggagggtggaagattactctgacacacataggaggcagagggattagtccttgtcagctggtgatggttgccatccaagataaagcaaagatacccatacccatgggttggcctgttaggaccaaaccagtatttaaaatcgtatccttttttggtgtaaaaaatatt

SEQ ID NO: 559 - DNA, 690 bp, Glycine max
  Clone ID: PAT_MRT3847_100504C.1
ccacgcgtccgcccacgcgtccgttctagatcgcgagcggccgccctttttttatgcatatgcatatgcttttattttcaacatcatctcatcttccccaatttcatcatcactaacaataacatcatcacaaagggggtttactaattacctcttctatttcaattttaaaattcaaatcatgtattcctgtttaattgaacaagtaaagcaaataacattatcttatttgtgacatgcaagaacaactaaaagcatatgcatatgcataaaaagaggcatgaactactcaatggtgcctccccacaatacattgaacatataccattatcatgtcaacactagattaaactacaatatctcgtttatcaattctagatgaaaatttaaaggtcatgacttttttagatgacactttgtagcaagataaaaattacaacatacataatgaaaattttagatattacgaaactacgtttattttaaaaaccaaaagacatgacaacctcaaagcatgatcgacaaccagatgaatcagcaaacattagccaatgtactttctacttttgttagcagcttcctacccagattgtgttgaacaattcattcatagacataaaaacattaaattttttctttattggtccatttaaataataaaccttttctagcaaaataatgactatttca

SEQ ID NO: 560 - DNA, 383 bp, Glycine max
  Clone ID: PAT_MRT3847_100505C.1
ccgacacagcccaagccctacacaaccaaattctaacacacacccatttgtttcaccctccatggctagcctcaaggttgcttctttggctgcagtgctctgcatggttgtggtgagtgcacccatggcacatgcagctatcacgtgcgggcaggtgacgagtagcctggccaatagcatcggttacctccagaagggaggaacgccctcatagggatgctgcaaccgagtgaagagcctcaatgccttcgccaagaccaccgtcgaccgccagacggcgggcaactgccttaagtacgaccccagccaaaattccggcttcaacgccaacaacgccaactttattccctgaaaatgcggagtttccatcccctacaagatca

SEQ ID NO: 561 - DNA, 367 bp, Glycine max
  Clone ID: PAT_MRT3847_100506C.1
cgcttctagtacacagccaactgtatggaatcaaattgcgacagtgggaacaccattgaattttgatcttaacaagcaccgctttcagtcagctttactatggagctttttgggggaggaatattaaaggacagaactgtacatcggatcacactatatacaacactacttcaatgagaaccgtgataagagtagctgtttggaagaaaagctgtctaatggataagagagcgatgactgggaatgcaatacactaaaagagtgatcgtgcctaattgctacgagtgtgtttaactatcagcaacagtacagagcattttgatgcctgtcagcggacaaaatcataaccacattcctgggaaatgat

SEQ ID NO: 562 - DNA, 253 bp, Glycine max
  Clone ID: PAT_MRT3847_100507C.1
gtgaatgggaagaaggatagaatggtaaaaacagaattatgttttataaatggcaaatgcttgattacaatttgatttgaattatgcctaagttgatacattttttccctctattcttttccttttttattgcttgtaaagttctagtctagctttttaactgtagcattatagttgttgggctctgttgaactgtttggtaattgtaagctgcctttaatatttccccccctaaaagaacagctttaataat

SEQ ID NO: 563 - DNA, 364 bp, Glycine max
  Clone ID: PAT_MRT3847_100508C.1
tctcttgcgtggttctgttgcgtctaactctagcgctgaccctgccgggggggctgctatcttctcatcccatgttatcatcatgaaccaccctgtactgattgtaaatggctctgcgcctgttcttgattgccacacttcccacattgccgtctagtttgctgatctctgtgccaagattgacaggcgatctggtaaggaacttgggaaggagcccccctttctgacgaatggtgatgctggtttggtccacatgattcccaccaagcccatggtggttgactccttctccgagtgtcctccacttggtcgtcgtgctgtgagagacatgcgttagactgtgggtgtgggagtcataagagct

SEQ ID NO: 564 - DNA, 1156 bp, Glycine max
  Clone ID: PAT_MRT3847_100509C.1
aactcactgtaactgctcgttcagggagcctcggtgggggccccttctggattgtggttgtggttgttgttgttgctgaactcactgtaactgctcgttcagggagcctcggtgagtcctctgatcatcacagaaatcaggagttgttcaatggcaaaagattctgccgatgctgattcccatcacaggcgtcttggtcttttgaaagatcaagttcacttggttaaaaggaaaggctctgatcgctatgagattgctccaatccaagaccaactagtcatttgagaaggggtttttcatagtgatccgtgcatgccaattgttatcccaaaagaatgatggaataatattggtaggggtggcaggtccttcaggggctgggaagactatatttactgaaaagatactcaacttcatgcccagcattgcaatcatttcaatggataattacaatgatgctagtcgaattgttgatgggaattttgatgatccacgcttaacagactatgacacattactccagaatctgcacaatttaaaggaaggaaagccagttcaagttcccatatatgatttcaagtccagttcacgtacaggatactgttcatataaaaatcatcaacaaattcaatccatttactggattccagagtcctacttatatattaaagtcaggaaggaatgtagaagttgataaaattaaagctgttctcgctgaggattttaaggaaacaacagaacaaacttatgacatatatcttctaccacccggtgaagatccagaaacttgtcaatcatatttacggatgcgaaataaggatgggaaatacagtctcatgtttgaggaatgggtgacagataatccatttgtcatatcaccaagaattacttttgaggtcagtgtgcgccttcttggtggactaatggctttgggatacacaatagccactatccttaagagaaacagccatgtcttttctgatgatagggtttgtgtaaaactagattggcttgagcaacttaatagacattatgttcaggtacaaggaagagatcgtttagttctaaaatacataggagaacagctgggtctagaaggttcctacattcctcgtacctacattgagcaaattcaaattgaaaagcttgtgaatga

SEQ ID NO: 565 - DNA, 234 bp, Glycine max
  unsure (1)..(234): unsure at all n locations
  Clone ID: PAT_MRT3847_10050C.1
gctatcaaatactatattttaatgaacgtggtgtaaccaaaacagagaaaacagagcactctttttaataaacacaacacactttgttttttagagtgaacaacagatacagttttagttctnaattaattaatagcttttccagactcctcgtgatggaaggatggatgttgcgcgggcctggctagtaggatactttgtttcttttactgatcggcaagtttgttggctttg

SEQ ID NO: 566 - DNA, 355 bp, Glycine max
  Clone ID: PAT_MRT3847_100510C.1
gtaaaataaaaaaataaaaggccgggggagggccaacaaaaaacaggcccggttaaagacccagaagaggggcgccaccaaacaggggcgaggaacacccggagaaacaaaacgagggccaacgggccaggaacgaagcccgaaaaagacccaggggaaaaggggcccccatgggaaacagacttggggaccaaaaacagcgaagaaacaagacaccaaccggtggggcggaaagctccagggggccaacaaccgtaaaggaggggacaaaaagaggaaggggggccaaatgcagcaaagaaccagcctgggcaggggggagagctttaacacacggaaaccgggaaaggaatgg

SEQ ID NO: 567 - DNA, 381 bp, Glycine max
  unsure (1)..(381): unsure at all n locations
  Clone ID: PAT_MRT3847_100512C.1
aagctcggaattccgcttcgacttggtaggacaggtatctgcaagaatttggatgtggcttcaagggttgctcgttctgatggtctggactgcataacactggatggtgatcaagtaagcaagaaaggtagtatgactggaggattttatgatcacagacgatcaagattgaggtttatgaatatcattaagcagaatgcagacactattcatattagagaggaggaattggagaaagttagatttaatctacaagagatagaccaaaagattaatgaaattgttgctgagcagcagaagattgatgccaaatgtgctcatgacanatctgtgattgaacagcttaagcaggatattgctaatgctaataagcagaagctg

SEQ ID NO: 568 - DNA, 255 bp, Glycine max
  Clone ID: PAT_MRT3847_100513C.1
gagtgcattataaaaaaaatggataacaaaaaaatgatttataaattctacaacataatcacaagggaaaattgccaactatatctcaaatcgatctggtttacaaaatcaaaacatacatacaaaattcgcaggttaagtaaaccaacccaacaggaaaaactgaaaagttaaaaaacttcagtcaccttgctcgcaagaacccgttccctccgttcaacgtaactaaacggaaaccaacctgcccagcctttg

SEQ ID NO: 569 - DNA, 190 bp, Glycine max
  Clone ID: PAT_MRT3847_100514C.1
tcgagtgagaacgaagacagggaagaatttctgttcgcaggtgattgagcgtcactacttccgcatgacccttgactttcacatcgaacaaaagcttttggagggagtggcggatatcccgtgcgagaaggtggaggaaagaattgaggggtgtgtgtgccacctatttatgtgcctttataagggccct

SEQ ID NO: 570 - DNA, 345 bp, Glycine max
  Clone ID: PAT_MRT3847_100515C.1
tttttttttttttttttttttttttttttttcggggggaccgggggtttttttttttttttttaaaaacccaatccaatgaaatttttttggttgaatttcccaacattttaacaggggttcctccttttcaaaccttaacattttaactaaaagccttaaaataaaaattttgcccttctttttttttttttaaacactttgaaaaaacccccacacaacctttttgtattttatttgaggaccaagtcctaatattgaataaaaaaaattcttttttgttttgaaagaaaacaaatgaggcttttctttttaccctgtaaaattttgtggaccttgccccggt

SEQ ID NO: 571 - DNA, 294 bp, Glycine max
  Clone ID: PAT_MRT3847_100516C.1
ttcctctaccaactcatcctctaattccatttctcatcaccacaataaccttttcgacagggcacattcaaatttggggcgagaccattccacacctactaacatccactctatttacacacgctatatacccaccatcacttttatatctctaactgctctccttacttttcaatgagtcttaaaattacatcatgtcaattaccctccatcatcaaccattacacacacaacacattatattgcttgctcaaactaacattcagtccccaatgatccatattttttaaaacc

SEQ ID NO: 572 - DNA, 1730 bp, Glycine max
  Clone ID: PAT_MRT3847_100517C.1
gcataataatgaccagttctcgagagcgtttggtgaaggcggtgaagcagtttgtggaggttcgctacaaggttttcggcgaccgttatggccaaaacatcatcgacatcctcgactttccgattaaggttgtcttgtctcccttcactctcgccttcgatattgcaggctctgctcctcgcggcttcggcgtcccggaactcatctccaagctctctgccacttccgtcttcgctatagctgctcttgggacttatgacattgcctttgagctggggaggaaggtgatatgtcaaaggaattgtaactcatgcaatggatggcgggccttacattgtacaatgtgtcgaggaagtgggagggtgcattatcaagtgaagaattgcaacttgaatactggagagaaagcaactgctgaatctgtagcagacgccattgccaataaccgggctgagttggtgcatataccatcatccttggattttcaaaaaccgctaccttcaaaagagtgtccaacttgtgatggaacgggtgtaatgagctgtcctgaatgcaaacacagattgctgcatgttaggatctcagcagatgatattatggagcccccatggcaagcttataatgtcttgaaaaagattgattatccatatgagcacatattgcacagcatgaaagatcccagtattgctgcattttggttgattacatttcctcagattatgggtggatttacctatgacgatgatgtgaagcagaaaatatggtggcagtacaaggaaaatatgcggtatgaccaactccgagatgtggtggccaagagaaaaccagggtgggagtatctgcaggatgccttgatatctattgatcctgcccgtgcaagggatgatcctgtcatagtgaaaaatgtcccttactataaggctaagaaggctctggagacagaggttatgaagattgatcctccaccaagaccgccaaattggggtgagcttgaccttccattgaatgcatcatcttggagtgaggaggatctcaaagatccagataagttctatgaaatgactgttcttcttaatgcccaaagagaaatctctgataagatcttggatgcacagtgggaaactaaatggcgtcaggacaagttgaatgagatgttggaggcaaaggtgaagccttacattcaggatatagacaatgcagttcttcctgagcctattttattaaagcctcaaaatcaggaaaagagacaacggcggaggtggttcttcttttgacaacatggataaagttactatatgcttgaacatgcttgtttgtagtcctaattttttgttataaatctgtaactatttattcactgttggatccccccacaagcacacatgttgtgcctctgttgtggccatcatttttgtggaggaaacaattgtttgtgacacaaaaaatacagcttatgaaaaggaaaatctagagaaacatagtagaacaagcaacacaagtcttcttcacacggccaaacctttgctgatgttacatttggtattatgtcaaatacattccgaagataccctatttagattattcctttttaattccgtgttgctgaaattccctgaaaatcaatccgtatgtgttaactacaaactcctattctgatcaatgaacaatcttcatttttcactgtgatgaataggtgaacgttaaaataatcaagttgctggtttgctttg

SEQ ID NO: 573 - DNA, 788 bp, Glycine max
  unsure (1)..(788): unsure at all n locations
  Clone ID: PAT_MRT3847_100518C.1
cttgatgcctgcgtcagcgcttaatttaaaatcagtgtttcggcaagcctctgaaatcagtgcacagaaatagataacaaaaataaaggatattaacaaaatgcaaacttttattagtggttttcacaaaatagtttgttggccagaacaaggatgaaggggaatgaatagattgtgtagatgcagcttttgcaattatatgaacagaaacccactcaccagtcatcaacaaataaaaaaaataaaaaactacttacatgtctctcagcttgttctctttgggtttgtaagtcccgctgattcttctcagccaatgcttttgcctagaataaaatgacaatgttcataacatagtgaaacaattttgtatgaaaagatacacttgaatcttccacttaaatttaatgtcaagttggctaaaaaataaagtatttttcatgtaattgtaacaactatcaataaacaatgaagaaatcaaattaaggagacaaatacagtaatgcaataatacatacagcacgctccttagtcctctggtggcgctccaacctggctcgtcgcctttcttcagtttccccttcaacttcctgaaactctccagatgttggagcagcttcaaaccataaaagagaaaggagaaaaagatccaagtaagcaatgaaacaaacacacaaaccactacagtaaaaaaaatatcttgaagacacaaacctacctccaaaaattgaggnaaagatcatcaacattattagtggatgaatgatgttttcttcatacttgtagatgca

SEQ ID NO: 574 - DNA, 142 bp, Glycine max
  unsure (1)..(142): unsure at all n locations
  Clone ID: PAT_MRT3847_100519C.1
cgaagacttagcattgagaactgcagcgctgtaaagtctgataaatctgtgaatcatgaggatagaagtggagccaaatcaccacttttgttacctcnntcgagaagattaagtttgganggaggttcaaaaactatcaagt

SEQ ID NO: 575 - DNA, 968 bp, Glycine max
  Clone ID: PAT_MRT3847_10051C.1
aggaagttgaaggagataaatatcgaaagcgatctattgggtatgtatatagctgtcaatgtttgtgtgcacaataagctgcttcttttatactgatcaaagaccaactcatcctaacaggctgcctgaaacaaaagccctttggcttgaagtgtattcaacgcacaggccattataccttgtgcctaatttaattttgaggaatgaattaatgattgacttcctatcaacttaatcatgatctaataccttgtgaaagacaaattgaacctagaaactaatgttagttgaagtcaaattgatggtggtcttatactcttaacaatattggtttgctgcagcacaaaaacacgaagccagagggttgatgctcttcttcatcatatgctgagtgctgaattgtgtcaaaatgagccttccagtacacaaacttcataaatcattttgcagaatgcacgaaggagcccacctcattctgatctttcatgtggtttgcatctcgtgtgggtgtaccgtacggtagacaagagagcatgcaaacatatagtaatttgcatttcccttgtttgtggaaaaagcacgttatcaattctgtgctgaatgaccttattaaatcataaagtggcaggatgctatattccacgggactactagatatctgtcttttttatttggtacatcgatatctatcttgttagtctgtgttgtaatggcaacttttttttttaatctgccagggtttgatttttgcatttatatctcgtgtgggtgtaccgtacggtagacaagagagcatgcaaacatatagtaatttgcatttcccttgtttgtggaaaaagcacgttatcaattctgtgctgaatgaaattattaaatcataaagtggcaggatgctatattccacgggactactagatatctgtcttttttatttggtacaacacagactaacaagatagatatcgatg

SEQ ID NO: 576 - DNA, 544 bp, Glycine max
  unsure (1)..(544): unsure at all n locations
  Clone ID: PAT_MRT3847_100520C.1
ggtgattatgagtttgtgttttcaagttgtggaattgtattctgacgttgaatttggcgatcaacaagacctgtttccacgttccaacttcccaagtgtcactctgtcccacactttctcataatggttgcaacaaacatgttggtaaatgaattgaagagaaagagagaaaacttctgaatcctctaatggaggagtcacaaaagcatctccaaagaaacaaatggttcgacttcgacatggagcttccctcgccattccagttggagcaagcagtgtgcagccacggcctcttcatgatgccgcccaaccactgggacccactctccaaaaccctaattcgcccactccgttcttctccctcctccttcctcgtttcactttcccagcactcccaatccctcgccgttagggttcacgccacccacgccctctctccccaacaacaaaaccacatcacggtacccaactctctatgtaaccgcttcttttgcttcgcgcgttttcattctttcgcttcttccgctgttgctgtttttangct

SEQ ID NO: 577 - DNA, 494 bp, Glycine max
  Clone ID: PAT_MRT3847_100521C.1
aattcggctcgaaggacccttggattgtgagtgccagtgatgatcagaccattcgcatttggaactggcagtcacgtacctgtatatctgttttaactgggcacaatcactatgttatgtgtgcttcattccatccaaaagaggatattgttgtgtcatcctccctggatcaaactgttcgtgtttgggatattggttctctcaaaaggaaggccgggcctgctgcagatgacatcctacgattgagtcaaatgaacacagatctttttggaggtgttgatgcagttgttaagtatgtattggaaggtcatgaccggggtgtcaactgggctgcttttcatcctacactgcctttgattgtctcatgagctgatgaccgactagtgaaactttggaggatgaatgacaccaaggcatgggaagtggatactctgagaggacacatgaataatgcttcatgagttatgttccatgccaaacaggacatcattgtg

SEQ ID NO: 578 - DNA, 164 bp, Glycine max
  Clone ID: PAT_MRT3847_100522C.1
atgtctctcgcgactgccgagatcaaagccaaagcagaggtgtattatggagaagaactttgccaagagaagtccaagttgttgttaaaggaggttgggcttcctaatgggcttttgccattgaaggacattgaggaatgcgggtacgagagggatagtgggct

SEQ ID NO: 579 - DNA, 483 bp, Glycine max
  Clone ID: PAT_MRT3847_100523C.1
ttccgttccaaggaaggtttcccgtcatcactgtatgacgtcctccttctttgggggggggggagggggggggcgggcggggggcgggaatgaccaaacaagagtataagaggaggtgacctaacaaacaagaccatgaccgagcctaggctaatagcctgaataatgcggtattcatgcaacttttcgtactttccggcctagggacatctaggtacggaacccaatagacctagaacaaaatgaggttaaaagaaaacacctgcaaaccaaacctaacaaaaacaaaataaatacctaaggaatataggatatattgtcgcggcaagccccgataggaggattcccagtaaagccgttatggttacagtggcaattcaatagtcatcgcgtatggaatcggccaacgccattttcgcgttccgggtggcttccaccaacacgcatgtgcaggttcgtctaccacatgtgcaggtttatggg

SEQ ID NO: 580 - DNA, 357 bp, Glycine max
  Clone ID: PAT_MRT3847_100524C.1
aaaaccatacaaacatcctggtagatttacaggagaactttaatcacagaacattccttttactacttaaaaaccatagtacacatacgtagaagtacatgggaacactatttatgagacaccttattataacttatgaaacatacagaacatgctagttgtattttttagagatgaaggcccagttgccaagtttctccatgtagagtccttctctagaaatacacgcatgtcatatttaatcatatacaggccttgacgaacgtactttatagcaacgcaaactcgtggaacagtataagtcaaatatccgatgcaccgttcccagcgtgtgagagcaacacacacctctactcc

SEQ ID NO: 581 - DNA, 1762 bp, Glycine max
  unsure (1)..(1762): unsure at all n locations
  Clone ID: PAT_MRT3847_100525C.1
aggaaaacacaagagtccttttcccaatcgcacgcgcctcctctcaagtcaactttaatagatagactctaaacaacgatgttaacacttcaccccttttgggctgtttagtaacatcattccatacatttctctctaggccctacctttgtgtccgctactctctctaccccttccttttttctcacccttttgaaatttgagcagtagcactgttgctacacaacaacatcatgaacatgaacatgaacatgaacatgaacactaagagcaggttgatcaccctttgggttgtgctctatttttgttccatcacaaactcactagctgcttcaaagcagtgccatttccctgccatcttcaactttggtgactccaattcagacactggaggtctctctgctgcctttggacaagctggtcctcctcatggagagtcctacttccatcaccctgctggccgttactgtgatggccgtctcattgttgatttcttagccaagaagctggggctgccttatttgagtgcatttcttgattctgttgggtcaaattatagccatggagccaactttgcaactgctggatccaccattagaccccagaacacaacccttcatcagactggtggtttcagccctttctctttggatgttcaattcaatcaattcagtgatttccagcgcaggacacaattttttcacaacaaaggtggagtatataaaacattgttaccgaaagcagaagatttttctcaagcattatacacgtttgatattggtcaaaatgacttggcatccggttacttccacaacatgtccacggatcaagttaaagcttatgttccagatgttttggctcaattcaagaatgtaatcaagtatgtatataatcatggaggaaggtcattttgggttcacaacacgggtcccgttggttgtttaccatacatcatggatcttcacccagtaaaaccatcattagtggacaaagcaggatgtgcaaccccttataatgaagtggccaagttcttcaatagtaaattgaaagaagttgtggttcaactcagaaaagaacttcctttggctgccatcacttatgttgatgtttactcggtgaagtactctctcattagtcaaccaaagaagcatggttttgaggagccattaagagcatgttgtgggcatggtgggaagtacaactacaatttacacattggatgtggtgctaagattaaggctcatggcaaggagattctggttggaaagccatgcaaggatccgtctgtttgggttaattgggatggtgtgcattacactcaggctgctaacaaatgggtgtttgatcagatttttgatggttcattttctgatccacctattcctttgaacatggcttgtcataagcatctttaaaagaaagggtgctaaaacctttgtcctcttctctctgtatcttccctcctaattttgtgtttcctagaaaatattctttaggaaaaaagaaacaaaaatgttcacacatcttctctattaattttgagaaaaatctctaagttgatagggtcttattggaggaataaaattgagaacagaggatttgagtcatgcatggtgatgaggagtgagttcacacttgtaatcttcactgattgcggaggtttcctttcttttttactgaataatagagcttgaattgtttgcttaaatcncctttaaaaatccccccccngttnttnnagggcggccgccgacttatngct

SEQ ID NO: 582 - DNA, 528 bp, Glycine max
  Clone ID: PAT_MRT3847_100526C.1
ggggcaaacccctaggggaaaaacccgggggaaaaaagaggaatcttacaaaaaaaaggcattggaaaaaaacacttccctcccgtagcagaaaccaaattttaagggcaaaggacacgaaaccctaaacttaaccccccccccctttgattttggaaacaaattaaaggcccttgggcataaggggaaccccataaaaggaaaaagcccaaaggttagggccccaaaaaagcccaaaaaaaaaagcccccggggtttcctaaaaaaccaaaacgggcctgctttaaaagcggaaaacggttttaaaaacctgaacaatttctttgacaaacctttgaaaagggagttttcgaaaaaaaagttcggggctctttgggaactttaaaaaccccctaaaaaccaccgttcctggcctaaaacgggggggctttttaactccgccggtccccggggctaacttgaaaacggttttggttgccaattgcttcctcggagcctttcctccgggggacttgcaagcggtttgct

SEQ ID NO: 583 - DNA, 444 bp, Glycine max
  Clone ID: PAT_MRT3847_100527C.1
cccaatcaaccacctcactattcaaaaacccccttttttttttttttttatttttttcacaaggccatttaaggataatttttaaaaataaaaaggcgctcctactataaaaaatttatattctcccaaaaatacatccttggtaaaaacataaaccaaacctaatctaatcgcacacacaaccatcaattcatgaaatccagtcattagttacattcttttttcttgtcacaatatcttaataaaacactcaaaatataaattaatacatataataaagtatctaaatcatcgttcccccatcagacaaaacaccacatcattaataccaaggcaaggctatgatttgaatcatcatcatccacaactttccattcaatagcctcctcataagacacttctcaattcatacttcctacacatattccttcttgcaaatattca

SEQ ID NO: 584 - DNA, 407 bp, Glycine max
  Clone ID: PAT_MRT3847_100528C.1
gggaaggtgaattttttccaatagaagatgctgtcagtccagatactgaacgaactgttctaataatggatgagcctccatcctagtacgcgctaaagctgctgacatactaagatagcatactgttctgtttgggcaggactattaccttaagctatatgtcactggaacctatctggactgagagctcctcataataaaatcactggaaagaatctcctgattgagataaaggaacctttataactgtgaatagaatactgtgcatgtgcatggggacatattcttaaataaactagtagagctctgacctaattagcttgaacctaggtcaaggcgggcaaagccacatttgtctgataacttatagatgatcgtgtggtctgacaatctcttcttttgctggg

SEQ ID NO: 585 - DNA, 2110 bp, Glycine max
  Clone ID: PAT_MRT3847_100529C.1
ggctcgagtcgaaacaatgatttgagcggtgagattccccaaacggggtcgttttcgaaccagggccccactgcgttcctcaacaacccgaacctgtgcggatttcctttgcagaagccctgcgcaggttcggcgccgagcgaaccggggctcagccctggttctcgtggggcgcaccggcccacaaagaggctgagccccagttcgattatcttgatctcggtggcggatgccgccggggtggccttgattggacttgcggtggcttatgtttattggaagaggaagggcaagtccaatgtgtgtagttgcactttgaaagggaagtttggtggggagaggaggagttgagcttggcttgttgtgaacgtggtgcgtacctaaaacgatacggctcttcccaaacacaaatcgtgattcgaagctaactggaagggtggccatctggcacatcaatccgctcagtctcaactctctccaacaaccacaatggctctcttgggcgccgcctcctcctccgctcgcatcattccctccgtcttcacctcattccatctcagtctcatcactctccaaccacaatggctgtcttgggcggcgccgcctccgctcgcatcattccctccgtctcactctccacctcttctcgctccttcttctccttatcatcctcttccaaactcaaatgcttgcgctcctctcctcgcatttcgcacctctttctcaatcagcaaagagcggaggttcgcgtttcgagtggaggatacggaacggtatcggcgccgaagtccgttgcgtctgatcctgatcagttgaagagcgctagagaagacatcaaggagcttctcaactccaagttctgccatcctattctcattcgtttgggatggcatgatgctggtacatataataagaatattgaggagtggccactgatgggtggagctaatggtagcttaagatttgaagttgagctgaaacatggagccaatgctggacttttaaatgcattgaaacgtcgacagccgatcaaaaagaaataatacttgtgtgacatatgcagacttagtttcagttggtctagtcctacaactatggaggaagctggaggccccaaaatccctatgaaatatggaagagtggatgtatctggacctgaacaatgccctgaagaagggagacttcctgatgctgggcccccttcacctgctgatcatttgcgtcaagttttctaccgtatgggtttgaatgacaaggaaattgttgcattatctggtgcacacacattggggcggtctagaccagatcgcagtggttggggaaagcctgaaactaaatatacgaaagatggaccaggagcacccggaggacaatcctggacagtgcaatggttgaaatttgacaactcttacttcaaggacatcaaagaaaaaagggatgaagatctattggtattgccaactgatgctgctctttttgaagacccatcctttaaggtatatgctgagaaatatgctgaagatcaggaagcattctttaaagattatgctgaagcccatgctaaacttagcaaccttggagccaaatttgatcctctagagggcattgtgatagatgattctccaaatgcagggggagagaagtttgtagcagccaagtactccactggaaaggaatagaaacaagtgtcatgttttcttgtgccagtatcttttagtaatacaagaagaagctattttcaaatcatgtgatatcgcatgtaaaatttcgaagttttaaatgaagaagaaaggaataaaattcaatagtgtgcctatttgaattgcagagtgagctgtctgactgtatgaagcagaagatacgggctgaatatgaggcaattggtggaagcccagataagcctctacagtcaaactattttctaaatatcataattattattgctgttttggcatttttgacatcactgcttggaaactagttggattttgttcttctgatttttactataattgcattggcattttgcacacttgttctaacttttacatatggcagcaagtaatttattgattgagccaaaataaaaaaaaaaaaaaaaaaaaacaag

SEQ ID NO: 586 - DNA, 208 bp, Glycine max
  Clone ID: PAT_MRT3847_10052C.1
atgccatcaaccgtaacaatgccactttgctgtcgtctttccacatgttccgctgccctgactatgatcatacagatccactcttgcgtctaatttcgattatcactttatatgactatatcgataccattcgtgtttcaatatattctcgttctagctcactcgtgtacatactctcacgcatttgatctgagtgtctattgttctc

SEQ ID NO: 587 - DNA, 171 bp, Glycine max
  Clone ID: PAT_MRT3847_100530C.1
gtaacgctcggaattcccggtgtcgccaaaaccagtcctaaccctttttctttttcctgtgtgcaacccaataggagtggggactacctctgcattcccaataccaaaattgttatgcaccaaccgatgctccctatgatattttcttcttatcaacgcgatccaagactt

SEQ ID NO: 588 - DNA, 1818 bp, Glycine max
  Clone ID: PAT_MRT3847_100531C.1
cgtgaatcgtataactcactgcaagggtggccatctggcacatcatctcatcatccaaaacagaaacaaaaggagaggcaacgaaataaacaaaaaaaatatataaatataaagctggacccaacaaaatggcagagcgtgtgtcattgcctttaccatctcagtctcaactctctccaacaaccacaatggctctcttgggcgccgcctcctcctccgctcgcatcattccctccgtctcactctcttcctcttctcgctccttcttctcactctcatcctcttcttccaaactccaatgcttgcgctcctctcctcgtatttcgcacctctttctcaatcaggttttccctctctctctgaatgccgcaattctgattgtttctagaatttgagcttttttgcgtgaatcgcgcttgtgatttttatttttatcagcgaagagcggaggttcgcgtttcgagtggaggatacggaactgtgtcggcaccgaagtcagttgcgtctgatcctgatcagttgaagagcgccagagaagatatcaaggagtttctcaactccaagttctgccatcctattctcattcgtttgggatggcatgatgctggtacttataataagaatattgaggagtggccacagagaggtggagctaatggtagcttaagatttgaaattgagctgaaacatggagccaatgctggacttgtaaatgcattgaaacttcttcagccgatcaaagacaaatattctggtgtgacatatgcagacttatttcagttggctggtgctacagctgtggaggaagctggaggcccaaaaatccctatgaaatatggaagagtggatgtatctggacctgaacaatgccctgaagaagggagacttccagatgctggtcccccttcacctgctgatcatttgcgtcaagttttctaccatatgggtttgaatgacaaggaaattgttgcgttatctggtgcacacacattggggcggtctagaccagatcgcagtggttggggaaagcctgaaactaaatatacgaaagatggaccaggagcacccggaggacaatcctggacagtgcaatggttgaaatttgacaactcttacttcaaggacatcaaagaaaaaaaggatgaagatctattggtattgccaactgatgctgctctttttgaagacccatccttcaaggtatatgctgagaaatatgctgaagatcaggaagcattctttaaagattatgctgaagcccatgcaaaacttagcaaccttggagccaaatttgatcctccagagggcattgtgatagatgattctccaaatgcaggggcagagaagtttgtagcagccaagtactccactggaaagagagaactgtctgacggtatgaagcagaagatacgggctgaatatgaggcgattggtggaagcccagataagcctctacagtcaaactattttctaaatatcataattattattgctgttttggcatttttgacatcactgcttggaaactagttggattttgttcttctgatttttactataattgcattggcattttgcacacttgttctaacttttacatatggcagcaagtaatttattgattgagccaaaataatcacttgaaaatagcgtattattgaattaataaataatgcaatctttacttgttgtgcaaaaaaaaaaaaaaaaaagcccccaaggcctccaacgggccccctaactgaaaccttcacctaaaccaggttttttgggaccaagagcccgtaacctcttaaaccgacacctaaaaggaatccc

SEQ ID NO: 589 - DNA, 234 bp, Glycine max
  unsure (1)..(234): unsure at all n locations
  Clone ID: PAT_MRT3847_100532C.1
tgcaaacactgangacacatactcgctnctgattgttctntctttntctgngctnacanatggcttgttnanagcntntcatggttctcntcattncgcgtcgngangcngggaaaactcgcagnaggcccncngngttaaacaangtacaagcccgcnaaggtgatctattggggngtggggcaganaatgctgaatcntctgagcncgactncgccgacgctccagagcang

SEQ ID NO: 590 - DNA, 383 bp, Glycine max
  Clone ID: PAT_MRT3847_100533C.1
aatcaactcaaatattacctgtcaaaatcgagacaaattcagatccatatgaatggtgttgtcatgtctactttaaatgaccaacacacacacgtatgtcaatcttgcccatgatgcctcgatcaataattatgtgtggccaacaattacattaccattttgtgtgggagcaacagcctggtcgatgtagttggatcattattatttgattaatgacgatggtacatttgaaaatgattattgtatatttggaaaatgttcatttagcgtccactcggataaatagttaattacatacatacatatctaaatataattaattggttctaaaaaaatctaaatataattaattatatatagttcataagtggttaagagttttt

SEQ ID NO: 591 - DNA, 336 bp, Glycine max
  unsure (1)..(336): unsure at all n locations
  Clone ID: PAT_MRT3847_100534C.1
cgtgtttttggtggngggggtgtcgagtgggggaggttgtggacgccttggtgaatagtgtggggcgagagagcgtgcggtagatgcagggtctgatgtttcggggcgggacctgctgtgtgtgaggacgcccaagcttgtatggaggaggtgcaccaatgcttgtagcggtggcatgcagcctctgggtgagtgcgaagctctggttaccagcgagctgggaagggttgaggaccgtctgggccggtgcgcgtatgcgttgctatgacgaagccatacactcagtggagttgttgatctaggtgagctccaggtgaatgcgagagttagacaggt

SEQ ID NO: 592 - DNA, 468 bp, Glycine max
  Clone ID: PAT_MRT3847_100535C.1
accaaacggctgctcgaagctgaaaaaccgcagtacatacatacaaaactataattacagcctgatgatacatcctgaagcttatgccgtcctgtcgctgtgcacctcaacttcctcttctttcttggctgtctcatatcgctttccgcggaaagcatacacgccccagttactgcacgtaacatcatgcgggtcgagatcgttcaagtcccatcttagacttctgaacaggttctcaccaggctgaagcagcatgtccatttcgtttccgtaacgcttggtcaggtggtcgacatcttgctgtacatcccaaggtgagtagccagtagcgataataggtaccttagtctcgagaagtagaggcagagtctcttcccactcgtgcatcgaggctgcgttaccgaaaccggggtggaagacaacgaagcaatcgaagtaaggatcatatgggtagaagtagccggtttt

SEQ ID NO: 593 - DNA, 247 bp, Glycine max
  Clone ID: PAT_MRT3847_100536C.1
aaaatgtagcaatttcaagcagctcaagcaagtccatggcaaaataatccgttatggtctcacctatgatcaattgcttgtgaggaagctaattcagctctctccctcttatggcaaaatgaaatatgccactttggtatttgatcaactcaatgccccaaatgtcttcacgtggaatgtcatgattagagcttataccattggcggttctcctaaaatggcctttcttttgttcaaggccatgcta

SEQ ID NO: 594 - DNA, 251 bp, Glycine max
  Clone ID: PAT_MRT3847_100537C.1
tgttgtacggctgcgagaagacgacagaagggggggcacttggggatacgtatttgcttactccggccggcaaaggactagatagatgttcgttcaagccaaacgaagggagccgcgcaaaactgaacagcataagcacagccaataccgtttcgacgccccacgagcttgacagggaccatgtcctgatgtacagagatgcactaacacataatacggtcacaatgatcgcgctaatcagctaaagggta

SEQ ID NO: 595 - DNA, 413 bp, Glycine max
  unsure (1)..(413): unsure at all n locations
  Clone ID: PAT_MRT3847_100538C.1
cccnnttttnnntttttcnaaanctgnaaccgcccaataaatacagaacanccccaaactaatttttttttttttttggggaacaaaacacaatggcgaaagctcctacaaagttccatttctttttttggcgacccaatttccccaagggaaagagaaattggtttccggggggcccacacaggggggggggggtttttttttttggggtggccccttttacatggaaaggaaacccccaatttaatcctttcacttttacccttttttcttgactaacaaaaaaaaaaaaaaaaaaactttttaaggggtcctaaattatgccaaggaattttccaaattttagaaaattttttaaattagactaaggtngggaacattaaggactccatttattccttaaatactaattt

SEQ ID NO: 596 - DNA, 638 bp, Glycine max
  unsure (1)..(638): unsure at all n locations
  Clone ID: PAT_MRT3847_100539C.1
ggtgtcgaaccacatcagcaacttaataagcaaaactgtacaacggatgtagatgtagctctgagaatagttaatagagcaaagacctaagaagtaccatctcctattcgtattctaacgggcaagggccttgcaatcagaccatccataacccagccaccatcagaaccatcatgtttgacatggctgaattccctctgcgcataatccagggatacttcaagccttccaccaggtctacattctgaagcaacattacttggtttgaaacccatatacctttccaaccaatatagatagttaacatggaacaaagatttgagcatgtcttcgggagaagatccctctttaagtacaatacaaaattttcctttgtaatccataagcagatattgctcatttttgtaaagatcaaacaatgcacaagcatcttctttactctcaattatctcactaagcttagaacccatttgtaaccgccggcatattctatctgcagcatcttttgcttccgctgacaaaatcttactttgacgtgaagcaccaagtgacaaatgaagaaaagaggttgttcatcattaaccggacgcgtgggtcccgcccgggaatccggacaccgtaaccgccaggcgtnacca

SEQ ID NO: 597 - DNA, 417 bp, Glycine max
  Clone ID: PAT_MRT3847_10053C.1
gcaaaaataggccatgcaacgcccctttttattaaatcgggcatcatatttacataccaaaaatcagggggaactccacacaattttaaaattttcactttacaaaaagggcagtaatttttaaacacgtaaaccattggattggatccataataccggaatgaaggaaatttacccccttctaaattttccgggtgacttgaaaaaactaatctttgggtcaaaaaaaacttggtttgcttgcaagcttaaaaggaagtcaacatgaccatagtttttaagataaaccacttccgggggggaagggaattccttgagggggggccggaaaatagttttttttgccaaaagattttttcccccatagggcattcccaggggcaataatttggtatcccactaagggcaaactttggg

SEQ ID NO: 598 - DNA, 561 bp, Glycine max
  Clone ID: PAT_MRT3847_100540C.1
ccacgccgtccggaaaggctatagcggttgacaaaaggtgtgggtagatttaaatttagaataagatgatagtgaccatagggacgaaaacctaccgggctaccttgcatagtgttaaggtgagtggtggaccaatcaaagacagacttggtacgaaatacaggtgattctctcaagtcaagacgtgagtaaagtctacacctgaaaatattgcggatgatggacaatcagagcatctaacgggtgatggggagctgcacaacatataagtgagagaatcaattatgacgatgctttgcttactgatcctgtaaatgatacgacaacagccaaagaagattctgatgcgctgcaatattccacaaaatagtgatcactatggagatgcttttgcaaccaacagacaatcataaaacaaacatttacctaatgctattttgccccttctgagctattgccattatgaaagttctgaatcttcctgcagatgacaaggctcgccttgagaagacagacactttacgagtgatgttagtgataatgagacacatgaagcatctt

SEQ ID NO: 599 - DNA, 415 bp, Glycine max
  Clone ID: PAT_MRT3847_100541C.1
ccaacctcagacattcggctcgagctctggtacagaacaacacagaggggatcgagaagtatagtttgagaatggtctacattgatgacttcttaagagcggacgcaaacacccaactactggatccgttaaaatcatgactttcattcacatatacatataaagatgccacttaatcatatcaaataaaccgtgcttgtccagaggccactccaggtactatcatattggatgcctactcacacactaaaagtaacatcattcacaagagcagtggacacatctctcatactcatcctaatacacacaccaaagatattcatcttataagctgaatgaaattcgatgcttgaacactctccaatattcaaccacacaattttacatccatgctacattgcgaacttaattgacc

SEQ ID NO: 600 - DNA, 198 bp, Glycine max
  Clone ID: PAT_MRT3847_100542C.1
aattttctagttattataaaatggcatacacaagtttcggataaatatcacacgacaaacatgggcttactgcgcaaatcctctatgccatcacgggaatgaaatcccggcctatacctcgactttccggcataacccacctccaaatgatggcatagacgatgcgtgcattaggtcaaacctgttcccgtgataaaa

SEQ ID NO: 601 - DNA, 238 bp, Glycine max
  Clone ID: PAT_MRT3847_100543C.1
ctcaaacggcatcagccagaggcgtatagagagcaaaactcagtgtaccaacagagaatatcaagaatggagggtgatactcttcatggcgtttgtgttggcttggacgtggtcgaaatgatcatgggctttctttttgcggctatcaacgagaaacatgactgcagcgcacgtggacatgatgatcgaagaagaaaatgtctgagggattggaaatcagtacgcctggtctgctacg

SEQ ID NO: 602 - DNA, 135 bp, Glycine max
  Clone ID: PAT_MRT3847_100544C.1
tccacacgtactccaatcatcgtattctccttgcactgtagactgtaccgtgcttcatatttggggcctgactaaacactagggggtgcaagagcatattactgcgttttgcaactcttactaaattctttgctg

SEQ ID NO: 603 - DNA, 415 bp, Glycine max
  Clone ID: PAT_MRT3847_100545C.1
gcacagattacgaacacgaagaagacgaagtttaagaacgatagtaatggaaatcatagcccggattgacagcactcgttaccaggggtgcctatggaatcggcaaaggtcttacactaactcttgcacacaacggtgccttctatcacgatacgggatttctctgaagaaaagggaagacaagctgcaagtactcgtctagaaaattaactcccattttcattctaagttaagatgcttcgctggcatattggtcaaatgtgatgcgagtcatgcatggtatctagctgctgcatctgacaagcattttgggacatatggaagactagacatttgtattaacagtgcagggattagtagatctgtaccattccgcgatgatcaaactgatgtcacccgaacattgaaatacact

SEQ ID NO: 604 - DNA, 411 bp, Glycine max
  Clone ID: PAT_MRT3847_100546C.1
caatttcttatttcactcttctccaccaatgatttccagcacccacttccttaacaactattcctttgtttggttggatatggagaaggcaccagtttttcattttcaattcatactttttcactgataatttaagaatgccactttttttcccttttgtcttttgctttcactactttgcatcactactttatgcacaaaagcaaaatgaaacaaaacattcatggcatcactactaaaaatattaatttgaaaatgaaaaaacaaaccaaacagctccatatcaaaggaatccaacttgtagtttatagggggttttggtttttcactgatgataggaatatgatatgagtatgataatgtgttggtttttgtatagatggatggcgaaataggtgggtgaaatcagac

SEQ ID NO: 605 - DNA, 473 bp, Glycine max
  Clone ID: PAT_MRT3847_100547C.1
ggcacagttgacttagtaatttattagttttctcttacttgtacagctagcttaatagtttgttagcttagccatttagctttatatatctagtccttttgtgtttttgttagagttaaataatgagaatttatgagcacaatgctctttcttttacaaacttattcttttcacatggtatcagttgaaatcttcccttttgctgtgatctttgattgatcattcttgcaaccattgttgttgttacactttcttgatcttaaatcgcaattcttcaagctttttcctcagttaatcatggctgaaaatgttgacccaattgcgaacaatgttattatcaataatgcaactcttacaaacttgctgaatccctattatgctcatccaaatgagaatcctggtgtggcgattgttgctcaggttctcaatggtggaaattaccactcatggtcgcgtgatatgctccttgcttt

SEQ ID NO: 606 - DNA, 1647 bp, Glycine max
  Clone ID: PAT_MRT3847_100548C.1
acggcgtccggcgagtgagtgtggcgttccggagaatatggaatggcagcggtgagtgagagtgaggtggtgcactctgtttggggatttgggaagttccatgacaagttcaatccattcctttcgcatgcatttctctcaaccttagagcactctgcttccgctgtcagggaaactggatgcatacaacaccacatcgttgccaaagccaacaacaccaccattctcgccgttgtcccactctatgttaaaacccattcctacggctaatgcttaccattcttatggatacaactattaccccaagttacagtcttgtgtccccttcgcacctgtaactgttccaaggatcttacttcgtaacacctccttcaaacatcaaattttctccgcaatcaaggaacttactctcacctcccagctttcatcattacatgttacttttccctctgaaaatgagtgccacaagctcactgaaaaaggcttcctgcccaggattggaatgcagtaccactggaaaaaccgtaactacaaaaatcttgatgacttcttgatggacatgaagcaaagtaaaagaaaaaatatacgtcaagagtgcaaaaaggttacaaacattgatatgtgcaggttttttcaacagatctcagcccagaacttgattatgaaacgcctccggggttatttaataaaggctaggcactgggattccttctacactttttacaggaacacaactgataacaaatggggcactcctcacctgacaagggaattttttcatgagctgggagcaaaaatgggagataatgtgctacttgtggtggctgaagaaggggatgaactagttgctggagccctaaatcttattggaggagatactttgtttgggcgcctatgggggtgtcagccacgaagttactaccaggcaattgaagcagctattgaactcaatcttaaaacagtagaggcaggagctcagggtgaacacaagattcagcggtgatatcttcctgtgactacttttagctgccattaccttattgataataatttatattttagtagaaatgtatgtacagctgaagtaatgaatacgttggccatttggttcgaagatgaatggtccatgtgtttgtattgctagagtaattctgtggtagttgtgttctgtgttaccagtgaattaaatacgaacatctccaatcgtccaactgcgatagaattgctgaactcattttgtttgactctataacaccatattaaatttaagaattccacctgtgacaacttatagctgccattaccttattgatgaagaatttagagaagctatacaagattttttaatacgtgaagctgctcaggtgaagctagttataaaactctggcatgattctggtccttttaaggaaggtatcctttagaaagtaaatttatgggtatagtatttgcaaatatgtatatgattgtaataatttatttataatttagcagaaatgtatatacagctgaagtaatgagtacgttgggtatttggtacaaagatgaatgatgcatgcgtgcgcattgttagagtaaaaaaaaaaaaaaaaaaaaaaaagttgccgcgtgaattaaatacgaacatctccaatcgtccaactatat

SEQ ID NO: 607 - DNA, 349 bp, Glycine max
  Clone ID: PAT_MRT3847_100549C.1
taccggtccggaactaatttcacgtgtcgactagcctagtttacttttcggcggcctgcccttcttttttctgtttggttgtttttacatccaaataccaccttttttgcatggccaggtttcacaacactatctaaattctatatcttattacatccccctgtacccatctgaaagtacacaacgattttttatactctcttatgattccacagacaagttcttacgccttatcaccccaagcacaatcaagcattgagaattctttagtctttcagaagattgttaaaaaatattatccaacctaggggcagctgatctcccttttttgcccttcagcaaacaccac

SEQ ID NO: 608 - DNA, 444 bp, Glycine max
  Clone ID: PAT_MRT3847_10054C.1
ttccaggtaggtttcccgtcatcactgtatgacgtcctccttctttgggggggggggggggggggggcataagtatagagtagcgagaaggttaaaatggagaaatagtaaacgattacttaagagagcgagccagtatagcatgagatgaaaaaggctgaaaagctctagtagaggtacgacgcaactgcagctacaagcactgcagcagacaaaaatagtaggcgataatttaaaaaccgggataaaggttaagtaatgggtagcaacgtatggttatcgcaggaaaatattggcatagttagttaataacgtgtaatgtatggacgatggtaggaatgtacacggttaataggattgcgagtatgggacatgcttgtgggtggctggatcgtgcgggagcatgggctgtgatagaaagtaatcggccaagcacagacaaga

SEQ ID NO: 609 - DNA, 717 bp, Glycine max
  Clone ID: PAT_MRT3847_100550C.1
ttctcctaaaaagaagcttcctcataatgaggatatttatattgctatgttaatttgtagtaaaaataaagaaaatgttgctatttttttttcaagttacaaatcacatgctttatccgcgacgaagagatactgctatggcacaatcatccttcagcaccatgaacctccatcacacagaaggaaagaacttgtttagattaaaaggtagagagtaaaactcttcactccttgtatctgtcttgaatgaacggaatctgtcccaccaatgcatgcctctgtcttttcgagtttggttatctttcttgcgcaatgtaacgtccaagagaagtgccaacataccggcaacaaatgcttcggattgaaatggcacattgatcatgtcattgaaccatctggctcgtgtgtgtacaggaccgtagcctttaaatgctgtgtactcattgaagtattgaggtatggagaagcccatgaaaatagagaagcctaagatgaatttagttctgaagctatttaaattgcaaaattgaaggaaactgagacctgctgagcctacataggcaaagaaaagacaatataaagctgcaactattggagctggaattgaagcaaaaacagctccaaatttcccaagaattgaaaaaaagatcatgaatccagctgatatttgaacaactcttctacttcccacacgtgtcaaggctaagagtccctcgt

SEQ ID NO: 610 - DNA, 499 bp, Glycine max
  Clone ID: PAT_MRT3847_100551C.1
tttttattttttttttttgttttttttttatttgagtgttgttaaataaaggtgtgtcttgggtgtcgtattaataactttaccttcacatcgattattgaattgtatagggcataaatttcatgcccttttaatcaaggttcaacaaattaagggtacttgcaacataaagggtgaacacaaacattaatgccacaaatatcacatgtggtggtgaggaaccttttcattcctcaattgttgtcggtaactgaccaacatggactccattccctcaatttactcaaaccaaatgaatgggaggggtttgaaaactatcaaacctggatgatcttgattaatggatttacaccacgcgaggaaagtccctgaactcatgaccttatataaataacaaactgcaactaaaaaattttgagaccaaatttcgtgcctaaaagaacaatgtgcactctggaggaataaagttcttttttatacggggccactaaaactaaat

SEQ ID NO: 611 - DNA, 2272 bp, Glycine max
  Clone ID: PAT_MRT3847_100552C.1
cccacgcgttcgcacgaagaaaaaaaggcattgaaagcaagaaaagaagcaaacattattctcgtgagtgcatgcctgagtaactgagtgagtgagtgagtgagtgagtgtaacatcgttttctcgtttgtgttttttcctttaaaatggaaaaccacatctacgcctcctcttacagcccttccaccaactacagatccttccgtgacccccccgccgacaccatgttcctctcccaccacctccaccaccatcgcaccgacgcctcctccgccgccgccctccgcttcccctcctcggccctctctgccgtcgaagccgccgatattgccccgcctggcgtcacctcccgaatcgcctcctcctccgccgccgccgacgacgagaatttcctttccacctggccccctgccgccgccgccgcgcccttcgccctcgacctcaaacgctcttccgaagctctctaccatccaaccattttgggtacaattgggcaaagtgaagcttggtattctacaaacccactggccaagcgccctagatatgaaagtgcttccaatatgactatatatccacagaggccaggcgagaaggattgtgcccactatatgctcacaagaacctgtaagtttggagacagctgcaagtttgaccatcctttttgggttccagagggtggaatcccggattggaaagaggttccaattgttacaagtgaaactccacctgagagaccaggggaaccagattgtccatactttctgaaaactcaaagatgcaagtttggttcaaagtgcaaatttaatcatcccaaagtttcctcggaaaatgctgatgtttcttctggcttacctgagaggccatcggagcccccttgtgcgttctacatgaaaactggaaaatgtagatatggtgctgcttgtaaattccatcaccccaagggagatagctgcaaatttgaccatcctgtttgggttccagagggtggaatcccggattggaaagaggctccaaatgttgttacaagtgaaactcctcctgcgagaccaggtgaaccggattgtccatactttctgaaaactcaaagatgcaagtttggttcaaagtgcaaatttaatcatcccaaggtttcctctgaaaatgctgatgtttcttctggcttacctgagaggccatctgagcccccttgcgcgttctacatgaaaactggaaaatgtagatatggcactgcttgtaaattccatcaccccaaggatatccagattcagttgtctgacgacttgagtcaaaatgttgcacagacacaaacaaattctatgatgggtggagctacaggagatacacagccaattaaatctcttatatctccgtcgttgcaaaatagcaaagggcttccagtaagactgggggaagttgattatcacccatacatgaaaactgggacatgcaagtatggtgtcagttgccgctacaatcatcctgacaggaatgcaattaatccacccattgctggattaggtgcctctattttgccatcctcggctgctaatctgaatattggacttcttaatccagctgtttctgcttatcaagcttttgaaccaaggctgtcaaatccaatggtgggaattgcagaaactatctatcctcagcgacctggacagattgaatgcgatttttatatgaaaactggcgagtgtaaatttggggaaagatgcaagtaccatcacccaattgaccgctcagcactgtcactgtcaaagcaggctactgttaaactcactcctgcaggattaccaagaagagagggtgatgttatctgtccttattatttaaaaactggaacatgcaagtttggtgcaacctgcaagtttgaccacccaccacctggagaagttatggagatggcaaaatcacaaggaacatcagccaatggagaggaagctgaaggcgatacttctgctctggaacaactttgagatctttcatgaaaacttgactctgtatttgatgagcccttttatttcttccttatatgttttttctgatcatgatatcaacagctgtggctgaagacctgctttgtttaatttagtgactaatttgtctcttgattggtatgagtgctgttttttaatggagtgttgctaggtgcacccagctttatggttagttgaattacaagatttctattcttaaatgtcctaaaaaaaaaacccgaatgggctaaaggcaaataactgggcaccaacacaaaatgggcggccgccca

SEQ ID NO: 612 - DNA, 414 bp, Glycine max
  unsure (1)..(414): unsure at all n locations
  Clone ID: PAT_MRT3847_100553C.1
gctgattcaaccccatgcaatgatcatcaacctagtgtatctgaggaagctgcatatgagggatgtgagcnatccactangcncttgctggtggggttgtatctcctttttccttgtctctgccgggatcagagactaggcttattcctccacatccatggttcataagactaatgtgtatgatgactctttatatgagggacatgcgaaaatttatctttgttgataatttgagttnnaacattgaatatcatattagtgctttttagcaattgggtattaatgttttgngagtatgatatattttgacttggtgttaacagtattaattaggtttttttgtagattaggtggtaggtatgatatagttgggttttgaatggttgtttgtgttgtatggtttataattggttt

SEQ ID NO: 613 - DNA, 920 bp, Glycine max
  unsure (1)..(920): unsure at all n locations
  Clone ID: PAT_MRT3847_100554C.1
atctaaacacatattctttggattaaatatccttaattcttttcattcatatgaatcagttgcaagtatggtgtcacttgccgctacaatcatcctgacaggaatggtatgtataatatattgatattgattgttcttacattttcctgtttcctaaacaattattttgcattatcattctttgatgcagcaatcaatccacccattgctggattaggcgcctctatttttccatcctcggctgctaatctgaatatcggacttcttaatccagctgtttctgtctatcaagcttttgaaccaaggctgtcaaatccaatgtctcaggtgggaattgcagacactatctatccccagcgacctggacagattgaatgtgatttttatatgaaaactggcgagtgtaaatttggggaaagatgcaagtatcatcacccaattgaccgctcagcaccatcactgtcaaagcaggctacagtgaaactcactcctgcaggattaccaagaagagagggtgctgttatctgcccatattatttgaaaactggaacatgcaagtttggtgcaacctgcaagtttgaccacccaccacctggagaagttatggagatggcaaaatcacaaggaacatcggccaatggaggggaagcagaaggcgatgaaatcgagacttctgctcaactttgagatctttcatgaaaactagactctatttgatgatcccttttagtttttccttatatttcttttctaatcatgatatgaacagttgtggctgaagacctgctttgtttactttagtgactagtttatctctggactggtatgaatgctttttttaatggttagttgaattacaagatttctataccaaanaaaatataaaaaaaaaaaaaggggggtggaggaaacacaaaaga

SEQ ID NO: 614 - DNA, 428 bp, Glycine max
  Clone ID: PAT_MRT3847_100555C.1
cttctcatgtacagttctcccatgtcccaaatttttcacccacagaaacttctctgaccaaaaaacaacacaacccacaacaatttcaaaataacacatacccaaaaagaaaaaaacagtctttattactctcttctgttattgcagtcatgcctttcttctttcacagttccaatattcattcttccctcccaagcttttgattattccaccactttacctaacaacaaaagcctagattttctctttccaatcacttaattctccgagttcttcacccaaaaggcaaaagatactcaaaattccccctttttatttttcctttcaatcatatccccttctcaattctctgaatatctgatttattcaactgcttctggcgtttcccctttgcataaaccccaactttcaacgtggtctctgaaaaa

SEQ ID NO: 615 - DNA, 408 bp, Glycine max
  Clone ID: PAT_MRT3847_100556C.1
gctgcgagaagacgacagaagggcagatatacacacaccactgttgactgaatgcatcattcagcaacactccaacgtgtttgtttgatgcagaaaacaaaatgacaagataacatgccataatctttataattaggcatagctcaagagtgttgttccttaaagctaaaccatagtgttcacagaaagggtccctctcattagtcattagtcgttttcttttttcaagaaaatactcaaatgaaaaaggggcatgagtggaaaagaaattctttgcttgagattgatacttaatctctttctcgtcataccttttaacaaataactgcatgtgtatgcaaaaatagactacatagtattacatcagatagaaaatttgtgcgatactggtaattactatttaataat

SEQ ID NO: 616 - DNA, 311 bp, Glycine max
  Clone ID: PAT_MRT3847_100557C.1
aggcgtgagaacacgtgagagaggaccaccgacggctgtaatcgcgtgagaaagttcattgaagctactaagccttttaccgtattggaaccatgtctagaagaaaggttatagatgccatggaagagaacgttactctgggcccatgtggtagagatggctaacatgtgtgcggcgtcggttacatgtgcgtctactatgaatcgatacatttattcatgtctgtgatctgtacgagagggaaacacttgatcggatcacaagctgaatgagcgctaaggctggcagatatgaatcgtgtccctattctg

SEQ ID NO: 617 - DNA, 210 bp, Glycine max
  Clone ID: PAT_MRT3847_100558C.1
gtaccgtgtctcgaattcccgagtcgacccacgcagtccgtccacacactcgtggtcgcgtactagtactcgctatagcttactattatttggaatcctggcctaacaactcgctggcttgctacattatgctaatgttatgtaatgacatcctttttcatttttaacggactgcttactactgttcattacataactatcactcattaa

SEQ ID NO: 618 - DNA, 478 bp, Glycine max
  unsure (1)..(478): unsure at all n locations
  Clone ID: PAT_MRT3847_100559C.1
gtgaataaatgcgctcgccctctacagtttttacctaaaccagtgcctgcatgcactccttaccaacataagcttgctacaaccttggcaaacgaaagcagccaaaagattgcannnnngcctttcagcacacatgcattgaaagttggtagttattcatcttttaagcatacaaactaattcatactaacttactactgcctgaagcctgaattatttacatcaattaaaatctatttgttgaaaaatttaaactaacatccaaactaactacttgcagagcgatttgattcaaatggaacgccatctatttggattggcgactgcaattagaaagagaacggacacagtctgatctagactggaatgctgactaaggaatatccatcacagactaactcattttcnnctgatccanngccttcttgctgatacatnnncgcactgannncatcctactgaccatattggacnnnaa

SEQ ID NO: 619 - DNA, 510 bp, Glycine max
  Clone ID: PAT_MRT3847_10055C.1
ccttgcacgatctgcttgctgcctgcacatcgtatttcacgtcagctatcaacaggaatcaacaactttcatcatgattgtcgagcccaacgccgtcatggatagcatcatggccgctgccacctcggttgcgcctattcccagcgtcgtgccgactctgcccgatttcgagaccgcaggcgagactggtcaccgcacgctatgggtcgtcttcgtcatgatggtcatctcgatggtcattttcgtaggcgctgcctggagcacgcccgtgtcgaagcgactttaccatgtcatcactaccctcatcctgacctttgcggccctctcatactttgccatggcatctggccatggcgctagcttccatcacgtcgtcgtcaaggagtcgcacaagcacgtccctgacactaccaaggatgtctaccgtgaggtctatcatgctcgttacattgactggaccatcacgacacctctgctcctgctcgatctttgcctgcttgccggtcttaa

SEQ ID NO: 620 - DNA, 428 bp, Glycine max
  Clone ID: PAT_MRT3847_100560C.1
ttttttttattgtttatttcattgtgatattttttttttattattataagattttacaaccgaaaaatttaattgtttttgttgcttacaccccaaggggagaacataaatttttgcccacctcaccgtttctatgaaaaaaaggataattctaacccttttccaagtctccggaaaagaaaaaaaaaaaagagaaggtgcatttttaaacgccccagctgcccggagttgagaaattcccaagccggtttggtgcgacccaaaaaaacggaaaaacatattttgtttttcgaccagggccgcgggaatccattaatgaccttaaaagaggggaaacgattggcgccccttaaaaacacaggggcgggaccaaaagagatgctgtttgagggggggtctttgcaccgcaacaatccgcgaacaagaac

SEQ ID NO: 621 - DNA, 258 bp, Glycine max
  Clone ID: PAT_MRT3847_100561C.1
tttttgtaaccatgaaactcttatgtaaatgggaaacctgagttacgcaatttacactgttaccacgtagtggggagggttcgaacttctaaaaagccagagaatggcttcttttgtgcggactactaacctggtaaaatttaaactctactgcaaggctattttgtctactcacaagagcaggatcctaggggcccatgggcaagattaacttgcacctaatgcacaaagagatgccccaaattgtgccccaccctt

SEQ ID NO: 622 - DNA, 215 bp, Glycine max
  Clone ID: PAT_MRT3847_100562C.1
caatataatagcctgccatgacatgcgccacaaacctttcctttattgcaaaaaggaccaagaccgataaggctagggaggaggggcagcctggggaccccaaggttgggttccctctgccaacaaactcgccaggtgcgctgtggagggcccccacccacaggaggcaccgcgggaacagcctttgtgggtcaagaactaggggcggcaaagcc

SEQ ID NO: 623 - DNA, 508 bp, Glycine max
  Clone ID: PAT_MRT3847_100563C.1
aaataaaaaaaaaaaaaaaaaaaaaaaaaaaaaaaaaaaaaaaaaaaaaaaaaaaaaaaaaaaaaaaaaaaaaaaaaaaaaaaaaaaaaaaaaaaaaaaaaaaaaaaaaaaaaaaacaaaaaaaaagggggcacctttaataaattcaacttttcattgctctacaatgtcatgacttgagaattttttattgccacccaatttaattccattgcagcacattttaaaattcaactgttggcaaaatcctttaagttttccaaaataatcccccttacgaaaattccccctttctaaaggcttatataacaaagaatgcccccaacgtataaccctttcaaaaatttggagaagccaaattgtctaaggggacaccccctttaaactaccactttaaccccgtccgcttttgtatgcccttttaccttgattgaacattttaaatatttattatcctcctttaattcaccctaaaaactttttaagttttttttttccagttgaattt

SEQ ID NO: 624 - DNA, 436 bp, Glycine max
  Clone ID: PAT_MRT3847_100564C.1
gttccctctacaaaggacttcctagtgggtgtgaaaggcagcggtggccacagaggcggcggaaagatggccttcagcggttcccaggctccctacctgagtccagctgtccccttttctgggactattcaaggaggtctccaggacggacttcagatcactgtcaatgggaccgttctcagctccagtggaaccaggtttgctgtgaactttcagactggcttcagtggaaatgacattgccttccacttcaaccctcggtttgaagatggagggtacgtggtgtgcaacacgaggcagaacggaagctgggggcccgaggagaggaagacacacatgcctttccagaaggggatgccctttgacctctgcttcatggtgcagagctcagatttcaaggtgatggtgaacgggatccttttgtgcagtactttca

SEQ ID NO: 625 - DNA, 1160 bp, Glycine max
  Clone ID: PAT_MRT3847_100565C.1
ggtatcaacgtgaaggatacataaaggccatggcaaatttaattgaaaaagagctgaagagttttgactgccccgaggaggtcatgatattctttagtgcacatggggtgcctcttgcttatgttgaagaggctggtgatccatacaaggctgagatggaggaatgtgttgatttgatcatggaagagcttgagaaacgaaagataactaatgcatgcacccttgcttatcagagtagagttggacctgtggaatggttaaaaccctatacagatgagacaataattgaacttgggaaaaagggagtaaaaagtctgctggctgttccaattagcttcgtcagtgagcatattgaaactctagaagaaattgatgttgaatacaaagaattggctctagaatctggtatagaaaaatggggccgtgttcctgctctaggatgcgaacctaccttcatttctgatttggcagatgccgttattgagagtctcccatatgttggtgccatgacagcttcagaccttgaagctcaacaatccctcgttccactgggcagtgtagaagagttattggcagcatatgattcacaacgcagggagttgccaccaccagttatagtgtgggaatggggttggacaaaaagtgctgaaacttggaatggaagagtagctatgctggctgtgcttcttcttttgttttttgaattcactgcagacaagggtttgctgcatcagatgggaatatggccctcgcttagatgaatgaatcatcaccacatgccctctaagccaggaattttgttgagttcaattttgatcatttgtcagaatatggcttttttatactacaattaaatcatgttcttaacacagttttcaagtagttgttaaaaatcatagtcaaagctaaattaatacaatgtgttaatgcatgattagatcagtgtaaaaggcttgacagtggatcaacataaaatccattcagttttgcttgtaaaataatgatagcatattatgctactcaaatccaaggcatgcactcagtaggagttctcaaatgtagttaggcacagtatttgtggatggtgaagtgagaggaaatttgtataccacacaatgtttttatatgcatttaaacttaagctttgttgattggtttaa

SEQ ID NO: 626 - DNA, 395 bp, Glycine max
  Clone ID: PAT_MRT3847_100566C.1
tttttgagacaaaacagcagaagaaaactaagaacacaaataccaacatagttttatactacaatttataaagtaaaactaaaacttaagaaaacgccatttattaattattagccttctagtaaattaagtgacggttgggcacaacgacgtcgtccagcatccacaggtcatccatgttgtcccactcagcaccaatgttggtggttaacaggaggttaattttcaaaacctagaaacaattaatttggtttaaggcggggttggtggtttcttcggcggttttggcggggggaccaagggggggaatgggagctgctgctgctgctttcttaagggatgatgtcagggctgaggcagcgttgctttttgaaaggtggcggaccggcggcggc

SEQ ID NO: 627 - DNA, 384 bp, Glycine max
  Clone ID: PAT_MRT3847_100567C.1
aatatcaatgaccaaccaagttggatgaatttggtttgatattttagtgttttgatgttatggaatttcattttggtaaatctcagtcaagcttattccttgttttaccttttgactatggttattacgttaagtggcaaattattaggaaaagaatgagaaggtaaaacgtatccaacatttcttgcaagttaaattaaattaattttgaagttaagtgaagctgcttttaaaacaagattgtagaggtaaaacgtatccaacatttcttgcaagttaaattaaattaattttgaagttaagtgaagctgcttttaaaaaaactaaaaagagggcactattcttgtaaattaagacattaaaataattaaatcaatgtataag

SEQ ID NO: 628 - DNA, 420 bp, Glycine max
  unsure (1)..(420): unsure at all n locations
  Clone ID: PAT_MRT3847_100568C.1
gcacgcgtacgcagagcaggattttgtggagcggccgccctgggggggcgggggggnncggngacggaacaagggcgcagaacncaggaaagccacgaaagagaaaacaacagagggaagacagncacaggactggaggacacacagcggaaacaacagaaagggaagcnagggccccaagnggaacgccccnnanaacagggggggggaaaggagctttttttattgttgggaggtgaaggaactactgaatgtagcacaggggattaggaagcttaccgggcctggttacgcctctgtggtctccgaggagacggctccattggggtcccatgatcccaacatggctgagatccctgccttgtgaggagcctcgctcgtctgcgtgatgcggatgaaactgccttggggggggaaagg

SEQ ID NO: 629 - DNA, 497 bp, Glycine max
  unsure (1)..(497): unsure at all n locations
  Clone ID: PAT_MRT3847_100569C.1
ttttatcgcgtgggcggacgcgtgggcggacgcgtgggcggacgcgtgggttcttgctctgtattttgtttttcttttaaatttttctttaaatttctcaattgatcaaagatcttcagcaaaccggtaaattctctctctttttctacgattcggttccgagaattttcagattcacagatctgtggcatttctggcttcgtttgatctgcatttgtcatccgttaatctttttctggttctgtaaatgattgcatgtgcgtcgataatcttgaagtctcgcgcgcgttgtttgtgaatgaacatgtcgtgtgtgaattgtcgattgatggcgtgcgattagggttttgaattcngtgatcgtgttccgatttgtgttatttcagggtttgtccttgaattcgttgattcagatctagcttgatcgagtgtggtgttgcttctgatattatctgaatggtttgcttaaatcattatattttttttttcgaaatcac

SEQ ID NO: 630 - DNA, 297 bp, Glycine max
  unsure (1)..(297): unsure at all n locations
  Clone ID: PAT_MRT3847_10056C.1
acgcgtacgtgggttcctatgaggcggcggtttttttttnttttttttttttttttttttggccaaccggggttggttttattacccaggtattcggctttattttggaccattttgattcaattcaacattggaaaccacccggaacttaaaaaaaggggtggaattggggggattcttaccaaacaaacctaaaattgcttaagaccccactgggggaaagtagaatcagagacacaaaattgttaaacaaaacagcttggtttcatgtatactagaacattctttacattaaaa

SEQ ID NO: 631 - DNA, 394 bp, Glycine max
  Clone ID: PAT_MRT3847_100570C.1
attcatatcagggggtatgaaagggcaaatcattccttggtaacagtcgtaacgtaagccataactttgtctgattatacgcaaacacacgttaatgaagtgtggaactgccatattttacaacaacatatagatggggggccataacaccataacctgtgtactacaaaacaggtgttactcgattcgggatggttttttcaatatgccctttcacttggctgcttggaaattattctgtacaatctgtgagaactgaccaacctacactatactacgatagtgatttgcatgagtctcctgtgtcatgcatgctgataactcaccttcgtgctctttattgagacttggggagcacctatccacctccatttgaaggaacagaatgcccttc

SEQ ID NO: 632 - DNA, 283 bp, Glycine max
  unsure (1)..(283): unsure at all n locations
  Clone ID: PAT_MRT3847_100571C.1
tccgttctccctctcctctcgcttcatacacaccagggcggcacgcgcagcgccatgggcccgccatcaccaacccacctctcttcaattataaacctatcctatatcatcattgacccaagctcacgcgactagtgggtattgatttgcggtcgcgcagatccaggatgcgattcgngngttaacttccaaggaaccagttcattgctggttctgctagcangaggttggatttcagaggcagaagctttcagccaggcgggctcagggcgcgggcacatca

SEQ ID NO: 633 - DNA, 227 bp, Glycine max
  Clone ID: PAT_MRT3847_100572C.1
cgacacagtctaactaggaatgcggccggcacgtatgctggtgaggtgggctatctatagctaaaaaaacatactgtgctggaggggagacctattactgacctaaggcagaaaggcccgacaattctctccctggatagaagaggcaatcctatggtggtctgaggattgttttctgttgatgccgaccaattacctggtctgcgtgatgcactagacaagcttct

SEQ ID NO: 634 - DNA, 446 bp, Glycine max
  Clone ID: PAT_MRT3847_100573C.1
tgaaattccggggccgaccacacccgtccgattcttggaaaaaaggtaaaatggggagggtggccaaggagaaatatttaaataccgtaaataatttttttgtggggcccccaccttattccaaaggattagattccattaatgaggaccgggggggggtcctggatatgcgtttatttgaaacgggagaatttgcactaattgcgggggtgggggtcccaactgttccagaatggtttcttacggccatgctaataaagtaagaaaaactaatttttgagaggttttgacctacagttggggcccagaactttgctaaatagataaaggatccttcgtttttttgatgatgtaagaagagttaattaaagaagcacggttggaaacataatttgggactttactttgtttttagggcagggtacttaaaagcttttggggatggg

SEQ ID NO: 635 - DNA, 1435 bp, Glycine max
  Clone ID: PAT_MRT3847_100574C.1
taggaagactaaaaggttgcagaatgttatgaactctttagtccacgacaagcagaaggaatatggaggtttctattacagatgaaattgcaggcactatggagctcaaccctgataggctgggtgagctcaaagcatttgatgacacaaaagctggtgtgaaaggccttgttgatgaaggggtcgcaaagatcccaagattatttcatcatccacctgatgaatttgtcatggcttcaaagttaggcaacacagaatacactatacctgttatagaccttgcagaagttggcaaagatccaagttcacgccaagaaattataggcagaataagggaagcttctgagagatggggtttctttcaggtggtcaaccatggcatccctgtgactgttctagaggacttgaaagatggggtgcaaaggtttcatgaacaagatattgaggagaagaaagagctatatacccgtgaccatatgaaacctctggtgtataatagcaattttgatctgtacagttcaccagccctcaattggagggacagtttcatgtgttacctggctcctaatcctcccaaacctgaagacttgccagtagtatgcagggatatacttttggaatatgggacatatgtaatgaagcttggaattgctctatttgaattattatcagaagctcttgggctgcacccagaccatttaaaagacttgggttgtgctgagggacttatttcactttgccattactaccctgcatgccctgaaccagatttaactttgggaaccacaaagcattctgataattgtttcctcacagtgcttctccaggatcatattggtggcctgcaggttctttaccagaacatgtggattgatataaccccagaacctggggctcttgttgttaacattggtgatcttctacagcttataacaaatgacagattcaagagcgtagaacatagagtacaggcaaatctcataggtccaagaatatctgttgcatgctttttcagcgaaggtcttaaatcatcaccaaaaccctatggacctataaaagaattattgacagaagacaatcctcccaaatacagagaaaccacagttgcggagtatgtacggtatttcgaagctaaaggtcttgatggaacctctgcacttcaacacttcaagatttgagttgaattggtgtgtggtttatttagcccaataaatgaatagattagataagttggatattataacatttatgaaactaaataagattaaggatcttatattcttattcttggactggaaatctgtggtatcgtttgtcttgtaactaagtcattataatataccgtatgaggtgaaacaagaaaaatgcttgtgttgattatgtatcttcatatgaagctacgcctagcaaatttatgttctgctcgtgattgatt

SEQ ID NO: 636 - DNA, 671 bp, Glycine max
  Clone ID: PAT_MRT3847_100575C.1
ggggaacaaactaacaacttttattctctttaatttaaaaatatttaggttgaaataggctcttaagaattatcagacaaaacaataatagaaaactttccagatcccttgaaaaaagccacacttatcttttgaggcaggctacatgcctgatacaagattacatcttgctatttctaacatgtttttattagttaattttaatagaaaaaaaagcccacaaaacaagttacaagccagcacgggttacggtagtttactccctgttgctttcactctagcttttgggaagatcttaactctaagtcaagaatgcaatgctgtttcaaatgtaagcaataataatactacactaacaaagtttattattaccagactaaagttctaatttgaattcacttagaaacaaaaggtcattctatttaaatgaaatgagtttatatattatataactggaaggcaaatacaacatactaatatatcagtcagtagtcaagctgttatcattctaatctgaggcacagaattcaggatatactccaaaacactacaagtagcacagcaagcttccgaggctaaaggtaaagacgactactagataacagcttctcctttcaatcgctatattcactttccacaaccaaatgtttcattccagttttcataaagct

SEQ ID NO: 637 - DNA, 258 bp, Glycine max
  Clone ID: PAT_MRT3847_100576C.1
acggctgcgagaagacgacagaaggggggacttgctgctagggtggttgatagacagcaagtgcataggaccatgtctaaagaagaaatgctgcatcggtttgagcttgctgatgatgacaaccctgagactctggctgatctaagtcaagaaaatgagcgtcaagacaaccctaatttggttgggcattcactgaaacacacaacaccacattccaatggcagctggtatcaccataagttcactgaaagcttactt

SEQ ID NO: 638 - DNA, 257 bp, Glycine max
  Clone ID: PAT_MRT3847_100577C.1
gcgtgaatggagcctgaggcacgtgcgaacgggaggtggggtcaatggtgcctgaaccgcgtgcgcggaaggacttatgaatattatacagagcctgagggccccacgcccactgactatgagccgtgcatgagcatcgaacctgataatgtgatagagctctcgagagagctctccaagaatgcggcaatgatctagacgctgccatcaagaggttgactgagctttgcttgccaactgacgatggaaatgtaata

SEQ ID NO: 639 - DNA, 1182 bp, Glycine max
  Clone ID: PAT_MRT3847_100578C.1
cggccgctcgacttccgctcccgcgacgctgtcaactggccatcctgatcgaaggcatccttgttcagacgtaacgaaatagagtaatatccccttctttgcttttctttgagaatatccccttctttgctttgaatggaacaagctgggaagcaaggaattatggtggcgtctcagagtcaaaaccccattgagcaaatccaagcgcgcttcaaggacttggaaactggattccgcctctggctctccaagcagtccctccccgtcgaggccgccgtcgtcaccaccaccagcgccgcccagggcgccgccatcggcgccttcatgggcaccctcaccgccgacgcctcctccaccttccccacccctcctcccaacgcctctctcaatccccaagccatggcgtctcttaaacaagcgcaggctctagctggaggtcctttaattcaggcgcgaaactttgctgtgatgacgggagtgaacgctgggatttcctgtgtcttgaaaaggataaggggaaaggaagatgtccagtctagcatggcggcagcttttggttcaggggccttgttttcattagtaagtggcatgggtggaccaaatcaagcaacaaatgcactcacttctggacttttctttgcacttgttcaaggtggacttttccagataggacaaaagttttctcaaccacctgctgaagatactcactatgctaaaacaagacacatgttgaacaatcttggccttcagaggttacgaaaataatatccaataaaggcttggttaacagacaacattctgtcttaaatgacagttgtctttcttggtttggtagctctgtttcttggtcgtagccagtggacttgagaaaatttggagaagtaatcagttattttagttgtgccatgaaacgtaaatggcctgaaagtaaattagggagcacgaatttgttaactctaaaataagtaaagctaatgcatttttgcgtagtttgtttgatagctctgttcaattgttgttgcagaatacttgatacaatttggttaaccaatcagttatattttagttgtgccatgaaacgtaaatggcttgaaagtaaattagggagcacgaacttgtcccctttaaagccatcgaaaaatcgatagtagaaagtatgtgttgcaaatgaattttgtcttt

SEQ ID NO: 640 - DNA, 262 bp, Glycine max
  Clone ID: PAT_MRT3847_100579C.1
gcaggtataataaatgatataatttaatgagaagagtcaaatgaatgtttgtcgttaagggatgcctacttgtcaattgcattcatttatttatatcgaccatacactgcttctcattcttgagagaaaaattgccaacccaatattctggcacaattgtacatttcttacgattattatccatgtgtctgttgtcgctgtttcccttttcctctcgtatttttttcttccctatctttcctatttttattcctcctctccc

SEQ ID NO: 641 - DNA, 269 bp, Glycine max
  unsure (1)..(269): unsure at all n locations
  Clone ID: PAT_MRT3847_10057C.1
caacttctgntacccactctcttcttccncannccangccacgctnttctctacagtcatgggcaaggtcaagatcggaatcaacggatttggaagaattggccgtntggttgccagantcgctctgcanagagacgatgtggagctcgntgncgttnacgaccctttcattaccnccgannanntgncatacatggttaaatacgacattggttcacggacactgggaagcatcaggatgtgcgccgttaaggncgagaaggcccntc

SEQ ID NO: 642 - DNA, 1359 bp, Glycine max
  Clone ID: PAT_MRT3847_100580C.1
cccgcgtccgggttagttggatacaaaagtggcatcgctcgcagtttgatagggtgcgtgacaagtataaaagggacaacattgaagacaacgttatcatatccttctttgcttggaatggaacaagctgggaagcaaggaattatggtggcgtctcagagtcaaaaccccattgagcaaatccaagcgcgcttcaaggacttggaaactggattccgcctctggctctccaagcagtccctccccgtcgaggccgccgtcgtcaccaccaccagcgccgcccagggcgccgccatcggcgccttcatgggcaccctcaccgccgacgcctgctccaccttgcccacccctgctgccaacgcctgtctcaatccccaagccatgggcgtgtgttaaacaagcgcaggctgtagctggagggcctttgattgaggcgcgaagcttatggatcctgtgtgcctgaaacccagtaaaagcttttgtttgcttcttctttcctaaatatgtaaagcaattatactttacttttgaggggaaactaaaatgtccagtccagcatggcggcagcttttggttcaggggccttgttttcattagtaagtggcatgggtggaccaaatcaagcaacaaatgcactcacttctggacttttctttgcacttgttcaaggtggacttttccagataggacaaaagttttctcaaccacctgctgaagatactcactatgctaaaacaagacacatgttgaacaatcttggccttcagagttacgaaaagaatttcaagaaaggcttgttaacagacaacactctgcctttactcacagacagtgctctcagagatgtgaggattcctcctggacctaggcttttgattcttgaccacatccagagggacgcggatttgaaagataagcgaggaagccgaaagtgactgatatgaatagtttgctggcttggaactttgaaagccattgaaaaatggatagtagaaagtttgtgttgcaaatgaattttgtcttttttgtttgttagctctgttccattgttgttgcagtgtacttgataaaatttggttaactaatcagttattttagttgtgccatgacacgtaaatggcttgaaagtaaattagggagcacgaatttgttaactctaaaataagaaaagttattgcttccttgtgtaggaattgttacgtttgatttcattagttcagtcaatgattcgttccacatagataatgctaatcggaacggaagaagacttgcgccgctattattattgggagtgatttccttttaacaatagcgcctgaatcgtttgtggaagtgaatgataagtaatttactattctc

SEQ ID NO: 643 - DNA, 487 bp, Glycine max
  Clone ID: PAT_MRT3847_100581C.1
acgctttacaaccctacgatgatgagtcagcattcccgtaggaggctgccacgtggcaatccaagaaaggccaagcgtgacgaagttgacaagcaggctgcgcccaaagccgccgagccggcaccatcctcgaatcggcttctagccggctatcttgcgcacgagttcttaaccagaggaactctgttgggtcagaagtttgagctggacttggaccgagccggcttggctgggtccagctcagcagaagcttcagccgtggaggcgagaccctgtgtggtgaaggagcaccatagttacgaagtgctggcaaatcttttgaagagaaaggagacccacattaaagggaaatgtgaaccccacacagctttccaactggattaacaagtgaccatgacgtggaattttcttttcttttgtttgctgcaacgcatgaatcaattcgattgacaggttagtttgaatttgattcaagttaggggttgcg

SEQ ID NO: 644 - DNA, 735 bp, Glycine max
  Clone ID: PAT_MRT3847_100582C.1
aaaagggacaacattgaagacaacgttatcatatccttctttgcttggaatggaacaagctgggaagcaaggaattatggtggcgtctcagagtcaaaaccccattgagcaaatccaagcgcgcttcaaggacttggaaactggattccgcctctggctctccaagcagtccctccccgtcgaggccgccgtcgtcaccaccaccagcgccgcccagggcgccgccatcggcgccttcatgggcaccctcaccgccgacgcctcctccaccttccccacccctcctcccaacgcctctctcaatccccaagccatggcgtctcttaaacaagcgcaggctctagctggaggtcctttaattcaggcgcgaaactttgctgtgatgacgggagtgaacgctgggatttcctgtgtcttgaaaaggataaggggaaaggaagatgtccagtctagcatggcggcagcttttggttcaggggccttgttttcattagtaagtggcatgggtggaccaaatcaagcaacaaatgcactcacttctggacttttctttgcacttgttcaaggtggacttttccagataggacaaaagttttctcaaccacctgctgaagatactcactatgctaaaacaagacacatgttgaacaatcttggccttcagagttacgaaaagaatttcaagaaagggcttgttaacagacaacactctgcctttactacagacagtgctct

SEQ ID NO: 645 - DNA, 837 bp, Glycine max
  unsure (1)..(837): unsure at all n locations
  Clone ID: PAT_MRT3847_100583C.1
ggtccggattcccgcgtcgacccacgcgtccgaacgacgcccacgcgtcagatccccttctttgcttttttttgaatggaacaagctgggaagcaaggaattatggtgacgtctcagagtcagaaccctatagagcaaatccaagcgcgcttcaaggagttggagactggcttccgcctctggctctccaagcagtccctccccgtcgaggccgccgtcgtcaccaccaccagcgccgcccagggcgccgctatcggcgccttcatgggcaccctcaccgccgacgcctcctccaccttccccacccctccgcccaacgcctctctcaacccccaagccatggcctctcttaaacaagctcaggctctagctggaggccctttagttcaggcgcgaaactttgctgtgatgacgggagtgaacgctgggatttcctgtgtcttgaaaaggataaggggcaaggaagatgtccagtccaggtgagctttatgcctcaaatgatccaactttttttttctttctatcatcggttgagttttccaaactttttacccttgttttttctaactccaattgtttttgtaatttatatattagatatgtgcagttcctaccctagatgattataggatacaaaggtctatgtatatatggatgaagtagtgctgtagatggatcgtaacttggaatcattttgagccaccttgctgtaaaatcttactcacactttaatcattttagaatcactggtaatacagctacaaaaaaccatggaaagaatgtaattattcaccatgagattctttttacaactncttcttggtctccctttccttt

SEQ ID NO: 646 - DNA, 551 bp, Glycine max
  Clone ID: PAT_MRT3847_100584C.1
ggaatctgccccgaatagagagcttccccaccctcagcgtggtgcccgtgaaagggaacgtctacaggtatcttcatactgtattattttgttgcttgcttttgattaatgagtgctcattttatctacctgtgatataggctgttaaccaacttggtgatgctaatgaggttctgaatgaacgtgctgtggttgtcatggctcgcatgagtaataagcttacaggacgggatttttcaacttgttcttcagtatcaaacaactcccctcagcatgctgtggaccatagcagtttaatttctggagacactcgtgaagttgatcatgctttatctgtgaagttgcaagttcaaaagttaataatccaagcttcctcgcatgaaaatttgtgccaaaactacgtagggtatggtctcttaacttagtaattttctgagtaaacatcaaattttacacacccacccacacacgagttctggtaaatgggcttatcaatctttgactccctcctttattttctctttttgattagatcaaaaggaactttcatg

SEQ ID NO: 647 - DNA, 346 bp, Glycine max
  Clone ID: PAT_MRT3847_100585C.1
gctgaatagtgcttggaaaggaacatactcgggagacttaacaggcaccttgacatttcaatacacattgcaacggcaaggctaggcagggatatctagcatggacaagcccaaaggacgccggaccacataaaagggtagctgttacaactgtgggatactacactgaaagggatagccatagcgcagaaggcgatgccattaaagctgataacgctgcggccataatattaactttcccaaacaactgtcgcgtactataaatgcaaacgtctgatatgaacaaaagtgacacatgtgggcgtggccccactgtaacgctctaggatcagcccaggattggtac

SEQ ID NO: 648 - DNA, 327 bp, Glycine max
  unsure (1)..(327): unsure at all n locations
  Clone ID: PAT_MRT3847_100586C.1
tgtctcttttttttttttttatttttttgagccacatnggacaaatgaactaataatattaaaaggttgagtttggaacaacatgattaggcaaattaaaaacatgcctaaaacattgcaccttaattagagaaacccaatctcaaggatgaaatcttatctttaacaaaacaagcgcacatgtatactcacaccagaaatctaataaatttcaggtctganagaaaaactnagatcagtgaaatatagctcctacactagatcatctggcccagggagcacgacattgcaatcatcagcatttatcctggcaaccagaatggctgc

SEQ ID NO: 649 - DNA, 455 bp, Glycine max
  Clone ID: PAT_MRT3847_100587C.1
ttaccgtgctacatgtgtgtagtgcctccttcttgggggggggggggggggggggggggggggggggggggggggggggggggaaaaaaatgcccaacggacctaccagggggccagcgtaggttgagagaggacctgagataaaggtagttgaaggaagggtaaaagaagcaagacgagagctagaagttagaagataaccatgcaatatagatcaccgataaggttaaactaaataaagaaacaaacccccgacgcacgtttgaaatatatcggaagctaagggggggtgggggtaaaagtatagaaagctaaagtaacggtaccagctcattgtacaacaaggtgtgagcgagacaagaggtaccgaagcgcgccgcaatgacgtggcgggcggagtttgacttggtacggcggtctgaggtggccatgggctacccctaattggccgaccc

SEQ ID NO: 650 - DNA, 256 bp, Glycine max
  Clone ID: PAT_MRT3847_100588C.1
tttttttttttttttttgggctaaagaaattctaaatagaatttttttgatgagtggggatgaaaaaacaaaacagcacaggaaaagggaacaacatccttaaaaaagagacacctgaagcatcagaaaacaagtgatgcctcattgcaagtggaccaatctaaggcataaaatggatatacaattgcttgtgttctaaaaatatatctaaggcataaataaaacaatcataaagtggaaatgaatttctttattt

SEQ ID NO: 651 - DNA, 234 bp, Glycine max
  Clone ID: PAT_MRT3847_100589C.1
gacgcgggggaagtgtgtgaagagccctacagtcattgtgtacaccccggtcggaatactattaccttggatctaccacctcataaaccaggatccttatgcccttggagtttttacctgggcagattgggcagccgaggctcagaacccatagattttcaaaagcatggtcccgaagctagtgatcgccttatgcgttatgaaaagtcagcttaacccattctgaacgttttc

SEQ ID NO: 652 - DNA, 186 bp, Glycine max
  Clone ID: PAT_MRT3847_10058C.1
aacgcacagccactggaggaagatttctttcatctgcctgcatacgtgctatttgtcacacagaccgacaatgattggctatacccaactcattgaatgacgttttgtgggaggaaaacgagcattggaacgtttaggttacaacctttctgttgtaaatttccaagagactagatttaatctgtt

SEQ ID NO: 653 - DNA, 226 bp, Glycine max
  Clone ID: PAT_MRT3847_100590C.1
ggcattgaaaaacaaaacttattaaccgcggtttgggctacttacaaacgacataaaaatataccacttttatattaatctaactatcattaaaatcaaaattaaaaataaattacccattaattttcaatctgaaaaaaccataccctaccaaaaactaagacacattataaaagtataccctttcaaagaataaatttttactttaagcactttacatccaaaa

SEQ ID NO: 654 - DNA, 360 bp, Glycine max
  Clone ID: PAT_MRT3847_100591C.1
gatggatagctgcagaatgcggcttaagcagtggtaacaacgcattttacgcggtgacaccgacaaagatgtcttgggtaaccgcgacagcagcactagacacgcatactgcgtttcacactaaggacacggtcgaatcagcggagttgtcctcatccgacgataatgcctccttgtcagctggatcggatgatgaatcggaacgattgagtggaacggaggacacaggaaagaagcagactcgtcagggccgtgattggcgaccaaagagcacactgcacctcaagatcgcgcgtggcgaaaaattatctgcggtcgagcgactggcttcgcgtaccttgttaccagaggagtactaca

SEQ ID NO: 655 - DNA, 176 bp, Glycine max
  Clone ID: PAT_MRT3847_100592C.1
cgcattgataatttaatcttttatttctttaagggatatatacaatccagcctaaccaaagcagagggggttcaaaccaacgaaaccccagactaataacactcgaattaacaaccagaatcacgccctatttcctctcgctcataaatattaattgacaagtagggaaaaaaaga

SEQ ID NO: 656 - DNA, 1323 bp, Glycine max
  Clone ID: PAT_MRT3847_100593C.1
cgattcacgttacgggaccttttatgtgttcgtcatcaaacaccatcacccaacaaacaaaacccacccaacctcgacccccacccaataaccacgtacgcttcctaaactgtagacattcaaagactagagaacaaccaatgacacccacccaacaaaaccacgcactcaataacaacacctcctctctccttgcagaaccttctttccgtcatttcctaatacaactgtattcacggccattccgattactcctaccactttggtggtgccctttacccgttgttgttatctgcggcgaggagaagagttgcccgaacccgaaaaccgaacccgatttcgacgagccgcggagggagcaaacggggacgttgaggaccggcgtaaccctaacgttggcggaataagagcgttccattccgcggtgcttgaagcggggaccaccgttgaacgtgctggggctactcgagcttcgctctaggctctggaacactattttccccgaagagttcattctagggctgtccacagaaactcccctgcatgtcaccgtctccgattcccgccggatcgaactcctccccgggcgggaataatgttggtccgatgagggcttgtgagcgtcaaatgagtttgtgcggtttctgacgaggcggattctagggttagggttgcggtggagcgagatctgattagtgttaaggctaaggttagggttaggtttatcggaatcgagggataggcgagggaggtcatcgtggtcgtggcttgaggaggaggaggaaagagagaggcgcgaggaggagatggagagggattcggcgtcggaagaaattgaggttaacaaaggcgcgttttccgaggagaaggaggaggtagacgacgacgtcgttttgcggtggaggaggatttttagggatttggctgaggttgaggaaggtgtggttttggtgttgtttgtggtttggtagagttttttgaggccgaggaggtctttccagcgggaggagcagcggggggctttgggggagaagaggtaggggtcggcggaggaggaggaggtggtggtggggggggtgacggtgttaacggaagcggaggaaggtgatttgggggtttgaggagtggtggtggaaagaggtttgaggtggagagggaggagtttgccgtcggagaagagctggtcggcggggagcatggtggtgggagggtctaaggggaactcgaagtcgggttcggggtcggatccggggcgaggggagagccagggagggaggtggttgacacaggccagggaagccattgccaatgccggacgcgtgg

SEQ ID NO: 657 - DNA, 473 bp, Glycine max
  Clone ID: PAT_MRT3847_100594C.1
ggcttattatggttgggtggctttgaaccacaaaatgggcatgttcgatagctacccagggtctcccactttgggacttgttgatttgggtggctcaccgttgcaggttgtggtagagatagatggttctggggatgatgtgcacatgatgagattgaagctcagctcaacagaacctcggattttggcatactcattgcctgcatttggcttaaatgatgcgtttgataggacagtttctcatgctcaggaacaatcaaagtgtggaaagaactgagctcagacatccttgtctggtatcaacttttgcacaaaactatacgtgcctttcttgctctggattggcttccatttatcagaaaaatcgcagccaacaccaggaaagtgaacattattctttacgtcttaccggagaacttgattgggagcaatgcaaagaactagctattgctgctgctatgaacttgagtgat

SEQ ID NO: 658 - DNA, 156 bp, Glycine max
  unsure (1)..(156): unsure at all n locations
  Clone ID: PAT_MRT3847_100595C.1
ctcntagggaaagttaggggtgcctcaacaaaanacaacatttttnacacagcagttctataaaatggagataattggagtgtcggacagccaccacttgttgttctgggccgagctctgctgcagcagtcaagaatactcgcactggattaagga

SEQ ID NO: 659 - DNA, 382 bp, Glycine max
  unsure (1)..(382): unsure at all n locations
  Clone ID: PAT_MRT3847_100596C.1
aagtacggctgcgaaagacgacagaagggggggggaaagagagtggattcttgtgacgtgggtgaccagaaaaggagcagacaggancaccaaagacattgctctaggatctatcgaatagagaaacaaatctctcggcatctacatatacaaaatcataatcgctcataagaatgcaattgaattgatatcaaaaatgcacatcacgggatcgagtcacagactcttcagtatgggcaataaacagatcccgatattcccgcgctccacatctccatgtaggacacattcgaaggtaactacgacgagggaagggtggggcaggacgcagagaatcgtgtttaccccatcaaagagctcgataggatcactggccagagac

SEQ ID NO: 660 - DNA, 386 bp, Glycine max
  Clone ID: PAT_MRT3847_100597C.1
tttttttttttttttttttttttttttttcaaagcaatcgagaaattttattgataactcagtaactagatacaaaggaaatctggcaaattgattaaatgacagctgaagcttttacttaataccaaatattaacataatacatgaaaacatgaaaaattgtaacctgaaactttacattataatttctatatatcaaagttaacattaaaaactcaatacaaggtcatgccatagatgctctttctctttccctttccctttgggggaagaaatattttggggcatgactagcaacttgagacatggttcttatcttaagagcatgtgtggaaatgttcttccattctcccttgccaaagataacaagcctttgtttcaactca

SEQ ID NO: 661 - DNA, 239 bp, Glycine max
  Clone ID: PAT_MRT3847_100598C.1
caaatcttgctgtttgtcctgcaggaacctttatgttatacctttccactatgtggaatgatgccgatgacggaatgaagctactaacagcagccatgaatgctcttcttacactgcctgtaactggaaacccggaatgtattccaagtgttcatagtgatcatgaagatattgcacccattgtgcactggagtgcattttatactcagaaatgagttatgtgtaatcattaatttatc

SEQ ID NO: 662 - DNA, 598 bp, Glycine max
  Clone ID: PAT_MRT3847_100599C.1
ctttttttttttttttttttttttttttttttttttttttttttttttttttttttttttttttttttttttttttttttttttgggcatttatcccaaaattggggtgatatatttgaaacttgatagcgattagctgatgtatcaccccacggcccctagtagggaaaaaaaaacccgggaaaaccaaatttttccacaaactaagggatcagcaggaggttcctttgattttcttttgaataaaaaatttttgggggcggggttaaaatttcctttttgaggggaagggcgagcttaattttctaacccatattttaaggggtggcaaacttggaaaacaattgcttggatttaaccgaaccggctggtaaaacaaggtttctttttaaaaacaaatcacaaatatgtagcctggtgaaaaaaaaaaaagggggagcttatgttttgggcaaaaattgggcccccaaactttcatgggaaaaaacaaattaacttctgaattttccaaaaaaattcttctatgctttcataagaagaaaaaaaaaccacccataacttggagaagcctcttctcttaaacaggggctattcttct

SEQ ID NO: 663 - DNA, 446 bp, Glycine max
  Clone ID: PAT_MRT3847_10059C.1
aaatcccataatccctacctagacaggtttaccacaagcctgtgtcactgtccggtgaacacagcgtcgacattagggtaaggactgaagtcggagatgctgcgggagtcgccggaagtaattttcccagggtggttttattgaagagatctcagccattaattttaatctacgttggagatttatttaaatccacagacactctccaaaatctcttaaatttctccgcccataaataaaactcaacatctaacgatccttattttctccacatcacaacacaaacttatttgtttcttaattgctccgcccattggcatatttccctcctattaataaattctcaaccttgaaaggcttctgtcattataatacaggtaataatctctcttgggtaattcaattcctatggtgacaactcatttcaagggattgggtgttgtgac

SEQ ID NO: 664 - DNA, 2003 bp, Glycine max
  Clone ID: PAT_MRT3847_1005C.1
aattcggctcgagtccaaatcagcacaaagcaccacgccatatggcacgagtcctttcacagtctccatccggaagccaatagccccgttgaactgcaccgcatacaacctcaccggaacatgccccacaaacctacaagaccatcagagcactccagccaccgccacgtgtccagattacttccgttggatccacgaggatttgaggccttgggcccgtacgggcatcacgcaagacatggtggagagggcaaagcaaacggcaaattttaggttgataatattaaagggtagggcttatttggagacttactcaaggccctatcaaacaagggatgtttttagcatatgggggattctacaattgttgagaaggtaccctggcaagatacctgatttggagcttacaatggccctaatgttgagcaaccaactcccttgtttcgggcagagattaatataaagccatggcatattttgttgggagagttgaaagaaggcactacgaggataccatggctgaacagagagccttatgcttactggaaaggtaatccagctgttgctcaaaccagataatatctcatggaatgcaatgtttctgaaaatcaagattggaatgctcgtttattggcccagaaaaaaggttaaaaagaaaagaaaagtgagtgggaaagacacactcgagtcgagcgggagtcaaagctggaagtccaaagtttctggaactcaaactagtagtgtgggtgtggaacaggacaagggggtttctgtgaaggactatttggtggacaaactgaggcctggtgatgaagacagggctctctctgaagtgatatcagagactctgcacaagaaggaactgcccccagaggaagttactgaagaaggtgtgagaaaggtggtttctgatgctgtgcataagagagacgatgatcctgagagaagaatggaacatcaaagaatactgggaaaggtaactgagtcagaggaagtgaagagaaggttaggaggtgaaagtgttgtgacagagaaaaagtaccaagagatgtatgtgaatagtccggggaaaggtgtggttgataagcttaaaggtatggttgggacatggtttaccaacccagcagagaatcaatcttcacaaggtaaatagcaatgaatagtagctctagttgtctccatgaggtttctcttgtttgatcaatgccttttgcaaattttacttatttctaaattagttgattgtattcttttaccatacttctctgactaattcttttgttactcttcacattctgcttgagttttgcagctagacaaagatattttgtatcgatattaaaatttattatctctctatttgtttattatatttgccttgtaacagtttttcgattttcttatcttggaagaagtgttttgagaaacaaaggaaattatgattatgtatgtttctgttagtcttaagacttgattccaagatgaatcgcagttatttgtttacttgttttggtcatgcttacatatttttctatatgtttcttttttttttcattttgtaagaactgtttaaaaaaaagtggagtattttttatcctggtggttttagacttcagtccaagatgagttacaattttttttttactttattttgggtatgctattttttactgaagcaaagtgccacattaattttgaatttgtggtttgcatgggccgaagattcatctatgaattatgaggcaggaagggcagaagtggaacaagttaaccaaggtgcagcaggtgaaagaaggcagcaggagtcatctaattgaagaagtgctttgaaggagtctttgctttgggtgattgtgtagattttcttaaaagctgtttcaatatctgtgtgtctagttctttgttggaagaaagttaggatgttcaagtcacagtaaactaaaaatttgtgtttttttttttaatgtttatgtaaatatccaattttattcgggtttattttt

SEQ ID NO: 665 - DNA, 106 bp, Glycine max
  Clone ID: PAT_MRT3847_100600C.1
ctcattcgtacgaatagggatacgagatagatatatctgttctttgctggatactttctcgattgcggtcaaaaagggaccaactacaaagaacaacctcattagg

SEQ ID NO: 666 - DNA, 137 bp, Glycine max
  Clone ID: PAT_MRT3847_100601C.1
aatggaaggccgggccgagcgacgcgtccgaccttacaaaaggtgacgactgcatttttttttccatcttacgtacgcttgcatgcgaagggttaatttttctatagggtgacctaaattcaaacttactggaccaa

SEQ ID NO: 667 - DNA, 1347 bp, Glycine max
  Clone ID: PAT_MRT3847_100602C.1
ggcttgatcctcagagcggccgccctttttttttttttttcttgctatagtggagatagtcgcacgtaatgacagatcacggccatattattaaaagcttggggtaagaatgggtttcgctcgagcgcccgaaaataatattccaaagctttagtatgttctccgttacttgtgtggataaggcctatgttataaagtatataacttcgatcatagggatcaatttccagtcgcatagcctcataataattctgtaaagcttccgcataatttccttcagattgagctgacatccgttacggtcgtcattcggttcaaagaatctccgctccagaaccgtacgtgagattttcatctcatacggctcctcccttatgtgtgtaatgataaaaatacatagaatcaaaaaagattgcagtattctcattattaactgaacagggctagtgtttttacaaaaaaatatctagccaaccttcctgtaaaaaatgatttcttaacattaagtatgttggtactggataaaaaaaacagtaactccaacaatttctttgtcctcaacgctgcttaatttcgcggaattagtcacctcaataatcttcgatggttatatgggtatccaaaatatgaacgagatggatatttattgtcccaaccattcttgtttgtcgcaatctcgataagacatggatatctatctctctatatatagatacaaagttttcgtgttcttgattcccaagcgtagtgcttctttcccaatgctgcctatcagtactactagtaggttagggttgacctaaccacataagtataggtataacctttcgcttaatactataaacctaaagtttaagcatatgaggctgcattaatcgaggatacacgacagaaggaattaatcctttatatttacaaatttcaccttcagcaagcgtgggttttttccactttttaccgatttcggtaaaaaaatagaatcaaatcgcaccatctctgtaataagtgaatgcccttttttctcccgaagttgtcggaattattcgtaataagatattggctacaattgaaaaggttttatcaataaaattttcatttatccgagatctaggcataggtaaaaatccattctataatttaatgaattatcgtgtgagaaataaatcccacaaataaaggaattgtacaatacagtgcgaaataacgtaaaaacggactcattaatttaatccaattggtttatcctaagaccccgtaggaggttttttttagaatttttctttctattttgatagtttgaataggttttatgcatttatcaaaaatatgaatgattccggacgcggg

SEQ ID NO: 668 - DNA, 226 bp, Glycine max
  Clone ID: PAT_MRT3847_100603C.1
ctctagccgctcgagccgtctcaccttctttctctgcttttttttcttcaatttccagatcacgaaactaatgatgatggagatagcgatcaccatacagaatattttgcttcatcatctcaaccctccatcgtctacccacgttaacgaattatcctccctctatgcttcatcatgtgtgtcggaggacagcgctgtttatcacaggacatcgacattcagggat

SEQ ID NO: 669 - DNA, 786 bp, Glycine max
  Clone ID: PAT_MRT3847_100604C.1
aagacaaaaggttcaaactttcaagaagagaataatttgccaaaactttgcagtgaataatcttgaaaatgaaatcaagacagcattctcactgatcacgatcgcagctttcgatctccaccatttccctaggacaatatcgtaattaacttttcggtggtgcaatgaattttttgctgcggtccacgacgggcgtgtacagagagccttctccgtcgattccggttccggagccgcgtgttgatacgcatcataggtctgcatctgctggatcttctttggagaatcgtgtgtctgatgatccgtatgcgtggtatgatgcaagggttgttagtggcgtgttccttaagcacgtggatgttgctgaggatgaaggatgggttaccattccatgcaaggaacttcctgaaaactggacttgtgcaccagatatacagtctctgtgctctcttgatcgctcctttcttttccctggtgaacgagttcatatcttggcatgcttttctgcatgtaagcaggatacatcttcattcaaagttgatgcagtgacaagtgacaatggcataggtcacagccccaagaaagaaaatggaaacattgaaaacagaaacaattcagtgtctggagaaggggaacctggtaccagtgatgaagagcagatggaagatgtttctgatgatgaatcccttcttcaaaaagaggttctcaaaaaacaaaccgcattattgttgcaaaagtttgaaaattctcacttctttgtgaggatttctgagtctgatgatcccc

SEQ ID NO: 670 - DNA, 280 bp, Glycine max
  Clone ID: PAT_MRT3847_100605C.1
cttccaccatcttctggcttccttctgttgccaccactctccatcttaagtccctcttctagttccagcatatccgctcatcgttccatcttcggagctcgacctaacctcgtttctccacagcacagacatggagtcattcacgtcgttccatactactggaacgagtgcaccctgacacgccagctacgcataacccacgtaatatgacggctatagatacttcgagacatccatgaatagcttgaactatatcgggacatgaatgctatcagacact

SEQ ID NO: 671 - DNA, 3086 bp, Glycine max
  Clone ID: PAT_MRT3847_100606C.1
gcagacagtaaggttggtaatggataggtttgaggtcaagatgctgatgaaagtttactgaacttgtttgaggagctaaacatttccatattgtgctttttatgtcccaagtatggaatcatttatgttttacatgacattgtttatatgggaaaccaattctgctgtgatatctgaaataacttatacagtggatttttctctcttgttatgaagattttgttttcatttattaataattattgccagctatttgatcatgataagtttaatggattttttttttcttttccatctctcaggctcgagagcagcagcagttgcaatccttgaggaatcttgcttcagtgaagttggaaccacaacaaatgcagacgatgagaactctgggacctgttaaaatggagcctcagcattctgatcaaccattatttttgcagcagcagcaacaacagcaacaacaacagtttctccacatgtcaagtcaatcgtctcaggctgctgctgcccagatcaatcttttgcgccatcaccggcttttacagttacaacaacaactaccagcagcaacaactcttgaaggcaatgccacaacagcggtcccaactaccacaacaatttcaacagcagaatatgcctatgagatctcctgtgaagccagcatatgaaccagggatgtgtgctaggcggctgacacattacatgtatcagcaacaacatagacctgaagataacaatattgatttctggagaaagtttgttgctgagtattttgctcctaatgccaaaaagaaatggtgtgtttcaatgtatggaagtggaagacaaacaactggagttttccctcaggatgtatggcactgcgaaatatgtaatcgcaagcctggccgtggatttgaagcaactgttgaggttcttccacggcttttcaagataaagtatgaaagtggtactttggaagaactactttatgttgacatgcctcgtgaatatcataattcctctggtcagattgttctagattatgcaaaagcaatacaagaaaagtgtttttgagcaacttcgtgttgttcgtgatggtcaacttcgaatagttttctctccagacctgaagatatgctcttgggaattttggtgctcggcgccatgaagagctcatccccagaagattgttaataccacaggttagtcaacttggagcagttgctcaaaaataccaggcaataactcaaaatgcaacacccaatttatctgttccagagttacagaataattgcaatatgtttgttgcatcagcccgtcagttggcaaaagctttagaagttccattggtcaatgatttaggatatacaaagagatacgtgcgctgcctacagatatcagaagtggtaaatagtatgaaagacttgatagattacagcagagaaactgggactggacctatggagagcttagcaaaattccctcggagaacaagtggttcatctggacctcgtggtcaagcacaacagcatgaagaacaattacaacagcagcaacaacaacagatggtggcccataactcaaatggtgatcaaaactcagtacaagctgctgccatgcaaattgcttctagcaatggtatggttagtgtaaataacactgtcaacccagcatccacattaacctccacaagcactattgttggtcttcttcaccagaactctatgaattctagacaaccaaattcaatgaacaatgcaagcagtccatatggaggtagttctgttcagattccatccccaggttcctccagtacagtgccacaagcccagccaaactcatccccttttcaatcaccaacaccatcctcttctaacaaccccccacaaacatctcaccctgctttaacatctgccaatcacatgagtacaacaaactcaccagctaatatttccatgcaacaacagcaacaaacatctctttctggtgaacctgaccctagtgatgctcaaagctcagtccagaaaatcatacatgagatgatgatgtcctcccagattaatggcaatggtggaatggttggtgttggatctcttggaaatgatgtgaagaatgtaaatggtattctgccagtgagtgccaatacagggctcaatggtggcaatggcttggtgggtaatggcacaatgaacagtaattcaggcgttggggttggtaattatggcacaatgggtctcggtcaatctgctatgcctaatggaatcagatctgctatggtaaataattcaatcatgaatggaaggggaggaatggcgtctcttgcccgggatcaagctatgaatcatcaacaggatatgtcaaaccaactacttagtggactaggggccgttggtggttttagtaatcttcaatttgattggaaaccttctccttgagagccctttgtagatttatgaatgttgtggttcttgacagttgctcatgcaacatgagcaatggtatttgccttcggcccctgatgatatggctgaaagtatttgggttgggtagtcacagggcgtaggccactgtgctaatatatgaatttatatataagaaatgaaaatttgttggctggttgtgtggctgatggggctgatttttcttgtgaattcaagtgtaactttttatattaatttttcttatgagcttccaaaaaaaaaggtcctgatggcattcacaagcttatcctttacacatgcaagaaagttattgctttggcctgcaaacttcaagtgattaggaccatgtgcgtcggcagttgacaagtctggcacccatgtttggcttttcagtcccctgtagagtttatgccgtgagctagaaaggccatgaagacattggaatttcagtttactcccaaacctggagtaatggtgccaaattaacttggcatgagaatttggcgaagtgaactgtaatgtatggcagaaggaacagcagagaagagaagagggaatttatacaatgtaatctttaacaaatgttgtaaaagatgtggatacaaagtactttttgaagtgttgaaaaccattaaaagcaagatggtccataatttattgatc

SEQ ID NO: 672 - DNA, 356 bp, Glycine max
  Clone ID: PAT_MRT3847_100607C.1
gggagagccagcgagctacaattcaggcgtgataagaacactactgttgtacactacatttagaatagattcaattctcaccacccggggtattattaaaccggtattcgggctacaaataatataaccctatatcatgcatatgaatgtgagcctttaacttttcttaccctatgcatgattgtaaatcttaagaatcaaaggcaggtcttttcattattttttttacaacctatttactgtgaaatcttgacgaccgatcctattttatttttggtgcggcagctaatcataacaaaaccaagtgttatatctactgcttattaacggaggttttctactacccaacccttttt

SEQ ID NO: 673 - DNA, 137 bp, Glycine max
  Clone ID: PAT_MRT3847_100608C.1
gaggttgggccagaagaagagacaactatggttgagaaccgggaaaacaacaacagcgactcaagaagatcactcactcttcatttcatttcagtaatggctacccaaacccaaacacacacacatccaaacaccac

SEQ ID NO: 674 - DNA, 350 bp, Glycine max
  Clone ID: PAT_MRT3847_100609C.1
cacgcgcacgcgagcgtggctccggttcgggtcgagagagctcaaatgctctactctcgatctctccaaagggaactgtacaccaaggctcctgttccttatcaagatcaacatcaacagggtcctctatcggttctcatctaactgctgctggtgaggactgcattgagttcatccactcttgcctttccagatcaaagccatcaaccaaagcaccccgacgagattctattcaagctccttgaggtgaaatgcttgcaatcatgtgccagctactatgcttaggctgatatcatgctttttgttccccacaaataatagtgatgggaattaagtgatcgggtgctgtt

SEQ ID NO: 675 - DNA, 339 bp, Glycine max
  Clone ID: PAT_MRT3847_10060C.1
attaaaagaaaaggataccggaatggtcggaggcaaaagacccggcgaccaagcttttcgggaggacattcccggtgccggagtttttgccgggttccaacggggctccggtttcgttttccggtgccgttgttgttgttgccagggttgaccctttttccaccaacttttaaagggggtctattcccaccccagttgcccaggagaaggttttggttagggccactttgggggaaaacccacctgttgccaggagggaggttggggcccccgcccattcttcagaggaggtcaccattccaattcctgcctttggaacctgggaagattccatcttcc

SEQ ID NO: 676 - DNA, 258 bp, Glycine max
  Clone ID: PAT_MRT3847_100610C.1
atgggggcacctggctgccctgcgctagctgtagcgcctgcagcagtggcgccagacccctgggcgttaccagacgcgcccgcgtcaggggcgctacctgctgtgccacgtgtcgcgtgcacagcggaggcgcctgtggtggatcaagggaaggagaaggtgaaacggttgtcaattcgtggaagccgaggtgtaacaaggtcaaagttgttgtcgcaacttcaatcgaaacaggaacaccccaacaccatggaataa

SEQ ID NO: 677 - DNA, 788 bp, Glycine max
  Clone ID: PAT_MRT3847_100611C.1
ccacgcgtccgccgaaaggaagaaaagagagaggtaggttgttcttgattgtgcaaaaatggatgcagaagcagcaccgttgaagttggagtcccttgtgtgcatagactccaccactctctctcattccgagctcctcgctctttctctctcatctctctccacattcgacctccgctccacccatgacctcgtcactcccaagatcgacccttccctcttcaacgagagcaccggctcccaccgccaaacctactcccgcccccagcagtcctcccccaccggccgccgccgccgcctcgccggcctcctccccaacaacctccctcccctccccgaaaaccgcctcatcatcgactacctcaaacaactcatcagagacgaccccaagttcgaccaagtccaactcactcccccttccccttctccttctccttctctcccccaactcaagaggaagcgtggcagaaagcccaaagtcaaactccacttggacccctgctaccgcggtatcgacataattgtcaatccaaacggcgtcgctgtggatctccaccaactcgccaactcccaagaccccttcgctgaggaactcaagagacgcactgagggtttgcacaacgaagaggagctgctagggtttctgagagacttgcccggacagtgggggagccggaggaagaagcggaggatcgtcgacgccggggatttccgcggcgacgtcttgcctgttagctggaagattgttgtggggttgaagagaaaggatggccgggcatgggtctatt

SEQ ID NO: 678 - DNA, 450 bp, Glycine max
  unsure (1)..(450): unsure at all n locations
  Clone ID: PAT_MRT3847_100612C.1
ccatttttctcaccatcgattcttagcggtgaaaatggtgaagtgtttctctctcatcgtcgttctctctctcctcgcagcatcggcgatcggcagcgaggtcatttccggagaatcggatggagatttcataatccgtcaggttgtggatgacggaggagtcaacgaaggaagtaacggcgacgatctcctactcggagccgaccatcacttttcggtctttaagcaaaagtttgggaagtcgtatgcttccaaggaggagcatgatcaccgattcagggtattcaaagccaatctgaagcgagctcaacgccaccaggctcttgatccctctgctactcatggcgtcactcagttctctgatttgactccttcggagttccgaagatcgtttctagggcttanaagtcgtcgtcttggactccctgcagatgctaataaggcccctat

SEQ ID NO: 679 - DNA, 1786 bp, Glycine max
  Clone ID: PAT_MRT3847_100613C.1
ccacgcgtccgcgagttcgagggttttggactttggtcagggtttagcactttcaccttccttctctttctctgtgatttgctctccgttctactccaactttctttcactgtcaaactcgtttttgtgttgttgttgttttccgaagagagaaaaaaccatgtggtacttgtgcgttttcttccacaggttattggattacagaaaacccgaagtggaatctctggcacaactcttcggagcaaccgaggacccccaaaacggcgacgtttcctcgcaattgcaatggaaactccctcatcacttccacgcaaattgcaattgcaattccctcaacactaccacgcagattcccctttccatttcgtaaacctcccttccgaaaaactcgctcgtgacatcgccacccgaagcatacttgttaaggggatgtatgagctgtggggtgaagggagtagctatgaggagttgaaggagtctgtgttgagttaccctgacgaaaggaagttgccgtacttggattctgatagcactttcaagattactgtcgatagctttgggaaggtcattagcttggaggaccaaaaggagctcattcaagggctctcttatatccctttcaagggacgagtaaagttgaaaaacccagatcacaacttctggcttatagaagttgataattatggaggtaataatggtcttcctccaattgtacaaaagagagtcttctttggtcgcgaagttggtggggcagataggaagcttttacccacatatcagttgaaaagccgtacttatcttgggccaacagctatggatgctgaaattgcttttctaatggccaatcaagcactagctacttctgggaaactagtttatgacccttttgttggaactggaagtattcttgttgcagcagctcattttggagcaataaccatgggtgctgacattgacattagggtagtccgtgatggacgtggtcccaactgtaatgtttggagtaattttaagcagtatggattgccaatgcctgttggtcttctaagagcagacaacaaccttcctccctggcgttctacgctgaaagaggtatttgatgccataatatgtgatcctccttacggagtgcgagctgggggacgcaaatctggtggtcggaagctgctaaagggggctgtggaaccttacaccattcctgatgaaaaaagaacaaatcacataccatcaactgcagcttacagtttagttgagtgcgtgcatgatttgtttgatcttgcagccaagatgcttgtaatggggggcaggcttgtgtatttctatcctgtattgagagaagatggttttgcagaaaaccatttcccagagcacccatgttttaaactgatttcttcatcggagcagatccttagttcgcgttatagcagggtgttactgacaatggtcaagacaggtccttacacagaggaaatagccgaggcggctaggaaaaaacacattgaatttaaggagaaccatgtaaaatggttagaagatggtaatcttcattctgcagttttcagtcctgctgatgatcaatttacggaggctggtgatcccaagttaattaaggatccaaagcctaaatacagaggaaagtacgtttagagttttaaggttaaatggtcttgtccctcaccattacaatggacagcaatgtatttttcaatgtccaagaggaaaacttatttcactctatggaagccaatgtaccctttttaatccaatttagtgatatttttcccac

SEQ ID NO: 680 - DNA, 480 bp, Glycine max
  unsure (1)..(480): unsure at all n locations
  Clone ID: PAT_MRT3847_100614C.1
tccaaaagctgggccacggttggtgacaggtgtagcactacgctntgctggggttcccccaactgttattgtacagtgcttacagccaacctttaaccacccanatnggtttgattactcctcaaagcattccaaggtggggtccctgcagatgtttatgagcaatgatggtaactgtgaggaccttggaccaagggctttttctgcggaggaggtgcataagatcaccgtgcttgatctaagaatggctaatgcagataggcatgctggaaatatattgttcaagaaagaggcaggtggtcacactttgctcattcccattgatcatggctactgtcttccagagaaatttgaggattgtacatttgattggctttactggccccaagcacgtcaaccttactcccctgatacgggtgattatatcaaatctctggatgccgagaaagacatagagcttctgaaatatttcgggtggga

SEQ ID NO: 681 - DNA, 276 bp, Glycine max
  Clone ID: PAT_MRT3847_100615C.1
catgcacaccagggaatggacatactgccatgctactcatcatctcatgatcctgatgtgagaaagggacattggaccatggtagaagactagaccttgagagactatatgcgctatcacggtgaaggtagcttggaactgcttaacctaaggtgctaggctcaaacgatcgggaaagagttgtccactccagactgtaaactacctctcccctgatgtctgatgaggaaacataacatccgaggaacatgtttcgatcatagaacttcatgcaga

SEQ ID NO: 682 - DNA, 349 bp, Glycine max
  Clone ID: PAT_MRT3847_100616C.1
ttcttttttttattttctttttctttttttttttgttgattaccccatcaatgtgtactcaaatttgccaatattcgtgaaacaaatatctcttagttcttccagctaaaatgtgtttaggcaaattttaacaaaaattttggagaggagcttggaaagcttttgggctttccaagcctaaatgaatccactcttttatttttttaacaagaccacagttaatcttatcctaaacatatggaacagttctttttgttgacgtgagaatgggtttgctttgactcttcctgggttccaacattcttatttttttcaggtgacatctccttcaatgatttcccgtttagcc

SEQ ID NO: 683 - DNA, 409 bp, Glycine max
  Clone ID: PAT_MRT3847_100617C.1
gcccgcgccgccctccagacctccgccatcgaggccaaatgcctctccgtctctggtgagggctcccacctctccgccctcctctgcctcctcctcgccgcgctcccgcgcctcttccccgccgacgccgccctctccgccaccttctgcctccgcgggctctgggctctccagagcggcctctccctctacgccgacgccttcatccccgagggctgccaccgcctcctcgacgtcaccagcggcgtcgagggctccacacagtgcgatctggacgagtccaagctccgcgccgtcgccatccttgatctcgcattcttgatccacgccatcatcgtggtcctaatcgtgctcctcacttatgccctcttcgccagaagcttcggcgggaggaggctcggatcctatg

SEQ ID NO: 684 - DNA, 226 bp, Glycine max
  Clone ID: PAT_MRT3847_100618C.1
agatctgagctcgtatcaagtcgcgagcttctgttgatgcactttaaaaccgtgggctttgacgatttgtacatggaattcctgaatctctcaactccttcctactgccgcgcgcatgatctagtcatggctagtgtatctcactctgtgctggttatatactgcgagaatcagtatctttccaactccagttatagattgggtatacgcatcgatcttctaaaca

SEQ ID NO: 685 - DNA, 123 bp, Glycine max
  unsure (1)..(123): unsure at all n locations
  Clone ID: PAT_MRT3847_100619C.1
aaaaaccagantgacggcgtgtatatttgtntnacatatagttgtttttaatntgttggaaagagtgcaatacgtatgnatttattggnaaganaagggttgggatccggataaagtaatanc

SEQ ID NO: 686 - DNA, 1569 bp, Glycine max
  Clone ID: PAT_MRT3847_10061C.1
tgctgttagaaagggtgttgacacgggcattgcagtcatttttagagaccatgaaggtgaaactttggcagctgcaacaaagtttcatcagagtggcagaagctctggccttaagatgttgtattgaagatcttttgtctttgttgtctgaatctagcttggatataagctagataacctccgctaagagaatgatttttccaattttgacagggtttcatcatttgactactcatttaatcaactgtctgtgagttcaggcttatgccttcagtaagtgcagttcgaagcctgtggggaagagtacacaacaaacctagaggcatgttcgtttatattggcaggagctgagagcgttaaaattaggatgggggcgattacatgtgatgagatgggtgaagattatgtctctgtctctctgaagatgcatgggaattttatgcaaggttgaatttaactgatgactcatgcgaatcagagtggctgtatactttgtggcgcagggtaattaatacgggaaaggggaatggtaattaatgctatattaacttttggtcaaattagcattgttacaggtcgaatatggtggttacacgataatgtatggtatggggatataattaaactagattgaagggtagaatagtttgctttagttttgatggttcggtggttaattaatagggagttgctattggctcttacaatccctcaaaattccaagattaacatcctctcgaaaaacattacggcatcgtgtttccgcagcacaaaagggagtgccaatttttgtgcacaaaagggaatcaaccggctcaactccaagtccacccaccacgcttgctccctcgtctgccaccattgattccaccttgagtgctgaacccaaaccaccctcgaaattggtgccacccaccacttcctcaacggtctccccacccaatcaccgacgagcttgtctgtggagagatatacgatgcgactaattagaatttatattatagggattggatttggatggttgggcgcatgaaaatgaggagaatttatttgatcgtggcatgcatatatgtgggaataaaaagagaatggtggattggaaggggtaactgcagtgtacctatctatcgtgttcactattgttatgtgcttcattttactccattcttcttgagctctgtacacaaacaagggaaaagagggaatcacctgataaaattgttgcaatatccccaccatggcaaccaacttgtgaagagagaggctcaacaaattattgttgcagactctgctatttagtttctgttttagttaattattgtaatcttgataaaatctcatagttgttgagatttttagcaaatttcaagttgtttgtaaattgattctcatttatggaatatattgccttttgttttcaattctatggcccaatttttatcttaaaaaaaaaaaaaaaaaaaaacaaaaaaaaaaaaaaaaaaaaaaaaaaaaaaaaaaaaaaaaaaaaaaaaaaaattaaacaaatacaaaaacaaaaaccatctaaaaaaatatcacccttatatt

SEQ ID NO: 687 - DNA, 297 bp, Glycine max
  Clone ID: PAT_MRT3847_100620C.1
gtctatacaagaaactatggagtctgcttcattatggacagagagaagctgagcatagcgttcattccagcaacatatcacggcacgtatacggtctcttgaacgcgtgcagctgattaagtagctagccttcatggaactccatacccagtcgagtatgatatatggttgaaaaggctgaacgaggctatggtgtattcacagaataatcgtgaactgattgtagaaggacctatcacgttaatatgaaagaatgatgcttactgttcacgagcatctggccattgattagacgct

SEQ ID NO: 688 - DNA, 332 bp, Glycine max
  Clone ID: PAT_MRT3847_100621C.1
cttattctctatactcttatactcataacctaaactcaatcatttcatgatatctcacatcacccaccattcctttactctatctatgtcacttttctctacacattcttcatactcataaaacctacccttgccgcttcaatacccaacttataccaccatattatcaaatatctatcacgcctgaattatatccttctatcaattcctattcactctaaatactctcctcattcacttaccaacgcaacccaggaacaaagcatactcatatcataacctttctttaactcactagccccctttatttctcctcatcattttttttttca

SEQ ID NO: 689 - DNA, 284 bp, Glycine max
  Clone ID: PAT_MRT3847_100622C.1
cgcgcacgtgttatgtctacacagcaagaacggattcacaatgacattgcatctactgaggttcatatgccgagcggccttctgctgctttgccccatatgtttgacctggtgctactaccaggactgatgctgtggacggaaccctaccgggccatggtacacgataccttgtgctaaactatgccgtgaacgcttatgtagcccgtgctcaaactttagttatgctcgcttatcagtggaatcataccactccgtatgggccgccaaaagtgcctgcagcta

SEQ ID NO: 690 - DNA, 427 bp, Glycine max
  unsure (1)..(427): unsure at all n locations
  Clone ID: PAT_MRT3847_100623C.1
gcacgtactcggtctcgtgaattcccgtggtcgactccacgtcgtacctgcccaacgccgtctcgtatcgtagatatatnttagaaaccagtnngtgatgaannatatgaaggggtccttgggttttcgtggtcgttggctacatannttttggtagggcatggcnatatgtccatgcccgtacganntatgttcccttcttccgaaatgagacatcttggcttatnnngtgcccgttactctcggaggggtgaaattgcgcacaagttggaaggcttttgcttgtggaaagcaccactaactatcttntgggcttttgagaaccattctctgaaaaaggtgcgttgaaagcaacaaaaggaatacattncatggcgaaacaatatagatcaagacttcaaaacaggttaaccacacaaagcttact

SEQ ID NO: 691 - DNA, 382 bp, Glycine max
  Clone ID: PAT_MRT3847_100624C.1
ggtcgcgcatcgctacgctgggcgggggggcccgaggtcaggcagagacagaggcatattcagatggaaacttggtggcgaaggaccgatgcttacttcgaatgaattggcactaaaggaccattgcaggggctgtgactgttttacatatgtgaatacaatccccttgctatagtggaggggggataagcctggtatactaccctttctataggatggtccgacaggccgtgcggtctacctgccatgagtgagagagtgcctgtgggatgcgctgtcccgggtggcattgtgcgattgactcgtgggcgagccggtgggtggccgggttcaaggctggggagggttgacgtttctctagagggctctgtggggggggagg

SEQ ID NO: 692 - DNA, 529 bp, Glycine max
  Clone ID: PAT_MRT3847_100625C.1
ggacgacaaagggcaaaaacttttttttggggaacaaaagggaaaaaaaaaaaacggattgtccctgtttttacccgggttgggccccgggactaaactaaaaacggggaaaccggaataataaaaaaaaaaaaatggaaaacctcaacgcccccgacgaccccccagaaaaaaaaaaacacccaagcaggcaacaaaaacaaggggaagggggactagggcaaaacttttggaatggaaccccatccattaaaaaaaccccggcccccccaaattttgggcagcaggaacaggaggggaaactttgtcccccccaggggaaaacaaaaaccgcaaaaaaggctttctgtcaagggggcgagcagggccaaaaaccaaaacccctgttgggttgccggggttaacaaaccccggggcgcggggcttgggggtctaaaacatgacccggggcgggggctgcatccctcaaaaaacatctccaaaggagggccccggcacggcccgcgggaccgaaaagttgggagggcca

SEQ ID NO: 693 - DNA, 477 bp, Glycine max
  Clone ID: PAT_MRT3847_100626C.1
aaaaaaaaaaacaccccaaaataggggggcaaaggggccaaaaaaaacaacaaaacaagcccccaaggtaaaaaaaaaaaactttaaaaacccagaagatttacacccccgggggttccaaaccggggaggtaaaaacccaaaaaaaggccctttcccccaaaaccttaaacttggggtaaaaaacgggaaaaagggcccccccccctacctcctaaaaaaacaaaggggaccccttatggggaaaaacaagggggctttggttttttttttttgggcacttttgggaaaaaaggcctgggaaaggggggggaaacccccccccccgggaggggccctttggaggggggggaaaaccttttcccccccccgaaaaaaaaatgaaaaggccctgggggaaacccccttccccttaaaattttggtaaaaattccccgcaggttccaaaccctgagagggaaaatttccaaaagggggg

SEQ ID NO: 694 - DNA, 302 bp, Glycine max
  Clone ID: PAT_MRT3847_100627C.1
cttacgcgtactaccatgcaatcgtacaggcttgctttataaacttcaaatttgtggtgaaaatctgaagtgaagaacatactccctttattgaagacttctgaaaatgaaagtcttgaaagagataacaaatattatcctgaacacgttcatttgctggatgctcataaacgagtcctatttgttgatttaactcctgtgattgaagcaaagctaaaaacaatagaatatgactttatgccggatactatggatcaaactaaagaccattatgaggataccttaccactcaatgttcaacc

SEQ ID NO: 695 - DNA, 447 bp, Glycine max
  Clone ID: PAT_MRT3847_100628C.1
taaatattcgagagtttaatttgtgatcatgcaaatagagctttaactagggataaaggaattgttcttttaagtgatgttctactttcttaaaagattaactagtctaatcactcacgaccatgaaaataccttagttttagaaagaaaaaataaataaaataggattactttttaaaacttgataatgtagccacagacatgacatcatatttctcatgaacccactacaaaaagtgagttcaattcaccaaaagcattgaaaatcacatcatgaggacagaatcaacattatgcatcagcccttttgcggaataagctcattttactcacagataacaggacctcgtaatggaccacagtaaatgagcaaaattcatacattgtgatgacatgagttgtgagatgatatttagcaaagatcccccagaatcaactgataatcca

SEQ ID NO: 696 - DNA, 1501 bp, Glycine max
  Clone ID: PAT_MRT3847_100629C.1
cgtttctgcacgtaacagctcttgttcgctactccatttgccgcctctggaactccgaacgttgaacatggacgctgccaaagaagaatttctcagagactttggtgaacactacggctaccctaacggccccaagtccgttgatcaaattcgagctactgaattcaagagattacaattacaagatcttgtatacttggatcatgctggggcaactctatactctgacctgcaaatggaatctgttttcaatgatctcactactaacctatacgcaaatcctcacagccaaagtgactccagttctgcaactcttgacattgtcaagaacgcccgccagcaggtccttgactactgcaatgcatctcccaaagaatacaaatgtatatttacttctggggcaacagcagcgctgaagctggtaggagaggcttttccatggagttgtaacagtagttttatgtatacaatggagaatcataatagcgttcttggaataagagaatatgctcttggtcaaggagcagcagccattgcagtagatattgaaggagaattacatcctgaaatatcaggagaaacaattactacaaagatatcaccacaccaggttcagaggagaaaagtagctggatcactgaaagaagagccaacaggtgatgtgtataatttgtttgcctttccatcagagtgcaatttctcagggttgagatttgacttggacttggtgaagattattaaggaagactcaagcaagatcttgggaatttcttcagtttgccatggacagtggatggtcttaattgatgctgcaaagggatgtgctaccatgccacctgatttgtctaagtatcctgcagattttgttgctatctcattttacaagctgtttggctatccaactgggcttggagctctcattgttcgaaatgatgctgccaagttactgaagaagacttattttagtggaggaacggttagtgcatcgattgctgatattgatttcattaaaagaagggaaggtattgaggaactgtttgaggatgggactgtttcatttttgagcatagtatctatccgccatggcttcaaaatcctgaattctttaactgtatcagcaatatcaagacatatagcatctcttgccttgtatacgaggaaaatgctcttggccatgaggcatggcaatggatctagtgtctgcatcctctatggacaccataattcaatgaaactgtgtcatgaaatgggtccaataatttcattcaacttgaaacggcctgatggctcttggtatggataccgtgaagtggaaaagctggcatcactttcaggaattcagctaaggacaggatgcttctgcaatccaggtgcatgtgcaaaataccttggcttgtctcatttggatcttatttcaaatactgaggctggtcacgtttgttgggatgatcttgatattatcaatggtaaacctgttggagctgtaagagtatcctttggc

SEQ ID NO: 697 - DNA, 426 bp, Glycine max
  Clone ID: PAT_MRT3847_10062C.1
cggctgcgagaagacgaggaagtggggctgttgcattgcgtgaacaaattgaggtgtggtgtgcatgttcaacattgggcaccgatgatgggttcagctactgtgcaaatagcgacgtcaaaatttgttctttgcccgaatgcttcagcggcgaaggttgcgagtcccaagaagaatgccgtcatcaatttctcttccaacttcaaaggaagtgttaccaaaatccatgccattccccctaatggctctgtctctatctgctcttcgcgtgtgtctgtgtcaagtttaaaggcagatgagaacaagcgcagaagtaatcttgaatccctgttttgttatgataaggctattccagaagaaataattgagaaacctgttgggttatctttggaagagaaagctattggtaacaaatttatatgtaag

SEQ ID NO: 698 - DNA, 259 bp, Glycine max
  Clone ID: PAT_MRT3847_100630C.1
tttgatatacttcaaaggcatgtgaggtgatgtcaaaaccacagaaatcacttgcttatttgcttgaaacttactgtggtgtgacaacaaataaattattacagcgtgaagactggaggcagcgcccctctcagcagaaatggtacattatgcacaaacagatgcacactatctattgtatattgcaaactgtctgatcaatgaactcaaacaactggacaatgaaaactcttcttccgatgacaaattccattttgtt

SEQ ID NO: 699 - DNA, 163 bp, Glycine max
  Clone ID: PAT_MRT3847_100631C.1
tagctggttataacccgctaaaatcgccgtcggaacactgttcatcggagagaggatcctctgcgaccacgttttcgctgaggatcggggacaaaaatagcggaatcacatttaccacatacccaattgagcttcagagtcacgtcacacaaggatcctgaaa

SEQ ID NO: 700 - DNA, 132 bp, Glycine max
  Clone ID: PAT_MRT3847_100632C.1
tgcgttcatattgaaaccataatgaccaagagattgctgaatggggatgatggacaattcgagaactcatacgttacgagttgtaataaaaaagactggaaatttatgtaaaattactaaaaaagaaataat

SEQ ID NO: 701 - DNA, 416 bp, Glycine max
  Clone ID: PAT_MRT3847_100633C.1
tgcacacgtgcaaagactcgtgggtatagatttcatgtgcatggcaaagcatatacctggcacattccaatggcttgcagcatggtgctcgacacgctcttggatcttgctctccgacactactcaacatcagtcaccaatgcatgtggcacatgcaaggaccaacactactgcttaatcataccatacatcatggaaactgcaccacggacacatagaatcctggctacgcatgctagatgacactatgactagactaatgttggaaggagatcccgcgtctctaccatgggttacacatctcttatactgttcactacatcatagaccgcactatacgcatgtactgctactcaggtcaaggtgcgtggaatcaacgtggatggacctatgccactcagcgttctactcaatgc

SEQ ID NO: 702 - DNA, 300 bp, Glycine max
  Clone ID: PAT_MRT3847_100634C.1
ggctcgagctcgagccgaatcggctcgcgcggttcgagctcgagccgcatccgctcgcggacaagtacaagagaaacctttctcgaaccccatcgtgtggacacctgctttagaagaaagcaggatcatcggcaaacaaccatctattagatgttcacgaggataacgtgagcgcagcagaggggaagatagatgatgaatataagtgctcgatggctgaacacgtccatttacagcggcgagtagaggggcaacgcttgccgaggagctatgaaaggtccataatctgagggctggagc

SEQ ID NO: 703 - DNA, 480 bp, Glycine max
  Clone ID: PAT_MRT3847_100635C.1
agagtatcaaaatattctatatcttttattcgagtggtgaggctacactacactagtcgtggagtcatggacaatcaattaattattgcactataagaacttttaaactgagaaatagaaatcgactattttttaaaaaaacaaaattggatatattgttataacacatgatgtgtatgttaaggagagctattgcccaatcttttttattctaaaactgtaaaatatatgaaggggtgtgtacaagaaaatgtgtgtcaatgttcctaaaatttatataaaaaaattgttatattgtgacatcgtggtgtgacatgtaaaatattatattacattatattaatgtctttctttaccttaaaaacacatggttataaatccaccattatgcaagatgtttctattcacattgtggtatcacaaacttagtgagttctcaagctacaaagtgttcacacttttaaaaaagatttctattat

SEQ ID NO: 704 - DNA, 887 bp, Glycine max
  Clone ID: PAT_MRT3847_100636C.1
aattttctgaacgcattgcataatattcaatttacttggcttcctgtttaccaaataacgcatctccatttttgtttatgctctcaatgtggctcttaatttccatctctgaagctgcaaagtatgtggttggaggcagtgaaacctggaagtttcctctctcaaaaccagattcactcagccactgggccagctctcaccgattcaaaatcggcgacactctcatatttaaatacgatgagagaacagagtcagtgcacgaagtgaatgagacggattatgaacaatgcaacacggtggggaaagaacacgttctgttcaacgatggcaacaccaaggtgatgcttaccaaatctggattcagacacttcattagtggaaatcagagtcattgccaaatggggttaaagctaatggtagttgtcatgtcaaacaacaccaaaaagaaactaattcattcaccatcaccatcaccttcaccatcaccatcaccatcaccttcaccttcaccctcaccttcaccttcattatcatcgccatcaccttcaccacttccaaataatcaaggtgttactcgtagttcaggcgctgaattcattggagttatgatgtggttgggggtgatgatgttattgctttaaattagagagtattgtgtatttacatgttaatttctccataactaatcactatatatgcaatatatatttgtgtggttagttaattaggtcaagcatgcattttcgctttcatttttgtatttttttaagtctggaagattttctattgattgtgcaattgtgcccttaaactccaatgcctactcgttgtaattttgaaattgaataagccatttggattttttaaaaaaaaaaaaaaaaaaaaaa

SEQ ID NO: 705 - DNA, 321 bp, Glycine max
  Clone ID: PAT_MRT3847_100637C.1
atgcgatcctttcacgaatatcggagagagaagaagaattaagacgtgaagcacgaatagcgccataggacggatgggactaggccttcgactctgtataagaaatctgcggatgctctctcattgcctccacctgaaggccccaactctggtgttttggtgacccaagatgaccatatggcgccaacctcttgacttgggttgggcgagttccatgaagtgaaggagttgcctttccctcaaagaataagccttgaattgtcttatagatcaggcgttgcactgaagagagcccatgactaccaccatggggccttcatt

SEQ ID NO: 706 - DNA, 413 bp, Glycine max
  Clone ID: PAT_MRT3847_100638C.1
aacttcaatacagatctgcacatgaacatcattggtaaatctatcattgtcttataccataggttttcatctctggaacatgtcagagaaagggcggaactgctcatgaccgcgtacttcttcatatcattgggtgctactaattgaaccgagaaaccaacctgtgctctatctacaagagcacatcctctcggaatcacactgatggatcaaaggcggttgaaccacatcctttatctgctataaatgcttgagcgaatcacacctaagaaagcttttgttgtacctaaacgtgatcattatagacactcttaatcctccatcactatcccttctagaggctgaggatgatgacttgcacctatcatgcctatcaaactgctcctaagagaggctttaattacaaccactta

SEQ ID NO: 707 - DNA, 933 bp, Glycine max
  Clone ID: PAT_MRT3847_100639C.1
aagatatctaaaaaccacaaagtcatgagaggaattcacatgttatttattatattatatatgtgtcaatattatatattagaactgtttgatagttaccctaaatagagagattaatgcacagtgaactcactatacagatccaaaagatttgtattttgtttaataaacttagtaaagtacaacatgaccagcagttattagtaatttgggttaattattgtgctaatatgcatcttacattttatagggaaagatagaggtaaggcttaagagtatgatatgcctttatggtgggttttgtcataggcattggctttcattggtgattgatgccccctttgacactgagccaaaaccattataatatgcatcaatttttaaaaattactagtcattttgatgtttcttgttgaagcaaccacatatttttctgatttctgatgagtatagttgatcattgacatattctttctgtttctttaaatttgggacaatttgcatgcattgttacataaaaaaaaagtctttttagtttctttacagttttgtcagttataaattgattaattttttggcatattattcaaacttttgttaattaatcagtgatctaaggtttgaatatatgaggtttgtggccctggaccagtactaccctgccttctccagttcgagttctatacttctctcgctaggcagcaatgcatatgagagaataaggactttgagaaactcttctggaaatggaatttcttttgaactgtgattgcaatcatagagggcaccattgagcttaaattgctgattatgtatggcggtgattgcaaatatttctttcatggaggggaatatttagtgtcaagcattgattttggatctcttatatgtatttaagggaaggggaaaaccaaacaagtagtattgttgacc

SEQ ID NO: 708 - DNA, 435 bp, Glycine max
  Clone ID: PAT_MRT3847_10063C.1
aaaaattttaattttataaaaaaaaaaaaaaaaaaaggcaaaaaatgaaagggggtccggtctaaaataaaacaggcttgcgaccgctatacctggagtgtaataactcctctattggggggcctgaccccggttttccggccttcggtctgggaattcccgagtgggtaccaccctgtattgccgcgcaaaacttgccctttgcccttgtgccttacgtcccgatgaggcaatactccgagcggcccgcaccttacttgttttccctgagtggccaatggtacacggcctggggcagggcccttttcccggctcttgtagcgctttctcacagggggacccccccacttggcacgtgccttacgcctggtccttacgccttgttcctttggtttttaccctctaattgcgggtttcgcgggcgggttttcaatg

SEQ ID NO: 709 - DNA, 271 bp, Glycine max
  Clone ID: PAT_MRT3847_100640C.1
acaaaaacacagctatttcatactgcgacaaccttttaaatgaaccaattacgccatctgcttcttttacacacatccaagatcatgcatagacgcaacctctatctcctaatataaccaaccgcaggggggcaagacttcttgggggaaagctatgccttatttttccacaagtgaacccacggcagacctaaaggactattatgaggatcagggctctcgaaaagggcaacccaatgagcttgaaatttaaggcttgcagacccattgt

SEQ ID NO: 710 - DNA, 339 bp, Glycine max
  unsure (1)..(339): unsure at all n locations
  Clone ID: PAT_MRT3847_100641C.1
atcnttaacaanttttttcacaccctattattttaccaatagcacacacttttgggatctttttataaaaaagagacccttaaccttcatcacctattctctcaaatcttctttccacatttttgccatcatacatcacaaccactactgctattttttaaaaaacatatcctacaacaccttgattcacttacccatcatctccattttcactttacctcgctccctctctactacctataaacacccctctatccacctttttccactttttaacatctattcctccactgtgcaaataaatatactcatttactaatttttcaccaaaaacatttt

SEQ ID NO: 711 - DNA, 232 bp, Glycine max
  Clone ID: PAT_MRT3847_100642C.1
ttttggcatggggacaaagccgagatcacaggaagccgcacttaaaaagcgcaagcacaagcagtcacaactggaatgaaagactgtcccaagtacgacccactcctgggtgagcgatttcacaacggaaagaaaagcactcactgtgctggccacagactagatgaaccatattcatttccacacttagtttattggcagagcactctaccattggctataggactttgtg

SEQ ID NO: 712 - DNA, 469 bp, Glycine max
  Clone ID: PAT_MRT3847_100643C.1
gtatgaaattgaaaagcaaccttccatgctttcaatctcttgtctactcagatgcatctgtttttcttggttatccagtttctcatttgcctcctctaacgccaatacataccctctttcttcatcatgccactttctaaatttatcatcacaatttgctccaagttcatcatttgcggcattgagatgtttggcgatggactctttattatttaaactctctttgagatcatcattgatatcatctgccttttgaagcatttcttgattcagcttctcaactttgaaaatagcttcctgtatcttattgacctgtgcatcatagtatttctttatgttctgaagtgtatttgtcttgtctcctagttttaccttgagtttctcaatttcagctttagcttcttccatttcttcataaacatccattgcttggtatttcacatttatgactttcaaaaaacctatttgc

SEQ ID NO: 713 - DNA, 435 bp, Glycine max
  Clone ID: PAT_MRT3847_100644C.1
gaaaaccagcaataagaaaagctcaacttctgccttttctagtcagacagctccaaatttccttaataaaacagaaaatttagcagcaagcatacagcatggtcttgaaattatcgatagttaccaacgtaattcagctttgaggcagtcaccatataggttttcattacaaccaagaaaatctaaattaacttttccagctagcaaagttgatgtgggcctacagacttctcttgatgatattgttggagaagattctgttttattcacctgtagtaattgtaacagcagaacgcaacttcatgtcaatgagactgacaatgattcaaacctacagttggtacctgttgattgccatgagtctgctgataagacaaagaagcaagttatcaaagcagtagagaaggttttggcaggatctataaggagagaaat

SEQ ID NO: 714 - DNA, 1010 bp, Glycine max
  Clone ID: PAT_MRT3847_100645C.1
ccccgaggcattagagaactggttatacggctgcgagaagacgacagaaggggacaccggatgaagattttggcattctcttagaagctgctgtaatgtatgatagacgtgttgctgccatattaggtgaagatgattcagtagatgaggaggtcatttggaaagaaatatccgatggaaaacaatgtttatatcccagattgttattcatcataactggcaaaggcccagaaaaagagaagtatgaggtaaaaataaagagaatgaaacttaaacgtgtggcatttcgtaccatgtggctgtcagctgatgattatccattactgctaggatcagctgatctaggtgtttgtctgcatacttcatcatcaggattagaccttccaatgaaggttgtggatatgtttggctgtggactgcctgtttgtgctgtttcatactcttgcattagggaactggttagagttgacaaaaatggtcttctcttctcttcttcttcagagctagctgatgaacttctgcttctcttcaagggatttcctgatgactgtgatgctttgaaggtcctcaaatatggtgcattagaaactggttcttcatcaaggtgggctactgaatgggaagaacatgcaaagccgctgataactgaggttatatcaagattttgacacactgttggttcttagaagacatctttaacttctctaacagtattggatcgagctgttggcctgatccagtggagagttaactagtactatgtgcctgattgcataaaaatttgatgaagttttggcaatttccaaggcagagttaccttgtacagaatagttatgcagcagggtttccaacatatgtctgttgttgacttgctgtgtatgaagtttgcaataggtgttctctgtaaaaattggctttatgatttaggatttcattttctttgaatgtgacttgattcttggtccatatgtttcgatgaaagtgaggttattatactaaagcttctagat

SEQ ID NO: 715 - DNA, 281 bp, Glycine max
  Clone ID: PAT_MRT3847_100646C.1
ttagatcttaatgaaacacgccaatactttgcctcaatgttgaccggggaaaaaaaaactaccacaaacaaactggctttccatgggccaattgttgcccaaccatttattgcaaccgctactatgagtctcacctgacttgcaagaaacatatagctcttaaactgtcagggggtctgcaacctatgcgacacaaatttgactcaaaaaaaaagtgtaaccgctcatgaaaggctaactaaagatgaacctacccttaaatctgtctttcaagaccgctg

SEQ ID NO: 716 - DNA, 256 bp, Glycine max
  unsure (1)..(256): unsure at all n locations
  Clone ID: PAT_MRT3847_100647C.1
caaaaaggcacaactctttgggacaaattttgataagagaagaaacaattgtgtttggcgcgggccacgatcgctggctccccaaaagatatcnnggnntgtcctttacctgaagacggataatgacttctggtgtgccagtggacgatcacagaccaaggctttgtatacgcttggatcaccagatgaagtttatggatttgttacggtactggccaatgtttgagacttacccagcttcaaaaattgcttatat

SEQ ID NO: 717 - DNA, 769 bp, Glycine max
  Clone ID: PAT_MRT3847_100648C.1
atgacaaatgatgttggagtggttccccaataaaccttcacaatttaccaataccataaattgttgctttacagatgaaacgtgacacattttcattactctttctaaatttcgacaagctctcataatagactctttcataatgtgaaattgttcccttgaccatctacgagtcagttaacctggtttctaactctacatatccacgtgaatcattttgcagaataagtacaaacccctatttatatgcaaatgaatttcgaaaacaaactagaccaatgcacgctcaactacatactactacacccttgtacctgaacctgaccataacctgtcatcatcaagtaatctctcttcttctattcattctacactgtcattatgcacttgtagagctgtacactgcttgtaatattacaacacaactaactccaaagtgacgtgtatcgaaacttcaccgctgattcttgtggaaaactcatgtagtgagtcttacagtgactaatgatattgccagaaccatgcagccaataagaggtctcagaccagctgaatacgaggtatttaaatcaggagggctttgggaccctaaaactgggctaccagtaccagagccggatgcgcctgcccctgaagatgatgggtagatgcaagaacccgagctcggattggtgttcactatgttggcagtgcctccaaagtcacagcttgtaggcgcaggattcttttggtagtagctgttgaaggcaaaagaagctggtgccgaatt

SEQ ID NO: 718 - DNA, 282 bp, Glycine max
  Clone ID: PAT_MRT3847_100649C.1
gtgtttttccttcaacactggagggcctaggaactaatatgactaggactcctgctattctgctcactaaaaaattatgatcctactaatagtgatacgtaagcgctgcttaaacttacttacaattgcacttggaaacatagagccttattttataggctgggttgaacatgacaaggatgtgagattacattccgatgagagcacaccttatggactccaagacggtatattgacaacctaatgatcccgcggtccaaaaatgcattcccagcttacccc

SEQ ID NO: 719 - DNA, 516 bp, Glycine max
  Clone ID: PAT_MRT3847_10064C.1
cgccggccacgcgtgcagatttcttagagtattagataggtggacagaggtgtttcattgagtgtagctctactatggctggacaggtggcgtgagtaggaaccgaataaaccacttaaacctttggtgtggttatgtggaaccaccgtgggactagtagggctatgtctcgaagcccatggcccatgtcagaaccaacggaagccctcgtactcaatactgtgggataaacttaaagctacctttctgtgaggtatttggagctctacagctcaaacactagggagctgttgagacagcccgcactgctctggcagaatccggcaccttgaagccttgctgatgacaagaatcctgctcggctgctggagcttgctcatgcacaggagctgtaaatcttccattaccaattgcatagtgtaacagacagctgatcaggcactgatgtggaaacagacacaggaacaaccaatactacttgcctcattgcccctacaaagcacaagatataactac

SEQ ID NO: 720 - DNA, 370 bp, Glycine max
  Clone ID: PAT_MRT3847_100650C.1
cccccaaacaatttataaaaggttttttttttgggccttttttggggggggggaatcaaaaccccttgaacccccttaagggccaatttaaaaccctcccggggtggcccaaacccccccaacccggggtttacaaaggggaaccccccttttacaaaagggggggggcccctaacttactgggcctggccctttcccaagaaaaaaacagtttcacccacttccgggggctaaaaacccgcccctttaaaatgggaatacggggcagaatccccctattattaggggggggggaaggttttcctcgggggcgtggggcccccttagggaaccccctttttccttttgacccctagggtcccaacccccc

SEQ ID NO: 721 - DNA, 379 bp, Glycine max
  unsure (1)..(379): unsure at all n locations
  Clone ID: PAT_MRT3847_100651C.1
aaaggtgngagtnnaagggtgngtgaggnnggtnaggtaggntgngtgnngntgtgnaggnggagngnagganngnaggtnagnngnnagtgtgngtgatgatanggaatangntgttagnggntgtgaggngtaggnagnaaggtnnagtgnggtagtcgngtnangnncatggaaggagtgaggngagngtgggnagtgcagagtgggngnngtngaggngggtgnggnggnttggggagagtngtggtagngnacngngngnnggtggnnggngggntnngnganaaggtcgggtnnnaagggnagnngnggggngtnangngtggaggtnganttgngngntgngagngaggannggngggngnaangngggaan

SEQ ID NO: 722 - DNA, 1780 bp, Glycine max
  Clone ID: PAT_MRT3847_100652C.1
gcacgcgtacagtctagactaggaatgcggcccgagtgttgctgggctgggtaaaattcggcttgaacttgaggagattgtcaagttctttactcacggagagatgtaccgaaggaggggagtgaaaataccaggtggcatacttctttgtggccctcctggagtgggaaagacattgctggcaaaggcagtggctggtgaggcaggggttaatttcttctctatttccgcttcacagtttgtggaaatatatgtcggtgtaggggcttctcgtgtccgagcactttaccaagaagccagggaaaatgccccatctgttgtcttcattgacgagctggatgctgttggaagggagcgtggcttgattaaaggttcaggtggacaggaacgtgatgctactcttaatcagctcctggtgtgcttagatggatttgaagggaggggagaggtgatcactattgcatccacaaaccgaccagacattctggatccagcacttgtgaggcctggcaggtttgatcggaaaatatatatccccaagcctggccttattggccgcatagaaattctaaaggtccatgctcgtaaaaagccaatggctgaaggcgtggattacatggctgttgctagtatgactgatggaatggttggtgcagagctagccatcataattgaggttgctgccattaatatgatacgtgattcaaggactgagataactactgatgacttattgcaagctgcacaaatggaagaacgaggaatgctagatagaaaggaaagaagcactgagacatggaaacaagtagctataaatgaagctgcaatggctgttgtggctgtgaactttcctgatcttaaaaatatagagtttgtcacgattgctcctagagctggtagggaattgggttatgttcgggtgaagatggattcagtcaaatttaatcaaggaatgctcacacgtcaatcccttcttgatcatattactgttcaactagctccccgtgcagctgatgaactttggtttgggagtggtcagttgagtacgatatgggctgaaactgcagacaatgctaggtctgcagcaaggacatttgttcttggtgggctttctgagaagtatcacggaatgtccaatttctgggtgtcagaccgaattaatgaaattgattcggaagcaatgcggattgtcaactcgtgttatgaacgtgcaaaagagatcctcgagcaaaatagaacgctgatggatgctttggtgaatgagcttgttgagaagaaaagcttaaccaaacaagagttcgtccgtctagtagagttgcacggcttcctaaaaccaatgcctcccagcatacttgacatacgagttgctaagtgtagagaattccaaaaattgatcggtagtggaaaggaaacgagtttgagtagccacgcataacaaattgcaggggcaaatgccccatcaattttggagaatatttatactatatgctgatttcatgtaccttgttcctgtattatattctttaccacaactctacggagtatggacataattgtgtcgagtctaagctaggtagcctttgctagctcgtgagggggacatgtaaaccttgttttcctacgtttcggtgtaaagcctgaattaaagccaagtgtagacattcctaaactattgtttaagtgcctcttatttctgttcaccctccggatttctgattatgcctttattgtcataatagtgaactagcaacaaaaataactacctaaaaaaaaaaaaaaa

SEQ ID NO: 723 - DNA, 808 bp, Glycine max
  unsure (1)..(808): unsure at all n locations
  Clone ID: PAT_MRT3847_100653C.1
cccacgcgtccgcatccatcgggttctctctctcctcctttcccttctctccaaaccctatcattttatgccggaccctccgatcggactcaaacaccgcaaccaccacactctctctcctaggttttaaattgcagctgtaattgtgatcgtcacagttgtgttgtggactcatgtaggccaattgcggctgatgtggttcgcgatcacagcctgatgcggctctaataaccgcaatcgagatgattgagctgtatcatgtgatgtggtttgcaacttaaaaccttgcagtatggaacataactggtttgggattttaaggtcttgtgatcttgccagtttgtatttgcaaggattgagtgagtttatcaaaagctatggttgatcccttagttctttgtctcattcatggaagagtgagggtgagccttggcacagcagtaaagttgctgtctcatgacttagaggtcataagttcaaacctagaaacagtttgcttgcagggtaagattgtgtatatttaccctccccaaactcctcttggtgggagccttgcgcattgagtcgtcctatattccgaggagggtggactggcatcaacttctgattttattctacccaacccgtgttatcacccgccgtataaacataccatggtgccttatagtgggcctnccttcaaaattgcctatggcggntgacaataaatccaccagccattccgccatggcagggccatagtggctatttaacacactggtgttgataaatctgagcctatgcaatgggaatatcaaatgattcaggt

SEQ ID NO: 724 - DNA, 297 bp, Glycine max
  unsure (1)..(297): unsure at all n locations
  Clone ID: PAT_MRT3847_100654C.1
aattcggctcagaaaaaaaaaaaaaaaaatccgcgattcgctcttctcttggattagtgtattccagtagtacgaacgaaagagaagagcgatttantagtgagagaagatggggttgtcgttcacgaagctgttcatcatgttgtttgcgaagaatgaaatgaggattctgatggttggtctcgatgctgctggttagacaaccatcttgttcaagctcaagcttggagatatcgtcaccactattcccaccatctgatttaatgttgtgactgtggagttcatttacttcttctt

SEQ ID NO: 725 - DNA, 903 bp, Glycine max
  Clone ID: PAT_MRT3847_100655C.1
attcaacggaattttgcaacgctgttaaaaacggcctgaaatggcactgcatgcccagcttcaaaggactgtggagcccccttatgtgttgatacctagcacgaaggtaataagcggataaaccttccgtttatcggacacccttaaatataatacgtcagggttaatccaatttagtaaggcaggaaggatttcatgcgatccaatctgtttggcttccagtggcacttgaatgatttatgcagttgggggtggccaaataaattccccatggattgtgagcgtctattctatttcgatccactatccgcattcactttcaactctcacattatcaacaactttctaatcaggcttgcagtttgtttttgtcaaataaattccccatggattgtgagcgtctattttatttcagtcacgaagaaagcggccaagaactcctacacctggacactatcttggccttaaaagtactagagactatgggcatcgtggtgaccatggaaggtatcgaggaggtggatctggtcatgatgattatggatatcgtggtgaccgtggaaggtctccaaggcgctcaccaccatatcgaggtggtagagattattcaccgaggcactcacccccaccttatggtggaagatctaggagggacaggtccaggtcacttccttattctccatatggtagcccagataggaggtatgctcgtggatctaggtgatgtcttttaagtttgaagatggtaatgaaaaaattatctattatggtatcgtgactaaagtttgtatccatgttttggaaatagtctgcactacttatgctttaatttgtacacttatatttgttcggtatttaactagtttatacaattcataatttattggtcaaattgttctacag

SEQ ID NO: 726 - DNA, 348 bp, Glycine max
  Clone ID: PAT_MRT3847_100656C.1
ctttgctatcgtccacgcgtccgcccacacgtccgctagattttataaagtaacctctactaaagcacattttgttagtggaaaaaccttcaaacatgtaataattggtgcttggattacattacttcagaagattttcctgaaaaagaatatcaagaaaaacccaaaaagattgatgccagattgagacaaagaatagatcctcaatacaatgaggttcaggctcaaatggaaacaaatttgtttaaattgactcttgaagatgtcgaaactcctaaaggtcccatgttggattctaaaatttctcaatctaaaaatgcaccttcccaaaaaacacaagtggtagga

SEQ ID NO: 727 - DNA, 556 bp, Glycine max
  unsure (1)..(556): unsure at all n locations
  Clone ID: PAT_MRT3847_100657C.1
acgaggtaacaggtaagattctcctaatgaaatgtataaaaaaataataagaaagttgttttagtgatctatgtcgccatagctaaagggatcatagtgacaactgtgggtgagacgaaggtatgggagacgtattctacggcaacgatgaccaccgagaaatgaacgatgattgtatgtataaggaggatgtagtgatggagagcatcagaagccaacgggaaatcaaagacctcaagcgcagacaaaacaacaacaactgctgctacttctacttccttcgatgctttcactttctcacgcttctccctgctttcgtcaacttctgatgtaacctactatttgtgttatgttatcaattaactcttgaaagtttttattcccaatctagatcaaatactgtgttgcagtattcatttttattttctttggtctcaaccctctgtttttcattgatttgatataggcgcaataatgataagaacttaattcttttttgttatcatgccgagcttaataccactttgagtagcaatttatnnnngataaganntta

SEQ ID NO: 728 - DNA, 1999 bp, Glycine max
  Clone ID: PAT_MRT3847_100658C.1
cgtggggcccccggaccgcatccctgtcgcaagtgtagccggtagcgctgctggtttccgctgtcatgtgcgtccgccgcctagcttgatcaagtctagtggaccgttaaatgagcatgttgcaccaacagttggttctggtccttttctgcttccttctggaactgctaatggctttttaggtgaggaaactgatggtaggccaggttgttctctagacacccgccgtgtatcttgtaaaagaaaggctgttgaacgaaatgttggacaatcttcagatggtggaagttctagctatagtcagcatacagatggtagtacttggaacactcttcctactcaggcttatggggggatcagttttaacagatctgccccaacggatcaggtaaatgcgagacttggcctgagtacaggggatggatcctctgaaagcattcctgtgtcaaatgtagcaagaagctcaggaagtttccacagaaattttcgtccgaggacaagtccttcaagtcaacaaatttctgttccttccactgcaatctcaagtgggaatgttattaggagttctggtgtttcatcaccctctcctatattgcaacgatttcatcctgttgatattcctttgacttgagggcagtgccacctgttgatactatggttcctcaaagtcagccccttgttattcatgttcctgctttaccaaggaatgcacagtcattcaggtggagtggtggttccagttcaacaaacaaccattcctcaaactcagttatgtgtgcagatagaaataatctaccaaatgaggaagcaagctcaagaagtatgcctagaaacattatagaatacccaatgtttgtgcctgcaaccaacttaagaaacgttgttcggaatccagctagaacttcaaataatgcaaatttaagtattccaggaaatgttggttcttcatcgcggacaggctcaaatccagctgtcaatccaccacctgcctcggcgtgggtttctcgccctaatcctcagcagtatccgcgcagattatctgaatatgttcgtcggtccttgttttctcctggtttggaagctgctggaagttcaagcaatagttatactcccttccgtggtcctcctacttcatctgaatcaaggggactgtcatctggggtaaacccgttcgagaggcaaggtgatagtgaatttggaattccatattcgttacaatctttggttgttgctggtgaaggaagtagtagacttgtatctgagctgcgcaatgtgttgggcctcatgcgtaggggtgggaacctgcgatttgaggatgttatgatccttgacccttcagtgttctctggaattgctgatattcatgatcgacacagggatatgcgacttgatgtggataacatgtcctatgaggagctattggctctggaagaacgcattggaaatgtgagcactggattaagtgaggagattgtatcgaaacttttgaaaaagaagaagtattcagctgaaccagattctcagcatgaggcagaaccatgctgtgtttgtcaggaggagtataaagatggggatgatttaggatcactggattgtgggcatgattaccatagagattgtattaaacagtggctaatgcataagaatttgtgtcccatttgtaagacaacgggcttggcaacctgagacttgtatcaaaaatattttcatattttctcttagaagatgaacattgaggtaaaggaaagtggcacaatttaatcagaaaattctgctgaattgtagctgaagtctctggtgctttgctgcttactaaatggcccatcttcttaagccttagccaaatttcttattatcaaattttttgtttacttgtagaagccaatgatctccggttaaagtgacacatgagatgattggtgtggtggataaaggaacatttcttaactgtagttgacaaggcttgttttacatttatgaaattttttatacattgctc

SEQ ID NO: 729 - DNA, 419 bp, Glycine max
  Clone ID: PAT_MRT3847_100659C.1
catcaactttacctagctttaaaaaacaacttcaactacacacctattggaatctttatacacctatgtatacatatatatatatatattacttcatctccacacatattcaattccattaatatctaataaacataactacaataagaaactacttatatttagaaatattacctactataataaatactaatttaccagatccctcctcctactattcgaccataacaactaacatctattaacgaactcaataactccaacccctctacaatccattcacaggactaactataatcaaatcacacacttaatctacttatattacaaaaccccataatcttctatcaatatccaaattcttatctcatcacactaccatctcacacacatataccaacttcaatatccaccatcta

SEQ ID NO: 730 - DNA, 254 bp, Glycine max
  Clone ID: PAT_MRT3847_10065C.1
tgggctatgaagatgaggaacgttccagattactcttggtggaaggctctatagctgagaagtggaaggatcgactcggtaaaaaagttaagcgctgggatatgaagcttcgtcatcttggactcagtaaaagtgattctagcaatagtgattccactcagagtcagaagtctggcaggaactcgaacccccggcaagcacgcaactaaatcccgaaatacaaaaagtaacacagtggacttcctattaagact

SEQ ID NO: 731 - DNA, 495 bp, Glycine max
  Clone ID: PAT_MRT3847_100660C.1
ctgcaatgatgctggattatgttttgcaggggttcatgattcgttttggacacacccatgcgatgttgagaaaatgaatcagattctaagagaaaaatttgtggagctttataacatgcctatacttgaaaatttgcttgagggcttccagactacatatccagggttggctttccctccattgccaaagagaggtgattttgacttacagaaggttcttgattctccatacttcttcaactgagcaattctccacattcaacaactataagttgcactgaaagtattctttactttcaatgcaaaatatggatgaacttatggggtgcaattcatcctgtttggagatgggattggtgatccaacattgcttatggagaaggccaagaaggaaagaaagtaggttctgataatatttgaaaaggtatcttgttcttgaatcctaagaagtcaggactttactgatgtgaagatctattcaacataaggcagcat

SEQ ID NO: 732 - DNA, 240 bp, Glycine max
  Clone ID: PAT_MRT3847_100661C.1
gggaaaaacataagggaattttttatttttttttggaaaaacagggggaaaacctgggagtatgattaatctcctttcatcccagggggctcgctagggagaaaagggcttttaaacattgggactttgtttttaggggggaatcaattccatacccttgggtaagggatgagaatgttaaatcactaccccccccaaacaatgggtgcccataagggaattctcatccctactttaaat

SEQ ID NO: 733 - DNA, 373 bp, Glycine max
  Clone ID: PAT_MRT3847_100662C.1
gatgatattcattgttatcgtaagcatagggcctatgtaaatgtcaaatatgtgttcacatgccacatgtgctatcaacaacgtctattaaaactgggttctccatttgaagcacttgtatactgaccaagggctatgcaccaaactctgaactggatacattgcatgatggttatatatatctatacactatgcattctgaaagtatgtgatgctaagcacaacatgatgaaaagagttaagtatggatgaaaagtcgctttccatgcgatcttattcaatacaaaacccaatctgatgtatatacgcgttatatctctctatgtatgatggattatgctacaggcattgataactcaaaatcataacacaa

SEQ ID NO: 734 - DNA, 2764 bp, Glycine max
  unsure (1)..(2764): unsure at all n locations
  Clone ID: PAT_MRT3847_100663C.1
tttcccgcacgcgctacaagcgtcagggaaaatctaccgctctcacccttcaacatcaagagagagagattacagagagagaaagagagtgagtgagtgagtgagtgagtgagtgagtctgttgctttgtttgttcccatcttgtaagcttagactccaaaacctacggctattgctaaggtatgttttaacagacaaacatcttcttcactgtcaccggtactcaccatttctctgtcttttcaagatttcttttcatggctcgagggggaatgaaaagccacaaatgtggttctatcaaagattaaaaattttgatcctgaaaatgcctcaaaaatcatgggttatcttctcatgaaccttgaagagtctgaacttattcgtttggcttgtagtcccgaccctgtgcttcacactctcgttctgagggttaagaaccacttgagtggtctcactctctcctccacgaccccttcgtctccttcgcttcctccttctccccttaaccccacagcgagactcactgctatttcctcaaacccattttcaagaggaggaggacccaccaatggttttgacttcactagaaaccacccgtcttcgccttcctctcactctcatgcttggaacttcccaaacaacaaccccattagtccaaagtccactcctttattctcttacgataacatccgagccctctcaccccgtgtagtcaacgatgattgtggtgattttgttgacgagcagcaagtgaatgagtactttcccttcctcaatgactcctctaagaacgaagatttggtcgatccgcgactcgaatttggcgttggggctcaaaattggcactctggggactcacatttgcaacacagaaggagctactccgccagtgacgttggttttgggtgtgatgaagcagcagcagcagcccctggacttggatacaagccatgcctttactttgccagagggttttgtaaaaatggcaccaattgtaagtttcttcatggtgcttttactgattcactggatgccattgttggctcccctagtaagcagcttgaggggatggaacagcgagaggagtttgttaggttcaacaaggcaccacagcttcaaagaatagcctctggaccttctgcgcccgcccgtgagaagtactttgagtttttgattcaggagtcccaaagggctgcagcagccttcatgatgggggaagaattctataactttggctgggataggccagaaaggaatgacttcctagccgcaatttccggcgaaaaacccaactctgcttcgcgacagatttatctgacctttcctgccgaaagtacattcaaagatgaagatgtttccgagtacttcagcaaatttggacctgtacaagatgtgagaattccatatcagcaaaagcgaatgtttgggtttgttacctttgtctacccagagacagtgagactcatattatccaaagggaatcctcattttatctgtgattcacgtgtacttgtcaagccctacaaggagaagggaaaagtccctgacaagagacaacaacagcaacaacagcaattagagaggggagatctttcaccatgtttaagcccctctggctttggctctaaagaaccttatgatttccatcttggggcaaggatgttgtataatccacatgatatcttattgagaagaaaaattgaggagcaggctgaattgcagcaagtccttgaacttcaagaaagaaggctgaagaatctacagcttccagacttcaagaataatcccattcaccatcaccaacgcagtctttcagtgggtactcctttggttttgccccatcaacttcatagtcatattaacgatgcaggtctttctcctgatagcattaaaggagatattacaggctacagtggcagcttcacttctaccaattctttaggtattgcatctgagcagcagcagcagctacagaaagaagttgatccagctcacattgatgattctgagagcaggaatttaatggagagtggaaatgccgaaggcgtagatcttagtaatagtgtggggcaggcccttcctgatagtctctttgcttcaccaacaaaagcagctggaggttatcatgctgacttctctacattggcagaggtcaatgagagtgctgtattttcagctagctcatcttctcaggacaagctagaaccgacaacctcttctagtgatgtggcctcccattagttttgtttacaattcaagatttgaattgtaggtaataagaatagaagtggccagctggggataatttttattaggatttatagaagcttatagaagaatcttctagatgtatagccaaatacacctagatcagaagattagatcctctagagaagaatcaaacgagatcatcaccatcatcaatacatactactaacagcaggcgatacaagttgcatacttggacagacattagtttataagactagttttcttttcttcctttccttttctgttgtactcccattcccctcaacataaatatctatagatatatatgtttcaccagactgaggcagaacaagttactgttgttttactctagcttaatgtataaaacttggtctaccatttagttgctaaaaaaaaaaaaaaaaaaaacggaacgcgtgggaaaaaaaaaaaaaaaaaaaaaaaaaaaaaaaaaaaaaaaaaaanaaaaaaaaaaaaaaaaaaaaaaaaaaanaaagggggggccgtttta

SEQ ID NO: 735 - DNA, 502 bp, Glycine max
  Clone ID: PAT_MRT3847_100664C.1
accttgaaacattcatgcttatttgagctaaaggactgaacttgaagtagctcggttccgcctaagttgatagctgtccagattaaactgcaacggatatacacccctcttagcaccacaagcacaaaaagggaacttgaaggataaaaggaggggcaccggggtgtgatccatgtgcaacatgcgctagaatcattacctggaccaaacgaccttgttggctaaccactaaaaaatctgggacgctatgtcgcttttttgttaactgggtttctcagttgccccctactcactccaaaatataaaaatctatggcacaacgcttcccgctagaattttgatgagcaaacctttttctcctgaactacttaatttccagagcttcaaactaactctattagccttttctttttgtaccatttttaccaaactttttaccctctgtcgacttgctctttatataacataccctggtgcctttgggctgcctctgctttccaat

SEQ ID NO: 736 - DNA, 307 bp, Glycine max
  Clone ID: PAT_MRT3847_100665C.1
aaacccccaacacccaaaaacaaaattcccttagacccgcccaaaaaaaaacgcccggggggatacatccggggccagcaggggggccccattcgcccaggatagggggccaacaacccagggggcccacaaaaacctttatgggaaaaaaagaacaggccccaaccaaggaaccataagtaacgggaaaggggggaaaaattctccccccccgggtttgggttcggccctcggaaccccaccaaggaaggggggggcatccccaaaaaacttaaagttctggttacccccccccaaccccttttga

SEQ ID NO: 737 - DNA, 323 bp, Glycine max
  Clone ID: PAT_MRT3847_100666C.1
aaaaagaaaaaaagatggcccggtgcagcacactgatctggcgggcggaataagatctactgggaactcgcacccgctcgtttgaatagaacgtagagacgtactcgatactaatggcatctggaagttataactgtactacacatgtagctggcaattgcttgctccgcgctgaagtttgcttggttcatgagcaggttcgggaagagttaccgaagcgaggaagagatgagggagaggcacgagatattctagcaaaacgcgggggcttcattctttggcacatcaagaaccggtagtaatacactgtctctgctcatcat

SEQ ID NO: 738 - DNA, 265 bp, Glycine max
  Clone ID: PAT_MRT3847_100667C.1
tttttaattgaaaattcataataatatagggtgagtatataagcaagcaaattcaaaaagagagccgctgaacgaatcccaaatttaaaacgcgccaaaaatgtttttgtttgaaaaaacaaaactgaaaaaggggggttacagagaaacattgggcagaagtttgtaacttacctttcaatgataacgttggagaaagaaatcctagaacaaactgaaggcttccggaatgggggctccaaaaatttaggggggtccctctgcc

SEQ ID NO: 739 - DNA, 202 bp, Glycine max
  Clone ID: PAT_MRT3847_100668C.1
agccatcggcgttacaacagagctgacaaaatatacagccttgaatccaactgaagctataacagtagctataacacatacatttacactatttatgaatatctccatcgccgccaacatctgaagtagccatttgaacccagctatcacttttgaattaagcattagaaacaacatcactgtcatcactaatgtgttatac

SEQ ID NO: 740 - DNA, 515 bp, Glycine max
  Clone ID: PAT_MRT3847_100669C.1
aaaccaaaaaaaataaaaaaaatcgagatggaccccggacctttttttttttacaaaaaaagaaagggttaaaaaaaatccaaaaaacccccaattaatcccaaaaaaaaaaagaaatcaacgagggaccacccgcggttttagcgggcccccaaagaaaaaaatgggattcttccccttctcttcttttcttttctcttttctttttttctttttcttttctcccttcctttaacccccaattccccttttttttaaaatcttctggaccaggtttttttttttttttttccccgggcggtttaaaccggggacttaaacccccccaccctaaaaaaagaaaaaaccctttccaaaaaaaaaaaaaaaagggggggggaaacaaaataaaataaaattaatttccgggtttgccgggattgtacccgaaataggaaaggtaccacttgacaaactttttaaacccggtttgaaaatcgggggggggcttgaacccgagttctctccgggccaaa

SEQ ID NO: 741 - DNA, 337 bp, Glycine max
  unsure (1)..(337): unsure at all n locations
  Clone ID: PAT_MRT3847_10066C.1
ggcactcctggggcaagggtggacagactcagacccccagcatggttagcgctgaccttcattgaggtccctttggaaccagatgtcttgttacngacaccttcctctgtgnaagtctcctcaccttgaggggtcttnagtaatgcatctgggnagcatctcaactgctggtagctttatctgacttggaaagttgganaagaggcattcctactggagaaaaatgtcagtgtnnnccnataagctctgngttagctattcattatatntgtgcttaaagatgttccttcatncatcaactaggggaagtccagatgcgggttatcttgaaagaaac

SEQ ID NO: 742 - DNA, 338 bp, Glycine max
  unsure (1)..(338): unsure at all n locations
  Clone ID: PAT_MRT3847_100670C.1
gagggcaaaactaaactagccccttcttatggaggatttcccataaactcaaaagcatgatattgacaaaattccctaacaagtttagacctaatggctaacaaaaacaaactttgaggcttcacaataccacangaccaaaatagaaaaaggttaacttgacaacattcgatatatcttcatgtccttaggtttaaggacagagaaagatatgcatgagnncctactggataaanattaaattctgttgtgttcacatgcgttgattcatgtaatattaaaatatccggttnggtaaggatttctcacctggaagttttagtaatttttgtatccct

SEQ ID NO: 743 - DNA, 253 bp, Glycine max
  Clone ID: PAT_MRT3847_100671C.1
attggctcgaggaagcatgagttcagatgggcaaaatttcagagttcctggaagttatataaagggaattgcctggggaggtcgacacagtgcagtaatcacagatgctggagctgtgcttacgtttggttggggactttatggacagtgtgggcaaggaagtacagatgatgaattaagcccgaattgcgtatcttccttattgggtattcgaatagagggagttgctgcaggactgtggcatactgtgtgt

SEQ ID NO: 744 - DNA, 537 bp, Glycine max
  Clone ID: PAT_MRT3847_100672C.1
gcaccagcgaagattcaagaaaaatagctcagataagacggttgaacagttatttgggtgagtcagtatagcaaagattaggcattctaagtaatgggggagtttattggctccactgagactaatcaggatcagctgtttgctcgaattgtcgcctatgctttccaggaataaaatgcgcacaagttgtcgagcattttgcagaatagaactgtttggaagtggtaagcttgcatgttactgtcattcctttggtaatctgttactcttctgggaactcttactccaagcatacaatcatgttcatcaggacttgggaggtcaggaactaacgaggttctgatagttagtattggcctttagacgttgttttttcctttcaaaacctttaagaagttttcaaaagtttgaattcgatggctttttatgatcaactttacaacctggaaatttgaagatttggatcctttcttgtaaaccaatctgtgtgtataaacaatgtgatcacttgtcatggacccccttcataccaactac

SEQ ID NO: 745 - DNA, 211 bp, Glycine max
  Clone ID: PAT_MRT3847_100673C.1
atataaaattgggcaaagcatatttaaatcctgtcattgtgaaaatatgctgttccctattttaaaggggagactgaaaacattcttttggatgtttgaacagtatgaaaaagattctaaccgatctatcttacccaaacaacttaaaaaggttttagaacattttgaacttcttttttaagagcataaaattgaacattttttttagtac

SEQ ID NO: 746 - DNA, 359 bp, Glycine max
  unsure (1)..(359): unsure at all n locations
  Clone ID: PAT_MRT3847_100674C.1
cgcgccgtaagctcggaattcggctcgagaattttcacctcaggaacgttgcgtcaataccggaagaaacataagcatgttgatttgagagctgtgaagaaatggtctaggcagattttggaaggccttttatatcttcacagtcacaatccgccggttattcatcgagaccttaagtgtgataacatttttgtcaatggtaatcaaggggaggtgaaaattggtgatttaggattggcagctatccttcaacaagccaattcagctcacagtgtcataggtacccctgagttcatggccccagaactttatgaagaggaatacaatgagctngtngacatctatgcttttggcatgtg

SEQ ID NO: 747 - DNA, 270 bp, Glycine max
  unsure (1)..(270): unsure at all n locations
  Clone ID: PAT_MRT3847_100675C.1
gnngggnaaatttataattttttttgtttttttttgtttatagccccctccacttttatttaaaacgggaaaaaggacccgtttcttcttttcagaaatagatgatggggagcatccctttgaaaagctgattgggggaataaaagaaatacccaccatagctttttcaaattttgaaaagaaaggcgcttttttaaggtttctgaaggggagctggattaacccctacctgaagccccatgtttctgttttttcttgggggagttcctg

SEQ ID NO: 748 - DNA, 397 bp, Glycine max
  Clone ID: PAT_MRT3847_100676C.1
gggactcgggtgaaccgctgacacaggccggcttacactgaaacctgatacaaatgcctggatggcctgacaccaagatgcaggaagttcatgcctacttcgatgggtacaatttctttaaggaatgaaaatcactctccgagctggtcacagactcacagaatcattttgtgttacactcttagatgataagacgagacactctcctatttgacatacgactgcgtgacaaaaatagcacttcttcttattgtgtgtgagctgtgcgtaaaatgcaatgttaagcaagatgaaatatggtattattgctacgactatactatctggtgtaggactcggcggggagacttctataatgacttccttctacatactatgtacagcttactgatccata

SEQ ID NO: 749 - DNA, 359 bp, Glycine max
  Clone ID: PAT_MRT3847_100677C.1
gaatattggttattgcgtgagtaacaaaacaaccatttcctggttattattgtcataattaagagtgttgttctgtctatttattacctaaaattatcactcgtcggtttgagttttgctcaacctatttattgatataaaaaaaaaaaataccactgttcaaaagttgtgcttggaaaaatattttagtgaatttggtcatttcattttttttctggagaataaataatatttcttactattttgaaagaaaaacacatttttttcctgtgtaataccttccatttcctgcactgaattgtgtgttcctctgcctctgtaagaacactgccgtactgaagaaatgagaggatcctaat

SEQ ID NO: 750 - DNA, 701 bp, Glycine max
  Clone ID: PAT_MRT3847_100678C.1
atttttcccttatttgttttctctcgatatttgtccataataacgttctctttgtccctcatcttatcctgcacccactcccttataaccccccctacttcaccacttcacaatcaatcttctttatccactctctctctctctcttaaaattaaaactaagcatgtgctctgccatatcccaagtggaacaagaagagttgctcgaaaaattagaggtgttcaagatcaaaggcagggacaagcatggccgcaagatccttcgcattatcgccaaactcttcccaggtagattgattaattaattaattaaatccctaattcttaattaatttttttatgtgcaccaaactgagggagtcgtgtacgtattgtttgccgtacgacagcgcggttggtgagtgttgatgttctgaagaagtacctggaggataaggttttcccgaagctggggaagaggaaattcgtggtgctgtacgtgcacaccggcgtccagaggagcgagaattttcccggaatctccggtctccggtggatctacgactcgattccggcgaacgtgaaggagaacctcgaagccgtttattttattttattcacccgggcttgcaggcccgccttttcctcgctaccttcggccgtttcctcttcaagctgggctgtatggaaagctgaagtacgtgagcagggttgattatctgt

SEQ ID NO: 751 - DNA, 1226 bp, Glycine max
  Clone ID: PAT_MRT3847_100679C.1
gactttcatttttttttcttccatacctttccctccttctgagtccttaccttgtccaattttttctttttcccttatttgttttctctcgaaatttgcccataacgttctctttgtacctcatcttatcctgcacacacccccccctccctcccttcctataagatttatttgcgtagcattcaccatcacaatcaatcttctttatccactctctctctctctcttaaaattaaaactaagcatgtgctctgccatatcccaagtggaacaagaagagttgctcgaaaaattagaggtgttcaagatcaaaggcagggacaagcatggccgcaagatccttcgcattatcgccaaactcttcccagcgcggttggtgagtgttgatgttctgaagaagtacctggaggataaggttttcccgaagctggggaagaggaaattcgtggtgctgtacgtgcacaccggcgtccagaggagcgagaattttcccggaatctccggtctccggtggatctacgactcgattccggcgaacgtgaaggagaacctcgaagccgtttattttattcacccgggcttgcaggcccgccttttcctcgctaccttcggccgtttcctcttcaacgctgggctgtatggaaagctgaggtacgtgagcagggttgattatctgtgggagaatgtgaggaggaacgaagtggagattccggagtttgtgtttgatcacgacgaggatttggattaccgtccgatgatggattacggattggagagcgatcacgctagagtgtacggtggtgctccaactatggattcacccgtcaccacctactccatgaggtgcatctcataggattcccgattcctctccaggatatctgcgcctcttgttttttgtgcgttaggtagattgggcctccctgttagttatatgggcccatagctatgtggttgttgatattgtgcagaaagaaaaagtagtaaaacaagctttttttaggtcttgctaatgtgttaatacttatccaatagcattttcggttttcgttggatgattcagttcagtgatatttcaaaatgaattccaccggctgattcttttgacactctttaggtatataggtctttccattcttcacattttcttattcttttttaaaggtccaataaaagcttctcaatcttaccaaaacctctccattataataaaatatcctttgaat

SEQ ID NO: 752 - DNA, 1693 bp, Glycine max
  Clone ID: PAT_MRT3847_10067C.1
ccacgcgtccgatggaatgaagattagaggagattacatatatgtttgatgggtgatcctggtgttgccaagagtcagctccttaaacacataatcaatgtagcacccagaggggtgtacactactggcagaggaagtagtggagttggtctaactgctgctgttcagaaagatccagtgacaaatgagatggttcttgaaggtggagcattggtgttagcggatatgggcatatgtgccattgatgaatttgacaagatggacgaatccgatcgtacggctatacatgaagttatggaacaacagactgttagcattgccaaggctgggatcactacatcgctgaatgcaagaaccgctgtccttgctgctgctaatccagcttggggaagatatgatctgagaagaactccagctgaaaatattaatcttcctcatgccctcctatcaaggtttgatcttctgtggttaatccttgatcgagctgatatggataatgatcttgaaatggctaggcatgttgtatatgttcaccaaaataaggagtctcctgctctaggattcactcctcttgaaccatctgttctacatgcatacatatcagctgcaataatattgtctcctagtgtccccagagaacttgaagattatattgctactgcctactcctgcattcgtcaagaagaagcgtttgtttccgcaccagcggctatcaacgggtcgccgtccctgctccggcctctatcgcgtggggagggatgaagctgctaaaagcgccagccgggacctctactctccccaaaatcaggagtctcctgctcgtggattcactcctcttgctccatctggtcgacgtgcatacatatcacctgctagaaaattgtctcctagagtgcccacggaactggaagagtatattgctactgcatactccagcagtccactaaaagaagcaaggtccaatgctccgcattcctacactaccgtaacgtctttgctcagtattctccgcatatcatccgccctaccacgactccgtttgtctgatactgttgctcagagtgacgtggacgaggcactgaggttaatgcagatgtcaaaattctctttgtattctgaagatcgtcaaaaatctggtctggatgccatatctgatatctattccatactgcgggatgaagcagctagaggtaaccgaatggacgtcagctatgcccatgcactgaactggatatctaggaaggggtacagcgaagcccagttgaaagagtgcttggaggagtatgcagcacttaatgtatggcagatacatcctcacacctttgacattagatttatagacgcttgatgcccttcttttcccccattaacattggaggagtatgcagcattaaatgtatggcagatacatcctcacaccttcatcataagatttattgacgcttgatgcctttcttttccccccattaaaacatggtttctagaaagcggggacaagagtgcttggtggacttaaggaatcatattttgcactttggttttttagtttgatttaggttgtttgtattgttacagttagatttgcattttttttttttacttttgagtacagtaactgctaatttcaatttgtatgcttaaagttagtactacttcttgatcgaaggtacaagcttcgcattcctatactact

SEQ ID NO: 753 - DNA, 853 bp, Glycine max
  Clone ID: PAT_MRT3847_100680C.1
ggctcgagatttttatttataatttttatttttatttcaatatacaaatattttcaatgtgaattaattactaaatcatcgataatatgatttctaaaattgttatcatgaattaataatttattaatttgtgatcggattacatagatatattttattataaatttcaattatacccctattaaatttattgtagttgttaattgcgtgtaagtttcattactatgtgtgtttcttttattgttttgattttgatggggtttgattgcgtgtgataggctgtatggaaagctgaggtacgtgagcagggttgattatctgtgggagagtgtgaggaggaacgaggtggaaattccggagtttgtgtttgatcacgacgaggatttggattaccgtccgatgatggattacggattggagagcgatcacgctagagtgtacggtggtgctccaaccatggattcacccgtcaccacctactccatgaggtgcatctcataggattccaggagattcattaatcctctgcgcttcttgtttttgtgcgttaggtagactggggtccctgttagttaaatgggcccatagctatgtggttgttgatattgtgcagaaagaaaaggttaaaaaaaaaaagaagaagaaaaaatagtcgttttttttaggtcttgctaatgtgttaatacttatccaatagcgttttcagttttggttggatgattcagttcagtgatgatattttaaaaagaattccaccggctgattcttctgatattctttcggtataggtctttccgtccttcacattttcttattctttttataggtccaataaaagcttctcaattttgcc

SEQ ID NO: 754 - DNA, 3255 bp, Glycine max
  Clone ID: PAT_MRT3847_100681C.1
ggcgctcgagcggcgggcgggattcaaaaaaaaacgtctctttgtccctcatcttatcctgacccactcccttatccccccctacttcaccacttcacatgccgcttctgtttccttgatctctccttctcttcaagagcacaagccgcttgcaaaaccgattcttaaaggtactcaagactttttacaggagatggctttaagattctggactcagggttgaaattattccgtagaataagaacttgacatgtgttcggccattgaccaattggaaggagaagaatctcccgaaaaattagtggtattcaagatctcttaattaaattaacaacaaaaaatgtgcgctgccatatccgaagtggaacaagaagagttgctcgaaaaattggaggtgttcaagatcaaaggcagggacaagcatggccgcaagatccttcgcattatcgccaaattcttcccagcacggttggtgagtgttgaggttctgaaaaagtacctggaggagagggttttcccgaagctgatggggaagaggaaattcgcggtgctgtacgtgcacaccggcgtccagaggagcgagaattttcccggaatcctccggtctccggtggatctacgattgccgattccggcgaacgtgaaggagaatctcgaagccgtttattttattcacccgggcttgtaggccctgcctttttgtcactacattcggccgtgtccactttaaaggctgggctgtagtggaaagctgaggtacgtaagcagggttgattatctgtgggagagtgtgaggaggaacgaggttgaagttccggagtttgtgattgataacgacgatgatgtggattaccgtccgaagatggatttcagaatggaggaccatcatgtggatgaatactgtggggctccaaccatggatataccgttcaccacctacaccaatgagttcgcatcgtctataggattccaggagattcattaatcctctgcgtcttcttgtttttgtgcgttaggtttattggggtccctgttagttaaatgggcccataactatgtggttgttgttattgtgcagaatgaaaagtttgataataaaacaaggatcaataagcacatggccattaatttttagaaaaaatgtaagcataacatgcttgttcattcttgatattctagtgcagcatccaaacatagtggttgatgattcggtggaaccagatgagaatgagactcagaaaggggttgactataatgggccgattcgggtttggggtaacttggttgctttcttagaaagaattgatgttgaatttttcaagagcttgcagtgcatagatcctcatacccgggactatgttgagagactcagggatgagcccttgtttctggttcttgcccagaatgttcaggaatatcttgaaagagttggaaatttcaaagctgcatctaaggtggccttgaggagggttgagctcatttactacaaaccacaagaggtttatgttgcaatgaaaaaattgactgagctgacagaggatggagataatggagtggaggcaagtgaggagaaaggatttgaggaatcaagaattcccactgcatttgttgctaccccagaggttgtggcccggaagcccaccttccctgagaatagcaggaccataatggatgtattggtatcattgatatacaagtacggcgatgagcgaactaaagcacgtgcaatgctctgtgatatataccaccatgctcttcttgatgaattctcaattgcccgtgatctgctgcttatgagtcatctgcaagatagtgttcaacatatggacatttcaacgcagatactttttaacagagctatgtcacagttgggtttatgtgcttttcgggttggactgatttctgaagcccatggctgcctgtctgaactgtactctggtgggagggtgaaagagttacttgcacaaggtgtgtcacaaagtcgctatcatgagaagactccagaacaggaaaggttggaaagaagacggcaaatgccttatcatatgcacatcaatcttgagctcctggagacagtacatcttgtatctgctatgctgctggaagttcctaatatggcagccaatgttcatgatgcaaaacgcaaactcatatctaagactttccgtcgcttgcttgaggtgagtgacagacaaacattcactggtccaccagaaaatgtaagagatcatgttatggctgccacgaggtttcttagcaagggagacttccagaaggcttttgacattattgtgtctcttgatgtgtggaaatttgtgagaaatcgagacactgtgcttgaaatgcttaaggacaaaatcaaggaggaggcattgaggacatacctctttaccttctcttcatcttatgaatccttgagcctggatcagctcacaaaattttttgatctccctgtttcttgcactcatagcattgtcagtaggatgatgatcaatgaggagcttcatgcaagctgggaccagccaactgggtgcattcttttccaagatgttgaacactctaggctgcaggccttggcattccagttgacagagaaattatctatccttgcagagagtaatgaaagagcaacagaggcaaggataggtggtggtggattggatctgcctctaaggcgcagagatggccaggactatgccgctgccgctgctggtagtggaacagcctcgtcaggtggtagatggcaagacctgtccctttctcagccaaggcaaagcagtgggcgtgcaggatatgttggtggtggtggaaggccaatggcattaggccaagggagtggctattccagggatcgatcgggacgaggatcaggtgctggctatcagagtggacgatatcaggggggttcagcattgaggggaccccatggcgatgtatctacacgcatggttagccttaagggtgttcgtgcttagagaagttcaaaattatcttctgtacgccagttttgataatttgactaaatgcactatagcatttctggttttcatttctgtaacattttacttctggattttgtctaaatttgcattgaaatgtatgatcggagcttgtggattttgtctggatttgttataatcggagcttgctttcattttacaccgatttccccctgggtttattctgtttgaatttgattaaccataacaagacaagtattaaaggtttatacaagtttaggagaatgatcagtgc

SEQ ID NO: 755 - DNA, 836 bp, Glycine max
  unsure (1)..(836): unsure at all n locations
  Clone ID: PAT_MRT3847_100682C.1
atcttatgaatcgttgagcctggatcagctcacaaaattttttgatctctctgtttcgcgcactcatagcattgtcagtaggatgatgatcaatgaggagcttcatgcaagctgggaccagccaactgggtgcattcttttccaagatgtcgaacactccaggctgcaggcattggtattccaattgacagagaaattatctgtccttgcagagagtaatgaaaaagcaacagaggccagggtaggtggtggtggattggatctgcctctaaggcggagagatggccaggactatgctgccgccgctgctgccggcagtggaacagcctctacaggtggtaggtggcaagacctgtccccttctcagccaaggcaaggcagtgggcgtgcagggtatggtggaagaccaatgacattaggccaagcagctgggagtggctattcaaggggacgaggaagaggttcgtatggaggttcagggaggacttctcaaaggggttcagcattgaggggaccccagggcgatggacctgctcgcatggttagccttaagggagttcgtgcttgaataagagttttgataatttggctaacgcactatagcattctagttttcattcttgtaggctttaattttcttacggattttatctttgtttatttgttacattggagcttgctttcattttacacctattttcacctggttttattttgtttgaattgtacccttaagtgatgcatattgaccttgctcatttacgtgagctatcaatgtctttcacacaaacttatctttgtttttctttttgtaatgaaagtaataatttanngaa

SEQ ID NO: 756 - DNA, 215 bp, Glycine max
  Clone ID: PAT_MRT3847_100683C.1
gtatacttataaactcatcttggtaaaggggaggaaagctaatggtagcaatgccaccgcctgaaagcacggtgcttaggataagaaaaataatgatcttgtgttgtgcctgctaactctgaggggtgctatgtccttctctaagaaaggagtttcgtacacaaaaaagttcacacttattgcttttttagcgcacgattaaccccattacaata

SEQ ID NO: 757 - DNA, 437 bp, Glycine max
  unsure (1)..(437): unsure at all n locations
  Clone ID: PAT_MRT3847_100684C.1
ccctcaatgttcaaatgtagcttgtttggaaagacaggaagagtacctgtttgcaaaaccagcaagggatgctgcagccaaagcaaaaatggaagctgaagcaccatcaactgaggaagtgccacttcacgaagataatgaatggaatataaggtgtttaatgatcttgttcttgatcattttcatgtgtgtaacagaagatacaaaacacttatcaattgaaattgatttaatccctgatttacttgttgcaatcatttatgctaaggacctaatagtatcaaacctcattcctttcttgaaattttagccttcacatttagtgatgttcttttgcttaatttccagtgttgttgatgatgttgagctggttggtccggataccagaagttcaagtattatcttaatntatattctgaaagtttaaatttgtaaat

SEQ ID NO: 758 - DNA, 472 bp, Glycine max
  Clone ID: PAT_MRT3847_100685C.1
agtttccgtcatcactgtatgacgtcctccttctttgggggggggggggggggcagaaggagagagtactgttataaaggcagaataaatacgacgaataggaagcccataagacacggtaatataaattaaatggaggggtaaaccgtaggatacatttaggatatagtatagggtggtggaaaagcgggcccaaaagttaatagtcaatagtatatacaaagtactgttactggaaaattttttatcacatctaatattaaagcgtacacggcatgttggtgccagcgcgacgtagcacccgttggttagttgtgaatgcgggcttagtaaaaagaagttgtggtgccgttcgccccaggttggttggcgttgccagtggtcttggtatagcggtaagcgcgcgctcaatgtgttattgcacccgaagacgtggatttcgaacccgtggcatcaacagtgctagattatt

SEQ ID NO: 759 - DNA, 785 bp, Glycine max
  Clone ID: PAT_MRT3847_100686C.1
cccacgcgtccgcccacgcgtccgcccacgcgtccgtacggctgcgagaagacgacagaagggggacagcaaaacaattttcaaactcaattaccattccataacctaaatctcctctttgtttccgagtcagagagcaatggcacgtaccaagcaaaccgctcgcaagtccaccggcggaaaggcgccgaggaagcaattggcgactaaagccgctcgcaagtcagctccggccaccggcggagtgaagaagccccaccgcttcaggcccggaacggtggctctgagggagatcagaaagtaccagaagagcactgaacttctgatccgaaaactcccattccagaggctcgtcagagaaatcgctcaggatttcaaaacagatcttcgtttccagagcagcgctgtttctgcgcttcaggaagccgcagaggcttatctcgttggactcttcgaggacaccaacctctgcgctattcacgccaagagagtcaccattatgcccaaggatattcaacttgctcgcagaatcagaggcgagagagcttaaaattaggtttcattgtgtgatctagaattaaaattaggttactgcttattgtaattcgtatttttcaatcgcctttttgttgtaatattcatcttatttcgaagtatatgctcatatggatctgaacacttgagggtcagtgatattcgatttaatctgtctagtccataatcatgtaagtctcctgatttgtatatgcaaaaattacccacgtgcacaagctcaaaaaataaaa

SEQ ID NO: 760 - DNA, 269 bp, Glycine max
  Clone ID: PAT_MRT3847_100687C.1
ggggtcgagcggagccgtcgagccggaagaacgcattaatttttaacatgcgacgtcaggctgttaaaattcaagctgcggggcggggcgtttaagttcggaagcattattgcaaaaatctttggtctgatggtgtggttgagaaagcagtgctgcgttggcgtttgaagagaatgggctttcgtggtctacagggcaaaactgttgatgcgggaaccggagatcaggatcagtaaagtgatgtataagaggtaatttttcggactggt

SEQ ID NO: 761 - DNA, 399 bp, Glycine max
  Clone ID: PAT_MRT3847_100688C.1
aagacgacagaaggggaagaaataaatcagaatttgcttacagcattgcaaattacaccatctcttctcttctcttcgatgagttgtcttcattgccgagacggagaaagaagagacagagtttctagcatatgttcttcatcaaaattctccacctaacaataattctctcaacgttacctttattcctcaattcgatatcttgtttggttttgtcttcgttgttcctgttgaattattcgttttcagctaacttagtttatttcatctcctaaattcaaatattcttacatgcccttttcatcttaaccatctccattcttataaaacttccaaagcttcaattttaaacagagaagcagttccgtatattggtattgaaaacttaagattcatggg

SEQ ID NO: 762 - DNA, 372 bp, Glycine max
  Clone ID: PAT_MRT3847_100689C.1
gattactaaatattggggttcttctgatctaactattgttactcatacgcgcgaggcctgggccatgttgattaagcggtggatgggcatagtctgcactagtgtgaaaacatccatgctttgtcgacggactcataatttacgaactatacaaatatcggctcaagatcatgggatccttttctatcaaatacgaacggcttatacgcaccatgctctcgtacgcaatcgttccatatattctatatctaactatgtcaccaagatatcatgacacggcggggattctcatctgcacaactggtacttccaacttggaaccagactgaagaaactaacgatacatctttacctttccagttggtctgccag

SEQ ID NO: 763 - DNA, 206 bp, Glycine max
  Clone ID: PAT_MRT3847_10068C.1
tacggctgcgagaagacgacagaagggaaccgaattggcgaagagatcagcgaaatgtttcgttggctttcaggggtatgattggtaaataaagatgaacagttaattaggatatatttttaattttgattaatttttttaaaatcattccaaatattccttgctcatttggcttccacatgaatatttccctctttataaaaata

SEQ ID NO: 764 - DNA, 117 bp, Glycine max
  Clone ID: PAT_MRT3847_100690C.1
cagttatagtaacgcgcttatcccgcctctaccttcatctgtgacgcgttcactgttccgtagtctgcaattctttcgttgctattctacttggatacatactcgatccctttgcta

SEQ ID NO: 765 - DNA, 432 bp, Glycine max
  Clone ID: PAT_MRT3847_100691C.1
ggtttgtgcaatttgttcataatgttttgaacaacgttacaaagttcaatttgttcatctatagatgcagcaatttttatgggaaaactccacaaacagtgactgccaaaatgaatgcaggcagaagcagaactaatacaaacatcaacttttctaaaggggggcgtgcactacaatttgttccatattctatctagttgccaccattgtcttgtgattgtagggcagacacatggcatggtaaagtggcaagtccaagacagttgatttttcaccaagataagaaaacggccccacaatactgaagtttctatcccttgaattctttaatttaaaattagtggcaagaaaaataaaatctccttgggcgtctaaaaagccaggatttattacaaggggttgaccccctggaaaaaaaaccctactttactt

SEQ ID NO: 766 - DNA, 334 bp, Glycine max
  Clone ID: PAT_MRT3847_100692C.1
gtatgcaagaattgtgtgtacctataagagttacattagatatttataagtattaagtaacgtgttttatgaatctctcatcactttgtcacgtctgttcaaaagatcatttatagattatgttaagtgtgctccatgcatgatgttcatgtttgtgatagcggtagttgtatgatttcaggaattgaatgccgaataataattactttaagaaacaacatcttggtagaacaaactcatcatgtgatttgttgcagggtggggttgttcagatttataatacttctagaagattaatgatcaataatgtcatcttttttgtctttagtaaaat

SEQ ID NO: 767 - DNA, 853 bp, Glycine max
  Clone ID: PAT_MRT3847_100693C.1
cgggaatcataatcccgttgtagttccaaaaaatgctctacaaccacacttcctcgatgtcattgccttccccattgtacctgaatactacgtcgtttcgcctcacgcgccaatctccttttccttttccccgccggcgcttcaatccaccggctttccgatcagtttcgccgttgagttccagcccctctgcatcactcttcgatctcagagggggcaaaggaatgagtggattccatgacgttgaactgaaggtgcgcgactatgagttggatcagtacggtgtggttaacaatgcagtttatgctagttattgccagcacggtcgtcatgaactcttgcaaaacattggtattaattgcgatgctgtggctcgcagtggtgatgcattggcattgtctgaactatcgctcaaattccttgcacctctaagaagtggagacaaatttgttgtaagagttaggatttctggctcttcagctgctcgtttatactttgatcacttcatctataagctgccaaaccaagagcctattttggaagccaaggccatagcggtgcggcttgacaaaaactatcgtcctatacgaattccagcagagatgaagtctaaatttgtaaagtttattcgaattgaggactcttaattcagttaccagttgagtatacttattggttaatagagcattaagaaaggtaattatttatgtacttatcttcaatttagcttgtgagtgaggaaggaggtaacacgtctctgtaatggatccagtaaattatgtgcagcaatatttttaaactataactgttatattcatgatgctcagtaataaagaatgtgttcttcctttat

SEQ ID NO: 768 - DNA, 373 bp, Glycine max
  Clone ID: PAT_MRT3847_100694C.1
gctccacgcgttcgttcaaatcttttaccatttaaattttaccgggctctcaaaggctgtgaagaagggtgatactattttatattggaaaatacttggttactaggaggggaaacagattatgctggctgtaggacatagaggtggaaggagagtatttaacctggctggtaaataacactgcgacactttttgaatcattgattactgcacatgattatcacatacagattgatcttaatactgtatgtgattccgattatgaggcactagccacatggtgtgtataattcagcattgactaactcatattatgtactcatcaagtcgaagatcttaggaatgcacacaactgactatctaaatagtttga

SEQ ID NO: 769 - DNA, 956 bp, Glycine max
  Clone ID: PAT_MRT3847_100695C.1
gaggattccttcgtctctgtctctgtctttcttactctctctctctctcccgtctttctctctctgttcactttttctatcctcgaagcaagaaatggactctaacagcgtcgtttcttggccgaggatgccagaaaacatcaacggtttcggcctcaaacagaaccaatccgaagaggttcatgttttagccgttgatgacagcaccgttgatcgcaaagtcatcgaacacttgctcaaagtcttagcctgtaaagttactgctgtggatagtgggctgagagcactgcaattgcttggactattggacgagcagaaaataccctctgaaactaatggttttgtgggtttgaaggtagatctaatcatcacagactattgtatgcccggaatgaccggttatgaattactcaagagaatcaaggaatcatctactttcaaggaaacgcctgtggttattatgtcatctgaaaacgttttgccacgcatagacagatgtttggaggagggtgcagaggatttcatagtgaagccagtgaagttatctgatgtgaagcgtttgaaggattacatgacaacaaaggaggttaggggtgaattaagccaagaagagagggaagggatcaacaagaggaagctattggacacctctgatgtgtcgccatcatcaccaccgtccatttcctcatcaccacttccatcttcactcagctcagtgattgactctccaatcagacggcttaaaatgaccaacactgattgatatactctagcaatttgctgtttttcttttctcattcctgtaggcactactgctgcaatctttggatttgttgtttttcccttttagggttcaaattgcaattacctcctcgtttaattgtaacggtttttgttgcgctcccctcttcttatttttagtcagttattttaattgtttatatatgaagggttaa

SEQ ID NO: 770 - DNA, 287 bp, Glycine max
  Clone ID: PAT_MRT3847_100696C.1
gggactttttatcttattttactccaccaactccccctataacaaattttcttcacgcaaattaaacttaaccgccaaagaaatacaactcatttcaaccttgcacaaataaattattcacctacccttgaaacaagatatagatatgacccaatactcactatcccacatgactaactcatgaacaatttattccagcaaaattaaagattcgttacacaactcaacacctgttacttgcataactgccccaatccacttaacaaacaaggtttttttcttcactt

SEQ ID NO: 771 - DNA, 664 bp, Glycine max
  Clone ID: PAT_MRT3847_100697C.1
cggtccggaattcccgggtttgacccacggtccgatcatcacagactattgtatgcccggaatgaccggttatgaattactcaagaaaattaaggaatcctccagtttcaaggaaactcctgtggtgattatgtcctccgaaaatgttttgccacgcatagacagatgtttggaggagggtgcagaggatttcatagtgaagccagtgaagttatcagatgtgaagcgtttgaaggatttcatgacaacaaaggaggttataaggggtgaattaagccaagaagaaagggaagggatcaacaagaggaagctattagacacctctgatgtgtcgccatcatcaccaccgtccatttcctcatcaccactcccatcgtcacccagctcagtgattgattctccaatcagacggcttaaaatgaccggcactgattgatattctctagcaattaatttgctgttttccttaattttctcattcctgtaggcactacagctgcaagcctgcaatgtctatctttataattataaatagtagtgtttttttcttcttctttggatttgttgttttactcttttagggttgaaattgcaaaccgttaattgtaacggtttttgttgcgcttccctcttcttaattatctaagttattttaattgtttaa

SEQ ID NO: 772 - DNA, 597 bp, Glycine max
  Clone ID: PAT_MRT3847_100698C.1
accagaaaaaacttatttaagtcaacttgaaaaataaatttttagttaacaaatgataatgaggagttttatcaaaataaataatttaatttcagataaaatgataaatgataatttttattattttattgaaaataaaaataaaaatcataatcgtaaatttaagttatgtttaaaaataaatcttataagtcaataataaaaaattgtttctcaaacacttatatttgatcaaatattattaaacttgttaaaaaaactaaaaattaattaaaataacttgatgagcatatatgtaatttaattttatatatatttaagaaattttatcctatttatttttttaagataattcctaattcaaaataagaaatacattaaattaataagatatttttattggtaggaataagaaaataaaatttaaaatttacaataactcacatatcaatttatcatgtttaattaactgaactagattaataagatagtattaaaggtaaaattaaagagttcagatacatacatttaatatctagacaaagctaaaagagaactcaacaagatcaaatggtgagatatatactttgggtccag

SEQ ID NO: 773 - DNA, 261 bp, Glycine max
  Clone ID: PAT_MRT3847_100699C.1
acattaacaacatggctcacgggatacaaacccttattcccaattccaatttccataatccgcaagttgctaaatcttcaagtgttcttgattttgcatcttataaactgaaaaattcagcacattgcatgttggctttgaaaaatgatacaattgttatgcccaaggttcgctcctctaggacttgagcatccatggctacagcctgcatgcttcacggtgcaagctgccggaccgtatgcggccgaaaatgctttgggc

SEQ ID NO: 774 - DNA, 217 bp, Glycine max
  Clone ID: PAT_MRT3847_10069C.1
gtcatgaatggcagactccctatactatagatactctcctactaacacacgcactcgtggccctatttaatatttatagtaacatttaatactctgggggggcacaggcacagatacattggatttgtatgtatgtatggcatccgacatcatcttgcacttatggcacacttgtgcatgccaactgtgtgatatataataagcgcggatcggcctt

SEQ ID NO: 775 - DNA, 529 bp, Glycine max
  Clone ID: PAT_MRT3847_1006C.1
ggtataatcttttgacataaagctaaatgatttgtacaaaagcaagatgacggtaaaaacaaaggccttgaattcttctgtgaccgttcactgagatcgaaaccagtaaattgtcccctcttttgattacccaagaacacaaagagatgggtgcatgagctcaaaaaagctcctccttcttgttataccaccatctccaacaatagtaatcccatctgggtttaactttggtcatgcggtttactccatgaggataatcagtttgagcccttctggcattcctgaaagcgcaaaaggcaatggaatatatgcctatgaggaacacaagcacgacaacgttaagaacagagatgttgtgccagccccttctaatgttttcgagcacaccagccttgcaagagtcgcaatcgtagcaaagcagagtgggggcgttgttccaacggtagcagtccggatcttgtgtcactaccactgtttcctcgttgtaactgcaccctgtgggtggcttacaacatccagactgtatggg

SEQ ID NO: 776 - DNA, 299 bp, Glycine max
  Clone ID: PAT_MRT3847_100700C.1
gggatccgcaaagtcaaagtcggaacctccttcgcaatagacgttctggaagcctcgttcgctccctcgaacggtgcgtttcgaaaagacctaagtgcccccgtcatgaaacccatgctaaagttcctcaacagaacaaaatcctttttcttcttagacgtctaccctttcttctcttggtccgctgaccccttgaatataaacctcgattacgctttgtttcagtccaagaatttaacggtaacggatccgggtacgggtctggtttacaccaaccatcttgatcaaatgggggatgc

SEQ ID NO: 777 - DNA, 248 bp, Glycine max
  Clone ID: PAT_MRT3847_100701C.1
cggctgcgagaagacgacagaaggggatcactgattagacaactctcttccaaccaccatggccaatttcaaaactttcttcatttcccaaaccctaaccctaaccctccttttctcaccctagtggtgccacttacaccacaaatccgccagtctgtagttcggggagagtgccctcttgcttctagtggattttgtgaaaggccacgtgtagtccaccgggaggggggttccttttgggggggggg

SEQ ID NO: 778 - DNA, 132 bp, Glycine max
  Clone ID: PAT_MRT3847_100702C.1
cgaaccactctgaagccgatcacgttatacacaacactctcaactctccctagactctaaccaatccagccatggctactatttccacactcactgcaatgtccgcctgcaagatctcctcctctgccgcca

SEQ ID NO: 779 - DNA, 208 bp, Glycine max
  Clone ID: PAT_MRT3847_100703C.1
acaacttcttctaactgtgagccataatggtgcacagttgggatattataaagggggtggggatttattgcgcagatagcgttctaattataccaaattacctctttcaccctttcattgcgatggctgactctattgtaagcaaatccaaacttgtatagcttgcctgcgcattctcttgcgtggagcgtggatactcattttattc

SEQ ID NO: 780 - DNA, 370 bp, Glycine max
  Clone ID: PAT_MRT3847_100704C.1
aaaaaattcccaggccctgcccttttttacttgaacaagtttttgccaaatccccaacccttctaaaggggggtaatttttaaaaccccctggggggggtcccaaaaagctcccgacaattaactttttggggcttacattccgacataccccagttcagcccccctttgccataaagggggccccaattattagagaagttttcaggggggcacccggaattcccgggcccaatattggaggccccccatcttggaaaaaagcccctatttttttcccctttttttgggccccaaacctccaaaggttcccttttgggggcccctgggtttaaacccctttagggccttttcctcttcccttttcttct

SEQ ID NO: 781 - DNA, 898 bp, Glycine max
  unsure (1)..(898): unsure at all n locations
  Clone ID: PAT_MRT3847_100705C.1
aataagttccaacgggtcagctcatgtggattgtccatctggagagtcccagaacacagttggtagcaattggaagttagtgaatttgaataatttcagctctgttaggacaacagttaatggatttagtgaaggggaaatgtattacaggagtgatgccaatttctctaccactgtgaacaatgatattgataatgtcaatactaactctcaaaggattggagttaataatgataaggctgggctagccttatgtgatgaagacctggggctcattgaaggagacatgtgcgcttcatcaacgggggtggtaagggtgcagtcaagaaagaaagcagagatgttcttagtacgaacggatggattttcttgtgccagagagagggtgagtgaatcctcattggcctttactcatcctagcacccagcaacagatgcttatgtggaaaactacgccaaagacagtattactgttgaaaaagccaggagagcatctcatggaagaagctagagaggttgcttcttttctatattaccaagagaaaatgaatgtttttgtggaacctgatgtgcatgatatatttgctagaattcctgggtttggatttgttcagaccttctatacacaggatacnttgtgatctacacgagaaagttgattttgtagcatgtttggggggagatggtgttatactgcatgcttcaaatctgttcagagatgctattccccccattgtgtcatttaaccttggttcccttgggttttctgacttctcataacttcgaagacttcaagcaggacttacaacaagttatccatggntatagtacaagagatgggagtgtacatcactctcagaatgcgtctncgatgtgaaatttttcgtaagggtaaagct

SEQ ID NO: 782 - DNA, 102 bp, Glycine max
  Clone ID: PAT_MRT3847_100706C.1
aattcggctcgaggtaccattatcccagtatcttttggacccacaaactcaatcacatcatgcaaggttgttatcaactcgggcttcttgcggatcacctcc

SEQ ID NO: 783 - DNA, 182 bp, Glycine max
  Clone ID: PAT_MRT3847_100707C.1
accattctgcgtagagatctataggcaaacttttcgacagagggcaattttagagcaagagtggatttgcagcgcactcatcgtattaaaggaatgattaaattggcggtcacagttgtgatatctgagaatacatgtatagcattggcccgtgctatgaataagtttcttagagggcgcgc

SEQ ID NO: 784 - DNA, 358 bp, Glycine max
  Clone ID: PAT_MRT3847_100708C.1
cgcctgcgacggctgcgacaagacgacagaaggtgcaagataaatctttcaaagaaaaaaggatagcgcttagagagagagcaaaacatattattttcattcacatctttcattgactatcaacagatggcaaccactgtgctgaccactctacgtcaatgcactggttttagaccccacttctcagatcaccctgcgaagaacttggatggtgtgcaacccatgagtcgcacggtgaagggtgcattgggacctctatgtgactacataggatcatccactactttaactatggtggctcttacaaccctgattctgtatactggaaggatagtatggtctacatgagcaaacagga

SEQ ID NO: 785 - DNA, 229 bp, Glycine max
  Clone ID: PAT_MRT3847_100709C.1
tgtgtcagaaccacattactgggaagtgatcttcccaatagaggtatggggccctaataatggctttgaaaagcggaggtctgaatgggcaaatcaaacatcatggcatttgagctttcttattgacagacccaaacaggctgcagtctttgatattatcttttttagcgagcgagacaataaaattgctggggagactcttatgccaagctttttttgtacacaagct

SEQ ID NO: 786 - DNA, 272 bp, Glycine max
  Clone ID: PAT_MRT3847_10070C.1
gttacggctacttcaattgcagcgagtatagacactcctcacttagtcacgggtatttgctacaaactatcgtgcctataaatctacccaagccgactgcacgtgagcgtatactataatgttcgttactgtaaaaaactgggcgttccctaactgactcgagcatagtcaaaagcaacttgggacgtctgttgtacatgtgaaaaatactaaatcaaatcaaattacttgaacatgatctattattaatttaattgctagccctttctgac

SEQ ID NO: 787 - DNA, 233 bp, Glycine max
  Clone ID: PAT_MRT3847_100710C.1
cggacgcgtggggtgtcctagaatgcaaggtgtagactcatcaaacttcaactccgggatccaggagtgagatgctgacaaaagtactaccgacttgcatgccgttcttgtaaccttcataacccactggaagtcgcgatcatgaaattgcaacggaatgatacaacacagacttgaacaagatatgatattctcttatgcgctggtgctatattgatcgacgaatccagctg

SEQ ID NO: 788 - DNA, 306 bp, Glycine max
  unsure (1)..(306): unsure at all n locations
  Clone ID: PAT_MRT3847_100711C.1
tcgaggcataaactccagtggatcacgaagnnccaccttcagcttctgagtgtagaaatccaaaatccttgaacctcaaacaaacctccggcatcaacaatctggttggatcatcatctggtgcaacccttgtcaccaacttttaacttaaaaataagggcttaatgggtggaccagattaaccctaccggaaccctggcattcgggttgaataaccccggttccacattgaacgaatggtttcatgaatattcaaaacggcgtgcttgaaaaccaaacaaaaccgggagaattaaaggtaagcct

SEQ ID NO: 789 - DNA, 335 bp, Glycine max
  Clone ID: PAT_MRT3847_100712C.1
gaaaaggccgaaatcacaacacacctcggggggcattacacctacaacctatgcaaggatcagatcaaaaaccccacacgagaactagttagagaaagaatccccgcggaaccgggataatgcaaacaaactcatcatcccggcgctattagagcaagtagcaaccgctacaccataggtgggcacaacccacccctgtccatctagggggggatgctgtcagctctcccatgaacaccccctgatgaggggaaccgaaatgtctcacgacgtactaaacgcaactcacttaccaaccagaatcggggaacaaccaaaccctaggaaccttccta

SEQ ID NO: 790 - DNA, 1137 bp, Glycine max
  Clone ID: PAT_MRT3847_100713C.1
tctagtagtaattactaactagcgaaacaggaactgagggaagacgatgtcgatgtcgatgtcaatgttgtatatgtgtctcttcacactcacactcgtcgtcggaatgttatctatgctatctgatgccgttgatgacaaatgtgccgcctgcaaagccgtcgcggtctctctctctccctctatatatatatgctattgtctatatcaaactcctaaactaatagatccatttaatcttattgttgattttatatattgtggttgcaggaggagctagagattgggctttccactgtaacgtctttatttatttatttcaattcttcgatcatgcttcatttatgatccattttgagacattgcgtttccgcaggagaggccacgaaatcacttggatatgcgccatcgcttagactccaaaggccagcgtgaaggaaagctaatcgattacagagttagcgaactaagagtcgttgaacttcttgatggcctttgcgaaaagatgcaagattatacactcaagatagatacaaatacctatgaatggttcaaagtggatagctgggataacctcacaacaaataagcaagaagctcgggcatattcaaaagatatatcttcttattgtggaaggttacttgaagaaacagaggatgagtttgctgaattgatcaaaaaaggatctgttaaagtgggaggtgtgagcaaagttctttgtcaagatttgagcaagcattgcagtcaaatgagtgtatcatatgccgcagaggttgatgacgatggacatgatggagagctctaaaaccatggatgttaggagcgctgaaaatatcagctttttgggcaattaactattgacagaatggatcccaaaattgatagtaattattaagggttgtgcccagcgctcaaaaatcttgttttgctttgtattttataaatacttagtttttcctagtaattcagagagatattacgcgtctactgttaaataatagatacatagacaagatacctcaccagtggacaattcatgggttctttaacttgtgttttagtggaccttacgctatatagaacataatgttagaaccttccaatcaaaaaaaaaaagtaaaaaaaaaggaaaatttt

SEQ ID NO: 791 - DNA, 610 bp, Glycine max
  unsure (1)..(610): unsure at all n locations
  Clone ID: PAT_MRT3847_100714C.1
tttcttttttttttttttttttttttttttttttttttttttttttttttttttttttttttttttttttnttttgggggaaaaaaaaaaaagccccgggtttatttcaatgggtaaaaggaaaaaaatatgaccaaccgggggacccaaacccggggagggggggccaaaaattttttttcttttgaatggaaaccccctcccgaaaaccccccccccccccaaaagggaaaacccctattccctttttccccatttcggcccttggggcccaactttgggggccccaattaaataaaaagcgttttgaaggaacccaacccttggccctcatttcaaaaccccgaaaccccggcctggcaaagggggcaaaaaacctcccaacaccagctttgaaaacttcaagggccctggtggtgacaaggcccttggggaaacccttgaaaagtttgccctgccccttcgggacccccagggggagagcccccccccggggaaggaactccccaatcgggtaaaaggccttttcaaccaaccccctaaaaggcagggggggggccccaattcgcaccccaccgggggccaaggccctggtttcaccaaaaacggg

SEQ ID NO: 792 - DNA, 1674 bp, Glycine max
  Clone ID: PAT_MRT3847_100715C.1
gctatccctcgcatctgttcagttcaccatgtttaaccattctgcgctccattattattttctcctcttcttcacgtgcacgtgcttagcacgacagcaatgccagttcaagcaggagtgccaactcgataccatccatgcactgaaacctgacaacctcatcgaatcccaaggtggtgtcacagagacatggaacgctagccaccctgagctatgttgcgctggcgtcgcctttatcaagcgcaccatcaaccccaatggccttcacttgccatcctacgttaattaccccgaactccatttcgtactccaaggtgagggagtgttgggaattgtaattcctggttgtgacgaaacttttgaagagccacaacgggagagggaacatgatcgccaccagaaggttcgttacctgaagcagggtgacatattcgcagttccacctggaattccttactggacctacaactacgccaatgtttctcttgttgtaattaccctccttgacactgccaatttcgaaaaccagcttgatcgtgtccccagaagattctatcttgctgggaacccaaaagaagagcacccttgtggacgcaagcaagaagaaggtaacaatataaacatgttcggtggtttcgacccacggttcttagcagaagcatcgaacgtgaaggtggggataacaaagaagcttcagtcacacataggtgaccaaatcataaaagtggaaaaaggtcttagcattatcaggccacccttggaacacgaagttagagaagcagaagtagaagaaaaacccaagacccgagaacactgtgaatgccaaaaagaaagaaaacacaaagaaggagaaggagaagaagaggtggtacaagagaaagaaataagaaagcgcaagcaccacataggagaacacgagggatgtggtgaatgcgaagataaagaagaggaagagcaaagtagaagccgagaacgcggcgagtggcatgaacataaaggacaacaacatggaaaagaaaaaggaagagagagatataaggaaggtggtgaagggagagtgcgtagcaatgtgttggaagaaatcttgtgcactttgaagctgcacgagaacattgctgacccatcacacgccgacatattcaaccctagagctggtcgcgtacgcaccatcaatagcttgaccctccccgttctcaaattgctccgtctcagcgcccaatgggttaaactctacaagagtggtatttacgtgccacactggagcatgaacgcaaacagcgtggcctacgtgacgagtggaggagggtgggttcaggtggtgaactcccagggaaagtcggtgttcagcggcgctgttggaaggggtcgagtggtggtggtgccgcagaactttgcggtggcgatacaagccgggagggatgggatggagtacatagttttcagaacaaacgacagagccatgatggggacgctggtggggcccacttcggccatcactgccatcccaggagaagtgcttgcgaatgcttttgggctgagcccggaggaagtgagcgagctcaagaataatagaaaggaggctgttttgtctagccctgcttctcatcactctccaaatcccctcattgtcaccatgtaattaataaacttatgttaatgatgtttatgttataa

SEQ ID NO: 793 - DNA, 287 bp, Glycine max
  Clone ID: PAT_MRT3847_100716C.1
accacgcgttcgtctagcattgcattcttattgatcagtcgcatgcattgtgctatatatgggggcaactggctaatcacgaggcgatttaagatcatagcgtgtgttatgcaacaatggctaggacctttgctgcctatcatccttggcactctttgccatttccattactttaaacagtggtcatgcctgctactgaacaaggaggcctctagtatgacaacaagatcaatatttcaaattgaaattatcattatttaccaatgcccattacaatgctctaggat

SEQ ID NO: 794 - DNA, 214 bp, Glycine max
  Clone ID: PAT_MRT3847_100717C.1
gatacacaagcatcgcaggaacaggcttgatatagctatcaaccacaaaccttatcatatttgcaacattttggctaattagcacaattgctacatcgctcccttgttgaaattctatgaatgcatccttaatttgtttgacagtcgttcttgaatccacaatcgaggaatttgacttcctacggaatgcaacattatccaattcagccaacag

SEQ ID NO: 795 - DNA, 388 bp, Glycine max
  Clone ID: PAT_MRT3847_100718C.1
ctaggctggggacgccctttctcctctttctttcgtctcccttactcatcttggaatactacactttccacccagagcttttatatcaacatatcgttctcgtagctctgctcaaccagtcatccacttcagcgacgcacgactaagcacactacatatcgacaattgcatgcgacacttaaatcgccgatgcgtacatttctctagctgtgtcgttttgactgatcaatgaggggtgttcctagacacgagcgccgctgggcgtccgccatcgccttgggaaaagcgaccgtcagcgccggaactttgccgggaactgagtccaactccgtcgcggccgagattgtggccgtgactctacagcgtcaagaggacgacaccatttcta

SEQ ID NO: 796 - DNA, 454 bp, Glycine max
  Clone ID: PAT_MRT3847_100719C.1
gtttatacaatctagcagcatcatattgggtttagggtcacgagaggttgcactaaactatgtacaactgtacagagaagaatcccagcagagatgcaagctgattgatgctactagtacctaacaatgtttaactgccatggcgtatgatgaagggaaaaagtgttgactcttggtgagacattcaatcaagggatgctatgtagtaatcataggtggggaggactggacatggaagccgatatgggacgcaatcctatgtaagaagccgctgaaccgcattactggaccaaattcctcaccgactgaacacaagtcagaggccttctaagccgatgactctggaagatccagtgcctgctacccactttagatggtaccaagcggctttgacacgattgtggatacccaacttgacataacctgactcaacccttgaaccgcctgcattgct

SEQ ID NO: 797 - DNA, 486 bp, Glycine max
  Clone ID: PAT_MRT3847_10071C.1
aacccggcgccacaatggcaaaggggggggagctggacactgctgaaccggaagagattcctcaggatgagtgtctgggtaacaaagccgagaagggtgtagtcaaggtgcgagtttaacgagcgaggagagtgatttggcccatagaagcgaggatctggaagagagggttgatactgggtcaactatggcagtgactgagggggacttgttctgtgataaacaaatgactccaaacaagaacctcagggcagccaatcctaagaaaagaggtgaacctgaagcagtaagagtaagcgttcaggtgctgggtgctatgacccttttttttccaaccttttttcgaaattcgaatggatttcaagccccgggccccttttttcagaaagcggatcaaagggcttcctatttcaaacggatttcgggattatttctaccttttagaatgcctttcgggatggctttccttcgggcccgcgccagtac

SEQ ID NO: 798 - DNA, 330 bp, Glycine max
  Clone ID: PAT_MRT3847_100720C.1
ttttggggggtggggtgtttttttgttttttttttttttttttttttttttgtttttttttttggaaaagggggcccgaaagaggaaaattccccccgggaatcctgggcccctccggccggtttcccccccccatttttttgggacttggaccaaaaaaggcgggggcctcccccccaaatgttcctttccccagggggggaaacgcccccaccccccccggcccagcggtctgggccccccccctgaacccccggggggcccaaaggatcccaggaggggggtttgatggagtccccgcgctggcccccttgttttaactgggggggg

SEQ ID NO: 799 - DNA, 231 bp, Glycine max
  Clone ID: PAT_MRT3847_100721C.1
gacccacgcgtacgcccactcgtgtcaccgctcttacggatgtttcagtttcaaaatacagtgtacatcatccaggcgggatattttatatcaacactagatctattcatcctacttaccttactaaattcactaccacattcaactttctctacaactcttaaaagcattgccaaaatgataattacaaccatttatcaatcctctacttatctctataacatgctactt

SEQ ID NO: 800 - DNA, 439 bp, Glycine max
  Clone ID: PAT_MRT3847_100722C.1
tttatacttgagggtacatgactcggtaccactgtgcagattgtaccagacatgactccaaggttttagcttttgagtaccactaccaatggtgattttgttcaaggaaaagatctcgcattggttaaagttaatagatctatgtgctggtgatggcttgacatcatgtttcactctaattccacctgttggtattctggctagcactaagacaaagggttaattgtggaatactctgtaaggatgtcttacgttgctcattacgttaatcagccccaaaagataagatatgttggagggaaattttttcctatgatattaaaattttgctatatatgggaaaaagatacccctacataaagcacatatttgcttgtggtaaaacccttctacttgatattattaagtgcttggttaacatctttcagaaaattcttcc

SEQ ID NO: 801 - DNA, 278 bp, Glycine max
  Clone ID: PAT_MRT3847_100723C.1
ggctggtgttgcagagagactcagggcctacctggagggcacgtgcgtggagtggctccgcagatacctggagcacgggaaggagacgctgctgcgcttagatcccccaaaggcacatgtgacccttcaccccagacctgaaggtgatgtcaccctgaggtgctgggccctgggcttctaccctgctgacatctccctgagctggcagttgaatggggaggacctgacccaggacatggagcttgtggagaccaggcctgcaggggatggaaccttcc

SEQ ID NO: 802 - DNA, 458 bp, Glycine max
  Clone ID: PAT_MRT3847_100724C.1
ggctcgaggtggggtggtgagcgtgccaaaatttttgtgaatggaaacctcctcacactctacagggggggagtctctggctctggctttcattccaaacacgaggacttgctcggaaatattgacatgcacctcaggcttgtgcctggtgactacgctggaacagacactggctatcatttatcttgtgtggggcctactcatgaccaaatagactttgagctcttggatgacttgattggcgatacttacgctctgcacaccaacgtatatagccaagggaaagggaacagagaacaacagattcatctatgggtcaaccccaccaatgactatcacacatactccgtccaatggaatgctgcagagcatcatattctctgaggacgggacccctatatgggagatcaagagtttggagacataaggggttccattgccaaagagcctacccatga

SEQ ID NO: 803 - DNA, 350 bp, Glycine max
  unsure (1)..(350): unsure at all n locations
  Clone ID: PAT_MRT3847_100725C.1
cttctatatattttttatacaattttttacttttaaccaacaaagnaaacaaatttggaaaggaagaggggtcaaaaacaatttgaacaaacctcaaggcaaaaccaaggatgccagaaaaccctgtaattatcaaaccccatcttataataaacctttaaaaaatcaagagcacgcagaattcaattggaccaaaattcactggggggtgaaacccaacccttatggtaatcggaaccacaaactatacaggaaccaatgaatgttgatcaatcgtaataaaaagcaagggaaaaagagaaacgttgttccctaaaaagaaacaggttaacaccgcacccaatggaaat

SEQ ID NO: 804 - DNA, 291 bp, Glycine max
  Clone ID: PAT_MRT3847_100726C.1
caacatcacgtttcagagtttaaaacctgcaacctgaaacgctgaagctgagctggagatacagacaaagaaggtaggcctggatgcaatatctccagaacataccgatctgtaacatgaagaaatggttcaggtatcggattctgttcgagggacggcacttacagaacctgtgagataatgcctatgagccatatgggtcaataccactcttagataaccggagaggaagacctaactggtcgaaactgcccaatcttgtgaacggatcgcgatgtgttgatagccata

SEQ ID NO: 805 - DNA, 214 bp, Glycine max
  Clone ID: PAT_MRT3847_100727C.1
gggggtgttcgcattttctttctttcatcacactttttctgtgcccttttttcttttttgctgaggaaaaaaaaagacctggactcttctcatgcaccacctaaggattgcgctttacctccgaacatacaaaaggcgatgactatggggtagcccccgggaagaaaaattaacagatcagccccacgaattgaagccgaaccccacaggcact

SEQ ID NO: 806 - DNA, 422 bp, Glycine max
  unsure (1)..(422): unsure at all n locations
  Clone ID: PAT_MRT3847_100728C.1
ggccaaaccagggacgcggcgaacctcatccacatggcgcagtgggagagcgccaggcgagaagccgaagcgagactcgtgagagaatcaaagctgcaagtccagaacaacctgggatcatgctccagcacacaacctgcgagacttgttctcaacaaaatcacaacacaacaacaaccctcgctgccaccgtgcctcgacatcctcaaagcatggcaaagctcgtggaacaaaccgccacaacaaccaacaacaaaagaaaacaacaccaagataatgcatagcatgtatgcaatgatgctttccactgatgacactctagagtctccaacatccacgttgtgcttnccaggaacaacaacaacaacaacaatgctttctatctccaacaacattggattactcttcaatgaaaacaacaa

SEQ ID NO: 807 - DNA, 1356 bp, Glycine max
  Clone ID: PAT_MRT3847_100729C.1
gccgtgataacacttcctgcgcgccctccttggcccctccatgcgcgctcggtccctggtagccgctgcttctcttgcgccgctcctgggtcgtcttctcagaacaaaaagtagtgtgtgctgtgtggaaagcttctcgctggcgaactttggagaagttttctatcgttttgccatgcggggacggcagcgagtgtcatcaagggaacacatacttggccacgtgcgtggcggcagctttccggccgttcgtgcgcctcctgccaaaccttgttggcggcggtctttgcggcatgtaattgtggcttctctttcttcattcttgtatggataccatattggagtagtcaatgaaaccttagagagcatttctatagatcttggctttagtgggaatacaatggctgagggtcttgtagtaagtatatgcttaggaggtgcttttattggatctctgttcagtggatggattgcagatggtgttgggcgtagaagaagtttccagttgtgtgctttacctatgataatcggggctggaatgagtgcaacagcaaaaactctgtggggcatgcttttgggaaggttatttgttggtactggaatgggacttggccctcctgttgcagctctttatgtgacggtgttctcactttcagctgtacgggagccttttggggccttaacccaaattgcaacatgtcttgtacgtatgggttctctctttattggaattccagccaaggaaatagttacctggtggcggatttgtttctgggtatctgtcattcctgctacaatgcttgccctttttatggaattcggtgcagagagtcctcattggcttttcaagagaggaagaaccattgaagctgaagcttcatttgagaagctcttgggaggagtacatgtgaaacctgcaatgactgaactttcaaagtctgacagaggtgatggatctgattcagtaaaactttcagaattaatctgtggccgctatttcagagtgatgttcattggatctacactttttgcgttgcagcagctatctggcataaatgctgttttctatttctcttcaactgtctttgaaagttttggtgtaccatctgctattgcaaacacatgtgtaggagtttgcaatttattggggtcagtagttgcaatgattctgatggataaacttggaaggaaagtgctgctcctgggtagctttctgggcatggggttatcaatgggtgtacaagtcatcgctgcaagttcttttgcatcaggatttggatcaatgtatttatctgttgctggcatgttctggttgatgctgcattgactttcggcgctcgtgcaattccttctcta

SEQ ID NO: 808 - DNA, 527 bp, Glycine max
  Clone ID: PAT_MRT3847_10072C.1
tgttcttttgttcgggaacaagagagtactagagtggcatctaaggtacaaaattgtgttgggcgtggtgaacgcgcttcattatcttcacgaagacgcagagcaatgcgtgcttcatagggatataaaatccgcgaacgtgttgctggacacggagttcaacacaaaggtgggggatttcggcatggcgaagttggtggatccgaggctgaggactcagaggacgggagtggtgggaacctatggttatttagcgcctgagtatgttaacgtggggagggcgagtagggaatcggatatctacagttttggagtggtatcgctggagatggcgagtgggaggaggacttaccaggatggagagtttcatgtttctttgatgaattgggtgtggcaactttatgttgaaggggagattatgagggctgctgatgagaaactgaacaatgagtttgaggtggatcaaatgaggagtttgcttgtggtggggctttggtgcaccaatcccgaatgataaagagagacct

SEQ ID NO: 809 - DNA, 984 bp, Glycine max
  Clone ID: PAT_MRT3847_100730C.1
atttaaatcaaatcaaaatgattgtattcatttccattgtggggtttaccaccgaaggagttgaaggcaagaacgggaggtgagaatgcatatttatttacggctgcgagaagacgacagaaggggggacagctcacagtgacagcaaattgcttatcttgttttgtttttcttttcctccttgctttccccttcaatagcaatggcctctgcaacagaagccattaataaattgttgttcatattcctctttcttcaacaatattccttattaataatggcggatgattcagtttcagttccagttccagctgattggccgcaacagttccactcggttctgttcataaaccgaagcggcgatctccagaaaacggacttgtggtacgactggcccaacggtcgcaacttcaacatcattcaacaccagttgggtgtgctcaaatacgacctcgaatgggacaatggaacctccttttactacaccctcgaacccttcgacaaaacctgcaaaatcgtccatttcgaggttggcattctccgccccaactggctccacggcgccaactacctcggtcaggagcatgtcgacaacttcctctgcaatgtttgggagaaagttgacttcatttcttactacgaggatgtcctcactcgaagacccgtcaagtggatcttctcctcctccgggatggttgctcatgtgatgacatttgaggttggtgcggtgcttgaggataaacactggcaggctcctgtctactgttttggtgacgctgagacacagaacaaaacaagtacctccctcttacattcacaagatgcttttcctggtggttcttctcatgggattttaatgagatagatacctcattctgcatatgctaagtaattctcagaatggagtgttcactttatgatttaccatatatataatatcttgaaatgattaagaacatcttaaattattttttagattagaaa

SEQ ID NO: 810 - DNA, 142 bp, Glycine max
  Clone ID: PAT_MRT3847_100731C.1
cagcgtaaggaggaccgactttcatcctgggagcaactccgccacaaacaccatcggggctaagatgtgtgactaaccacttcctaacactcccactgtatacgactggttgttcacagaggagaccataaccaggcaccgc

SEQ ID NO: 811 - DNA, 294 bp, Glycine max
  Clone ID: PAT_MRT3847_100732C.1
aaagatttggtggagggaaattcttcctttgatattaaatctcgctctagattggaaaaagttgcctctacaaaagcacatcttcgttaggtggaaaaacccttcaaatcatgatataattaggcagctggctcacatgtcttcaccaacatttgcgctgataaggacacgatcaagaaggacgccatatagatcggtgcccagagtgacacaaaaaatagatcctcaatacaatgagggtcaagctcatatggaaaccaatttggttaaaccgtctcctgatgatgttgaaac

SEQ ID NO: 812 - DNA, 1295 bp, Glycine max
  Clone ID: PAT_MRT3847_100733C.1
ccaaattccaatccttcaattcaataatttagtaaaaatgttgtcttctctgctgaacccttccttcaccaccacccttccaatccattcaattttaatccctaataaccgccgcgcctccaccgtagtatcatgcacctcctcacacctcaccaccaacaaccactcccatgtttcttcgccgccgaacatcaaggacgaggcccgccgccgccccgcggcggagaacgacttcacggcgaagtacgtccccttcaacgccggcttcgactcgccggaaacctactcgctcgacgaaatcgtgtaccgcagccgttccggcggactcctcgacgtgcagcatgacatggaggctttagggcgcttcgacggcgcgtactggcgcgcgctgttcgactcgcgcgtggggaagacgacgtggccgtacgggtccggcgtgtggagcaagaaggagtgggtcctaccagaaatagaccctgacgacatcgtttccgccttcgaaggcaactcgaatctcttctgggcggaacgcttcgggaaacagttcgtgggaatgaacgatttgtgggtgaagcactgcggaatcagccacaccggaagcttcaaggatctcggcatgaccgttctcgtcaggctcgagctcgagccgctcgagccgctcgagcggctcgtgggcgtcggctgcgcctccaccggcgatacttccgccgcgctctccgcctactgcgcttccgccggaatcccctccatcgtcttcctccccgccaacaagatctccaccgcgcaactaatccaaccggtttcaaacggctctttagtcttaagcatcaacaccgattttgacggctgcatgaagctgattcgtgaaatcaccgccgaattacccatctatttggcgaattcgttgaacagtttgcgtctggagggtcaaaaaaccgctgcaattgagattctgcagcagttcaactgggaggtgccggattgggttattgtacccgggggcaatctgggaaatatttatgctttttacaagggttttaagatgtgcaaggaattagggcttgtggagaggattccaaggctagtgtgtgctcaggctgcgaatgcaaaccctttgtatttgcactacaagaatgggtttaaggattttaacgctgtgaaggctgagactacttttgcttctgctattcagataggggatcctgtttcaattgacagggcagtgcatgctctgaggaacacggaggggatcgtggaggaggcaacagaggaagagctgatggatgcaatggtgc

SEQ ID NO: 813 - DNA, 305 bp, Glycine max
  Clone ID: PAT_MRT3847_100734C.1
ttcgtccgttataacagtcataatcgaaggacacggataagaacacctacaatgcgtggagtgagcactgtgcatgatggacaggtgggcgtgcaaattgcaaaggctgatcgagaacaggactgatggacacagggtctacagcccgtgggaacaaggcaatccaggcaatagaactaaaataatgcgtacatcacatggttacaacaaacagacaatgggcgacttgtaaggcatactgctcagaccgactaggtgccaacatcagatgacctgatcctagctggtacttacctgctgaatta

SEQ ID NO: 814 - DNA, 579 bp, Glycine max
  Clone ID: PAT_MRT3847_100735C.1
ttttttttttttttttttttttttttttttttttttttttttttaaaggggaaaaaaaaatttagacccccccccctcaactttttgttccatcgaattttcaaaacaaaacaaaaccctgaaaataaaaaataaaagggttttttttggtgctaaacaacaagcaaatttttttcaggttcaaaaaagggatgaagctccttttttttggaaatccaatttttaaaatccaggttttggagcaaaataactttttaaaatcaacaacaactacttggggatgcataaaacggggggggcctgtccttaaaaatgttttttttaacaccctttgacccctcggttttgagggtaggggtatccaaaattttaaaaacaagcttttaaaagcattggtgaacattaactcgagttttacccctggtttcaaaaaaaaggcaaccgttttccctggaaaagtttattccctttttttttggcacaactttttcacccgcccttttttaatttgtttccaaaaagccttttggggccattttgattaattgaaaaaagggttattttcttttcccctttttt

SEQ ID NO: 815 - DNA, 173 bp, Glycine max
  Clone ID: PAT_MRT3847_100736C.1
cagggggtttatggagaggtggcggattcgttactttatgcgatcagtggaaggagagagagtctatgaataaaccaccacgcgacgcatttaatcatggtgaaaaggagcctgcatggaggagaatatgatcagacctaacgaaagaggcgctgcatcttgccatgtgtaat

SEQ ID NO: 816 - DNA, 481 bp, Glycine max
  Clone ID: PAT_MRT3847_100737C.1
gttcgagagcgagatagatatgactgactcattcctaagagatgtcgaatgctgcattattcaaccccagaacagtgatcagtgggtgtggctggcagatacggctggtcaatattcagccaaaagtgcttatagtgtgctgaggggggagtcacccgaggaggtccaagttgaagcttttcaggaattgtggaaattgaaggccccaaacaaaatctcagcttttgcatggaggctattaaacgataggttactgacaagagcaaacttgacatggcgacaaattgatctagaggacaatacttgtcctttttgtagcagcatggaggagagcgctggtcacttgtttttccactgcagaaaatttctccctgtttggtgtttggtgggaatcgctgtcttgggttaacatcaagggagctttcccttttaatcaaaaacaacatttcctccaacatgtatctgcagtggcagggggtac

SEQ ID NO: 817 - DNA, 490 bp, Glycine max
  Clone ID: PAT_MRT3847_100738C.1
aggacactagcttggggtattcttttaaaaccaaaagaggcagcttcgctccacctttggtttttcccggaaaaaaggggggaattggaaaacaaaaagggaccctactttatcaactattttttttatgggccaaactaaatttcactatttgcatttgacaacgggaaatttggggggggttttgggaagggggacttttaaaacacttcccttctttgggggggggttggatagaggttccaaagaacaagggggaggaaaacccccactggaagggggccgagccccacattgaaaatcttgggggaaggggttaaggggggacaggaccttgaagggatttttggaaacccatccctgacaaaattgcaattctgaagggtaaaaaaaggggggggggaatggtctaaggcaaaaatttcattcaccggggctactatctgcaaggaaatctgggggggcaccctgccaactggggggcaaaggc

SEQ ID NO: 818 - DNA, 141 bp, Glycine max
  Clone ID: PAT_MRT3847_100739C.1
cttctttaccacttgaaaaaacttgtatccgctggaaaactcctcttttcgagctctttctattgaggaatggagatggaaagggacggatttcatacaacacacattcttactgtgaatgctacaaaccgtttttttcac

SEQ ID NO: 819 - DNA, 296 bp, Glycine max
  Clone ID: PAT_MRT3847_10073C.1
acccgagcaataccggaccgggaaacaaagggccccaaactgagcctaataaaagcttgacaaaaaacggggcataacagggcccggggtaaaactgtgagtaaaatggcaatcccgcaaaaaatacaacccgcaaacaaaccggaaaaataaggggggaaacgggggaggctaacacaggagaatccaaggggattgtgcccgcttaaaggcggtaaacatggggaaaactctgcattaaagaatccttaaaaacaccggcaaaggcgggttgagaaaaggcccccaaaggggcc

SEQ ID NO: 820 - DNA, 155 bp, Glycine max
  Clone ID: PAT_MRT3847_100740C.1
aaaatcgggtaaagaggatggttccaaaggattagggtcaagggatagccatccctaacataagggaagagcgttgttaccacacaacgggcaacattaaaattgtttttacaggaaaaatatgttaaaaaaatgggctttttttaaaggaaaaa

SEQ ID NO: 821 - DNA, 1635 bp, Glycine max
  Clone ID: PAT_MRT3847_100741C.1
atttgacaaggcggcttcaaagtttcaggaggtggctgctttggctttcttcaactggggtaatgttcacatgtgcgcagctaggaagcggattcccctggatgagtccgctgggcaagtggtagtggcagagcagcttcaagtggcttatgaatgggtcaaggaaaagtattctttagcaagagagaagtatgtggaagcattgtcgatcaaaccagacttttatgagggactgttggctctggggcagcaacaatttgaaatggctaaacttcattggtcttttgctcttgctaagaagatagatctatcaggctgggattctaaggagacacttcaactttttgacagtgcagaggagaagatgaaagctgcaacacatgttggtattggtgggaaaaactggaggaacagagggcaaaagagctcccacgcgtccgggctgcgagaagacgacagaaggggagaagaagaaagaaacaaggtgctactgaaggtgagtcctccagtgttggaggtcagggtgaaatatctgcagaagaagctgctgagcaagcagctgtcatgagatcacaaattcacctcttctggggtaatatgcttttcgaaagatcccaagttgaatgcaaattaggaatgactggatggaaggaaaacctggatgctgcaactgaacgctttaagcttgcaggagcttctgaggcagatgtttcgatggttctaaagaatcattgctcaaatggagatgcaaaagatggagatgataaaaaggttgagaacccacagcacaataagactgttaaaccagagatcaacaaggctcatcaagtatgagataaatggtgtgactttgaaatctcttttacatctgttcagttgagtcttgaaagaagactctggacaaaggatatgcttgtcattcagagttcagaagggatatctaatttttttgaaatagaaattgaaaatttagggtgccttaactagatggttctgctcttctttttcttttctctgaagttctcagtgatctaatgaagggagattattttttaacattatttcccgggtaatatgctttttgaaagatcccaagttgaatgcaaattgggaatgactggatggaaggaaaacctggatgctgcaactgaacgctttaagcttgcaggagcttctgaggctgatgtttcgatggttctgaagaatcattgctcgaatggagatgcaaaagatggagatgataaaaaggttgagaacccacagcacaataagactgttaaaccagagatcaacaatgctaatcaagtatgagataaatggtgtgactttgaaatctcttttgcatctgttccgttgagtcttgaaataggactctggagtctggacaaaggatatgcttgttgttcagagttcagaagagggatatctaatttttttgaaatagaaattgaaaatttagggtgccttaactaaatggttctgctcttttttttcttttctctgaagttctcagtgatctaatgaagggagattattttttaacattatttgcacaatcatttttgtcccctgctatgttcgtagtgctgatgcaacttatttgaggcttgcttacttgctgaaaaataaaataaa

SEQ ID NO: 822 - DNA, 674 bp, Glycine max
  unsure (1)..(674): unsure at all n locations
  Clone ID: PAT_MRT3847_100742C.1
ncccacgcgtccgaaaagaaagctttgattttggttccccactaacaaaacagaggaaagcctttcttgttcttgtctttttcttttgcagctgccactagtgtgctactgatctccggtcaccaacaggttagctaaaacaagatctgtaatcaatttcagatgttgtcttcaactttggttctaatccctgtgaatatcagcttatgttttatgttgggggtttcgatttgaactcaagggtatctgttcttatcgcacacccaacgttgaagcttgttatgataattactagttattgccttcgcttatttcctatctgcgggttctgagctttattttgatttttaaatgatgtgtgagcctaaaatatggctttccggttttgtggtggtgccaggcttagtcaactggtaataaatactgttccaattgagatttcaggttctgctggcttggggtgttttttctatctgcatatttaaggattagggtttgggtttgtgttccaagaatgagcagttcgggtttgggtggggggattttgggacttgggagtctccatttcatagacaccagcacacccaattgggtcaacaatcaataactggtcaacagcacataaatattatgaggtgggctttgaaagtgatcaccccatttggcctaattga

SEQ ID NO: 823 - DNA, 333 bp, Glycine max
  unsure (1)..(333): unsure at all n locations
  Clone ID: PAT_MRT3847_100743C.1
aaaacatatatttatattgaatttgtctgatggataaacatgtatgaatcaatctgaccaccccgcgagacaaacatactacctacttattaacttgttctttcantatgatctgtaaaagaagaaaaaatgcaaaccacttctgtaaactatctttgttcttaagttataccactaacacatattcatagcatcattactttctgcttaaaaaaagaatcactacaactttttaattagattctatgacatcttccaactgcaatctctatcttacatcataaatacatccagatgtctatgaactacatatcatctttccttcatctatat

SEQ ID NO: 824 - DNA, 404 bp, Glycine max
  Clone ID: PAT_MRT3847_100744C.1
ggagaaaaggaggaagcagagagggaggagggtagtgaggaggaagggcccaaagggtggaagggttattgtctctggggctatgctggttgaggttgagactgttcttcagactcaggaaccagtgataaaaccaatttggaatacatttgctagcagtctcagtggaatttggaagggtgtaggtgctgtgttttctcccatcacagctgaaatggaaccaatggaaataggtagcaagaatgaacacctatatgactgctatactctttctcgcatagaggcagtaccatcagtttcaggtgagcgtacatctcaaatccagagaaaggttaactgggtgactttgaatccttatggcgaaataccacagcatattgaaggcagcaatgtagctaaagaca

SEQ ID NO: 825 - DNA, 359 bp, Glycine max
  Clone ID: PAT_MRT3847_100745C.1
gtgtattctgttgtctttttttttagtttatttgttgttcttgttgtagccaaaaaaacaaaacttttttgccttgggacccatagggggcccctggggttggccgactccaaaacggtcttcttcccctttacgacatgggggaccccccctaccacaaaggggccgccataaaaagccttttatatcaggagagtctctcccacaaactcaataagaacaggaagcccccgttttgggccccccaggtcaaaaaaaatatggggcaaatgtggttttgccgcatttttgagagagccccccttggaaaaaaacgcacccgctcattcttccccccgtgttaggccccctttcttccc

SEQ ID NO: 826 - DNA, 208 bp, Glycine max
  Clone ID: PAT_MRT3847_100746C.1
ggttgacgataggcactgcaggccccggcttgcaattatagaatacatacccttatcggcaagttaatcgggggtcaggacttctgatgacaaacttggagctctctgcatgcagagcttacaggataacgttcactcaattcgcgaagcagctgctaacaactagaaacgcctcgctgaagaatgcggacctgcgtgggctatgcag

SEQ ID NO: 827 - DNA, 285 bp, Glycine max
  unsure (1)..(285): unsure at all n locations
  Clone ID: PAT_MRT3847_100747C.1
ntnctcnntcacgcnnactnaanctctctaatgngtctnnntgggacnatacnntgntnttnacttctnngntgngggcnggtgnnnttanattgntcgctngangntggnnggactgcccgctaggttctgtggtggtancnncnagttgnctacnngncnangnttgcgctngcccnngccnnncnggtgtnggnnncnttntgcgtagtgntgtnntggncagattgtnttnngncnggggnnattnantgnnaagtgttgantgngngngcngtcgnccgt

SEQ ID NO: 828 - DNA, 272 bp, Glycine max
  Clone ID: PAT_MRT3847_100748C.1
accggtgcgaaaagaccaccgaagggggctcgagaaagtgacaacgaaactgacgtcaggatgaatgaattctcgctaagcttgcatcttgcatattctcgataggaataacaactgggacaatacgttgggaggagctgatcgccctatatcatcaatacctgtcggctctttctttacgcgtcgttcatgtccatcacccattttgtattcctcacactaacagcacaggtatcttcccagaaaaaagagccgatgacaatctcttgctg

SEQ ID NO: 829 - DNA, 599 bp, Glycine max
  Clone ID: PAT_MRT3847_100749C.1
acgctgcgagaagacgacagaagggccccatattaccaactatgcagcgtgagtacatggttcatgtaggcatgctgttcatcaatttttacattataatgagaagactttctttaaagagaaaccaatacagtgagagaattctgcaactatggacaatcctataaaactttttatgctatagtaaacaatagtgtatcaaattcactaatggtgtaaaagcttggtcactgaaaccaaattaaatccagataaaaacaaaatacgatttggtctctatatgattagtttggcatgttctatacacatttttcaaactataagccttaggccatttttgtgccaacttgcttgacatctcttcccatttcccatccaacaggattcttgtgcttgagtgctgccttttaatgcttcatattcagcaaaaccaaaagtgattggagaggtgtaaaatttatgagtagatatcaataaaataattcttatttgtgtaacatcattgtgctaaaatatttactatttatctgtactacatttcactaatgattagctgcatacttttaaaaaaaaaattggaaatgtcctggtgccgaatt

SEQ ID NO: 830 - DNA, 169 bp, Glycine max
  Clone ID: PAT_MRT3847_10074C.1
accacgcatccgacggcacagttcaagaactctaactaaattaaggaacatacaactccttgggagatctggaaaaccattaacgtccaactctccctaactctaactaatctttccatactctgctcctctacttctatcttcccttaccaattatccataccctaat

SEQ ID NO: 831 - DNA, 870 bp, Glycine max
  Clone ID: PAT_MRT3847_100750C.1
cggctcgagcggctcgagtacggctgcaagaagacgacagaagggttcttaaaagatataagatggaagaatgcaacctagctaagagtccaattgattttggattaaagctaggtgctggtcttgatgaaaagccagtggatgccacattgttcaagcaaatggtgggaagcttgagatatttgtgccatagtaggccagatattgcttatggtgtaggtctggtaagcagatatatgaatgatccaaggacttctcatatggctacaccaaagagaattttgagatatgtaaagggcacacttgattatggcttgttattctccaaagcaagtcataatcaaggactaaggttaattggtttttctgatgcagactggagtggtgatttagaggacaacaaaagcaccactagatatgtcttcaaattacttggatcaacaatatgttggagttctaagaagcaaaaagatgttggactttcaacttgtgagtcagagtacatggttgctgcctcagcagcttgtcaatcagcctggttggagtcactatttgtagaattgaagattcagctttattcagttgttcaacttaacatggacaacgagtctgttatatgtcttgccaacaacccaattgcacatggaagaacaaagcatattgggacaaagtacccctatcttagggatcaagtgaggaaagaaagaataagtttggcttattgtaagtcagaagaacaagaagttgacattctaaccaaagcgcttcgtggagagaagttttacaagttcagagaaaaacttggcatagtgaattgcttaaacttgaattagggaggaatgttgatgtatccatatagttctagtttag

SEQ ID NO: 832 - DNA, 220 bp, Glycine max
  Clone ID: PAT_MRT3847_100751C.1
actctaggagggctaaagagtcctataggactatcgtgaccagtgtagatatagagatatattctaaaagggaaagggaggcattatgggaaaaagagtaagtctgggaaagaaaaaaagtatgtcattgttatcaaaaacataatggttattatatattaccgagtataatatatttgcggaaaataatatatttgtgtttaatagtagctttttcttt

SEQ ID NO: 833 - DNA, 249 bp, Glycine max
  Clone ID: PAT_MRT3847_100752C.1
tctcttgcggctatggttttagcgcagtgtcttctagatttaaggtagatgggtaatgtgcatgttcacatcagtattgtggatattggccatgttgactctgggaagtccaatagcactggccacctgatctacaagcttggatgcattgagaagcgtgttattgagagatttgagaaggatgctgctgagatgtacaagatgtctttcaagtatgcctgggtgcttgatgagcgtaaggctgagcgt

SEQ ID NO: 834 - DNA, 403 bp, Glycine max
  Clone ID: PAT_MRT3847_100753C.1
ccactgaaaaccgagccgccgccccgcaaggtcgctggaggccccgaaacccaaaacccagaatggggggggggaaaacccaaaaaccaaaaccaaagggggaggggtttaaaagccaaaaaaaaaaagggggggggggggtaaaaacgccttggaaaaattaaaaactaaaaaccccgggggcttggaggccaaaaaactgaccccccggccttgggaaacggtgcccaaccccagaaagcggggaaaccccgggggggaagcaaatttaacccctggaaaccccctcaacccccgaaaagggtcaggggaaccaaacaaggggggctccccaaagggccaaaagcgcccaatgaaaaatcccggggaccctgtggggccacggaacaaaaaaccggggccc

SEQ ID NO: 835 - DNA, 850 bp, Glycine max
  Clone ID: PAT_MRT3847_100754C.1
ggaggttccaatttgcgtgagaacgaaaaaagaaaaaaaaaaccctaacgcactcgagaccctgagatttttcatcttcgtttctcattctctttttgatcatggacgtcgaggtgcggcagatcttcaacaagttcgacaagaacggcgacggaaaaatctcggtaacggagctgaaggacatgctcgcggccctcggatccaaaacgacggacgaggagttgaaacgcatgatggaggagctcgaccagaacggcgacggtttcatcgacctcaaggagttcgcggattttcactgcaatggcggtgccggaaaggacgactcgaaggagctccgcgacgcgttcgatctctacgacgtcgacaagaacggcctcatctccgcgaaggagttgcacgacgtgctccggaatctaggcgagaagtgctccctcagcgattgccggagaatgatcagcaacgtcgacgctgacggcgacggcaacgttaacttcgaggaattcaagaagatgatgactcgctcttaattaggtttgaatcaataatcaataataagttcatttttaaaaggtacgtacgtacgtttacgcatcttcatgttaggttagaaagaactaagacctgcacataaagtagttattaacatcttttctgtacattctctagcgtgacatgtggctttaggtgttagattaggaattgaagattgaagaacgaagaagtagggttagtagaatttgtaggactcagttctgtagttatacatatgatgataattcttgcttgttttttcttaattcctttgtcactaaaactcatgaatatgattactgattctcaatttcctgcc

SEQ ID NO: 836 - DNA, 235 bp, Glycine max
  Clone ID: PAT_MRT3847_100755C.1
aactggcaaaacacctgcattatgccttcctgcattgaaaaaactagatcaggacaataatgccattcatgttgttatactggtcccaacccgaaaattgccattgcaaacttctctagtgtgcaaagagctcggaaagcacttgaaaatccacgttatggattcaacaggtggtaccagcctcacatatgatagactgatcttatatcacccggctcatgtactatgtggaact

SEQ ID NO: 837 - DNA, 354 bp, Glycine max
  Clone ID: PAT_MRT3847_100756C.1
agtttctgtgccccaaccccacttgcttctctggattcttttttgtacatacttagcctctgtgttctaatcccaagcttcttaatcactgtctaaattccattgctacctctctaacctgaactttaaaccttgccatagattctatcatattttcaatcttactggaatgctcaaaactgttcctgagaaggacatttggagacgccctaggaggaaagatttcgagactgatgatgccctaggaagaaggtgtatatcttataaactctgccgagatcagagacatgggggtcaacaaacccaaaaagaactagcagttcatatggaaactgaagacccttttaaggctca

SEQ ID NO: 838 - DNA, 251 bp, Glycine max
  Clone ID: PAT_MRT3847_100757C.1
gacccacgcgttcgaagcaggatggactcgcctatggatcgcctcttttgttactccttatctgcaaatcgtggcgaactgattcctcatggtcctattttttacccttactccttactccaaataattagcaacaacctcatatccactatctgagactgtttattctaataccacctatattccctcctttgatctttatcctctacagacaaacttcaacatcctacccgattccataacagttttac

SEQ ID NO: 839 - DNA, 332 bp, Glycine max
  unsure (1)..(332): unsure at all n locations
  Clone ID: PAT_MRT3847_100758C.1
ttaggatgaaaccggatgcgaggagatgaaagcgaacatcctagagcactggaaaaagaagaagaggatcgtcgaagagaagctgcaatcgcatcctcatcctgtctgcgacccaatttcaacccttaaggcatgacccaagaccatctctcatgggtgggcgaaccaggggagaagcgccngcaaccgaaggcaaaagcgaagcccaaaacgaaatccaaagatagggccaacaaaaaggcacaaggggaagggccatcaagccaaaacggaggaacccaaagcccaaccggggaccacaaagaagcaaacggggggaacgacggcgaagg

SEQ ID NO: 840 - DNA, 787 bp, Glycine max
  Clone ID: PAT_MRT3847_100759C.1
ctcttggctataggttgagaaatctgctggatgggttaattgatgaacggcagacagctttcataagaaatagacacattctccatggaattctcattcttaatgaggtggtggatgaggctactaagagaaaaaagcctactatgatctttaaagtggacttcgaaaaagcatacgattcagtatcttgggctttcttggattacatgatggaaaggctaggtttctgccttaaatggagacaatggatatctgcatgtcttcattcagctactatctcaattttagtaaatgggagccctaccaaggaaatagtcccctctagaggattgcgacaaggagatcctttggctcctatgctatttaatatagtggcagagggccttaccggcatgatgagagaggctgtcaataaaaacctttacagaagtttcttgagtgggaagcaaaatgagcctataaacattttgcaatatgctgacgacacggtcttcgttggagaggcctcttgggataatattcttgtgttgaaatccatgcttagaggatttgaaatggtctcgggtttgagaatcaactatgcaaaaagccaatttggggttgtcggttttcaggccaattgggcccagcaagcagcccaattcctgaactgtagacagttggatacccctttctactatttaggcatgcctattgctgttaaagcttccagcatggtggtttgggagcctttgcttaacaaatttcaagccaagctctcaaagtggaatcagaaaactttgtctat

SEQ ID NO: 841 - DNA, 688 bp, Glycine max
  Clone ID: PAT_MRT3847_10075C.1
cccacgtgtccgtgcacatcaattcacttcccaaaacatgcattacatgtcgtatcagcaaaatgtgattacatccaggcaaccaaactcccagcacattcagccaaacatggtatcacccgggcaacctaactctcagcaggttcagcataacatgcatggtcagccctttgaaaaccaacaaactacatatccaaaggtagaggtagcggagtttaaaaatggaagccaggttggacattcgctgtctcattatccacaaaggagtgccttgcccgttcagaacaaccagaacaatcctgctgaagttggttctggtcaagtgcctaatgtaggtgtcaatgctggccaaccacagcaattcagggccttatctggcagtatgcaacagtcaccctctggatctgatttatattaccaacatggtcctaactttcatagccagatgagcccaggcatgatgcatggtcatccatccaatgtccaccctgctggccaaaagatgggtcacgaggataatttacatggtagagcagggaatgagtatgactataattctaccaaagatatgtcaacaatgggttgtcagcagccagatataactccaataccgattccaagaaatcagcaggatatgaggattggcaatgctccttttcaaaatgtaatgccaagtggaaatggaagt

SEQ ID NO: 842 - DNA, 594 bp, Glycine max
  Clone ID: PAT_MRT3847_100760C.1
ttcccgggacgacccacgcgtccgcctagctctatagctcgagtattgcttgctctccacaagaaacaaagcagagcaccaacaatggccgccgcctgctcgtcctcggtcctcctgctgctcctggccgccgccgccgacttggctggcatgagcgccaacgccgccaccttcaccatcaccaacaactgcgggttcaccgtgtggcccgcggccaccccggtgggcgggggcacgcagctgaacccgggcgggacgtggaccgtcaacgtgccggccggcaccagctccggccgcgtgtggggccgcaccggctgctccttcaacggcaacagcgggagctgccagacgggcgactgcggcggcgcgctggcctgcacgctgtcggggcagccgtcgctgacgctggccgagttcaccatcggcggcagccaggacttctacgacatctcggtcatcgacggctacaacctcgccatggacttctcctgcagcaccggcgtgcggctggtgtgcacggaccctggatgccccgacgcgtaccaccaccccaacgacgtgaagacccatgcctgtggcggcaacagcaactac

SEQ ID NO: 843 - DNA, 512 bp, Glycine max
  unsure (1)..(512): unsure at all n locations
  Clone ID: PAT_MRT3847_100761C.1
gtacgtatagctnggattcctctagagccggctcgannttttttttttnnttttttgtttttttttcgattgagtctctacaacacctctaccttactaagggtatggtgcgctgtgaagaaaaagtgagctctccacaacaaggctcaccattacaaaatatcctatacttcctttacatgacttctccctcaaaatgactccatttgatatcacacctaagtgtcaaaattcaatatccacaacaaatcgccaaaagcttgtcctatattttcaatcaagcagttccaaagaacatagatgatcaatattctacaaactctctctggaaagagaaagaaatataattgcgcgttgcccttcacatccatatactcaccctctctttccatccattcgatcttgcttcaaatcaacacccattccatagggactccacagcaccatcatatttcaagaagcccataaaccaaaattcatgattgtcaaccgaaatcaccttgatgtacttt

SEQ ID NO: 844 - DNA, 443 bp, Glycine max
  Clone ID: PAT_MRT3847_100762C.1
gttttcattcaatcatcactgatctaagatatgtctacatctgataagtcagaagtggtggaaaggggtgctaaggatgatgaaaagccaaaggaagaacatgagaagggtggatttcttgatacagtgaaggatttcattcaagacattggtgagaagattgagggagcagttgggtttgggaagccaactgcagatgtcactgggatacacattccatcaattaatcttgagaaggcagagctagttgttgatgttcttataaagaacccgaatccggtgccaattcccctaattgacataaactacttggtcgagagtgatgggaggaaactagtttcgggattgataccagattcgggcacaatccatgcacatggagaggagacagtcaagattcctcttactttgatttttgatgacttaaggaatacctatgatga

SEQ ID NO: 845 - DNA, 253 bp, Glycine max
  Clone ID: PAT_MRT3847_100763C.1
ggctttggcattcctgtcttttgaactggttgctcacttctcagggctccgctctctttcacaaccataataacttgcacctaattcctcaaacttcggtgctccctggatggtttcacactgcctatgtctcgtggctggagttccgggtagactatattgctcccctaattcagtccctatcaaccttctgcattcttctcttcttaattcagtccgtggatcgaatggtgtcttgcttaggtgcttctgg

SEQ ID NO: 846 - DNA, 2722 bp, Glycine max
  Clone ID: PAT_MRT3847_100764C.1
gccaaagaagagatcagctctcttgagaaggaattttcttcatacaaagttcgtgcacatgcccttcttcaaaagaaggatgctgagctggctgctgctaaagattctgaacaactcaaagctcttgaggaaactctgagagtatatttgatcagtattttgtaaaaaacgttgtttgagtagtgtatataaaataatcacccaatgcattcttaattttcttaggaggtggaaaatgaagtattatcaataacagaagaaagggatagagttcttcaagatcttcaatctgctatggctaatcatgagaaagagattgcagaaagtcaaaacctctcattttattaatttcagagacacagcccttgaaaatgtcaagcaacacataaggagctttgaaataaagcttgactcagctaatgttaaacacctaaaagagaaagaggaatggggactaagtcttcaaaatgtagaagaaacatggagaatcagatgcgaggcaatgaaggctgaaaatgaagctactgctacaaaagatatgcaaaaggaattggaagagttcaaacagcgatgtaaaaaactgaaggaagaacatgcttcatttcatgatcttgctgatagaatgattgaggagaaaggctatgaaatatccagacttatagatgaaaataagaatcttcgtcagtctcttcaatcaagaccaccagtcgatcagaatgataattattcaacagccatgcataaattggattcaacaaatttaagcccctcagcagcagaacagcaaattctgattttggctagacaacaagcccaaagagaggaagagctagcactgtcacagcgccatattttagctcttcaagaagaaattgaggagcttgaacgtgagaatcgtctccacagccaacaggaggcaatgttaaaggatgagcttcgcagtatggaaagatcaaagaaaagggaaggtgttgatatgacatatttgaaaaatgttatcttaaagctgcttgagactggtgaagttgaggtattgctaccagttattggaatgctgcttcagtttagtccagaagagatacagaagtgtcaacaggcatatcacaactccacagatgttccaccaccaaatcctgcaagcgatacttcaggatctggcctatcgcttttctcaagattcacattttcttaatggcataaatgggagtgctggcgaattttgttgttgctgttagaatgtctgcttcttccatccagctctaggagtatgtttatttagtcactgttactgagaaagcaggtttgtatctgtaaattagaagggggatggcggggggatcttggttacaacagcaattgttccatgcaagtgtaaagaaacatcaagagtaatgtacaacaaataccacaacagggagggagaattcacgggatgttctgcctgttatttagccaaagatatagttcattttttaccattgaatatgtcgagtcacaaaatattactagaaaattgtatcatgtctttatatgatttttcaattggcaatgccaaaggaatgagaagtgtccttttgagttcatgtttgcaaataatcataaggcatttttagtatcactgagttttcatgaagatttgctttttcattggttcattagaaattgtttatcgaattttgattggtcggaactgtattgttattacaggccagttaaggtgttatgagctgctatggatgttgacagacaacaactaagaagtgcaaacaacaatcttcgagataccattgaagatttaaggcgttcattgcaacctaaagagagtgctattggaggcattgcaacaatcagttgcagaaaaggaacagatgttggaagatatgagagggttgcttcaggctgctgaagaaaaaaggcaagctgctctagctgagctctcagctaaacatcaaaagaatatcgagagtttggaggctcaaattaatgatgcattgtccgacagaagtaaggcaactgaatccatttcttcactgcaggttctagttgcagaaaaagaatccagaattgcagagatggaagcggcatcaacaggagaagctgcacgactcagagcagctgtggaaagtgtgaaaggggagctttctcacctaaaagaggagcatgaaaaagaaagggaaagctgggagactgcttctcaggcacttaaagcaaaacttgaaattgcagagagcaactgcatacgtgcagaagttgaagtagcaaaaataagaagtcagctggaatcagaggtatccacccaaacaagaatcctcaatatgagagatgccgaattgttggctgccaaagaagagatcagctctcttgagaaggaattttcttcatacaaagttcgtgcacatgcacttcttcaaaagaaggatgctgagctggctgctgctaaagattctgaacaactcaaagctctagaggaaactctgagagaggtggaaaatgaagtattatcaataacagaagaaagggatagagttcttcaagatcttcaatctgctatggctaatcatgagaaagagattgcagaaagagacacagcccttgaaaatgtcaagcaacagataaggagctttgaaataaagcttgactcagctaatgttaaacacctaaaagagaaagaggaatggggactaagtcttcaaaatgtagaagaaacatggagaatcagatg

SEQ ID NO: 847 - DNA, 505 bp, Glycine max
  Clone ID: PAT_MRT3847_100765C.1
ggccaaagaagagatcagctctcttgagaaggaattttcttcatacaaagttcgtgcacatgcacttcttcaaaagaaggatgctgagctggctgctgctaaagattctgaacaactcaaagctctagaggaaactctgagagtatatttgatcagtattttgtagaagacgttgtttgagtagtgtatataaattaatcaccaattgcatccttaattttctccaggaggtggaaaatgaagtattatcaataacagaagaaagggatagagttcttcaagatcttcaatctgctatggctaatcatgagaaagagattgcagaaagagacacagcccttgaaaatgtcaagcaacagataaggagctttgaaataaagcttgactcagctaatgttaaacacctaaaagagaaagaggaatggggactaagtcttcaaaatgtagaagaaacatggagaatcagatgcgaggcaatgaaggctgaaaatgaagctactgctac

SEQ ID NO: 848 - DNA, 392 bp, Glycine max
  Clone ID: PAT_MRT3847_100766C.1
ctctaggagtatgtttacttagtcactgttacagatacaaacctgctttctcagtaacagtgactaaataaacatactcctagagctggatgggagaagcacgtttgtatctgtaaattagaagggggatggcggggggatcttggttacaacagcaattgttccatgcaagtgtaaagaaacatcaagagtaatgtacaacaaataccacaacagggagggagaattcacgggatgttctgcctgttatttagccaaagatatagttcattttttaccattgaatatgtcgagtcacaaaatattactagaaaattgtatcatgtctttatatgatttttcaattggcaatgccaaaggaatgagaagtgtccctttgagttcatgtttgc

SEQ ID NO: 849 - DNA, 801 bp, Glycine max
  unsure (1)..(801): unsure at all n locations
  Clone ID: PAT_MRT3847_100767C.1
ctcattacattttaactgttcanaatattattagggacgagtatgtgggtaaaccagctactatggaagttttgtatgcttaaaaatgttggacctgtttttgcanggtttgaatgtctatagcattttaccgcttgacacaagtgatggtccccgagatgctatgaacataattgtttggcacaatgcttttgaggctgaaactatttttggtgttccctttcatttacaccaactaggataatgttttgtatgtcatgtcgatttcggtttaggggattggtttctcatggtttttaatgataacatcttggccctgaatctggtcttaacagttctttcaaaaacattggatctgaatatctgataagctagcatgtcattcccctcaccttgatgatttgacccattttcctatataatttgtctttggctttcaattatcgaacagaggtgtgggcattcggcgccaagtatggccacccaaagatgttaaatctcatgatacagcacccctggatcaggtttttggtgtttttcttttccctttgctcatgccttggagaatagtatacacaacttcacttggtgcttcttactctagcaaactctctgcatgcaggacaacaggtttcaagcctcaagattcaccccattattcgtatcttatcctatactgcacaatcacataaacggtctaattgggcctcattacttacctgcagtaacgagcaatacctaacattattatggtgataccaataaaggaaaagacgagtctgaagtaaatagtaatgagat

SEQ ID NO: 850 - DNA, 311 bp, Glycine max
  unsure (1)..(311): unsure at all n locations
  Clone ID: PAT_MRT3847_100768C.1
cttcctttctctgctctttgtcttctctgacacatttggggccttgttgagtgtgtttttgcaagagggtatggcgaaggacgttgaggttgctgagcgtggctccttctctgggaaggacttccaggaccctccaccagcaccactcattgatgccttgaggagctcacaaagtggtccttttaaagggncttcttattgctgagttcattgccacttttgctcttcctctacattacctgtgctcaccgttataggggtaccaagcaccagacggatcatgctgatgcgtgtggtgggggttggcattc

SEQ ID NO: 851 - DNA, 417 bp, Glycine max
  Clone ID: PAT_MRT3847_100769C.1
ttgccgtgctacatcgttagtagtaccgcctgcttgggggggggggggggggaacgtaagcatagacagagtatgggtaacagtggccaaaccgatggatgggatagcacagcaagtcagcaattggacgaggtatgacaggttgagcattattagtaacaatcgcttcatcaccgtattgctgagtaacaggtgccactaactcgcagagctctgagaggtatatgggtgatagaaatgaatgcctgaaagcgatttagaataccagccgcagtaattgcatacgctaggtcctccaaatgttggtgctagtgcggctatcaactcagctcgatacagtcgagcctatatacatcaaagtcatactcgagtaattgccacacaggcagaagtagctttaagctcgtatagcagcgg

SEQ ID NO: 852 - DNA, 480 bp, Glycine max
  Clone ID: PAT_MRT3847_10076C.1
gggggccccagttatttaacaataacttcctcccaaatatgctgggaaggggaaaaaatgatagcttctgggagtccggaaaattcggacagttttttgcatacaacagaatcttttaaaccaaggcctagcatacaaattgagttaaaaacacccttttttgggtggaatttcttcctgcctttttggggcggaaaaaagggaaaattttgtttttgcaaaaaaccaccccggacatgaaaattttccaaaacattcaaacaaattcctccaaaggcacataccttgaacgggctttttttgaagaacgaacaattttttaaaccttggggacagccattttttccaaatttgctgcgtaaggcgtggaaacattaaccccactatttttttaaacgggcgaattaaaataaccaaaacttttttcaatgacaaatgtgcaaatttcaccgcacaccccatcctgaggaaacccttttt

SEQ ID NO: 853 - DNA, 344 bp, Glycine max
  Clone ID: PAT_MRT3847_100770C.1
ggatttgtggtgtgaagagagattttgagagacacatatgtgtgttgtgttgtgtctcataggagagaaaatgtgagatgtggacagtgtgtcccctcgcgacatatagactcgcgttctcgtgcgatatcactctgttggcaaccagaataacaacacgcgtctcatgtgagacattctcgacaacatataagacacatctagtgatagtgattttgtgtcaaacactgtgtctcgtgaatatagatgtgctcgtgtggcgttttgagatagtgcagggcaagagagatttagatctcacactccgctctatatgagatactcctctggtgcggatagagtat

SEQ ID NO: 854 - DNA, 112 bp, Glycine max
  Clone ID: PAT_MRT3847_100771C.1
gtttcgtctggatacttacaacgtaacaacataatgttgcgaattgcctgcaattgctcttatggttgcgtccgttgcatctcattagctgtttggggtctagtcttagttc

SEQ ID NO: 855 - DNA, 682 bp, Glycine max
  Clone ID: PAT_MRT3847_100772C.1
tcgcccacgcgtccgattttcaaaagcttttgtgagaaaaatgctgatggccaatcaatgctggcgtctacgctaattccacagccatattccatgaatcatgcattcctcgaggaggatgtcaatatgtcttttggcagcatgctattacacagtcttactttgggtgaaaatggtgatcttgagacttgttgcagagctgctagtgttctatctcatatgttgaaggaccatctccaatgcaaggaaagggttttaagaattgaaattgaggcagcacccatgcaatctttaggagctccagagccactaatgcatcgaatggtgaaatatttggctgttgcttcttccatgaaattccatgatggaaagtctagtacatcaggaaactcttatgttcaggccattatcttgaaattactgattacctggctagcagattgccccagtgcagtgcactgcttcctagatgctcgcccccaccttacttatcttcttgagctggtatcaaattcttctgaaacagtgtgtataaggggttttgcggcagttgtcttgggtgaatgtgtgatctataacaaatccactgaccgtggaaaagatgcatttgccattgttgacacaataagtcagaaaaatgggcctaagttcatacttttttaaaattgatgagatgcagaaa

SEQ ID NO: 856 - DNA, 626 bp, Glycine max
  Clone ID: PAT_MRT3847_100773C.1
ggctcgaggggatacaaagcagcggttgcaacttcccgctccgttgctctaaatcctaaactaaaataaaaccctagccagtggccggtgatcaccatggcgatgaaaactgcagaagaacacgaagtgggtatctcctgcttcatttccgaccttcctggcttccgcggaattttaaagcaaagtggacagagatggagcagttgttcaattgtcctcatttgatgcccctctagaggagccagaggaaaatcgaaccaacacacacgacactgtcgttagttatgcctctcagattgaatctttcaagtctcttgctgaggagtatgatgcaattcttttggaagaatttattaataagattaatgccggtggagaagatagtgtttctcccattgttctttctccagattctgataaatctcatagaaaggcaatgcataacttctttaaggaaaactttaagttcctggtcactgatgtggtcaatggacccgatgcttcatcgaaatgtatccgtgtgagattgaattcttgtgacccaacaacaaaggcaaaaacttcaagaacgcaaagaaagagatgattagcttttgacagtcgaggttcaaaaaattgccttgaaa

SEQ ID NO: 857 - DNA, 475 bp, Glycine max
  Clone ID: PAT_MRT3847_100774C.1
ttttttttttttttttttttttttttttttttttttttttttttcaattttatttgaaattttttgttagggggaaagaaaaacaaaacaaaaggggagggaaaaaaaaagcaaaaccggggaaaagagtaaagatagggaaattaaagggaaggggggaaaaaaacaatttgccaggtggaaaaatagccaaaaggggcggaggggggaagaggtccaaaaagggcgcagcaaaaaaagtaaaaggggcactgcccttaaaagaggaatagaaccaacggggtggggggtggagacaatgggggcgctagaattgtaaactcccaaacgcccgcttcactggcaaactccccttccttttttcccttcttttcctgtttttcccctaaagatggaaatccttgagtccccgtaaggaaggaaatattgggggttttggtccaggggcccaaaaaagcggataaggggaagggag

SEQ ID NO: 858 - DNA, 279 bp, Glycine max
  Clone ID: PAT_MRT3847_100775C.1
gctaaattaagacagggcacaataccagctcttgactgctcaagtttttgtggtgcaagatagattatgcccgacattttatctcaatagtcacaagtccctttttcttccaccattgttctttggataaaatttgattgcagtttcttatgtgcttttagtattgttctccaatcaaaattagagtttgactatagatatattcaatgattctatcaatactagtctctttaggaatacatggaatttgtgatggggtggggttttgctacatcgcag

SEQ ID NO: 859 - DNA, 836 bp, Glycine max
  Clone ID: PAT_MRT3847_100776C.1
atcggctcccagaatatttggaatgttacaaactgatctgtgaaagaaaggtcaaacccttggatttggttgcccttttgaaatccctaggagaagaaaaatgcatagtttttacaagatctgtggaatcaacacatcatctctgcaaattgctaaattgttttggtgatctgaaaattggtatcaaggagttttctggtctaaaacatcaacgggtaagaagcaagacagtgggtgaatttcggagaggggagtttcaagtgcttgtatcttctgatgcaatgactcgtggaatggatgttgaaggggtaagaaatgtcattaattatgacatgcccaaatacacaaagacgtatgttcatcgagctggtagaactgcaagagctggccagactgggcgttgcttcacattgatgtcaaaagatgaggttggaggatttaagaagttgatgaaaaaggctgaggctagtgattgtcttgagtatactgttccatccagtttgattgaagcgcttcatagtacctaccaatcagcactgacaaaattgaaggagaaaattctggagtcccggagaaaaccaaggataagtcttgtcaatcgatcaaagtgagaacaaatattcacgagaatagttttgcctatgaacggatatacaagagattcttttactgtacattttatgatttaattagaatgataatattatgtttttttgggttacatattatttattttcaccactattttttgtttaatataaaaagaaattaatattatgctactcgtatatttgtttactttacaaaggagaatgtcttcattttattgtttaaaa

SEQ ID NO: 860 - DNA, 339 bp, Glycine max
  Clone ID: PAT_MRT3847_100777C.1
ccgactcgtacggcgatatgaaggcatgctatcctgagaaggggtctggagttgagatatcaccaaaaccctgtggagagtggcacgcctgctacctttaagatctccgctacttacagacaagctatatatggtggagagagtgtaaatggagtaccatacgttggggcgccagaccatactgaaggaatagatctctgacatgaagtatcctgagctgttgccaatggcaagctgctgatttctcacacacaaacattgccttcgattactacaccagggccctactctctggagatgacactgtaacatgatcgggactgggtcgtaacttgcatt

SEQ ID NO: 861 - DNA, 523 bp, Glycine max
  Clone ID: PAT_MRT3847_100778C.1
tagcataatattaatttctttttatattaaacaaaaaatagtggggagggtttataatatgtaacccaaaaaaacataatattatcattctaattaaatcataaaatgtacagtaaaagaatctcttgtatatccgttcataggcaaaactattctcgtgaatatttgttctcactttgatcgattgacaagacttatccttggttttctccgggactccagaattttctccttcaattttgtcagtgctgccaacaatggaacatgacagagacttaatgaaacatctaatgtaaatccaaaacagcataacgtaaaccaacatcaagaagcgttgagctcatccacaagtataatggaaccatgaaaccaagtctatgaaacattcaatgtaactgattggtaggtactatgaagcgcttcaatcaaactggatggaacagtatactcaagacaatcactagcctaagcctttttcatcaacttcttaaatccttcaacctcatcttttgacattaatgtt

SEQ ID NO: 862 - DNA, 160 bp, Glycine max
  Clone ID: PAT_MRT3847_100779C.1
acaaggaaactgcaatattctgttattaaaagcaaactgcaaaaattaaagtaaagtagcaaggaatttattacatttggtctttattacatgcgaccaacaaacagacaaatttcagtggaacacaaacaacatttaacatattctaaaaacaaagtct

SEQ ID NO: 863 - DNA, 292 bp, Glycine max
  Clone ID: PAT_MRT3847_10077C.1
ggcggccgagctggttggtggcggcggtcgtgcggacgcaaacatgcagatctttgtgaagaccctcactggcaaaaccatcacccttgaggtcgagcccagtgacaccattgagaatgtcaaagccaaaattcaagacaaggagggtatcccacctgaccagcagcgtctgatatttgccggcaaacagctggaggatggccgcactctctcagactacaacatccagaaagagtccaccctgcacctggtgttgcgcctgcgaggtggcattattgagccttctctccgc

SEQ ID NO: 864 - DNA, 707 bp, Glycine max
  Clone ID: PAT_MRT3847_100780C.1
tacggctgcgagaagacgacagaaggggactcactataaacattaattagaaaaagaaaacatattacttaaattgctttgatttttgtcttctaatgtgtttgggtttttttattagacaaaaataaataggttaaattataatttttaatttgtaattttattttttatctttaaatctgcaaattttgttcttcaatattctaaattatgcaattctagtccgtccgttgactatcggtggacattttcatgccttttaattaatacttttacaacattatttaaaataattttcttaatttatcaatcctaaactttaaatatctgttttgctgatcgacttatttatgcgccttagtttaagagattattccgtgacgttagactgcatcctatcggatggtactacatgatttgcctacgcaatcatttttatattctcggcccataaatgccaaactgcttttattaaagctgaaaaaattagttacgtacggccattagtgttaatatcaatctgcaacggaaattaatagtaagaagggtcatttgtgcacgtatagggttgtaattagtactaattaatggatgggaccatcgacttaattcctttcatcaatatttcacggtcaagggatgcgtggagatttagtcaaagctcaaatgtccattttcattttccttcatcctacttttcgtgtgat

SEQ ID NO: 865 - DNA, 429 bp, Glycine max
  Clone ID: PAT_MRT3847_100781C.1
gtgcccacgcgtccgcttgaagcaaagctgtgtttgcaatgattggaatttctttgccagatattatgagggacattgcgtataataatgtactaattgcagtggtaaactattgccatggaaagaataatcgattattgattcatactagaacccaaaagttctaaagatcaaaagaatcaattataattaaaaataatcaattaaatatgtttgaaattgttgcaactggttttcaaacttgacttttcctttcatttttcacttgcctataaaaggttaactttcatgtgatagtgagagagagtaatttcaaattttacaaaagaaaaacttcaaaaaaatggaaaaaaaaatattttatcaaaatacaaaaaataaaagagacaaaattaaattttacaaaagagagaaaagaatgaaaatttg

SEQ ID NO: 866 - DNA, 575 bp, Glycine max
  unsure (1)..(575): unsure at all n locations
  Clone ID: PAT_MRT3847_100782C.1
tcgatctgtcgctaggaatgtgccagagtgccgtacaccgcgatgaacgcgctggagcagcgagtgacctgttggggggggggcgttggggcacgctagcagaggtgtgggcaacaagcaaaatgacgcactcaggagagcgccgacagggcaaggggctaaccagtgaggaaggaggcagaaggggatggcgaagagcagggcgggccagcacaccacacaaaagccacaccacagcaaagagccagaagaagctaggggtggggcggtacgcgaaaaacgggtataaacgtaattaagtaaaaagagcagggggaaaagaaggaggcgaaaacgtaataaatgagcgggctaagaacagcagaagcgaaaaaggtgggataggcggcagctagagacgagggagggaaggtaaagagcatagggggggacgatataggcggggtaagctttttagctgcatgccggggatgtgtaggngggcggccctgcccaatacagaaggctaccccagttacacaagcgcatacacataggccagcagaatcgggagacngggcccagccgaagggccc

SEQ ID NO: 867 - DNA, 370 bp, Glycine max
  Clone ID: PAT_MRT3847_100783C.1
agaggggaatgggggattttttacagcattactcactaaatagatttcacttcattacgacctaatcattattattattcaaaaattactcccctttccccgggggggggggggggattattattacccccctttttttttatgggaataaacctttaatttccgaccccacgccatgggggcttaaaccccatcccctttttttaaaggttttaaatttccctttttttttaaatccttgaccatttaatttttacaagggttctctttccatcccattactatacaccctggaaaaggccttattttttctattccctccctcgctctcaattaataaagcttttttttcttcccttttaactccatt

SEQ ID NO: 868 - DNA, 166 bp, Glycine max
  Clone ID: PAT_MRT3847_100784C.1
ttaagcctctgtctattcttaccttgcgcggaggaccgtgtagacagtgataagcaactcgcttgtcctccgtgagaagtcatgtgtcgacgctgccgaagttatccttggcgttttggctccgtctctcactctcgttgaagctgattaagtaccgagagcttgt

SEQ ID NO: 869 - DNA, 1192 bp, Glycine max
  Clone ID: PAT_MRT3847_100785C.1
gcagcaacaccaaaaccaaaaaggcaatatgggcagggctccttgctgcgacaaagcaaacgtgaagaaaggtccatggtcaccagaagaagatgctaagctcaaatcctacatagaaaagcatggcactggtggtaactggattgctttgcctcaaaaaataggccttaagcgttgtggcaagagttgccgccttaggtggctaaactatcttcgccctaatctcaaacatggtggtttctccgtagaagaagacgacattatttgcagcctttacgtcagtattggaagcaggtggtcggtgattgcagctcaattgccaggaagaaccgataatgacataaagaactactggaacacgaggctgaaaaagaagcttctggggaagcaccgaagagagccacgtaatagagggaattacaacagtgttaagcaagaaaatgatgttaatagagggagtggtactactgatggtgattcttcttccttatctttgcttcaggaaaatggtagcactactcatcatcaagaacaacatcaacagcaaccatgttggccacagaatattaataacatgcctgtgctaccactacaagtacctttgccatacaaaaaccaaggtccatgttttaacgaccaagattccctcaaaaaactccttatcaaactcggaggaagattttcaggtgattcttaccatcctacccttgatggcttgaaccttgaattctcatcacatgggcaacaaatttatcaagaacaagtccatgttggctcttctgctgcttgcattagtgccactattaacaacaacaatgaggtacaatttgcacaaactggtcaataccctggagttgataacttggtgcaagggcaaggtggtaatttcactccgtcgtttgaggaaatggtgtcttcttctaattatccagatggtttagagttcttgtataatgagggcatgatcgaccataagataatagacactactactaccacaacctggggtgaaactagcactccaatttatcatcatcatgattcacttgcttccacttaccaaggtcaaggtgtgatacaagaatgtgttttgcaagattttagctaccccagggcacaataacatgatcttgtacatattttgttatttttatcattattaacagctgctactagccatttatcacaaaaa

SEQ ID NO: 870 - DNA, 391 bp, Glycine max
  Clone ID: PAT_MRT3847_100786C.1
ctaggatcatggatcgtgagtactgcttttttttctctgtttcagatcatgcctactaaggcaaattgtacatagcggtctggaaactactccaaaaaagacaggcatacactggacatactcattagttatgattctcccaaatcctagactcctgaacgctaaaagcttatcaatgagatactcgagtacattcttttctcagcactaactgttactcaaactagtgccacagacgcttctgatcagaaccccataaatgaataagcccagacacatgtcaattcaccaaatcccgagtccttacctgcattacagagtattacaaatcaagaaattaatggaattataaaaaaacaccaaatcatccttgaaaaccatgcttgaattg

SEQ ID NO: 871 - DNA, 379 bp, Glycine max
  unsure (1)..(379): unsure at all n locations
  Clone ID: PAT_MRT3847_100787C.1
cctcgtgccgaagctgaattcataagtaatctagaggaatggcagcaccagtcagtaatggtcattctgaagaaggaagaaatgagaagtcattgatggaaaatggggaatacactttcttcgctaggtccatgtataagcggcggaaagtctctgctgttcgtgatttcccagatggatgtggaccatttgctttgaggattgatccagtgttaaacgtaaatattgtgggttgtggttcaactaatggtacaattattgaggataagaatggtgaacatttaggggatgatactgttaaaacttccaactgtgaaaatgatggcagtcattctgaagtaaaagattcacttctcactgaaaanaaaaaaaaaaaaaa

SEQ ID NO: 872 - DNA, 502 bp, Glycine max
  unsure (1)..(502): unsure at all n locations
  Clone ID: PAT_MRT3847_100788C.1
ggtgtagaaggttcatgataattcagatcaactaaaaaagaaaaagtttcatgacaattcttaaaaatcagcatcactatcactatcttacggaataaacagggttggaatgtgagcaatctttggccagtcttcgcctcctgggttctggcaacgctgcttgagcttggggcagcctttaattgaaagaaatgaaatggatttgggaagaccctcctctggtagctgttggaggttggggcagccttcaattgaaagaaatgaaatggatttgggaagaccctcctctggtagctgttggaggttggggcagtagtcaagaatcaatttcttgagagaggagaggtgacagagccccttgtagtccagtttttttagatttggaaaatcacggatgactagacangcaagagagagtggcagcataccttcatcaagaaaagatttcgcatcctgctttattatccgcaaggttttcagagagggattgtttccaaagccc

SEQ ID NO: 873 - DNA, 821 bp, Glycine max
  unsure (1)..(821): unsure at all n locations
  Clone ID: PAT_MRT3847_100789C.1
gaagctcggaatcgggcgaggcagtctctgcacccctccctccttgtttgtatcatatcaggcagctcagaaggcaaagatagatccatgtccaccaccgcaactacaacctctgaagaagttagcagcaatgagtggaaagtcatacacatgagcgagcaagaggaggatctcattcgcaggatgtacaagctagtcggggacaagtggaatttgatagctggtcgcattcccggtcgtaaagcagaagaaatagagagattctggattatgagacacggcgatgctttttctgttaaaagaaacggaagtaaaacccaagactcgtgattttctctggtcatgtatcttttctgggcataattctgctaaatatataaaattgggttaaatatatttttggtgtctataaaatttcttttttttttttggtctctgtgaattattttgtatatttttagtctcttgtttatttttttgttatcaatatcagtttcttaaattttttatacttttttctgccatttttaatctctttgatagactgatatttatgacgaaaaaattaataaatgatttgaaatagtaaaaaaatgaaatttcattagagttaaaaatatatttaaccctataaattctgttctaaatcttacagaattatcgtcaattgtatttcttgtcgttgagatgagaattaatgtacactttcgttaatcggtcatgagtatctcatatagaagctatggaaaagtttgcatgttggtttgtaaaaaagaaaaaggtgtgactagtcggtcaattgangnnnnnnnagnnnnata

SEQ ID NO: 874 - DNA, 240 bp, Glycine max
  Clone ID: PAT_MRT3847_10078C.1
attcatatatttaacgatttactatatcgacaaagacgatcgtgcgaccgggaaagaaaggctctactgtacagggatcccgaacccatactcgacctctgtccatgacgccatgctagcagatgttgtgtctcctgcacagaatgtctctgcccgaacgatctatggaattgatcactcacaaatactgcaggctatctagaaccccaaggtgcgtaccaacaatgagttctcactgga

SEQ ID NO: 875 - DNA, 256 bp, Glycine max
  Clone ID: PAT_MRT3847_100790C.1
tgctcatttgctcattattcatctcttccctctctactacttctcttgctcttattttctgatacacaagagatggaagatgatgaatctcctcagatcaaaggagttgttataatctcccttccacccccagataacccctcttttcgcaaaaccatcactgcttttactttctcttacccttctcctcaaccttctattcaaccccaccaacaccaaagtcaaccaacacaccctaatgctcaacacaacactg

SEQ ID NO: 876 - DNA, 224 bp, Glycine max
  Clone ID: PAT_MRT3847_100791C.1
ctagatcgcgatctataactagccaattctactcttatcttctagccctctgccgcgtggtgagggtgtaacatggcgtgctctaccaactgctgagcttagtgactcaaatgcaacacatgtagcatgttgtgatgtgagggtgtttcatccagtgttcaaggtttaccgttgagccaccgtgttctccgtccccgttttcacccagaaggtgtttgaagaca

SEQ ID NO: 877 - DNA, 676 bp, Glycine max
  Clone ID: PAT_MRT3847_100792C.1
ctgatatgaccatgtttagatttaccagattcatatctattaaacccttgtccatgcttctaaaatctcgaataacagttagatgttaccaggtacagtgtcatatcaatagttaagagattcatgcatttatattttaccaagagaatccagaggctcactattaaccatgaattggcctaaattgtttcccccataagttaagtgcggtaaggttttttcgtcatagcttgttagaggatgtagaaaggaagcaaaacattagatctttccagtttctgaaacaattctttcaatctcttcaaggaggcgctccttttcatctgccaagtcttcattctgcttctgaaggtcctctatctgctttgtttgttcagaatccttcctattcatgaaggacaaattaagtttcagtgatcgaacttccttctcaagggtttcacaccgcctcaagacagcttgcatatcagagggaactgatggtgtcaagtttctttcctttgcctcagccattttccttgagcgctccactcttcgtttttttgtggtgtctcctttctcctctgaaacagctgatgttatagaaccatatctttctaaacttttcctcttccgatcatcttttatattatccattatctgttctctgacacctctgactcgattttgagtattt

SEQ ID NO: 878 - DNA, 460 bp, Glycine max
  Clone ID: PAT_MRT3847_100793C.1
ttcgattgatcaaaagcttattacaacacttatacatgcgtgcaaacagcagagcttgcattgtggcatgaagcgttggatcaagggaggcatcgaaggatcaattgggggagcgcaggtggaaccatacattgaggcctctgtagcagcatgccaagagcaacattagatgctacactcaagccaacaccttggcttatgctacttctgctgctgcttccaatgaggtcaagaggaccaaggaggagtccatgagggaagtcatggacttgagctggtgctgtcccaatacttgaaggatttagtgaggggactattgtaattgcattcatcattgcgctgaacggtgtatgaagatgcaatactacatttagtgccttcttgtcatggtatgcatcactgcgggctttaccttatgcatctatttgagtcataatacaaagctttgtctatgaaaatg

SEQ ID NO: 879 - DNA, 441 bp, Glycine max
  Clone ID: PAT_MRT3847_100794C.1
acgcccacgcgtccgcaaattcaacagttttttcagttttagacgctgaaaattcaacaaagaaaactacacacactgacacaaacaaacaccaagcttgaaccttccctccccatgtttgaattttgctctttcccccaactaacctttagcctccatttccccgaaaaatatccccgcggcgaactaaaccacttcaaatgaccaaaatgcccttcaccttcgtcaaatttccattccacatcctcctcttcctcgtcctctcgctgccctccccggtaatttcgcaggaccagcaaacaaccctcctcggcatcaaacgacaattcggtgacccttccgccctccggtcatggaaatcctcgtcgccgccgtgcgcatggtcgtgaatccgatgctccggcggcttctgaacggagctccacctcgccgggaaaaaca

SEQ ID NO: 880 - DNA, 211 bp, Glycine max
  Clone ID: PAT_MRT3847_100795C.1
cagaattatccgccccaacagaacttcgttcgagcatcccagaattatccaccccaacagaattacggcaggcatcaagaattatcctccccacaaatatggccaggcatcaaaatttccacacacagacttcggcagcatccaattatccaccacagactatgtcaggcacgcaattatcctcccacagacttgacagctcacgattatc

SEQ ID NO: 881 - DNA, 448 bp, Glycine max
  unsure (1)..(448): unsure at all n locations
  Clone ID: PAT_MRT3847_100796C.1
acgcgtacgtangcttggattctttagagcggccgtcctttttttttttttttgtnttgctagcgaagggctttaaacgaatccctgacttttgggaatgggaaaaacaactggctttcttctcctagggcagtcagttctggcagcaagacaatcctgattcaatttcttataatctgacaccagcagtttcttctgggcatgtccctgagactgagatgagtgccttcctaagctagataaaagaagcgttctatcggcctaagctcccagttagggactcctaccaccgtctgatggggccccgtaacgggcttggtttgtatgataggtaagtaaagccgagtattcaagcggttacgtggtgtttgccattagagcactattgtggataagactccgttgctacgcctgctcctccgcttgaacaacgggcatgattgttgat

SEQ ID NO: 882 - DNA, 310 bp, Glycine max
  Clone ID: PAT_MRT3847_100797C.1
actgatttttgctagaagtgtggttaccccatttggctccagcgggtatggaatgggcacgtatatggatttatgaatggccccaacctatggagctgctggtgggtatggtggcactgtcggaaactgtatagaagagtgctttcaacgatggcaactttaacagataccccactcctattggcaatagccgccgccctgggagaagcggttctaaatgaactcaactactcggaagagccccacaactgggggcctggatcatgatgtcaacaatccagtcaatccttacgcttacttgggatctgga

SEQ ID NO: 883 - DNA, 263 bp, Glycine max
  Clone ID: PAT_MRT3847_100798C.1
catggctgtggtgtgtataggttttggtgtcatgattgcacccgtctatattgctgaaatttctcctgccattgctaggggatctcttacctctttccctgagatatttataaattttggaatccttctcggctacatatcaaactatgcattttcgaggcttccatcacatataaatttcaggataatgcttggtgtgggacttatcccttaactggtaattgctattgcactgtttgtcatacctgaatccccaagatggc

SEQ ID NO: 884 - DNA, 373 bp, Glycine max
  Clone ID: PAT_MRT3847_100799C.1
ttcaagacagatgctgctgtacgcttgcttacaagaattaagcgactctctggtcagagtggtcatggtattacagctgatctacttcacccaactagagtatcgaagatatcgggtgatcacataaagagagttactacaaaactttctcatacaatcataacatgtgctaaagataatgaggatgcatttgatgagaatgaacaacatctgctcacaactcttgctcatcatgctaatggatacagatatcagagctaatatataatataactaactagttatatactggtgactcataccccaatacttcatattcagacacagaatcatgacatatgcaaggactctaacaagactactggattgttcg

SEQ ID NO: 885 - DNA, 648 bp, Glycine max
  Clone ID: PAT_MRT3847_10079C.1
acgcctcacgtaatctgcgcaattcggctggagggagtatttcttcttggtagagatcggtcggaaaaaccattacgtacttgttgtatggcatggtgcttgataaatagctaagaacacgggtatgacaacaaaatgcgcttctatgtcttggggatggaccatcgctgtgtacataatgagatggatctgatcgagcctgatttgaacctgaatttatcgaatggatgccaataggctacaaatatgcccatattgtacaggcctatcatatactgtatgtgagctatctggagaagaaactatggtataatgctctggagcttacaaagctaccctaaactctactcagaaacctcacatataacatcataaattgaccggtgcatgcttatttaaaaccttaaaatgaatgagatgtttaacacgctcacactgttatattagacttctatttagacttaagcctaaaataatcggagcgccgaaaggaatgacaaatccatcactgtacaatagcttttatagtatggctcagagaaatgagatcattttccaaaatccttctagttaactcgaaataaacgtgtggaaacatccaatctcaatcaaatacttgttactagacctatatcttgaaagcttatt

SEQ ID NO: 886 - DNA, 417 bp, Glycine max
  unsure (1)..(417): unsure at all n locations
  Clone ID: PAT_MRT3847_1007C.1
ccttctcttggactttcacatatgcaatgangcncaaaangaagttgtgtgtttcttcttcatttntctcagcgcgacaacanccacaaaacagttgataagtgatgccagaaggaaggggtagaaggagaagtaataatggctttgaaaaatgggaggcacaaatcctttcaaagacaaaattggtttctttcacaaagagaattgttccttccactctctatgctctgcttcccattgttctgctttgtacatacttcgaccttctcttcctcactccacattccaccaccaccacctaccacctttctctttctcctncttcacctcctccaccttcatcatctttttctttttctacagaaaagaacaaaacttaccaaaacccatgtgactactctaatggtgattgggtac

SEQ ID NO: 887 - DNA, 277 bp, Glycine max
  Clone ID: PAT_MRT3847_100800C.1
accaaaccaactgtgcattgaaaacttttatcaacaaaatcacccctataattccataccattccaacattcataatcccttacatcactttattttcaaatcacacttaaatatataattcttctaccaacagactacatttctataaataaacttcgtaccccaccgcctatacgctcttcgctctgcaaaaaaatcgccgacggatattgtacccacccttacccttgcatatgcaaacaagctctttctcagattcaaacccatcactcaaca

SEQ ID NO: 888 - DNA, 1237 bp, Glycine max
  Clone ID: PAT_MRT3847_100801C.1
atgaaatctggcgtttagtgctgtctaagatatagccattcgtttttcagttctataaatttaaaggactatcttctttgctctctttctagtttgtgccttcaccatctcatacctgccttcagccaccgctcagttcgtgctcgacactgatgatgatcctcttcaaaacggtggcacatactatatgttgccagttatcagagaaaagggcggctgattcacgcaactaaataagaaatgaagagtactatcttctttgctctctttctagtttgtgccttcaccatctcatacctgccttcagccaccgctcagttcgtgctcgacactgatgatgatcctcttcaaaacggtggcacatactatatgttgccagttatgagaggaaagggcggtggaatagaagtagattcaactggaaaagaaatatgccctctcactgttgtgcaatcacccaatgagctcgataaggggattggactagtctttacatctccattacatgccctttttatcgccgaaggctatcctttgagcattaagtttggttcatttgcagttataacgctgtgtgccggcatgcctactgagtgggctattgtggagagagagggtctacaagctgttaaacttgctgcacgcgatacagtagatggttggtttaatattgagagagtttcccgtgaatacaatgactataagcttgtgttctgtccacagcaagctgaagataacaaatgcgaggatattgggattcagatcgacgatgatggaatcaggcgtttagtgctgtctaagaacaaaccattagtggttcagtttcagaaatttagatcatcaactgcatgaagcgtgaaaaatcacgtgctttcttgttaagagagacaagtgtacgtaagactaaataaatgctttggctaataataaattggttacagactaaataaaataatcaaagcttatgccttcccccaaaggctgaatgcaaaaaaaaaaaaaaaaaacaaaataatatccactttaggaggagaattacttttgccaagtgtacgtaagactaaataaatgctttggcttgtaataaattgaaaaaaaaaaaaaaaaaaaaactcgagactagtctctctcctctctctctctctctctctctctctctctctctctctctctctctctctctctctctctctctctctctctctctctctctctctctctctctctctctcctcgt

SEQ ID NO: 889 - DNA, 280 bp, Glycine max
  Clone ID: PAT_MRT3847_100802C.1
cccacaaacaaccagtattcaggctactttaatgaatttgtcctgcactacacttacagatatgagctctacacgcagcagtccctaattttcatcagcttacttagacccagctagcaccaatactgtatccgtacatgggtccataacccaaagtttgataataactaattcccaacatgggaagaaatctcttgctatgcgtgtaacgattgcatataagatatatggctaggatagactggaggatcgacaactacatcattcttctcgaggttta

SEQ ID NO: 890 - DNA, 556 bp, Glycine max
  Clone ID: PAT_MRT3847_100803C.1
tttacacaagagagaaagatggagaagcaacaacaaccatctaaggaaacaaagccacaaaatgaatcaggtaaagaaagcagcactgaagggcttccaatggaggatagtccctatgtgaaatacaaggacttggaggattataagcgtcagggttatggtgcacaaggtcaccaagaaccaaagccaggtcgtggagctggagccactgaagcacccactctctctggtgctgcagtttcatctgatgcacaagccactgccactgatgtcattaatagcaaaggagtcctttaattcatacttctttgaatagaattccttgctaataagaaattgttttcttaatttgggtcgtttttttttaatatgtgaacatcttagtaatttgtattattacttacacgtttaaagtttacatttagcatattatacattttttctatacaacacgttttggatgttgacatgttgtggtaagattatctcaggataggttgctcttgtatatttgtgatatataccatgaatagaaatgatccctttttgtgttacc

SEQ ID NO: 891 - DNA, 321 bp, Glycine max
  Clone ID: PAT_MRT3847_100804C.1
ggcaaggcaagtgctctcattcagcatgagtggaggcccaagtcttttgtgactatctctgcggaagtagacactaaagccattgaaaagagttccaaggttgggttggctttggttctcaagccttgatgggattgttgtccttagtacttccatttcagatgttgattcaaatatgacgtggacttctttttgtctcacttgagaaatcctgaggatctgttagctttgttttaatgttcggatcctgaggatctggtagctctgatttaatgttccgtaagaataattctgctcggcaattggaaccctgagttttcg

SEQ ID NO: 892 - DNA, 157 bp, Glycine max
  Clone ID: PAT_MRT3847_100805C.1
attcataatactacatgtgttatgtggatattgggtgttttacctgaaaaggtattacattctcaaaaagaaatggtaacctattccttaagatacttttttcaacccatttttttattacgtatcaaaatttcttggattttctcaaaatttgaaa

SEQ ID NO: 893 - DNA, 1151 bp, Glycine max
  Clone ID: PAT_MRT3847_100806C.1
tatgctgaattcagtgagactggaatcaggcgaactgggacaaccatatggggagtcacctttggtactgttaagcggacattcgcacgtttggtcattttattggtttcaatgggctatggtgttgtgagacctacccttggtgggctcacgcgtccggctttgaactgatctagcatctggcacacttcgaacatcttttgaagaaatgggtgatggttttatgagtgttaaagtagtaacgggaattcaaatgatgttttagaagaagacaagagagaataaactaggacgaagctctgaaaggtggttatgcttggaggaaccttctttattgcatctgaagttcttgaattggtagaaaatgttggtgcagtaagtgatctttctggaaaggcaaaactgttattggttcttcctgctgcagtattggatgtgttcttcattctttggattttcacttccctctctgcaactttaactaagcttcagaccaaaaggatgatgataaaattggatatttacaggaagttcactaatgctttggcagcagctgtgctcgtatctgtgggctggatatgttatgagctttatttcaaatcaaatgatgtatacaacgagcagtggcagaatgcatggatcatcccagccttttggcaagttttgtcttactctctcctgtgtgttatctgcattctttgggcaccatctcaaagtgcaacacgatatgcttaccgtgatgatggcagtgatgagtttgatagggatgagactactttaacactcataaaaccatcacctatttcttcaaaagatgttcgaagtgtgccagatgctagaccagtgcaaagcagtaacgggaattcaaatgatgatttagaagaagacaagagagaataataaacttaggatgtagctctgattctatgcttccattgtatccctcctgaaaattagctccatgactattttccctttattcttttatttccttcattagtctttactctcacttgatactttgtcaccaaatagttccttacgagattggattacttgatagaattctgtgtattcctgtgatgccagtgcacaagaatataatttagtcacttttttttacgtcaaaggaacttttcttcagttatgcc

SEQ ID NO: 894 - DNA, 523 bp, Glycine max
  Clone ID: PAT_MRT3847_100807C.1
caatttacgaataaaagtataaaaacaaaattaaaattcataaaaaaacccaaaaataactcaaaatttatcctttaggaatctctacacatattcattctaactccaaacgtgagtaactcattcattacttcgatgtagtcgttcaagcatgtaatggtggcatttccggtactctctagagctccttttcttccgattactttgttaagaaatttgatgacttaatttttattcctatttttctagtttattttattaattataaaacattttctctctctattaaataaataaaaaataaacctttctcttattttctaaaactttttttattttctataatactcttatttgttatttattccaaacctctatttttatttaaataaaaaataatttattttaattaaaataccttttaattcattttttcttacaaaagaatttcttttaattaattttcagtgaatcaaacaacttacattttcatacttacaggactgtgtaatgacggctctaa

SEQ ID NO: 895 - DNA, 344 bp, Glycine max
  Clone ID: PAT_MRT3847_100808C.1
tgaacctagctcagtggccggccttttttttttttttttttttttttttatttattctttggcttgaacgtggcaatcggcatttcatctgaaggaaggggctaaatggctcacgggcccagcagctaatgggaagtggctgatgaggcccatggcatgcattgcttgacacggctgcttcagttgcgtgccaattgagcctgcggatctgggactattggagcacaagttcttaagatgtgtggcaacgaagtggacgggcaatatccctttctgctggagctttgacgccgtggataatcccgactccttgatggggacccaccgttggtaatttaagatca

SEQ ID NO: 896 - DNA, 637 bp, Glycine max
  unsure (1)..(637): unsure at all n locations
  Clone ID: PAT_MRT3847_100809C.1
actattattggagacaaccatgatataactagaataggaagatgagcaacatagtaacggcacaatagagtttccatataaaaatgagcttaaaaactgatcaaatagagcttgctttatttccttcccttgatcaaaacagagtttgaaatacacttgccaaggcactttgcagagatggtttttggaatagaacaaattcatttaaaacttaatcagaatcattgcaggaatgtcataaaattgtaccacacgtacgatactaggttatcaaaagaacaagttattgaggcaacattacaggagtaattaggggcttatttaagaagaaggcttctaaattgcctcccataagttcacacaaattcatcatagattccacagtaaaagcagcagaatgtggagataaaaccacattattcattgcaaggagttctttgggaacatgaggctcgttctcaaacacatccaaaccagcacctcnnatttcaccttccatcnnncacttgaccaattccttttcatcaataagaccccctcttccaacattgannntaaatccttgttttcccaatgccaacatgacttccctgttaattatgtgctttgtttgctcatttagtgcgcaacataacac

SEQ ID NO: 897 - DNA, 434 bp, Glycine max
  Clone ID: PAT_MRT3847_10080C.1
cccacgcgtccgggcatgcgagagcttattcatcctcatcaccaccgttgcatctcgggtgcaactaattaacatgaagaacaatatcatgattaattagaacagaaaaaactcgagtcaaatgacccacgcagggcattatggggacagaatacgcaattgctgcagagcgggcagacgacaaacacagcatgtatcttaagtctatagaagcatataatgctaatcatttatatgaatctaagcctacgaaaacaatatatgaccctgctgccacttgcgtacacagcaatgctctacatggtggctgcaggcgcaaaatcaatactgagagagtgtatacccaagccaatactgttaatgagggtgatgactcgacggaatatccatttggtcgacactaccaagcttaaagcaaacatggaagcatagca

SEQ ID NO: 898 - DNA, 129 bp, Glycine max
  Clone ID: PAT_MRT3847_100810C.1
ggctcgagcttaaatccattcttctctgatctagtgtctaacagtctgagatgattttcttccaggaacaggcccctttgtaaaagcagtgtacagctttactcaccgaatccgacgcagatgatccct

SEQ ID NO: 899 - DNA, 363 bp, Glycine max
  Clone ID: PAT_MRT3847_100811C.1
ggacaaggccaattaccccctatccatggggaactaaagatagccaacaaaacaagagtttttcaaaaagggcccccccaaaattcccccccccggaattgggattttttttttttgaaacgattacagacagacattgggcaccccccttgggtgggggatctataacaggagcccaacatatttgaacataaaaagacggggggggaaaaaaaaaaattgggggcaatcaaactaaaatttacaggcctttttttttaaagcctaaaatcttaaaacaaggcaatgaagcaagaggccaacccaattggatttaaaggaaaaaaaaatcaaaccaccgggaaaaagctctggaaacttttt

SEQ ID NO: 900 - DNA, 445 bp, Glycine max
  Clone ID: PAT_MRT3847_100812C.1
tgttgtctttgttgctgcagtagttttggtagcatggccatgccatggagcaagctaccaaagggtccctctccaaatgaaaactggctatggtgaccgttcttcacaggaaaaatgcacaaaatgtaagcttgctgtttatttacacaacatccgagcctttaaaaccattcctgaagattgcgttgaaccaacaaacgactacattaatggcgaacaatttaaatcacactctcaaacagttaaccaactagctttcttttatggtagagaacgcgaagtccatcaccacgacatatttatatgcggaataaatgacaccgcactctctaatatcccatactatgaaaaacatgcatatgatgtggcagaatttaatgaaaccttctctgatgaatggattatcaatgtggacgctccggcattgccaaaaactctgtccaat

SEQ ID NO: 901 - DNA, 563 bp, Glycine max
  Clone ID: PAT_MRT3847_100813C.1
tctcacatcatgaatactctaatgagttgagagggttttgttgttcacctgtaatgtaacaagtaagctccagcactgtcttttattccctttattctctctctctctttccttcctttgatccatggaagcctgtgatctcttgtgatagttggtgtgttgggtagggaagggtttgaaagtgtcgtgtcttctaaggagctttcactgcacgacggtggccgaatcttcttgcttctttctctttccaagatatcctttgattcaactttggatcttcacctctgatttcctttcatttttcggtttatacacacttggggtttcccctcacccaactgtgtgcaacaaccacaaagtacgaaccttttcttttttaatttctatttcttggaaatataaaaggtctttttatttatttctgttttagccctagaggagtaaaatctgttgtaggaaaggaaacgcctgataaattagggtacgacagaaaatagttagaaggtgtatacaaagatttgggattagataggaatcatttgtctggactttatggagaaaac

SEQ ID NO: 902 - DNA, 199 bp, Glycine max
  unsure (1)..(199): unsure at all n locations
  Clone ID: PAT_MRT3847_100814C.1
gttcngaaatanacgcngcacncgtatctaagtcggaantcggcncgaaggtctcaggatcctanntgcggggaattntgngaatttnnantanaatantnngtncnatcnntttaaagnaaanagcanannngnnaganagncgganancacgnccctgananngnangagcnggcnnngnagngnagcnataccgnc

SEQ ID NO: 903 - DNA, 324 bp, Glycine max
  unsure (1)..(324): unsure at all n locations
  Clone ID: PAT_MRT3847_100815C.1
atcctnnncaataantnaagactccctaaaaaagtattttcaattttctagtgaaaactgcatacaaaagttattgtcaacttcttacacaaacaaaagaaatgtcaattattgattgaaaatgctcactctttacaattgaatttaaatattaaaactctattcaggctcactccacacgtttcgcaacccttttgttcttagaactttctctccccaacatttcataacaatggccaatgccatttattctgcaaaacaattagacttttatctttttcaaaccacgtacataaaaaaactttaaatacaacctcaacataa

SEQ ID NO: 904 - DNA, 397 bp, Glycine max
  Clone ID: PAT_MRT3847_100816C.1
ctttctctctctaaaacacacggcaagcagcagcagtaacaacagcaacagtgcatttgtttcactgagattaaagacgatgctgcttctgcactgagaaaaccctagacacttaatagtggatgcgaattcagaaaccccaagtggaaagttcgagccttttcgttccttctcagttcgttgatcagttcccagattctgttactgttcaatttcgcaattttcaactctcggtgattgcttgaagaccgtgatatcgaaaaagatggtgcctccggggccacccactcccattggtggtgcccagtctgtttcgccttttcttttaagatcgaattcgggaatgctaggagctcaaggaggtcccatgccaccacagtcgtctttcccttcactc

SEQ ID NO: 905 - DNA, 601 bp, Glycine max
  Clone ID: PAT_MRT3847_100817C.1
gacttacatagaggcatagagaaaaatttatagagagtttcatcgaataacactggatcggaactgagctttcatatataaatatcacggcaatgtcaaattatgatcttcctccaccggctactccttcggaaccaacggtcccccaatggacaccacctttgccaacaacatatccaccaccaacgtcttatttttcatcaacatttgatgattcatcttcatcttcttccacatccacctttggcatcatcatcggagtcttggttggggtctttggacttattttgttgtacggcatttggcacaagtatcttaagaagagatgctcaaagtaattaatcatcttctagatatatatgttgagtattaattatttcatttcaacaacataaaagtttcgtttctttggttgtgtgtaggcgtgaaaattgatgttcacgtaattaatgcttgttcctgttgagtcatgaagagactgtttttcaattaatatatatatacatttgtgattcgcaattggtgaaaataaaaaaaaaaaaaaaaaaaactcggactagttctctctctctctctctcctcgtgccgaattcgcacgagg

SEQ ID NO: 906 - DNA, 590 bp, Glycine max
  Clone ID: PAT_MRT3847_100818C.1
tttgggtttttttttttttttttttttttttcctctcagttcatgtttctctctcctttcatcaattttatttttctcttattttctctctttgttctcttttcactctcatttttatttgatcctcacaaacctcacttggagacaaaggtttaagggtaaccttttgccctttatgtacaaatgaaaatttgtttgtgacatcattggggacaacatccctatcgtactaccaagacattccaagtaagagatgactagctccatagggactacatgaaatagtatttcatcaacatattttccaatggaaaagcatatcaaaacttgtctatctacagctagctcctcattctcactcaaccattgtagtttgtaaggcttagggtgagggaaagtttccaaagcaagtttttcgatcaatctttggctagctacattagtacaactaacctcatcaataatcaaagaacatattttcctcatgaccatgcacctaccatgaaaaatgttctccctttgagtttcatccctatccttacacacactccccattaacctcctaaccatcaaaagataactttcaaggg

SEQ ID NO: 907 - DNA, 368 bp, Glycine max
  Clone ID: PAT_MRT3847_100819C.1
aactaatcatgttagatatgacttttagatatttgctatatatatgctaattagtaatttgtgattggacgatatcataaaaattccttgacggtcaatgcataaattatttactctttttgtaattagaagtgaaaactgaaaacatataaaacgttcaaatgaacagctgaacgaaggggtgtggatcctgaaattaattgaatgtgaaaagttgtatatgaacatgttgtctatgtggcttatatgctactgctagtattgtgactgacaaaagcacaatcttctaactaaccacatctctggtataataacgaggcttaaatattttttttttttcatgtaatttagaatttttttatttttat

SEQ ID NO: 908 - DNA, 428 bp, Glycine max
  unsure (1)..(428): unsure at all n locations
  Clone ID: PAT_MRT3847_10081C.1
ctcnatgacttgcttacaaccactcactggtggggatgtttgaggacgcttgcacatgctgccaacaactcctgcaaagttttgtgatgaatgcggggctccatatctgagggaaacatccaagttctgctccgagtgcggttcgaagagattaggaacatagcaggtttagacaagttttactagtccattcccattataacatttgtcctcaacatttttttatcacaggtgtactcaggttttttatattattagtttttatagtatttttttatgttcttatttaccctaataaatagaaaatagtatagttttcacttgaaagttgtggtctggtaaatagctgtagatatatctatcgggtttgaacttgtgggagctttatgaaccggaatgcagaacttaagaagacgtgaaattgacag

SEQ ID NO: 909 - DNA, 240 bp, Glycine max
  Clone ID: PAT_MRT3847_100820C.1
gtgagggtgttcctcgggttctggcatgctggggatgtaatctactcggtgtacagtccaacaagattgtcgctgaagggtaatcccagaggactggagtggacatgaatggtgctaatgacggtgtcttattgatcattgaaaatcccgtcacgggtaatggagatatctttaatgtgggataccctaacgatgaggttacagattggcagcttgctgaaatgatgactcaggtttatt

SEQ ID NO: 910 - DNA, 406 bp, Glycine max
  Clone ID: PAT_MRT3847_100821C.1
aaaggacacacctgcttttgcgcttgatgttcaaggatggcaattttgaagaaagatgattggagagttgaatgtggaaacccttctggatttccgttcacagtcttttgcaatagcatttttaatgagatgctcattagatatagctatgaaaaatatctgcgcctggctaaagcttccaagtatgtttttacaatccttcaaaaattttgtttctttgtgtgtgtatggcgatgattactttaattagtgttcatgaatattgtcaagccttactttagtggttctaaaatgaaaagcattcttgctggtcattatatcaccattactgatggttttgacataactagggcatacttgcaattagaaagttagcgattgtgattttttacgagaactttaagca

SEQ ID NO: 911 - DNA, 586 bp, Glycine max
  Clone ID: PAT_MRT3847_100822C.1
tgcgagaagacgacagaagggcatcatgaggttgttgcagatttggtgcagacaagctttcttttttctctgcttctggtacaagaagtgataaacttttctctttggatcctatgtgggtacacaattgaagttaaattaaactgaagatgaaatgtgtggaaccgaccattgtagccttttcaatttaccccaagcttcaattcctcaatgtacaaaatatccacagaatagcagccagtgaaatgtcagaaggatcatttgtagcatatcaaaattcggtcaatttgtcgtaatcggttacctgaaatttggcacaggtcttttgagtacagtatttcttttcatttcatgttttcttggtgtcgggtgatttatgtcccatagttcatccaattaatttattttgtttcattttttttataactcaaaaagggtttttagtagattgtatgaatctttactaaatcatttattagagatagaggcgtaaaagctggtatcttagatttgaaaaaaaaaaaaaaaaaaaaaaaaaaaaaaaaaattaattggaaccggataaaaaaaaaaaaaaaaaaaatag

SEQ ID NO: 912 - DNA, 461 bp, Glycine max
  Clone ID: PAT_MRT3847_100823C.1
ctcgagccgaatcggctcgagcaaaagttatgaagcaacttagtcgcctttttccaaacaaagtgaccatacagttgcctcaggacgaggctttactctctgactggaagcagcagttagattgtgacattgaaactatgaaagctcagtccaatgttgtcagcattcgcttagttcttggcagaattggattggattgccctgaccttgagactctctgcatcaaagaccacaccctaacgactgagagtgtggagaagatcattggatgggctataagttaccattttatgcattcatctgaagcttcaatcagagattctaagcttgtaatatctgcagaaagcattaagtatggacataatattctacagggcattcaaaatgagaacaagaacatgaaaaaatcacttaaggatgtggttactgagaatgaattggagaaaaaactacttactgat

SEQ ID NO: 913 - DNA, 883 bp, Glycine max
  Clone ID: PAT_MRT3847_100824C.1
acccctaaataatcaaggaaaataaatatctcagttagcaatcaatcacattggtagtttccatctcttccactagctagctatttcgctttaacaattaaaggacaactacaactacaactgataggaaaatttgggctaagggaactataaaagggtgggaaatatcatcaaagtcaaggccattttgttgtcacactgaagcctcaatccgaggctcaaatgaaagggcagacataaagtctatgacttctccatttatgcaacattttggaaattcaacccacttgttgggctccaaatcacacacaacataagtgcatagctcaggggagttcaagcatatgaagatttggttaccagcaccaacacagttaatatctgccttcttcccataccactcatgagaatttgctgcaggcattgctgcaatctgatgccaccctctactagcttcatcatatttccacaccctaagagttgcaatttctaagaattctgataacaaaacaaccagcatctccccattgcattccacaacatcaatggaatactcactaaaaacaggcaacaacctggggtactcaaagaagcacttgcatgtcaaattgcaagctactacattccctgaggagctaagaaaatagacaatctcttgaccatctttgttagtaataacagatgaaaattgcttagaggggcttctctgcatgttgctcgccacaacaaatccagccttgctgaggaagtacacaacattgtcatcagtggaatcatattcaatggaattgtcttcagtctttctcctcaatgctgtctcaccctcccaacagttagaacctgaattatgactttaaacaagagatttggaagttcaccaaag

SEQ ID NO: 914 - DNA, 264 bp, Glycine max
  Clone ID: PAT_MRT3847_100825C.1
aggttaacgccggacgcccggggcccgaattcccagttcgatttacgcctcaggctttcgatttttcaacaacgcaatcgctgggagggccaccgtcaacacgaggatggcgccatattggcacacgtgctactaacaaacagttgccgtcctgaggatacttggagcatgaataagaacaagatctgaaccacattcatgggagtgagccgtccgaataaaggggccgggctctaacaatgttaaccatacgtgggaagaaag

SEQ ID NO: 915 - DNA, 1355 bp, Glycine max
  Clone ID: PAT_MRT3847_100826C.1
attcacaatccctcttcaggtttcgttattttttggattcttcgcctgattttgtgtcatataaatcgtgttactaccgtgaagatatgacagaggatatgaaaattgatcatattgtggaagttcctgataccccagatagaacaactgtaaggcacgattatcagaaatatttaggtaatcctgataagagggggagagcttttaatgctgctgatgaaaataataaccacagtaactatatatcattgtccccgtcagaggaatcttattcttctcaaaatgctcccatctttaggagagcccaaactgatggagctgaaaagatggagaaagggaaaagtataagctccaaggttccttctaaatcatctcaccgtggtatttctattttagatttgactgaagagaatgaacaaatccgacatccgaaaccagctttctcacatcgtggatcaagagataatgcaactgaagacaagaaagcactaaaagcaactaatggaaggtcttcgttacctgtcatttctgattcttctaatacatctagaaatgccttcattggaaagtataaactagatattaaaacacttccaggtcctaatatatctgtggaccatggcaagggtatttctctgtctaatgattctcaattacaaaatgaaaagcaagtatctttgcctcctcgtgtttgtacctctccacgaggtagagggcacaagagattggtacgaaatgggtgcatttcacctcataatattgcaacaatggaaaaacaattagcagaacagagcaaccaccaaactaaagatgctgaacagagtcatactggtcattcggtttctagcaatacagtgtcaccggttagtgttgatgacttagttgctgaagagagaggcgatggtagagggaaaggaaaggaaatacttgttcatccttcatctcataatagactgacttttcgcactgctgccagccctgtgaccaattatgaagagatcaatggtcccagtaatgctataagaaatccacttcaatactctgggggccaaggtggttggagaactacacataatgagaggaatgctaatcagccctctaatgatgtaaatgggcatcattcaaggagaagtgatgatattggaagatttaattatagacagaatacaaacagaatggacagaagaaacactgggagtggtcaaagcagcaagcatgtacatgtttctcaatcagatcatacagctcaaccaacttctgtgttcattccatatgtggaccagtcatctagagcccatcctactgctgacattctgaccaaaagacagagctccgggatgagtttgatgaacccc

SEQ ID NO: 916 - DNA, 617 bp, Glycine max
  Clone ID: PAT_MRT3847_100827C.1
ctaggcagaatttcatgcagcactcgttctgcagtacccatcttggtatcaagtcacagagttggggaatttggtgggtggcactaacttggagtgtatggaaccatagaaacaaaatcatattttcaaacgatagccccaacaccagtaagatactagatgatgccattttcttttgctggagctgattgaggaacctggaaaaaggattcgacaatccttttcatcaatggtcaagccatatcagagaagggttttgtaattagtggaaaatagctccacagatagggatcaccaatatatacttagagttttggttctttaatccatcatgattagttttgtattagggaaccaaacctccacatgggagacttcattggtgatagtaaaaatcacagtacgacttgtactgacttttatctaatatataatattatttttgcggataaaaaaaaatgtagttaatatcattgcctaaagcttacatgtcacaatatatacttgaaagaaacggagaagataataccatgacagctattgattttaaaaaaattcaattgataatgtaatacaaaaaaatcggacgcgtgggtcgacgcgggaattccggaccg

SEQ ID NO: 917 - DNA, 138 bp, Glycine max
  Clone ID: PAT_MRT3847_100828C.1
gctagatccggaagaaacatctaagcacactgccaacaaaatgctaagaaccgtctactcgccgtgttgctagcatttttctatacgctccgcgcccctgatgagcaacactaaagtcgacgctcaactcagaggtgg

SEQ ID NO: 918 - DNA, 451 bp, Glycine max
  Clone ID: PAT_MRT3847_100829C.1
ggacgatgtcgtttgagaactgtctgttgtttcattataatacctttgaattattgtccaacagaaatagaacctatctcttgaaaacaccttccaaattccttatttcctttatgaacattggtaattattcttattccgtatttttatatatttaaattgattcttgaatattaattccaatttgcatagtttgaatattgtaagaaaagaccttttgagacatgattagtatgtaatttaaccaataaccattactttttatttgatatttttgtgataaataattattttgttatagtttactgcaaaagatgcggtgcattaccagctataagtcttgaagtataatgaccaaccctgtacatattatggtaataatgttatatactggtatgctggatttgatccctttgaaatgtctgcctattttggacctttctttgatttg

SEQ ID NO: 919 - DNA, 345 bp, Glycine max
  Clone ID: PAT_MRT3847_10082C.1
cagaaaactgttgactctgcattgataaaagccatcgggagtgttccagatttgaagacatatctgggtgctaggttttctttaaaggctggcgtgaaacctcatgagctagttttctagaggaaagaatggtgtttttcttgtttgcatatcctgttatttttattgattttggtcctaatagtttcacttttaaaaaaaaaaaaaaaaaaaaaaaaaaaaaaaaaaaaaaaggaaatacaataaaaaaaaagcgccgcttatttaaaagaacaggcgttccctttcgcgggggtgcgatttaaaagaccttcattggagtcccctacttttaattaagtggcc

SEQ ID NO: 920 - DNA, 415 bp, Glycine max
  Clone ID: PAT_MRT3847_100830C.1
ggctcgagacttgttccttttgatggttagaagtgctacaatacaaacaatggcgggtactcaggaagatgtgaagctcttgggtattgtgggaagcccatctgtgtgcatggtccatattgtccttaatttgatagggagttgtattcaaatttctgtaagataatttgggcaacaagagtgatttgcttctcaaatacaaccctgttcacaagaaggctccagtgtctgttcacaatgagaagcccatagcatagtctcttgtgattgccgaatacattgatgagacattggataacaacccctttttaccttttgatccttaccaaagagccttggttcgtttctggtccatattcattgatgataagattgtgggtgttgtttggtaaatctgtttttatggttgatgaga

SEQ ID NO: 921 - DNA, 459 bp, Glycine max
  Clone ID: PAT_MRT3847_100831C.1
ggaacgctaatcatccactgtcactgaacaatttaccattaacacgaacacgaacatttcaagggaggacatagtaatggacatggctctgcattcatacttgtacccaccatctttgtcttgttcctcttctactactggaacaagacggcccaattcccaggttgcagatagttcgaactgtaagaactagtacttggtgccttgtgcactgaaagcatattatcactctgaattggagaataaaaagcatctacttactacctctgtgcaatacacgcataagcgcctcttaacaactgctgaacaactctcttgtatcgtagaagctctcgtcagtctccaaggatgcaacattgactcttaccctatcaatctctacaacttggatcgaacatggcgcctacagttcactttttgctctgatgttctcattcttctgcaagctgatgctactct

SEQ ID NO: 922 - DNA, 712 bp, Glycine max
  Clone ID: PAT_MRT3847_100832C.1
ctttctcgtccggcgaaattgatagtagggtttccaggaaaataaacctgaagtgtcaagggacgaaatcctcttatctgggattttagatgagagtgcgattgaatccaacaactctaagactgacattcagaaaatttcctatcatttttctaaaaaagtgaaaatcccaagaaacagttgaatgagttaaagaataaatctgaataacaggagcattgtgcaatagagatgataaagtcgaggaaaagccatttagatgtcaaagcaatgcttttagagaccaaattaccaagacccaaacctcctccctttttgggtctatagcaaacatcccaactaactgctttgtaaccatgtagaagctgctagattcctagatttgtttgctgcatgtctaagccataatacagtgttttctggtttgctcggcataatcactaaaacagatcgatcatcaactctgggatatcttccctccattgctgagttgaaatctggagctaatttcttcaattatggcccccttcttataaattctgctttatctgaagtccctaagtgcaggcttattgaggaaaaaagtatagatgaacctgtgaaaactgctcaaaacaactatgagcttcctcgcatgcccccttggtttagttatgttggtagtattaaattataccagcctcttgcagggattctccgatttgtgggttta

SEQ ID NO: 923 - DNA, 106 bp, Glycine max
  Clone ID: PAT_MRT3847_100833C.1
cactgccgtgtgtggctctctctctctgaacccttagtgagacacacacagctagccattggctcctggtatcttgggattaggtttgctgacacattgtgtgtga

SEQ ID NO: 924 - DNA, 255 bp, Glycine max
  Clone ID: PAT_MRT3847_100834C.1
cctgtttttttttttttttttcttttattattttttttttttgttgttgcccttctctcttgggggtctactgggtcttgacccgcccccttcagggttcttggcctatgttcctggggccagtcttttttttatatcccgcccacgaaaatgggtgggggggcggctccggcttcctggggggtgagcccctttgcggggctcaaaaatgtcctcccccttgggcgctggacagacccctccgtgagcccggga

SEQ ID NO: 925 - DNA, 923 bp, Glycine max
  unsure (1)..(923): unsure at all n locations
  Clone ID: PAT_MRT3847_100835C.1
ccacgcgtccggagattggctacgtgtaggtgtttggagtggggtccacaatccaccatctccatccattccatccgagaaaccatagacacagtagaaaaggccagatccaaacccaacgtaacctcgcttcgtgcctatgctccaccctcaccctcaccctttcctcctctccatctttacccattttattttataatattatatacatcacattattttctcttcttttctttcctttttaccattttcagttcacagggttaggtcttgctcccttgtctggtctggtgtgcaattcccataccaataacaatacacccattttaccattcaatatacctatagtcatcctctccttcgttctgaaaatcgtagatttttgttttagggtttctcttatataatcttttcgtaacacaaaaaaaaatcacataaatcttcctttatatttattactatttcgttttttctttggattaattaactaggcttgagctatccgaataataataataatagtttcggagaatggaaaagaaaaaggtagcagttcccctcgtgtgccacggacactctcgccccgtggttgatctcttctacagtcccgttacgcccgatgggtttttcctcatcagtgccagcaaggattctagtcctatgctcagaaatggagagactggagattggattggaacatttgaagggcacaaaggtgctgtgtggagttgctgcttggataccagtgccttacgtgctgcaactgcttctgctgatttctcaacgaaagtttgggatgctttgactggagatgaattgcactcttttgagcataagcacattgctcgagcatgtgctttttctgaagatactcaccttttacttactgggggaggttgagaaattctncgaatctatgatat

SEQ ID NO: 926 - DNA, 473 bp, Glycine max
  Clone ID: PAT_MRT3847_100836C.1
cccacgcgtccgcttaccagttccatacataataaggttagacagactgcgagctctatctagattatataggtggaggcccatcctataacacccatgaacatctatgggctacatgttactggtgttgcagtacgacctaaggagcacacctatgtaaaaaagctagctgggagtttaccttgtgaaaatgattctgcaacctatggtccgctaggaccaatgaggtgaccagccaataactgatcaagggagcaatgaaccattgatcctacagttgtcaaacactgctcacaggactatcatggtgagctagccggggatcatatgaacaaccactgatgacgtgcagaagaactctgtcttctgctgactggactgagactcaggacagaagattgaacactagacccgactgtttgctcgacccatgcgtcaaatatgatgaatgatgcatgtgatgctagtgaaga

SEQ ID NO: 927 - DNA, 354 bp, Glycine max
  Clone ID: PAT_MRT3847_100837C.1
gcgcttacactaatgctacgtttaaggattacgccaaacagggcgtatcctttgctagttacaacgtatctttctctcctgggagagcatccaaaactgttagtggcagtttggtaaaaaggtgggttgaaccgggtaagttctttcgggagagcatgcttaaggatgggactcttatgcccatgcccgatataagagataaaatgcccaaaaggtcgattttgccccgctccattctgaccaaattgcccttctcgtcttccaaggttcacgagttgaagcgcctcttcaaggtttctgataactcctccatggagaagatgataatggactctttgggggagtgcgagaggg

SEQ ID NO: 928 - DNA, 257 bp, Glycine max
  Clone ID: PAT_MRT3847_100838C.1
cataactgtttctttcctcacaagttccttcgttatcgtcatatctttcatcgctgttgttctacgtgtcaccttctttcttatagctattgttcatgctttactaccacaaggtaatgttccatttgtgttttccaaggattacaaccttcttccagccattcttagtacattttttatatttttctatttgataacccccttccaattttctctattatactacatattactttttttcttaaaaatatttattc

SEQ ID NO: 929 - DNA, 283 bp, Glycine max
  unsure (1)..(283): unsure at all n locations
  Clone ID: PAT_MRT3847_100839C.1
tctactcgtccatctaatagtaaaaccaccttatctatcacacatacgaacactcattcaaagtctgttttcaatgcaatgagggttgaaccacatcaacacaacctcatnttcattcctaatgattctttgctttcacattaaaccaatttattataacagatcactcctttttttatctaaaaccatccactacatctactaaaaattgactatttattatgcaacctcacccctatatctaatcattttaatgttgatttcatttaaaacttcaattctt

SEQ ID NO: 930 - DNA, 513 bp, Glycine max
  Clone ID: PAT_MRT3847_10083C.1
ctgggttgctttttgtccatctgggttttggacatcacattctctgccctctctttttctttgtgatagaacaaacaagaccaataagagaacagggagaggaaaaaaaaaagaataagctattctttttttttttatgggtttttgtttataaatattgttaaatcaatcttttttttgttcaattttgatcttttatataatagttcctctcttgattgcttgatcctttagactatcatcaccgtctcattcatcgtggcttcgtggggtgtgataaagttgctaaattttcgctgattcttccaaccctactttcaaaaacggttcctttctcttgcaccctctgtctccatccatatagaaacaagagagtttccgtttctgttcatttagccatttttgcatacccttttttcttcttcattcttgtgtttctttgtttgtgagggaaagttttttttttttttttgttgctattgcaatggagaaaaactgggttttgagatggat

SEQ ID NO: 931 - DNA, 409 bp, Glycine max
  Clone ID: PAT_MRT3847_100840C.1
gtcaatctccatataaataacactggggccttagcattggaaggtgagctatgtttgaagtgtgctcggcttatcaattgtagctttgtcattcacatatgttgacgttcccatcagagttaatcctaggagggaagagactcgcaggtcattaactgataaattcaagaaaaacgttgacattctagagacacagagtcttattgtttgcggaaagatcactactacatgaattatatttcatgacacatgattgaagatggttgtctaaaaccgttgtgatgaaaaatgcagtgacattttgattaatagatataactgtttaaaaaacacttatttttgacacatccgatcaaagatgattttcataagagctgtcatgatttacgcttgtcatgatttttgtcac

SEQ ID NO: 932 - DNA, 1062 bp, Glycine max
  Clone ID: PAT_MRT3847_100841C.1
gtttttatgcagtcagaagcactcagtgctctaaaagctgctgagggaatgatgagagaaagtgatccttacatcgtccttcatctttgtctagaatatgctgaccagaggaagttaagcattgctcttgatcatgcaaagaaactgattaagcttgaggatggatctagtgttagtggatatattctattagcacggattttatcagctcaacaaaagtttgtagatgcagaacttgttatagatgctgctctagatcaaagtggcaaatgggatcaaggagaattgttgagaactaaagctaaactacggattgcacaaggaaaattaaagaatgcagtggagacatatacttttcttcttgctgttcttcaggttcaaaataaaagtttaggcacagcaagtaaggttgtgaagaataagggaaaccgtgacagaagactggaaatggaaatatggcttgatttagccaatgtgtacacggccttatcacagtggcaggatgctgaagtttgtctcgcaaaatctgaggctattaatccctattctgcttatagatggcacacaaaaggtttgctttctgaggccagaggttttcatcaagaagctttgaaatcatttaggaaagcattagatattgagccaaaccatgtaccaagtttgatatccacagcctgtgagtcagccaacttggtggtcaatcatcttcaattgttagaagccttctcattgacgcattacgccttgacagaacaaacccttttgcttggtacaatcttgggatgctctacaaagctgatttggggacatcaccaatggaagctgttgaatgctttgaagcagcagctttttttgaagaattttctcccattgaaccctttagataaccctttccgctttattttgttagcatatatcatagattcatagtaagttacaagtctgattgtaaagttcagcttcttttaacttctttttttataggttcaatgcaataggagaaagaacccagataaatgttttttttatgtgccataatgtaattaataatttattttcccc

SEQ ID NO: 933 - DNA, 937 bp, Glycine max
  unsure (1)..(937): unsure at all n locations
  Clone ID: PAT_MRT3847_100842C.1
ctaatgcagcgcagggccctcccgctaggcacctacttccacaccgcgttctgggcgctaggcattttctgcttcaccgccttcggttgcgtagcttccaagggttcaccgtcgcggcgcccaagggccaccgtctctggtgcagtgccacgtcagcaccggaggaagcagcttccaacgcggaggtggatgaccccgagtggaggaagaaagaagagaagatcgtgagggacgttgagccaatcgtttcgttaaccatgcaaattctctactcatcaaggtacatgaatggggagatactgactatggaggatgaaagagccgtggtagagaacattctcatttaccatccggattatgaagataagataggaagtgggctgaactccattatggttgatcaacatcccctatatctattcccaagatgcctttttgttgtaagaactgatggtagctggatcgacttctcctatcgggtgtgcattgaggaatacattaaaaataagtaccaagtaagtgcagaaaggtttgttaagagaaggtttcttagagatcttattaaacgttggggtatttgatatgtatgtattggaacttacaatttgtgtagttaatggtagtagatgacaattgaccgggatgcctagcttgtttgtcaagggaacatagaaaatgattgaagttaacttgcagtttgttaactagcggaacactttgtgttgtggagaaattcatgattaggtaacttgcagccagtccgagtcctgcaacttttgttgctcaaaaatcgatccttctcttcttagtgtgtgtgtgtgtatgtaataaggttattttgaccgtagttatcagaatcttagagttcacaatnnnatacaatttggctaccttcaattcgtatcataagatgaatcttaaatnannntgttcttca

SEQ ID NO: 934 - DNA, 315 bp, Glycine max
  Clone ID: PAT_MRT3847_100843C.1
acacacgatacgaacgacagctgacccatccagggcgcgtaattagagtttcatcggcccccacttgcacaattataatccccctagctgtttggttcttcagtacgtctataataatgtacccccgccgccctctcactaatcctcaaatccgtgacgcaacaaacctcccgcagaatggaggaagttcaagagtttcaaacccaatactcgccttggtccagaagaggaaaatgaagtgactactgaaagttcaacatttgataacggggaaccggcaccagatttcaacagcgacccaacaaaagttgatcc

SEQ ID NO: 935 - DNA, 331 bp, Glycine max
  unsure (1)..(331): unsure at all n locations
  Clone ID: PAT_MRT3847_100844C.1
gttngcangcgtacgtnagntcggtnattcagtcncgngcncntngagatcactnntntncanaccactngtcancnaagcacaatgncacnaacgtttagtnctctcanagttcatgnagcnatgtntagatacngnaatcaagcggcnnttgatgnanngtgncgtntgnttgccagagtctntctgnnnanagacgatgtgnagctngttgccgtnancganccnttcattancaccgagtacatgacatacntgtttanntacgacantgtncacggacactggaancancacgatgtnacngttaagggcganaagncccttntct

SEQ ID NO: 936 - DNA, 904 bp, Glycine max
  Clone ID: PAT_MRT3847_100845C.1
gaagcgaccgacctgactttcggatcaagatggacacaaaaaatcctcgctcaagagtcactcaggccgaagatttctttgtgaacgcgttggaaagctggaggaaggctcaaaagctcggaagtatgatactggttggacatagcttgggaggttatctcacgacagcttatgcccttcgctatccgcaacatgtaacgaagcttattcttgtctcgccggcgggctttcaccgacaaataccgcatcttcagacctcttcgaaacagcaagagagcgcacagcaagatgcgatgcaggcaatggatgccgaactcaatgtaccgcaagacaagttgacacgaggtccagggcatggctcgtcggatatcgatgcagacatgcgcgcgtcccaaaatgctacgaagaagacatggagaacgtccttctttcattatctttgggaaaagaactattcgccattcagtttactaagagcttcagtctttttcggaccgctgttggtcggaaattacgccgagcggcgctttgcagatcttgatgcagtcgagcggcagaacatgtattcgtatctttggtccatctcggtagcaaaggcctctggagaatacgctatcacacatctcttagcacctggggcatatgcccgatatccgatgtgtgatcgcatcgacgcactcaagatcccgatacttttcatgtacggcgaacatgactggatgaatccagagggagccaaccagtccttggagcgtttgaggaaagctggaaatcatttgagcagagtggtccccgtccctcgagcagggcatcacatctatcttgacaacgctccagcttttgacgaattgatccgcaaggaaatcgagagtgcttaatctacatacatcttgtgtcgaatgcc

SEQ ID NO: 937 - DNA, 265 bp, Glycine max
  Clone ID: PAT_MRT3847_100846C.1
tggagtagacagcttgagtgggacttggagctgcagtgtaggttcagattgcttcaggaaatggctactgtgtcccctttgatctcattccttgaaatccgttttgggtttcaaccagagccagattaccctgcttggtgttgccaatgatattggtgaaaatgttggcattcttcccggtctcgcctgcaacagattcgctccgtggctcattctcttcatcggggctcttgttgcgttccttggttttggggttctcgggctt

SEQ ID NO: 938 - DNA, 298 bp, Glycine max
  Clone ID: PAT_MRT3847_100847C.1
agaaaaaggttcacttgccatcacatgtactagcccatcaaaagattctggggataaaaataaaaactgtgtagaaagagctaaaacgtaactgtgtgatcctactacttcgatatgcccttaaatgacaccctaataaaacgacgagagcactattcttacatcgagatcttttatgccgatgctaacttagctggttaccatgaatataaaataattatgtattcctggctatcgcaggggcttatgccattggatttgcctttcttagctaacaaatatgctactgagtctgaca

SEQ ID NO: 939 - DNA, 410 bp, Glycine max
  Clone ID: PAT_MRT3847_100848C.1
ggctcgagtctctttcctccaaaccattctcagcctactctctcttctccggggattctctcaatttcgatctcctatccctctccctcgcctacctacaactcttacttcgtgctcgtcttcccaagagacttcatatacatagcggctctaaccacctatagacatcactttcacgttacaacatatgtctaatcacatataagatgttaccattcaatcaacacctgatggacctcaaatcttacagtatcatcttgctcatctacatattcattcatcacacactacaccaactttcagcaaccgatccaacaattcttggtcacaccacttccacgaaattgataaagttactgatttcacaaaccactaacttcctcttgcaaggatcaagaatattatcaacg

SEQ ID NO: 940 - DNA, 1270 bp, Glycine max
  Clone ID: PAT_MRT3847_100849C.1
ggctcgagctttgtttttctctcagatagctgtatacctttatacaacttcagctatacatatgactacatcatgtcaacatcaacaagttttgtcgacagctttgctgaccacgcgtccgacgaaagaaggccgttacaatccaaaaatggatcctgttattcctgtctataactggaggaaaggatctcagtggggtgttctcaccagaaagcatgccaaggttgtagtggaggatgaaactgtctttctaatgtttcaaagatactgcaagaaaaagccactaccagaattttggagggctcattacattcctgctgacacatctaaggtgcataactgtataccagatgaacactatgtccagacattactggctcaaaagggccttgaagaagagatcacacgaagatcattgacacatacttcctgggatatttccaactccagggaatatgaccgccggggatggcatccagtgacttacaagtactcagacgctacacctatgcttctaaactttatcaaggaaatagataatatttattttgaaaccgaataccgaagagaatggtgcagcagcaagggtaaaccatccacttgcttcctttttgcaagaaaattcactcggactgctgctttaaggcttcttaatatgtctgttctgggagtgttcaattaagagaacaaaagactcattttcagagactgatacaggaaaaaaatacacttagcaaaacaaataagagtattggcaccataatgatatgtacaatgagttgtatatttacaaatttaacagtgcctgtggtgtacatttagtaagtaatttttttttctttcagaataatattgagaagtagggacacttctaaatagtggttacgtcttgttgaaattgcgtcagatatgtccatgtcagatattgtatggacacctcaatttttttaattgtattttatattttttgtcaaggggcctggaaacatatgagaactcttgaattgaaatgaaaaaatagatgtaagtctagctactttggaaatggtaagatctttggcccaaggatgtacaaaagatgtcctaattttttttttcagaataatattgagaagtagggacacttctaaatagtggtcacgtcatgtcgtgttgtaattgtgtcaagtataagtacatgtcagatattgtatggacacctcaattgtattttatattttttgttattttatttatttcaaaaaggtaaaagattcacattcgcatagtt

SEQ ID NO: 941 - DNA, 368 bp, Glycine max
  Clone ID: PAT_MRT3847_10084C.1
cgtcctccttctttgggggggggggggggggggggggggggggggggggggggggggggggggggggaggggggggatggggggggaggggaggggaaccagtggaatggccagaaaggctagacaccacacaatttacaacaataatggaaccaaaacatgcgggtttagtacccgggtaaaaaaaataggcccccagtaagaaggaccccacctggaaatcctgctggtagtgactgatttgtactggtcctagatctactcctcgttcacacaccacctagcgtactggtgcagagtttactcgcggtagaaagctgtacggtaactggaaaaagatgcgccagttgcgggttcaaacccggccc

SEQ ID NO: 942 - DNA, 192 bp, Glycine max
  Clone ID: PAT_MRT3847_100850C.1
aataccatgtgttatgtgattatagctgatggccaggtgaccagaagtgttgacactgagcatgggcatgttagagcacaagacaagaaaactgtaggggctgtcgtgaaagctagcaatatcccgttgaaatcatattaaccggacctggcgatggtcctggcgatattatgcaacaacaccacgatatca

SEQ ID NO: 943 - DNA, 498 bp, Glycine max
  Clone ID: PAT_MRT3847_100851C.1
ctagcacctcgtctacttcacccattactctagctctagcacgcgttcggtaagggcgtcgtaaagcgcgttgtttcctttcgataacaatgattacagttctgatttcaaggaaagaatgcaatgagcaatgcaaccaatgaaaagcatggatgtatgtgaatgatgcattgtcgaagtactgcaaattttacataggacattcaatagaacacagggtcgaattaattcagacgacattgtttactacatcttgtcagagtcaaagtaatgtggacatcaataacccttaattttgtaaatcgtgtgttggcagtagacaaaagagcgatgtaactcgattcatctcttgccccaatttttggaagctggttacttccatacttgaccttgacttaatgaaccttttcttaaaagcatgtgcttggttcaaccccataatccgaggaaaagaaattttgattggcaatacttcagcaacctatcatagagatgaat

SEQ ID NO: 944 - DNA, 607 bp, Glycine max
  unsure (1)..(607): unsure at all n locations
  Clone ID: PAT_MRT3847_100852C.1
atcgcgaattgcagatggcgagntcggcttcttgacagaggaacgcttctgctaaaggcctattctgctcgggctgaacgccgacacaggcacacgactcggggatgcctttggaattcattcactagctgatgaccgatctctctgtctttcacattgaggggagagaagacatttcttcctctcttgtggagagctagctgccgccgttgcttggccagacgggccttgagagaggcgtcgctcgatgtggctcgctatgtggtgacttctgaggaacgtgagacagcgtcttaatattacgtatattgttattcattccttcacttgccgacgtcagaggatgctataacagactctaaatcgggggttatgaataaccatccatatttaggctgttatacgggtgcgtcaaatgctgtagcggaaagcatgaggacttgtagatgatgctgactaaatcgaaccgtctgaccagatcggtgaaaaagccatgaacgcttggatgaggggaggagactcgcataatatggcagtatgaagcatggactgatctataggaggctcagggcttattggataaggctgtgcctgagtagacagcgga

SEQ ID NO: 945 - DNA, 347 bp, Glycine max
  Clone ID: PAT_MRT3847_100853C.1
ctggtatcgatcccatatttaacgttgcaacagttggctttatctacacacgagattattcacatatggcatgtcacgttgatggatttggactctccattgttcatcacctctgcctcgaatcatggatctgacagaggactcactagaataacttgatcgctcccacgcagacctcacctcgccacgcgaacgctaaggctgctactcctgccgacgcgaacgataaccctaactactacggtttcgagatccatatgcatggccccgaaatccggggacattaaggcgctggtggagaacaataacgtgcttctgataagcggctagaccaagaagcaggagga

SEQ ID NO: 946 - DNA, 830 bp, Glycine max
  Clone ID: PAT_MRT3847_100854C.1
agaaaagtgctttacccgaattcatatccggtttcagcagttatttgagacaaatatcttctgcacaattgctctcgttgttttatcaagaacagaaaaatataagcattatatcatcaaatcacattgtttggaaatcagatgaactaattgtatcatatctcactattagcaaaagcaagttttgtatttcaattgtgaagaagggggagggaatggggtcgtgtgaggagttgttcagtaaaggactccaaattcaacatttgtaggacagacatgttcaacggcccaaagaaggggcagtaacattttgattttctttcctgtactgctacattggacatgaagcaaaactgtacggtatttacatcataaaattgggatgttcgaccagaaaaatggggggaaaaaagagcatttttatcctgttatgtgtacttctagtttgtggcataatcaccatcgtttactacttgttactgttcaatattggtttcttctaggttagcttgatctacttctatagaaatgctgagtgggccttgtggggttccaaaaagtgtagtaaatatctgtctgtggcattcatgacaaaagtagatataggtgaaatgaccttcatatgggagtttatgtacagcagctccgggcagcaagcggtgcacaaaatcagtcattgatggaggaaccactttatcatccattccttgccatatatgtatagggcccagaaatcccatatattcctcagtttcagtgaacattgacttaagccaactgagcaaattactactctgttttctcttctgcaacttgaggtctgaaaggct

SEQ ID NO: 947 - DNA, 444 bp, Glycine max
  Clone ID: PAT_MRT3847_100855C.1
aaactataaaataaatcccaagggcaatccctccataatcgccctaaaacggattaaaatacccccctcgaaaaaagcataaagtaaattgggggtcataaaattctacgcccaaattttggatcaatttgttttttttaaaggggccttttgtccaggtcataaaagtatacatgttccattgtttttttggaaaaaatccttttggaaggttcatttttcaacatttgaaatagcaaatccagcccaagcttatttaaacttggaacacccgttgataaactttgagggttccattgaggattttcccgccagtttattattttactcacccctggccacacattttttttgggagtccccaataccctgaattttttcaggagttgttgcacctcggaatcaccaaaaaagagtgcttgtttggttacaagttcggcaaat

SEQ ID NO: 948 - DNA, 497 bp, Glycine max
  Clone ID: PAT_MRT3847_100856C.1
ccccccacctttaaaatccaaggagaaaaaaaaaaaaaaaaaaatggaaaaaaatcccggcctaggggccaccttttgaaaaaaaactatgggaacaaaaaaaaaggccccaacaaaaaggagcccaaaaaaaatttttttccgggcaaacagggaaaaaaaaaaaaaaaccaaccaattttctccacggggtcgggaaaaacccctatgcccccccaaaaaaaaaagggaaccccgggtcattccgaaaaaagttttaaggaacaaccgggggcttaattttcaaaacccccgaaaaattatcatggaaggtttggggcccaaaaaccaacccctccggaaaggttttcccaccaaagggggtacccccaatataaaaacccctaaaattaaaaaaccccctttggggattttgggacccaaaaggggggagggaaccgaaaaacccttaagccgggggcgggaaattcaaaacccccccgggggaaggatccccc

SEQ ID NO: 949 - DNA, 134 bp, Glycine max
  Clone ID: PAT_MRT3847_100857C.1
tggcagaggtgcatcaccggaagaagacgcaggcaggtggcgcagtacgtggagagaggacgctatataaatagatgttgtccccgatgctctcgatgtcaggcactcgtatatgcttcctccgcacaacatac

SEQ ID NO: 950 - DNA, 428 bp, Glycine max
  Clone ID: PAT_MRT3847_100858C.1
cggtttcttgggaggagggctgagggggcaactgactctccatgggggcacttcccccagagtgacaatactgccgattcttctaggggggggagctggtgcaaagaatgctatgatcatgaatctgccggatgctgtcttatcactgctgagatatttcgacggggaactggcctatgaagtgaataagatgactcctccgtacaatcagggtacagtgtcttttttcattggattcggaagattggtttatgacaccatcaattcaggggctttttcgccaagctggttgtctttggagagattcacgcaccagttgtaatggaatttacacagcaggaagttgttacatcttgaacaacataagagcgtgctgcaacaactctgatggcccatgggtgcccacctttgcatgctatggtgtatga

SEQ ID NO: 951 - DNA, 476 bp, Glycine max
  Clone ID: PAT_MRT3847_100859C.1
ggaaagagaattttttttaaaaaaaaaataccaaaggaaaaaaaacccctttgaaaaaaggttttttagggaaaaaagctcccttttaaaaaaattccaaacccaaatttggatttcaaaaaaaatttaccttcaaccccaaattgggccccttatcagggcaccaggcaaattggagggcccccacccaaaaaggaaagagcctttaaaaaaaaaaaaattaccccgaggatccccaaatccttccctccaacgaaccccccataacaaaaacatcatcaggattttcccccctatcccccgggggaatacccagcaatccaggaaaacccctcccgttttttttacccccccggaaaaaaaccccggcaaaaagggatggggcaggacccccttaaggaacattttccatgacccaggggacaggggcaactacctcttcatgggggaaaaatgggaaaaccccatcgggggaa

SEQ ID NO: 952 - DNA, 403 bp, Glycine max
  unsure (1)..(403): unsure at all n locations
  Clone ID: PAT_MRT3847_10085C.1
gaaagattgtttaaaagggttgggnntttaaaaataaaataaaggtttaaggggtgggggatttaaaaaaaccattaaaaaaaggcttgtggtttgtttttaaaaataattaagcctttggggaaattttttacacccctttctgtttgtttgggggaaattaaattttttttttcttggcttttttttaaagcaagtttcgctttgttcaaatttttttccaaggggggggttggcttttttccaattttaatttttgatttccgaatgggggcctccgttttttcttttggaaagttccccaaggaaaagttttgggtttcttaattttttcctttgggggaaggttttggtttttaaaaaatttcccaagtgtgagaatggggggtttattttttttttt

SEQ ID NO: 953 - DNA, 470 bp, Glycine max
  Clone ID: PAT_MRT3847_100860C.1
aggaaaagaatcactctgcactcatatcttagaagaaatttttatacttcaacatacacacctttttttttaaagaaaaaaaatactaaatttaataaattcattgaacaaaatcaacaaatactatctctattcctacgtacaaaaaataaatgaaaatattttttttctaaatataaaaaatatatgactactttcaaatgcattgattaaaaatatttttatattattaattgataaccaacccttttaataaaataatcactcatttttaatgaaagtgattgaatttattaaactattgacaatataattcatatttactggttaaaaaaaatatctcttgaaatgtaaatagtgtcattaaatacacttaccacttaaatcattcaattttataaatatttctaaaataaaattaaatttataatattattaaaataaactaactgtaactacttttttttatt

SEQ ID NO: 954 - DNA, 417 bp, Glycine max
  Clone ID: PAT_MRT3847_100861C.1
cggctcgagcggctcgaggggaaactatgcttgaccccatggctgtcttcgctctgctctttgggagtgaattgtttgaggactacatagggcatctagctgtggcatcaatggcttcctctgagctagctgatggaactgaggatcctgataaactcaatgagaagctaaaggctgtccaaaaagaaagagaagaaaagctagcaaaaattttgagggattatcttggtcaatatgtccggggtgacaaaaaaggattcttccaacgcgcagaatcagaagcaagacggctttctcgtgctgcatttggagtagatatgttacataccatcggctacatatattcaagacaggcagcacaagaactaggtaaaaaagccatttatctaggagtgccatttctggctgaatgggtac

SEQ ID NO: 955 - DNA, 465 bp, Glycine max
  Clone ID: PAT_MRT3847_100862C.1
aggaaaagaatcactctgcactcatatcttgagaggatctagatacttcagcatacagacctttttttttaaagaaaaaaaatactaaatttaataaattcattgaacaaaatcaacaaatactatctctattcctacgtacaaaaaataaatgaaaatattttttttctaaatataaaaaatatatgactactttcaaatgcattgatgggtaatatttttatattattaattaatggggaagccttttaatgagataatcactcatttttaaggaaagggatggattttattaaactatggacaatataattcatatttactggttgaaaaaagtatctcttgaaatgtaagtagtgtcattaaatacacttaccacttaaatcattcaattttataaatatttctaaaataaaattaaatttataatattattaaaataaactaactgtaactacttttttt

SEQ ID NO: 956 - DNA, 208 bp, Glycine max
  unsure (1)..(208): unsure at all n locations
  Clone ID: PAT_MRT3847_100863C.1
aaatggcatagcaaagtctggtgcaaaaatggtgatggctgtttcttgtgcaaaggtacctaaagtcactataatggttggaggaagcttcggtgcaagaaactatgcaatgtgagggcgagcctatagaccaaacttnttgttccttgggccaaaagctagaataanntgaaagggaggagcncaagcagaaggaggggtggccaaa

SEQ ID NO: 957 - DNA, 204 bp, Glycine max
  Clone ID: PAT_MRT3847_100864C.1
gagagagcgagagaactagtctcgagttttgtttgctggattttgttacagattcagctcaattttcttgaccccatcaatatctttattaaatctattgttctgaccaaaggtgctataattgaatacacaatcatcagatgccagctgttccggtcagaacaaccagtgttcttacactatccagtatgtatgaagatggta

SEQ ID NO: 958 - DNA, 263 bp, Glycine max
  Clone ID: PAT_MRT3847_100865C.1
actgcacgtacgtgtacccatacgtttgccatggcctgcttcgtgtgcggattttttatattggaatggacatctttttttaacacgcttgggggttagactttaactccctatcttttgctttggattgtagaaacttgatgaggacgctttgcacgcaggtgccttaacttgttccaaactacaactgaggaccacaaccgctgtgcagcttttatcactattccatcacatgaacatggagatgtttgcgggtaaaacaa

SEQ ID NO: 959 - DNA, 619 bp, Glycine max
  Clone ID: PAT_MRT3847_100866C.1
ccacgcgtccgttctgttcatccagttccactctctcttttttttccctttgatttaatactctccaaatatgaattctttctcacaatctaacctctttttccatggtatttatactttccactttctggggcttccttttctcaattcttccacttggtgacacacacactctttccctcccttcttcaagttgtgaattttcgttgtggggtgcttttgttgctgcttccttgttctcttggcttccatttgagcctacaccactaggtgttcatggaaattgatctgaaccatgaagtgactgaggttgagaagaatgcattctgtgatagggaatgtgagaaaggtgtctggtgttacttgttggtcctcttccacttgttcatcctctacttcttcctcttcagcgcttgtgtcctcttcttaccttgagctttggcatgcttgtgctggccctctcacttctcttcccaagaaaggaaatgtggtggtctattttccacaaggtcacttagaacaagttgcatctttctctcctttcacaccattggagattcccacctatgatcttcagccacagatcttttgcagggctgcgaatgtccaactactcgcc

SEQ ID NO: 960 - DNA, 339 bp, Glycine max
  Clone ID: PAT_MRT3847_100867C.1
aatactaaaatatcattatttgttaacatattggcaggaataaacatgtagaaaagggagaacgaaataggagaaaaagaaaattgtatatttaattaaataaattatgtgaaaagaatggaaggcaactaaaataaatatagaaataatattatatatatatatattttctttttaatttctagatattaaaaaattttgcaaaaggaagaagtgtttttgcttcattgtcaagatgaaaatgaacgattgaagaggaagaaccttaagtaatatatgacatcaaatgtcatagtctgagcaaatagttaatttgagagatgatatcttgagataatg

SEQ ID NO: 961 - DNA, 331 bp, Glycine max
  Clone ID: PAT_MRT3847_100868C.1
acgcggacgcgtgggcagacacgtgggcggactcgtgggctcgctgttgatatgccgtaattgatgcggtatgacataggaggccgggatcaacatgagtatgaggaaacgcagcagacaaagtactctgtcgagttctgggctgagaagttagaaactgaccacttactccatgtatcttctgagattgaagaggacccgcagagagagacagttgaggctggccatgctgcctaagacatgtctgtggataggcgaactggagcttgacggtgcaactggtgggaaagcgtgcagttctgatatgactgaacaggtttctgcaatggtg

SEQ ID NO: 962 - DNA, 547 bp, Glycine max
  unsure (1)..(547): unsure at all n locations
  Clone ID: PAT_MRT3847_100869C.1
ggctcgaggagagagtatgaggacccatccaccgcccataagcacgcagtctttctgcaatcaaatctagtttggatctgttcttctcctcagtctaaccctaacccaacactgcatcttctctccaaaaataagagaacaagcttcaacctttttctcttccctcttcaacggaaactccaatttacaccgctttcaccattgaaagccccaccaattgaacgtttttagaggcaagttgaagtagtagtacaagtcaagttaatctcaatcacgactttggtgacctggcctgcaccaatctcaatctcctatttccgtttctatcatcacttgtcactgctactcgctacaagttggattcatcaaattaacaagattgatcttcaagaaaagccaagcctggtcaaatataacagtttgttctcattaatttcctttccattttgatccatcccatattttgtttctctcatttacatatacacacatactagaatagccaaattcatttctacttttcttgcatatgcnaatgaagtatagt

SEQ ID NO: 963 - DNA, 311 bp, Glycine max
  unsure (1)..(311): unsure at all n locations
  Clone ID: PAT_MRT3847_10086C.1
gcgtccgtacggctgcgagaagacaacagaagggggcatcttntttaattatttattttgtaaactagggaccagggagcaaccaaattccctaattcgatttcgattaagagagcaatggtacgttccaagcaaaccgcttagcaagttcaccggaggaaaggattcaaggaagcaattggcaaccaaagtcgatcgaagtaggcccgggaccggcggggtgaagaaccccaccgttcaggcagaaccgggctctgagggagatcaaagtccagaagagcaccgacttttgaaccgaaactccattcaaa

SEQ ID NO: 964 - DNA, 105 bp, Glycine max
  Clone ID: PAT_MRT3847_100870C.1
catgagaagactgagctagaaaacacgctcggtcttcttctccaatggcgattcccgatgagcctgagagtggcacgcctgttctgaaccattcttccctgcgcc

SEQ ID NO: 965 - DNA, 366 bp, Glycine max
  Clone ID: PAT_MRT3847_100871C.1
ccacaacagtggatggttgtctatccatgcagattatcgccacctcctgtatcttcagatcccactctctgaggatgggtggagccgaactgggcttgaaggacaactcactgaaagggatgaggctgtggaagaaagtgaagtaccagctggggtagatccactcattgcccagatattagagagacaacgaggacatatctccaacactatacgatccgaatgccccatcctgcatgttttgctgatcacattcaccatctacaacgaatctgctcaccactctgaacgcagtccgaaccggttcttaatacttcggagcttgaccatatacactggcgtgaccattattttgctacagcagtt

SEQ ID NO: 966 - DNA, 421 bp, Glycine max
  Clone ID: PAT_MRT3847_100872C.1
tacggctgcgagaagacgacagaaggggggaaatttgtccggtataatgtcagcagcagtggaaaatccgtccgttgaaatgccgggaaatttgtccggtgtaatgccgacaacagtgggaaatccatccgttgaaatgttgggaaatcagtccggtgtaatgatgacagcagcgggaaatccattcaccgttgaaatgcctgattctgctgcaattccttgaccaaccaaattttgagacttgataaaggcttatgttatatttagtataaatagctgatagcatatgttttatgttatattgaactcagtcattatagtactcttgaacaatgtctgcacttgatcctggaatattatttataattgcagatggttatgtttaatccataggagggcataaaatccctgttcgtttcgg

SEQ ID NO: 967 - DNA, 568 bp, Glycine max
  Clone ID: PAT_MRT3847_100873C.1
atcacttgtcaggtgttttgggtcatttagtattagtgatttatagaagtcattaatctttctttcatagggttgtgtgatcaattgggcttgtgattataccacgtctctgttcacattattttgtgctttctatttcgattgaattcggctgtgtatcttgaccacataattataattgtccttttttctgttttatgctcttttctgcaacattatttttcatctacaaatgaatatttgcaagttatggcattattatttgaagagagcaaaaaatctcatggattaaacaaagaatatatcctcttagaagataacatgaaaaagagaaagcaaagagaagataataacactcaaatatgcagtgcttcagtttccttgattatcaatccaagcaattccctaataacctatcttgtgtcgtagatgatataatggaagaaatttgtttataattattgtgtttgttaaccaagctgctgcaaacataacatacatccacacaaacttctttttatttgctattataacagtgttttactgcaatgctgtgtgtctttgagat

SEQ ID NO: 968 - DNA, 388 bp, Glycine max
  Clone ID: PAT_MRT3847_100874C.1
aattaagccaacaatggcaattttataaccaagggataatatatatatatatggtcctataactaggataactaagggtggaatcactgttacaatctgaactaggctaaatgacagtaaaaaaatgctttaaagcaaacattttaagggtcctgggaatttgattggggggtaatcatgtgagaaaccacaagcttaaaaatttcatggattgcagcttgaaactgaaaattacctgacttaccaggcactgtccattttgaaggggactgaagggtgaatccaccgtttttactagcagcaacctttgttttttttgaagtagcaagggcctttttaaaatttaactgggacaaaggtctaggggcatgaaaatggtttccttttt

SEQ ID NO: 969 - DNA, 260 bp, Glycine max
  Clone ID: PAT_MRT3847_100875C.1
ccgggccgacccacacgaccgcccactcttccactcaatcaccatcttttttccatccaccatcacaaaatctaccttgacgggttataactcccatatggcgataataacacacttctttcacattacttatacataaaaaattacccaaccctcctttttatactaacaccctaaccatttcaactttttaacctccaatacaccattaacaattccaatcctttcctttcatactaaaaacatctaaaacactaaac

SEQ ID NO: 970 - DNA, 379 bp, Glycine max
  Clone ID: PAT_MRT3847_100876C.1
ccgtttcggaaacccgcggcgacccacgcgtccgcccacgcagtcttacggctgctagaagacgacttatggggaatatcttatttggatgggtatataatataagaacggttgccaggctttacctcctcttttattcagatattggctcatcggggcctaatccataacagaaacaggggattcgcagtagtggagttgatctgagctagaagcaatagattctccaaatttggcggcaatgtgtggcctcaccgttgaagatctgtcgaccatcggcgtattctccactgtttggcttcaccatacctttattcccactcactggctaattttctcctttgttggacgcactcagaaaagttctctccccaccact

SEQ ID NO: 971 - DNA, 434 bp, Glycine max
  unsure (1)..(434): unsure at all n locations
  Clone ID: PAT_MRT3847_100877C.1
ggttttgggcggaaacccgggccgaccccgcgcccgcggancatctaaggggcaggnaagaacaggaaggaaaannaagggaaccggggnggaaggaaaggagcncgcggcaaaagacaaancnggaaaannngaccctcacatcaaanagcagcanggaaagggggnccagaaaacaaggactgngcatactccaaatcctgcctggaatcatacttttgaattcgatgagataggtggcgctgaatacttaaaaanaaaaggnnnnnctgaagaaannnncggagaagaaaacancggcagcgcacacgngaannnggaaggacnggnngagggctcagncagggacgnangganccctcnngaaagagngcgnncaggagaannaagacnncaaanancaannagagcggangaacaagaaggancgaggg

SEQ ID NO: 972 - DNA, 884 bp, Glycine max
  unsure (1)..(884): unsure at all n locations
  Clone ID: PAT_MRT3847_100878C.1
ttacggccaagctcgaaattaaccctcantaaagggaacaaaagctggagctccaccgcggtggcggccgctctagaactagtggatcccccgggntgcaggaattcggcacgagtcgagtttttttttttttttttttttttacctattaaattcttatattttgtattatttaaattaaattgtagttaaaattttagtacataaattatatataaaaaaatgctcataaactatcagtgtgaagagactttagtagtgctttaagaaactcgagggatacgttcttttagcgttttcaaattttccttaactaattcccccacatcatatgcacaaatacatgtcaaaataactacctatttgaattacagggtagatgaatgcactgaagccccttttaagctttggctgagatgaagcaccttaaaaaaatcctttctattcctcgtcatcatcgtcttcttcaggtgcctcttttagccattgaattaacttttgggcctgcttaacaaaaactttatctgcctcgtcagcatcttttaactcggcttcccaactcaaaatagcatcttcttctacaacatcttcattgtacaagtagtgcaaaatccttgtgaacaatggagcaaattccttagcagattcctcacatatttcttcaaatttaagtattacttcgatctgctcatctatgtcagtcagataggatgtaagagcctttttccattttgtaaatacagcctgaacattttgaagcaaaacatcagctgaactatggggggtgtctaaagcatacttcatcatggcagaaaatacagctccagcacaatcagcagctagcttattgtatgacaacttcaaagaattgatttctaaaatca

SEQ ID NO: 973 - DNA, 544 bp, Glycine max
  unsure (1)..(544): unsure at all n locations
  Clone ID: PAT_MRT3847_100879C.1
cgacccacgcgtccgcgaaagagatcgatcgtatctgcggaacaagcagcgaaggatcggagcctatccaatggccgagggcaacagcagctccggcggcgacctgttctccagcggcaagctggtggcgggggccgccgtgtcggtgttccagcagaagagcgtggagaacgtcgacaagcaggaggtcgccggcgcggcggccgagctcctgcacgcggcgtccgtgtacggtaagctcgacgacaagccggccgggcagtacgtcgagaaggccgaggggtacctcaaggagttcagcgcgggacacgccaccgagcaggagcagcctgcggcggcaccaggcgacgacgcggcgcccaagccaccggcgccggaggcgcccaaggagccggcggcggtgcctgcgccggccgcggaggaaggcagcaagtcgtcggagggcttcggcctcggcgacgtcatgaagggcgccgagcagctggtgggagggaagcancanggcggcggggaagagagcgcccgcggcggtgggctgtttaag

SEQ ID NO: 974 - DNA, 232 bp, Glycine max
  Clone ID: PAT_MRT3847_10087C.1
gtttccttttcaaccgttcactccttcttctgcgttaccgtcaccattataattaccatccctttccttattcttcctctgtttcatccctctacccattttctcgctctcgattattgtcctatacttctttctccatggcttctgatttccctttacatgtcacccgctaaaacattaacctcaaggctctgtaatgtgagtatgatgctagaggagaggaagtctctct

SEQ ID NO: 975 - DNA, 131 bp, Glycine max
  Clone ID: PAT_MRT3847_100880C.1
cacacgcgtccgcttactcctccgaccgctccagctggctgtgctaaccattcagacgtaggaacctgagggctgggaagcgatgaagatcatgcactggactcggcgaacgttggcaaatccgacccacg

SEQ ID NO: 976 - DNA, 130 bp, Glycine max
  Clone ID: PAT_MRT3847_100881C.1
gagaaagcgagaaccttcgtcacaagaccagtgtacggtgacaacatggatactctagcctcatcatccatgcacgtcctcattctcaaacaacttcagttctagaccgtgaacgacgattccctcttgc

SEQ ID NO: 977 - DNA, 193 bp, Glycine max
  Clone ID: PAT_MRT3847_100882C.1
gacatttcacagtcaccaactaaccctccgtttatcccacccccaccctggttttaaccggcaacatccattggaaaggacacaacgccaggcgtctttcaggaggtttgcaatgcgtgttggattgctctctcagaaccgtgtcatacatgtaattgccacatcgctgcacatcagaagaatattagacccc

SEQ ID NO: 978 - DNA, 349 bp, Glycine max
  Clone ID: PAT_MRT3847_100883C.1
atcttaacatattgagtattttgggttttcgggacaaagaaaggtgagcatcaggacgttttgaactgtgaaatgtggaggaaatgaacaaaaatggttatggacttaggacattacccaatgcactgttcttacacaatccgcatttccagccgaatgagactcattccctactctgcacacaatctcaaagaggcacttgcttatccttaatggttgacatgacatgtcttcattgcaacgttcctagcctgtccatacgcacacaagcattcaacactgttgggtatgctgcccattaaaaagcttatgcttctgcagttggacacacttccaggatgtgcccctt

SEQ ID NO: 979 - DNA, 157 bp, Glycine max
  unsure (1)..(157): unsure at all n locations
  Clone ID: PAT_MRT3847_100884C.1
tcccctttaacaaagacacaagcccgcttccacttaaacttggtgccaagccaattcaagngtttcttgaaccaaagccaattggaccagaattttgcttcaattttcttgcaagcggngaatacttgaaggccaagcaagtgaaagcaactttaac

SEQ ID NO: 980 - DNA, 195 bp, Glycine max
  Clone ID: PAT_MRT3847_100885C.1
gtttttatattttttttttggcgagcgctcaaatcatataaaaaatggtttcttggtgacgtgataagcataaatgtatggagggatgcgctggccttgaatctgagatctagtagaaaacaacaaccgaagctcattagagtatgatttggtgggaagcgctcaaacttcaaagttcatatttaggagatgatc

SEQ ID NO: 981 - DNA, 267 bp, Glycine max
  Clone ID: PAT_MRT3847_100886C.1
ggaacaacagctacagcataacaatcttcgctgccagaaacgaagcccctaaacgcgaacgcgacccctgattaaagcgtttcctagctcgaaccccgaaatctacagttccttgcaacccttctgttgacgcacatcgcctcaaaagaattactaaacccaaattctaaagcagggtgacccgacacatgactatagcgtatcaccaccacctcactctccaagccctgaatttgactcactggaatgttgagcctttccggggta

SEQ ID NO: 982 - DNA, 121 bp, Glycine max
  Clone ID: PAT_MRT3847_100887C.1
ctctttttcttatggcagcgcaaccaataacgaaagccaggctattttctaacgtgctctggtcatctttactccaagatgaatgccacaaaggaatttatcgatcatgtgaacgaaaact

SEQ ID NO: 983 - DNA, 263 bp, Glycine max
  unsure (1)..(263): unsure at all n locations
  Clone ID: PAT_MRT3847_100888C.1
agaaggacagccagcagggaccaggaccaggaatatcgcagggtacagacaccacagacgactcttaccttacgcgaaccgacgcacgcagagcaagaaagaaaagaggaaccagagaacacagggagccgcacccaaaaaccggaaacaaaagaaaacaggacaaagaaggcaagaaccagccaaaggcgaccaaccacccaggaggacgaagacagaagggaaagaaaancacgccacagagcaggccacagacgacgaga

SEQ ID NO: 984 - DNA, 546 bp, Glycine max
  Clone ID: PAT_MRT3847_100889C.1
gccgcctgcttgggggggggggggggggtatagagcgaaaaggcgaggatgtgtgagaagggcacaggaggatagagggtgactagaaagtggcacacaatagggggggggcgggtagtagagaaaagagagagcggtgcaaacaatatagataacgatataaaaaaaacccccgaaaggtagaaaaaaagatacaaaaaaaaaaatacaaggcacgaacacccaaccaaatagacacaaaaggggagtaagtacagaagaacaacttaggacgacggtaaaacgtttgggttaacacgcggccaattttggggacggaaataccgattggtgtttttggcacgcctggtattatggtttagcgcaaagtacccgtagtgtggttaaacgcgttagaggtagtacgtggtaacaattcgttagggttattttgtggcacagtaaccggcagccacagtagcttagcttgcaacgtaaaatgtgttggtataagctgcaccagggttggcgtacccagtggtttacgcttagaacgcgtaataaata

SEQ ID NO: 985 - DNA, 266 bp, Glycine max
  Clone ID: PAT_MRT3847_10088C.1
ggctcgagcacatacacagcatgctttaggcctataggcaaatccacccatggatatttgtgtataggatccattcaacctaagccagcacctgcttattaccagagcctagataactaccacccatcaggggactccgggctgctgtgcacataatctttcaccggacacgttcctggcataagcaatgcagtacaaccacccctgaacggcacactatcggaggtaaattacacggcatctagctctatgcttccaaggtcatg

SEQ ID NO: 986 - DNA, 325 bp, Glycine max
  Clone ID: PAT_MRT3847_100890C.1
ctgtatagagctcgagcttttttatcctttttagccgtattttaaagcctctagtacgtgtttaatttgcgctggaccatcttttactgattagcaggttgaactcgatgaatatacatggacagcggaaatgctattcgtttattatagggaaacaataaccaatctttgttcaagtgggcatcaagacaagagtccacgtgcttgagtgataagcacagttaactactccatctcacataacactgtttggaataagaaaggatctctgataccacgattcagaggtaaaatcattaagctaacctcaaagaatggtagctat

SEQ ID NO: 987 - DNA, 491 bp, Glycine max
  Clone ID: PAT_MRT3847_100891C.1
atttataattgtatgtaagtttatgaagaagggacgatatgcactccatctgttgattttttaacagggtacccattccaaataactcaacaactcttacagctacataggaagactattttgcattgatgatggccaaattggggattgaaatttgattgttttggggacaactgcatatacatcaaagagtgatgtctccctactttttggtgtctttttgctaattcatttgctataagtcatatcttggtttaaattatgaatggagaaaaaattatgatcttttatgacaattttatcttctcaatgctgattgtccttgttaatgtaagttgtcttattatgtctgttgtattaatgtatttcttccaacagtattgaggaggttgccttcagtttcaatggaggaaaggattcaacagttttgttgcacatactcagggctggctatttcttgcataaaaaggggcaaaatagtgtcaatgggg

SEQ ID NO: 988 - DNA, 2032 bp, Glycine max
  Clone ID: PAT_MRT3847_100892C.1
atttataattgtatgtaagtttatgaagaagggacgatatgcactccatctgttgattttttaacagggtacccattccaaataactcaacaactcttacagctacataggaagactattttgcattgatgatggccaaattggggattgaaatttgattgttttggggacaactgcatatacatcaaagagtgatgtctccctactttttggtgtctttttgctaattcatttgctataagtcatatcttggtttaaattatgaatggagaaaaaattatgatcttttatgacaattttatcttctcaatgctgattgtccttggtaatgtaaggtggcttattatgtctggtggattaatggatttctgcgaaagagtgtgaccttggatccggttatcttaaatttcggttggagcagccacttcattttggtgcgctgcgacaacacaacgtagataagacatcattgttttgttcagattctgcgcgttatttcattctcacacataaccacattctgcatgtccaattcttgctcttaaatatctcatctctcacttccatccaatcccctttttgaaaacgccagaatcattcattcaatcacttcacacactcacaccttgctccaccccttctccaattcgctacaaggtgtttcaacatggagatcgataaggcaattagagagtgtgacgatcgaagacttcagaccaagtacaacaacgctacctatgttgttcagagagctttggctttgtattctattgaggaggttgccttcagtttcaatggaggaaaggattcaacggttttgttgcacatactcagggctggctatttcttgcacaaaaaggggcaaaatagtgcaaatggggatctaaaagattttccaattcgaacaatatattttgagagtccttgtgcattcccagaaatcaattcatttacctatgatactgctgccacctatgtgaagcttcttcccttctacagcttaattttttagtttgttttagttgcgttgctaatcctaaagagaggtgatactatcttatgttaagttccttgtggaggtcacgttagttgtggttaccagcagaatgccagagctaatgcagaatgactgaccctgcctccaaagaggaatgtttattccttgttatatcccatagcttgctgagaccggagatagggtcccctaagatatgatgatagttacaataatctacgttcccctatgggcatatcccaggtttccattatgatcttaaaataaactattagacacaaaaaagctaaaaattagcttgattgtaatccgagtaacgaagattgataagcaccagggttttgagaattaatgggatgggtcaagtttcaagattgagatgcaatttttagctgcttttatttagacatgtattatagcgactttttaagccctatgttttacaatcttaactcctattcctgattccaagtaaaatcttgattttggctatctagtttgtatacaactgttttttttaatatttatgatcacaaatattgtttttgaaaattgtgatcatcatccaagggtaaaatggatttagtttctgtaggctactgtttgtgataacattgagatatgacatggaaatccctcatttcctatgaattcataattctactgtaggagtgtagtgtccaattacgttctccttccatcttaatttaaaaaaaaaaaaaacattcttcttccatcttgattaaaatgctatatgttgtgacaagttgttggctctcactatgcacctgaaaaacaatgctatgagatgatctaattatagctgttttttttttcaggtacaagcagcattatctgctttaaaagatggtaagtctttgtatttctatcttcctgatggtaataaaattcacaaaatcttttttgttgacctatcctttggttattgtgaaaaatagaaacagtacacatttgtctggttcaattcctgcattatactgttcctggggctatgat

SEQ ID NO: 989 - DNA, 455 bp, Glycine max
  Clone ID: PAT_MRT3847_100893C.1
acgaggtcacttgctattttccttgtcctctttttcgtccaatcctaataccatcatggaggatgctgctacttctaatggtaaattttttcataattctcgcttttgcatctagtcaaaaactgttcctcttcaattgttgtctatgcaatgtaatatttgtcaattcgtcactcacttgaggcaaaagagatcgtgctttgactatggatgaaaaaccatattgaatgtttacattaacgacgtataaataattgaacaaattccaaacgcaaaataccatctaattttttgaatccaaattccaagtgcatatttttgcttcaaaatttgatcctaagtctcgttgttatttttaaattatacaccaattccaatttgctcttgtagctcactgaatagaatatctgaaccgaagattatttgttttccaaattcgttttcttccttgccct

SEQ ID NO: 990 - DNA, 445 bp, Glycine max
  Clone ID: PAT_MRT3847_100894C.1
ccacgcgtccgagagagggttcttcctccactaagatccgttcccgtctcattctacttctacccagagaaaccctaactcatatatttattatttctcttctttatcttttaatttaccgatttgtttattcgttcatccctttctttggttatacactgatcaatctctgcagtctgcactttgttttatcactctaagaaggcataaaaagaaaaaccaggaaccccaattatcaatggtcactgctgctaaatcttcaaaccaccattcgccgcccagtgctccgtcaccggcgcagcccagcgacgccaacagccctaagttcaggcgcaaaaatcttccctccccgggggttcagcttgttcacgggggcgagccccaaccggggagcgggattcacccaatcgcggcggcatcggcggcctcgtcctcgtctctgggt

SEQ ID NO: 991 - DNA, 400 bp, Glycine max
  Clone ID: PAT_MRT3847_100895C.1
acgcgtgggcttggatgggtttttttcgcgatcactggctgtctcacctcaaaaccggaaacaaaagcaatcgttacttgcatctccagattacttcactttttttctacttcttggtgtccgatttcctaacggacagaatatcactctctgcgctggccacagcactttcgcgacatattttcttttccacctcttagtctctctgctgaacactttcctatttgatataggtcctcgcgttatattcaaactttttctgtttctttcttagttctttgcttaacttcatgctcatgctggtgaaatcttggcatactcgctccactcttctatctggtattggacttcgtgggtagaacttctttattcctgtcctttctttcactcttcttcttct

SEQ ID NO: 992 - DNA, 336 bp, Glycine max
  Clone ID: PAT_MRT3847_100896C.1
tacgaagacgacagaagggtggggcataacaatatcatgttcaatgtaatagagaactgaaactgaatgccgtcactaattaatataaaaagaaatgaaaaatcacagtgtagtatgaatgctatattcagagaaaatgtggaaatgtaatctaaataaataactcatcatgccacatcagaaatagaagcatttatcctaacaaattaagcttctgttgtcagagctatgcacattttaacccaaatcatgtgaacactttgtcctctaatgatatgacagtatgataatgaccttgttgcttccaatcaattgtcttttagatcatgttgaatt

SEQ ID NO: 993 - DNA, 317 bp, Glycine max
  Clone ID: PAT_MRT3847_100897C.1
gacgattattccacgcacatttaatacttgatattcatgcactgtttctttgttccggtgcctcgcatggcatcaactactctcttcagcttcagactctctttgaacccactgcaccatcaacagacaactaggccaaaatctctgctctcctctcctcgcaccaatccacgcctcgcttctttcattaacaatcatttggccctcacacatgtcacatacccgcttctccaatctcactctgctcctaagcgcaaattccatgtgtattctgatggggaaagctcctagtcgcttgtttctgactctacatacca

SEQ ID NO: 994 - DNA, 569 bp, Glycine max
  unsure (1)..(569): unsure at all n locations
  Clone ID: PAT_MRT3847_100898C.1
ccacgcgtccgcccacgcgtccgcccacgcgtccggccgccgcacgagtgcggctacccgggcagcgtcttcaacccgctcaacttcgcgcccacgctcgaggccaaggagaaggagctcgccaacgggaggctggcgatgctggcgttcctgggcttcctgatccagcacaacgtcaccggcaaggggcccttcgacaacctgctgcagcacctgtctgacccatggcacaacaccatcatccagaccttctccggttgagtcgaggtcgaggagggatacgatccatcgctggtgagctgatatggactggaaggcaaacattgaaaccttaagttcctttctggatcagtttgtgtgtgttgttaatctatctggagggtacagattcgtgccgtgttgcaatgcatgcatggtctgaagggagcgagggctgaggagtgactggtatgtacattagctgaaggggatattaagggtagagatcgtttgatcagtatcatctgtatatccccatgcatggngttntcgctatgtgcgcttacttctggcttgccagcgtatggttc

SEQ ID NO: 995 - DNA, 271 bp, Glycine max
  Clone ID: PAT_MRT3847_100899C.1
ctgtactatacaaatgccgaaccctccatatttttatctttccgatcgctcacgacaaatttggagatccggataactttgagtggggggcggaacactaaaccaacaacattatcattggcggggttcgctttctataacgaaaagtagcatttatatgttatcgaaacacaaacggatcgacgttgacctcagtgatgagtacaagcgcgaaacgcttcaccattttgttcttcggtgacaaacaacgctacatgggcactgttggtgc

SEQ ID NO: 996 - DNA, 407 bp, Glycine max
  Clone ID: PAT_MRT3847_10089C.1
ttaatatataaacctgccaaatcatagttttgatagcctttatttatgtattcgaccaacctaagcaccagactaatgtcagcattcaacttaaaaattacaaactggtgtgaaagcctagttgtctatggcacaaatgggatgataagtcaaaaagagaactacaacagagattggaactatactatacatgcactcgtgcatgcagtgcaccttggatacttgacagttgaaaatgcatcagtgtgccacccacttgccatttgaaattgggaggggatatgtgtcaccaaaatttgataagttctccaaaagcagcaagtactatgcaatgacctcccatgaacacagctccatgttattcacatatacagaacttgggaaaactaaggtgcaagtagctcatg

SEQ ID NO: 997 - DNA, 368 bp, Glycine max
  Clone ID: PAT_MRT3847_1008C.1
ccttaaaaagggaatggtggtaagatggtaaagtaggtttttattaacttaccttgagcttgcttgcgattttaaagtaagtcttgtcaactggaacccaaaaaatctcgtgcctagcttcaggaattccattcacgggataaatttcctctggttgataccacactttgttcaaaagatttgtatttgacttgaaatcttttgagcagttattggaattggcaaactcaagatagccaaagtctttgctgaaatctccggatacatttacttctcctaacctctgctcaattaaaatagagaaaatcaaatcaagttattatatgtactatgattaggctattattatttcaatatatcttttttaa

SEQ ID NO: 998 - DNA, 146 bp, Glycine max
  Clone ID: PAT_MRT3847_100900C.1
atagaacaactcttcacacaacacaactttttctagcattgtagcatcatgactggcaaagacatcctccatataatgacggtgacagcacggtttgcaccaccagacacagggataggacaaggcgaaatatctaaacacatcac

SEQ ID NO: 999 - DNA, 182 bp, Glycine max
  Clone ID: PAT_MRT3847_100901C.1
cacactacctaaaacaccactttattattttccaacctacaacttatcaacatttaccgcacgcattttataacacctttaactaatactactatcatttaacataatcaatttaatcatacactatatcatcattaatacaatttttcatataaatttattaaatttatttatattatttt

SEQ ID NO: 1000 - DNA, 340 bp, Glycine max
  Clone ID: PAT_MRT3847_100902C.1
atcctgagcggcgttttttttttttttttggaaagcagaaaccctactttataggggggcattcatgaagactggctggtctgaatattgaggaattattttgtgccggtacttttaagtcctataaaaccaaattcatccatccctatttcaacatatcttgacattttggacctacgtacaagagaactgtaaatttctcagcttccgatctgtatgatcataatttaccttcttaactaaactttgataaggcatcctataacgatctattaatgcccccgtggtataaattgtccttatttttttcatggaaaatacggctgactttatcattggt

SEQ ID NO: 1001 - DNA, 873 bp, Glycine max
  Clone ID: PAT_MRT3847_100903C.1
gttcagatgtgtatgtttgggatactgatagtgggactttggtgaccattgtccataatgctcatgttggtaatacttatgctttggcacggagccatacaggggacttcctttttactggaggtgaagacggtgcaattcacatgtatgagattgttaatgatggctatgagtctaaagcttggcatgttgctgtttgggttcctcactcggctgctgtgtattctcttgcctttgagtttccatggcttgtttccgcatcaagtgatggcaagctggctctaattgatgtgagaaagctgttgaagattagcaagcgagctctggggaagagagtctcaaaggtaaagcatttgggtggagacccggtggagcctccacagaggatgttgcatggatttaagagcaatcttttctctgtggatataggagctgaacgaattgtcagtggaggtgaagaaggtgttgtcaggatctggaatttcacggaagctttggaaattgaacggagagcccgagcattaagaggaatacgattagagcacagaatgaggcgacggaagcttcaaacagagctgagcaataaaagtggtcggagtgatcagtgttcagttgcagccaagaaaaattctgtcacttgtatttggcccactaaacgtggcatgagcggaaagctgaaagcatagtgactgaggcagtctaatgtttgcttatatccaccaattgtcaatcctttttaattttgtttttacaaaattgatgtatacgatatttagtttcaagcaggtaaactgaccaattttaagttctctttacgtattttgatatgagaagtttctgtaggtagtgatcaaatcagactacacccctctt

SEQ ID NO: 1002 - DNA, 350 bp, Glycine max
  unsure (1)..(350): unsure at all n locations
  Clone ID: PAT_MRT3847_100904C.1
ttcaattactttctttctccacaanacaaactctgtatttgttaaatttacacacctgctccgcccncnncaaaaccctctataataattcctcactttcatctatctacactcaaaccttaactcttcttcttcttccccatttatatttttttttttttacttccaattcttttattcttcacttttttcttctcacttcacattcccattcctcccacattctttcaatctctaaacttcattatctcctcttccttcacctttaatcttttaatttctccccttctctctctttctcttctctcaactccttaattttcctttttctttattaccctttttaattt

SEQ ID NO: 1003 - DNA, 408 bp, Glycine max
  Clone ID: PAT_MRT3847_100905C.1
tttttcacgaagtggaccctttacatttgtttgtaaatgtccttagaatccaaataaatttgtcaatgtttcgagttccgcataaaatgtttcacaaaccaaataaattataatccctttacatttctcttgcattcatctcaccaaatacatccatgatttaagttttagtgttgttatactgcccctacccacccaactaacatcgaaaacaaaaaaaataaaacagatgaagccctagtgttacatagtcaatttggtgactttggttcccaatggccaccaagagatatgccttcacataattaaaggccatgtcttgtgccaagaatgagaggcaatgaattctgtgactttttctctctaccaaatggaggaacctaatccttttatgctataaacctaatt

SEQ ID NO: 1004 - DNA, 552 bp, Glycine max
  unsure (1)..(552): unsure at all n locations
  Clone ID: PAT_MRT3847_100906C.1
ccctcgcgtccgaagttaaaggtttaaggatgtatctttttttttatccgtaggaattgaacacagtaccaagggatttacaacacacgcacaccttgcttaaccaaccaagctagacacccttggtgtttaaggatgtatcttatacctcttgggtgtaattctccttttcttgttatgaaatatcttatgctattaagtaaaacaaaaaattagtctatccatgtactaaatgatgctggttttggtttatatttccctagcattttacctgttcctagtcatttataatctataacaataacaaagggatacccccatttggtctacaaattttgttagactactttaccctttaactgctttccaaaccactcactattctatttcaaactttcatgtcaaattgactatatattaaattgttaaaacaaatcaaatttaatactttttcaaaataaaaaatgcagacagacagcagttaccagcactggtgcctgtctttccgctagtttccaacttaatatttngttagatcttagaatgttactt

SEQ ID NO: 1005 - DNA, 284 bp, Glycine max
  Clone ID: PAT_MRT3847_100907C.1
gtggggggggggaaaaatgggcattccttgcgccaaatatcatgtgagcaaccatgtttcaacaattagttccccaaaaataactaaaaagaataaagcttctcatgccatgaataaagccccgccctaaaataaaagggcggggcttccctccttggggggggggggaaaaaaaaaacgggagtagacacaacattctccgggccacaattttgttttgccgaacaacgtttgtcttgttctatgtgggcaggggtaccggggaggaaaaagtaccccccgga

SEQ ID NO: 1006 - DNA, 285 bp, Glycine max
  Clone ID: PAT_MRT3847_100908C.1
gcactgctatcaatgttttcttctttgcttgaagtttaaaaccagcaacacttatggtatggttatttatttcctagaggtagaggcatacatgttgacgaatatgataaggttaattgaaaaactgatagagctgaacagatgatatgaggccagagccttatgactatggcttaaacaattatatgataccactcacacttattgaaagtgctcctaaagctatattaatatatggagccaagcctgcaaaagaaaaatgtggcaccaaaatatgctatcatg

SEQ ID NO: 1007 - DNA, 267 bp, Glycine max
  unsure (1)..(267): unsure at all n locations
  Clone ID: PAT_MRT3847_100909C.1
ctggtgaaaacaatgatggtcatggatcaaataaaaatgtaaaanttggcaggccagcatctgccaaaacagcttcactacaggcaaagaatatgttaaatttancnnngaatttggttgcacctggtgaccatattgaagacttgaaacttccaaatcaatcggatgtctctggaattatttcgaaaaagaaaactgctgatactaaaccaatattgaacccttctgtctctttgaaaacatcaagtgatgatgctcctgctgtaa

SEQ ID NO: 1008 - DNA, 443 bp, Glycine max
  Clone ID: PAT_MRT3847_10090C.1
gaaactgtgactcattcctctttgactccgactccccatagcattgtgttacactctccctcttttctttgttctatcattcgtcttttaaaaaccttaaacccatccatggtttcttcctccgaccaaacacaactttgagctaattaagataagacggaacgatgccgccgatgaagtgctgggtcacgaggttgtcggggaagcccaacaaacaacaacacgccgtgaagctgacccaattgaagctcgaattaggcctcttcggagccaggctcggcgccgcaaacgacaggatcgcatttgaaattacggggattgccaccaagaaagaaacgacacctctcccactcgttcccttttctaaacgacgatacactcacagtcacaccacatgctcccgcagattcctcagttccaaatcaccctctctcgcatgggaa

SEQ ID NO: 1009 - DNA, 254 bp, Glycine max
  Clone ID: PAT_MRT3847_100910C.1
gataggaaaattttcttttaatctggacgcgggggtctcccggggaatttgggacgggttcttgttggggtaccggttttccttatggggggggaaaaaaaagcgggaggaaaagggggttataccagaccccgggggaagggggtacccggtaaaaatccacacaaaatccgggggggaagcaaaaagtgaaaaggggggggggcaaaaagggggggggaacaaacataaattggggggcccccagggacagt

SEQ ID NO: 1010 - DNA, 393 bp, Glycine max
  unsure (1)..(393): unsure at all n locations
  Clone ID: PAT_MRT3847_100911C.1
gggctgaattcatacatatactgcgtttgatttcctagtcaacaatggctatcggtagcataagaataagctaaccatcatttgtttcactccatcatgaacagaaagcgtacatagcaaaataatcattctcacttaaattattcttcacacatctattatataaattttgacttgtacaggaatctctcaaatagaacataacataaattaagaaagttaaaaacatatcatcaatctttgtctagatgagagatcctgaccaaattagtgtcatgaacggtgcatgatcgagtacatgaaaaaaaggacatgctctttctcacccttgactcaattccatctttgatcaactttttgttcaccgtancactacttttctgatgattcttg

SEQ ID NO: 1011 - DNA, 371 bp, Glycine max
  Clone ID: PAT_MRT3847_100912C.1
gaaaatgctcaagaacaatatttctctgtacatgtgacacgtacattttagaggttaaaatttgaaaaaatgttagcgtttcaagaatggttttagcttctgaatttgccagacacaagctgacccatatcaatgcaaaagcacacactgctttcacagtatttctaaacctccaatggttggcacttaacagcacaaggtcctctcttatgagccaccacaaattgggacctatgtcattcatatcttgaatggaacaaagcaagtaatgttttcattttgaactctgacttttagcacttcagctccaatatgcaaatggtccaatagaaaaaagttgaatgaattaggccaatccttgactttgatga

SEQ ID NO: 1012 - DNA, 255 bp, Glycine max
  Clone ID: PAT_MRT3847_100913C.1
ttttggcgcattttggcatcaaaccaccaagccctaaaaaagcattatcctccttctttgttctttgctttgctcttttctctggtctcttgtcctctgagaacacaccctctttacagatcctgttgtttctctctctgtctccacaatggctcatgatcgcgctttgtaggtaggaggacaatttgctcaatatttctaaaggtttgagctttagatctgcgggagctaaggttgtttgcagcaatggcgaca

SEQ ID NO: 1013 - DNA, 640 bp, Glycine max
  Clone ID: PAT_MRT3847_100914C.1
attgaagcagtaacaagttggtcagatatttactggaaaaaagcagttttaatggtattcaaaaatactttaaaaagtattctagcacaagatttcttcgtaaactagattattttgtaaaccttttctacgtcttttggggtgtcagttgttaagtgctgagcttctttctattccaaatctatcttgcgctcctgaaaaactgcagtaaaggcacttgaaagctgttttcctaagatacgatttttttttccttcttgctggtactgcactgttgcaccaagtgtgtgcaatttttattcaaggtcatcgtgatgctgagaagtctcattgatcacctgtccatctctggtctcaaccgtcttaatcaggagtgttctttttgagtgggtgtcaaccagaggaagtgactccaggttagtttctctcaggttcagggaagaaaaggttggcagaggcagagaaatcctgctctcctcgccttccagcagcttcctgtaggtggcgatctcaatgtccagggccatcttaacattgagcagatcttggtattcacgaaggtgacgagccatctcttccttcatgttttgggatctcatcctgcaggcggccaatagtgtcctggtagttagcagcttca

SEQ ID NO: 1014 - DNA, 540 bp, Glycine max
  Clone ID: PAT_MRT3847_100915C.1
aggtttcccgtcatgactgtatgatatgactccctccttgggtgggggggggggacggggtatagcaagaatgaggacggaaatggaagggtaaggggaacgcacgcaaagaattacgcaaaaggaagatcagggaagagaaatgtggatgaaatatagtatggaaaacacgttggatatataatggaggagcgagcataagacttgggatgacactaacagttagagcgatagccagagaggatggcactggggtatcataagttggttatggccaggtagcgtgttaaaaaaaggttggatgcaaaaaacggatgcgcgtaattatatggggtaataagccaacgaaatgatgtactgacgggagtgagaatcatgaacaaatgaggagtagggtgggacgcgaaataaagagcgattcgcaaattaataattagtaaaaaatgccaaggtgttgacgattatggccgaggggtttgtagtaggggttgcgtagaagggagctattttaagtttattggatatgacagggaggggtga

SEQ ID NO: 1015 - DNA, 465 bp, Glycine max
  Clone ID: PAT_MRT3847_100916C.1
accacgcgtcctcttactcattcgtccacgcgatggatagccaatcggaactgcagtatggatcttaggctgtaaacctatcaatcttaaaaaacacactaaaatgttacctatagagaatcaaaatcataccacatatctgtagacttgagagctcagacttttagagggtgtatctcagtattaaaaacacacaagaatgctagtctattcactaacagagtccatctgaggaatgctgaaaaatacatcaaaagaggtaccatgggaaaaggaactggtgttagaacctagaatgataatactctacaaagcagacaatttaccctctgcttagatacctacagtattcgatatttttattgtcaatgttattgctaatggaagcattgttaatttagcgctatggtacacagcccacaacaaatactataacaggaagaggccactgaaatatggaggaac

SEQ ID NO: 1016 - DNA, 668 bp, Glycine max
  unsure (1)..(668): unsure at all n locations
  Clone ID: PAT_MRT3847_100917C.1
ggaaatgttagccaaagcgaaaccctaaccctaacggagagatggcggagcacttggcatcgatattcgggacggagaaggacagggtgaactgtccgttctacttcaagatcggcgcgtgcaggcacggcgaccggtgctcccggcttcacacgaagcccacaattagcccaacgttggttctgtcgaacatgtaccagatgttctacatgaacatgaacatcatcaccaaccccgatcagccccagccccaatctctcgaccccgataaggtccaggatcacttcgacgacttctacgaagatctctttgaggagcttagcaagtacggccccattcagagcttgaatatttgcgacaacctcgccgatcatatggttggaaatgtgtacgttcagtttagggaggaagaccatgcagccaacgccctcatgaatctgactgggaggttttattcaggcagtatgaggaaaatgtatgcaatcgaggtggctattgcaacttcatgcacctaaagaagattagcagggatttgagaaggaaattatttggaagaaataggcgatggaatggccgcagtggaagcagaaagcagagtcctncaagggaatcgtaccatgggggagcatttacattctggtcgtggttctggtagaagagattttgac

SEQ ID NO: 1017 - DNA, 845 bp, Glycine max
  Clone ID: PAT_MRT3847_100918C.1
ccacgcgtccggagaagacgacagaagggtacggctgcgagaagacgacagaaggggaggaaagggaagccaaagcgaaaccctaaccctaacggagagatggcggagcacttggcatcgatattcgggacggagaaggacagggtgaactgtccgttctacttcaagatcggcgcgtgcaggcacggcgaccggtgctcccggcttcacacgaagcccacaattagcccaacgttggttctgtcgaacatgtaccagaggcccgacatgaacatgaacatcatcaccaaccccgatcagccccagccccaatctctcgaccccgataaggtccaggatcacttcgacgacttctacgaagatctctttgaggagcttagcaagtacggccccattcagagcttgaatatttgcgacaacctcgccgatcatatggttggaaatgtgtacgttcagtttagggaggaagaccatgcagccaacgccctcatgaatctgactgggaggttttattcaggtcgacccatcattgttgatttctctcctgttacggattttcgagaagctacttgtaggcagtatgaggaaaatgtatgcaatcgaggtggctattgcaacttcatgcacctaaagaagattagcagggatttgagaaggaaattatttggaagaaataggcgatggaatggccgcagtggaagcagaagcaagagtcctccaaggaatcgtaaccatggggagcatttacattctggtcgtggttctggtagaagagattttgacaggtcccatggccaccatggtaggaggcctagaagccgtagtcctcgatatagagggaaacg

SEQ ID NO: 1018 - DNA, 549 bp, Glycine max
  Clone ID: PAT_MRT3847_100919C.1
gaagctgagcgactttgtgggaagagtgaaagaagaagcgcagttaatgaaggtataagactgcagaaactgagagagaaagagatctggaagagatgagtgaagcgcagaagcaggtttggaaaggggccattcctctccagattcacctccacgaatccgaagtcaccactctccctcctcctccacccgctctcgtgttggcacctcggatagggtacttacctttgctgatttcgctcttgaagcctcagttcagcaccacgcttccccctggagtcgacaccatttggtttgagtacaaaggcctccctctcaagtggtatatacctactggagttctttttgatcttttgtgcgtggagccagagaggccgtggaatttaactgtacactttagaggatatcctagtattgtattgcttccctctgaaggggatgtccgtgtaatgtggtgcttcattaactcactgaaagaggctgcatatgtaataaatgggaatagcaaagatgtgatgaacatgtctcaaactgatcaggtggagctct

SEQ ID NO: 1019 - DNA, 501 bp, Glycine max
  Clone ID: PAT_MRT3847_10091C.1
atgaagctgaaagttggcgaagaacagcagccaatgtcttgttgaaaagtggaaataagaatttactaagtgtactttcagattctgcagcaaatggtgttccaagtttagcaagagctagccttgtaacaatttcatggatgagcagctaccttcacttagttgatgatagaaagcttccaccaatggcattatcaatcctcatgccattgttgctaaaatacttgaattatgacaaggatgttgaggcaagagtcttggcttcatattcattgctatgccttgtaaaaatttcaggatgtgtctctttcctatcatcactagataaagactcactcaaacatctccagaatctctctctagtgacgtggacttccaatgagctaatttcaatcatctccaaaagcagcttgcaataaaaaccaatgaagagcaaaactccattgtttgaactcttcagtgtgtgttcattatttgtcttttatgtacatgtgattgtaa

SEQ ID NO: 1020 - DNA, 1272 bp, Glycine max
  Clone ID: PAT_MRT3847_100920C.1
cggacgcgtggggggaacccaaaccgaaaccctaaccctaacggagagatggcggagcacttggcatcgatattcgggacggagaaggacagggtgaactgtccgttctacttcaagatcggcgcgtgcaggcacggcgaccggtgctcccggcttcacaccaagccgacaattagcccaacattggttctgtcgaacatgtaccagaggcccgacatgaacatgaacattatcaccaaccccgatcagccacaaccccaatcccttgaccccgacaaggtgcaggatcacttcgacgacttctacgaagatctcttcgaggagctcagcaagtacggccccattcagagcttgaatatttgtgacaacctcgccgatcacatggttgggaatgtgtatgttcagtttagggaggaagatcatgctgccaacgccctcatgaatctcactgggaggttttattcaggtcgtcccatcattgttgacttctctcccgttacggattttcgagaagctacttgtaggcagtatgaggaaaatgtatgcaatagaggtggctattgcaacttcatgcacctaaagaagattagcagggatttgagaaggaaattatttggaagaaataggcgatggaatggccgcagtggaagcagaagcaggagccctccaaggaatcgtaaccatggggagaattcacattctggtcgtggttctggtagaagagattttgacaggtcccatggcccccatggtaggaggcctagaagccgtagtcctcggtatagaggaaaacgaagtagaagtccagtgggcagagataggagtcctccgatcagagaaagtagtgcagaaaggagagctaaaatagagcaatggaacagggagaaggaacaaggggacactggtaacatgaacaattcgaaaagcagtgatgattatcaagaacagagtgttgcacaaaatggtagtgaatctggtaaccatcagatatagcaacaacaacgtaatgatttggcccaaaatctgctagtaagtgtggcaagtaatctgatttgtgttgtttgcacctgcatttagatggattcagttgccattgttattattctatttggaattgtcaatttagtgatagaactttgtaatatccacagcaacaacattttaattttctgcttcaattgtaatgtcctgcaaggtaggaaggaaaatggaaaatgaagcgatacatttgataaagttcagctatgaatgtttcatattttgttatcgagc

SEQ ID NO: 1021 - DNA, 1083 bp, Glycine max
  Clone ID: PAT_MRT3847_100921C.1
cgcgtggctctcaccttcggtaccatcaaagcctcccccgggggataaattgaagtatagattgaacacacacatagaaacccaacaacaagaatgaagaagatgattctaaccctcttcttcaatatcattttatctctcctctccctctcccacgcctccgtggtggatttctgcgtagcagactacacaggccccaatggccccgcagggtactcatgcaagagcccagcaaaggtcacggtggacgacttcgtctactccggccttggcaccgccggcaacacctcaaacatcatcaaagccgcggtgacgccggcgttcgacgcgcaattccccggcgtcaacgggcttggaatctccattgcacgcctagacctagcagccggtggagtcatccctcttcacacgcaccctggtgcctcagagctgctggtggttgtgcagggaacaatctgcaccggcttcgttgcttcggacaacactgtgtacctcaaaaccctaaaaaagggtgatgtcatggtgtaccctcagggcttgttgcacttccagatcaacgatggagagtctcaggctttggcttttgtgagcttcagcagtgctaaccctggcctccagattctggacttttctttgttcaagagtgatttccccactgagcttatcacgcaaaccactttcattgatgctgcagttgtcaagaagctcaagggtgttcttggagggtcaggttaattaaatataattaacgcgtgttgatgtgtttttaattaaacggagttgttcattcaaaacacaagagtctagagtgtgttgtgttgtgtcatttttgttaaatttgtttgttttggttttgtactgttttggatttagcagcatgcatgtaatttgtaaaagtatgaaggtatgggtttcttcttcgatctttagcagattgtctttgttaaacgaaccagtgatctggttttggttatattgtttctagttgttaagtaattaagttgcttttacaggctgataactacttacttcagaaatttatgctacaagatgaataaatgtgtggttttttctggttcgtct

SEQ ID NO: 1022 - DNA, 2125 bp, Glycine max
  Clone ID: PAT_MRT3847_100922C.1
ccttcaccatcccggattctccctgccactacaaattcccaacttcgcaaaccctaggcagcagcagcagcagcaacaacaacagcaacgaagaattcgaagagaaatcaaatcgaatctcatttgatctgtgtgtggttgcggcggcggcataccgcaccgatccggagaagctcactggaagaaaaggaaaggagggagccgcaaaccgaaacccaagggaagccaaagcgaaaccctaaccctaacggagagatggcggagcacttggcatcgatattcgggacggagaaggacagggtgaactgtccgttctacttcaagatcggcgcgtgcaggcacggcgaccggtgctcccggcttcacacgaagcccacaattagcccaacgttggttctgtcgaacatgtaccagaggcccgacatgaacatgaacatcatcaccaaccccgatcagccccagccccaatctctcgaccccgataaggtccaggatcacttcgacgacttctacgaagatctctttgaggagcttagcaagtacggccccattcagagcttgaatatttgcgacaacctcgccgatcatatggttgggaatgtgtatgttcagtttagggaggaagttcatgcattcagcgccctcatgaatctgacatgggattcccttatattcggtcgtcacatcatagccgtacagctttataggtaatatagttcttgcagaaatgtcccttttctcaaccggttaattattaacattccaacgtatgttggtcttgtatgcttgttactgtggttgatttgcagttgttgaatgtatgcattattttacagtcaggtacactgatcaacatgaagactaatgaacgagcagtttcaactctttgattaggggttttttgtttgcaatgtataattaatttttcctcttggaatatgaagtagcaagatcttgacgttgttatgaggtatgcagattcagatatccggtgttcagagatcagagtcgcccgataggtaagaggagtacaacgcggagtcctcgaaaaggggaatagcgaagtagaagtgctgagggtagggatagtagcactccgatcagaaaaagtagtgcagaaaagagagctaaaattgagcaatggaacagggagaaggaacaaggggaaactagttacaagaaaaatacaaaaagcaatgatgattatcaagaacagagtgttgcacaaaatggcagtgaatctggtaatcatcagatatagcaacaacaacgttgaggtttggcccaaaatctgctatcaagagtggcaagtaatctggtttgtgactttgtcgtttgcgctgagttagatggattcagttgccattgtttttattctatttggaattgtcaatttagtgatagaaccttgtaacatccatagcatcaatgttttaattttctgcttcaattgtaatgttctgcaagggaggaagaaaaatggaaaaagcggcgagtttaacttgttgcgaggatgaagcgatacatttgataaagttcacctatgaatgtttcatattttgttgtcgagcatttattgtatgtcaccaatgttgaagggtatttagatggaaaacagatgaaatgatgtatgaatttcgactatgtgaatagctaaaggtttttttttgtgttaagtaaaaaaaaaaaaaaaaaaagcggccgctctagaggagggtataaggttaatgctgaggaaatcaataatggtaatgctagcaaacatcatgggcatcagcagcaggagcaggaaccgcaatcacctcaggagggacaatgatctgtttatgttgtaatggttcatggcttgctctttgaggatgttttaacggatctttcagctggcaagtaatcgtgtttgtaggagaagccttggctggtttacttgctgcatttgtgcaggctctgaggaagatggcttcatttttataattttatttagttttctttttcctggcatattaggattttttagtgtgtaaaccttcgaacccaattgtgcgcttgtaaaattgttactttgaggaagcagcttttgaacgtttaatacattatcgacgtgcatgcatttccttgataaaaaaaa

SEQ ID NO: 1023 - DNA, 590 bp, Glycine max
  Clone ID: PAT_MRT3847_100923C.1
ttccgagatcgcgatacctgagattcatgatactctcgtatatctttccaactatcctcactcttactataacccctttatgtatcgtcgtacgattgacctctccctccttgtcttccatataaatggagtctgctaaagacgtcgagatccctgaccttgttctaagagtgagccagctctgtcgacgatggagatcgaacggtggaccacttaggacccatcacgagatcttcgcctagagggcatcatcgccggacgacagactacgctacaactgtctactctgacgattaccgagactgatacaatgactctgatatgcgcgtagctacccctttcatcttcatgaagattctccagggtcattaagttcacctctatgctgtcaactatgtgtacactcctcctctcctacgtctctcaagtatcttgcggacaacatggctcacatcagaaactgctagatgcttgtatatataatcatgattctttctggactcattcaatgatgaggatctgactccaggtaacgcttgcgttctctaacgattgtcataccgcgctttgcatgacttctgatatcatat

SEQ ID NO: 1024 - DNA, 371 bp, Glycine max
  Clone ID: PAT_MRT3847_100924C.1
gtggggggggattttttattttttttttattatttacttgtcactgttctttggactctggaaattttttattccatatgtttttttatacccagccaattgcgaccttacgaccaccgggtccaactggaaaaatttttcaacagggggagccaaaaaaaaaaagggggggggcaattcaaaaacatggggagggggaaaaaaacgggcctcaccagaggaaaagactgggggaccacccccctgttcataggggggggaaaaacgaagagagcggacagacacccctttatcaaaatgaagcccaagtaaagggggggatgaaacgcctcattatgtcctgtacaaaggggggggggtgggagggaaac

SEQ ID NO: 1025 - DNA, 513 bp, Glycine max
  unsure (1)..(513): unsure at all n locations
  Clone ID: PAT_MRT3847_100925C.1
tnnnnnnnnnnnntttnnnntnnnnntncctacctctatttctttttcttgggcctttatttctttctcttcgacctttatttgtttttccctcctctgactcattgcatctgttacctcattcttctttttaacaatagtgtccttcacaacaacttgctccttcaaagcaacaacatcctcatcctcaaccgccacaagcttcctgcttcttgatacaatagctttacactcttctttgggattcttctcagtattcaccgtaaagttgttggatgacttcttagctaactgcttggccagttgacccacctgaatctcaaggttttttagggctgactcagtactcttatggttggacatggtcacttgcatgaattgagccagggtttcttccaatttggtagtcctctaaaaaatattaggcctttcttgaggcgtcctgttggaaggtccaccctagtccttattgaattgattaccagggtgtgatctccattgtccttgctgatc

SEQ ID NO: 1026 - DNA, 575 bp, Glycine max
  Clone ID: PAT_MRT3847_100926C.1
ttttatgggtctcaggctggatgggggacagctccaccagcagcggttcagtctatgccaatgcagatgcacaataatgtttacatgccacctggaactatgccacaacaaatggcccctggaatgcaatttcctagtcacaacacagcacaacctacaacaacaatgccctcatatggatctgatcgtactcaatagcatgcatctcctttgtctcaaatagatctatacattggttagcgctggcttatgcagaactgaggactgtcatttaaattagggttcccatctggtgacattggcctctaatccatttgtttgacagttattttgaacctcaaatgggccacttctcatctttcccttaagttatttttcagatgttgaatattgaatatggaagtctgtaagcaattggtccccaacttttgagtgttttaactttgaaacaaaatattctgttttagtttatttgtgtttgagaatatgatgtaatcctgtataatcgattttgtatggccgacagaacgtaatatcatgttattaccagcatcgtcgtttgggttgtgaagccc

SEQ ID NO: 1027 - DNA, 1002 bp, Glycine max
  Clone ID: PAT_MRT3847_100927C.1
cggcgggccgggcggtacatcaattctctcgaataatccggaattcaaacccctaatccctaatcaatcgcaagttcgaatccctaatttcaacctgttcttcctcaacgtgcgtcgtgagcgagttaaggtttcgatggtgttcttgtggcacatttgaacagagatagacaaagcgccggctggttcaagacgtctatgtggactgtttgtacggagaagcagggaaagaaatagcgatggatggttcacgacggctactgggacattctataggggttttcagtgaagggattggtttagttttatttcgctggtcgactcttcgaacggctgttgagaatgaatggggtggccatgagtcccgtgtcaaagccgatcaacttgccagtgacattcttgcctggttcactcaatccaaagagccactttatattgatgacttagaagacatactggatcaaggtatgctttctctcaatgtagaggttgaggatggcagcattgaagaggtagctgaaaaactaatggttatgcaagaagaattcttagaaggcaattttaaatctttagaagatctcagaaaagccaatcttgagcaatgctactcgtcctcttgtaccacagattgtaaacgatggtgaagacgattcagatgaagatgttggcctcgagtaacacagattggaaacgaagaagattcaaatgaagatggtgatcatgatgaaaaaatgattgtggatgataattcttcaaacatgaatccggagatttcaacatctgattcaaacatgaattcagtgaacaggccagtaaatgagagcctctacttggtttcaggcctcccccgtgtggggtcggctgtagtaaaatggatgagcatatattgtaggaaatcctacattatttttgtctgtctatgaaacatttaatgtttgtagtttatgctactgaaagttgtgccatatcttttccagtaaagttgggtcacttgcttgttct

SEQ ID NO: 1028 - DNA, 262 bp, Glycine max
  Clone ID: PAT_MRT3847_100928C.1
catcttcgttgtgagaactttcgctggttggagttctcgttacctctagtgtaagtacgagtctattctgcctttggggactcagttcgctgattgggtattcttgggaacctctttgatgcatttcttgagcgattctgatgagatcttctcgagaccttaccacagaatcttacccttttgcctatatgctggcttcatctgggtaccttctcaccatgctcggtgactgtgttatcacttatgtcacgagcaatatcaa

SEQ ID NO: 1029 - DNA, 297 bp, Glycine max
  unsure (1)..(297): unsure at all n locations
  Clone ID: PAT_MRT3847_100929C.1
gcactaatatcaagacaaagtaccactgagaagccaatggaaagaaagaanacgaggacaaaagaacatacccgtctttgaacagccatatgttgatagaacgaggcaataaactgtagattatttagactttgaaatttcagtaaaatgcttcttaaaatattaatcagaactacacaaataatatgttatggcagacaaatgccaagcccaagatccatttaattggcttgaggtttaaattgcaccaccatttttttatcagctagtgtttggttgttagttttttnttttttt

SEQ ID NO: 1030 - DNA, 334 bp, Glycine max
  unsure (1)..(334): unsure at all n locations
  Clone ID: PAT_MRT3847_10092C.1
taatncananntannaanatacgaattngnctcnagtncacattaaangganctaacaacaatgncntttggnactntgtaaacatatantntanaagaatgaanaatattgaatanacaactnngagtgaancnactggtntanacagntggaganatncaatngnattnncacnagnnntgtaacgctgtacattntatgtcntaantgacaggttnagnganangtanangtaagnnngnaagaacgntngngncganacngtnnggcntggtgactgtgcnngatgaaagntggtagtcttnanacttgatctnttgnagntggagatnn

SEQ ID NO: 1031 - DNA, 406 bp, Glycine max
  Clone ID: PAT_MRT3847_100930C.1
ctatgctgaaagctgtgccgcctcgcgggccccggtccccaattccccccacgccccacgcttcccattctggactaaacacgagaaaaatcttgctttgacagaagaggaaaagatggcagtgattacaaatagaggcattcctgctgatgttcttgcaaagcgagctcatgactttgacaaacatggagctcatgaaagcctcaaggatcaaattcctgctgatgacaagttggcttctactaaagttaataagcttgcaaaaattatgcaccttacacaaagcgaggggggatcttaactttactgcgggaagaagatgagggctagcatattcctgtatctaatattcgagcacgggaacatcatgttagggaaatacccctaacggcacaggaagaaattc

SEQ ID NO: 1032 - DNA, 270 bp, Glycine max
  Clone ID: PAT_MRT3847_100931C.1
gttccgtttcctttggtggcgttgccgggaaccggtttgcggggcttaatttgtggcacagtcaaagggatagaaggttacaattaccctttttaacttacaaggttttaacagtttcaaacttttgtttgaaacccaaaccggctgattccgactcctgaaaaaattcaccaatcgttcccaaaaacttgggaacctttgaaactaccggatggcccagttccagtcaaaaccaaacacattccttctaccccaccatgctgacgccga

SEQ ID NO: 1033 - DNA, 301 bp, Glycine max
  Clone ID: PAT_MRT3847_100932C.1
tggatatctgcagaattcggcttaagcagtggtaacaacgcattttacttggttttttttttttttttttttttgttcaaccggtgaattataagatgttcttcaatcacaacttcatcaatcaatcaatcaatcaataaatcaatctcaaacaagatgatttatgatttatggtctaattcaacaattttttgatgataatccctaatctcaaattttttcaatcatcacaaacatcaaattaatcattatccaattcaaatccttacaatttttcccgctttaaccaccggatttttcc

SEQ ID NO: 1034 - DNA, 274 bp, Glycine max
  Clone ID: PAT_MRT3847_100933C.1
ttactgctgcgagaagacgacagaaggggatcatcatatcatgtcttatacaactgatgaagtgatcaacttgtaatgtaacacttctgagttggattgatgggttacatctactgcagatgatggatggatgggtaccgtggggtctaggtatagtgctcagtcacaactttggctacaggatgaaagagagcctaaacggcaacggctgaagcatactcacagggattacgacagtgcgctcagaccgcgacagcatgctgtcacacatgag

SEQ ID NO: 1035 - DNA, 134 bp, Glycine max
  Clone ID: PAT_MRT3847_100934C.1
ggctcgaggtctctgaaatcatctgctatggccggttttactctggacttgactattgccagatgccccgtgactcactatcacactctaccggcgtactaactgctttttccacctgactgcatatacgtccc

SEQ ID NO: 1036 - DNA, 242 bp, Glycine max
  Clone ID: PAT_MRT3847_100935C.1
tttcaatcaaagtccatcttgactctccatcgtgcattgtacatgatcaaggcaaaagcaaaactagtttttaattatagttttagtcaacaggtaaggttcaacctattagggtcacttgtatctcaaagcgtgattggcttgctttcctctgtggttcgttacctttgtctgtataaatggaaatttgtatattgtaactatattctgcatgaatgaaaatgactacacatatacgagcg

SEQ ID NO: 1037 - DNA, 332 bp, Glycine max
  Clone ID: PAT_MRT3847_100936C.1
cttctatgatctttgttaaatattttaatttggtctaattctttctgtttatttattgaaaaaacccagccacgacccaggggagagggagagtatccacaaagtactaaaccagggccaaaactggtgcgggaactgccaaaaactccatcgcattagcacccaccggagaagacactaagacctagaataaaccatacagaatgaagactgatacccttacgtaacaacataggacacttagaaaacacggattgacagagaaacccagtccaacgcataagagggggacttctggagagaaaaaatagccgaatcaccttcacactgcg

SEQ ID NO: 1038 - DNA, 531 bp, Glycine max
  Clone ID: PAT_MRT3847_100937C.1
ggaaacggggcggttggaaccgggcccaaaatctaaagataagggcccgggaacccccaaaaaagcatcccccagttaataaagtttttaacaaaaacaaaggccacaatttgcttttgcaaacaggaaaaaaggcccaaaaaacagcctcccaaaaagggacccaaaacccctaaaaatagggataagatttaaggaaaaaaaaaaaccttgcacattataaactttaccaaaaaacaaggtttggggaaccgaaattttcagccaggaaggatttgctaactggaaaaatttgcctgggtctaaaccttgggttttgaaggaacaactccaggggcttgcttttttttgaccccacccactatataaaaaatcctaaaaagcatacaaggggtttaaaggggagtctaaaaggctggggccttcacatgggaggcatcccaaattttgccctttttcatggaagggaaactgccagtatttccatttataccaaaccatgcattttttccattggcatgttttccttgg

SEQ ID NO: 1039 - DNA, 522 bp, Glycine max
  Clone ID: PAT_MRT3847_100938C.1
tttgattccttcgtgcttgcttctggaatctcaacaacaccttttgctctctcttggctggatcagtcgccgttactcaagtgctgtgatcgcggggtagcggagcggagtggccccttatcgctcctaagacactcgtcacggcactattagccgggcaaatcgcagagaattgcagcgatttgtgggttttgcagctactacttcgtttgcatcgttgacggacaaggctctacgacattcgttgttgctggacaaggccttgcaaccttcaccgtcaccggcaacagcttctgcggcctccatattgcttttgctgacctttcaagcacccaatctgctttgtcttcctcttccatagaggcagtgcatgctaacagtgggctgggtcttagggtttcatttcagggtgttcctttttttttttcttttgtctgttttgattttttgggcctcaatttgagtccattagctttcttttccttatgtaaaacataacatacagctttttttttttgctga

SEQ ID NO: 1040 - DNA, 435 bp, Glycine max
  Clone ID: PAT_MRT3847_100939C.1
catcacaggttgccgcaccttaaaaccggtaccaaaagcaatctgatcttgattgcaagaatgttccaattccttcctacttcttggggtacgactcccttaggggaaagaaaatgactctctgcgctggccacagacttcgagaatcatacactatgacactcttacattatgtgctgaacactctcctatttgatctacgacttcgggtcaaatgttagaactttttctgatgctttgtcagcatgtctgcttaattgtcaagattaacgctggggaaatctcagattagtgctcccactctcctatctggattaggacttctaggggcgacatctctatatctgaacgtttctgtcacctcgcttattatcactgatccgaattgaaccgtcaaaggggtgttattagaaaaacacttgagcagcaggagca

SEQ ID NO: 1041 - DNA, 677 bp, Glycine max
  unsure (1)..(677): unsure at all n locations
  Clone ID: PAT_MRT3847_10093C.1
tacggctgcgagaagacgacagaaggggaacctaattgagcagcgaaaatcctctgatactgttgttttcctgaaactatgacaaccatgtcaacctcatcctcttcccaaagcctcaaaattggcattgttggattcggcaactttggccagtttctggccaagacaatgattaaacaaggccacactctcacagcaacttctcgatctgattactctcaactttgtctccaaatggggatccattttttcagggatgtcagcgcattcctcgccgcggacatagatgttatagtgttgtgcacatcgatattatcgctatccgaggttgtagggtcaatgccactcacctccctgaagcgaccaacgctctttgttgatgttctttctgtgaaagaagagcccacccaagagagcttctactgcgagagttgccagaggattcggacatactctgcacgcacccaatgtttggtcctcagactgccaagaatggatggacagatcacactttcatgtatgacaaagttcggataagagaccaagctacctgctctaatttcatccaaatttttgctactgaggtaggttaatatcctttgtcaatacccaccaatcacgaaagaagaaagaatctttttttttttttttttgccattgtgaagnaactacttgca

SEQ ID NO: 1042 - DNA, 218 bp, Glycine max
  Clone ID: PAT_MRT3847_100940C.1
ggcttgcatacgaacttattgctatggaaagatctcaccaaagcataaatctatgatcgggtgctcatgtgtttgacgtgtagatccagtatgcgcattgatgattgcaacgagctcattatgaccattattaataccggatcatcaaacatccggactaattaacctatggctaagggattttaaccactggttggcaaattcaatttacattaaat

SEQ ID NO: 1043 - DNA, 307 bp, Glycine max
  Clone ID: PAT_MRT3847_100941C.1
ggaaagctaacatgataaattttttttcatcaggggttaacctttccaaagggaaccccttttttggggccattgggggttttaaaggtcaaacaaacataaacagaatttaaaactttgtttaaaaatttaaaattaaaggggtgtttttcacacaataaaaataaatttcaactccctaataacaaattcctttaaaaaaaacctccaaatttttttttaggggaacgggggaaaaaacttttcccatagcaaaaaacttggggccgtttttgggacggaatcagccaaataatggccccccttt

SEQ ID NO: 1044 - DNA, 1340 bp, Glycine max
  Clone ID: PAT_MRT3847_100942C.1
cggccgctcgagccggcgggccggctctctgatccctctcccctcccctccccctccccatcctcctccttcttctcctcttctcaatccaacatgttcaactaccttctctccctctaacgatggaccactcagatccattgatttgatagttgcaaaggaaaagatacgaccatgcagattcattaccattggtttgattctgaagctaaaatacggttgttatctaattgtatatccagtctctattgcaattgataagccactttcaaggtgttatcatcttgctgaccctggagactttggtctgagtgaatagataaattggtcgcaaatttgcaagatgccatattatatacagagactttataggctatgcaatgcatccttttcacctaatggacctgcgtctgaagaggccatcgagaaagttcgtgagaagttagaaaaaatcaagccatcagatgtaggtcttgaacaagaggcacaagtggttcagaattggtccggttcaatgcttgaacgtaatgggagccatcaatctttgccacctatcaaatatttgcatttgcatgaatgtgattccttctctataggaattttttgcatgcccccctcttctatcattcccctccataatcatcctggaatgacagtattgagcaagctgttatatggctcaatgtatgttaaatcctatgattggattgatgcacctggctccactgatccatctgaagctagacctgcaaagcttgtcaaagatactgagatgacagcgctgattcccacaacagttctctatcccaccagcggaggaaacatccattgtttcagagctataactccatgtgcaatctttgacatattgtctcccccctactcttcagaccatggaagacactgcacctacttccggagatcccaacggaaagatcttccagttaatgttctgttgaacggagtgacggtttctgaagtgacttggttggaagatttccaacctcctgatgactttgtgatccggaaagggcagtacaggggtccagttattagaacttgaaaattttattgtttgatgtgtcttactacaccaaaaggaaattggcttatgtttaggttacaacaaaggaaactgtggaatgtggaataattatattctttgtctatgtcctttaggcattggagtatgtacataataatgcattagtgtaattatttacagacctcagcttaatccattagaatagttaactgtatgttgaaatagtacttccccgtggccatatcaaaatttgttttcgtggagaataagagggtattgtgacttggtccaaaaa

SEQ ID NO: 1045 - DNA, 265 bp, Glycine max
  Clone ID: PAT_MRT3847_100943C.1
tggagtcggagtacacatcttacattgcccctgttgtcgtgaagaacggtgagcgacagtgcgcaaaattgatttatcgcaaaatgtggtagctacaggtaccttcatttcaaatcgcagttgcatcctagaaattccgctgataccggccgaaggtggcaaaccgttcgtgatcatcccggcgacgtacgatggtcacctgccgtatcagttaggcttctcaatgacgcttttcacatcgaagccgactggctgtgattcccat

SEQ ID NO: 1046 - DNA, 668 bp, Glycine max
  Clone ID: PAT_MRT3847_100944C.1
attttccccacgcgttcgacagagtgaagcgagcgagcgagtcacgactcagtgagcgatggtgggcccacagtacgattttctggcgaaccctttgggcgccgtcagatccaccttcgacgccgccgtagcctccgttcccgatccctccgccttcgacggccgcgactggggcgtcttacccctcttccaacacttcctctcagatccgtccagactctctcaggttcctcttctgacccctgccaccatccaatgggtgaagcccaatactctcgttcggtttcgcgggatgatacaagacatgctcgggaatgaattttacgttggcgcttataaggatggttcggtgtggaggaccaacaagtttatggatgcttctcaatctcttacggcttcttcggcggatatgcgaatctgggaacgtcgactgctttattgtgttccggttccgggattgagtccatggactcaagtttcaactgaagaatttggccatctatctatggatcggacatcagagaatagagaaaaacggaggagagaagatgatgagtcttctgatatgcctgtctctggtgatgaggttcagaattctccaaatactaaaagaatgagagaaggtgaacactcttcccttgcttctaattctcgaggagctgcgactg

SEQ ID NO: 1047 - DNA, 484 bp, Glycine max
  Clone ID: PAT_MRT3847_100945C.1
acccttccgctttgtttggtgcaatgtgccaatgtttggtaggtcgaaattatgtcatttttaaacctcaattgctaatttctgctgggtgagttttattttattgtatttagcctacaatcttgatttaggctagtattcttattataaagtagtgatcttggaagatcttaacatatttggttcatgcctctcatggagaagaacctctttttggtttctcaagatgatatagtcttgaagggatctagcacaccctcttttatcaaaacccctttggcttcttttgcactttcacttacacaaacacaattatatcacattcaaatgccacactcttggtgattatgcttgaatcaacctggtggtggaaaccattttaaaatttattttcaagaggcaaatatcttaaaatgaatatgattgaaaatataaaatgcattgttttaatttaatggaactagttttaatatattttaatggc

SEQ ID NO: 1048 - DNA, 461 bp, Glycine max
  Clone ID: PAT_MRT3847_100946C.1
ggaagctctcaaacctgactcaaaggaaaaaaatgaacagaaattatgtcattctaacaagaaatggtttgagaggcaaaaattagatactccagtgggatactcacaaactcatatagcaccaccatcaccgtgacctattcctccaccagaagcgattaaattaactgatattgaaaatgacatcagtcatgatcacgactatgatgttgaagttgcaactgccatgcatgccgaagaacctgatcctgctattcaaaaacaacctgttacggtcgtagctgacctaattgctcattatgctgataaaccaaacgatgaagtgactactatcaaaattcaaacatgttttcaagggggtctgtacataagatcttttcctctagggattggttctaaacccgaagtttcaatgtgaagcttcgaggaaactgctgttgttatcatcaaccatgttaacc

SEQ ID NO: 1049 - DNA, 314 bp, Glycine max
  Clone ID: PAT_MRT3847_100947C.1
ctcacacgtgcgcaacaagctgttcatccttctattggatctgccagtgaataatgctgaggaagattgctgccacttcacaggacactctacagaacaagctacataaccacgtcgataacgcctgcgaatacgcgtggcattacctctagctagtgcgacagccgtaagataatccgtcgcagcaagttctcaatcatggtcactatatccttcaccacccctaacaccgatcctatctatgctcctatgaatagaccttgtctgatcatgatgcagatgctgatatgcattgccaatgtcacgactgtgcc

SEQ ID NO: 1050 - DNA, 250 bp, Glycine max
  Clone ID: PAT_MRT3847_100948C.1
tcacttctctttcaccacattctaaacataacactttttaccccatcatccccaataatttcttcttccccaaccttttcttttattaccatcttctcttctcttttttaacctatttcctccacaaaattattactcaccacctcattcaccacaaccctcttaccatttactttatcaaactcatcttttcccacaactttcatacttaacaccctcttcctcacatcctttacctttaattccccac

SEQ ID NO: 1051 - DNA, 366 bp, Glycine max
  Clone ID: PAT_MRT3847_100949C.1
gatcggcacagatcagcgccgctgaccacccctgacgactccctcgacacttcgataggggcagagattctcgtcgtcgacactcgcccacagccgcccgttgctcaatatttgatgccgcctctctacggcgaagatgcgaacgcagcccactccacgccgccctccaagaggcagatagagaccgaccaaagttccaacgagacccagttcgaaatccccaagcccttcgataccgccctgtccaacaacttcacggatacatgcgccaacttcttacgcaaactcctaagcgatcaagagttcaatgacttgcatgccttttctttgatgctagagacttctaccgggttcttcgatgcctcg

SEQ ID NO: 1052 - DNA, 743 bp, Glycine max
  Clone ID: PAT_MRT3847_10094C.1
ccgggtcgacccagcgttcctttgatgaagatggtgtcaatttggggttcttgatttctgaagatgactttttaattattcttcatattaggggatagtatacttccctctcttgatagatatttacctctaagagatgaaatgtgctatacttttgtccattttaatatttttttattagtattgtccagtttaatataaatgaatcttttactagttgcaaacatttatagatgggcatttcctttttctataactttcaatgtcaccaactactaattttaacgccttattattgagttttggattctagatgtaatgaagttttagacatgactgttatcagctttggaacctttttttttttttacctataatcttcatttcatcttctgaacttcccaagttgatagtagggttcagaactgattacagatgatgctggatactgtagagagaaaattacatccaataagcttgcttacactaaaatgggcctaagtttagctcgttcatattcttctcatgggagtagagggtaatttttaaaattagaggggagggcagtgtagtttaagtgtctttcaagggagttgactataatttacacatcactaccactacttttactgacaccattttttttttcttgtatgatgttttggacagtagagtaaagagacttcttcattttttaaagttgtgattctcaattaagttatctttgtttactgtaaatgatt

SEQ ID NO: 1053 - DNA, 1657 bp, Glycine max
  Clone ID: PAT_MRT3847_100950C.1
cccacgcgtccgcccacgcgtccgcccacgcgtccgccctcgagccgaatcggctcgagtacggctgcgagaagacgtcaagagaacatggtaacgagtattgtggatcttcagtcacacacagaggacgataaagggtttttgttttgtttccttgggtgctgcatgcactttcactcgaagaaccttgaagcgagtctgggccacagcaaccagcgacaacaactcaatcagctagggttgctttgcttgctatcttgttggaggattttctgttcaagagaagatggtaactagaattgtggatcttcgttcagacacagttacaaagccaactgaagcaatgagagctgctatggcaagtgctgaagttgatgacgatgttctaggctatgatccaactgcttttcgcttagaaacagagatggcaaagacaatgggcaaagaagctgctctttttgttccatctggcactatggggaaccttgtatctgtacttgttcattgtgatgtcaggggaagtgaggttattcttggagacaattgccatatcaacatttttgagaatggaggcattgcaaccattgggggagtgcatccaagacaagtgaaaaataacgatgatggaaccatagacattgatttgattgaggctgctataagggacccaatgggggagctattctatccaaccaccaagcttatttgcttggaaaacactcatgcaaactctggtggcagatgcctctcagttgaatatacagacagagttggagagttagctaagaagcatggactgaagcttcacattgatggggcccgtatttttaacgcatcagttgcacttggtgttccagtggataggcttgtccaggcggctgattcagtttccgtttgcctatctaaaggtataggtgctccagttggatctgttattgttggttccaagaattttattgccaaggctagacgactccggaaaaccttaggaggtggaatgagacagattggcctcctttgtgccgctgcacttgttgccttgcaggaaaatgttgggaagctggaaagtgatcacaagaaagctagacttttggctgatggattaaaagaagttaaaggactgagagtggatgctggttctgtggagaccaatatggtatttattgacattgaagagggtacaaagactagggcagaaaagatatgcaagtacatggaagaacgtggtatccttgtgatgcaagagagttcatcaagaatgagagttgttctccaccaccaaatatcagcaagtgatgtgcaatatgcattgtcgtgctttcagcaagctctagctgtcaagggagtacaaaatgaaatgggcaactagtggaagaatttgaatatggcacgttgctgccatattagtcattaaaaaggaattccgtgttccatttgcctttgctcatttgattttcttaaatgtaccctaaagaacatgcaaagatttacatctttgatgttgttccctgttatgaattatgttgactatcatcgtcgttcccctgctaatttagctcattgtttactgtcccattattaggcatgttaggcatgtataggatattgtgcaacgttagcaatatatttttaatatatcttttatcaattaggtaaa

SEQ ID NO: 1054 - DNA, 446 bp, Glycine max
  Clone ID: PAT_MRT3847_100951C.1
ctcctagtctgcggccgcgccgttggtaaatttttttctttgttgtattatcctttttctaggagcaaagatattgtcttcccttcctgccgctcccccgggactaaaaactatgattaaatctattgatgcaacactagactgactccgggaatttctccacgaggctttatcccatggtactggggacagctgatgatacatcttgaaatatgtagccaatgcttctgatgcctatccgtgtagctgagacattgctgtccgttttatttgaaaaatggggcccttgtaatgcggcacaaaaagtcacttatatgtcgcttgatgttaaaccttaaagattcatacagccctgatttgcggagaacagtctgcttggtgttgttgaaccttgcgtctgatctacatgagcacagcggcaatggttagtgcgcaaaggatgcacg

SEQ ID NO: 1055 - DNA, 303 bp, Glycine max
  Clone ID: PAT_MRT3847_100952C.1
tatagcaaccccaaagatgacggacggcacataatgcaatacttatatgtaaggcactttgcgggtgcgaaaccaatgcagatgagcctatgcactggtgataacattgggagagcacaaggccaaatgccaagggaccgcgggagcatgccaagacacaaccaagagggacacccacacctcgtggtagaggatggtaaccgccgataggagcacagtggattacgcccgttgactactggcgaaccaaagctgctgcgtagacagaggaggctgattgacattgtggtcctttgccagggc

SEQ ID NO: 1056 - DNA, 2506 bp, Glycine max
  Clone ID: PAT_MRT3847_100953C.1
gggggtttcactgtttcagaatgaacggcttaagaagtgaaagagcccctctcttggaggctgagcgtgctggaagaggaaagagggatggtgcctcggaaggtcaagcctcagaccttgagcatggtgatgcagtgccggcggcaaatgtgggattctgtagggtgctttcacttgcaaaacctgaggctggaaagttggtgatcggtactgtggctctgttgattgcagccacatcaagtatcttagttcaaaaatttggtgggaagataattgacattgtctctagggaaatgaaaactccagaggagaaagatgaagctttgaatgctgttaagaacaccatactagaaatctttctggtcgttgtcttcggttcaatttgcactgcacttcgagcttggcttttttatactgctagtgaaagggttgttgcacgactgagaaagaatttgttcagtcatcttgtaaaccaggagatagccttctttgatgttactcgaactggggagcttttaagtaggctatctgaagatacacagatcataaagaatgctgcaactaccaatctttctgaggccctgagaaacttttcaactgcattaattggtctgagcttcatgtttgcaacatcatggaagttaacattgttggctttggctgttgtacctgttctttctgttgctgttcgcaagtttggccgttacctgcgtgaactttctcataaaactcaagctgcagctgcagttgcttcatcaatagctgaggaatcctttggtgcaataagaacagtaagatcatttgcccaagaagattatgaagtaacacgctactcagagaaagttaatgaaacacttaatcttggtcttaaacaagctaaaattgttggactcttttctggaggccttaatgctgcatctacactttcagtcattatagttgttatatatggagctaatttgacaatcaagggttccatgtcctcgggtgatcttacatctttcattctttatagtctctcagtgggttcttctatatccggtctgtcaggattgtatacagtagttatgaaagctgcaggtgctagcagaagggtatttcaacttttggatcgtacctcatccatgcctaagtcaggagataaatgtccacttggtgatcaagatggggaagtagaactagatgatgtgtggtttgcctatccatcacgccctagtcatccggtgctcaagggcattacattgaagctgcatccaggatcaaaggttgctcttgtcggtccaagtggtggtggaaagagtacaattgcaaacttaattgaaagattttatgacccaaccaaggggaagattctactgaatggggttcctttggtagaaatatcacacaagcatttacactggcagatcagtatagtgagtcaggagcctacactcttcaactgttccatagaggagaacatagcttatggatttgatggcaaagtgaacgatgttgatatagaaaatgctgctaaaatggccaatgcacatgaatttatatcaaaattcccagaaaaataccagacctttgttggagagcgtggggtaaggctttcaggagggcagaaacagagaatagcaattgctagagccctgcttatggacccaaaaattctcctcttggatgaagccaccagtgccctagatgctgaaagcgaatacctagtgcaggatgccatggagtctctcatgaaaggaagaacagttctagtcattgctcacaggttatccacagttaaaactgctgatactgttgcagttatatctgatggccaagtagttgagagaggcaaccatgaagagcttctcagcaagaacggtgtctatactgcattggtcaagagacaactgcaaacaacaaaagccgaaatctcggtttagcaaatcatgaataaccaaaccctaccatcttgcttgttaaacactcagtctgctcaaaaaggaggggcaaatgatactgaggcacaagttccttggaagaccttcacttccacagttgcaagttacagcattaccctctgtatcagaggaaagaaaatgagggaagagagaaaaatttaaaaattgaatagaagagaaaatagaaagaaagaaaatttcgaatttttcttcatctaaatgtcaatttttctttcttttcttaaccaaataaaataaaatgtatcattatctgtattttcttactttagtccaaacacatgattaaagtttagcaacaaatttggtgtaactcccgatatttcaaaaccagaagtaatcagtgtgatctatactgtcagtagagtattatcaacatgctttgtctaaaaaaaaaaaagaaaaaaaaagaaaactaatcgaaaaaaaacaacggataaaaaaaacgcagaacacactaatacaaaaggataaaaggtggggggcggcccccacttgagggctctccaggaaattaatgccgaacaggtccttgagggagacccgct

SEQ ID NO: 1057 - DNA, 1052 bp, Glycine max
  Clone ID: PAT_MRT3847_100954C.1
aaagaaaatgatgacagtgctttcgcgcttgattcattccacgccttccatttccaggatcaaggcagggtgcaattcgccggagagatctcttctttccaaatgtctgctttaaagttgaagaagcagttcatgtgcctccacccccaacggaaaatgttcttctgtttggaggccattggcttgagagtttgtgtcttatttttatcaatttcatccgaattactagaattgcacccccattcttttgagtccaatgaccatcaacttttgctggctagggtcgctcgaaattcttgaggccttcttaaacacgggattagttttatatatagcaatactatttatttataacgtctatttactcattgttttgaaagagatttttattcttccacatgtttttgggtgccccagaaaaaaattctgggtgctcctagtaacacccggaactagaatgtttgaacagaattggttgcgcctggtgcccattccaagtttgttcctgtattctgggcgaatgcgaaggctcatgtcacgcggctattagaataaagtcacttcccagttacttgactctctctctattcttttccgccgccgttcctaaccctacaagcttcgtctcgtaaagaaaattccaaagctcaacagagaaaatgaggacagtgctttcgcgcttgatccattccacgccttccatttccaggctcaatgttgcgcataatatgctatgtggaggatagccggtgcaaattaagtgtgtcatgagtagggccactgttgtttattttaatgaagttagaccattggaagcagatagattcaaggcgctttgcatccagtgggcacaatattatctaaaagttagaaatcaaatataggatattaggcaactatgtaactttaggttacttaattagtttacatactttgcattacatttcttacaattgttgtttcattttaacattgaataacctttgttgatagttagttttttgctaaaacctatttgaaagcagaatgcaaatgatatatgttgtgtgcgc

SEQ ID NO: 1058 - DNA, 271 bp, Glycine max
  Clone ID: PAT_MRT3847_100955C.1
taagctactcgacgacggcggttggcggatcacaagatcagtatgctgaatatctcgatagatctcccccagttctggggatggctaaggctacttttaagggacgcacggctgctggttctccggcggattcatccgctgacgctgatatcaagatttcgaatggcagcggtgtctactcgtaatgctttatttcgagaaagatcttggcgacctagcagatcctgatcttctcagggctgactcatgtaacccctgacttccgtctttc

SEQ ID NO: 1059 - DNA, 368 bp, Glycine max
  unsure (1)..(368): unsure at all n locations
  Clone ID: PAT_MRT3847_100956C.1
caattgtttgattcagacagaaaaaaaatgttatcgtaacttatcttaattatctctcgattcatttcctctctctttggagagtttgctacttccccttccgaagctgcatggctttttctcatcccgctcatagctaatgccctcttctattatttcagtgtaacaatggatagcgatggaggctccaaattgactgggattaggcagattgtgaagataaaggaaatgctccagaagtggcaaagtgtgacattaggcccaaaaccttgcaattccctttctgatcatgtggctaatgatgatggaagcatatcaccattgatcaacanaagggtagtgaatgtgatatcggacaacgaagacag

SEQ ID NO: 1060 - DNA, 476 bp, Glycine max
  Clone ID: PAT_MRT3847_100957C.1
tgttcacctatgaaaaagacagaaatgtctaccagagatgcctttttggtggagggagagaagaccagtgtgacgctggctggagatgcgtcatgcgtcgtgtgcgtgaacttcacacgctagggctcttcatggggttgcatgcggagatggttggagttgctgtgcatgtggacgacgtggtggtctttggtgattggtgacagtggtcgaaggtgagtttcgatgaaaaggcattgggaaatctgccaaataagggcagagcatccttgcgggactgttcaccactaagaggggaagagtgaaaaagaaaaacaaagaaccatcaaagcaacacgcagaacaactccgatgatggcgaaactatagggttaggatcgttcatggtgggtgacctcgttgctggaagcacggccagaacggaggcttgacgtgccggagacgtgtctagcgcagaagttgtttggcgcgtcttt

SEQ ID NO: 1061 - DNA, 149 bp, Glycine max
  Clone ID: PAT_MRT3847_100958C.1
tttttataaaaaaggaacccaactttgctatctgttccggattcagatgaggcattttgctacctaagagcttcaatactgctcatacacctgctgcaggaatatgatgccaaaataaggaaaattcgatcggagaaacttgctgagga

SEQ ID NO: 1062 - DNA, 298 bp, Glycine max
  Clone ID: PAT_MRT3847_100959C.1
tgttctcttcttcaccgtggttagctccacatatgtgccatgcaacccaccccccaaaacttcaaaacacccacctgtcccaaagccaccttccccaaagcaagcaagttgccccaaagacactatttagtttggtgtgtgtgctgatttgttagttttgatcaacgttcaacttgggaagccaccaaagaccccatgctgcaaccttattgagggtctcgctgatctttaatctgcagtgtgcctcttcactgctttcataactaatgtgttgggcatcatccttaatgtttctatg

SEQ ID NO: 1063 - DNA, 1810 bp, Glycine max
  Clone ID: PAT_MRT3847_10095C.1
atctcttggcaagtcttgttaaaatgatatataaaatcagcagttgtacatcttatgtagtattatcaatttatcatggagcaatgaactttctttagatttgcagtaacatttggttaaaagttttacattatttctctataatccaaaatggaatacatgctctgtagatacattgattgaaaagctagaactagaaggctcatgtcaagaccccagaggatcacttgggagggttctaatttatttgtttaaaattgaagaggtagttgagatttggattaaaatgaagggaattcattcagagaaccaaactggggagttattatatggttttaggcattggcgactaaatgtctggttttttttttcttttctctaactttatgaaattacaaagaatctgctcggaacaagaacgtggaacatttttatcgcatgtgattgaacatataccagtctctttggtttattaattgaacttcaattttggtaaaaggaaactgaaataagagtaatttataattggaactgcaggaggaatttgagagttaaagaaaatatcttgtaaaataaatatgcatcaactttcagttcttttatgaccctgctccccattcgtcctttgtatcatcagcgtttctttgactttgtgcaaggcatgttcaaggttttccagctcttgtctggcgaatctgttatacacgaataatccactatacaaatcaaaactatttctcatcatcgtctccttcaatttaacaagtgtctcgaagcccttagtgtcaataggtgtggattgaatatccatttctcccagtgtcctgccaattgtgtgagtgataaattggctcttagcagctgctctgtcatgttcctcacaggacatctgtaccatcttgcaaccctcagtagcaaaaatttggatgaaattagagcagataacttcgtctcttatccgaactttgtcatacatgaaagtgtgatctgtccatccattcttggcagtctgaggaccaaaattgggtgcgtgcagagtatgtccgaatccggcaactctcgcagtagaagctctcttgggtctgacagaaagaacatcaacaaagagcgttggtcgcttcagggaggtgagtggcattgacccgacaacctcggatagcgataatatcgatgtgcacaacactatgacatctatgtctgcggtaaggaatgcgctgacatccctgaaaaaatggatgcccatttggagacaaagttcagagtaatcagatcgagaagttgctgtgagagtgtggccttgttttatcattgtcttggccagaaactggccaaagttgccgaatccaactatgccaattttgaggctttgggaagaggatgaggttgacatgattgagaaacaaattgtgatggtttcaggaaaacaacagtatcagaggattttcgctgctcaattaggtcttgaaacttgaaagtaacgaggtgatgaactactgccagtcgaacttccttctgcccataggcattgacatttcgggcagccgcagcagccgccctttcagcctgggcacgactaaggcctttagcagcactcagggctgcagccttgattctttcagctgcagcctgagatttctcttccttcttgcttgacatgttttatatatgtcctcaagtttgccttttgtggcagacgaataaactcaacagcatctaacttcccaaaaaactaattgcacactatgaaaaatcaacacctcaacagttattgaacccgaagttttcttttccccctaattttgaaactcga

SEQ ID NO: 1064 - DNA, 817 bp, Glycine max
  Clone ID: PAT_MRT3847_100960C.1
cttatggctccaagggcatgagtttttctccttatggaagttaggggaggcagatgagaaagatttgcacctttgagctgctaactccgaagcgtgtcgaatcatttcaagcgattagggaagaggaggcatcaaatcttgttagagagataggtttgggtgaagggtcatccatcaatctcactaggatgatcaattctttctcctacggcttaacatcacgcgtggccttcgggggaaagtccaaagatcaagaagctttcattgatgttatgaaagatgtcttgaaggttattgctggtttctccctagctgacttgtatcctattaaagggcttcaagttttgacagggttgagatccaaagttgagaagttacatcaagaagttgataggatccttgagaaaattgtgagagaccacagggacacaagttcagaaacaaaggaaacccttgaaaaaactggagaggatctagttgatgtgctactaaagcttcagaggcagaacaaccttgagcatcctctatctgacaacgttatcaaagcaaccattttggatatcttcagttctggaagtggtacttcagctaaaacctcagagtgggcaatgtcagaacttgtcaaaaatccaagggtgatggagaaagcacaagctgaggtaagaagagtctttggttaaaaggggcatgtagatgaagctaaccttcatgaaactaagttcttaaagtctaattatcaaaaaaacgctttcttctacacattccttttccatttttactaccaagggaatgcattgaaaaattttgaaattaatcg

SEQ ID NO: 1065 - DNA, 180 bp, Glycine max
  Clone ID: PAT_MRT3847_100961C.1
cgagtatctaaaatatcagcagcagcagcaaggaggttcccaaagctagacaggaacgcaccaaggagcagactacgaaggaagcaacatattgagtggcttcacacctgaattcttgaaagaaacgttcggagtgctcatgcagatagtgagaaacctacaaggtgagagcgacgagga

SEQ ID NO: 1066 - DNA, 440 bp, Glycine max
  Clone ID: PAT_MRT3847_100962C.1
cggctcgagctggagccgattcggatcgaaccctgcttttttaccacctcctgccactcctccccccgccactcctacccccgcagttccaccaccctcattgaccgcaacaggtacacctgtgtttatgcactgcatcttgtccatctcctgctatcttccaagtgtttgctcctgcactctctccttcccttgctcccggtcccaggctctccaccatctatccctacaagaatgacagtggggctcaaaacttgcggtccttacagaagatgattgggagcttagaatgcggatgtgctgagatgtccatgtggagctagacatcgatctctggcttcggactggcagattattctgccaactcatgtgattgtgctattgaccctataccttacctttatatattatgtcgtgcatgcgatcgggggagtctatta

SEQ ID NO: 1067 - DNA, 317 bp, Glycine max
  Clone ID: PAT_MRT3847_100963C.1
cccgggccggaagggccggggcgacccacgcgtccggagagaggaatggtcagttatggaacgacaccgaaagagggacgctgatctatgatgggcgccactatgatgcatgagggatggctccctccgaggaagctccagaggagtaggatcagaccatatgtgctggacagaaaaacagaagcaatggacctggggaggggctcgctctaaattttgggaaggaccagcaaaggaaacggagtaacactgacactgctaacaacacactgcgctggggagcatgccaaaggggagaaacgggacagacggaggca

SEQ ID NO: 1068 - DNA, 603 bp, Glycine max
  unsure (1)..(603): unsure at all n locations
  Clone ID: PAT_MRT3847_100964C.1
ccacgcgtccgaaatctgtgtggccaacgcgctgccaagaaactgcgggctcgccgacttatgcgataactctgacttaccgaattcgcttacttaaattgcccggagaacctgacgtttgggaccatatgttagcctcgctctcccctgagagacaccacgcctgctagaccttaatgcgatgaaaactccctgatgacatagtctcaagggataagggttggaagacacatttatagtcatattgtgatcagggcgtagaaatgcgcctcatttaggaaattcatatgaaagtatcttaaatgcttatactatgccctcctaattttatacttaaaagttaaaacccattatcctcaattttctgtaacagttaaataaaatgacccaattatatatataaactcaaaagactcaattaaaaaaaatataatttaaatacttggatttattggattaagagtttaaagaattttttaatataacaaattttgtgaattttaaaaaactttataagaatgtaacgacttttaatattttttttaaaatactnttatgatttggattttataatttaaattttaatgaatttataacacatac

SEQ ID NO: 1069 - DNA, 1104 bp, Glycine max
  Clone ID: PAT_MRT3847_100965C.1
agagggacaaatctgaaaagtgaagaaacccaatacataagatgttggaagcgttattatggagttttttcatttccccactgaagattgtgtgggaatctctgagaattctagagagcaacaagctagtatttacttccatcctctgtttcacaacgctccctctctccttcctaaccttcaccctcgcaatctccaccttccccctccaatcccgcgtcctccacctcgagtccgtcgcgcgcgtcgccggcacgcgcgtcgaggcgcgccacgtctggcacgagtcccgcgacgacgccgtctcgctcctgcgcacgcgcgccctcttcgccctcctctgcttccccctctccctcgccgccgccgtctccgccgtccacgccaccgcctccgccgcccagggcaagcccgccgccctccgtggcagcaactggaagcgccccgcggtcactgtcgtcttcgtctacgtcgtcctcatggccttcgccccggtgccacgtgccctcgccgccgcagctttcacctcgccgccgtggattcggatcctcgttcgggcaatcggatcgggcctagaggtgtatctcatgacggtgctgagtctttccctcgtcgtttccgtaatcgaagatcgggtcgggtgggaagctattagggtcgggtcgggattgatccgaggaagaagggcatgcgggtggattctttcgggttcgttcgttttggtttcgggtttgatgaataggaaggtggaagtgttgttgttggagaatgagaattcggagattggcgttttcgataaaagcgttttggtgtgttcgtatgcgttggtggtgctggttagttacgtggttaccactgtgttttattgtgatagccgaagacgacaccacgacaatggaggcgggatcaaggaaccccaacctcaagacgatcatgaaattgaagactctgttgttgttgattcgtcccaactgtaaccttttttttttatctgttttcttttttcggatttagctgaaatatattcagtatagttttgagcaaattataacaatatcgccccaagttttgagtaaagtttcggatattagtgtaagatttgtg

SEQ ID NO: 1070 - DNA, 281 bp, Glycine max
  Clone ID: PAT_MRT3847_100966C.1
gatggaagcacttgcaattccacaatcaaagtgttttcaaagcgctatccagtttgccatgtctaaaaggttgatagcagctcctgaaccaattcatgctatagctacactcatttgggaacctattcattgattagaggctggagaagccaaagttattctgacagcaatgtgtgaacatggacattttgatctgccagcttacgaaaagtccttgcagagtaactcgtttgacctctcattcacaaacgaccaaatgaagccttcattggccattattc

SEQ ID NO: 1071 - DNA, 459 bp, Glycine max
  Clone ID: PAT_MRT3847_100967C.1
gtttgttatacttgccagttatagcagagtcctttgggctcaaaatatagtattgtattgtattatttgatcagaacatttaatgctatgatttaggagaaggggtgagactgagagatgataaccaacactgtataaggctataagcaacttgctttagaaatgaaccgtatatttaaacattcactcttacacacttccataatttgggtatgatcctcatgctgcaactcaagcttatggtgtaggcttttccccacaatccctcacgatttggtatccccaggtatgtttctcctgcctcactctcaaactgagttgtaaccaccagacaatcatcaaggatcacctcatttcttttggatattttcttgatgaaaaccccaattttatatggctgcaattatttgtgaatcaccacatttcttggccattgtgtggctctaatattaggaccac

SEQ ID NO: 1072 - DNA, 1502 bp, Glycine max
  Clone ID: PAT_MRT3847_100968C.1
ggaagttctgagcacttctttgtccctctttcagaaactggcttttctatttctgatgcagacaaaaggggagctttattaaggagcaaaaaattatttgtatcccaaatggatgattctttgcttgagagtcatgcattctggtgggcatggggagagcaagtttgatgaatttccacatatgttgaatgatttggaaaggctttctgcaccacctctctgatagaaaatcactggatcctccttcaaataacgaagtagaaagttcagccggatgctcggcggtcaatttttgactcaatttgtgcccaggatcaagtcttctcaccacctttgctaatggactcatcacttttgacagatccatttgaagacttgctggcccctctgtcggagactgaaatcccccttgatagaccttgcttttcttatttggcaacctgcaaatcttcattgaagaaatggcattactgatgtggtggattgctattcttttgttgagatatgtactccattcaccttatatataacacgatgcctgtatgatttattcttggttggtatattttcaccatctatgactctgttgatgccctactactactgggaggaaccacgagtgacctgcgttcttcattggtgaatgaagatttactttgggatgaagatactaaaatccaaaatgcaagcctgggttggaggtgaagttagttgtgtcttcaaccaacacctgaatttacattctaattttcatccacttgtttgttgttttagtccaaccattttcatctgcttaagtagactgacatcccaatgggcctgttgaaaacaaatttgtggatataacaaatgcagttctgggctttttctgcgaccctctggcatccgatttagtcagtcatcatctatccttggattgcaattaatttatgtatttttacagttgtgtatcacatgatctaggccttgtatcttggcaatatatcaggaatgaaactcacgtcatttttattttactgttcagtgacattgctttgtgtttttcttttctttaataacacctgtgcacatgactgattaatggaatataatgcttgtgtttgatggtgaagatagtttgtcttcaaccaacacttgaatttacattctcattttcatccactggtttgttattttagtccaaccattttcatctgcttaagtagactgacgtcccaatgggcctgttgaaaacaaatttgtggatataacaaatacagttctgggctttctctgcatccctctggcatccgttttagtcagtcatcgtctatccttcgattgcaattaatttatgtattttgacagttgtgtatctcatgatctaggtcttgtatcttcgcaatatatcaggaatgaaactcacgtcattttattttactgtaaagtgatattgttttgtttttcttttcttaagcaacactccacatgaccgattagtggaatataattctttgattttt

SEQ ID NO: 1073 - DNA, 865 bp, Glycine max
  unsure (1)..(865): unsure at all n locations
  Clone ID: PAT_MRT3847_100969C.1
gtggagattcgctgtcgttgattgttactattcacacacttgccctcactcactctgtgaaatgggtgtcatctgtgggaagatcttcccagcatgtggggacatgtgtgtttgctgtcctgctttgaggtcaagaccgcgccagccggtcaaacgatacagaaaactgcttgctgatattttccccaagtcccctgacgagcctccaagtgaaagaaagattatcaaattatgtgaatatgctgcaaaaaaccctttccggattccaaagatagcaaaatatcttgaagaaaggtgctacaaagaactcagatctgagcacatcaaactggtcaatattatagcggaatccttcaacaagttgctttccatttgtaaggtgcagatagcgtattttgctgttgatgtgcttaatgtaattttggagctcttgagctattctaaggatgagaccattcagacacttggttgccagtgcttatcaaggttcatctactgtcaggtggatgctacttatactcatagcattgaaaagttggtgcggaaagtatgcatgctatcacaggaacatggtgaagcacgtgaaaagcgctgcttgagggcatcaagcttgcaatgcctttcagcaatggtttggtttatggctgaattttcacacatttttgtagattttgatgagattgtacattccgctttagataactttgattggagtagacaaaatgaagaagctgatgccagggaagaggcacatcataattgggtggatgaggttatccggtgtgaaggtcggngtggttcagttattggtaatgacaatcgctctagntgcttgatcatccagccacgacctgaagtaaaggat

SEQ ID NO: 1074 - DNA, 321 bp, Glycine max
  unsure (1)..(321): unsure at all n locations
  Clone ID: PAT_MRT3847_10096C.1
cggctcgagctcgagccgtttggtttcacacacacagaagataaaaaagagagagaagagaaacacacaaacacaaacagaagcctggaggtggaatgtgtggttnncccngtggaccttaacttnnacagcaactgctcctcccccttcatcaccgccccttttagcccgggattgttggctttcaacaaaccatacttcttctttattgcccccaccagccccacacgtgggaccttctccttttttcacgattgcccctcctctttctttgttcttccccatgaagaacaaccagattttgagttgattttttgcggc

SEQ ID NO: 1075 - DNA, 3210 bp, Glycine max
  Clone ID: PAT_MRT3847_100970C.1
aattcggctcgagaaatttcagttttgtaatgttatgtgtcttgcaagttctgacacggtttgaaaccgcagtggcataggtacactttttacagcaaaagaaaagaaaaaaagaaaaaaggaaaatgaatttgtgttccacctgacacaatcacgtgatctcccacacccaacatagtctcaccttgtctcgagttttgactcacgcgccatctttgttttgtttttgtattctctttccctgttctgttctgttcctttttttgctgctattcgctgtcgttgattgttactattcacacacttgccctcactcactctgtgtaaggctccgttcacctttccctcccagattttcttccataggggctaggaaatgggtgtcatctctcggaagatcttcccagcatgtgggaacatgtgtgtttgctgtcctgctttgaggtcaagatcacgccagccggtcaaacgatacagaaaactgcttgctgatattttccccaagtcccctgacgagcctccaagtgaaagaaagattatcaaattatgtgaatatgctgcaaaaaaccctttccggattccaaagatagcaaaatatcttgaagaaaggtgctacaaagaactcagatctgaccacgcgtccgggggcatcatctgaaagggatgcagagtctaatcattctgctccaagcttattgaatacagaatctatctcaaatcccttcagttccaagggtgcagaagattctgcttgggaaactaaaagtaattctaatcagaactcctcatggggtgttgcagtggagaagactggaattgcttctaacccggatcaatctgatggttggggaagtggagggagctggggtcaggcagagcataaaactggaagcatgggtgatggcaatcagaatagcaattggaatgacaaacctaacaatttgaatggaaatcaatcctcaggaagggacagcaaaagcaattggaatacaaccaaggcttctgaaggggagtcttctggttggaacagtgtcaaaaagtcaaatcaaacgtcatcaattggatggggtggtggcaatggttttaaaagtggagtcaaagaagttggaaaccctgatggtacttcagatattgatgctaatcaggatgttgggtggaaaagccaaccaactaaggatgggagtgggtcatctggctggggaacaaaaaacaattggaatgctccagtctcttcatcacatgataaacagggaaaaggtaatgatcaaggtgggtggaatgcaggaaaagcttgttcggctgcagatttctgtcaagcttctggttggaaaggtgggctgagtgagaacgcccaagaaggttctaattggggcatcaagaaatttggttcatgcgatgtatctggtgattccagtggaaacctgggtagtaatggttggggtcagaaaagcaattggaactctggatctaggagtgggaatgagaaccagaattctcactggagttctgggcgtaatgagcctggaaatcaagattccaacttggacaagaaaagcaattggaactctggaaacagtggaaacctggcttccgatccaaaaagtagcaattggaattctggatctggtaattccaatgaaaattccaactggggaaccaatgtcaataacaaatcttcatggggtactggaaatgaaaacaagaattccagctggagttctgggcatagtgatcctggaaatcaagatgccaatcagggcaagaaaagcaattggaactctgggaacagtggtaaccagccttctgatcctaatagcaattggaactctaacaaatcctcttggagtgctgggaacgaaaacaagaaatctaattggagttctggggatcctggaaatacagattctaactggggcaacaaaaataattgcatttctggatctggtgatgctaatcaaaacacgtcttggagaagcaatagcagctggaacactgcaaatgcctcaagcgatgatggtaatgaaggttcaaatgaaaattctgatggagtaggtggtgggaactggagaggtggttaccggggtagaggtggctccgacagagggggttttagaggtagaggttttcggggtagaggagagcgtggcggtttcggtggacgaggggagcatggaggctttggtggccgaggggaacgaggaggctttggtggtagaggtagatcagacagggaaggttttggtggtaggtggggatcagaaggaggacgtggaggccgaggcaggggaaggaacgatcaatctggtggttggaacaacagaagggattctggtgaggatgggccctctgactggaagaagggggcagataatggtggatggaagaatagtaatggatctcaggcttggaaccaggatactggtgacaaggataggcagagctggagccagggaaatgcagataaggagcatcctagctggaaccaaggaagtggaagaaatcagagctggagttcagcaagtggagctaatgataatggatctcaggcttggaaccaggggaatgcagataaggagcatccaagctggaaccaagctggaaataagcagagctggagttcagcaagtggtggaggtaacaataattggaacaacaatgggtcatcgcagactgcagaggctagctggaaaaaatctacaactgaagggaccaatatccagggtggtgggtggaacaagggatctagttcaaacactacttctaaggactggggtcaatcaagtgctgcagacaagggtcaagcatctagttggaaagaagcagcagatggtgcatcaggttcatggggcaagaaaaatgacgggggtgacaaaggtggatggtaattgctttcttgaacgtgctagatgggccaaagaagggaagaattgagttcgggcattttgtaattaatggcaaaccttttttctctttgtaaatccgtataaatctgcgcagagactttgtttttaaattgttctaaacagatctgatgaatgactaatcctctcttccgtgttatgcatgaatgttatgtaatatgcagtgtcgtgttacaatttcttggttgccagtgcttatcaaagttcatctactgtcaggtggatgctacttatactcataacattgaaaagttggtgccgaaagtgtgcatgctatcacgggaacatg

SEQ ID NO: 1076 - DNA, 815 bp, Glycine max
  unsure (1)..(815): unsure at all n locations
  Clone ID: PAT_MRT3847_100971C.1
gatcatatattaatcataatcaaacccgacttcttaagaaacttttgtgaaactctgtctattttgacaatgtttgaatacaatattaataaaatacattgtctggaaatcatgattatgaaattacaactttaaattgttaaaacaaagtaacattaaaatttcttcatcaatcaaatggggtcatcattactccaattttgttgcttcttgattattagctaccctatcatcggagtcagctgattttttgtcaagaattcctgtgattgctacaactgaacgcaaaaatgagacgcaaacaaaaattaactaaaataatctatattactaataaaataatattaaattaactaaaacctaacaatgagcaataaaaaatatctatattactaataaagaataaatataattcaagctgtgaatgttgagagcctctgcatcaaaatgtaaattgaaatctctgtgaccataaaaaaaccataaacaaagaagtccaaaactactatattcaattatctgaccatataaataaaggatgacatatatgtgataataaagcatgtcatatatttgaaaatcaaagttgaaagtgtctaactcaaagggattgaacaaatataaaaatataacccattgaaataacttcagcnnncattaaaggaaaaaaaaaatataaaggtagaacacccaaaaaaatttaagcttttgggttgcgaaaaataaaaaacaaaaaaaaaagttacccaatgatnnnnnnnnnnacccaaaatgcaacgcaagctatnnnnnnnntnnnnnnanacaaaaattta

SEQ ID NO: 1077 - DNA, 190 bp, Glycine max
  unsure (1)..(190): unsure at all n locations
  Clone ID: PAT_MRT3847_100972C.1
gtcgctgcanacgtcgggnacgnggtnagagggacatnnncatangcntcaatgnttnccccccntgtngtaaaaatnantaanaanatanatntctaagatccanccntcttctaactggtnncccttnttcantactaaatcgtaaacaanacggcaacancataaccaanagnacactcacacngga

SEQ ID NO: 1078 - DNA, 307 bp, Glycine max
  Clone ID: PAT_MRT3847_100973C.1
aaaaaaaacaacccacttttgcaaaggaatccaaggggggggccggcaaaaaataaaaattcccaggggcaacccaggggccaaaaaaaacaaaccctttgggggaatgccttaccccccataaaaaaggggggtggcccgcaggaacctcaaccttttaaaatgaaaaccaacccggggccggaaaaacggggtgaccccccccaagccccccttgggggggcactcctttacccaatccagttcccaaaaaaattccccgttttttttgcccgaaattggcctaccaccccaaattcccaattcc

SEQ ID NO: 1079 - DNA, 239 bp, Glycine max
  Clone ID: PAT_MRT3847_100974C.1
tgatgcgtggaggaataaccaggtgaagccccaatgagctgaaccaactaacattcagtggaacccgctcagtgaaagcatgttcacaaccaaaacctgatgggcgaaaagcactaattaatcgaccaacgggcggggagaggaaggctacgaaacgtgcgccatggtggcttccaaattctcacaacagacagacactagatctattgcaaccatcttcctgtcctgacgacagggta

SEQ ID NO: 1080 - DNA, 502 bp, Glycine max
  unsure (1)..(502): unsure at all n locations
  Clone ID: PAT_MRT3847_100975C.1
gctacattctaaggtttactagttccttagggtcacatggagcatgcctttccctcgcattacctcagccctctcatccgctctctccccttcgtcccctgccatgttcctcctcactctcctctcacaatcacaacaacaacctttccaaaatgacaccaaggaggtttgaaatgacgatgacgataaggaccgcgagaacaacaacgtcatttcattcgcgaagatcctcactccctccgacgccaacaatggcgacgacttctctgtgccacgcttctgcgccgactcgtgcttccctccactcgactttcgcaccgatctgcctgtctagctcctctctgtcgctgacatccacggcgtcgagtggcgcttccgccacatctaccatggcacgccacgccaccacttcttcaccatcggctggagcaagtttgtcaatcataagaagctcgtcgacggcgacactgtcattntcgtcaaggactcccacgatggaatg

SEQ ID NO: 1081 - DNA, 1205 bp, Glycine max
  Clone ID: PAT_MRT3847_100976C.1
cgaagctcggaattcggctcgagcaccagactacattgctcctgactttggcagaaccaatggatgttgatgatgcggacaatcgaagtagctggagaagtccacgtgaacagcttcaacattggcagatgaacaggaggaagttggcattttcaacagtggggacaccagactacattgctcctgaagtacttttgaaaaaaggatatgggatggaatgtgattggtggtcactgggagcaataatgtatgaaatgctggttggttaccctccatttttctctgatgatccaataaccacatgcagaaagattgttcattggagaaatcatttaagatttccagatgatgcccagttaacacttgaggctaaggatctaatttataggttgctctgtgatgttgatcataggctaggtactcgaggagccaatgaaataaaggctcatccttggttcaaaggtgtggagtgggataaactgtatgaaatggaggcagcatttaaacctcaagtcaacggggagctggatacccaaaacttcatgaagtttgatgaggttgatccaccaacagcagcaagaaccgggtctggatcctcacgaaagatgctaactaccaaagatctaagtttcgttggttatacttacaagaatttcgatgctgtaaaggaagggctccgtcaatcttttggtgattccatgcaagagtatgcttctaaacgggcagctgaagaaacaagtttacaaatgcttgcatcctctggagatccaatggttccataactttgtgcaaattgaagtccatcctgttgggtttttgtgtacttgctttggctttaaatattcggccaagaacatgtattatggtgtactccaattcctatgccatttgcaagaaaaatgtgtacagcaagcagttgacagcattgtcaaagcttgtagggcaaccccgcgcgtctgtatttgaattttcaacttaggaactgagagttgtgcgactgagtgctcctgtcctggctgcccaggttggctgaggaagacttgccttctctagtggcagttgctggttaaatgttagttatggacaaaaattgctaaggaactattaaagcatcctgaaaattattcgatgtgatgtgtacatttattggaagataacataaattaaactattaaaacaaactatgcttggggatggagtggggg

SEQ ID NO: 1082 - DNA, 280 bp, Glycine max
  Clone ID: PAT_MRT3847_100977C.1
gaaatagtataaactttgtcagttagtactcgtaggttttcatgaggaaaaatacttgtacttcggggcatgccactcggtttggaacttacttgagacttgtgttgatcaccatggggggtgtgggagcggcctgtgcataacagggtgacctggacactagttgcctctttacctaggtgcgagcgacatgtggatatgctgaggctatttactgcttgacggaaccatggtcattgctagagtctgtgcaaaatcgtgcttcgttgacagcatcaca

SEQ ID NO: 1083 - DNA, 658 bp, Glycine max
  Clone ID: PAT_MRT3847_100978C.1
aaaacttcatgaagtttgatgaggtagatccacctacagcagcaagaactgggtctggatcctcacgaaagatgctaactaccaaagatctaagctttgttggttacacttacaagaacttcgatgctgtaaagaagggcttcgtcaatcttttggtgattccatgcaagagtatgcttctaaacgggcagctgaagagacaagtttacaaatgcttgcatcctctggagatcccatggtaccatagctttgtgcaaattgaatgaagtccatcatcgtgttgagtttttgtgtacttgctttgggtttaaatatttggcctagaacattagtcaacttttatttgcaagaacaatgtgtacagcaagtagttgaacagcattgtcaaagcttgtagggcaactccgtgtgtgtgtatttgaattttcaacttaggaactgagagttgtgcgaccgagtgctcctgtcctggctgcccaggttggctgtggaagacttgccttctctagtggcagttgctggttaaatgttagttatggacaaaattgctgaggaactattaaagcatcctgaaaattattcgatgtgatgtgtacatttattggaagatagcaaaaattaaactattaaaacaaaaaagactatgcttggggaaaaa

SEQ ID NO: 1084 - DNA, 2492 bp, Glycine max
  Clone ID: PAT_MRT3847_100979C.1
aggaaaaaacgtaagaaatctaaattaacaactgatggtgaagaagaaaagagacttaagaagtccaaaaagtccaagagggattctcctgacatttatgcttccgatttggaatccaactcattagttgtgcaggatgaacatgcagaatcaaagacttgtgaaagtctggttgatttagaacagaaaacagcaagcaggagtaagatgggaggaaaaatatccatcactcctatccctttaaaacaggtctggatgataaaaccagaaaaattgaaaaagggaaatcattggtccaaagattgtattccaccagctgatttttggctgcctcaggaggatgcaatattatgtgctgttgttcatgaatatggtcctaactggagtttggttagtgaaacactttatggcatgagtggtggtgggtcatacaggggaagatatcgtcatcctgtccaatgctgtgagaggttcagagaactattccaaaagtatgtcttgctgtcaatggacaatgcaaatcatgagaagatcaacagtccgggctctggaaaggctctgcttaaagttacagaggataacattcggatgctgttagatgttgcttctgagcaggtaaatagggagttactgctgcagaagcatttttttgcattgctttcatctgtctggaaagtggcatcacacgttgaccacaggcgaaatccatcaccctcctgtaatggtctctatttcgatcagagtttctatacttccattggccagccttcacaaaattccttgaagaaatcctctgaaaggatggcatttgcaaatttagccccgagcaagaatttagtagcagctgcacttgatgatatcacaactaggcaagtgaatgacaaagtcattctgtctaaccaaggggaagacatgccagtgagtgcagatcagctggatataacactggagtttgcaaaagaggatagcgacgtcctatcttcatttccatctgttataaatttatcaatacatgggactgaaccaacaccatctttaaataagctaacaggagaagatgatcttaaagttggtttgttcattgctgagaatcgtttcagggaggctgcaagagtttgtggagaagacagctctggatgggcatcatctgcattcccaaccaacgatacaaggtctcgacctggatccaggttacaatcctccggaaagcggaagtcttctgtatctgactcttctaagccttctaggtcaaagtccaaaaaagcttcaatggatcgtagtgaaatgcatccctatcaggctgactcaatgttccagtcaatgccatcacttaaagatctgagaattgatctcacttcattaactactgatgaagttggaattgatggtatggatagcattttctcctttgacttgaatggggaaagttcattggaaatggagagtgttggaatgatcccacatgattatgttgctggtttaatctcagaccttgatgatagtacagcattccctgaatatactgacattagataaggatgaaatcaagcctgaaatgcagttttgaaatgacctttggcttaccaagtggcatactcttggcaagttagtcttgatcagttcatgaattgctgttggcttacaattggaaatgcattcttgcagttcgctccttggcatgccatttttggatatacagacaaaacatttcaaaggctagcctgctgaaggtttcgatatgaaaatatagagatgtagaacgctgtcaatgatttaatttcttacttggaattatgtattggcttggtggttcagctcgaattttgacagcgccattcttccatagatcagtgctgattggtaagaagcccttcattttctcttccctctaatggtgcacatggatttgccttggatgttttgcatgctcacgtacatatgtttttagctgaggcatgcctagggtttagttctttaacttgcaacattttgttatgccaacagaacaatttagtcctttagtggctagttcattagtcccattcatttagaacaacacttcacatgatttaacatgagttttacaccatctataagctcagtctaatatattatattttttagaaaatttccctcccgtcccccgttcatggtgcggtgtctagtgatctaacatccccctggaactgtgggatccaattatagataaaacagccttggaatctgaagtcaggattgaggacacagaatgggagttggatcgcattgaaaagtacaaggaggagatggaagccgaaattgatgaagatgaggaacctcttgtatatgaaagctgggatgctgattatgcaactacggcatatcgacagcatgtagaggccttggctcaacatcagttaatggaggaactcgaatatgaagctaggcagaaagaagctgaggaagaaacctgtgattctaaaaagactccaacaccaggagattcgaagccc

SEQ ID NO: 1085 - DNA, 249 bp, Glycine max
  Clone ID: PAT_MRT3847_10097C.1
acggctgcggagacgacagaagggttaccccatatttttgttagaattaataaaagaaccaaataaatgtgtatgatgaactttattgaaaataagttttgaaaagattgaggacactgacatttctaatttagacatatagttaaattcacataattcctctggtagcatgaagtgaactgtgaacgtttttcttacaaaaattaactggcaccagcgcagacctacttgacacctcaggagagataa

SEQ ID NO: 1086 - DNA, 225 bp, Glycine max
  Clone ID: PAT_MRT3847_100980C.1
aaactcaagaaacatgaatatgcaaccataaactccatgtttctcagacctcacaaattttccatacaatacaagccacaaaacacaaacctcccttaacccatttttccaaaaacttcagatccttttgtgttaaacaaccacaagtccccgcatcgaacaaataaaaacacacaaaagggtatataaagacagagaggttgagtctaattatttcttgtgcca

SEQ ID NO: 1087 - DNA, 1090 bp, Glycine max
  unsure (1)..(1090): unsure at all n locations
  Clone ID: PAT_MRT3847_100981C.1
ccacgcgtacgcattcctctcttaacactctcttctctctagctataaaaaatataccttttcagtttccactcattgatctaaagccttactcttgcaatcaatacaattaagtattattcaaagtcccaaccatgtcaccaacaaacacttttgcaattttggtcttcttctgctgtgccatttcctttaccttcgcttctgaccctgacacacttcaagacctttgtgtggcacttccctcttcaggtgtgaaggtgaatggatttgcttgcaaggctgagtcaaatgtaacagaagctgatttcttctttgctggtttagccaagcctggagctaccaacaacacattgggatctgtagttactgcagccaatgtggataaaattccaggactcaacacattgggagtgtcattctcaagaatagactacaaagctgggggacttaacccacctcacacacaccctcgagccactgagattgtgtttgtgttggatggacaactagatgttggattcatcaccacagccaacaaactcatctcaaagtccattaataagggtgaaatctttgtgttcccaaaaggtttggtgcactatcagaagaacaatggggataagcctgcttctgtgctttctgccttcaacagccaactccctggcacagtgtctatagctgcaactcttttcacttcaacaccaactgtgcctcataatgttctttctcaggccttccagattgatgctaaactggttgatgacatcaaggccaagcttgctcctaagaagacttaatttatgttgagcttatgatattccagagaggaagattatgataatagtttcataattaagactactttccctatatttttcctataattcttgaagggttatgattcattgtatcacttaccgtgttgcattttgctcattgatattacgtcgagaataatgatgtaattgtatcgtggattatggtacatgttaagagtaatataaattctatgaaaaagaagctgtcaccttttatctgggttttttcatttctttggttttgtggtcatagatgttgtaagcnnagcata

SEQ ID NO: 1088 - DNA, 1301 bp, Glycine max
  Clone ID: PAT_MRT3847_100982C.1
aaactattgtcctgtctcaatcttatgtacgcactcttgctggattagctcttcgtgtcattcgtgatcctgctccaggtggttccgactcagtagagattttcagtagggtttatatagcttaaactcaggttcacaatttaaggcattgaataccattcctctcagaaactcatgctactctgaatagcttacctttaacgttcaatgtaaccgagaatacacaaggtcctgagcgacccttgatgaattaaaatgagaccaaagtgcccatatattattattttaaaagcttcatttgtaaatggcaatgagctcaattcatacgttgtacgcttcttccttccgtttgtgtttcccaaattcatcaccacaatttaagcctctgaatgccattcctctcggaggaacaaaactctacaacaacaacaacgttaaatttcccagagaaagaacaaggaccagagcaacccttgatgatgttgaaacagaccaactttcctcaaccccacttgttgagaatgacaaagccaaaaaggatgtagatgaaagtgtgaaagtgttaaaagatgcagctaagacaagaaaggtagcagcagaggatattctttctgcactgtctatcattgagaaagcaaaagttgatccttctgccttttttgagacccttggtggaaaggaatccccagggaggacctggatgctaatttttactgctgagaaacaattgaaaggtggtcgatattttcctctcacagctgttcagaggtttgatgctgctgcaaagaggatcgaaaatggagtatatcttggacccattggacagttaacatttgaaggcagactttcatttaaaaagagaatactggctttcgtttttgagaacattcgaataaaagttggacctttgcaacctctagagatcagtctaggaaaaaaggaagacaaagaaccgagtaccaaggatcctttcttcatctggttttatgttgatgaggaaatagctgttgctcgaggcaggagtggaggaactgcattttggtgtcggtgtcgtcgtgccaataactgattgtttttaactttctttccttctctacttctgagttttgatggaaagatacatgtatatatgtaaacatttaagttcagttggtggtaaacatatttgcacttgtttgcataaattccagtaacttaaatatgcaattcaaattgaagtttgtgtttcacgataatcctactgtcgtggaggtcatcccgccttttcctattttatcatagtcgtgaaaccctttcttgtt

SEQ ID NO: 1089 - DNA, 1141 bp, Glycine max
  unsure (1)..(1141): unsure at all n locations
  Clone ID: PAT_MRT3847_100983C.1
ggctggccaaacattcctctcttatctctagctatataataaacttttcctgtttccactcatcgatatctaacgctttagtcttgcaattgatatataattatcatccaaaacatgtcaccaacaaacaacacttttgcaatttttgtcatcttctgctgtgccatatcctttgccttcgcttctgaccctgacacacttcaagacctttgtgtggcacttccctcttcaggtgtgaaggtgaatggatttgcctgcaaggcagagtcaaatgtgacagaagctgatttcttctttgctggtttagccaagcctggagttatcaacaacacagtgggatctgtggttactggagctaatgtggaaaaaatcccaggacttaacacattgggggtgtcattctcaagaatagactacaaagctgagggacttaacccacctcacacacaccctcgtgccactgagattgtgtttgtgttggatggacaactagatgttggattcatcaccacagccaataaactcatctcaaagtcaattaagaagggtgaaatctttgtgttcccaaaaggtttggtgcactatcagaagaacaatggggataagcctgcttctgtgctttctgccttcaacagccaactccctggcacagtgtctatagctgcagctcttttcacttcaacaccaactgtgcctgatgatgttcttgctcaggctttccagattgatactaagaaggttgatgacatcaaggccaagcttgctcctaagaagacttaattttaagttgagcttaatcatattcaagagagagagcaagattcagtcttttaagtctactttccctatacttttccctataattcttgaagggttatgactcagtatcagtatcacttatggtgttacattttcctcattgatgtggtatcgagtattataatataattgtatcgcggaattatggtacatgttaagagtaatcaaaatttaattctatatactgtagaagctctcaacttttttgtgggtatatatattaatttcttgttttcgtggttcattgattttgtatacactgatcaataaaggttggacctttaccanngnaaataaataacaattaataaaaaaataaagg

SEQ ID NO: 1090 - DNA, 500 bp, Glycine max
  Clone ID: PAT_MRT3847_100984C.1
cttctcttgcggtcgggtgggaggagggcggcggagcaagagatgcgtggcagagggggagctatatttaacgggcataaatagacaaccacagcagttaagggataaatgataaagttggtattataatacccaatagcaccacgtatagaaaaaagagaacaattgtttatacataccggaggccccgcgactaaacaaactggatgcaagagaaatagtacgataatccaatatattcagacgaaagaagagtagcagtaataccctaatgggacgattaaaggtgagttacgttaaatacgttggaaaggcgcatgggttaccttaggagccattggcacagcatgtttgtatatagttaccaaaataggggaattttatacgtcggacagccagacaacccgcgcagcacaggtggaaggtgcttgacggttcatgtggatggggtgtaatactgtgcctcgtgacattaagcctggacactgtggcagaagttg

SEQ ID NO: 1091 - DNA, 186 bp, Glycine max
  Clone ID: PAT_MRT3847_100985C.1
tacggctgcgagaagacgacagaaggggactcctaaccctcaccaaatacttctcttggcattgcgagtccctggtctcttactttgggtcgatatttcccacccaaaattcttattaatagcaagcgtagctaagctcctctgctatgaatggcaagtgagatatgttttgcccttgtgatcaca

SEQ ID NO: 1092 - DNA, 460 bp, Glycine max
  Clone ID: PAT_MRT3847_100986C.1
cacctcaaaggctcatcgcattcttaaggaatcaattctcacatgacaagatgcaaaggatgaaaccaacaacgatgcctataattacctcctacctataactcctaccttcaaagactcacgattcattggttctattgaacctcattgcaaactacgtatcatgtatatgccatatctttctcgctcatctccacagataaaaatcctagcactgactgctctgtctgtcttgctatacaatgatacatgatattcctatctatcgtcatctgatcatgtcccttctgttttatctatgctgcagacactacacgaggaaatcacaacagctgtcctggttgttgttaaagagatggcaccactcttagaatcaagagaacagcagaatatgctctcataagctattactgacatcctcccctgtgcatctgtgtctagaaagtattttaaatcgaat

SEQ ID NO: 1093 - DNA, 1019 bp, Glycine max
  unsure (1)..(1019): unsure at all n locations
  Clone ID: PAT_MRT3847_100987C.1
aaacaatgccgcctgcagaaaccctaatttcctctcccaacaactcatgaccaatgacggggcaagattcgtgcctgacgacttcggccatgccgccgcccgcctcgccgtggcacagctttgcgatgccacggagttccatggcgccaccgcctcggctctcgatgccttcgccgacgttgccgttcgcgacctcctcgacctgggccgaatcgccgagtctcatgccgaccgcacgcagtgcaccgtcttcgacacaattcgcagcatggaagacttagaagcgccacgagccttcgccagcgccggcggcatcagagagatcataaacttcttcgaatccgctgccgacaaaatttcgttcgcccaaccgatttctaatttttgggttgtttaggaatgacgccgcatcatcccgagttttgatcagatgggtgaggctccaccggcgaagcatatacccacgtggctacggcgtgagagtggctaagagggagagagagcgctagggtgtgcgggagagtgactgagtgaggaattttaattcctttattttttttgtgagaatttgaaatactgtcaaattagtatgttaaaatgttttacaccaataataacattttaattatttttaaaatatcctatccaaaacagattattttataggaatattcgctttaattcctccctccannnaatgtataaaggaaaaagagaacaaaatcagtggccaggaaacatttctttgtaagattaactaggaattcaaccttggttttatgacatctggttacaacaatttctaggttatcatcagattgttctgttctagttataattacatgtttctattagtctatgcaatggagtcatgcaggtcctctataatttgcttgcaacatggggttcccgtttgggggaagtctccagttccttttcattatcttatcctgcaacttgcctgtaaatccatctaagatgcaattcttaactgcattacggtaaggagttcatgtggc

SEQ ID NO: 1094 - DNA, 115 bp, Glycine max
  Clone ID: PAT_MRT3847_100988C.1
gaaatgtctgcttttgtttacaaggattggctttttacaaagcgagcgttgcctgctgatttttagaaaagaggattggcaattgaggatccatctgccctcatggcattcgcct

SEQ ID NO: 1095 - DNA, 207 bp, Glycine max
  Clone ID: PAT_MRT3847_100989C.1
acatagtgctgctccttgcaactctaattctatcgccttaaggtcttggaaagtatgagaaaaacccaatggaaaaggcttccaattgggaacccacaagtttataagcccccagttgaaaagcctcctgtttacaagccaccagttgaaaagcccccaatttagaagcctccagtagagaagccaccagtgtacaagcaaccagtt

SEQ ID NO: 1096 - DNA, 365 bp, Glycine max
  Clone ID: PAT_MRT3847_10098C.1
ccacgcgtccgttcggctgcgagaagacgacagaagggtacggctgcttgtagacgacagaatggtgcggctgcgagtagaccacagacgggtactgctgctagaagacgtcagatgggtgctgctgtttgaagacgacagactgtgtctggttgtagaagacgcccgaatggcacatgcatatataaagtgcgggcactgtacaaatagtcagaacaattgcattggtcacctccagaacggtggaacgccttcatctgtatgctttaacggtgtgaatagcctcaatgccgttttcaagaccaccgccgatcgtcatattgagtgcaactgccttatgtctgccttcagccaatatttgcggc

SEQ ID NO: 1097 - DNA, 279 bp, Glycine max
  unsure (1)..(279): unsure at all n locations
  Clone ID: PAT_MRT3847_100990C.1
tttttttttttttttttttttttttttgccaaaactacataatgtttaatactccttaaattaacctcctctaaaaaaaaatcctaattccaaaaccaatctaaaatatatctccaaaacatttgatcccatgtggcttaaactaactctgnaactatttcgtatggaattacttttgtacttttaaatttttctttataaaattcttttnnnncaacaccaaaaaatctttttaaatattgtgataagcctancctcttttcaataaactaccacccc

SEQ ID NO: 1098 - DNA, 562 bp, Glycine max
  Clone ID: PAT_MRT3847_100991C.1
ggctcgagcttttgccaaaaaatacagacctagaccaaaggtctagcaatggcgtcaggacacatggaagctctggttgggtatccgggcaagctcacccttagggtggtcctaacatgtgtcatggcagccactggtggattaatttttggttatgatcatggggtttcaggtggagttacctccatggattctttcttgaaggaattctttccttctgtctatgaacaagagtctaccatgaaagcttcaacagatagttactgcaaattcaacagtcagatattgactttattcatttcatctttgtatctaactgctcttgtggctggtctagtggcatccagcataacacgattgatggggaaggcgtgcaactatgattataggtggcatattctttgtgttaggtgcattactcaatggattagctacaggtttatggatgcttattgttgggagaatgttgcttggttttggtattggatgtgccaatcagtcggtaccaatctatgtctcagagatggccccctataagtacagaggaagtctcaacatatgc

SEQ ID NO: 1099 - DNA, 242 bp, Glycine max
  Clone ID: PAT_MRT3847_100992C.1
cacggtcaaaccacggcgtgaaaaaacaataaattaaacaattcaacaattcaaacattataacaaccaaaatgataccaccttccaacccaaaatatttaataaataccaaaaaacccaaatttttttcctaacaaattatgggccccatcccctaacaaacctacaattaaaacttccacattttaccaccccttcaaaccatgaaagaggacggaaaaacccctcccaaaattaaggtt

SEQ ID NO: 1100 - DNA, 682 bp, Glycine max
  Clone ID: PAT_MRT3847_100993C.1
atcataaaatcactatttctttcttctctcccaatgtaaataaatcaaacatgcacgatccttaaataatcctgcagaacattgatcaaagttaacaaaaacaataatagctcttactgaactctgaaaaatggtaaagaaaacaaaaactgatttcctatctccttttcatgtttgtgagcttgaaacagagaaagcagaatatcacaacacagacaactaaattacagagattcctcgtattgtacaagcaataagaaacgcacaccacagtaaaaaaggacacaaaattcagattatacagcacataataatataacacaacagaaaagaaaaaagcagtgtcaagctatggaaaggagaccgaaccaggtgtcatggtttggtccataaggcgtaacactagtggagccagcatgcgagcaacccttggtaaggtagggtaggttagagtgccaagaataaaccaattgaagcttaaaagagcaacagcatcagatgcaggtttatttctaatggtggagaaaaactgcaccacactcttcaaggacatgcctactacggcaaagagagccaccacaagaggcatgcaagggtcctcagcttcccacgcagtgactccaaccacaagtgacataagggcactgaaaagtgattgtgaaagagctatgtctcgatgatg

SEQ ID NO: 1101 - DNA, 545 bp, Glycine max
  Clone ID: PAT_MRT3847_100994C.1
ctttattgaccacatgcaatctcgcatcaggtgatgtcccctcttgtgatggcattgtttactgccagcttgtcgactcgctgcaatatctctctctcacatgccctgatatagcattccctatcaacaagctctcagttcatgaaggaccctactaaaattcgcatgcaagcaaccaagcgagtcctcaggtatctcaaaggaacaatagattttggacttcaactgcgatcatctccagatcaacatcttcgtgccttttatgatgctaactgggttgacaacacttctgacataaggtccacgggtgcttacgtagtttactttggcctgagtgtcatctcctggagctgcaagaagcaatccatcattgacaaatcttcaacaaaagttgaataccataaaataaccacaacaatcattgaatcacatttagcctgatccttctccaacgatgtattcttataacattggagcaatgtatctttgtgcaaaccctgtatttcacttgtgtatgaaacatctcacaattgaccatctctttg

SEQ ID NO: 1102 - DNA, 253 bp, Glycine max
  Clone ID: PAT_MRT3847_100995C.1
gtttggagctatgtattggctgttgcagtcttgggatggcagatttcttttggtttactgctttggaatacgcctggaattatgtaagtatgctgctagtatgcctattgcttcgcagaggaaattagtgtagatgaaaattaagtactgttctttgcatggccatgggaggctgtcctaaggaagagataggctatataacatggatgatttttctgttagcaagtcttgagtagaggaagtgtgatgcagg

SEQ ID NO: 1103 - DNA, 190 bp, Glycine max
  Clone ID: PAT_MRT3847_100996C.1
ataaggcacaatttgttgcttgaataacccctaaacctaagttatgggagctgacaaaatctgttacacacatatttctgaactgatatacatcgaactgccaagaaggtgacgcctgactgatacatagaatatagctttaatccagcgaggttcacgctcatatggagacaaatctgcatgaaccgat

SEQ ID NO: 1104 - DNA, 841 bp, Glycine max
  Clone ID: PAT_MRT3847_100997C.1
ggcagtagtttttgcggcaagggaatgagaggtacaaccttggtagacggcacagacgctgaactgaccccaggtagtgctgcaggtcatggaagatttcagatgggtttagaggcaatgaatttcttcctcctgttgcatgcagttcggcaagggaatgagcttaacaaccttggtagacggctgaggcctgagctgacccacaacaacagggttgcaggtcagaatgcagctgccgtgctggatatttcagatgaagacaatgataatgatggcaggtacaatgaagataatgatgatggtggtgtatctttggttagtcgtctccacggccatggcggtggcagagttttattgggtcgttctggtaggaggcgtagatgtagagaagcacgtgcaaggattggagatagttgaagatcgggcatgaaacaggaggttggcaaaggacaagtttcgtaggcatatcagattagaaaattcagcaccatgtagtggtggcttaataacatttgaagggctttctcccccaaaacaggaaaatcaaaagatgggcatttttattttcttttaaaatcttgttgtaatttcgtttacatgtacattcctaccttcctcctattgcttttgcacatttcaatgtgaattcacttgtgtaaacatttgattttatgaaatccttgacaagaagttgattgtcaaaaaaaaaaaaaaaaaaatcaaaaatttctctattcatgtgactgtcccaggatcaagtggccttttatttagggtgtttggattgacggtgggaaaattgattttactgaattgattattattgaatttattttggtag

SEQ ID NO: 1105 - DNA, 900 bp, Glycine max
  Clone ID: PAT_MRT3847_100998C.1
cggcaagggaatgagcttaacaaccttggtagacggctgaggcctgagctgacccacaacagggttgcaggtcagaatgcagctgccgtgctggatatctcagatgaagacaatgataatgatggcaggtacaatgaagataataatagcaggtacaatgaagatactgatggcggtgtatctttggttagccgtctccaccgccatggtggtggcagagttttattgggtcgttctggtaggaggcggagatgtagagaagcacgtgcaaggattggagatagttgaagatcgtgcatgaaacaggaggttggcaaaggacaagtttcgtaggcatatcagattagaaaattcagcaccatgtagtggtggcttaataacatttgaagggctttctcccccaaaacaggaaaatcaaaagatgggcatttttatttttttaaaatcttgtaatttcgtttacatgtacatccctaccttcctcctattgcttttgcacattccaatgtgaattcacttgtgtaaacatttgatttttatgaaatccttgacaagaagttgattgtcatgtgactgtcccgggattgaacaagtggccatttatttaagctgcccagtgactggcaaaccaagctcaatccaatggacactgcttgttgtgggaggaccactgctactggtggctctttcaaactccaaaattgatggagaaatttcacgtattcattttgcagccaaggacgaaacatagatggttagaattggagttgagaaattctcccatttgcagatttagattcggaagaaaggataatctattaggatggcagatgacggatttgtctagaaaatgtaagaacattgaaaaccatcacaaggttgaaaaacaaaagcttttcc

SEQ ID NO: 1106 - DNA, 782 bp, Glycine max
  unsure (1)..(782): unsure at all n locations
  Clone ID: PAT_MRT3847_100999C.1
tnnnnnnccactggnnnaggagaagagagannnnnnnagctgcctcagaattggaagatgatgatgattctcatgatccttcagtcnnnnntagannnctggaagagnnnnnaatcccgttgcggcaaagatactcacaaccatgctcccttccaaacaacaaaagaacacaacctatgaggacttctcttcntagcccatcctccaatgtgaaattcagtgcaggcttaatgcaaggtgtaattcagctaaagccacattctgctcattcaactcctagtcctttccaggaattatcagtgtcttctctttcatacatcaagaaacaaaagggtgttgaaataatgggaccctcttgctctaatcgatcaatagatgacggcacacttctattgaactacaaacagtgttccttcaataagaaattgatgaatgggtatttttcttttggagcacagggccttgctgttgaagattccaatagctgcgcaaagtcaaacagcagctacaaacgtttaagttccatagttgcctaacggttgtgatcaatttggtgagaacatgaaaactatagattacatactacttagcttgtaatgacaagtttgtaaaagttacggcacaaatatgcacacaggtgtaacatgtttgtgttgctttcttgttagacatatgttatttactctggatcttcttgctacaattttttttttttgcaatgtatgttgtactcttttcaaggtgtaacatgctccgattacacgactgangatgaaatgaaa

SEQ ID NO: 1107 - DNA, 326 bp, Glycine max
  Clone ID: PAT_MRT3847_10099C.1
ttgctttggagggagaaaaggtattaaatccaagcccatgcccaccatcgctacctgctgaatgtgttgtttctagggctgatccgattcttcaacaagaaaaatcaactcaatctccaagtgaattaacagaagttaccggcttagaagttacaaaggatagacctgaagaattgcatttagttctacctgcagaatgtccagtttctggagatgatcccatttctcctaaagagaaaccaacacaatctcctagtcagttaatagaagagactagtttagaagtaaaacctcttgagcagtcttccattaatctggaaagggaa

SEQ ID NO: 1108 - DNA, 591 bp, Glycine max
  unsure (1)..(591): unsure at all n locations
  Clone ID: PAT_MRT3847_1009C.1
atcaaaaactacttttgtttcatcaaaattccaagcttactgcagaagcaccactacctgcgagaagcatcatccagatatgacttaccaaccaacaaatctacctatatacaaaaatggcaacaataagtagaatatgaattaattttgggagaggaaattgagccaaagaaaaaaaattaggggggaaaaactgaaaaatacattctgttgagtaaacatcctagttgatatcatgttagcttgactgctcaagaccaggtagagaagttggctgaaggtttgatttcgggggaacacctgcagactgctttagggatcttgttttttcttctccttgcagagaagctcctatcttctcagggcgaaagtgagttccttccaaaccctgttctagctttctctttaccttcttctttattaaaacaccatcagcacccttgacatcatccagagaaccacctgaacttccctttgctttttcttgttttggaccattgacaggattgtgaacccgtgcggtggtgactgtgttagaaactgtcttgtttactgaagcntgaggatgaccactagagtctgtaactaatc

SEQ ID NO: 1109 - DNA, 671 bp, Glycine max
  Clone ID: PAT_MRT3847_100C.1
tgggggcattatggtctcatgaaataagcgtccgaccgcagccgcccgtacattaaacggcaacacagatctcctctccatctcttttttatttttgttttattttttcccactctttctcctcgtttccgaaccggaccgaaccgagccggaaacatgggagttccagcgttctaccggtggctcgcggatcggtacccactctcgatcgccgacgtcgtggaggaggagccatctgtcggctccggcgccgttgatgtgtctaaacctaatccaaatggcgtggagttcgacaacttgtacttggacatgaacggcatcattcacccctgttttcaccctgatggcaagtcagcacctactacctacgaagatgtattcaaatcaatctttgactacattgaccatatattttcattggttcgcccaaggaagcttctttatcttgcaattgacggtgttgcaccaagagccaaaatgaatcagcaacgttcacggcgttttcgagccgcaaaagatgcagctgagaaagacgcagctgaggctgaagctgaaattgaaagacttagggaagaatttgagggtgagatgaaactctttgtcttctaaagacaagcagagacttatgattcaattggcattacccctggcactccatttatgggaggact

SEQ ID NO: 1110 - DNA, 246 bp, Glycine max
  unsure (1)..(246): unsure at all n locations
  Clone ID: PAT_MRT3847_101000C.1
cccagagctccttcgcctcatcgatagtttaaagtctcgttttgacaatggtgagggttagtgtgttgaatgatgctctgaagagcatgtacaacgccgagaagcgcgggaagcgccaggtcatgattaggccatcctccaaggtcatcataaaattcctattggtcatgcagaagcacgggctgggaaaatcgtggttgaattgaatgggcggctgaataagtntggggttattagccctcgctt

SEQ ID NO: 1111 - DNA, 127 bp, Glycine max
  Clone ID: PAT_MRT3847_101001C.1
cgctgtcataacctattctccatctcaacatagaaattactactttaccccattccttaatcctactaactttggctctggtgaaactgatatcaggtgcttgttatccaccccccctattttttat

SEQ ID NO: 1112 - DNA, 112 bp, Glycine max
  unsure (1)..(112): unsure at all n locations
  Clone ID: PAT_MRT3847_101002C.1
ccgggggttgaggtgtaagaccttgacagtttagcctttcttaggnaaagagaagaacggcttcctgnaaaatcaacgagttggntgcggtccagctgcatggtggngaatg

SEQ ID NO: 1113 - DNA, 355 bp, Glycine max
  unsure (1)..(355): unsure at all n locations
  Clone ID: PAT_MRT3847_101003C.1
gggtcgtatgcacaaccgcggtaaaggtatatcctcttctgctttgccctacaaaaggacacctcctagctggctcaagatctcttcgcaaaatatcaaagaaaatatctgcaaatttacaaagaaaagtttaaccccgtctcagattaatatcattctcatagattctcacgatattgactcaatcaataccatcactagcagcaaaatccttcgcatcctcgaanctcacagacttacacctaaaattccagagaacctgtaccatttgattaaaaagacagtgtcaattagaaatcatcttgangaaaacagaagagacaaaactccaagttcaagttgattcttattgata

SEQ ID NO: 1114 - DNA, 411 bp, Glycine max
  Clone ID: PAT_MRT3847_101004C.1
gttcctaatgcccggcataattaaaatcagagttgaagtgcccttcagccataagaaggtgggggggcgtagcaaaccaaaagtgcctaatctaacaaaacaaactcaacctgaaactgtgtcacagccagtgccgaaaataacaacccatcgtccctaaataaatccaaaatataaaccttaaaaaacaaggatgccattaagagataatgaaaccaggtgatccgcagaaccgccagcctgtcgctgagcaacatttcttaagacgttcattgcctccttcacctttgcttttagggcttctggcgactcgagcaaatgcacaacttcagactggtccatctcaacaagcatgcctgtcactttggcagtattgccaggctctaactgtttcacagggcggacgcgtgg

SEQ ID NO: 1115 - DNA, 480 bp, Glycine max
  Clone ID: PAT_MRT3847_101005C.1
aattcggctcgaggcagcgtgcttcattcaggctgcgtggcgccggttcaagaagagaatgctgacaaagagccttagcttgagggaatgccagtccttcaatcacgacgaacaagtcggggatgaaatggaacatggggaagaagagcacagtgcagtgacttcaaacactgcacaagtgaaacagaacctaggtgtcactatacttgcttcaagatttgctgcaaacacaaggagaggggttcagaagattaaggatgtagagttgcccaagtttcaaaagcctgaagagccagacttttcagtagagcctgatgatggataagcagttcagcactgcaatatgaagtatctgaatctgatacagctgctactgtcaatggccaatttctaaagttccattgctatcttcaagagttaaaagtagtattcctcatacaaataataggggttcatacctataatatgtgtgcattattt

SEQ ID NO: 1116 - DNA, 761 bp, Glycine max
  Clone ID: PAT_MRT3847_101006C.1
cgaattcgagctctgtacccggggatcctctgagtcgacctgcaggaacggattcaggtgttggggatgcaaaaataatgaagtgaattgtgcaccgaagagcagccataccagagaaagagtggcatatgagtccttgccttcagttgcatcactagccgcgcggagagtttcttttgccttcacccaatcatcatttttcaactccaactcaccaagcatagataatgcattgggacacttgttattcaccttcaaggcatcattaacctacagaaaggagtgtcaaatagtaaatttatataatatataatttatttataaataagaaaagcaagaagaccatagggataatagtaaccagttcaatgcttaacagaatgttgttccgagcttttgcaattgcagctagcctcagatacgcatcaatatagtcaggatactggagacaaaagataataaaattgaatgaaatatataagccaaatgttaatcatgtcccatgtaataaaatagtcatcaaatatagttatccaggtgaacttttgcacaatataggcactctgtaattgaactatacatgataatcatattgtactgcaacaataaaggcattaacagattttttcagtgtgagcaggaaataacaaacattatttattcaaaaggaaaatttcaattcaagtctgcatggaagcaaaagcaaagaagctagctgcaaatctgattgaggatgatggagggaaatatataataaaata

SEQ ID NO: 1117 - DNA, 762 bp, Glycine max
  unsure (1)..(762): unsure at all n locations
  Clone ID: PAT_MRT3847_101007C.1
ctgatcactaggtgcgttcttccttggctaactctgcgggaattcagactattgttttggtacctactgatttgggagtcgtggagttgggttctgtcagaatgttacccgagagttttgaactcttgcaggctgttaaatctgtgttctccacgccgattcccaaggttttggtgaacacaattcgcatcagacacattttagagagaaacttgctgttagaaaaatggaggataataggccttggaacaacaacaacgttagttttccgaatgtgcggagcaatggccttcatgtttcaagttgttggccagtgaattcgggtttgaggcagcctgctcctagggtggtggcggagctggctaatggtgtgagacaggatttgaggctgagcaatagctatgaacctcaaagacaggtgcaaatgcaaattgactttagcggaggcactagcaggccttctgatgtggaggcctcttgcaaggaggagcaaccaagtgttgccgatgaaaggaagcccaggaagcggngaaggaagcccgccaatggaagggaagagcccctcaatcatgtggaggccgagaggcaaaggcgcgagaagctcaaccagcgcttctatgcgttgagatctgtggtgcccaacatctncaagatggacaaggcctcattgttgggagacaccattgcttatatcaatgagctccaggctaaagtcaagatcatggaagccgaaagagagagatttgaaagcatttcaaatca

SEQ ID NO: 1118 - DNA, 1633 bp, Glycine max
  Clone ID: PAT_MRT3847_101008C.1
tttttgcagcaaaaattaagaattctttcctcttatgcacagaacaagacatgaaaaaacaagaacttgaaagacatgggcatcaagacataaactgaaccatgacaactagatcggttaaactaattaaaatgattgacattgcaggaacaattttctgctgtgtttacactatagacaaacataaattggctgcctacatcgttaatgggaacctattattctactattctagttcccaatgcttttcttttaagatcctccgtggtgtaacaaaaaaattctgaggaagcttttagaaattggtatttctctacgtatggactatgctgactgcaattcccttgctatccaactgtgacaatggctgcaatgagttggattctgttggagaaaaaacagcaatcaacttgtcctttgtgagctgttcaggtccttgggacttaattacaaatgtgtgaaaaatggtatcatttgcagcagcaagtttagactctacaacactgatctgtgcttcgttaaatgtttggattacttttgaaacagggtgactgtcaagagggcagctcacctttacaatgacctcatcttgaaaagcttgaatatccacatcaggagcttttttctcctgattttccaatctcaacttagcttccaagactgatccatcatttgaagtgcttccaaatctctctttttcagcttccatgatcctgactttagcctgaagctcgttgatataagcaatggcatctcccagcaatgaagccttatccatcttggagatgttaggcaccacagatctcaacgcatagaagcgttggttgagcttctcgcgtctttgcctctccgcctccacatgattgaggggcgcttcccttccattggcaggcttccttccccgcttcctgggcttcctttcatcggcaaaactgggttgttgctcctccctgcaagaggcctcaacatcagaaagctccaattcaccgacgaccggtctcgctgaagaaggcctggaagtggctccggtaaagtcaatttgcatttgcacctgcctttgaggtctgaaatcctgtttcccaacattagccagctctgcgaggacactactcgtgggggccctaggagcaaaaatctcaaggggaccaggctgcctcagatccgaattcactgcccaactcgaaacatgaagactattaccccgcacattcggaaaactaacgttgttgtggagattgttcccattggggtcggggtggccatggcctggccaaggcctattatcctccatttttctaactgcaagtttctctctgaaatgcgtccgatttccaattgtgttgacaaaaaccttgggaatcgaaactcctccatctaccttattagcatccccaattgccaaaccagggaaaacagcattcccaccggtgctcacactcaccccttggtatgaaggagactgcgtggagaacacagatttaacagcctgcaagagttcaaaactctcgggtaacattctgacagaacccaactccaccactcccatatcagtagggaccaaaacaatagtctgaattcccgcagagctagccaaggaagaacgcacgcagtaatccggctcgagcggctcgag

SEQ ID NO: 1119 - DNA, 489 bp, Glycine max
  Clone ID: PAT_MRT3847_101009C.1
gttttattgaaagagttgaagacacaaatgaagtaatataagagtactgtgttgaagagaagaaagaagtaataaagagtgctctgttgaagaaaagaaagaagtaataagagttctgttcaaggtgatgttagtgtccttgaaggtttggaaggttgagtttgaattcattgtgaagaagttgaagtcttgaagagttcaatctcaattaatactttggcttctacgaggttagcaaatccatgtggtgtttataattgatttctatggagtgttgagaaagtgacttgtgatagtttgggagtcaggatcatatttgtggatatctgcaatcaagccaccttccgtatgcaggtgtgtttacttattaaaccatgcatatggtgtaacttatgacttcaaattttatggtacagggagcccagaggttttgggtttgtccaatatgtggacccaactgatgctgcagatgcaaaatatcacatggag

SEQ ID NO: 1120 - DNA, 568 bp, Glycine max
  Clone ID: PAT_MRT3847_10100C.1
tcaaattcccttcccatggtctctctctcttcaattaattccatttagctttccccaaatcccaaaccctttttcgcttagatcccaatccaattgggttatggacatggcttccagtccccgcaccgtagaagagatcttcaaggattacagcgccagaagaacctctgttattcgcgctctcactcacgacgttgatgaattttacggcctctgtgatccaggtaaaagggtggtaaattggatctggttttattttttatttctcggctctatttttttttttagtttcgtttatatttttttgtggggttcgttttgttttgcgaatttttaatttctttttccttctctggtgtgtgagtgtgaattgtgcgtggttgttggaataaacaaggttggttttcttttttttttctcaaatgagtgggccgtaatgagaaaaacgtgagtttacgcgtgtgtgtgtgtgtctggataagcgttttcagaaattattttattaaaaattgatttcgaactgaattaattcatgcttggatgtaaaagtataaaaaaaaaaattatt

SEQ ID NO: 1121 - DNA, 152 bp, Glycine max
  unsure (1)..(152): unsure at all n locations
  Clone ID: PAT_MRT3847_101010C.1
ggactacctttnncntcttccactaatcaccatantntggataagcattcatgtactcatctctagcttcnnnccantcanancttcnanaaatcccccggggnctcaccctttnccaatcataggnaanatattggagcttggcaaccagc

SEQ ID NO: 1122 - DNA, 338 bp, Glycine max
  unsure (1)..(338): unsure at all n locations
  Clone ID: PAT_MRT3847_101011C.1
acatctntaaacggaaattcaaagtgttttggcctacattgaactaccacaacccacgcgactcccgagtgtacgacccacgctagcttcgaaagttttccttattcccagccctaatcccctgagttcggtagcacaccttctcttactctacgtcaccatcctcaccgtcatcggctacaaccaccagacagccaccaccgccgagccctgcaacgacgtcggcgtacatcgcataggttggacctttggaagcatgatttttgaactcttctattgcaccgccggcatatcacggggacacataaacccggcggtgacgttcgggttgcttttgg

SEQ ID NO: 1123 - DNA, 402 bp, Glycine max
  Clone ID: PAT_MRT3847_101012C.1
aatttctctaacatcgtaagttactagaaagtgagagaaattaataagaatggtgtggcctttgaaggagagaggaagcaagctagggtggacaagaagcactttgtagtccctatctgcaactcctggccatagttggcgtgcgtcgtcatgtttttgttatttgttccacgtcttcctcttggtcttgcccctcgtggttccattttttggaggcacaagagtaccaacagaagctgggagtagcgcagttggtggccttgctcttggttttggcctcttacctctccgatttcaagtccatgtggtcaccactcatttggagaccctactagttgctactactatcatatatggccattaccaaatgaaaaatgcacggaagagaagacgtgggaaaaa

SEQ ID NO: 1124 - DNA, 432 bp, Glycine max
  Clone ID: PAT_MRT3847_101013C.1
cccacggtccggcacacgcgtccgcggctgcgagaagacgacagaagggcaattgagttcacagtcaaggtgtgggactatcttgaggaagtggtggttgctgttctgaagcgtcactcagaacactaccaccaacttcagacaagtacaaaacgagcagggaagaacctcattgctaagatgaaggagaattctatgaaatatgtgatggaggttgtggaaatggaaaagctaactgattacactagtaatcctgaatacatgagtgagtataacgagctaatggccaaccaggatgaattcgtggagaaagttaatacaggcaactatcatgaagttgcccttgatggttttgagcaggcgattaaggttggtcatctgagtcagtactcaactttacttccgcaggcatttgacttgaaaatgagcctg

SEQ ID NO: 1125 - DNA, 261 bp, Glycine max
  unsure (1)..(261): unsure at all n locations
  Clone ID: PAT_MRT3847_101014C.1
ttttcaacaatttctaatttctttnctcctataatcttatcactcttttccatttccatacttcaaacanttttaatnnctcctaattaacaataattccacttttattacaacaatatcaaatatttaacttnaaatatcaatacttcccaatccccatcacaatcctctattatatttatccaaacccaataccacataccctccatatttttctttcaaaaattcttcaatacattcctttttattcccccaaattat

SEQ ID NO: 1126 - DNA, 371 bp, Glycine max
  Clone ID: PAT_MRT3847_101015C.1
tcgcgtcacgtgaactgtgcttgctcgatttgtgctttgaactgtgtggcatcacgaaagcgagacgcggaacaacaaaaccctactcggcgaattcgaatcgggagaagtttggtgaatcaaaaagggaaaccctaatttggaaggaaacgagtaacaaagaacaaaaccctacccgactctctctctctctttatttctttttctcttcgggtgtgtttatgtgaacttgtgaagggtgtatttttgctttatcggcgttaatgaataatgagaaatggaggggagggtcttactctagggaatgagaggtgggtttggagtgtgaggttgaaggaggggtctggagtgttgaagaggttggaaggggt

SEQ ID NO: 1127 - DNA, 397 bp, Glycine max
  Clone ID: PAT_MRT3847_101016C.1
cttacaagaaaaagccaccccaaatcccctaaaattaacatttcctaatcatactccacacacagacattaaaataccttaaattaataacacaaaattcctttctctcccacacttgtcaatgataatgtaatcaatctattatattaacaggttacaatagcaattattcattgctatcctcctgaagggaaatatcattcaccaaactcacttctctttttaagaacgcatgctacgcaaattcatttgaatacatctttgaatttttcaattaaagttcttttttaagccaattatcacctagcaacctttacacgtgtttcataaggtttcaaaatcaacaatcttcccttctcttgcacaaaaaataaagcccaccaatgccccttttaat

SEQ ID NO: 1128 - DNA, 349 bp, Glycine max
  Clone ID: PAT_MRT3847_101017C.1
acagaaagaagcatttcatgaagaggaagaaccacatgaaatatctaaaaatcaatgtggtgatgaatataaagaagaaacttgtaataaaaaaggaacacacggggttattgttattgaaaattccaacttattaaagccaaagaccttgaaagctagagatgtagatgtgggaaaaacaacagaactttcaaggcatgaaatggatgagattaataaacacatagccgatgatcgctatatgaggatgcaagagcatggaaaaacagaacaagcaactaatgatttagaacgtttaactcttatacgccatgaaatggaagattctgcttaaaagcgagaacaagat

SEQ ID NO: 1129 - DNA, 487 bp, Glycine max
  Clone ID: PAT_MRT3847_101018C.1
acggctgcgagaagacgacagaaggggttgtatacagttatatatattgtttttcaacaaattaattaaaacaaataaaccccattatatgatgacgccatcgtaacctacagtagatatatatcatggtagttatagtatgttaggggacagctatgttagctttggaaggtcaccaaatctgaaattacttctattttcagtgaaggaatccaaggtcaccaatctctaaattaagtggaacagggcactaagactttgtatttctttgcccgttactccaaggcaaagtagaaagcgacgactatagtatcatgaaaagagagaatccaatacaaagcacacatagaaagctacatttgcgaactagcttccaaataaaacaatacaaacttgtaaataaaatctttcaggtgcacaatcatacgtaagccaaaatcttcatttggctaataaattatttccttaaggtttccacattttaaaa

SEQ ID NO: 1130 - DNA, 695 bp, Glycine max
  Clone ID: PAT_MRT3847_101019C.1
attttcttctagtgctagaagttctttttaataccttatctcctacatttatgctccatggccctatataagaagaaggaataggaacaaatgctatagttgctgtcaatgataaagggaaagaaaaaccatacatttttggtggtttactaacgtgagtactgcgacgtaaaggagctggtgctggatgaagcactggatctatattcagagattgatcagaagggggccttggaggtatggatggggatttggtagaacaacttgatgtctctgatacaccaataaaggttgtggtgctggttttcctacaaaattgttaggaaacaatgacaaaatagatgtggatgtagaagagggagtgtcttggttagttgggaaaaaatatgtatcttcttgaaagatgacatttctagaaactcgaaacttgtgtagattgggataataacacacaaaccctttatggtggacagaataaccaagaaaagcacatttaacaaattgagttgtgagcttggtgcattcttatggggaaggtggacataccaaatacaaccaaaagtgcgtagattggaataagtgggtttgtgaccaaataacttgaagaaaggagtatcattgtttaatgattaagaaggcatgcggttaataaggtggacaacagtggagagggcctcacacccaaatcgagatga

SEQ ID NO: 1131 - DNA, 429 bp, Glycine max
  Clone ID: PAT_MRT3847_10101C.1
ggcaatacacacaaaaatgtctgctgcagaacagaacgtcgcagtcgaggccgacaagaaggaggtcaagaaggccaaggccaccaaggccaagggagcccaggcaaagaagggaaagaagacttctctcaagtttaccgtcaactgcgctgcccccgttgatgatgaaattttcgacatccaatccttcgagaagttcctgcacgagcgaatcaaggttggtggcaagaccggtgtcctcggtgatatcattgctattgagcgcgagcgaagcaacatccacgttacctccaagaccgccatgtccaagcgatacgtcaagtacctgaccaagaagttcctcaagaagcaacaactccgagactacattcgtgtcatctcttcttccaagaacgcctacgacctgaagtacttcaacattcacaacga

SEQ ID NO: 1132 - DNA, 723 bp, Glycine max
  Clone ID: PAT_MRT3847_101020C.1
gaaccatactttctgcaacttcctcttaaagccaccattgtatctccacttcatcaaacattgtttcatatttcaataaatactttacattattgttagaagcacaagaagcaatctagagggatcatctcatttaaaaaaaatgttgtcgtgcatctttgcaccttttataaaaactaaaagacactatcagctccaacccaacttcggccagtgtccttggatattcctctctccttcattatttctctaagctcagttacactttcccatttcccagcagctgccaaagtattagatagtgcaacatatgcccccggtcttccagtagcattcagcttaaaaagctcatttgcagctaattttgccatctctaaattaccatggagtctgcaagaactaagtaaagcagcccacacatccaaattcggtctctcaggcatcctcatgacaaactcccaagcctgattcagcatccctgctcgacctaacagatcaaccatgcaagcataatgctccattcctggctttaccaagtattcattctccatgctctgaaagatctcccaacccttatctacaagtccagcatgtgcacaagctgaaagagcactaaggaatgtcacataattgggcacatgccatattctgtttgggatctttccaaatagctgaagtgcttcatcaggaaacccattctttccatatccatcaatcatagat

SEQ ID NO: 1133 - DNA, 729 bp, Glycine max
  Clone ID: PAT_MRT3847_101021C.1
ccacgcgtccgcttttttctgatggcaaagaaaaatttgccatcttgtgttccaatgggcacttaagagaagcgtttgaaagctttttatctgagatatgggcaaaaccccgtttgttctcaaacctcctccaagcatgcattccgttaaagtatgtttctttggggaaacagcttcattccttgatattaacttctgggtgttcctcagacaagttcatttccaaccgcctcctcaacctctactcaaaatttggggaacttcgagccgctgttgcactatttgatcgaatgccaaggaggaacattatgatcaaggcctgtcttgaaatgggaaatcttcagagtgccaagcacctgtttgaggaaatgcccgagagaaatgttgccacatggaatgcaatggtcacggagttgaccaagtttgaaatgaatgaagagtctttgctcttgttttcgagaatgagcgagctgggtttcatgccggatgagtactcaataggttgcgtgctcaggggatatgcacatttgggagctttgttgacagggcaacaggttcatgcctatgttatgaaatgtgggtttgagtgtaatttggttgttggatgctctttagctcatatgtatatgaaaactggaagcatgcatgatgggaagagagatatcatttggatgccagattgtaatttggttgcttggatacacttatggtttggaaaagctcaaaaag

SEQ ID NO: 1134 - DNA, 490 bp, Glycine max
  Clone ID: PAT_MRT3847_101022C.1
cccacgcgtccggccacgcgtccgctgaatagcaataagcttgttgaagagtctaggagttttctttgccctttaattcaactcgagtggaagcagcgaaggaacttggatctccaataccatgcgatgatggacacctcgataccgttcttagcattgatgggggtggcattcggacaatcataccaggaatcatccttggctgcctcggatcagaacttgggaagctagatggctaccatgtaagattggcacataactttgacgcgatggcggaatcaagtactgaaggagtagagactgcagggctcactgctgcaaatgaaaatagccgagccttgtatgcagaacaaggatcttgcgaatttgtaccgtgagcataccccaatactctatccacagaacaggtgctggcatttattctcatgtatggtgaagctcacatgaactcttgttggaccacaatacatcggcgggtgcttacacaggc

SEQ ID NO: 1135 - DNA, 915 bp, Glycine max
  Clone ID: PAT_MRT3847_101023C.1
ggcggctcgagctcgagccgaatcggctcgagtacggctgcgagaagacgacagaaggggataagaaagaagatcaaaagaaaaaagagaaacaaatggcagcactgggtggctttaccgacatcaccggagcacagaacagcatcgatatcgaaaatctcgctcgctttgctgttgatgaacacaacaaaaaagagaatgcagttctggagtttgtgagggtgattagtgcaaagaaacaagtggtttctggcaccttgtactatatcactttggaggcaaatgatggtgtgacgaaaaaggtttatgaaactaaggtgttggagaaaccatggttgaacatcaaggaggttcaggaattcaagcccatcactgttgctgttaatcctctttcggtgacggtctagcacatagctaggttatggaagtgactagcttggccgcaagagtaataatatgtatgaactgaataaatgtacctattaactctacaaacggtgtggggttgtgcatgtttgccatcctatatatttcagtataaatattgccatcgagattaataaaataattgattatgtattaatttatgcgtgtttcgtccaaagagtggatggtgatgattcgaactttatagcagaatgatctggtggagcggtcccttctgtactcaatgcgattatggggtcacaatcttgaagttcttgccctccttggatctatcttaatatttattgacattaagtgaaatatagatttcatttaagtttgatctaacaaccaattacgtcattgccaactcttaaaaatgacatttacattgtcataaaccaataaaaaattatacgtaataataaatgcattacaaacgttttaaacaaatatattataaaccattcatagttgattagtcataaa

SEQ ID NO: 1136 - DNA, 596 bp, Glycine max
  Clone ID: PAT_MRT3847_101024C.1
gcaccagctggtgctgatgaagactcgtggttaacagaagcagaatcatacgatccttcaagcttcataatattggtattctccgccatcttcctgcgtccaaaacagagcaaagatggcccgccaggcccaccgggcttcccggtgatcggaaacctgcaagccttggcccagcaatacggtcccgtcatgtccctccgcctcggacaggtcccacacgggtagtctcctcttcagaaagaagaaggcgaggtgattgaccttagcgagatgctgctcatctttgtggaggaaattgtgtacaagatggtgttggggtgtagcaactagcaagcatgacgagtttgatttgaaggggttgattcagagtcggattaaccttactggcttcgacctttcgatcttcaggcttctttcacatgcttggtaatcccctcaactggatagagattagatgcaggacttgagcgagttgctcttcgcaagggagccgcttctgctgattttttagcatgaaaattcattgttattttcaatctctagtaagtaaataagtaatttaacttgttattaaggcacttgtaataatatattat

SEQ ID NO: 1137 - DNA, 594 bp, Glycine max
  Clone ID: PAT_MRT3847_101025C.1
gcagggaaaattgttaaatattttggcattcaaaattcctctcataattttacagaagagagattgcttaattgtaacaacagataagggtagtaccaggggccaaatgacacattcctgcccctgccctgccacaaactttacaaaatccaaaacgtgccacatattggagtggcacaactcaaaaactgtataactattataatgtacaaattgttaagaggggagaaaatgaaccattaattaatggactttgtcacaattgacaactacgccatcacgtgccggagtggcagtgtgtcaccttaaatggagtatctgagtaggcaaattaggatgacaatttactgctctccacttcttcatctgaggacttcacacaagtggaagatgaacaatggcatctaggttgttctttacaatccacttctgaggatagaacgaataagatgattcaagatcaatatgccagaccataactctcgagcagttgtccattaagccctccatttgactttcatcttcaaccacctgctcaatcaatgtgctaacccacaaactttccttgaccgaatcaagttgtctgataggttc

SEQ ID NO: 1138 - DNA, 379 bp, Glycine max
  Clone ID: PAT_MRT3847_101026C.1
aaacacaaactaaaagcgcttaaaggataccaaattggtttaaccaaccctatatctttggacagtaaaaccgggcgattacctccaaaaaaatggcaagaaggcactttaggtcctaaataggccacacctctcaggggctggaggggaaaaattggactatggctttttaatacaggaatatgtgggcctaagtgccataaatcacctaagtaaaagaaaagggtaaaacaaagatgggaagcccccaaatcgcttttaaatttaagccaaaaggggggccagatggtcgaaccatactcttttaaattgagggaatgaaacatgaaacccgccccaatatttatggtgtgctggggaaaacgaggggttttgggca

SEQ ID NO: 1139 - DNA, 406 bp, Glycine max
  Clone ID: PAT_MRT3847_101027C.1
gttgtgcgcttcatgacagcctcgtggttctggatggaccatgggtgttctggcatgaaccaggggagtggggcaaccatcagagctatcaatggtcgacttgaatgggatggggcaaactctagtgctgttcaggctcgaggtaattactacacccagtattgcttacaatcttggagcatcccctgctgacaatctgacttgctagatactaaagatggatggtcgcatctgatgacataatacatagaggcggtagatgacaccaggtctaagataagtaaccattcaaggtttacagcctcatgacgggtattaacgtaatgactcctaacgggaatatcgtgtatgacttccatcgatattgagcttccaatatagaataaaggtacgttacttttgggct

SEQ ID NO: 1140 - DNA, 204 bp, Glycine max
  Clone ID: PAT_MRT3847_101028C.1
ctttctccttctctctctctctctcacaatctagataaaggtgtgtgtgtgtgtcgggggagataaataccactgtggcccactcaagttgctctaccaagtttcgatttcgaaggaactaatgtatctaatgaaggtaactggtatctctgttgtagaagtgagcatcctcatcatcaacactagtgtagaggaagtaccaat

SEQ ID NO: 1141 - DNA, 933 bp, Glycine max
  Clone ID: PAT_MRT3847_101029C.1
aattccaagattggattttggtgctgtgagtatttatagagagagaaagagaatgtgtttggtttgtggaataattggtgacttgaatcgttgaatgagatattattgagtttgattcagaaatgaacaaagacgaaagcgataggaacgaaaagaaagcgcaagatattaagctttggggagttttcatcttcggattaatcggcgccaccgtcactgctttctccgaacgaataagacgtatgcaaagtgtgtttaatagagaaagggataagcatagaagaaactacgagagctggaaggaaaatggtgccggtgcacatcatcaacatttccaaagagatgattggtattggaaggctgaagcatccttcagagagcagtgggccaatcaacatactcaaagagggagcggaaactattcgttatcacatcactactcagttttaggtcttgacaggtttagaacaacaccatatacagaagcggagattaagacagcatttaggaccaaggcaaagcagtatcatcctgaccagaaccaggataatagagaggctgctgaggccaagttcaaagaagtaatttgttcatatgaggccatacaacaggaaagaaaaaaccagaatctgtaattggccacctctgcctaacaatcctggaaccttaaaggtgaggtattcaaaatcatcatcaaaggtcctccttaacttcataaaatagtattatcatccagctaaaatatgattttgctgctagtaaattttgggtaattatcacatcatatcatatattttttttttaaaaattatcacatcataaattaataatgatgttgatgtgttgtattataaagctgttatccttggatgcgttgaatttcttttccgggaaattgattgaagacatacatatttaattaataagcattgc

SEQ ID NO: 1142 - DNA, 381 bp, Glycine max
  Clone ID: PAT_MRT3847_10102C.1
ccacccaactggttgggccatggataaaaaaccagactaaattcccccttaaaacaaaacttggacaaactcaaggctcaagggtaaatggaaaatatgtccgggactaaaaaggggggaatagactaccccaattaatcgaaaagacggaaccccatataatcatcaaatccctttttctcccccaccttttcctttttttttacctaagcagccggagaagcaccaccgccacctccaccagaaccagggggaacggcaacggccccaccgccaccaaaaggcaccgaggccagtttttccttaccggcagcaattagctaaactatatcctaaccctaaacttaagacaaaaacgattaaatcctatcttaatcggcc

SEQ ID NO: 1143 - DNA, 604 bp, Glycine max
  Clone ID: PAT_MRT3847_101030C.1
cccatgcttccgtacgggtgcgagaagacgacaagggggggaagaaaagagttttggctcttggtgctgtgagaaatttatagagagagaaagagagatgtgtttggtttgtggaataattggtgacttgaatcgttgaatgagatattattgagtttgattcagaaatgaacaaagacgaaagcgataggaacgaaaagaaagcgcaagatattaagctttggggagttttcatcttcggattaatcggcgccaccgtcactgctttctccctgtccaggtcgcaggcaaaaggaggcagctctttccgaacagcatttcaagaagaagcatggaagaggtacaataagcgattgcaagaggagtatgaggaggagatggagagggtggaacgaataagacgtatgcaaagtgtgtttaatagagaaagggataagcatagaagaaactacgagagctggaaggaaaatggtgccggtgcacatcatcaacatttccaaagagatgattggtattggaaggctgaagcatccttcagagagcagtgggccaatcaacatactcaaagagggagcgggaactattcgttatcacatcactactc

SEQ ID NO: 1144 - DNA, 391 bp, Glycine max
  Clone ID: PAT_MRT3847_101031C.1
gctcggaattctgctgcaggtgcatcagtccctcataactccgcagttataaatattgagagcattgcacatcagagataaatcaagtctcaaattcacaagtgtctggctttacaaattttgaagtctatcacctttgaaattacacatacctcataagatttttggtattccattggtattgaactctgttcagcttcctgccattatctgcacaccaggcttcaccttgtcgctcaacacatctgctccctaagtttatagcctgtcaccaagggtgatatgttgtggtactcactatagaacaacccagagctagtggcgtataagatggcattaacctaaatatagagcacttaggtagaaacctttactcttctgataaaactct

SEQ ID NO: 1145 - DNA, 213 bp, Glycine max
  Clone ID: PAT_MRT3847_101032C.1
cgcaacgcctcgtggagagcatgagcatagtgactcaccaatccacacacgtaaaatctttactgatcttctctatacccatccgaaactctacctgagaatgctagacatgtcaaatcccccggcgacaactccatcctcctactgcaaaacgactactactcaggtgacccatatcaacaatcttgcaccacgtccgcattctcacattaa

SEQ ID NO: 1146 - DNA, 743 bp, Glycine max
  Clone ID: PAT_MRT3847_101033C.1
tgatcatttattcatgtgtctcagatttcattgtagatgcacaaatacttattatttcaattttttttattgttgtctcaatttgtaaatctaagactgcctttgttccctacattggtttgtataagatgatgctcaggctcaggcttgactcattatttatatggcaggctcgaactggatccaagcttggaaaggggaactcaagctattgcttgtgatgctcattatatgcttgcaataaaatgtgcccaagctgaataaatctcaagattggggttgtttcaaatgcacaatcccttatgcatggtttccatcaacatatatataatgacaatatatacaaaatatataaaatatttgaattaaagctcataaacttgcacctcatttgttcacaactaattggattaggatttactaaaaaatcacatttcctcttggcaactaatcttccagtgagattacctatcaaatacgaagcttcatctagacatttttgtatatcgctgaagtcattggcttttgtttgcttgatatgtttctccactcatacatgacaaagtcactgatattgctaactcgacaagtatattaattcagatatttgcaatatgatatttgttgtcttccatagggttcaagtgttcccttagttgtcaaatgggctgatactgaaaaggaaagacaagctcgaagagctcagaaagcacagtcccaagcttctaatgtaccacatactg

SEQ ID NO: 1147 - DNA, 255 bp, Glycine max
  Clone ID: PAT_MRT3847_101034C.1
tctcgagccgattcggctcgaggattttgcccagaagctccttgaacatctgcggctaaggaaagaacgaatggcttcttctacagactcagaggtcaaaccaatcccaccatttgcctatagatgcatatgcttacaccaaacaaacatacagaggatccagacatacaaaagctactgaaattgtcagttccaaaactggggagatgctgaatagttctagcagaagctacagatcagtaaacaacggacaag

SEQ ID NO: 1148 - DNA, 422 bp, Glycine max
  Clone ID: PAT_MRT3847_101035C.1
tacggctgcgagaagacgacagaagggggaacaagttggttcatcgccccatgtccacgtggcatcacaaagctgagacccccattagcctgaaaccaccaaaacccaaccaaacccttaagaaccaccttgaatgtaacaggcccaccaaggtgcttctactcttcagatccttcttaagaaaaaaacccactctcaacctcattgacagtttttctctgctgtatgccctcaaagcctgcaaccacaaacacccctccacccaaggaaaacaacttcataccctcattataaaacttgggtaccagcccatagttcaactccagacaacccttttgaaaacgtacgcgcaacgcagcaacctgcgtgatgcacaccaagtgttcgacgaaatacctgctaagaatattatatgctggaca

SEQ ID NO: 1149 - DNA, 700 bp, Glycine max
  Clone ID: PAT_MRT3847_101036C.1
atattctcaattcctattccattcaggtagaaaataaatagattacactgctatccccaacttacgacataaattttacaatgcagttgcctgagccacgaagcaacataattttttttacagagtagctgcatgctaatgcactcaccaaagagaaaaaaaaatgtagatcaagcgcaacccactttctccaatatggtggagtggacaacattgtttacaaagttataaaagcattgcctgcaacaattaggcattaaagtagatttctgaaactgaggagtattgtcggcatggctgcatactgagctagaggaggatgtactagacttttgctgatcagaactgcaagcagccaagatggtatgagtggcctgccttgcaactaccttgaaggtatcaaagcctaattttttatctctagttaagagcttcagattcaatttaacaagagactggatctcagtttttgaatcaacaatatttcttgtgtttccatcctcagagcttttagccaatctcttttcttcattaacaagattcacacccctattagagaacatactgccaaatttgtcacgagaggaagctaaatctgctgatgttaccaagcaagcatacaagctttgttcctcagcaacatttctcagtccatcttcacgacagggaccaccctggatactagtatggacctttcttg

SEQ ID NO: 1150 - DNA, 491 bp, Glycine max
  Clone ID: PAT_MRT3847_101037C.1
tacggctgcgagaagacgacagaaggggagggagtgaaggtgaagatccctacttttaaagggatttatgatccagaagtgtatcttgagtggaaaatgaaggtcgagtatgtctttgcttgctacaactacaatgaagagaaaaagatcaaattggcctccctggagtttgagggatatgccttagtgtggtggaatcaagtgaggagtgatgttgagagaatgaaaaggttgttaattgatacttggcaatacatgaaaagagttttgagagagagatttgtgttgtcttattatgggagagaccttcacaacaagctccaaagactaattcgaggaaataggagtgtggttgagtattacaaagagatggagatttccttgattagggctcaaattgagaggtctcaagaggccaccatggcaaggtttttgcatggtcttaatagggagatccaagacattatagagttgcaccactatgcctcttt

SEQ ID NO: 1151 - DNA, 119 bp, Glycine max
  Clone ID: PAT_MRT3847_101038C.1
caaccatcgcgacgccgggctggggctacgttccggtgcggtgcggtggaccgcgttcccagcgtagcgcaatgatggaaagcggatcctgaggattgaagggatccaagccatccaaa

SEQ ID NO: 1152 - DNA, 442 bp, Glycine max
  Clone ID: PAT_MRT3847_101039C.1
atcttgctctatatcaaggcataataatgtttggtctgaggccacttcctcggaatctgttgaaatgctattaaaatctgttggacaggaggaatttatccctagagaaactgttatacaggagtctgatgcctgtgatgaactggtatgcttagctaagcaaatggagcccgatccaaaacctgatggtagaaatgaatttaaaaataatattactgatttacagcctacaggttttattgatgagaacttggctggattgaaggatgaagaaagggagcagtctctggctggagtttcccagggtgtactatccattgatggaagtttaagcaatctgcaaccacatgatatgcttggcaatattgacttgccaatggctagggggattctctttactgatgacaaaagtaatgatacaaatcaaggaaaagttgagact

SEQ ID NO: 1153 - DNA, 466 bp, Glycine max
  Clone ID: PAT_MRT3847_10103C.1
ggggttgggttttttttttttttttttttttttttaaaggctacaaaagcaagctgggggcttaatgaacaagactcaaaacaacaaccacacttcctgtgagtttatatacgagaacctcacgtggttttggcttaaaactgataaactacacccatttgggggggggggggcttcccaaaatcgttcacgaagcaaaactctgcaaaactatgggctacattcaaagaacccactgtgaaacctctctatttccgacagacctcgctggctaactggcaaacagccaccttgaaccggccctttttccttgccctgcggggggcttttcccaaaacctcgccacaccgtcccccctcccaccgcctgccttttggttgaacagctcaaccctatggacctgctgcgcggggcttgctcccggacccctgccgggctcccggaccccgcacccccgtgatttccc

SEQ ID NO: 1154 - DNA, 314 bp, Glycine max
  unsure (1)..(314): unsure at all n locations
  Clone ID: PAT_MRT3847_101040C.1
aacggcggcagagccccccgaggggaacggagagagggagggagcgaaggcggaaagagaagcggaggcgacacaacccaggccggccccaagagccccgaggacaagacagaggaaaccgaacacgcagagggaagacacagaagcgcnggaggagccccagcaggcaaacnnacggagaggaacaggacacgaaagaccccacagggaggagcgaccccccaaaacggaagccgacggagaaaaggagaccaaggacacacaccaggccccaggaaagaaggaaaacaaagcccggaggcagacagcaaagc

SEQ ID NO: 1155 - DNA, 247 bp, Glycine max
  Clone ID: PAT_MRT3847_101041C.1
tggaaacacatctgagaggcatcacaataaagaaacacaaagaaaaacttagagagagcaagtgtttgtgtcatttctctgatgggtaacaacaggttcaagttatcagatatgataccaaatgcttggttttacaagctgaaagacatgagcaaatcaaggaagagaaatggttctcatgctatgaagagtaaagtgtcttcaccaccaacaacaacaacatcacaaaggtcgctgccaagatatt

SEQ ID NO: 1156 - DNA, 388 bp, Glycine max
  Clone ID: PAT_MRT3847_101042C.1
catatgagactacactgagcatcgtctagctatctcgatcgaactgtccaaggtcctgtcacgtcaaatcaaaaagtcttagcaagtttaaaagttgtggtcgcgggctgtggtggtgcaagtgtcgagttaaggtcggttaaaatttgaatttgaaaatttttaaagcaatcgtagtctacatgtatcgccacgtgtagtaattatcctggatttcttccgtggtgttttcttattattcgtgcccgtgatctcgcgaattcgattgttctccatgggattcgtacgtgtcacctctcgctaacagtacgtgttcgttcgataatgatcgtcttattgaggttcatattagtatacccaacaagcgcaacccccaaaagtctgcaat

SEQ ID NO: 1157 - DNA, 604 bp, Glycine max
  Clone ID: PAT_MRT3847_101043C.1
ggcacacctgcaaactggcaaaatggggtagccctccccgccctgcagggagctaccagcagcggctcactacaactatctcggttgctttgctgggaaggacccaaacatagcatataattcacatctggagctctggagaggggatgtagtgcaaagcaaacctggggtactggaccgactactacatagcatcgtgaagcactgacatggggagactacctgtgactataaggccattgttttggagaggaactactataatgtgataaacttgcccccaacactaggcagcaccgacgcatgatcaataagcctgcacctggcaacaccatgtgagaccgaccaatccgactagttttgctgaacaggaacatagctgagcatatattctgatctggaggccctatgcttctagagcaaatatacactactttgctggaatgtatgactacataacattgaaagcactacatggcttgattaatagagtcactccagctaagctatgcccgatgtgacagttgaactacaactagttgctacaattgaaccttgtcatgatcactgcgcacatatggctggccttacctatgtgactgct

SEQ ID NO: 1158 - DNA, 328 bp, Glycine max
  Clone ID: PAT_MRT3847_101044C.1
taatctgatgacactagatgcggctccgttgccataatcagcggacgtgggctaaggagactttggagatttttgcacctttgtccaatcgctagcgaatttctacttagaaggaacaattgcaaaatttatgttttaagcatatcaacccaagccaccatgatgagctatcatccaagcttgtataatcgtatgatgatccaatgattacttttgcaatagagagattacaggaagcacttaaagatgaatgcatttcttataatgtcatttcttaactgcataagatcctatataaagtttatcgcacaatgttaaagaagaaact

SEQ ID NO: 1159 - DNA, 348 bp, Glycine max
  Clone ID: PAT_MRT3847_101045C.1
ggtctcgagctctctatggcagccagccaattctgactgcattcctctaactctaaacgagaaaggtatcccaaggatatggcggacaggagctcacaccagagttctcaaaagaagcatcacttaaaaactcctgttggatataaacttgcatagaattggggaaaacaccggcacaagttgcccttaactggggactgctaacaggtcataatgtgctgcctaagaacacttatgaatgcctaatcaagggaaacttttgtttgtttggattgtctattacacaaaaagtgatggataaggtcttttgaattcagccagattgaactattgaaggctctttttttg

SEQ ID NO: 1160 - DNA, 1013 bp, Glycine max
  Clone ID: PAT_MRT3847_101046C.1
cgggaataattaatcaaaacaggctccatttgactacaaaacagtctccatttgacacagtcctatgtactacacattatggccacaccagcatccatcaccaatgtcactgtggagttccttcaattccccgcggtggtgacacctcctgcctctaccaaatcctatttccttggtggcgcaggggtgagagggttgaatattgaagaagaatttgtaaagttcacgggaataggtgtttatttggaagacaaggccgtgtcatcactcggtgccaaatggaagggcaaaagtgcagctgaattgctggactcacttgacttctacagagatatcatcaaaggtccgtttgagaagttaattcgagggtcaaagttaagaacattggatggtcgtgaatacgtaaggaaggtatcagagaactgtgtggcccatatggaatccgttgggacttacagtgaagcagaagaaaaagctattgaggaatttagaaatgctttcaaggatcaaaatttcccaccaggctccactgttttctacaaacaatcacccactggaacattggggcttagtttctcgaaagatgagacaataccagaacatgagcatgcagtgatagacaacaaaccactctcggaggccgttctggagactatgatcggagagattcctgtttcccctgctttaaaagagagtttggctacaaggtttcaccagtttttcaaagagttagaggccaatcccaacaatgaaaactgagaacaatctttaggggacattggaaacaggaacaacaaaaaaatccccactttgtttgaatttgtaccccatttaataaatgagcaaaccagttagataataaaatttataaattagaaaataatataacccccccctccccgcagttatgtgtgcactttggtggatttgtaccccatttaataaacgaccaaaccagttattgctaatcattttagtgtgcggtacggagcaaaataagagaacatgttgca

SEQ ID NO: 1161 - DNA, 313 bp, Glycine max
  Clone ID: PAT_MRT3847_101047C.1
ttaaaacaatcgcaccctctatacgttattacgacctttgaaagaggcgaggttacaaccaaaggggccgtacatactaactaagacggccctgcctaatcgcctttagagaaggaacccccccagcaggcgaaagacaacacgaattccatatcatgcatagggttccgcacatgaataaaatctcgcctgtcgcctgtggaactctacaagctgacatatgagtatcaccagttctttcactctcttgccagatctgcgtgctgatctctgctaccgtagactgtttgcgactgcaaatgtggcaactaat

SEQ ID NO: 1162 - DNA, 457 bp, Glycine max
  Clone ID: PAT_MRT3847_101048C.1
tgttgaacaactcatgaatggtgggcaacatggaggggcatcaatgttttattcaatggagaaatggaacccaagcttactcacaggattcaggttgacatgggtccaagtttggggcattccgcttcaggcttgggactcgaagcactttaggcacatattggtagcaatgggggatatggtggacgtggatgatgatacagaggagaagcggaggcttgatagggctagggtgctcgtaaagacaccatggagaccgacaatcaaccacacagttgatgtccacataagcagcgaacgtttcaaggtgtttgttgtcgaggaaactggtggaggtagccatgattgccagtggagacaccgtagctttaatgggtagtcggacgagattgtttctgacgacagctctctcgggaatcttactccgagaaccgatgaccatgatgggggcgacata

SEQ ID NO: 1163 - DNA, 333 bp, Glycine max
  Clone ID: PAT_MRT3847_101049C.1
atggagaatgagaagtttctatacaaataacaagacaatcggggttacgtgacaagttatgggataattcacaccttctcactggccactctgatcacttcactagaagaaatgatatattttcaagcaccaactgtgttagaaactacaactatcaggttaaagcctagaaattatttccataaatatcttgaacatcttgcttacataccaaacgacacccacacctcactattcccaatgattggcaacaataacttttttgtacaaattcaacttcactgccatcaccaccctcataaatcatgtcacggtatttatcaatggacaaat

SEQ ID NO: 1164 - DNA, 215 bp, Glycine max
  Clone ID: PAT_MRT3847_10104C.1
tcgttatatcactctatgcgctggccacagacttcgtgaatcataacctgtaacactctcagtcgatacgcggaacactgaactattcgatatatgactacttgtcagagtcaaacttcttaatggatatgtctcagacttttggtcaaggtcacggacaagctgaataaattctggattagtgctagcactttccgatcacgacttgaatttga

SEQ ID NO: 1165 - DNA, 277 bp, Glycine max
  unsure (1)..(277): unsure at all n locations
  Clone ID: PAT_MRT3847_101050C.1
atggtttctcagaagaagcctttcactgtagccacgctcttcttcctggcattgttccttannnnnnnnnnnnnnnnnnnnnnnnnnnnnaccagaacaattatntcanccactccctccatccactcagatctctacnncntcctcnaacctntttctcngcctccgnncccacagccacagcaancagactcntcctnctccttcaccagcactgaaacccaacctgagcctgtnggtgacattgacgatgccacggacaatgtcaccgatgccg

SEQ ID NO: 1166 - DNA, 505 bp, Glycine max
  Clone ID: PAT_MRT3847_101051C.1
gccagggatatacaaattaaccacaagctgacgtctgaaaatgaaaaaaagcataccttcaacatattccattaagatgaacactacccactctctttcttgcattggaaactgcttaaagaacatttattcttgactaacatattcctagatgatactcttatagcagtgtccctcaaactcatttagcaactagactggagctctgtagaaccggaaaaccttgttccatgatggataactgctaatgtcagccacatcacgcacgcacatgcttcatgtcctctaacaaatactttatgcccatattgttcacaacataatcaagaactggcaggtggctcatatcaacactgctgcacaaatcatgagcctaatacttagacttagagagccgctcgctctctatgatcaacacttgtaccagcttcgctttgctctcctcaaccacccttgggatctggagtcacaccgactagtgaaccaaacaaaccatgtatacaca

SEQ ID NO: 1167 - DNA, 370 bp, Glycine max
  Clone ID: PAT_MRT3847_101052C.1
aaaaatccattataaattgggagggggaggggatcaataaaaaattacaaaggacaaatcatttcacaaccaattttatggagaataaacagccaacccttgcatttccaaccaacaaacaattgaaggaaacggggctaaggaccaaagcttatttgccctttcttatttcttctgagaataaaagagtggcagacccacgcacgctccttgtggctaacgtcattttttcgcttgtcttgaatcaactttatgcagaaagcctcgcactaagctcgggtgccacggcatacataaattcctttgcgaagaaataatgctcccttgacatcttggatccactaaaaataagtgccaaatacttggaaat

SEQ ID NO: 1168 - DNA, 852 bp, Glycine max
  unsure (1)..(852): unsure at all n locations
  Clone ID: PAT_MRT3847_101053C.1
tcgaggttttagtantttcaatttctattatttagctaaagtaaaggtgatacccttattaagcgagccattacggctggcttagtatcaatttctatatagctaaagaaagtgatactattaagcataattaatataatggggtacatgtgcattaagatttcgttttgtgtgatgtgtgtgttggggttggtgatcgtgggtgatgttgcctacgctcaagattcagcagaagactacgtgaatgcacacaatgcagcacgagcagaggtgggttctcaatcaccaagacaaacagtgattgttccaagtttggcttgggatgatacggttgctgcttatgcagagagctatgctaatcaacgcaaaggtgactgccaactgatccactctggtggtgaatacggagagaatattgcaatgagcactggtgaactaagtggcacagatgcagtgaaaatgtgggttgatgagaaatccaactatgactatgattctaactcttgtgttggaggagagtgcctgcactacacacaggtcgtttgggctaactcggtgcgtcttggatgtgccaaagtgacatgtgataacggaggcactttcatcacttgcaactatgatccccctggcaactttgttggtgaaagaccctacaaactgtagctgctatctaccactttacatattatgaataaccatgcaacaataataacaccaccaatttaggtgatcctacacttcaaattcatgcatgttataatatatatacgtattaatactcaataaaaataaaggatgttccctgtgtgtttttaaaaaaaaaaaaaaaaaaaaagagactagttctctctc

SEQ ID NO: 1169 - DNA, 1165 bp, Glycine max
  unsure (1)..(1165): unsure at all n locations
  Clone ID: PAT_MRT3847_101054C.1
tcgcccacgcgtccgcccacgcgtccgcggacgcgtggggggatgtttctgttcgtgttgatcaatcgtcacagaatgaggttgaggatactccttcttcattccctaacaaggaagaggattcccaaatcccaaaaatgaagttccagaaaccctcatctggtagaaatgaacaacaaatgagcatggcacatggtaaaagggatggtgctaatgaaagtagcaagatgaaacaagttttggagactccggataatgcacgtgcaacttcaactccgcctttagagcagcaacaccagagggtgaggcaatctaaagggaatcaagggatgcatgatgagctgaaaatgaaggctgacgagcttgaaaagctttttgctgagcataaactgagggttcctggggaccagtctggttctgtgaggagagtcgagccggccgatgtgcatgtggaacagtcacagtatagaagaggtggggtgggggattcaactcctcagttgccttccagaagcaatgtgactgaagtggctgcgagttctagcaatttggcaagctttgatgctaagttggttactaagatggtggatagtcggaattatggtgattctttgaggcaaaatttttctgatcttaacttgagtgaagattctagaggaaagttttatgagaagtacatgaagaagaggaatgctaagcttcgagaagattggagtatgaacagagctgagaaggaagctaggatgaaagccatgcaggatagccttgagaggagtagagctgaaatgaaggtcaagttttcggggtctgcaaacagacaagattcagcatcaggtgctcaccgtgccgagaaacttagatatttcaaatcaaatattaagagagagcagcatccaatagattctcttcagaatgaagatgatgaagatctatctgagttctcagaagagaagacttatggtgcttcaaggcaaagtaggaaaatttttcccaacagacatataccttcaggcacacctcgtacaacagctgtgtcggtctctcgttcatctggtggcaggcgaagagacaatcctcttgcccagtctgttccaaacttttctgatttaagacaagataatacaaagccttcttctggagtcagtanaacaacccgctctcaggt

SEQ ID NO: 1170 - DNA, 377 bp, Glycine max
  Clone ID: PAT_MRT3847_101055C.1
tttttgaaatctaaagaaaaactttattgaagaggtgaaaaacaattgctaaaagattgacttttccagaaaactagctacacagtgcattgcctctatcatgttaaaacgtgcattatacacaaatgcaaaaaccatgaaacaagccaccattcttcaacattttgagccaagataaaatgcctaaggaacaacatggatgacttgcaaaggatgggctctttactttaagcaccataaaaaaaaacaaaagcccacatggatgactgtgttcagctatatacactgaattgaacctttggcactaggaatcagagcattgtggcatatagcattaacatgtattataaaagtgcgtattgtcaaaggaatagaac

SEQ ID NO: 1171 - DNA, 301 bp, Glycine max
  Clone ID: PAT_MRT3847_101056C.1
gtttgagttaaattgtgttcaaagcaacaaattgaaagcttaagtagctcatattccaacattatggaagcgaatagagccggtcaaattgcgccaaatacaaaggctgaaaatcatgggaacgcacggactgaaattcgacagcctgcgaatacgacattcagaaaaggtcacagaagagcccattcgatgccatccaacgcacagaaagcggacaaaacaatggcaaacggaaaacaacaaacgatcggtgaaaagcaacccgaacacaaacggcgtgtgatgcgacatcggcacattc

SEQ ID NO: 1172 - DNA, 561 bp, Glycine max
  Clone ID: PAT_MRT3847_101057C.1
ccacgcgtccgattttttgagcgctgtaacagacattgtcggtcacactttactattgtgcgaagatgggggcaggatggccgagctgatgcgtactactggcacagtatgccaaagagcgatcctttgaagccgcggcctttggaagaaccttgattcagtctgagcgctagtatggaaagggcactatcacacactcatctgtcttcaacagccctgtctgtacagtgattctgctatgctgatgacgacctcaccgtagacctctgtctatattatgccgccacccattacttacaccttcttcccaatgctctatctctcttggcacgtccaatcgtaccgttctggccaaggttgcatgcttactggctctcgagtatttgatactgagtgaggccaccatgcgttgagggactaccaaacgctagctgatatggtggacgttgtactacagtccgtgctcctagactgatacttactatgaaaatacacacctagccggcgccactccggctctggatcatttgatcggcatgaagaacactggccaaaccggac

SEQ ID NO: 1173 - DNA, 362 bp, Glycine max
  unsure (1)..(362): unsure at all n locations
  Clone ID: PAT_MRT3847_101058C.1
gagannnnnaattttagggggccaaaaaaagtcacaaaacttttgggggtgacgggggtcaataatggaaaaaccccctttttttttttgttaacccaaacggtttcaaattcactttgtgggggataaaacgactaaaagggccctcaacccccggggggtttaaatcccaattttttataaacccccctggaacaagcaaagttttttaaaggggccaaaaaaatttttcccccaccttggaaaattgggggtttgggaccttaattccccaaggtggccctcccccaaactaggattttttccatgagaaactaagggttaaggggggcttttcccaccaaaaagcctccttttttttt

SEQ ID NO: 1174 - DNA, 268 bp, Glycine max
  Clone ID: PAT_MRT3847_101059C.1
taaaggggggccacttttgagttgaatttttttaaaaaaacttttggccaatacaagcctgggtggccccttactcccccccttaacctttttatttaaggcaaattgtaaagaaagggaaacctattcccctggggggttttcgtttttggggaatcccttccggaaaatgataacccaaggggtatcctttgcttctatcaagcctgttttatagtagcaagacccttaaagatgaagtttttttttttcaaaaaaaaaagggggg

SEQ ID NO: 1175 - DNA, 283 bp, Glycine max
  Clone ID: PAT_MRT3847_10105C.1
tactcagctcgagctcgagccgaatcggctcgagctcgagccgtcaaaattccttttctcatcgcactttcatctgatcccaattccattcattcattcatgaggagtttcttctttcacccacaacaaacaaaacagataaactttcatttcatatatttacatcatcccaccaaaagattcaatcaatcaaaaaccatggctagcttaaatgtccactaaaccgctcctttcttcgacttcctcgttgccactgcggcccttatcttcttctgtattggaa

SEQ ID NO: 1176 - DNA, 336 bp, Glycine max
  Clone ID: PAT_MRT3847_101060C.1
ccggttcgagttcggggacgcgtacgcgtacgtgcgactggatggacgagaactatctctacacctgctttgctcataccggctaggtttggtgaggtatagacattcggaacatgcgaactcttcaatctgaacggtatcggtttattgaggataatatttctgctggagctgatataatcctccaaacatataaaggggttattatgccgaatggcgggcagcacttcacggtcgcatagaggcaaccgttagggctcaccgagagggaactgaacaagacactcctgattacatcatatttggtggcgactagggtgtacatgttactgatca

SEQ ID NO: 1177 - DNA, 311 bp, Glycine max
  unsure (1)..(311): unsure at all n locations
  Clone ID: PAT_MRT3847_101061C.1
aattccggcgtcgacccacgcgaccgtacagncgtcagaacacgactcaatggggatgcaagaagttgtcatttgggagcaccgtggattcattacaataatctcaatggttgcccaatagcagaacacacgtgttccatatgtttaaccgcaacggctcacggagtaataacacaatgagctcacctagcccctgagtaatcggtgcaccgtcaactcagataatgccctgaatcctatgattcagaggattcacgtcaacagcgacagttgcattgacattgacaattttggagatctgtatcagacca

SEQ ID NO: 1178 - DNA, 114 bp, Glycine max
  Clone ID: PAT_MRT3847_101062C.1
actaatcatgacatcatcacattgcagagaaaatacacattacattactaagtcgttgtgcatctgagtagtagagatggctagcctcaaggtagcatgcgtgggcgatgtgat

SEQ ID NO: 1179 - DNA, 351 bp, Glycine max
  Clone ID: PAT_MRT3847_101063C.1
tgcttgcatggtcgtgagaagtgatagaagggggaagtagccgtagattgagtcagtcagtcagtaagtaagtatagagacggaggtaaagtgaggttacgtttctacgcgtccggtatgcgccctatctccttctcgtgtctcaatttcacttgtcgtctatggaagtattatggcctaagatactgtgagaaagccgaaatctggggataatgagtcctcgtgtatggagaagaagcctaaggcccctacggagaaccatgggaggagtcatcttatagaggaggagcacccgtgttgcccggggacccctgtttagaatacggctagagtggtggagtactaggtgtc

SEQ ID NO: 1180 - DNA, 479 bp, Glycine max
  Clone ID: PAT_MRT3847_101064C.1
aattcggctcgagtacggctgcgagaagacgacagaagggtcagtattttgtttgttatttcattgtgatggaacttgtctttattttatctcttccagtatgttgtcatgttatttcattgtgatggtttgtttgaaacaagaaaaaactaaacaaaaaggaattgtgtatggtttcttttctttcatgcacctttttttgtccctttgatatgtggaatctcgggttataactttgcctaggattcaaactttttttttttaaaaaaaaagctaaaactaacatgcttttaaaaagtaatttttgcccattttctttggaaagttcgcggatcaaaacacaaaaggtttttttgaaaaaaaagaaatgttcacctagaaggtgaaaacaacgaaaaatggacttggatgttttgtattacttgacaaaagagcaatcattgaaacactggtttggcctgaatgtgggaatgaaccct

SEQ ID NO: 1181 - DNA, 178 bp, Glycine max
  Clone ID: PAT_MRT3847_101065C.1
tacttgccacccccacgaccctacggaatcctgatcaggcctcgacatccgttgacccacttatgcgacacgctttacaaacgggtcttatgctccagacattgggccgtccatgttcaatgccctatacacatcgtactcaatacctcagccagatacggtgcagaaaacctacaca

SEQ ID NO: 1182 - DNA, 428 bp, Glycine max
  Clone ID: PAT_MRT3847_101066C.1
cataggaccaccaatctcaaacaggaccaaaatattccggaaattttttacaacaatctattttgtaacaagttaagctttgctagcggagggatccagctgcgacgttttcctttaccatttcccctaatcacttacaacaaaaaactgtattaaacattttttttatatctaaaaccacacacgcacacgaacaaaaccagaacatacggatttttatgggcaaattaaaaggaaccggctccagaaccaaataaaaaataaaaaaccgtgcctcctggtaaaggacttgaggcagagccaaaaaattcccggccccatttcaggtgtgggtttcagaatccgattgcacttttgtgcgttatccggaccaacttttcaagcgcgtccgtaacttgctgggcgcacccacacacaaattgaccccc

SEQ ID NO: 1183 - DNA, 558 bp, Glycine max
  Clone ID: PAT_MRT3847_101067C.1
ctttttttttttttttttttttttttttttttttttttttttttttttttttttttttttttccttttttttttttgttcgctaattttttgactttcaaaacccagaccgggacccggaggcgcacccccttaacccagagcgagccccaagagggggggggggaaaaaatttggtggtttgtacaagagggaaagggatatccggaaaaaaccgcacacaagataaaaaccccccccaaaaagaggaaaccccggggcacaaagggggagcccaaacacaaaaaaaagggggaacaaacaaagcaacctaaccacaagaaaaaccgggcgcccaacccccaataaagaaacggaaaacccgcggagacaggcggaataaagaatcgccacaccgggtgggtaaatggtttcccgcgtgaaacgcacaaaaggaaatttcccttccaccgcggggacggagataagcggaatgggcgacacacgcggggcccaaaaaagacgaaaaaagcgggccagggggggggacaccgggagaaaaaaagcgaacagggggggg

SEQ ID NO: 1184 - DNA, 161 bp, Glycine max
  Clone ID: PAT_MRT3847_101068C.1
gtcctttttttttttttttaatgctaatactttacatacatggggggggggagaagtccctctacaaagttcatgtttacaaatcccatgtttcacctcactattaaggggaaactaacccctccgagcataacaatccacttctaaccagtgatggatta

SEQ ID NO: 1185 - DNA, 274 bp, Glycine max
  Clone ID: PAT_MRT3847_101069C.1
ccctcgcgtccggcgggatgggtgcgcggatgggggcacctcggggaattccaatggtaatcacaataataacactaagaagaggaacaggcagaagcataccaggggtgggagcgagaagaagaggacccacgaacaggcctaggccttcatgctagcgagagtgtgggagctcttggagcacccttctgcttgggctgcatctgcttatgctgctaagtgagttgacgatgcacagggcgttcagacatctttatggagaggcgacgaaaag

SEQ ID NO: 1186 - DNA, 321 bp, Glycine max
  Clone ID: PAT_MRT3847_10106C.1
cacatgtgtcatgacacgcatcctgacacgctgtccaacgacatgatctaccgctgcagtgcttatgctgacgtatcagggtgaattccacggactagtgatcgcgatggaggtcacgctcggtgactcttaatcataacacaagtggtacacttgtgtaccttacacccaaggagattatgatactgagagattcatgctttattgacatggccataatattgactatgacgcgaaggtattatccgcttcggatcattacacctgcagaatgtactgattagatggacacgacgagagactcatgccagaagatctata

SEQ ID NO: 1187 - DNA, 280 bp, Glycine max
  Clone ID: PAT_MRT3847_101070C.1
tgaaagcatatttatgatctaatgggtaaccaaaatttaataacatttacgtgacaaaatatttagaaaagaacaaggaacctaaacaagccaagaaaaaaaagactagcatcaaccaactaaaaggcaacacttatatgattttcttgtgaaaataaacaaactgaggcttgaaacatatcgtgtaagtaaactcaaaattgaggacgaaaattgtcatttacgggaatttttttgtaaaaaggaaccttaaaaactgatgtgttaaacgttatgaaaa

SEQ ID NO: 1188 - DNA, 331 bp, Glycine max
  Clone ID: PAT_MRT3847_101071C.1
gtattgtctgtgaactattaatgagttatgttttgttgatcggactcgtcttccctctcttgatcaagaaactactcattatcttggtcataggcttattcatgcttgcaataccatgctcaactattatcctatacctacgaatccttagttggggcatacaacgctcactgcagtactcatgacttatgtcatcatcaccaaccacctgatcatcatgcttcgcaacgacggtggatgcgatgaggaagatgttaacaaggcatgcaaacgttcacaggattagcgttctccttgcgtgaaggatatcatggattaggcacacacacat

SEQ ID NO: 1189 - DNA, 321 bp, Glycine max
  Clone ID: PAT_MRT3847_101072C.1
ggggggcccttttttttcaacctttttccggtttccgaaaaaaagggggggccaaagggggggccacccccaaaaattttcccggggcgcccctttttgggaaacccccattgggcaaagggatcagccccctaaccgttttccaaagattagggatttgggcccaggggtaaagctctccacccacccccccgggggaaccaacgcccccccggtgtctatgggggggtttcttttaacaccaacccaattgttttcttaaagccccccccccctttttttttcccaaaaaaaagcggcccggccattttaccccctttt

SEQ ID NO: 1190 - DNA, 1393 bp, Glycine max
  Clone ID: PAT_MRT3847_101073C.1
ctcgagccgaatcggctcgagcggctcgatacggctgcgagaagacgacagaagggggcacaaaaatacaatacaaaacaaaacagagcaaagagagagtgtgtgaaaagtgaaacaaaaaacagaacaacaatggcgacacttaaggttcctcagcctcttccccccgttgcagatgattgtgagcagctccgaaaagccttctcaggttggggaactaacgaggagctgattgtatcgatcttggctcataggaatgctgctcagaggaagcttatcagagaaacttatgcccagacctatggagaagatctcctcaaggccttggacaaagaactcacgagtgattttgagaggctggttcatctttggacacttgattctgctgaacgtgatgcatttttggcaaacgaggcgactaaaaaatggacttcaagcaatcaggttctggtggaaatagcctgcactaggtcctctgaacaattgtttgctgcgaggaaggcttaccatgttctttataagaagtctctggaggaggatgttgctcatcacacaacaggagacttccgtaagctcatactacctctggttagttcttatcgatatgaaggagatgaggtcaacttgaccctggcaaaaactgaggcaaaattgctgcatgagaagatttcaaacaaggcttataatgatgacgacttcatcaggattttggccacaaggagcagagcacagattaatgctactttgaatcactacaaagatgcatttggacaagatatcaacaaggacctgaaggctgatccaaaggacgagttcctgtctttactaagagcaactgtgaagtgcttgatccgtcccgagaagtacttcgagaaggttgttcgcttggcgatcaacaagcgaggaaccgatgaaggagcccttacaagagtggtggccacaagggctgaggttgatttgaaaaacatagcagatgagtatcaaaggaggagcagtgtccctcttgaacgtgctattgttaaggacaccaccggtgactatgagaaaatgcttgtggcgcttttaggacatgatgatgcttgacatactcctttgtgtttgtgtgtgtgtacttgtggcagagttactatatagtgtgcagtgtactgctttgtggttccatgttgttgtgttttctggccattattgtcttcctttgttgaataaaatgaaccactttggcacactttggtgggtttttgaagcccctagaattgattgagtgtcaaacataaatggaatcctgcaatatatatgtggttcagattttgtaaatcactagtgactttagggtcacttttctgaagttaaatatatatagagagacaactaagtttggttcgcttcttaaaaa

SEQ ID NO: 1191 - DNA, 282 bp, Glycine max
  unsure (1)..(282): unsure at all n locations
  Clone ID: PAT_MRT3847_101074C.1
tttgcgatcagtggctactattccaagtgattgtggcattggggataaggtggcagccataaacaatatgtgagcatatgggctcaatcctggtattgcatgttctatgatactgggcacaattccgtaattcattgctgatcaaactgtgtgtaatcagatgggctcagttaggacaccacagaatcctgattctagcaggctgagcttgtgtcaattttatatcgaccttatgctggtgagaatattaggggaccaatcttgagactgnaaccacactta

SEQ ID NO: 1192 - DNA, 111 bp, Glycine max
  Clone ID: PAT_MRT3847_101075C.1
gaatctttgttctcttcctttcagctcctcagcagtcatcagatatacgccactctccatgattgtctttcaagaggtaggtttagcttgggatggttgctcaaatgagct

SEQ ID NO: 1193 - DNA, 423 bp, Glycine max
  Clone ID: PAT_MRT3847_101076C.1
ggaaaaacccgggggacccaacccttccgtacggctgcaaaaagacgacagaagggagattgtagatcatcttcaatttcttgatcatccgtagaatactggttgatagcacctcatctatgcaagtgaggagggtaaccatgtttcttgtagcaagtgtctaccatatgacctgatatgttacaataagtgcacatttttgtgcttctgcctctacctcttccaccagatgtatggcctccacgacctctgcttctgccacaagtaccattgttggtatccaattgagcgaaaactctagaatcatcaaattgaagaaccaatcgcctttcttgttgaatgaggatagaaaaaaatttgtctaaatcagggagggggtccatcatcattatatttgacctaactgtagagtattgttcattg

SEQ ID NO: 1194 - DNA, 1065 bp, Glycine max
  Clone ID: PAT_MRT3847_101077C.1
gagtctcaagaaacaaagttgcatgaaatagcattacattagtagtggtagcagcatctgttgaggaaaatcacctcacaattttgcaccacatttccattcctaagaatctaaatcaaaagccacaatctcatgagaactataaatcagagtagttttttttccttcaaatttgacatacatggttagaagttgtgctgcaagaacatcctctctcttggagaagcaggaccaatctcttcctcaaggcttctcaaaacatcaccaccccctccaacattgcccaagttcttcccttctgcattattgttcttcccatctacatcttcctcagacactgatgattttctcctctgagaagatgccacactagggaaagttatccatgagggtgctctaaactcaaacctttggtcctcagtttctgccacatcagtctcagaaactgacctgtttgaagacctttgagatgacttcttgtgcaatctgttgcttcccaaaaccacctcagtgggcaaaattggctgctcaatgcatggacttcccattaactgtgcaagacctctctccaaagctgttgttactttatccattgagggcctttctttccctctcattctcacacacttacaagccacattggctattctcttcaatgcttcaagatcaggaggaggcttcaaaaccgggtccaaaatcgcggttatgtctcctgatttgataagaggcactgcccattccactatgttgccttcttcatattgcatgtcaatggcttttctaccacttagaatctccaaaaggagaacaccaaagctataaacatcagattttgttgtgaggtagtgaagcctatagtactcgggatcaagataaccaagagtcccagctgggagttcagctaaaggggaaccactatctgcagggcctaacaatgataaaccaaaatcagccactcttgcattgtgttcttcatcaatgaggatgtttgaggacttgatgtctctgtgaatcactggagggcaagcatagccatgcagatattcgattccaccggacgcgtgg

SEQ ID NO: 1195 - DNA, 264 bp, Glycine max
  Clone ID: PAT_MRT3847_101078C.1
cttcagagttggaaataccccagaagaaggagcataattcatcacttgtaaattaggttcttatgatgacaccaaccggcggagaaggagctgagaagatggatgcagaagatggtgtaaactgcagtgattatgagcatgacatagaaaatgaagaaagtggagggtactggtcagggatatatgacagacacatggctcatacaatgccacttcttatgaagagggctaacaccacctacccagattgctattgttggtgcc

SEQ ID NO: 1196 - DNA, 276 bp, Glycine max
  Clone ID: PAT_MRT3847_101079C.1
agctttcacatccaacaacaactactcaactaccaaaactctattcttcaacctcaaacctcaaatcaacttcatcaaaatgcagttcaccaccatcgcctctctcttcgccgccgctggccttgccgctgctgctcctctcgagtctcgccaggacaccgcatcctgccctgtcaccactgagggtgactacgtctggaagatctccgaattctacggacgcaagccggaaggaacctactacaacagcctcggcttcaacatcaaggccaccaa

SEQ ID NO: 1197 - DNA, 363 bp, Glycine max
  Clone ID: PAT_MRT3847_10107C.1
ctcgaaactaccaattctccatctctattgtaatcgggctttgttcattaaattatactcggtcaagagatgcgggttttgtatgccaaggtgcgaccttgctacagtcttccatgctacaaaatccagcatgataacgtgatggtaatcacaattgctgaaaactcagatcgcgaggtcagtggacttgaacctcacgttgtgagaggtgcaacagaaagtgtcaatatcattacacgggaaacaagctgatgggtatctggggatgctagacactatgccaaggctcatggaagagtgagggtttatgccatacacaaagtcaacattatgcataagactgacggccttttactcaagtgt

SEQ ID NO: 1198 - DNA, 245 bp, Glycine max
  unsure (1)..(245): unsure at all n locations
  Clone ID: PAT_MRT3847_101080C.1
gtctgcttatcctttctttggtgcacggtcccttggttggtgtctgttgtgtcgcgatgcaaacctgcaatttcgtgtttggtagcattggtgctgtcagtgctgacttttccttggtctggcacgcaaacccagcggtcagcgtgtttgtccgctgggtcgaggtggtcgtcgtgtccagcagatctcggcgcctggttgtgggcttcgtctcccgacgctcggtggtnttccgccatttccga

SEQ ID NO: 1199 - DNA, 556 bp, Glycine max
  unsure (1)..(556): unsure at all n locations
  Clone ID: PAT_MRT3847_101081C.1
aaataaaataaataaataaaagaatagcaacctggaatggaggttgtagacactgtaatagcaatgctttttcttttttatacaaactgtaatagcaatgctataaacaactgggagaaaaatacaggaaaaaaagagtgctggtaaaatagatgtaatatattataatatacttactcttcacatttgacgttacaagagattgtgatactgtttgaaatccacactccctatgaagaatttcagcaatatcctcctttacataagcaaatcagctagcactttccttaacaaatttgcacactgtacacctgccagcagaagatggtatgtttgtcttgagactcttgacactggtacaacaacagcatgttactgagttctaataagctgccacctgtggtccagtatcagattaccattaattgaactggcaaagaccatatgaacagtcatgacatgatatctctcttcatttgtttttcatctggtnngnnatgcttnnnttttagtagttgtatatattactgtagaccaaaatttttcttcaacattg

SEQ ID NO: 1200 - DNA, 244 bp, Glycine max
  Clone ID: PAT_MRT3847_101082C.1
attctctgaatttttcatctagaggcagagcattttctttcttctaaaaccaaagtggttcttatgaggatatgttattgacatcgtgcttagaagatttctcaaaaggcatagagccatagtattgttcctgtttggaaggctccttcttgctctcatattctgcttcttgtgctgcatggatattttctcatcagaattttaaggtcagtactgcaccaaatctatccaaaaaactatttct

SEQ ID NO: 1201 - DNA, 381 bp, Glycine max
  Clone ID: PAT_MRT3847_101083C.1
ctattttttttcggtgctccatgcttagcatcccgtgctacccatgcctcccatcgttgggagccggcacagcatttccacctgcccgtgcattactcccgccgcccccgatcacatcagtgtccgccctagctcctcaatgtgtttcttgtgtacccgagccagtggtgcaggttcagtcatatcccgtcttcgtatccggccctccggctgaagccccgagggtggatgtcaaagtggtggatcggcaaggccaggactgcggctaccttcagcaggagctcacgcatgtgctgctccagctgcacaccgaccagctggaggaggagcggcagctgcagcaagtggccgacctcagcgggaagctgcgctacattcaag

SEQ ID NO: 1202 - DNA, 440 bp, Glycine max
  Clone ID: PAT_MRT3847_101084C.1
ctgcggccgaccttattttttacattatcttttaaatcataggttctcaataaacacattgacctaaagcgctacatctacaacatacagggaggacaatacttgagcccgatctatcacccaagatcttgaaagtcaatttgcgcagagctacgggattcgaccaggactgagataggaaccggaaggaagagctcaatagactgacaaggatcatagaagagattcaggtggggtacatacaatcgaacaccaggatgcatgacggttaagtgcctcacgcgggtctgatggactctgaaaccgtgcaccatggaccgcgttgagcatgcttcgtacgggcagatcttcatgatcgacctcttggagagctggcagtccgagactggacacaactgcaccctggtgcactacactgatggtgacttgcttaatgacta

SEQ ID NO: 1203 - DNA, 169 bp, Glycine max
  unsure (1)..(169): unsure at all n locations
  Clone ID: PAT_MRT3847_101085C.1
gatgattccaaccaagcccatggtggttgaaactttctctaagtatcctccccttgatcnttttgctatgagggacatgcgtcaaactgtgactatcggagtcatcaagagtattaagaagaaagaccccaccagagccaaggtcgccgaagccgctaccaagaagaag

SEQ ID NO: 1204 - DNA, 222 bp, Glycine max
  Clone ID: PAT_MRT3847_101086C.1
gtaaaagggcacctcaactacgggctggctatcgaatactagctgtgaaggaccagtttactttttgtgcccagaaatgtttccacctatcacggactgctcggcaagctcttgttcccattcgttctgggcatgcaaaatgattgaaaatcttcctgaggctgcaaattattttactcgtggttgaacacctaaagggacggatttcacccagtctaaacc

SEQ ID NO: 1205 - DNA, 452 bp, Glycine max
  Clone ID: PAT_MRT3847_101087C.1
attaaattcccaattcttattcatatccttatcaataaaaccattaatccaagggcaaatgttccttatttcacaacccccaattctgtgacaaaaactttttgaaaacctaccacgaccgggaacataactggatgtgactctttccaaaccagggggggatggcccttgagctctgatggaacctaaccacacccctgtcccggaaattctttattccaagaaaccttttaaagaagctctcttctgaaggcaaaaaaagagtcccccaaatttattcttgggcccggtccttaatttacaaaccactttggctactggggggggaatgccaaaaattgggaaaaaggaggaccaaaggcgggattttggtgcgcaaacacctaaaaaagctcctcacccttggtgtgaaggtgtttagggggggggggttgaaaacccttttgaacccc

SEQ ID NO: 1206 - DNA, 484 bp, Glycine max
  Clone ID: PAT_MRT3847_101088C.1
ccctttgcccctccccaatcgttctcccgatttaatgtttttctaaaagatcttttatactgggtccgatttcaaagttcgtactatacatatgacccgcattgaggaaaagaattgcgatagctaaacgatgatgtgccatatcggttagccataaactttgcgtttgtggatggaatcccccaagaagggttagaatggcagttccggatccttgggaggtaccaaataaatgactactcgagtcggggttttgagcataaagattccactgaccctgaaaaagtgggcctaacccttggggatgcggtaatacatttaagaaattattccatctgaacatattcctccctggatgcaggaatagctacctggactaattgacctgttcaagcaaatgagcttaccccgaatagtcctgacaaatgatgattcagacaagaatcatctttttttgaaccaccaaactcttggtttccatttt

SEQ ID NO: 1207 - DNA, 678 bp, Glycine max
  unsure (1)..(678): unsure at all n locations
  Clone ID: PAT_MRT3847_101089C.1
tcttccacgcgtccggtgaaattggtgattatgatgagtatgagaagggtgagatggatgagcttgcttgtaggactttggaacgtcggggttgccctcatgggcgccttcctcatcttgctcactttccgcctctgtcatgcctccttcttgcttcccttcgtcctggtttccttcgccgctttgcttagggttctgctcatgattcttaccgcttccgcccaacaagccgctgccaccctcatccttcaacactcctcctccgatctccttatacgcctccgccgaagggccatgtataagaaatggctctgcttgagtcgatgttccgctgtcctcatcgtgcttcaatttctctctgctgcttaccttgtcctcacctcttcccaccatttctccacctctcattctaatcaccactgtcttttagaatccaaatggaaccacacgcccgtatctatattcatcatcctcgtctcttcatgggcctaactccagtgcttcaccggatcagatattatcaaagtaagtcatttctatgaaactcatgatcacgcttggaaatgccactacagcgaggtcttcgatcatggcattcgtgagaccttgtgntgtctangccgnctccaatacttgactacctncgaagaagatgaagtctattcagttgcacgatta

SEQ ID NO: 1208 - DNA, 804 bp, Glycine max
  unsure (1)..(804): unsure at all n locations
  Clone ID: PAT_MRT3847_10108C.1
gaaaacatttctcatattaatatagttggttccaggctttagtgcttggattttgatattaaaaaaaattacaatacataaaaatatgccataattttcaaatcaatacaatgaaaatggaaaaataaaatcaaattatgtaaaggacatacatcatacaaaaatacttcctgaaacaatacacaattaaggacggtgagtttccaaacaaatgcaaacacaggtgtcaaacattgacacataattgaaactttaacaaattaacaaaatataatggcaaacaaatgaatgggtttatgtattcggatattcatgaatctcatgcaagaaatataccataatttaccaatgaactcaattaattcactctgctgcatacttttctgatctgaccctgtgtccctgtaagtgggctaaggttgctcatcttgagcatggcgttagcgaaatctgatttgaagaaaagtgatgggtaggtggcataatatttaactttggagtccgtgaaactgccactatagagctgttggtcagagtggaaaagaccctttttgtaaagtaaattccggtagtaagcattgtcaaaaatgtctttagtggcgatatctataggagacaagttgtcatcaccaccactcttgggacagttgcttctcaagaaatttgcatacgagggttctatatcgctatcgttgtaagcccttgatcggaaggttaaacacctggcgctgcctattgtatgagcacctgataaagcaaccatttcatttactnnnaaacccttcttttggaaagcnnnnacag

SEQ ID NO: 1209 - DNA, 1045 bp, Glycine max
  Clone ID: PAT_MRT3847_101090C.1
ccacgcgtccggattgaatggcgattctttcgctccaattccatgctcttccttttccactcccaacttcttcttcttcttcctactttgacgcgatccaccttcgctctaacaacaagaacctcgttttcatcgcttatcctctcttttccatcagcagcagcagcagccgccggcgctttgcgacactggttgcttcagcttccggcgattactacggcactctcggagtctccaaatctgcctccgccagggaaatcaaagcttcttatcgacgactagctcgccagtatcatcctgatgtgaacaaggaacctggagccactgagaagttcaaacagattagcactgcttatgaggtgctatcagatgataaaaagagggcaatgtatgatcaatatggcgaggctggagttaagagtactgtagggggagcatcagctgcctatacgacaaatccattagacttatttgagacattttttgggtcgagaatgggtgggttctctggcatggatccaactgaatttggaacatgggaacaatgtactactgttactaaaggtcaagacatccgctataatatctccttggattttactgaggcaatttttggaacagagagaatttgagctttttgacatggaaatctgcgaagtttgtagtggtactggagcaaagataggctccaagatgagaatatgttcaacatgtggtgggaggggtcaggaaaaaaaaaaatttccagtgacaagataagtggatcaaatggaagatctatcctgttgaaacttgaaagtagcagaggaagacctatgcaaacggtggccgaaccctcgagccgttgatgaagtcatatctgaatattgcactaattgcagaggtgaagaacaaatacagattaagaaaaacattaaagttaaagttccacctggggttagctcatgctgggtactgctggtggctggtgtggggcccgcggcacccagttaccaatgtaaaactcattgataccaaaccaaactgagctcaatgacatcaatta

SEQ ID NO: 1210 - DNA, 419 bp, Glycine max
  Clone ID: PAT_MRT3847_101091C.1
ggccgagataaccctagagccgagtgatcttatggctcaaacaaacaaaagaatagtgccaaagttcactgaaatcttgcgccgggaggacgcgaactacccttacagcgccttcatcgcgtcggtccggaaagacgtgatcaaacactgcaccgaccataaagggatcttccagcccgtgctgccaccggagaagaaggtcccggagctatggttctacacagagctcaaaactaggaccagctccatcacgctcgccatacgcatggacaacctgtacctcgtgggcttcaggaccccgggcggggtgtggggggagttttataatattctattattcttcctcaatcatctatttatcattcttcattactttactcttcttttatttttttccttttttccttaatttattcttt

SEQ ID NO: 1211 - DNA, 294 bp, Glycine max
  Clone ID: PAT_MRT3847_101092C.1
ttttttttttttttttttttttttttttttttttttttttttttttttttttttttttttttttttttttttttttaacccggggaatatttgtttttccaaattgggattattaaccggcaaggggccatataaaataaaccccctagggcctaacttcctaaggcaagaacccgtgatacaaaacttttttgcaacaaaaacttttcggttttggggttacaaaaaaaaaacattttgacccccacatggggccataaattttgggaaaccaaaaaaagaatgcccttcctg

SEQ ID NO: 1212 - DNA, 433 bp, Glycine max
  Clone ID: PAT_MRT3847_101093C.1
tgcacgtttaaagaacattattaaattgattgttgcttcttcttatgcattctgagcctatcatttaaaagggggttaaaagtttgttagtgaaaaattttgtaagacttaattcaccctccccctcttaagttgttgaggtcacttgtccaacagagatctcgatgaactttaaagaattgcactaaggtctgagagaaggatgaatcggcaccactattgtgagctctgccatcactgccgctacgccacctcatcaacgagtagatctgactcccaaacattcaaatctaacttgcaatgaaggagaatgaaatgattatcccacttgaagtttctcattgaggatggcattgtgaagggcaaggaagtcctggaaggagaagtggaagttatgttgtaaagggagggtgaggagaacctggtgggggta

SEQ ID NO: 1213 - DNA, 181 bp, Glycine max
  Clone ID: PAT_MRT3847_101094C.1
ctgaagcgccctccattgtagtggctgatgttccatcatcaaatcccggattgcagcacgcaacagagtccatcttactatcaattagccaaagccttgatggagtggtgaagcaatgtcatggaatgaacacttccttcagaacttgatgctgataaacatgtctatatagcggacaata

SEQ ID NO: 1214 - DNA, 1215 bp, Glycine max
  unsure (1)..(1215): unsure at all n locations
  Clone ID: PAT_MRT3847_101095C.1
agtcactacttcctctgagtctagcgcgtgtatgccccccgaacatgaagagaatgcgcgaaatggaccagctcaaaacagtggtaggaatgacaaggagcatgagcatcccttggcctcagagacaagagttgagaagttgaatgagatggaacaagatgcatatgagagactggagaggagttcatcctatgtgtcctccaaaattgggagtccagtaaatggtcatacctctattacaagtactccaaatcatagatcagcaacaaccccaaagcaggctgcttctttgaatgctgattcttcgtccccaatcttggaggaaaattctaagagcaggtccataagcagtgatgatgaaaatatggatcaggagggttgtgaaaaagttttcaatggtagaaatatgagtacaggtgttcaaataaacaatgacgaaagtgattttgacatctattctagcaacactacatctctagacagtaattacctcgtggacaagaatccaagctttggtttgggaaccaaagacaacttaagtgaaatgtttcattctgataagcaatatcatgtagaagatgaatcggtggcacaaggtgtgaaagatcaagttaatttgagtagcaattcatattctttaggtgggttagataatggtatgaaaggcaatgttctgaaaaatgaaagattaaagcatgtgaggtctgtaagatcatcagccgactcagttaggtctattgggtcacttggtaacaatcatctcgctgaggtaaaggaaaatggtgttaatggagatacccaaaataatggagggaacattagaagcagtgacagaaaagatgccaaggtttatccaagggaagccagaaatgccattttagatcgcaagattgagcacttggaaaacaagataaagatgcttgaaggagagttaagagaagctgctggtattgaggctgctttatattcagtagttgctgagcatggaagctccacgagtaaggttcatgccccagctcgacgcctttcgaggctgtaccttcatgcttgtaaagaaaatcttcaagcaagaagggctggngcagctaaaagtgctgtttcaggattagcccttgttgcaaaggcatgtggaaatgatgtcccaagttaacattnttggttgtctaattctattgtgctgagaacaaattattagcaaactaccaaaggcatgac

SEQ ID NO: 1215 - DNA, 807 bp, Glycine max
  unsure (1)..(807): unsure at all n locations
  Clone ID: PAT_MRT3847_101096C.1
gaataatgacaacttacttggtacacaccaattgatcagaaaaaataggaactgacaatgaagatcattaccgcagataaggctagctacagaagacactgtcaactccttaaaaattccttccttacacattttgtccgcaagaaataccatgttcctcaaggccaatacagcatttaaccgtaaagatgaatccatagactttgtcaattggataagctccttaacacctccacattccatgaatgttgacttctgtggtgtaaagtcgatcactatgttgctaatagcaccaagggcagcaacctggtagaaaacatagaaaaggctatggttgctaaattttaacaaaactaatgagggaaaattcctttgaatatgatcaataagaaagtataacttttgaaagggaggaaaaacaaagtgctggggagataaggtcatattggatataattaaaggtaagcttttaatttagtcaacaggataacatgtattctatttgtgataacctcatttagagcaagataaaatacttataatgctcagtagtttgagtttattcaacaacacaccagattctcttgtaatgcatccatctttttacgtatttgacagcatggcttgaaaattattaaatagattctcttttgaatgttgaattctgaatatcatattgtacaacagtttaatccaaaaaatatccctttaagacagctcaccctactcagcatcaattacaatacttcttcataccatacttctaatnncatgttaacctgcatatttatatntactagtactgaa

SEQ ID NO: 1216 - DNA, 209 bp, Glycine max
  Clone ID: PAT_MRT3847_101097C.1
atatcttgttgtcaaaagggacattgggtgctcagatggttgtccttcaaccaaaccaaattggcaccgggggctatcttaagcataaagtgaacataatcggaaagggggcggacattcttaactccctgtataggagactgcctcccgattcaccccacttaaattttcttagcaaaacaatacatccttggaagccacccccatgt

SEQ ID NO: 1217 - DNA, 539 bp, Glycine max
  unsure (1)..(539): unsure at all n locations
  Clone ID: PAT_MRT3847_101098C.1
aaagtcagctaaaagagtacaatattgatgaaaaaaaattcatagtggtaatggtcactaaacctaaggctgcatctcaagcatctgcaggccccagtgaccctactgcaactgctgctggagatagtgacaacaaggatagcaaagacagcaaagacagtggaggacagtcatcatctgcttctcccactagtgctcaaactaatacaccttcaacaggtggatcatcttcgaccacaggtagcacttcagctcctacagccacaataacatcggctgaatctgccctgcttgttggtgatgcttacaatcaaatggtgcaaaacatagtagatatgggatatgatagagatcaggtagagcaagctctgcgagcatctttcaacaaccctgatagagcagttgaatatctcataaatggtattccggcccaagctttggatgctgttcctcangatgcaggtcaagatgatgctgatccagacccagcaccaccttcctctccagcagatgaacctttggcattcctgcggtcacag

SEQ ID NO: 1218 - DNA, 475 bp, Glycine max
  Clone ID: PAT_MRT3847_101099C.1
accactcaaactgaggtcactaatcacacactgacggataagacatggttccattttttttgcccctacatggaactcaccacaccatctttaccgaggcgtgcgacgaggcattgggactcttgcggctcctaattttttttccccctattgtacactcgtagtggcgtggtacatcagaaacagctcaggatgctgctagggcctatgaagaatcagctgggctaatgtgcagagcaagggcactaacaaacttccttttcaatctaaatgcgtcacactcaggatgatgatagtccaaagcttctctcaagcactactaactgcttaaggttctaggcgctacctggcttcttctgcagacacaagacacgctatggcatgtcgactctcaaataacaccacgctctgtgcactgtgcagctacctctacaagcacaccaatgtgacatcaactgctgtgaagaatagtgag

SEQ ID NO: 1219 - DNA, 200 bp, Glycine max
  Clone ID: PAT_MRT3847_10109C.1
cgtcggctgggaataatgctggtgctgcttttcaagtcatcatccttcgctctaaccatggtgctctatctctttcacgcagccagccactcactgactaacacttaaacagagtcgcagtcatggttgtttggactttttacaacataagaaggtccgctttaaggggctcaaaatgttctttttgtggtgggagagca

SEQ ID NO: 1220 - DNA, 617 bp, Glycine max
  unsure (1)..(617): unsure at all n locations
  Clone ID: PAT_MRT3847_1010C.1
cccgcgtccgatcccattctctctctctctttctctcttacatctctttctacctgcttcaaccaacatgtcatggccacctccctccttttctgtgttatttgacttaaaatctctgattttgcattccttttaaaaataaaataaagaggtgaaaatgtcggggactaaacaaaagtaaccgtccctggttgttctgtctagttctctgttgtattctctcttgtgcttttttggtactgtgtactacttaaaaacgtactgaattcaaattcaaagtcaaaaagtatgaggaaacatggatggcagttaccttaccatcctcttcaggtggtagctgttgctgtgtttctggctctggggtttgccttctatgtgttcttcgctccttttgttggaaagaagatgtatcagtacattgtcactggcctttactcacagctgattanttagtgtctttggactgtacantatggtgtgcagcagcagatccagcagatccaggggtttttaagtccaaaaagtatcttaaaatcccagacagtaaaaagcttgctgaactaaagaattctaaactagngtgaagaatcaacttcatcaatgcatgaagcaaatgc

SEQ ID NO: 1221 - DNA, 230 bp, Glycine max
  unsure (1)..(230): unsure at all n locations
  Clone ID: PAT_MRT3847_101100C.1
cgaatcccgctcgagccacgcgtccgcccaacgtccnnccacgcttccgtattcattgtccactttccattaatttgaccagagctatgtatggtgctgccacaattttccatctagtcgaacaaagcctcaacctttattcgaaagagccacgatctgacttgaatcgagctaacatgtatggacttgcgataatctcctacttcataccggcagctcccgtctattac

SEQ ID NO: 1222 - DNA, 264 bp, Glycine max
  Clone ID: PAT_MRT3847_101101C.1
gtggattcagtgaatgtttggtgctcgcatgattacacatcactcggcagcaacatcctcatcaccaacgctgaatgcagagaatgccgatgaaaaatatcgatatcatgacagcctgaatacgggagccgctacgacaccgtgcacagtagagttgtgctgagcttcaactccaacttgatagtcgtctacagagatacatgttccagcatctccgactagtactagcaccgagagcagcacctgaagtctcgctggacagat

SEQ ID NO: 1223 - DNA, 374 bp, Glycine max
  Clone ID: PAT_MRT3847_101102C.1
attttgcatcggatcttgtaatgaatagtgatggcacttgccaaggagtgaccgggttgtatttgggggatggaacactacatcgtcacaaatgctgctataacaattttggccacaggggggagtgggagagcatacttctctgcaccctcagcacatacttgcactggacatggccacgccatgggtgcacgtgctgcgatccctgttgaggatgtggagtttgtacaattgcaccccacaggtatatatggagcgagtcgccttatcacagaaggatctcgaggtgaatgccgcaatcttaagaatagtgtcggttaacgatcgatgaaacgatgttgccctactgcgaaggatctcgcataagagatgta

SEQ ID NO: 1224 - DNA, 286 bp, Glycine max
  unsure (1)..(286): unsure at all n locations
  Clone ID: PAT_MRT3847_101103C.1
ggagcgaaaaatgaagaaaatggcttccaagggtttaacctttcttgctggggtaatatgccgttcaacacttgcccttgagtcctcttgtggcgggggaaggccaaaataatggcctggttatgaccttttccaaggaatcatgccttcagcttgaagacatcatcacaaaacaggtcaagcttttctacaagcgccacaagaacactgctttctcctggctcaagaacatcttncatgactgtgctgttcaaagttgtgatgcttcactgttgctggactccac

SEQ ID NO: 1225 - DNA, 295 bp, Glycine max
  Clone ID: PAT_MRT3847_101104C.1
ggggtcattgggtatcattgcaaccattgctaatgggttcgttgtaggtgccaacatcttaccagcacgcccattcagtggctgttcaatgaacccaactcgctcattctgcacacctgtggtcacatggacacttcgctgctaactggatccattgcgttgtgcccattgactgaaagacgtttggctgacctgatttatggacacgtcttcattggttcatataccagcgtcccaccctctgaaaccaatccctgagcatcaacttgaaaaatatgacttcttgttctatcca

SEQ ID NO: 1226 - DNA, 437 bp, Glycine max
  Clone ID: PAT_MRT3847_101105C.1
attagagtgggatctacaactaatcactatagtatattcggtaagatatgcatgcctgcaagttgaaactactatataaatccaatgaattaagaccatttattaggatgcttaattaaattataaaatatattaaaattaatacttaattagtcattatttgatcaatgtttcactgctaggatatttcttattatttaatatatttttaaaatagttcacatattaattaattgtaaattcaatatgaataattactctcaaagacagaaaacaaaaagaagtacagaaattgaacaaacaatgcacaaaaaattgcttgattcatctttattttgtttgtttttgcttaatgttataacatttgtatgagtacttatattgtgaacttttcgttattagacaagtgatgtttatttgtgtagggagcactcgct

SEQ ID NO: 1227 - DNA, 362 bp, Glycine max
  Clone ID: PAT_MRT3847_101106C.1
ggctcgagccaaatccaacaccttattcaacgttttatgagcggccacaccactaacggtggctgtgtcttttaaagatgaggagggcaattccccaattttaccctgctcattactttcttactgatgtttgataaaaaaaaagggaacatggtccgtaatatcttcaaaacatgcttgaaccttatatgcttaaaaattcccacaatggagtgccatctataatgcttgatatggttctctcaataggacattgcaattactctttgtaaacacttaaagctgctcttggtcttacctctccattagcttctggatttttattctttattttttctatctaaataaccttgcttttaaat

SEQ ID NO: 1228 - DNA, 409 bp, Glycine max
  Clone ID: PAT_MRT3847_101107C.1
gatccgcgtttttaaagaattccaaccaatttgcatattggttccaacattttatgggggtcaacccggtcccttaccaaaggaccatttggggattaacatggggggggtaacagtaaaagaggcacttagtcctaaaggatttttcattttagattcccaagatgctttcatccaatatttgccggggttaaacagcctacttactgcaaaagctattgccacagggccaatcttgtttttgaaggaggttggtcctttgaggccacttgtttttgaattaagcaacccacatccagatggggttaatttgggtcctgggagattgggggtgttgcctgcaactgaaggggttgttggtccaattgggttattgtccaaggttaatgttattgggaatgattttgtt

SEQ ID NO: 1229 - DNA, 238 bp, Glycine max
  Clone ID: PAT_MRT3847_101108C.1
ggaagaagctagcgaaaatatcaggtcatggtacgtggaggcaaaggtttgggaaagggaagaaccactatgcacatgtatgcgtctcgtgtcattatccagtggatcaccaaacccccaattcggggtttggctctcaaaggtagtgataattgaatctgttgtctcatcgacaatgaggaacgtctcatcctcaatatcttcttctataccatatttctcgacgctgttacattca

SEQ ID NO: 1230 - DNA, 323 bp, Glycine max
  Clone ID: PAT_MRT3847_101109C.1
ccagcctccggcgggtccggacgctcggggacttgaacctttgtgcgcatgctgagaagcctgagctccagcttgaatatgatctcatgcaagtgagagtgatgcttagccaccatggagagagagcggctaggacctcggcattcagatcttaataggccaatcaggtctatcagctgattgcggggcacttggtgaatttgagctgtaagtacatccattcactcgatatgacagtctaagcatggttggagcttcgatctctctggacaacgcccctggacattgtcagatgcagactgcatgacgctgttgactcagag

SEQ ID NO: 1231 - DNA, 2322 bp, Glycine max
  unsure (1)..(2322): unsure at all n locations
  Clone ID: PAT_MRT3847_10110C.1
tttgaatcttagtgggagtttaagtccttctgttgcgaacttgggttctctcgttgagattaggttgggggggaatgatattagtggtgtggtgcctggtaattggactagtttggcatctttgaaatcgttggatctgagtgggaacaacatttatcctccactgcctgactttaagactggattgaaacctgttgttgtggggaatcctctgttaaatggtggagcgaaaactactccttcggggaacaataacccgtcaactggatctgggaatgttgacccttcagggaacactaactcgaattctagttcaagtgattctcatgaaactaagaaatccaaaaggaaacagttggtttcgattgttgctccgattgcgggtgtggcagctgcggcttttctgctcattccgctctatgcatactgtttcaggaggaggaacggtggcttccaggctccaacttcactggtaattcaccctagggatccatcggattcggacagtgctgtgaagattgctgttgctaataataccaatggaagcatttccactttgacagggagtgggtctgggagtaggaatagtagtggaattggggactctcacatcattgaagctggaaatctaaggatatcagttcaggttctgaggaaagtgaccgagaactttgcgcctgagaatgagcttggccgtggtggatttggggttgtttataagggggagttggatgatggtactaaaattgcagtgaaacgaatggaagcaggtgtgattagtagtaaggccttggatgaattccagtctgagattgcagttctatcgaaagtccgacaccggcatctggtgtctcttttgggttattctacagagggtaatgaaagaattctagtgtacgagtatatgccacaaggggctctcagtaagcatcttttccattggaagagccatgatctggagcccctctcttggaagaggagactcaatattgccttggatgttgccagagggatggagtatctccatactctggctcaccaaagcttcattcacagagatcttaagccgtcaaatatcttgcttgctgatgatttcaaagcaaaagtctccgattttgggttggtaaaacttgctcctgaaggggaaaaagcatctgtagtgacccggcttgcagggacgtttggatatttggcgccagaatatgcagtgacaggaaaaatcactaccaaagcagatgttttcagttttggggttgtgctaatggagttgttgactggattaatggcacttgatgaggatagacctgaggaaagccaatacttggcagcatggttctggcatataaaatcagataagaagaaactaatggctgctatcgatcctgcccttgatgtaaaagaagaaacatttgagagcgtctccatcattgctgagctagcagggcactgcactgcaagagaaccaagccaacggccagatatgggtcatgccgtgaatgtgttggcaccgcttgtcgaaaaatggaaaccctttgatgatgacaccgaggagtattccggcattgattatagccttccccttaaccagatggtgaagggatggcaagaggcagaaggaaaggacttaagttatatggaccttgaagacagtaagagtagtatccctgcaaggcctactggatttgcagattcttttacttctgctgatggccggtgaaacaaattgtttggtgtacccgttttccttttgattttccaatagatgtagatagatagcatgctcttttctttctgtctgtcttaattggcaaagtgtctagtgccagtgttataatagtgtttgagtaaagagatttcacatgcacttgaaatctcagttgcatgctttgtattttccaccaagacatttaagtgttaatggttgtagatattgcgccacgatcaatcatcaatgagaatgcttgtttttttgttcaaaaaaaaaaaaaaaaaaaaaaaaaaaaaaaaaaaaaaaaaaaaaaaaaaaaaaaaaaaaaaaaaaaaaaaaaaaaaaaaaaaaaaaaaaaaaaaaaaaaaaaaaaaaaaaaaaaaaaaaaaaaaaaaaaaaaaaaaaaaaaaaaaaannngggggggccccttttaaaaaaaacaaatttactgaccgggggctggaaagtaaaaatttttttttgggggccccaaaaaaaaatttccgggcccgcgttttaaacccgggggggggggaaaacccggggggcccccaatttaatgggtttggaaaaaaaaccctttttcccagggggggaaaaaaaaaaagggccc

SEQ ID NO: 1232 - DNA, 1535 bp, Glycine max
  Clone ID: PAT_MRT3847_101110C.1
cgtccatctcctaggattcggctcgcgggaagggttaccctcttccgtcttctccagtccgaagtctgcgcctttaccgagggtcgcattgaattggaagaaatcaaagaagaacgaatcaataacacgaatacctcaagtgagagggagaaatggaatcgcctccgcagctgggttcaagaggggcagaaacacttaaacatatagctcctggatcatcaatttctgttgcatatcacccatcttttggaccttatgatgacctcctctttctagagcttgatgagaaacttctcccagatgttctgaatgaaagggtggtcttgagaggacagcctgatgaagatgccgttctttgtactctatccaaaacctatgctatgaagtttgttggaacttccaattctgttctgcttgtacctccagcaaatcattcggaatttagtgaaaatccacaaaagaatgatagtactaatgatgaagacaaagttgttgtacctgtactcaaagttgtatctggtaatatggagcttattgagacagcccccagacttgataagcttaaattacttctgtcagaaaagccttacaaattggaggaggatgacatgggaaatttagaagagaatcaggaatctagaataggactatataactggaattatcttgtagacaatattcaagctagtgacaaggaattattgtcgggactgcaggctctttcagcgctggagattaatgggtattggagactagtagacgggagttacatggacatgattctgggaatgcttttgaaaaatgcagtgttgaatgactggtcacttaatgctttaaatgaagatgaagttgtgagtatactggaatcagatggatttcctagggtgcttgcaaggcattgtttgcacgtatatggcaacaaagtaaatgagtgcatgcctagctttgtttggaagttggatgagaagcgagtatgcatacattttgcaagagaaatcctgaaagggggtaagagaaagttagagagtttcatggatgaatggaagcagaagattccagacggaatgcatcccacttttgatcttgtggaaggagaggtattaacagagagacttggagttgagacatgggttcgtgccttcagtgtcgcgtctttgccttccactccagccgagcgtttctccattcttttcagagagaggccaaaatgggaatggaaagatctgcagccctatatcagagatctgaaggtaccaggtctttcttcagaagggttgctactcaaatacactcgaaggacacaaccatcacctgacacagaaccagttttcagtgcaagatagtatgtacttgtgtatcttcaacagtacttattttcttctccctcacttcagattggcaatgtctagtacttctatattaaagtttataatttcttgtatttccactatatgtttgtgtgtgtgtgtaaaatcaagatttgttacaatgctttactatttaagacatgcttagcagaaataacttgtggtgat

SEQ ID NO: 1233 - DNA, 312 bp, Glycine max
  Clone ID: PAT_MRT3847_101111C.1
gtcctgtcttgcacaccatatgtatgaaatgtaggtgccagattgttaaggaaggcggtgcaggcgaactctcaccagatgttgtcctgtgcagacaggaagaagctgagaccaggcattataccctgaattccaaatggttactgaattctacttacatcccttgcttcctcccaaggctgatatcacattagccaagcttccaatcccggtacattggtatgccgttaaggtaggctcttcaatgtttttctatgatgatgatcttggatcagacattagtgcatatattttatgcactgtggaaggtcc

SEQ ID NO: 1234 - DNA, 294 bp, Glycine max
  Clone ID: PAT_MRT3847_101112C.1
gtgtatgggggtttttttttttttttttatttttttttttttttttgtattttttttttttttgttggggaaacgggtattacataccaggtaattttttcaaaaagaaaaaatccacatttgggggggttgatatttctaaagccccaaattttttaaaaaattgggggttccccccaaacaatacttaggggggggtaacaattgtttgaaacataaaggtgggtctctgtgagagtaaaaccaaatttttgggtaatatacccggccctaaaaaaagggttaaaaaggggg

SEQ ID NO: 1235 - DNA, 147 bp, Glycine max
  unsure (1)..(147): unsure at all n locations
  Clone ID: PAT_MRT3847_101113C.1
ttaggcgccttcagcctagcttaccatcttctatgctggtactgtcaatggctttgatgatatcttcgctgagaagggacaagctatgatagtgggtggctggcgactaggtgnatntgnagggtctaacatgggacagccaaaagg

SEQ ID NO: 1236 - DNA, 417 bp, Glycine max
  Clone ID: PAT_MRT3847_101114C.1
tttatgtttaaagtttatgtagcatgtgctgcagcaggcttgacatcaagatacactccaactccaatgttggaatctggtttgcaaaaagacagtgggttaattgtggagtacttttggaaggatgtcttacgtagctcataacgctaatcaggcccaagagaaagattggttggagggaatatttttctttgatattaaatctagctctagaattggaaaaagttttctttacaaaaacacaatttgttagaggaaaaacccttaaatttgatttaaattggtggctggttcaaattattcagaagatttttcttgaaagggaagatcaaggaaaaacccaaaaagaatgatgccagattgagacaaaaaatacatcctcaatttaatgagggtcaggctcaaaaaggaaacaaa

SEQ ID NO: 1237 - DNA, 1939 bp, Glycine max
  Clone ID: PAT_MRT3847_101115C.1
gcgacgaagctcgacgccgcgtccgaaagtattagatgaatgagagaagagagatgggaaggagaagagtggggaaggaatcaaagtcatacacgcttccatcatcaccgtctcactcattctcctcaagatcttcttcatcctcagacttcgagttcaccatctcagtctcgccacgcaaatcctccacggctctgtgccccgctgatgagctcttctacaagggccagcttctgcctcttcacctctcccaacgcatctccatggtccgcactctcctcctctcctcctccagcacctcctccacctccaccaccgcacgtgactccaccggcagcagctcctccttcaccagcgacctcgccctcttccccgactgcgactcctctcgccccagctccgtaaccgatcaggacgacgacttcaaacgcctccacaaccccaacccttcttcttcctccatctccaagcaggatcacgtcaagaaaaccctcaagtacttctccttctccagattctcctccgttttccgcaaggaaaacaccaccaccaaaacccgtgacctcgacaacgccgcctcttctaataacaactcctcggtcaagcgaatgagcgtcaccgccagggaggttatcaggaagtatttcaagaaggtgaagcctctctacgagaaactctcccagaagcagcaacagcaacagcatagaacgggaggagaggctggcgtactgttaacggcggaggctggtgcaacaacgacaactacaacgacgacgacgacgacgacgtcggttttgtctctgttaaccaagacggagagatctaccaaacaaaccgagggtactaataagagagggagaaaagacagtagtgtgactgcactttctcactctttctcggggaatctcagatacccgagaagaagaagaagctgcgtttcgagttgtccttcttccatgagatcatcgcccaaccattctggtgtgctttctcagagagctgctgccgccgctgctggtatgtattgcggagacacttctacaatggaagagttgcagagtgcaatccaaggagctatcgcgcattgcaagaactctttgattcagaccaacaaaacaatggtcagtaacgaaatctaagtctaattaattaatctaatcaaatcactctttttccgttgttaattaattgtcttccgctctcgatctgatgaatcaattaaaccaacgtacggtcatgttccaaaataattttcttttttcatttacctttggaatatatatatatatctgacgtgggggtgaggttaaaaagctgcatgtgatctatgtttggaagttccatttggattcggcagcaaagatgaagatggcaagtagaaactttattatctgactgctttggtagccttagaaatttgaaaagttatggtctgtataatttattgcataacagtgacgttgcagtggtcgtagtaattgctctgcaacgctaaattggcaccatgtgacttggagttttcttggacatatgattccatttgtaacgttacccgagcgagagcttcctcaaaatcgcgagcgcatatttaaatattgtactagtagtagtagtagtattattatttgatctcatcctgaaaattaattcaacttggtgtatacgtttataaaactaataaaatcaaatcaatagtacaatccaacttgctttcatcctacatgtgcgtaaattgaaaggaagtttcaagtcttctcgaatgatgaggcgtacattaatttaaatctgcatttattattgtgtaaagaagcttgtaagaaggttctgtgcaagtctccgtcggttggatagcttgatgtattaaatcttacttcattccatatttcaattttttagtcaaaataatagcaaataattaatcaaatacagtaattaattt

SEQ ID NO: 1238 - DNA, 500 bp, Glycine max
  Clone ID: PAT_MRT3847_101116C.1
ttttttttttttttttttttttttttttttttttttttttttttttttttttttttttggttttttttttttttttttcggggcccaggcaaaaaaaaaaagccgggtaacaaaatgtttgttttggggtgtaccccttggggaaaatttcaaaccaattttaaggcccgtttcgggccccaacccttggggggccatttgcggtaaagtcctttgaacccccccacccaatcccaatttgcccccctttttagggggggttggggttacagtaaacacccgttccaacccaggaattttgggtctttgggtaaaacggaaatttgaaggttctttaaaaaaaaacaaccccccccttgttggtttgtctcaaaaaccttaggggggggggtcccattgaaaagtgttttttttggtaaacacgggggcataacattttgacagattttttatgggtgccactttcccgccctaactaagagggaaatccttctctattc

SEQ ID NO: 1239 - DNA, 470 bp, Glycine max
  Clone ID: PAT_MRT3847_101117C.1
ctactcttgttctttattgtgacaatcaaagtgttgtatccattgttcataattctgtgttccacagtcgcatgaaacatatggaaatcgatatcttttttgttagggaaaaggttccggccaagcagctttcagtctgacacatcccagctctggatcagtggtcagatgtgctgaccaagcctctttcttcatcaagatttgaagttctcagtggcaaactcaatgtgaagagtttttcctctgaaaactcttccccttgagtttgagggggggtattagagtatatgtaagaataattgtgaaaacagtttgcaagggctattagcttttgctaatagcacctcactagtatcaggctgttagtctattaacaaacttagtttgaagcattagaggcctataaatactcccttgtaactaactctgtaactaactttcaggtttaatagtatcagttctctttctct

SEQ ID NO: 1240 - DNA, 417 bp, Glycine max
  unsure (1)..(417): unsure at all n locations
  Clone ID: PAT_MRT3847_101118C.1
gcgagaagacgacatacgggctttccttatgcttaaattcaacttgtgttggttgtgtatctatctcttcatttgtgagatgtgaacctcctttacatcctgtctcaagggtgcctagagtttgctttggtacccttggaagtagctttacttctttgatctttgtttgtcaaagtttgaggcaaaaaaaaaaatatcatggtactatatactagcttaaatcaaaacaggtgctctccttcacttcaactattttttcatgtgatcttgcctatcggtagggccggccctaacctgctaaagcaagtgaaatacttactttaggttctaaataaataaggttattctaaactttatactcattattttaaaaaatattaaagaagntattggttaataattaattagtaatatttt

SEQ ID NO: 1241 - DNA, 358 bp, Glycine max
  Clone ID: PAT_MRT3847_101119C.1
gacgcagtgttcggtaatgtgattactcagtgctcaaccgagtcaaatcgattctcctgatgatggtggctatggatcgcacagtgttgcggttctcttcatcagctgctgcatctgcggatatcttgtctgcgaaggtctacgctctggtcatcgtaagtatctgcgattgctatgttcgacgctctgactatgcagaatgtgtcataggttggttactcgactccgtcctttccgagtgaagcgtcgaaatccgaaattcctactttgttcctctaaataagtctatcgacgaggttggattggatatacagtaccatcacaatatgttaatatgctatcataacgtgaatctaaa

SEQ ID NO: 1242 - DNA, 479 bp, Glycine max
  Clone ID: PAT_MRT3847_10111C.1
acgctgcgagaagacgacagaagggttcccctatgcataggtgtggaacgaggcaatttataatttatttgactgggatgcttttaatcaatcagctcatgaaaatagtgaatagggggttccttcggattaggaaaacatgtttttgaaatataatttgaagcactataaattaatataaatgacataataaccttggagatgagatttgtaatttttttaaaatcttgtaatttatttccgtcttgtaaatgagtacttgattttgaggataaaactcccactctttcaattaactcattgttttaatattctaccaatttcttaggcgtccacaaaagaagaaaaaaatgattaatttgttaaaatttaggaactaaaaattattttaaaattttatagtcttaaaaaacaaatactccaaatgcaaggactaaaacaacatacaactaataagaattatgtgcagtttttagttt

SEQ ID NO: 1243 - DNA, 431 bp, Glycine max
  Clone ID: PAT_MRT3847_101120C.1
ctgcgatacggggtcatgaaaaatcctattggtgaaggttatctgactatacctgtcctcattaatggtactaatcctctattatggataaatcccacagtaccggatgctattaaaaaacatccagatggtcattctcaagttatttcttctgatattttagtatctagcctctttactgggagcaacttttccaaagaagagcaacaagctctgcagacatggaaccaattgaaccacttaattgataatgttcaggggttacccaaagcagcaagaagctatcaagggaggctgccagggtgtgggaatagccctttatttccttcaattgaaagagcaaaagcaagggtcatggaaatgataggttcaagagctaaaggagaaagcattgtccccattttcttaataacatgaattccactgaactt

SEQ ID NO: 1244 - DNA, 306 bp, Glycine max
  Clone ID: PAT_MRT3847_101121C.1
tgctgtcagctgcgagaagaccacagaaggggagagacaatgggggcttccggggtcaccttccacaatcacattttgcgcttctctcactcactcactctatttcttcctcttcctgtcgggatctttctcgaactccaacaaagatgcgtgagactcttcacatccagggagggcaatgcgggaaccagatcggagccaacttctaggaggtggggtgccctgagcacccgatctattcaacggggaggcaccaaggggacaaccagttgcaactctagcgaggcaacgtctactacaatgaaa

SEQ ID NO: 1245 - DNA, 275 bp, Glycine max
  Clone ID: PAT_MRT3847_101122C.1
attcaactcaagtacccctctctctatttcccttctctttatcttcctattaacaccattactcttaactcaatctccaccttctccttcttacttcttcttcttcttcttctattacctacaaaaacacactatatccaaaactctaccgttccattctctcaaccattcgttcatccccttacaacccttataactataacaagttctccataaaacaaacctcaaacaaacaagaccactagaccaaatctttaagaactttctccaacacc

SEQ ID NO: 1246 - DNA, 144 bp, Glycine max
  Clone ID: PAT_MRT3847_101123C.1
tccacgcgtacgtcaagcactgctttcttctttcactgtatatctgtttgtgctctatattatagtcctgggctatcactaagcgatttaagagcatattacctcaattgcaaccctcgttaaattctttgctgatctcatctg

SEQ ID NO: 1247 - DNA, 563 bp, Glycine max
  Clone ID: PAT_MRT3847_101124C.1
cgatctataacgtactttttttattttccgggtgacatgaaacaccgttgaagacaaccaagcggcaaggcagaacttatttggccaatcgaacctacaactgcacaaaatggatgaatctatgttggatgcttcacttagcacccccaaattcccaaacgagagatttttaccctggatgttattggtgacatggaatgcgactaacctaaaccagatggccgccaaaaatcaaaggttctatataagctatttagctgaagcatcaacagcgagcttatggataccaaagtctttggatattctatcagctggagcactagctccgaaacgaacaacgcctatggcttttccctctgctccaacgaatgtggcccacccaaaggatgagcctggctcaaagctaactctgggagaaacagcagcagggaaaacactatacttgaaggcctcggatgagctcatggaagagatcccaaaaaccagcgaaaacagattgaacagcctacccttacttactcaggtcataagcaacattggcagccagttccaattccgaacca

SEQ ID NO: 1248 - DNA, 220 bp, Glycine max
  Clone ID: PAT_MRT3847_101125C.1
ttccaatcctcattgatggaatctggtcagcaaaaaggcggagggttaattgtggactattttggaaggatgtcttacgcagctcataacgctcatcagccccaagagaaagatccgcctggcgggaaacctaacctcccacctcaccgctcgccccagactggacaaagcttcctcctctaaagctcacatctcgacagtggacaaacccctcaaactc

SEQ ID NO: 1249 - DNA, 154 bp, Glycine max
  Clone ID: PAT_MRT3847_101126C.1
ggctcgagcaaaaatccatatatctttgatcatatgactttttgtctaattttatatgcggccgggaacagaaaactttgaaaattcaattgctagatccactaccaaaagcaacgatgagttctaatgacacattactgttttcaatcaacat

SEQ ID NO: 1250 - DNA, 1077 bp, Glycine max
  Clone ID: PAT_MRT3847_101127C.1
agagcatagttaagtgccgtagggttgcaatattcatcattgatgactattaaaaatggagggtagaaggtgttggccttgtcagacgttttttcagagcttattgtgtcaaagaaagaagttcttgattcactattgttgctgcagatgtgcaatgcacaagaataaaagctactgtgtatgcatttagcataatattaatagggttgatcacaggccctgacattggaatctcaaagtgagcgtggtaaagagccggaatgttgggtgcaatctcagctgttgtgttttcaaggattatggtatgtatagaaaagccggaggataataacgatgcaatagagggaagttagattccttaataatagttcttagtcccaaagcttgaggaagatacaagtgcagctgttactaacttgcatgcgcacgtgaatgattatgcaactaatacgtaatccttcaaatgactaggagtgtggctttgcctcttgggccttgctgtttgcaactccttgctgttactcacattgggctttgctgcttgtagctctttgttgttactcatcagttggttaattgttttcgttctgatcaagagagtcatgcacatattttgtttacacaaaatgcacttgagatagagtcatcacaagtttgatattagagcaatcgaaactcgagttcaattcaaattaaccttgtgttgtaagatccgcaaaacccacacttgtggtatagccaatgaaatggtgcagtacccttctcatggcagtcattgcaaagtatatcctgacattgattccgatattcttctgggagttcctcagaagccagtagagcatcaagcatgtcaaagtaaaccgacatatctcccatagatttgctacaaattggacagatgtagtggctacatgtgtatgcctgaaaacaagcagaatgcatgaaatgtccacaagggagagctctgacagattcactggatgtgaacaaaaaatcacagcagatggggcagtttgtttctaaacccttttcccggcatatgtgatcaaccaatttctttgacatgcaacaattaca

SEQ ID NO: 1251 - DNA, 432 bp, Glycine max
  Clone ID: PAT_MRT3847_101128C.1
gatgaataggaatttcatttcggtggttgtttttgggagttgtttggggctgggaatatcccaatatgttgatgcaagaaactgggaggcattcacacccgaataggattgggaggggttgaacgtggggtaggaactatcgggggtgtccccggtgtcatgggaggtttctttcatcttaaagccccccgccttgaaacatcccttgagtcaattccggaccttctttaaattgggggggtcccaaaccgccttttaaaaaaaaaaaatgttacatttccacacctttggtgggaaaaagaaaccctgttttttttataatgccccccaaaaccggaaatattgaacccccccccgtatataccccaagcgtgtttcaaggggtggggggttgaagcaggcgagaaacccccaaagaacccccccaccccc

SEQ ID NO: 1252 - DNA, 426 bp, Glycine max
  Clone ID: PAT_MRT3847_101129C.1
cggacccgtgggttgatatttctatagtctagttgggcatcaaacttaattaaaatattaagagtctttaattataggaaattttctagcttttttatttggctgcctaataaataggacgtttctgggttgaacatgtaaagagattgagttactcttgagttgataaatgttcttttcttctttattacctccgtcatgatactctgttttgtatgagttcttcattttattttaacaagaaaacatcattttgaattttaagctagctgcactcaaatttattatcaaatctttgttccgacaacttctaccaacctttatgagtaccccctactttagaagcaaaaaaaattcctttccatctgggttttcattttaagaccaggagatgccatctaggtcacggttgctgaggaaaagggg

SEQ ID NO: 1253 - DNA, 202 bp, Glycine max
  Clone ID: PAT_MRT3847_10112C.1
tcggccacgcgtgcggccacgcgtacgatcaggatagcatgcatatcaacatcatgatgaacaatgtgcgtgggtttgcaatactgatggtggctgtgcaacttctggggtaagagagtacaaaaggaaaggctgcgacttgatcccctgtggaggctattccttgtttgggggcaataacattgctgtgaaccaccatcaa

SEQ ID NO: 1254 - DNA, 541 bp, Glycine max
  unsure (1)..(541): unsure at all n locations
  Clone ID: PAT_MRT3847_101130C.1
aatagtaatcattatcatattaattcacaaaatcacaacacacatatagttaaagcaatacatacagcaaagccttagctttataattaattaattaagctttacccaaactttttttttttcctgcatgtgaatgaaacattgatgtattcaagttctctcgtggaccatatatatataaccctattaaaacagggagtagacaagctgagagaacctgaagaaaaagttctttggatgcttgcgttttcgatgtcatcaatccttataaaagatgacaagccgaagaacctaacccaagaatattcattctgattgcccaatggtttctttctattactttgttctggaaagggaaaggaattaatcataaaaagataaaaaaaaaaggaagattaaaaaaagcaatcaatgattcttaagtgctttttctgggtttgcttttcctcctcgccctgcttctcgacggttccccttttgggatttgaatctcttcctttgngattcttttgcatgccaccgattctgatgttaactcctc

SEQ ID NO: 1255 - DNA, 1536 bp, Glycine max
  unsure (1)..(1536): unsure at all n locations
  Clone ID: PAT_MRT3847_101131C.1
gaagaggaaaagaagcattctccagagccagagaaaaagagagaggaaaagggagacaaaattgggggaaggcatgggtatggggggattgggaaggaatatccataagcaaaatatgctatttcttccctacacctcccataccactgtttttcctctctttctcccccttcccttcctttctgctgcctttctatatcaaacctccttctcatctcttcatggtaatggtatctctcttttttgcctttcactaaacatatgtttctgcatgctagctgtattgtattatgttgtgagattttacattttaatttaccatttttcttctaggagaaaaaaatacgctatgaattatttatcaaatttggactgtgttgatgtcgtgaattttaactttgttaacaaaatatagccaggagtaatttatttttaatctaattttgaaagatttaacaattttgtaataagaaccataaaagaaagtatctcccattttgcaagttttgagatggaaacaagtttggtacaaaatcttagaaaacaaattatactaacatgaaaaaactcacttgtctagatctgatcacattattataactacagagaataccaccttttcagaacatgaaaaaaccaagatagttgttagtgattggagttttgcaggctacatcttgattggatggaagattttttttcttcggcgaaataattattctttcatcctttaattggccgaaaaatcctgcaactaaaatggtcggcaataacttcgaaaattgtttgctatgcagtaacaaccatatatatgttgaagaaaattcatagtattttacacagttgaccatttatgattttatgttccatacactaatgttaattgctctaaacttttaaagtttagatctttctcttcaaccaacaaatctggtattatcactttctgataataaagttttgttgaatttttcttatttgaagtttggttaatattagattaattttcgccacattttttatattctttatttgattcaactggccttattacgtttgtctttatgagttatgactaatcttttattagactgtttggatcttttagactgtcctattaagaacaattgttttaaatagtttttttagtcactgtaattaaaatctttggtttcttggtggaactccaaagtatccaacaagttttggtcttttggtcgggttatgagattaatcacacttaaaatttctcaccccttaggaatgtattatgtgggtatccaacctaggttttcttgcaaaaactttgttatcaattaagttacatccatcaggtagttttcattaacganntacagtaaaactttacatantaataaaaaactgaacanagatccacattcccttatgcacattntaccacagtctaatatcctatatactaatatactatcaagcaaaacatctctcttatgctaaaatgatcactttcttttttcttntttttccaatgcatgcagactgcttttataactg

SEQ ID NO: 1256 - DNA, 352 bp, Glycine max
  Clone ID: PAT_MRT3847_101132C.1
gggcccccggtccaatttctggataacttgggaaaagggtaaaaaaatcctccccaattacatggggtccttccccaaaaaaaaaattttcccccccttttttttcccccaaaacccatgggggttttttttcccaaaaaaaggggggggggaaaaaaaatttttttgaacaaccttgggggacaaaatttccccccccgcccaccaaaataatgggtccccaagccaaggtttgggcctatttaaaacttttgggctttgatctctgcgggggggattccaggggaacccgaacccaattcccagctatcaatcccgtggctggaaaagaaatagtttttttttgggggcc

SEQ ID NO: 1257 - DNA, 189 bp, Glycine max
  unsure (1)..(189): unsure at all n locations
  Clone ID: PAT_MRT3847_101133C.1
tttnnnnnnntttttttttttttttttttggaggttctgaatactatggatttttttggccaaataaggaaactgtttttggaaagacgacatgtgtacataagatttatgctcctatccacggaatattgtatgggcttggttttaaattttttagacattaattaaaacgggattccaaaataaaat

SEQ ID NO: 1258 - DNA, 355 bp, Glycine max
  Clone ID: PAT_MRT3847_101134C.1
gtagcgtgtacataatggaccatattcatctgtcggctacaattacaccattgtgaggtccgtactgcccagatagcctaatgatgtatgaaaggaaagaggtttagcatgctagatgtcacaagacaagaatgtttgactatagtacacatgcctggtacctactcaccgaagctcattggacgaggatgctagtgcttaagcactggtcgatgcataattggcccacgaaacaaataggctgtcaattatcaggaatcgtactctatcctatgatgtaataatagagcactttgtgtgattaattatcgtgggaatgagtatgcaaagcgtatatctacacatctattgacca

SEQ ID NO: 1259 - DNA, 413 bp, Glycine max
  Clone ID: PAT_MRT3847_101135C.1
tgtttattgtgcattgtacaggaagtgattccagaaactgcattggggagcactaaaagcaagtctgactatactgcattgcatgtgggcgctatagaaaccatcatagatagcttcgcaagtactgactgcaacatctgtggtgacatgatgatgatggataattatcataccaagactgatactgcctttaggactaactatgttgaccctttcacaggttgaatgccaatcgggcaggttacattttcgaataccatcgtgcatactgtacctgacatcaactcacggtttcagctagagagtacccctaccaacggccatgctgcacaaacacctgatctcgcaatggatacagccaaagtctgatgggctggtactgactcgacatcgagtgacactccaactacatt

SEQ ID NO: 1260 - DNA, 437 bp, Glycine max
  Clone ID: PAT_MRT3847_101136C.1
cacaaaaatcgggttaattttttgaaaaaacccggcctaccgaccttttttacaggaaccaattaaatttcttccgaaagaaaaaccctctcaaagaagggaaagaaaaattttttaaaaaaaaaaaatgggaaaaaccagcttccttatttacatggaaagggggttcgaaattttaatttggaaacggggaatttgccaattggggagcctccccgaaactgggaattggagtcgttgggctgtttataaattttgggggggcccaaccccatcacaagggttcgtaagggggggggggaacttggttaaacccctgaatggggcctaacggaggggggggaaagaaacatgggcattttttctggcgtggcgggggaattgccaacccctcctgcgggacccaccggggggtgcgggcccttcctttagggggc

SEQ ID NO: 1261 - DNA, 350 bp, Glycine max
  Clone ID: PAT_MRT3847_101137C.1
aagtaaataaaaaagcaattttattggtggattgaaactggaactcatacccggttggacatgtgtggcaacccttttgtttacaaatgattgagaaaggcaacacttaaatggcgggagatgatcttgacaaaaaaatttgaaagatatcccattcattgattcaacttcgggctaattcaaggagcacgctacattggccaaagacaaccacggattgggggcatgatcaggtgatgcttgaacgaccttaaaaaactataacttgagcagattgtaggctgaagtggcggccaatgatgaaaaccctttcaaagctatctcgcgcacccccctgagacacacacata

SEQ ID NO: 1262 - DNA, 258 bp, Glycine max
  Clone ID: PAT_MRT3847_101138C.1
ctagaggattccatttcaggggcacaagagcttaacgttatcagcgcaaatacaagccttggggaatcaaaaggtgatgaacgggttgctgaaaatttttacctgcaaagcgcctgttcctggcagtggaactctcgctcttcaggatctagggtaggagggacacaacggctcctttggcttggtgaaggttaaggttaaaatattactgacggattgtgccatgcaggggttgaaagattaaaagtggcttaaaaa

SEQ ID NO: 1263 - DNA, 429 bp, Glycine max
  unsure (1)..(429): unsure at all n locations
  Clone ID: PAT_MRT3847_101139C.1
ggaggcgcgaaacgcagtcaaagcatgaatattacgctttctgatgttgtttttcaagttgtttttgtgttatttttttaaaatgatattattttcatgattttcacatttacaattaaatatttaacacatctgttataaatatttaacacaactattatgccatgtgattttagatggacaagacaaggcaatttaaaaatgcacagcagagaagccagatgcctgttacttgctactcaaacttcacccctgtcatctaagcctttgctcttctcgtgtttcccataacggttactctttttccctctcctatttcaacacatgccatggcttgtctgagccgncaccaccaccaccaccgctcctggctcacttcccccgacgacatgctccaacgctgccccctttccgcccaccaccaccgtc

SEQ ID NO: 1264 - DNA, 333 bp, Glycine max
  unsure (1)..(333): unsure at all n locations
  Clone ID: PAT_MRT3847_10113C.1
tccggnaattcccgggctcgacccacgcgtccgtacggctgttagaagacgacagaagggcgctgaaggttcatggtagctgactcaatgtgaaatgaaacagaattttaaatggatatgaaatgggttccaacaggactcttcaaggtgttaatggatattaaatgagacttgatgttttcatatttatttttttaagattcctatggtggttcgaattgatcgtttcattagaatttctattccagtttcgtttcnnnnnaaannaanaaaaaaaaaanaagggaaaaaaaaannaaaaaaaaaaaaaaaaaaagcggccgctctaaagga

SEQ ID NO: 1265 - DNA, 1073 bp, Glycine max
  Clone ID: PAT_MRT3847_101140C.1
caacgggatacattagaatggtctgcacggcaaaaaattgctgttggagctgctcgcggtttacgatatcttcatgaagagtgtagagtgggttgtattatccaccgtgacatgaggccaaacaatattctcataactcatgattttgaacctctggttggcgattttggactggcaaggtggcagcctgatggagacacgggtgtggaaactagagtgattggaacatttgggtatttggctcctgaatatgctcaaagtggccaaatcactgaaaaagctgatgtttattcctttggggtggtattagtggagcttgttactgggagaaaagctgtggatctcactaggccaaaggggcagcagtgccttactgagtgggcacgaccacttttggaagaagatgccattgaggaactgattgatccaaggcttggtaaccactattcagaacatgaggtctattgtatgctgcatgctgcatcattatgcatacagcgagatcctcaatgtagaccacgcatgtcacaggttctccgaatactagaaggtgacatggtgatggactcaaattacatctcaactccaggttatgatgcaggaaaccggagtggtagactttggtcagagccgttacaaaggcagcaccattatagtggtccccttttagaagagtctctggagtccttcagtggaaagctatcccttgacaagtacaagccttcctattggggagatagggacaaggctagaagggcttcatgtgaagatgacatctgaagtgattgatgatgaaaattgcattcttgttatgctaaatataaaatatgtttgttacccaccaattttgttgtttctaatttccttttttgggcaatgggatctaattttgcatctgtatagcagagtgaaagtaggataggcaagtatagaaaagcttttgaaaaaaattcaggaaatcatgtaaactagtgtttgaatgacttgacagacctaactgctgtctacatgattttcactcttcaaccctccctaatttattttatgttccaactaaaaaaaaaaaaaaaaaa

SEQ ID NO: 1266 - DNA, 266 bp, Glycine max
  Clone ID: PAT_MRT3847_101141C.1
tgggcaccgcttgagcagacttaacaacagcacagagcgggttactgtctgttcaggctaccatctctctctctctttcttagtgcctccttgccagaagttcgaatgggtgatgaaacttgcctatgcacatctgagtcggtgaacgatggggggtctgacaagctctgtgaccagatctcggagtcggtgctcgatgcatgcttggagcacgaccctgacagcaacgttgcctgtgaaacctgcaccaataccaacatggtgat

SEQ ID NO: 1267 - DNA, 1970 bp, Glycine max
  Clone ID: PAT_MRT3847_101142C.1
ggctcgagggaggtcgttgtttcttgattctgtgcccaagcaagtttttatatcatcaagcaccataaagaaacatttcaagtctgatggtcataagaaaagaaaaacggtcaatgcaagcaaggaacatttgaatagtgctacttctggactgggaagagtgaaggaaggagcaaagagttcttctgaagttcctccggtgattggaaagtatacctattgccgcaagaaactgtcaaggaaggagttaatttcctcaaaatctgtagcagaaaatgattctaggccaggtaagcagcctgtggccaagttgaggaaacatttttctggagatgttggtgaggctgcagaggttaaaatagcttctgttatacatggaaagacaaagatgattaaagggaagaaggatacaacttctaagggcaaatcttctgtcagtgtcaatagtagctcacacaatgatcaattatctttaaagaataaagctggtcaaaaagtgttgaagttttcgggtgaagttcaaaatgatgttaaagattttgtaaaatccaatgtaaagaagctttcagcatcaactgataatagcgttgtcatgaagaagattgtcaaaagtgatggcactgttaaagagaaggtcacaagtcattgctccagagagatacaaaatgcaacaatgaaagtatcaaaatcaaaaaggaaacatcaaatggatggtacagcatcttcacatcctacaaaggttttgaaaatttcaaatggtggtgcttatctgggagccagtaaacaagttactgtggcaagtaggaagtctgctaaatccaagccactgaatttgtgtcctagatctgatggatgtgccaggacttctattgatggctgggaatggcataaatggtcccgaagtgccagtcctgcatataaagcacgtgttaggggtcttccatgtgtccagaacaagtgcatagattctgaaaataatttatctcagttgtcaaatggcaagggtctttctgcaagaacaaatagggtgaaattgcgtaaccttcttgctgctgcagagggtgcagatcttctgaaagtgcctcaattgaaggcacggaagaagcatttgcgttttcaaaggagcaagatccatgattggggtcttcttgccttggagccaattgaggcagaggattttgggattgaatatattggagaactgattcgtcctcggatatctgatatacgtgaacgtcagtatgagaagatgggaattggaagcagttacctttttagacttgatgatggttatgtggttgatgctaccaagagaggtgggattgcaagatttgttaaccactcttgtgagcccaactgctatacaaaggttatatctgttgagggtcaaaagaagattttcatatatgcgaaacggcatatagctgctggtgaagaaattacatacaattataagttccccttggaggagaaaaagattccctgtaactgtggctccagaaagtgtcgtggatcattgaattaggctttgattgggtttctgatgctggttgttcttttcaaggtccacttgttaaattgttgagtgggcagaattttttccataggttatactcctgctattgttggatgttgcattctgaagacttgactcttattttatatttcaccttgcatcaaattggatgagttgcaaggtgcttgtttgtgatcataccttgttcattcttgtggacttttttgtggcagttgagtttcttctctcaaaacaatctggtgttcatgggggttattattagcatgttatatttatattacttgatagttgatatagatctggggtggctacctctggattgagataggtgactgccaaaggaatatataggggaatagttgtagagacagtttcctttgtataaagacttgatatgttcatctattaataaatgcgttgccttatacttatt

SEQ ID NO: 1268 - DNA, 407 bp, Glycine max
  Clone ID: PAT_MRT3847_101143C.1
accttttcttgcacgcgtggaaacaaggacgtttaagttgtttcttgttgatgttgaacctactaaaggttacatgttgcacctaaaaatttgaggatctaagatagcactctgcaaaaactcagttggaggaaccattctgctgaaagatctattggccggaatctgaacagtgggcaaatttacagcaagtgttgctatgcagggcactcattgtgttcaaggaacgagaaaaatggtggtcacagatggtattcctgggaagacaggtatagcaatagccggtgctatgaatagtgtctttagggggcggctcatgactgatattaacacccttcgctttaaagactgtgagttatggtaccctctttggacaaaagcaatgcctctgtggtttataacaaacc

SEQ ID NO: 1269 - DNA, 209 bp, Glycine max
  unsure (1)..(209): unsure at all n locations
  Clone ID: PAT_MRT3847_101144C.1
antcgcanncntgcgtacgtnagcncggaatgtcggctcgagatgnnctngaanantgnacntggtcanatggggatttnattttnagggngggtatncaggcgactgnttagtttagatnnactcctgggtgccttnnanttcgnaattgangtacaggngngcaaatgtctaggcnatgatcanaacttgtcgancgaggatcagnn

SEQ ID NO: 1270 - DNA, 300 bp, Glycine max
  unsure (1)..(300): unsure at all n locations
  Clone ID: PAT_MRT3847_101145C.1
aaaaacccgagccgacccacgcgaccgcccacacaaccatccacccaaacatcatgtataaaaaaacaacaaaaaaanatacgcacgctttcttataaaaacttgaccccccacccccacannaacatacntntnntaaattaatcatcaccaccttatcataccacaattaacttcccctttgagaacttattatcaataccctcatctttttctacaaaatatcattcttaagacacttacatatgacctagcaataatcatacccatatctgacacaccatataataaaaaaacaca

SEQ ID NO: 1271 - DNA, 319 bp, Glycine max
  unsure (1)..(319): unsure at all n locations
  Clone ID: PAT_MRT3847_101146C.1
gttgcatgcaaacntacgtaagctcggnattcngctcgncactcgagccgaatcnnctcgagcngntcnancngntcgagcaaaccacganttaggaaaatcaagcntatncattncanctgngatactgatnnaatncttcanggnttttctnntgaacctggcttgtncagtggcatctacnncttctnnttntgacttncanttcnnggctnggtctatancccngcangtgtcnanggcaatgatgagttagagcattttggattnaaatgnantttggatcccagnanggnantnntatntcatggnncanggt

SEQ ID NO: 1272 - DNA, 146 bp, Glycine max
  Clone ID: PAT_MRT3847_101147C.1
ggctatataatcggtctctgttgttgatactggatccgtaaacctccacttgaagctacgtggttatatattctggggatacatgcatatctaagccaggatatatatcagggatgagtcacctaccatcaaacttgttggtcgtg

SEQ ID NO: 1273 - DNA, 236 bp, Glycine max
  Clone ID: PAT_MRT3847_101148C.1
atacataggggggggtacgaaaggacaaagcattctctcatcactatctttacgtacggcaaaactttgtcttacatgggctaagaccgttttaaaaggttgaactgccattttttacaacaacatgtagatggggggccttagcacaaatattgttggtccaaaaaggtgttaaatagttcgggatggttgtctaaaggtgccctttaacttggctgcataggaatcattctgta

SEQ ID NO: 1274 - DNA, 290 bp, Glycine max
  unsure (1)..(290): unsure at all n locations
  Clone ID: PAT_MRT3847_101149C.1
cgcngagangaggacaaacanttagggtttttcaaattcaacatttcttcgttttnccantttagggttccnctcctncggttctgttgntttagcccttcagttggcaatcggacagggaggttgtnctaattcntcntgcacaaatggcaattggcaattgagtggatncaaaaaaaaaacgaggtaccctagccagggcntnccctcggtccaggaagaaaaaccancngtttggtganggcntnggtnaagatnaacctgnaaatngcntggncccgtccngngng

SEQ ID NO: 1275 - DNA, 332 bp, Glycine max
  Clone ID: PAT_MRT3847_10114C.1
ctggggtatttgtgtgaggaggtatctcctcaggttgttgatcaggaccaagtaaataaaatacttactgccgttgttcaaggtatgaacgcgtctgaagggaacaatgatgttaggcttgctgctacaagggcattatataacgctcttgggtttgctcaggctaattttggcaatgatatggagcgtgattatatcatgagagttgtttgtgagacaactgtgtgccctgaagtgaaaatacgtcaagcagcctttgaatgtttggtctcaattgcagccatgtattatgaaaaattggctccttacatccaggatatatataacatcac

SEQ ID NO: 1276 - DNA, 408 bp, Glycine max
  Clone ID: PAT_MRT3847_101150C.1
cggacgcgtgggttaaaaaaaaaaaaaaaaaaaaaaaaaaaaaaaaaaaaaaaaaaaaaaaaaaaaaaaaaaaaaaaaaaaaaaaaaaaaaaaaaaaaaaaaaaggacaaaaaaaaaaaaaaaaaggggggggcgtttagatgaaaaaaacctaatttactttgctggggagtaaaaaaatttttttttttgggcagcaatttaaaatcaggggggattggctaaattttgaaagttatgtaaaaaaaaaaccttgaacaaaattaattttttgcaaatggggtaaaattttcaatagcccgagctatttaaaaatttaaaaaggccggaaaaactttctttgaaaagggtactcccattggaaaagcaaatgggcccctgcccgttaacgtaaaattaagcgggggg

SEQ ID NO: 1277 - DNA, 474 bp, Glycine max
  Clone ID: PAT_MRT3847_101151C.1
accaagcgtccgagttccttgccctctatagctattgagctattctttttaacaccgaatatgagtgacacagaaagggcctttgatgctacctatcactataaagctcttaactgattcacctctggggaggggaggtctattatgcaaatcaccataagtgcaatgtgaactcaaatctatccaactcctgtttgatatccttgattgtgggagcagaattgtcatcatcaccattcgatttgctggaccataatatatctgctttggtgatgccctcttccacatcgttgaacaagagggattatactgtgggtgtcatatacctgagaccattatgatcttatcggctaccctccaatgccatactacttgtgacacgcctactcctcagatagattatgatgagtaccctcctgtccgaccttaccctcatgtgctagataagacgatgtagcaatcacctcagtatat

SEQ ID NO: 1278 - DNA, 115 bp, Glycine max
  Clone ID: PAT_MRT3847_101152C.1
atagatggtgttgcttctttccatgagcttcctcatcttgctccttcgctatctttttatcatgatgttcatgtaaggcaaacccaccatatcccacttgagctgctgctgcaac

SEQ ID NO: 1279 - DNA, 281 bp, Glycine max
  Clone ID: PAT_MRT3847_101153C.1
cacacgcttgctacaagatggacacattcattctgtcccataaacttgtcttgtcaccaagggccgggcatacgtcttacgacaacgtcccacaacttcatcccatcctgtaatactaccagatcacatcacaacacatgctcttctcacatactaaatccactgtcttatcttacacggatcaaagctatccttatacctctgccatatcaactaactaccatgatcaacctttcaaacccattcgcgattcctcacaagctactggctgcattaacttc

SEQ ID NO: 1280 - DNA, 2143 bp, Glycine max
  unsure (1)..(2143): unsure at all n locations
  Clone ID: PAT_MRT3847_101154C.1
gcaccaccggttgttggtggtggtgctgctgcatcaggaggagcacatgaaggcggtgccaacggcggcggcggatcaaattcaggggatgatagagttgaggaaggtgacaagagctttggtgggaacaggtggccaagacaagagactttggctttgttgaagatacggtcggatatggacgtggcttttagagacgcaagtgtaaagggtcccttgtgggaagaggtttctaggaaactggcagagcttggctaccacagaaatgccaagaagtgcaaagagaagtttgagaacgtttacaagtaccacaagagaaccaaagaaggtcgaagtgggaaatcagaaggcaaaacttatcgcttctttgatcaattacaagcccttgaaaacaacccttcaatccatgctatgcaatccccaacaccaacaccttcaaagccaccacaaacaacagcactacttgcaacaccagtgtcaatagtggtaacaacaactactacaccatcaacattagtgtctaataatgccactgttccatccacaaatacaccccctttgcctcaagccattctcaacataacaccaccatcaacactaaacatcacaaccccttcttttccatcatcaaaccctacaacatacttcccaacacaaacaccaaaccctacaaccaacaacaaccctccaaacaccatcaccccagcttccttccccaacttctccgcagatctcttgtcgaattcgagtttttcatcgacttcgtcggaggaaacaacgacgatggggggagggggaatgaggcgcaagaggaagaggaagtggaaggacttctttgagaggctgatgaaggaggtgatagagaagcaggaggggctgcaaaggaggttcttggaggccattgagaaaagagaacaagagcgtgtggtgagagaggaagcgtggagaatgcaagagatgcaaaggatcaacagggaaagggagattctagcacaggagaggtccattgctgcagcaaaagatgctgctgttatgacatttttgcaaaagatagccgaacatcagcaacaagaaatcaatcttgagccagcattgaataacaacaacaacagcatcactgtcgttccacagcaaccagtgccacaaacaactacaacaccaacaccaacaccacaacaagcacaaacaacaatagttcctgaggccccacaaccacaacaacaaatagtggtgagtaatgttgaaaacaataaagctgacaataacggtgagaatttgacgatgggagcgagctcttcaaggtggccaaaaatggaggtacaggcactgataaacctaagaacaagcctggaaacaaagtaccaggaaaatggaccaaaagggccactgtgggaggagatctcagcgttgatgaggaaaatggggtacaaccggaatgccaaaaggtgcaaaaagaagtgttagaacatcaacaagtacttcaagaaggtcaaggaaagcagcaagaagaggccagaagattccaagacttgtccctattttcaccagttggaggctctatacagggagaagaacaagagagaggggcagatgaagccggatagcatgatggcgccgctcatggtgcagcctgagcaacaatggcctcctcaaacgcacgtggtgccgccagaagtgaccatgggagacgcccagaatgaccccatggaccggcggcacgaggaagttgaggaggacgaagccgacaaggaaattggagatgaagacgaggacgaggacgacgaaggaagtgataattatgagatagtagctagcaaaccagcttctggagagtgagagaaacaaatatcaacgaaaaagtgcattaattagagaatggtgggttaatttgggttcaggattgtcggaaaatggtggtgtgggagtgaaatgtgataggggtggtggtggtggatggtgatggggttgtattgaagattttggaaatgcacttacttcagaattaaaaaaaaaaaaaaagaaaaaaaaaaaaaaaaaaaaaaaaaaattggaagtacttggtacaatagcagcatatagtcagtaagattatatgtttttttgttttgaaaaaaagaaaaataattaattatttttnttagct

SEQ ID NO: 1281 - DNA, 333 bp, Glycine max
  unsure (1)..(333): unsure at all n locations
  Clone ID: PAT_MRT3847_101155C.1
agcggccgctttnttgttttttttttttttttttnttactttaaaaaacccaacgatttactttccgtttttgcttttctcctcttcaactgctgattcctcttgtttaaattaatttgcatctgccccccccttctggaaatttccttccacaccaaggactcatagtcatacccattgtccgtcctgacaattacttaccagcacctgccaccgtaccagacttttttatataaagaagaattacaaacctggccaaccaagcgcacaacctatccctgtctgaaatagctttaccatcacaattccacacaacctaccatcccgaaccat

SEQ ID NO: 1282 - DNA, 465 bp, Glycine max
  unsure (1)..(465): unsure at all n locations
  Clone ID: PAT_MRT3847_101156C.1
atggaagacgcccagaatgaccccatggaccggcggcacgagnaagttgaggaggacgaagccgacaaggaaattggagatgaagacgaggacgaggacgacgaaggaagtgataattatgagatagtagctagcaaaccagcttctggagagtgagagaaacaaatatcaacgaaaaagtgcattaattagagaatggtgggttaatttgggttcaggattgtcggaaaatggtggtgtgggagtgaaatgtgataggggtggtggtggtggatggtgatggggttgtattgaagattttggaaatgcacttacttcagaattacacatgggtataggggtagccagtagggtgggggaatctaggttggaagtacttggtacaatagcagcatatagtcagtaagattatatgtttttttgttttgaaaaaagaaaataattaattattttttttagctaaat

SEQ ID NO: 1283 - DNA, 741 bp, Glycine max
  Clone ID: PAT_MRT3847_101157C.1
ccacgcgtccgcaataatggtgtcggcaaggtccactacctttctcctagttttcattttgcttcctctaagattctccagcgcacacacccaacaccaaggtaagaagacaccggtggttgccaaacttgaaacaaaaagaagtccagtgaaggtagagattcatcatggtgttccagcagttgctgagacagatcaacgaaacaggcttcttccaggaaggaagatgatgtctaaaggagtaatctcgaagttgattaatgcggtagactctgacaatggaattaacatggcaaagggtgtaaccaccaaaggaaaagcgcgttgcttgaatggaaactgcaaacgtgaaacggggaaaagaattttgggtctgaaacataaagacagaaaaaggagcaatattgggcgttctacgaaagcgaagatgtctggtttggtgcctctgaatgctgattattatgttccaagacctcacccacccaagaataactgattcacaaagttttaagcatatatacggaattttggcacacatttatatatagtttgttttagcttgattagtttttttcgtacttctaaccatttgctttgtatttgttttcagttttgtagtgcttacgtactgtttaggatagtctcacaaaagaatattaggtaattatacttgtacgtatattgagactttaaatgtgaactcagctacatgttctaaaatagagttctacgatttatatt

SEQ ID NO: 1284 - DNA, 3085 bp, Glycine max
  Clone ID: PAT_MRT3847_101158C.1
ctatatttcaaaaacccataaaagattttaccaccctttttattatcgccatcctttttttttcccccccacaaactattatctttttttcttctcaagcaatgccatcaaggttctgtgcagtgtttgtagagagagagagagaaaaagatgtagaaagctagaaagacaagagaacaagagaaaaaatattataggaagagagggagaaactaatagagagtcctatgctgggggactcagcagtgttgggaacaggaggaggaggctctggtgatgcagtggcagcagcaccacctgctgcatcaggaggagcacatgatggtggtgttgacggcggtgacggtggcggtggcggatcaaattcaggggatgatagagttgaggaaggtgagaggagctttggtgggaacaggtggccgaagcaagagactttggctttgttgaagatacggtcggatatggacgtggcttttagagatgcaagtgtaaagggtcccttgtgggaagaggtttctaggaagctggcagagcttggctacaacagaaatgccaagaaatgcaaagagaagtttgagaacgtttacaagtaccacaagagaaccaaagaaggacgaagtgggaaatcagaaggcaaaacttatcgcttctttgatcaattacaagcccttgaaaacaaccctgcaattcatggaaagcaatctccaacacctccaaagccgccaccacaaacaacagcactatcagcaacaccagtgtcaatagtggtaacaacaactacaactacaccatcatcaataataatgccacttccattgccaccagtgtctaataacaacaacaacaccactgttccatccacaacatcacttcctatgcctcaaagcattctcaacataacaccaccatcaacactgaacatcacaatcccttcttttccaccatcaaaccctacaacatacttcccaacacaaacaccaaaccctactagcaacaacaacaacaaccctccaagcaccatcaccccaccttccttccccaatttccccgccgatctcttgtcgaattcgagttcttcatcgacttcttcggaggaaacaccgacgacggaggccagagggcgcaagaggaagaggaagtggaaggacttctttgagaggctcatgaaggaggtgatagagaagcaggaggagctgcaaaggaggttcttggaggccatagagaagagagaacaagagcgtgtggtgagagaggaagcgtggagaatgcaagagatgcaaaggatcaacagggaaagggagattctagcacaagagaggtccattgccgcagcaaaagatgctgctgttatgacatttttgcaaaagatagccgaacatcagcaacaagaaactatcaatcttgaaccagcattgaataacaacagcatcactgttgttccacagcaaccagtgccacaagcaacaccaacatcaactccaacaccacaacaagcacaaacaacaacagttcctgaggccccacaagtgcagccattggtcccacaactacaacaacaacaacaaatagtggtgagtaatgtggaaatcaacaaagctgataataacggtgagaatttgatgatggaagcaagctcttcaaggtggccaaaagtggaggtacaggcactgataaacctgagaacaagcctggaaacaaagtaccaagaaagtggaccaaaagggccactgtgggaggagatctcagcgttgatgaggaaaatggggtacaaccggaacgccaaaaggtgcaaagagaagtgggagaacatcaacaagtacttcaagaaggtcaaggaaagcaacaagaagaggcctgaagattcaaagacatgtccctattttcaccagttggaggctctatacagggagaagaacaagggagaggggcagatgaagccggagagcatgatggcgccgctcatggtgcagccggagcaacaatggcctcctcaaacaacgcttgtggtaccgccagaagtaaccatgggagacacccagaatgaccccatggaccggcagtaccatgaggagaatgaggatgacgaggacgacaaggaaattggagatgaagacgaggatgaggacgacgaaggaggtgataattatgagatagttgcgagcaaaccagccacagctgatgcttccggagagtgagaggaaaaaatattgaccaaaaagggcatcaattaaagaatgatggatcaatttgaattcacatattgtcggaaaaatggtggtgttgggatgaaatttggtattgatggtggatggtgatgtgattgtattgaagattttgaaaatgcacgtacttcagaatgacacatgggtataggggtagccagtagggtgggggaatctgggttggaagtacttggtacaatagcagcatatagtcagtaagattatatgttttttttgttttgaaagaagaaataattaattattttttgagctcaataaataagttgatgagggagaggggaagggttataagatagagaaaaaacttcagacttgcatgagaggtgaggttcaacataaaatgaataagcaagaaaccttgattaatgttatggtactagctatataggttttttgtactaaattttcatgttcatgttgatgtaaatgcgagaaacgattaattgtggggggggtttgtctttattttgtttctttaatttccttttcaattttgttactcttcaaatgttgtcaatcatttttgtttcttttcctccttcattgtatattatcttgtcttgatgagttaaaaaaaaaaaaaaggggcggcaaggattgccggacaatggtggtatgggagtacaatgtgataagggtggtgctggtggatggtcatcgggttgtattcaagattttggaaatgcccttacttcagaattacacatgggtataagggtagccagtagggtgggggaatctaggttggaagtccttggtacaataccagcatatagtcagtccccccacatgtttttcccccccgaaaaaagacctcaattaattattttttttagttaaat

SEQ ID NO: 1285 - DNA, 2133 bp, Glycine max
  Clone ID: PAT_MRT3847_101159C.1
caaaatttcgatatgtgatgtggttttctgacagtcattttgatacatacatggtgtgttttccaaataagttaccaaatcaaattggttcttcaaaagcaacattttcttcctcccttatttcggttacccactcttggttgggaatgaatgaaggaagctggcagagcttggctacaacagaaatgccaagaaatgcaaagagaagtttgagaacgtttacaagtaccacaagagaaccaaagaaggacgaagtgggaaatcagaaggcaaaacttatcgcttctttgatcaattacaagcccttgaaaacaaccctgcaattcatggaaagcaatctccaacacctccaaagccgccaccacaaacaacagcactatcagcaacaccagtgtcaatagtggtaacaacaactacaactacaccatcatcaataataatgccacttccattgccaccagtgtctaataacaacaacaacaccactgttccatccacaacatcacttcctatgcctcaaagcattctcaacataacaccaccatcaacactgaacatcacaatcccttcttttccaccatcaaaccctacaacatacttcccaacacaaacaccaaaccctactagcaacaacaacaacaaccctccaagcaccatcaccccaccttccttccccaatttccccgccgatctcttgtcgaattcgagttcttcatcgacttcttcggaggaaacaccgacgacggaggccagagggcgcaagaggaagaggaagtggaaggacttctttgagaggctcatgaaggaggtgatagagaagcaggaggagctgcaaaggaggttcttggaggccatagagaagagagaacaagagcgtgtggtgagagaggaagcgtggagaatgcaagagatgcaaaggatcaacagggaaagggagattctagcacaagagaggtccattgccgcagcaaaagatgctgctgttatgacatttttgcaaaagatagccgaacatcagcaacaagaaactatcaatcttgaaccagcattgaataacaacagcatcactgttgttccacagcaaccagtgccacaagcaacaccaacatcaactccaacaccacaacaagcacaaacaacaacagttcctgaggccccacaagtgcagccattggtcccacaactacaacaacaacaacaaatagtggtgagtaatgtggaaatcaacaaagctgataataacggtgagaatttgatgatggaagcaagctcttcaaggtggccaaaagtggaggtacaagcactgataaacctgaggacaagcttggaaacaaagtaccaagaaagtggaccaaaagggccactgtgggaggagatctcagcgttgatgaggaaaatggggtacaaccggaacgccaaaaggtgcaaagagaagtgggagaacatcaacaagtacttcaagaaggtcaaggaaagcaacaagaagaggcctgaagattcaaagacatgtccctattttcaccagttggaggctctatacagggagaagaacaagggagaggggcagatgaagccggagagcatgatggcgccgctcatggtgcagccggagcaacaatggcctcctcaaacaacgcttgtggtaccgccagaagtaaccatgggagacacccagaatgacccccatggaccggcagtaccatgaggagaatgaggatgacgaggacgacaaggaaattggagatgaagacgaggatgaggacgacgaaggaggtgataattatgagatagttgcgagcaaaccagccacagctgatgcttccggagagtgagaggaaaaaatattgaccaaaaagggcatcaattaaagaatgatggatcaatttgaattcacatattgtcggaaaaatggtggtgttgggatgaaatttggtattgatggtggatggtgatgtgattgtattgaagattttgaaaatgcacgtacttcagaatgacacatgggtataggggtagccagtagggtgggggaatctgggttggaagtacttggtacaatagcagcatatagtcagtaagattatatgttttttttgttttgaaagaagaaataattaattattttttgagctc

SEQ ID NO: 1286 - DNA, 153 bp, Glycine max
  unsure (1)..(153): unsure at all n locations
  Clone ID: PAT_MRT3847_10115C.1
ctcgattcggctggggaaattggtgacagaattaccgccctacatcaactcgtgnnnagcgcccccnatttgcggggggaaanaggacacctgggcaccaccggcctttttttcctcggtcttattagaagctattggctatatcagattcct

SEQ ID NO: 1287 - DNA, 1057 bp, Glycine max
  Clone ID: PAT_MRT3847_101160C.1
cttaactgccatatcagaacctccaaaactcatttgaatatatccattttgtttcctctcattaccttcttttttctaattaaaaatgaagttttttaatcttctgaaaagcagacatgtcagatcctcctcctcttcttcatcaagggcctggccatcctgccaccaacccaaaaccctctcttttagagtcaccaccaccaaaattaacaatgaggaagacaataacaacaacaacaacgtcgtcaacgacgttgttttgaaagacattaactcagcgttagtgtcacaaactccagaatcgtttttcaccgagtctccggactcggcaagcttctcaacaacttccgagttgtctcgtggcatggaccccatagaagcggtgattcgcggcctgcgttcggatcgacttttcttcgatccggacgaggcaagctgcatattagaggccaaaccgacgacgacgagcctagagcctttcaaaaacagcgtcgttttgacgatggattcagaggaccctcacgtggatttccgcaaatccatggaggagatggtggagactctcggcgtcgaaaactgggagagtctcgaggaccttctgtgctggtacttggcaggcaaacaccaagagcaatcacgagtatatcattggagcattcgttgatttgttgttcgatctggctgttccaaattcaccttgttcacaagacgatgacgaaaatcttcattctcactctcattctcgtccttcttctcctttatcgttttataactcttttttttctccctcatcctcttgcagcactccctattgtataaaaggtgaagtggaagaggaagaggttggtgcttgtagttcttttttttctttagcgcagcttaataattaaggaggccggagattacacctgaagatgaagctgcttcatcttttaacaactgattttaatggtagtgaagtactgaattgtatgtacgtaaaacaattggcacaggaaaaatattataattactaattattgacatcaaattttaattttatttgcatttttgttgc

SEQ ID NO: 1288 - DNA, 563 bp, Glycine max
  Clone ID: PAT_MRT3847_101161C.1
cccgcgtccgcgtgctttcaaatcagttattgtgggggaacaaaggtggtaccttttgaaaaactggagtcttttgggtggttggttttgtggtcaccaatactattgttcttcccccccttggcaactttcttagatgaaggccatgcccttgccttttgaggaatttcaagggaagggagtgttggatttctcttctgcctcagatttattttcagtgcttttgcatcatccacaaccaaagtggaccacagacaaagcggactattgctatgtgggcagcagcactgagcccacctcagttcttgactccagaagaagccctagccctcccacttcctcctccacaatgtcctcttctcttggcagcagcagcaacaacagcaccaacccaacaccaccctcaggcaacaacaacaacaaccctcctcaggaatccagccctgagaaatgtggcatcaggatggaggactgggagggtcaagatcaatccattctgaggctcatcatgggggatgttgaagacccttctgctggattgagcaagctccttcaaagcactg

SEQ ID NO: 1289 - DNA, 397 bp, Glycine max
  Clone ID: PAT_MRT3847_101162C.1
tttttcttctttcttttgcacattcacatgcgtgccttgaagagagaaccaatatatattattgtaaaacataccccccacacaacgaactgggatattattatttatataatgataaagatgaattagcttccaagttcagaaactgggcatgtgtgattagatgtatgcatgcgtcggaataccactcatttggcccttaattagaagactaaaaccatcttcttataataggtgcccaaaaacagccatccatgcatgagaaaagaaaataatgtatgcaggccttgaaaaaagggaattttttttttaatagaccaataaatattggtcttcacattaaaccaattaatgtttgagacaaataaaataactggggcgattaaatttttggggt

SEQ ID NO: 1290 - DNA, 2139 bp, Glycine max
  Clone ID: PAT_MRT3847_101163C.1
ccggtccggaattcccggggcgaccacgcgtccgatcccctcatggtgtcaacatctgtgtgccctggtgtgttcacttctcagcagcagcaggagtttggagtgggggatgagaagcctcaggttattaatccacagtttatgttgaaccagaaccaagttcagttctcagagaatccttctttctttgtgccattgatgtacccccaggtgcaggtgcaggagcaacaggttttctctcctccgcatcaatcgaaacgccctctctttgacacgattggtcacaattttcaggctccaaggttgccccttttggattcagggcaagaggtgtttggtaggaggcagcaaacacagctgccattgtttcctcaccatatgcaacaacaacaacaacaacaacaatcaatgggtttgccatctgctaaacagcagaaggtgagttccaccggagacgatgcaagccaccagtttcaacaggctatatttgatcagttgtacaaaactgctgagctcatagaagctggtaatccggttcatgcgcaagggatattggcgcggctcaatcaccagctctcccctataggtaagccttttcagagggctgctttctacatgaaggaggctttgatgtcactgcttcattcaaatgctcacagtttcatggctttttcgccaattagtttcatactcaaaatcggagcttataagtccttttctgagatatcacctgtacttcagtttgccaattttacttgcaaccaagccctcattgaagctgtggaaaggtttgaccgaattcatgttattgattttgatattgggtttggagtacagtggtcatcttttatgcaagagcttgccttgaggagtagtggggcaccttcactcaaggtcactgccattgtgtcaccctccacttgtgatgaggttgagctcaatttcactagagagaatttgatccaatacgccaaggacatcaacgtgtcattcgagttaaatgtttttagtattgaatcattgaactctgcttcatgtccactgcttggtcaattctttgataacgaggcaattgctgtgaatatgccggtttcaagcttcacaaactatccatcgttgttcccttctgttcttcattttgtgaagcagctcaggccaaaggtcgtggtcactttggacagaatttgtgatcgaattgatgtaccacttcccaccaatgtagttcatgttctccaatgttattcggccttgctcgaatctctggatgcggtgaatgtgaatcttgatgccctccaaaagattgagaggcatttcatccaaccagccatcaagaaaattatacttggccaccaccattctcaagaaaaattacccccatggaggaacctcttcatacaatctggattctctccattcacatttagcaacttcacagaagctcaagctgagtgtctagttcagagggcacctgtgaggggatttcatgtggagagaaagccttcatcacttgttctatgctggcaaaggaaagaactcatctcagtttctacttggagatgctgaggagcagcagcagaagctaattaccttatatttttaaaggtgcatggtaacttacattgcagtttatgtaattgtttgtgtaatttttaggcttattgatgagatccacacccaaatgttttcttaactacatgggttggaatctatcattctatagttctattactagtacgtcactttgaacatgggtagtaattatgcctttccccattcccatcatctaagatgagtaactgtttctttgttatcttctagacaaagcaaactgcttagtaagaaaggaacaatttagccaagaatgcagcctctattttcttcttcttggtttattatattctttcttaattaatgtatgatgacctgaatttgggatacgtgattttaatatgcagcatgaaaatcttgtgccaattcaattatccaaatattagtttttgcgtggtttgagtgaaaagctggaaagattataattggttcatttgtagtctttaaggaaagacacccaaaacaaactcatgtatagtacttttgtttgtaatttaagaatataattcgttgtttgagtgttgatttata

SEQ ID NO: 1291 - DNA, 375 bp, Glycine max
  Clone ID: PAT_MRT3847_101164C.1
tggttggaacctttgagctgatttatgtgcttgtccctctcacagctcacatatctaaatttcactctttgatttcgccttttaggtgcacttgctacgacacgaggaatgcttaagattgaactcaagagagttagtctttaaatccgtcgcgaactagcagggacttgctattaaggtcaggaaatttgttagtcaggggaaggtactaaaagatttcattaagttaaagaggttcgtaagcgtacattctgcccacacggatgatcctaagtaggctcccaattaataatacatcgtaaataaagtagcgcacgtcgcgggtaaagttatccgagttaaacggaagattacgctcgacgtctaaaaagtatt

SEQ ID NO: 1292 - DNA, 2980 bp, Glycine max
  Clone ID: PAT_MRT3847_101165C.1
ccacgcgtccggaagaatacattcattcatctcatggctttcttcttcttccctcatcacaccttcttcaactgtttcaatctcaacacgccacagaagtatcagatagaagaagaaaaaaacaagctttatttttagagggtgcccaagttgtttgttcttttgtttttcctgcagcactctatgtgtttgttcagtgttcctcgaagatttgtattgtccccaaaacaaaaacaaaaattcagcctttttagctcttccaacccgaaatttcttgttttttttatgtgttcttcatttggggtggtttaaatttgcttaatttgtaatcttttttttctggggtgggttgtggggaaataaaggtggtaccttttgaaaaactggagtcttttgggtggtgggttttgtggtcaccaattttattgttcttcccccccctaggcaactttcttagatgaaggtcatgcccttgccttttgaggaatttcaagggaagggagtgttggatttctcttcagcctcagattcattttcagtgcttttgcataacccacaaccaaagtggaccatagacaaagaggactattgctatgtgggcagcatcactgagcccacctcagttcttggctccagaagaagccttagccctcccacttcctcctccacaatgtcttcttctcttggcagcagcaacaacagcactagcaagggtggtggtggcacctcagccaacaccaccaacaacccaacaccaccctcagactacaacaacaacaaccctcctcaggaatccagccccgaaaaatgtggcatcaggatggaggactgggaktgccaagatcaatccatcctgaggctaatcatgggggatgttgaaracccttctgctggattgagcaagcttctgcaaagcactgcctgtggctctcaaagtgctgatttcaatgctggatttggtgttgtggatcaacaaggattgaatatgaatatgaatatgaatatggtgggtggtaatattgacccaaattaccctgctggtttccctttcattgctgagaatatggatggccagaatgccaaggctggttctgggactggccaggtttcagaatctgttgttttctctgccaacaatcctctcatggtgtcatcatctgtttcccctggtgtgttcacttctcagcagcagcagcaagagtttggagtggtggatgagaagcctcaggttattaatccacagtttatgttgaaccagaaccaagttcagttctcagataacccttctttctttttgccattgatgtaccctcaggtgcaggaacagcaggttttctctcagcatcaggcgaaacaccatctctttgacaccattgggcacaattttcaagctccaaggttgtcccttttggattcagggcaagaagtgtttggtaggaggcagcaaacacagcttccattgtttcctcaccatatgcagcaacaacaacaacaacaatcaatggttatgccttctactaaacagcagaagggtgagttccaccggagacgatgcaagccaccagcttcagcaggctatatttgatcagttatacaaaactgctgagctgatagaagctggtaatcccgttcatgcgcaagggatattgggcgcggctcaatcaccagctctcccctattggtaggccttttcagagggctgctttctacatgaaggaggccttgatgtcactgcttcattcaaatgctcacagtttcatggctttttcgccaattagtttcatttttaaaattggagcttataagtccttttctgagatatcacctgttcttcagtttgccaattttacttgcaaccaagccctcattgaagctgtggaaaggtctgacagaattcatgttatcgatttcgatattgggtttggagtgcagtggtcatcttttatgcaagagattgccttgagaagtagtggtgcaccttcactcaaagtcactgccattgtgtcaccctccacttgtgatgaggttgagctcaatttcactagagagaatttgattcaatacgcgaaagacatcaatgtgtcatttgaattcaatgttttgagcattgaatccttgaactctccttcctgtccactgcttggtaaattctttgataatgaggcaattgtggtgaatatgccagtctcaattttcacaaactatccatcattgttcccttccgttcttcactttgtgaagcaactcaggccaaaagttgtggtcactttggacagaatttgtgatcaaatggatgtaccacttcctaccaacgtagtccatgttctccaatgttattcggccctgcttgaatcgttggatgcggtgaatgtgaatcttgatgtcctccaaaagattgagaggcatttcatccagccagctatcaagaaaattatacttggccaccaccattttcaagaaaaattacccccatggaggaacctctttatgcaatctggattctctccattcacatttagcaacttcacagaagctcaagctgagtgtctagttcagagggcacctgtgaggggatttcatgtggagagaaagccttcatcacttgttctatgctggcagaagaaagaactcatctcagtttctacttggagatgctgaggactgaggagcagcagcagaagctaattaccttatatttttaaaggtgcatggtaacttacattgcagtttatgtaattgtttgtgtaatttaggcttattgatgagatccacacccaaatgttttcttaactgcatgggttggaatctaccattctgtagttctaatatttactagtatgtcactttgaacatgggtagtaattatgcctttccccattcccatcatctaaagatgggtaactgtttctttgttatcttgaacacaaagcaaattgcttagtaagaaacgaacaatttagctaagaatgcagcctctatt

SEQ ID NO: 1293 - DNA, 831 bp, Glycine max
  Clone ID: PAT_MRT3847_101166C.1
aaggtgagaattttggagtgcatcaataaatagggcagatatgtataactacaacaaaaacatggtaaaaggagctagctagccaacctgtcaacctttttttcaatttcataattcaattcatgcaatgatatgctcccttgcagctatgacaaaagctgcttcatctggtgactcggcttcatatgatggcagggcaaccgttggtacagattccaggcaaacatatctctatcatagatccaaaggataacctatcatcttagttacaacagatgacaacattatgaattggaacaaaagatcagacatacatggaataacaaaaatctttgaaagttactgactccaacatcagaggacagcaatattaataaactatttaactaattatgaaaatcaataaaataaaaaagagatgagatctagttactcaaggcatggccttctaacaagccaaatttcatgaagaactttttcctattacaatccaacatttcactcaagctacaatttaaactcctctcctttagaagtttgtatcggggctctattcttctcttcaggccatgccgaaagaagcaaggataatcaatgacttcatcaacttgtctccccattacatctactaaaaacttgatcctcggttctaacgaattctgaatgctcttgatcagaataggaggaaaaccaaccaccaaagcaactatctgtctgtcttcaaatccacgtttctttagatacgcataattgggtaccaaaagcttgttcacatctctactcaagattcctgggaagctcacagccaccgcctgaagatctgcctcactc

SEQ ID NO: 1294 - DNA, 297 bp, Glycine max
  Clone ID: PAT_MRT3847_101167C.1
cccccttaaggccatttttctttttccatttaaaggggaaaacgaaatttccggaaggggaaactattctcaaataaaagggaatgttcatttttttgggattaaaaaaaccctccttatatacaagggaaggttatcgcctttttttctcattcccctttaaatatgaattacatgccctacaaccctacgtaacaaattcggcgttattatactgtttgaccccgtaatatttgtcttgaaagacaggactctaaattaaagctcgctaaacaaaggaaatatataatgcttcca

SEQ ID NO: 1295 - DNA, 206 bp, Glycine max
  unsure (1)..(206): unsure at all n locations
  Clone ID: PAT_MRT3847_101168C.1
gcctgccgtaccggtccgaatttcgggtgggcgtacgcnnnnnncccacgacgtccgacggactggtacaagacgacagaaggcggcacangtatagagagggagggagcataaacataggggcgcctcagagacgacaacagaagaacaagtcatagatgtgttgtgtgataacgatgactgtgtatatatcttatcagtgggtg

SEQ ID NO: 1296 - DNA, 440 bp, Glycine max
  Clone ID: PAT_MRT3847_101169C.1
ggaattcggcacgaggcaacaatacttaattccatttcaaccacttagaaaagcctcaagagttcaagaacattattcggggtatgatggaagaagctggaaggcctaatgttgcagatttctttcccattcttcgtccacttgaccctcaacgtgtccttgcaaggaggagcatttatattaagaagttgtttgagattatcgatggaattattgaagagtgtgttcaagagcttcaaaaactgactccatggatgtattggattcacttcttaacaacaatgaagaaactggttctctgttgagtcgcgatgagacgatacacttgttcatggttcgtatttcgttttccaataaataagctttataaattataatttacttatttttctagtatggttggtataaagtttcaattctaagttatcaaattgtatgaa

SEQ ID NO: 1297 - DNA, 282 bp, Glycine max
  Clone ID: PAT_MRT3847_10116C.1
ggcggccgaccttttttttttttcttttcttttttacttttcattttttttcccccacgaccccattttaggttgcgggtaatcttatacctcacatactcatgtatacatccatgttttacaaacaccaatttctcttttcatattaaaatacacaaatttctctaaacaatatctttataatacaaaaggtttctcatatctatttatttacaacccccatcttcccaaatctttattatatgccccttttacttccaaaattttattttgtccccaaat

SEQ ID NO: 1298 - DNA, 271 bp, Glycine max
  unsure (1)..(271): unsure at all n locations
  Clone ID: PAT_MRT3847_101170C.1
ctcattaattgcaagaatggcacttcgttgcttggtgatgtccctntctgttctcttcactcttggtcttgcgagagaaagccatgccaganacgaagatttntggncatgctgnttggccaaacactcncattnccaagttnattgcgagatcttctaaagcctggccctggcaagtgttgaaatcgatgattcancctatgncaaattgaagnnacacagtacccgaaaaccttcttctatnangaagacctncatccaggcaaaacat

SEQ ID NO: 1299 - DNA, 468 bp, Glycine max
  unsure (1)..(468): unsure at all n locations
  Clone ID: PAT_MRT3847_101171C.1
gaattcggcaccagctcaagccttatcagcaattcaacatcttctttacatacagtaagatatgaattcccaagcaacaagcagacaaaagcagttgcagggtccaaagcctgcttctctaatgattaacagaaactccacaaagatcaataagaagcagaagcagcacctctcacatcattccccagttatagtgcatttgaaatctcccaaggtcattcacgtcaggcctgaagaatttatgagtctcgtgcagcagctaactaggaaccccgtatcagcagcttttgctgctcccaaaatggacaagagtagcaccgtggttgaaaacccaatagaggattttactggttgcataggtcacacttccaatgttcctgttgacttccaagctaaaatgcactttgtagattttttttaatcgctccatcagtttttcnngcgagctgttgtgaatgatatgtccga

SEQ ID NO: 1300 - DNA, 349 bp, Glycine max
  Clone ID: PAT_MRT3847_101172C.1
aggagataagtgagtctaggcacaagacttccttccaacagataagggtagataccctgacgttattgtgaaggccactctgggaaatcagaccttgatgactataatctctcttagcaggccataattccaatgtggaacgagaattttatttttttggcgggggacccataagatgaccctctgattctgagtgtggaaaacacaatttcccctaacaaagaggattccatgtccaagtgtgctgttccttatcatatggaggatcggagactgtatcctaagcctgttaatactaaatgatataatattgaaaaccacattgtttttatggaagggctaaagaaaa

SEQ ID NO: 1301 - DNA, 225 bp, Glycine max
  Clone ID: PAT_MRT3847_101173C.1
ggtgtatccaaaatcctgtactactatattggtgtctgatgagaatcaaggcatgtagatctttagggcttcgatagtggaatcgctacagcatttccgataatactaacttgcagtagcgtatgcactgagatgcctcacaaatgtagatgtgattccctattgtcgctcggctatagctcaaagcatgtgtacatcatccttcgtaaatatagcggcttagtg

SEQ ID NO: 1302 - DNA, 427 bp, Glycine max
  Clone ID: PAT_MRT3847_101174C.1
gcacgagggtaaacttgcatcagcatgtccaaactggaagtactagctctcaagtaaaaaattatgaagcaagaagtagatggtatgtatgtgatgatgatcatatcattttgtgatgttcaatttttcaacttactaatgtcatgtcatgttcaatttttcagaagaagagggtaaaggaatttttaacactgaatgcccaaaagtggagcagttaactcctaccactctaaagaaagccacaactttcaggcttgtcatgaagccatccttcattaatggagagtacctggtgagcatttgattaaaattcaatacatgcattctcttgattagcttcattcataaggatgttatgttccagcagaaatatactcttagttcttatttttaggctgtaattatccaccaaaaaaaaaaaaaaaaa

SEQ ID NO: 1303 - DNA, 296 bp, Glycine max
  Clone ID: PAT_MRT3847_101175C.1
tttactgctaaataaagaaacttattatttccattaacatattacatgtaatttgtgtaaatgataaagtgaaaagttggtaatgctaaacaacagatggcgttcttcctaataaattattaaccgtttatttttcttaaaaacttaaaagcaagtcgcgaatagtggggagaaaattcaaatcaaaagccatatccccaagattctgattctctgaacatttttgaagattgagtgagagaagtatcaaacacttggttttcatcactatcatcatcttcattaatcagccaata

SEQ ID NO: 1304 - DNA, 559 bp, Glycine max
  Clone ID: PAT_MRT3847_101176C.1
gccccatagattatactttcaccacattatgagatctaggccctaaagcttgccctcccctacacgggataaggaaagtagtgcccttccctgactcactcattcacgtcagggaaccttttctcttatctataagactgcacatgctccactatcgatactgggcagcatacttatactctttaacagataatggcaggctacgatgagacactagccaaacgcgacagccggaagctatcggtttacagacgccctgaacaagaaggccccttgtagctggacaggctcatgttcttacctagtacgacagccgggagtgcataaacatcgtcgatgcatgaagtggccagccacacactcctggaggtaatgcttttccccaaccatagtacgtcactgcccaaccgaccggcttcctttatgaactattaaggataatccagtggagatacaggaacagggcctggcggggcgttccacttctcatcattgctgagaacacctcctagataatcctcccatcctgatctggttccacctcagacattatctgctt

SEQ ID NO: 1305 - DNA, 181 bp, Glycine max
  Clone ID: PAT_MRT3847_101177C.1
aagctcggaattcggctcgagcagccgtgaaccaggttccgtgcccgatgaaacgacgacgccggttgattcgaggaagcagcacaagcaagaggaggcgcgccacgccagcagccggcgagtgcctcgccagccgccaggcactcccgacaggcccgccaacgagctgaacccagcgaaa

SEQ ID NO: 1306 - DNA, 138 bp, Glycine max
  Clone ID: PAT_MRT3847_101178C.1
catgaccatagtcaacgaggagtcaatagtagaggaaacatcagagcagcggaagtggagacctattggaggatttctgcgagatcaaccctgctgatgaggaatgcaaagtttatgaatagaggagacctccttttc

SEQ ID NO: 1307 - DNA, 312 bp, Glycine max
  Clone ID: PAT_MRT3847_101179C.1
gtgagcggttgaatgcgacacatggcctaatgtattgaagctgcatgtattgaacgttgccatctgaacttctcttggacttgcagggcaccattctgtcgccacatatgcgcccttgaagccataccgcgcacctggcctcacgaaccttgctcatatctacagggatctcctggtgtgtctggccacaaattccatgtattctctaccatggcagctacttaatatctgtgccggcagcgtcacagccgagactacagctgcaataccttgctctacatatcaccccacgttcacttaggctgcgctcgg

SEQ ID NO: 1308 - DNA, 410 bp, Glycine max
  Clone ID: PAT_MRT3847_10117C.1
gcttatgctttatttattcaagagaatataaatgtcattcctgtctttaattgcaaacccaaaaggaattgttggcatttagttacgcgcctaataagactcctctcgggatagaaaactataaataaggctgagcgcccttgtttttaattctacaaaccgcagcccttgggttatgactgcgatgaggggtaacatttttagaaagcggcccccagtggtgcttcacgtcttggcccatcacacccatttgcacgggatgccaaccttcaaggctcccttcgagggctcggggacttgaatttcgtccgaggcacgctgggcatgaaacgtacttgcaaatcaacctaaatttacaccggcacctgaaaactccaccttctgtgcggacgccagtctcgacccgggaa

SEQ ID NO: 1309 - DNA, 246 bp, Glycine max
  Clone ID: PAT_MRT3847_101180C.1
ccctctgtggtgtattttggggctaacctaattgccattgctgctattggcatgctgaactactgaggattctgttcatactctatagatcgtacccattgattaattgtatttaaaattttcatatattattccaaatagaaattgcagacgtaaattaaaatgcttgttacccaaggtaatcataaatggcatgcgtgtgaaattgtacctgacgattgtaaaatttcagatgttagtcacttt

SEQ ID NO: 1310 - DNA, 304 bp, Glycine max
  Clone ID: PAT_MRT3847_101181C.1
gttaaaaaaatgactattatctctaacctttaacatcaaaggcatcaacaacaatatatatcaatatccacactaaaatgaaacagtcatatcacatcaatgtagattataaaatataaaaaaccaatccaaagttccaaaccaatttttaaaaaatgatccgagaccacagtttcacctgcaactcaaccgcaattgtggccacttctaaattaatttaactcaacaaaaaatgcaattgcgaccacaaaaaacgatcaacaatgaatgaaaagatcaatttaactcaaaatcagacacacac

SEQ ID NO: 1311 - DNA, 657 bp, Glycine max
  Clone ID: PAT_MRT3847_101182C.1
ggtccatggaaaaatttaacaattctcctgatgccagagtcttctttggctcaatcaaggcatgtggagagggtatatcattggttggggcttctcgaataattattttggacgttcatctcaatccatcagttacacgtcaagctataggtcgtgcattcagacctggccagatgaagaaggtgtttgtgtatcgtttggtatctgctgattctccggaagaggaagatcacaatacttgtttcaagaaggaattaatttcaaaaatgtggtttgaatggaatgagtactgcggtgatcgagcttttgaagttgaggcagttgaggtgaaagagtgtggtgatctatttcttgaaagtccacttttaggggaggatgtataagctttgtataaaaggtgatcaagagaatcagagtctgcttatccatattacagatcgagagaatcagagttgacttctgcaagcttggaatcctctctcctttatctccatgtcttgtacctaaatttcatatatatcagctttagtgctatacttcatgggcattatttttgctgttacactatattactatactgagatataacaggttccatctagatacttctgctttataaagtctatgaattagcacaatgaactgtgtacatatata

SEQ ID NO: 1312 - DNA, 1431 bp, Glycine max
  Clone ID: PAT_MRT3847_101183C.1
gtgcgaatatgttgcttttgtgataaacctctctctcttatcgaagaacctgagcgcaaagcagcagaaaatgggttttgtgatgcaatgctcaagctatggcacttgtatttctatttgtatctctcatcgtttcccccaaacccctctatcttttcacgttccagcttaccactggaaccgattcaagagtgcacgaaggaatcagaggatgatggttctttgtagcgtggacgaccgaagctacaacctagattccccgaggaaaataaaaattgtggaacacgtttgtctcctcaaagcaaagcatgatttatctgaagaggaagagaacgacatgcttggttatttgtacacaacgcagtaccaaatgggcggtgttgttgcaatttcattagggcgcatttcttctccaaatcctgagcgctacacgcatgctctctttatgcggtttcagaagaaggaaaatcttgaaaagttttacgagaatcccttttacatgatgatactcaattttactggaaggacctactgccatagataatgtaatgtggattatgattgagtagtggctgacgaaatgctttccatatttcgcaaaggagaggagttcaaccatggagtggagtttgtgcttctgatatcatttaatgaggatgcactgggtaaccaggcagagcatgcattagcctctctggcatcaatgatgttggaatctccttccttgatagtccaatttacacatggtttgaattttagtccaagctctaaggaatatactcatggagttgtgattcgatttcgatcagttgaggcatttgagatatttataaacagcaaagagtacaaaaatgcatggcattataagttccagcctattgtccacaaatctttttctcttcacttctctgttgatccagtgggaactgaaattatgtagtgaggatggtttgtggttttcaagaatagatgcggcttggtttccactttttagaaacaagaatgaaggtcatctttcgttggaattatttcattctgatgaatcagatagctttgagaattgccgagacgatacaatttaggtactgctgtattaaacttgagcttcagatggataaaaactgagcttttaaattatgttgtccaagaaagcaagagtcctctttggtccttttactctggtggagtgccaactaaaaatactgcttaaaaaaaggatgagaccgttgacttctctatcaattgggtctcttatgccgctcatttagagttttgataatttaattgtgtgataataattgtgaagacttgtgagggctttcatatacactgtccctggattagaatgacagctagtgctggtgcctattttccgattccccccccccccttttccccccccccccccttttacccttcctcttccccccc

SEQ ID NO: 1313 - DNA, 257 bp, Glycine max
  unsure (1)..(257): unsure at all n locations
  Clone ID: PAT_MRT3847_101184C.1
gagaaatcacttatgcacacagatctacattgacttgatgggtacctaaaatacataataactaaatgcttgaggaataacaagttgatttgtagggaaggaattgttaagcaacttaaaattaaggagaccttatagagcttaggacagtgtttgatgcccacttagaancaggtgtggagtactactggcaaggttgcttactgtttttcattcttttgcttatggtcctgtgcccagttatatataatctgtag

SEQ ID NO: 1314 - DNA, 390 bp, Glycine max
  Clone ID: PAT_MRT3847_101185C.1
aggatgtggctcaaggtctattccacatgtccctaaccgtcctttcatattgactgcttcttcttactatggggcgcctcctgctctaccataaggaacttaacgctgtacattataatgtcatggctcctccattgtccctactatactacatagtcaacactaaaccctattttctagtgtattgactaattattcaccctacttctaagcatcacaacggcgcatagaagacactcgctctcaaacaacctcacaatattactctaaatatctactggtgtcagtgttgaacgtcctgtctgatttgtcacagaatgtggttctatactgcaggatctctcacctaaaggtcttcattgtatttttgagcgccttcgtggaattctt

SEQ ID NO: 1315 - DNA, 337 bp, Glycine max
  Clone ID: PAT_MRT3847_101186C.1
ttttattttttttttttttagcgacatcaaagtttgggggtcattagtgcaattaaacctaacactgttttttgtttgatacaatagggtatggcctcatccaacagatcatattacctcgcatagtgggcaacaacacaagttcctatatgaaatgccttaaaagaaataattaagcaagaaaaaaaaatgcatatatacaaagataagtgctcaagtttatgaggtgacagtttagggggcttaatcaaacaaaaacgagtggaaatctgacaagtcaaaaccttcatgccatagtgcttttctattatgtgaaccttcatgacctacttgaaaa

SEQ ID NO: 1316 - DNA, 263 bp, Glycine max
  Clone ID: PAT_MRT3847_101187C.1
tacggctgcgacgacagaaggggacgaaaaaagagatgcatgccatgtgggtctccttgaaggataatgtcaaatgcggaaacaagctcaacgatgtaatcaagcagcaaacaaatgcggcaaaggaagtggctatgttgcagaaaagcgagaaaatgaatggatatgatagacctctaatggaaactccaactactagcctagtggtttcaagaccaagcaacgcactgggtcggcttcatgagctgagtgttggagaccca

SEQ ID NO: 1317 - DNA, 1508 bp, Glycine max
  Clone ID: PAT_MRT3847_101188C.1
gctcccgagcccagcttgcgagcgtaaccgtcgcttgctcccatttccgtttcgtaactttcggttcctcccattttccggttcaataaattaaattaaaaaaaccgaaccggcggatctcggtggtttcatggaggctcatggcggagggctccgtcgcatccttgtgctcgccttctgcgtcgccggaatctggtccgcatacatctaccaaggcgttcttcaggaaaatgtgtcgacgaagcgattcaacggtgaaaggttcgagcaccttgcgtttctgaacttggcgcagaatgttgtgtgtttaatctggtcgtttatcatgataaagatgtgggctagtggaaattctggtggtgctccttggtggagttattggagcgctggaattaccaacaccattggtcctgctatgggaattgaagctttgaagtatattagttaccctgctcaggtgctggcaaagtcctccaaaatgattccagttatgctgatgggtactctggtatatggtataagatacacttttccagaatacctttgtacttttcttgttgctggaggggtatcaacatttgcacttctaaagactagctcaaagactatcagcaagctggcacatccaaatgctccccttggatatgggttgtgtttcctgaaccttgcttttgatggatttaccaatgcaactcaggattctttaaaagcaaggtatccaaaaacaagtgcttgggatattatgctgggcatgaatttatggggaaccatatacaatatgatttacatgtttggatggccccgtgccagtggatttgaggcagttcgcttttgccagcagcatccagaggcagcatgggatatttttctctactgctgctgtggtgctgtgggccaaaatttcatcttcttgactataagccggtttggctctttggctaacactaccatcactaccactcgcaaatttgtaagcattgtggtatcttctctattgagtggaaatcccctctctacaaagcaatgggggtgtgttttcatggtgttctcaggattgtcttatcagatctacctcaagtggcagaagttgcagagattgcagaagaaaagaaaagctgtgtgaagcccttcagcaattttgaagtcaaaacgttaatactatctttagctaatttgcccttacaaggttcaatgaaccagatttaggtttctgcaaaagaatatttgtaattttaattgaatagatactttttaagaacagagctgaaagtttagaccccattttctcattcattgtgccaatatttagttgcctgtattctactgaagagctagatttagttttatagcataatactaaggcaaatctatactctgtaaacatgattttcagactatctcatcttctctggtttatttagaagattatcctagtattgtgtagctgcaaaagtacctttctaagtagtgggatgagcaataaaagtagctttactaaaaaaaaaaaa

SEQ ID NO: 1318 - DNA, 371 bp, Glycine max
  Clone ID: PAT_MRT3847_101189C.1
aattaagttcatgaattgcttattgctagctatatggtgatcgacaacttcaaattttgagtctctcactccctcagttaaagctcacatcacattagattactatttgaaaccttcaagctagcgagtctcatatatctgttctttgtctctttactctttgttttcaaggattccttctaacgagcaaaatgtcggctaactgtgagaaaatggtagccatccctccaacgaccaaccaatggccacaggtggatgatcacaaggtcttgatgggttccaacggtggaagtagtaacaacaacaataataaggtattggaaaaaccaggtcaagatcagcttgtgcagcagcagcaacaacaacaagaa

SEQ ID NO: 1319 - DNA, 338 bp, Glycine max
  Clone ID: PAT_MRT3847_10118C.1
tcggaccaagccttccgttcgatttcgttccttaccctcgggttgatctgtgagaggggattgatagccctctctgtctctggtgctgcaattcagatcgctggcaactatttgttatacagaccatctgtcttaacatggaagcattgcttgcttgacggacacctttgtctcaaaggagttggaattttcgggtctgtctgcggattggagatttacagagcgcccttgcactacctgtttgatctcatcaccatgagacatactgatactatagatcgagctacacaacctaagatcaggttcttaacctgaacgatacaaataggttctgcaca

SEQ ID NO: 1320 - DNA, 112 bp, Glycine max
  Clone ID: PAT_MRT3847_101190C.1
tgagaatagaaggttttcttttgttaaatacatgttatttgtaaggtgtttattcattatcagatgtgatcatattattcataaggtatttatggatgtgattttgcttaaa

SEQ ID NO: 1321 - DNA, 269 bp, Glycine max
  Clone ID: PAT_MRT3847_101191C.1
gcatcttttgacgcccaccgccttattgagaaactacttgttcgtacagcacgctgaatcaaaattccccgatcaaaacaaatccgatgacttcactgcggataccggacttctccttagaccggtaagctaggcagctgtactgcccgccgtctcaactggacaataaatgagggatgaggtatacaaggggatctcgcgaggggaagaggaggatgcgtctgccgaacatctcatgcctttttcgcataccctaatgactcccgatc

SEQ ID NO: 1322 - DNA, 442 bp, Glycine max
  Clone ID: PAT_MRT3847_101192C.1
ccaccaccaccaccatgccttctttgacccacgcgcttttcatggcgcgtagaacacatctgacccgccaccccattcgatgctctcccttgacccggtacctaacgtcaacgcagttgggcctgggcacgggcccgggtacgggccaagcagacttctccttgtcccataatctgaatacgtgagtcggcccatggactttatcggctaacgaattggactcaacctcggaggacggatttagttctcattctccaaggatgacttcgtgagccggctctaccgtcggtctaggacagtggaaccgggttcgactgcatggtctaactcacgccggtgtcaagccgagggatgtcatgctgatctttcaaaggcgtaatactgccgaacgcgtcacagggagtaggagtttagtgcctatagcgacgacgtgttaggcgcc

SEQ ID NO: 1323 - DNA, 299 bp, Glycine max
  Clone ID: PAT_MRT3847_101193C.1
cggacgcgtgggcttcttgttcattcttcatttctctcttcccctctttacgcgttcttctggtctgtttcataatcgagctatcacaacttttatcttgataaatcccaccggcattgccatttacttctcccattccttcaaaatggcaaatcccatttcccccattgctctctttatcctacttctagccccctctgccctacccggccatgattactgacaagctctcaccaagagccttctcttcttcgaagctcacagatccggctacctcccccacaaccagcgcgtcaatt

SEQ ID NO: 1324 - DNA, 430 bp, Glycine max
  Clone ID: PAT_MRT3847_101194C.1
ggcttaaatattaatttttattattattaaagggttgattggtaaataccatctaaggaggagttggtgaatagtatccaaaggagaagacctgggaggtcccagagatgcctgccactagggacaacaaaagaaaatggagtacagaaaccttattcagtttcctatattctcttaggtggctcccaatagcataggcagtagcataggagcagattaaaaaaaagggtaaaattacaacaaaagagcttttctttttttaatattttggaaaaaaaaggaaggaaggaaaggaaaggaaaaggaaagggagttcctttggacaaacattgagtagcttctctcctttgacatccattcttttgtggtttctctttccacagcattgcagcaacaacaaacagtgacaaggactacagcaaaatcactc

SEQ ID NO: 1325 - DNA, 600 bp, Glycine max
  Clone ID: PAT_MRT3847_101195C.1
cgcgtctggtttctctcccaacattctcatctgggtcttcccaatttcttgatttgatctttctccctctcagaaactggcctcagccaagagtttctcctttttccttttcacctgttcagcattgatatttggttatacattgcattaggttgaatatcagtgttttcaatttgataaaagatattgattctgtaagtccatttgctaagaatcaaatcaaaaaagtatcttctaaatttgatagaataggatcaaaatttcgccatgagtttctctgaccatattccatcctttatgatgtcaccgccgtcgttttccacagacacggatgccattgaagtgaggcttcaattcccaacgaacaacgaatcattggagccacattcaccacaggatcaacccccttcgttcaagagggcaaggacctgtgatagcagcctctccaatgcaatggcatgccctccaaggatgattcagcaccctgcacttaacaaaggaacgagccacattttcttcaagacccgtatttgtgcaaagttcagagctggcgcttgtaggaacggcgagaactgcaattttgcacatgggcttgaagac

SEQ ID NO: 1326 - DNA, 535 bp, Glycine max
  Clone ID: PAT_MRT3847_101196C.1
atcttaacatagtctgctagaacaatttttttctaaagaaaatacatcaaattgaataatattaaatgacaggaaaaggagtaaacattatagaaacctcctttaaaaattaaaaactatttcaactttaaaatgaatgggtattaacagctcagggagcacatctgcttcttcaaaacaggcagagtaggaaaaaaatgttgctaatttttaagaaatcatataaatcaattttttgatcgttatcaaactattcataataaaattaacatattacaaccattcatacaaatgtttactacagacacacctgaactcaagcagtattaacatttcaatttattttaggaatgatgaaaaaattattccaacatttaagagaccaccattttggccaggcccagtggctcacacctgtaatcccagcactttgggaagccgaggtgggcagatcacctgaggtcaggagttcgagaccagcctgaccaacatggagaaaccccgtctctactaaaaatacaaaattagctgggtg

SEQ ID NO: 1327 - DNA, 304 bp, Glycine max
  unsure (1)..(304): unsure at all n locations
  Clone ID: PAT_MRT3847_101197C.1
gaattcggctcgtggtcgcgtgaattgggcaccgcagagctataaccatcctagtatgatcggcttgcctcataagtatcgtgatttgcacctaacatggagatgttaatgctcataagttggatgctgttgccttgaaaacaaaaaatgagagagaaaatttatatttttgccacgatgcacaacgtataagnccaagantaaaagtggaaatatgggaaatcctgagccattcaaaagtccaggttcagctcagaaggtaggccatcagtttgataatgagaatgaaggccatagtgaagtt

SEQ ID NO: 1328 - DNA, 250 bp, Glycine max
  Clone ID: PAT_MRT3847_101198C.1
gctttgaagagagccagtaacatggaaaagatcaacgaacatggccgctacataccttatatataacactgaagatctggttccacatgcattaaagagcaaactaaaggcttgatactgctatcttaatcacagacacaagggaactaggcatgctgaaaagtccttactcccttcgcagctaccaaagaagagaaatcattgtgccacaacacctaccaatagaccacgtagggctacttctacagct

SEQ ID NO: 1329 - DNA, 337 bp, Glycine max
  unsure (1)..(337): unsure at all n locations
  Clone ID: PAT_MRT3847_101199C.1
anatctngnnaaaagtcgcangcacgcgtacgtaagctcgggaattcggctcgagntggtgccttatcgctgtggttatcatcttcttcttcctctttcttagatctcttctttctctacgccgcacgccgaaaccatgggccggaaaaggagagggtctggtatcggaatcnatcttcggaaccaactaattnttgntccgtttnttggaacantancgngntgnaattaatggcnanggccnangggacnagaccaaggccnttttaannnnggattnattganaacggngggtttnatcggtnntccgggccangattcaanttnncantgaac

SEQ ID NO: 1330 - DNA, 729 bp, Glycine max
  Clone ID: PAT_MRT3847_10119C.1
ctgaaatggccgctagaagagtaactaaaagtgcagttaactggactgcattaagcgaaagggttcctgaacaccagcgtgcccaatttctagcgttcaaagctaaatctgatggctatctgaggcgtgtattggccaaccccgaacaaccaccagcgatagattgggcatactataaatccaaagtaccagttgctggaatggttgaagattttcagaaacagtatggagctttatcaattccttaccctccagacactcttaaatcccaacttgatagcttggagaaggaaatcaagaatgatatagaaaagtttaaaactgaatccaatgctcgtatttctgagtacaagaagcaattggctcacattgctagtctaattccatacgatcaaatgaccatggaagactatcgtgatgcgtacccagaagatgctattgaccctatcaacaaacccacattctggccccacactccagaagaacaacacgactatgttcataaagatgcgcaaccccaccactaattttttgaaagttgtaatactttcaaatgcagtaatttgaataacacaaacgataaactgctcaagacagtttaaacaaatactaccgtttatctgctgcatctgaaaatgtttttacttctcatgtactaagttatatagttgtgtctactacatttttcctctagaatttttgattattagaataaaattaaatacccat

SEQ ID NO: 1331 - DNA, 430 bp, Glycine max
  Clone ID: PAT_MRT3847_1011C.1
atcaagcgtgtggagcacggacatatttggattataatcgagccatttttatatgcgcttcaaagatcaatttttgcatatacttgggtgacattcaaagccacctatgctagcgcttcctaaatgatatcaccgcttgaattcaacccgcgttcactggaggaaatggccctataataatcaatattgcaagggaacggccagccaaaacgcaagttgcgtgcacaccatgcatattgaaattccaactgctcagatcctacagcagaaacactagtcgtgggcacaccaatcagtgggacatggtgaatccttgatataggtcggaaacattttccgatcttgaaaggagaagacctcagctactgttgtcttaaccaactactatattatgaactgaggatcacaaaatgtaacacgtcttttgccc

SEQ ID NO: 1332 - DNA, 235 bp, Glycine max
  Clone ID: PAT_MRT3847_101200C.1
accagcatttgaggactttccttattacttgaggtgattttgagattccattgcagtagaatgatataatatgacccaaacatggtgttattgatgtctctgtttcttttttcttttttcttttttaaccatttgaccctgcagaatgacatttagacatggtatatttgaatttatgatagtttattttgataaagttgggtgtcaaaggtgttttgaacatggatctctctca

SEQ ID NO: 1333 - DNA, 912 bp, Glycine max
  Clone ID: PAT_MRT3847_101201C.1
tcccacgcgtccgtacggctgcgagaagacgacagaagggggagaaatgaaagtgaagagaggaagcagagtgtgtgactgttccccaatttcctgtgcttagagtgaagaagcatttagaaaaagcaagacacgatgccttcggctcaagatccattctacgttgtcaagcaagaaattcaagaatctattgataagctaaaatccacttttcaccaatgggaaaacactgctgatgttggcgagcgatccagtctatcaaaggaagttcttgctagttgtgaaagcattgcatggcaggtggatgaattggacaaagcaatttctgtagcctctagagatccttcttggtatggcattgatgaagtggaggttgaaaaccggaggaagtggaccagtgatgctcgcacccaggtgagcacagcaaagaaagcagtgcaagctggaaagggcttaaacaatgctagtctaaatgggatgcacaaggaattaatgaggcttcctagttctcatcaaactacatctaaccaatatgctgcccaagataatgatgatttcatagagtcagaatcagacagcttactcaaggctgttatgacatgacatgttggcttactaaacagaaagtgctaagcaaagggacttgcagacaagtggatgaggactgtaagttgaatcacggttatatgataacattaatgttttccggaacccaaatttcatgaaagttttgcattttttttttaaattaacttagtcatcatcagttatcacaaatttcttttgttgcttcaatcttaactatccatgtgttttactgatgtgtttgttcattagttattaccacataaggttcatgaataactttatctttggaattcactgaacaagcagcttgagctcaatttttgg

SEQ ID NO: 1334 - DNA, 479 bp, Glycine max
  Clone ID: PAT_MRT3847_101202C.1
caacatcatacaatggcttgaaatcgatggtaattgaagaactgaggtcatattttcgtccagaattgctcaacaggatagatgaagtggtagtatttgaaccccttgaaaagtcacaggttcgtgaagttttggttatgattaatagctcactggtaatattaatagtcacttggtaggctcttagtatatcatttcagtcgtgtttgttagcaataattttgattttctttacagaaactaaatattcaagcacgcctagcagcttattctttctgaactatgatgacttagaaaatctagattatgattagagggtcgtatagtagtgaatagttaagctaagattttaagggagtatcaaattagttcttgaataacaatgaccagtttaatattatggatctatcagtgtgatctctgaatatgacaatccctgaatttggacatataaattagtccttgactttactgtacat

SEQ ID NO: 1335 - DNA, 398 bp, Glycine max
  Clone ID: PAT_MRT3847_101203C.1
ctgttgctttattattcaccctggaatttggttgattttattatgttttgaaaaataaggaaagagatttatttgttagcttaattgttttaattggcgaatatgtttttcttttcccttttttgcacagagtgaagctttgttcttagggtaatggattcccttttttgtgatgctagtggatgatttgactgattagtgtttagtggaatgaagaaccagaactagtagtaggtagagggaatcacttttggttttggatgtaaacttagaaatgtgcagcactgcacagaattgatatttgatcgtgggtcaaattgtcaaaatgtgcaaagaatacaaaggcacaggtgatatcattccattttacgttttttaacgaagctgttagtttcaat

SEQ ID NO: 1336 - DNA, 226 bp, Glycine max
  Clone ID: PAT_MRT3847_101204C.1
acgcatagctcgtaagataacagtgagtaagttagttattcataacccactatttagcggacgggatgctattagcagtgataggcatattcatgttgcctagaacttttctaaaggaagcaaaattgctcttaaatggcctatttacaatcttattcgtaaccgtgacatactttacatcgtacacatcaagcctttctgacgaagtgaattcccaaatcttctc

SEQ ID NO: 1337 - DNA, 144 bp, Glycine max
  Clone ID: PAT_MRT3847_101205C.1
tgtagtggtaagtgtaacacgtacgtgggatgtgtagttgatcttttgctcggtcgttgtagaggatccaagcatacgtacacgtgcatgcgacgacatagctcttatattgagtcaactctgtatagtttactgacgcgacca

SEQ ID NO: 1338 - DNA, 414 bp, Glycine max
  Clone ID: PAT_MRT3847_101206C.1
ccgggtgggggaggtgcctttttttgtggccgacctaaggggacactgtaactcaaaattatagaggaagacagcccagtatgaaaaatatagtagaatcatgtcaaacttggcattttctctttgcgcctaaaacattgagaattctaagaatggtactcgcgggggggatcacaacttttacgactggggtcaccccaaccttcaggaaaaaaatattcacttggcaaggtcgctttgcctccaatgcaagattggaagaaaaggccccctgttaatcgcctccccctgagcgttagccaagtgccccctttattaagatacttggaaaccaattggactctctggcacattttattggttttggacaagcttggtccctttcgacaagagcttgtccagagaaatattggg

SEQ ID NO: 1339 - DNA, 789 bp, Glycine max
  unsure (1)..(789): unsure at all n locations
  Clone ID: PAT_MRT3847_101207C.1
caggaagaagcactgcatgggtttcgagtgagcaactattttgaatacatggagaatttggagcaaaactaccgaccagtgctgctgcgagacatgcgcagcatcagagtgcagaacacatagatcaggagaagcacactcccattttatgtcctattcatttgtaaaggagacaaagcaacttgatggtgttctgtctacatctgtaagatcctttgtgcgtccacgcactgtaaatcagcactgtggggttgggaacagaatatattcatcttgttgtttgctcagtgtgtggaacgaagtgaggtcatttgtgaagtcccttgttctttaaatgtttagaatctgctctaggttatactttttattttatgtttggcttacaaagggatcaaagacattaatgtaaaacctaaatatttgaaactactagaagaaacactcttgaaaaatatgaacatagccaatggcttctgagtgagatcccaatagctgaggaaataaaagcaggcatagatagattgtacaacatacgtgtgaaataaaagaaagggaagctagggtataaaccatgtaaaatcctcgccaattattcaaccaatgaaggaataagatttagaacatgtgttgaacttaattactaaatagtaaaagaccaaaaagactccagtcaaatgggcaaagaaaggagcaggcccttccacgatgaagtagccattgtaaacaagcacatgaagcgaggctctctgccgttacccacctggagactgctcatncaaactacttcac

SEQ ID NO: 1340 - DNA, 363 bp, Glycine max
  Clone ID: PAT_MRT3847_101208C.1
atgggttccaacaagcctcgcggtcttcaggcagcgcgcaagctccgcacttcccgccgggagaaccgatgggcggacaagaactacaagaagcgcgccctcggcaagttctacaagacttcgcccaccggtggtagctcgcacgccaagggcatcgtgctggagaaggtcggtgttgaggccaagcagcccaactcggctatccgcaagtgtgtccgtgtccagctcatcaagaacggcaagaaggtcactgcgttcgtccccaacgacggttgcttgaactttaccgacgagaacgacgagggtctcatctctggtttcgggcgaagggggaaggcaaagggtgacattcccggtgtgcgc

SEQ ID NO: 1341 - DNA, 449 bp, Glycine max
  Clone ID: PAT_MRT3847_101209C.1
tttttgtttttttttttttttttttttttttttttttttttttttttttttttttttttttttttttttaaaaaaccaaatttggcttaacgggaccccccaataagagatgggggaaggtaaaccccccaacccaaccaaaattaccggcttcccaatacaataaaggaacccaaccatttcaaaaaacaaccaacccacaaactttctttaaataacaaaggcaacccccaaaccccccaaaaaacccaacggttcaaaatcaaaccaaggcccaaccgcccaaaaaaccaaaaccaggacccggaaaaaaccaaaaaaaaaaagtaagtcaaagaccggggaaactggggaacggcctgggacccctaaaaaacggggggctgggccaatccccgggcaaaaaaaacccgaaccggggttggaattcccttggaagggaggggggc

SEQ ID NO: 1342 - DNA, 233 bp, Glycine max
  Clone ID: PAT_MRT3847_10120C.1
gtcggcgacgctgctgcgcagcacagttcgttgcagaaagctggcagttggccagaggaattgcttcctgcggaaggccatgatcagaatttgcttttgggtccgatggacgaacccggcccgccgtcctcggcgccgcaaccggctcagtcaactggggttgcgatagggcacaagaagcggcctcttcattccgaggatgttccccttattgcggggtttgaggaggccct

SEQ ID NO: 1343 - DNA, 411 bp, Glycine max
  Clone ID: PAT_MRT3847_101210C.1
ggtttaaatgttttcgctaatcgagataacttgggacagtgggaagaaaataaaggtccttgtcttcttctacgctacaattttggtaacatgacaatgccatgcgtacgatatgtttcctctacaaatgaacactggctattatgcccgtactccgaaggtctaatgcgcatgttgtaggcttgctgtggaaacacacaacatctttggctttgagaccattcctgattagtgcgttgaagcaactaaggactacatccatgacgaacaatatagatcagactccaaaacaattaaccaacaagcttacttttatgccagagacctgaaagtccatactaaagacacatttgtgttcaacatagatgacacacgactctttaatattccatactacaaaacacatctata

SEQ ID NO: 1344 - DNA, 259 bp, Glycine max
  Clone ID: PAT_MRT3847_101211C.1
gccatatctagtttgcacaggagcaagattttaaggatcgagtggaatggatacccttccagtcactgaggaacttcggagacaagatgagatcaggcacttgttgtcctgtttctgcttccaaaagccttcatttctgtaattgtggacaaattttagaccagcgttttaacccttctgatattagtggggtgccaaagaagagaaggttggacatgattgtggatactacatctcttgtgaacaaggaatcaaggaa

SEQ ID NO: 1345 - DNA, 316 bp, Glycine max
  Clone ID: PAT_MRT3847_101212C.1
gttgtttataaatgttcaattctatcccattttaaaatgctcaattccttagtggtaatggtagatgatcatggtttaaacttctagaatatgaattgtattagtctgaaaagttattctttaaattcacatttatatgcactacatatcaatttttaggttagggcaattgttcatttctccctcattcagcaatatttgaggtccactaaatattatattattatatttgctttgtcaagttactgtcactgaatatgataaggaccggtgacattatggatacaatgttatcaatgacaataaacttatgcct

SEQ ID NO: 1346 - DNA, 744 bp, Glycine max
  Clone ID: PAT_MRT3847_101213C.1
ggaagttgaaaaccccaaatctcagtttttcttctgcactcattctttcattctcattgccgtcacagagagagacaagaaacaatgaagtttaaccctagggtttcctcaagccgtcgcaagagccgcaaggctcacttcaccgctccgtcgagcgtgcgccgcgtcctgatgagcgcgcctctctccaccgatctccggtcaaagtacaacgtgcggtccattccggttcgcaaggacgacgaggttcaggtcgtgaggggaacctacaagggccgcgagggcaaagtggtccaggtctatcgccgcaagtgggtcatccacatcgagcgcatcacccgcgagaaggttaacggctccaccgttaacgttggcattcacccttccaaggttgtcgtcaccaagctccgaatggacaaggaccgcaaatccttgctcgatcggaaggccaagggtcgcgccgccgccgacaaggaaaagggtaccaagttcgctcctgaggatattatgcagaccgtcgattagtttctctcctttttttaccctcgctatactttttatttaccgcatttgttgtcgctattatttggaacttggattcggttatttttagtgtttcttgtgtttttttttatttagtagtttgagggtcttgtggtttggatcttaagggttccgctattgtgaggcctttctgttttgtttaatttaatcaaatgtttgacattattactgttattgttt

SEQ ID NO: 1347 - DNA, 1016 bp, Glycine max
  unsure (1)..(1016): unsure at all n locations
  Clone ID: PAT_MRT3847_101214C.1
gaccaaacgttccagaagctgcttcttagtttctccaaacccaaactttcaccacagggacctgtcagatttagttaacgtttttacatcatcactgtgtgaagataatatagatatggaaatctcccatgacatcaagatcaaggatgacaagctaggtggtgtgaaggaagagaagattaaggtagaagttgaactgaagaataaatcagttgagaaagagcatacaaaaagtaaagaagagaagaaacataaagatgaagataaatcaaagaaaaaaaagaaagagaaaggggaagaggaagatgaagagggagagaagaaagaaaaagatgtaaaagataaaggggaggatggtgaagagaaagagaaaaaggagaaggataagaaggagaggaaaaaggaaaagaaggacaaggatgacaaaactgatgtagagaaggttaaggggaaagaacatgatggggaggatgctgaagagaagaaagaaaagaagaaaaaggaaaagaaagacaaggatgacaaaactgatgtagagaaggtcaaggggaaagaagacaaagaggagaagaagaaaaaggaaaagaaagtcaaggatgacaaaactgatgctgagaaggtcaaggggaaagaagatgatggggaggacaatgaagagaaggaggaaaagaaaaaaaagaaaaagaaggaaaaggatgacaaaattgatgtagagaaggtcaaggggaaagaagatgatggggaagatgaagggaagaaggagaagaagaaaaaggaaaagaaggacaaagatgaagaaacagacacattaaagggaaagggaaaaaatggtgatggtgaagagaagaaggaaaagaaagagaaggagaagaaaaaggaaaagaaggacaaagatgaagaaacagacacattaaaggaaaagggaaaaaatgacgaaggcgaggatgatgaagaaaataagaaaaattagaaaaaggattaagaaggagaaagagaaggatcacaaaanagaaaag

SEQ ID NO: 1348 - DNA, 755 bp, Glycine max
  unsure (1)..(755): unsure at all n locations
  Clone ID: PAT_MRT3847_101215C.1
gtatactataaattaagctccaaagaaagatagaaaggtctaaattagaanaatttcttcatattgaaggacaaactactttgctttttagtaatttaaatttgaaaagagtggcagatgaatactaactttgaattcagaaagagatcaactttaaatatctagattcatatatgttactcatggtgtggtatggttgacaaataatcatgccccttaagtctctatcactcggttagaaaataccctaggttcaccaaaaaaagatgcatatatgctaaaccgagttctggtcagtgagatgtgtagatcatagaacattatatgaactaacatctttttttcctgtatttctctggtcttttctgatatcctttttaatgtgtacgagcagggacatcaccacaacattcccgagctttgtattccattcacaagtagacgatacttgaagataatttctcctatggcttcttcctttgggctgcatggccacgtgtgtagtaaaaagggcatggcagatagccttgcttttaccttacatttgttatatctttgaataatgtagtttggtttgtggattcttttgctggggtttaactttctcattttttcttcaaacttccagacacatatggttcccatttttcaaaactaggatttcaaaagcaagattggaaggttgtgcaaaaaagtttgttttaaaaaaaaaaaaaaaaaaaaaaaaaaaaaaaaaaaaaaaaaaaaaaaaagaa

SEQ ID NO: 1349 - DNA, 465 bp, Glycine max
  Clone ID: PAT_MRT3847_101216C.1
ggctcgagctatacacaagaattgttatttagtccacctgagggtggtcttgatgaaagtaatttttctcctgatgaaacgctgtggagggagaggctgcgggagcgtgtcttacgtgagacacggtctgaatggtcgatgacatgctcagtttggggcgcagtcatggtgccattgcctgctggggcttatatacaggacgttccgtatgcaacagcacagctcaagcttccaagtggctcaggttgaccccttattgaaccacatctgtctccagatgggcgaatgcttgcctatgtaagagactgcgagttgcacgctctggatctcttgtgtgatgaatcaaagcagttgacccatggggcaaaggaacgcgggtcggctcatgggcgggcataatctagctctcatgatgagattgatataaaaactggctatgggaggacactgcacaggccatggatt

SEQ ID NO: 1350 - DNA, 255 bp, Glycine max
  Clone ID: PAT_MRT3847_101217C.1
cccacgcgtccgaatcggccttagaaataatgtgcgacctttcatgcttctctgctgtacttggaattggggctcaactcgtacgggcagcgttcctataggtacacttcggttgctcgtctttaccataagaagctctggcaccagctcactctcaagcttgatgccaatagaggtcttgtcatctttcacgcatggtgacgctttaatacaattatatcacaaattacatcacatactttgagacggaaatca

SEQ ID NO: 1351 - DNA, 286 bp, Glycine max
  unsure (1)..(286): unsure at all n locations
  Clone ID: PAT_MRT3847_101218C.1
attttattttttctgatgcttactccttttctattggagttatcaataaaagacattagacatggcaacggggcggggacgggtattgcctccccagtccctgaccccgactcctcaacatatccccgtcgggtattggatattcccgtccccggtttagatatgtannnnnnnnnnnnnnnnnnnttatattaaaaatttgatttaaaaaataattgatacgggaatggatatgggatgagtggtgacatccctgtcctcgaccccaaccttggtttaaaaaatt

SEQ ID NO: 1352 - DNA, 416 bp, Glycine max
  Clone ID: PAT_MRT3847_10121C.1
cattgctttgcgaagacgacagaaggggacaagggggcggatcacaacgcgcactgggtctttcccctcttaacacaaaaaccctatcggtcttcgcggatacgccgattcccgccaagccgaaagccaaagcccacgccaaggctccccatggccggttgaagcgcaagggcgctggtgctggaaggaagcaatcgaagaaagctgccaaggagcctaacatggctaagagaacctccaagcgctctcttcgctttaatgtccgaggccagagagcaggttcagaaggaggactccaacaataaatccgccgctgtagacggcaaagctggtggtgacaaacggaaatcgctgtttgatgctgaaaaggccccccccgtgggcaccgccgaaaagaagaaacaagagtatgagaa

SEQ ID NO: 1353 - DNA, 270 bp, Glycine max
  Clone ID: PAT_MRT3847_101220C.1
tggttcccaaaactgtagcgaaaaccatcacaacctggtggtggatcggttcgatctgcgtcttcctctgctaaactgcgttcttcataaccccccaaaagagaattttttttaaaaaatttggagagagaaaaacaaagaggtgaagatctgaaggctttgttgtacccgcttataacactgaaaaatgcaaggtagatccccagaccaggaatcagtagggtctgggacaaagaggtccagtgtatcatcggggggtaggcctcgaaa

SEQ ID NO: 1354 - DNA, 1373 bp, Glycine max
  Clone ID: PAT_MRT3847_101221C.1
ccacgcgtccgccgaggcatcaagggcggaggagtgcgtgttttcttctcctctacgagacaaatccccttttagttcaaccgatcccatcaacttcacttgattcttcgactttcaaatctcaaaataccttgcatgttttcttgaatcctcatctcccgttttagccacccatggatgtttgcgtaaaagaagaagtcttggagactccgattgtcaccgagaggaggccaagaaacgccgtcgtttcggcgctccctccgggtttggtaattgaactcagcgattccgatacggacgagggcgatttggatagtgttgtcgccaatgcagtgaacggtgctacggtggagagtccgtccaagaagcgaaggacgagcgaggctggaggagtggttttgccggttggattcctcacccctctccctccggcgccggtgccggtgcctcctcccgcggcggtgctctctttgccggcgccggaatgggcctctaattcggcatcgcgcgtcaacgcgagtaagagttttagtctgaatagctccaagcagttctggaaggctggggattacgatggtgctcctctcggcggctctggatcttcaacagttggtatggatcatgtcagagttcaccccaagttcttacactctaatgcaacaagtcataaatgggctcttggagcgtttgctgagcttttggacaattcattggatgaggtttgcaatggggccacatatgttaatgtagatatgcttataaataagaaagatggcaccaggatgttgctggttgaagataatggtggtgggatggatcctgaaaaaatgcgtcagtgcatgtcgctggggtattccatgaaaagcaaaatggcaaatacaattggtcaatatggaaatggttttaagacaagtaccatgaggctcggggctgatgtaattgtattctcccgttatcctgggaaagatgggaaaagatgctggctggcccatttagcccccgggttatgcaggcggacgtgggccttctcaaacaaagtccgcataagcaggcttaatgggcagactatgcaggctgtgggctatgttggtgcgggctttaatgagcgggtttattcgtattcccagctctaccagtgcccttagcaagacccttatattttatcatttgtgaattttggttgatgatttgaggttctgaggagcatatgcttacattaagtgtgcagcttaaaatgcaccctgctaaaatgtttttgctgtatttcaatgggtttgtttcagaatgtacatttagcattttaggttgcctggtctattactggcacaatcattaattgtagaattttccttaataacagtcaatatttgtat

SEQ ID NO: 1355 - DNA, 271 bp, Glycine max
  Clone ID: PAT_MRT3847_101222C.1
ggttataggtgatttcataattctacttttaaaaaaatattattatgccccatattctaaggtaagaaccactcccatttattgactttaaaagaacccaactctatctatctatcaaaaaactgcaccttgtcctcaaccaaagagccaaacccacgcttttggcgaaaaatctttcccacaaaattgcacaaaaacatttagagaacgcttgccacctccaaaatttcgagcggggacccgcaactttcgcccagaatctttaacaacc

SEQ ID NO: 1356 - DNA, 973 bp, Glycine max
  Clone ID: PAT_MRT3847_101223C.1
catctataatgatgtttattttaaaagtctttgatagaagattagcataatctatcaatgacaatgtttattttaaaactttgtgatagaagaaaggcataatctatcaataataatgttttgaaaactgtaccatagaagagacattggactgagtcactttccaatatcatgcataaaatctggctgaaattcatgaaagctgcatttcacggttaatgtgtccttacagtaccaataatgttgttctaaagcagaacacaaactttattggttctgatctgaaccacacactcatccatcacatagtatcatagcctctcaataattcaattgctcattcctggaaacctgtgtggtgaatctcaaccgcacacatcatgctaccttatcatctttattaaccgttcatttcctagccagtttcacacaccccactgaactcactcactggaagccttgttgtgagtaagggaaaggcttcctgcactgagcaccaagttgaaacctcttgattctttgcttagaattccacagaatatggagactgttcttttcaatgactccccacctttggagttcaagtgatctaaggtttgaatatatgaggtttgtggccctggaccagtactaccctgccttctccagttcgagttctatacttctctcgctaggcagcaatgcatatgagagaataaggactttgagaaactcttctggaaatggaatttcttttgaactgtgattgcaatcatagagggcaccattgagcttaaattgctgattatgtatggcggtgattgcaaatatttctttcatggaggggaatatttagtgtcaagcattgattttggatcttttatatgtatttaagggaaggggaaaaccaaacaagtagtattgttgaccactgtgtaaccacctcttgtgaaatcttatttgtgtgataaaattaatttattctctttataaa

SEQ ID NO: 1357 - DNA, 261 bp, Glycine max
  Clone ID: PAT_MRT3847_101224C.1
gtccgggctgtgctagggcccggcgggcgctggtgaggcctctggtcgggcttcttccgcgcgtgtgatccgacgaacttaagagggaggggtgattttctgggttttcaacgtcttggtcctcgtctcaaaagtgtatcttcggccgggcgcggtgtctcacgtctatcatcccagcactttgggaaggtaagttgggtggatcatttgaggtcaggagttcgagaccagcctggccaacatagtgaactctttactaaa

SEQ ID NO: 1358 - DNA, 369 bp, Glycine max
  Clone ID: PAT_MRT3847_101225C.1
aaaaaattaaaaatattattaaatttttttaagacccttattaacatttattctatcttaatttgggagggggacaggaggttccgggaaaaggtaggaggtcctgtggaatgggtccacccacccaacccggttttttggtccttccttccattcaattgggggccagggggggggcgggagcttccccaaatggttatttaattaacctggaaggaaacctcaaggatcttaacccttccacccaaagatcaccggccaccgtttcaccaggaaggaaaccccaagggagggaaacccttccccagaagaggattccggagaaattcaataatccacattttttttttttaataattcaatttttcc

SEQ ID NO: 1359 - DNA, 780 bp, Glycine max
  Clone ID: PAT_MRT3847_101226C.1
tggatatcttatgattttcgtttcttcttttacgtatgaagtaaatcgaattggcgaagaaaggccatcctgcaaagtcattatcaaattccttttggtgatgaagacgcacgatatatctctcagtaatcattcgtgttccgttcaagtgtttcgtctttgtgttgtattcttgttgggctcctggcatgcttcctcttagtttcctcggtgagtctgtgtctgttcacctccgggttcgttacatcccccctgtatcgatcggctgtctgcccatctgtggcggttgtagaccccaccttttgcttcgactgcgtcctggcgctcatacgaggtaacatccaataaaattagagcagcataaatttcaagcaaaaattacttctcgtattaatcttctattacccttctttcaggcattttatcggtggagggaaaaagcattggattatccattagccactaggaaaatgctggtgcatattattaattgacttactgatatttcctaatatattttgatgattgccaggtcaaattagactcaaactttgtgagaagcttcaatctcactcaaactctaaagtaagcaagaaaacaacacagttcatgtacaacttccaggtcaatttagttgagcaagtgtccaagcccaaggtgtggagagtctatctgaagagaaataagagagaaaaggaggcatagggaaattgggcatatagggaataagtagagagagaaaaaggggataagaatgtgttagtttgttatgggaagaga

SEQ ID NO: 1360 - DNA, 436 bp, Glycine max
  Clone ID: PAT_MRT3847_101227C.1
aaaaagccataataaatctaacctctcttggagggcttaacccatttattccttagatattccaattgagggcggctttccatactttttctgaaggatgcccatgccaatagagaatcttaatataaaccaccacatggtggggataccctccccattaccgggggccgaaacctaaccaaatggggagggctggtgaatgaagtttcttaatgccctttggtggcaccctaccagacttccaagaatgaaacaccaaaattctgagagttttcaaatgctgcaacccaacatttgtgataccacaatatgaaaaccgttcaaagaatccaatccggtagcccccagaaattacccccagggtagtctgtaaagtggcacatttgtgataaaaataaactctttacagataagaaagcttttatatattttacac

SEQ ID NO: 1361 - DNA, 411 bp, Glycine max
  Clone ID: PAT_MRT3847_101228C.1
ttttttttgtattttttttttattgtttttttttttttttttttgaaaagtggggagtatgtttaattttctctggtagacacatttgttgttttaaaaaacatgtagggggggtttttatgaaaaaaatacccgggcgcccccgttttgtttgggggacaattgggggcttgaccccaaactgagggcacagggggccccccctggtgggggtgggggggcaccccggggcattagtctggggtaacgaaccttattggtgtgaagaaaaaacctatttgcttggggggcaccattcttgtccccgcatataagggggtttaaaacaaattgtagggggggggggggataaatgttttacccccccacttcgcggggaaattcttgcttaataagggaaaccccttcaac

SEQ ID NO: 1362 - DNA, 1095 bp, Glycine max
  Clone ID: PAT_MRT3847_101229C.1
tacggctgcgagaagacgacagaagggggaaaagaaggtagagaaggtgttgtgaaaggttaagatcgagaaattagggtgaagtgaaggagaagctcttgagaaggtatagttcttgttcttgctcatgctcccttgtgttttgtgtgactcgttgttcttgttcttgctacatttttatctttaatttacgtgcttctaatcatgttaacattagtgttttgtttcaccttctacacatttacacatttatcgtctcaaatctcaaatacaaagcacctatactttctttctcccaaaataattgatcgtctcaaatctcaatttaataaatgtattataaagtcttttaacataagattcttttttaaaaaagacaaaacaaaacattaatataaaccaaaagatcgttatcacttatgttaattaataagtgataacgatttatatttcttaatcaagtgatttaattttaaattctagttaatcattgagaatgaaataaattttattaaaaaaaaaatattcaccttctgtactcttatgatttctgataaaaattagtcattttgacaaaaattattttatatcaatatcatgtcaaaaaaagaaaatacttcaaatatatatatatatatatatatgttgtatgataattacagcaagcattgaaccccaaaatacttgaaatatatattagagcctacatggttgatcaaactttcatatgtaacctgtaaaaacaaacggaattgattaaaagacaaaattagaatgaatgtttgaatattttattgaaaagtgaaaatattagtcaatttaatttcttttaaaaattataattatgattattttaggacaaagaaagtaaatattattcttatcgagaagaggctccatcgcctaccggtcttaattatgatggaattactaatctttggagggagctatgacaccattgcctagttagtagtcattttaacaaaacaaaaaatattaattaatcttctttggatattttggttccactgtcaagtagtctcgtcaaacattcgtatattatgcccaaaaaaaaaaaaaaaaaattaacaaaac

SEQ ID NO: 1363 - DNA, 353 bp, Glycine max
  unsure (1)..(353): unsure at all n locations
  Clone ID: PAT_MRT3847_10122C.1
ggaacgaacgaacgaagacagcgaaggagctacactacgctgcgagatttggaaattgaatccctaatctaatttcgaggtccaactcctgtggagtgtgtgtggtgctttcaatctgcatgatcatatagcgaatttgtgtttagcgaatcatatttgcagagtaaggatggggaaaaaccaagcctacaaagctatgcagagagccaggctcggcggcgcctccgccggccccgacgaggttgaagacggcatggtggatggttcatttcattcaccagaatggcatgcagctcgtttggctagccttaacacctctcacaccattacctgggaagagtacaanaagaagc

SEQ ID NO: 1364 - DNA, 159 bp, Glycine max
  unsure (1)..(159): unsure at all n locations
  Clone ID: PAT_MRT3847_101230C.1
ggatcctaggctaaggggttttaaacagccagnctntggntacncccgtaagnacaaacgggattcaacagtgctttcttctctcttnctantcctatttgcctncaactccanaggngttaagggggatnccggtcgnganncaggcgcctcgcacta

SEQ ID NO: 1365 - DNA, 325 bp, Glycine max
  Clone ID: PAT_MRT3847_101231C.1
tgttatctacaccatcacccacatcgcgtgtattctctctggtacttcccacaatagacgatattttcccaccgactttctccatgaccaggaatcggagagtagcactgctacagacacacacctgaactacaaatcgcagaactgaaccctgaccatatccagtgactgagcctccggtcgattcattgacacaataggaacaacacacatcaccatctcctacggtaagttcgaggaaaccgcagtggctagaattattccccttatctacgaagagacagctgaaaaacttaagaagaagctcaataagatcagtggagtg

SEQ ID NO: 1366 - DNA, 227 bp, Glycine max
  unsure (1)..(227): unsure at all n locations
  Clone ID: PAT_MRT3847_101232C.1
tcctctagagtggncgcctttgtttgtctttttttttttgaaaggaaattaaactgaggtattacttgttccattaaaaccatcacactcagggtgcgtggtgaaaccgtgaaagttaaaaaacaaaaacaggggctgtagagcgaggccctgctcgctgggacttggaatagtacacggggtggcggcacaccagcagagccttcagcccacacgcatcacggaaa

SEQ ID NO: 1367 - DNA, 487 bp, Glycine max
  unsure (1)..(487): unsure at all n locations
  Clone ID: PAT_MRT3847_101233C.1
cggctcgagcggctcgagcggctcgagtccacaactgatgtgcaggagattgttgattggtagagannncncnnnannnnncnnnnnnttnanntnnacaanccttnnctaccccttgctgcttccatcgctcattcatagtaccttcgtcttgatgctcttacctctgtctcggctgcttactcccagcattgtgcccgtctcctcccaccgcatcctcgttgcttgcctccccaacgtcccctctgctctgacagctttgtaatcggcctggcttctgactcgctatgctcggatctttctagtcaatctattgtccccaattctggtgccacagaacttgcttcatcggttgcattgtcttgacacaactttcatcctacctccctctgcctgcgcatatcttttcttctacctttcttagaacttttttcttttttaacgctttcttcttaaacctaccctggacacgcctggagctgagtcc

SEQ ID NO: 1368 - DNA, 502 bp, Glycine max
  Clone ID: PAT_MRT3847_101234C.1
gaaatggaaaacaatttataatttgttcacacattcacaatatttgcaacatttgatagaacaaaattaattgttgatcgcattagatgtaaaatatactataaataggttcaaaagttcaatgatgcaagcctgcaaaacgaggcaaccatccaattttatgattatccaatgcttagtttagctattctaaactcatgagcaaaaataaaacgctgttttttttaacgagcaccaaggctatccgaatgcatgactgtgtctataaattctaagttgcatatttcctagattaaagctgacgataacaactcctgaacaaaagatgccctcagccttctctcttcaatatcctgctcatcacctgaatcctggggtgcatctgtcccagagccttttgcattggaaatgtacgtggcattcctggaggaaccttcaccaggatggatgccactggagtttggaacagacacattgccgacaaacggtgacaaaactggat

SEQ ID NO: 1369 - DNA, 438 bp, Glycine max
  Clone ID: PAT_MRT3847_101235C.1
cttatatgctaagaactcgacacacacaattgctgttcgcacctaaccagaaagaaaccattgtgtttgaattcgttggttgctgcttcagtctcagtgtggtaattcatcgatgaatacgacgccgtttatggacaagcaaattatggatctcactcacggtcacggatcttcttcttcttccactacgcagtcgcagagcaaggacttcatcgacctcatgaaagaaccgccacaacaccatcaccatcatcatctcgaagatgaagacaacgatgaagaagaaaaagcgcgtggcaatgggatcagcaaagacgacatcgttcccagttacgatttccaaccgattcgccctctttccccttccaataatttcgatttcctcgcattctctcgcccttggaacaccgattcttactccttcgtttactttttttt

SEQ ID NO: 1370 - DNA, 253 bp, Glycine max
  Clone ID: PAT_MRT3847_101236C.1
ataaaggtttccaaaagacaatacagctgatactgagccataagttccacaaaagaaaattccagtggcgcgagaactggtgtcttctaaaatccttagctatacaggggttaactctgagggctttaattttagaggaaatgacagaagaaaactctacaagagctaacccaccaagaaataaagatggtgcagttttttatatttatatttatttaagttaaaaagggcttctattgttctggttactacc

SEQ ID NO: 1371 - DNA, 236 bp, Glycine max
  Clone ID: PAT_MRT3847_101237C.1
cggctcctagtcgcgccgcctttttttttttttttttttttttagcgccttttattttagggctaccaagggacccatcacacctagaggcgaaaaaaaaaggtctccttcttttgagaaccacttctaaagagttaaaacaacccggaaggagtgcgattattttttttgtagaaggcgggttacgtttaggagtcgtaagacaaaagatctacaactttgttaacattctagag

SEQ ID NO: 1372 - DNA, 399 bp, Glycine max
  Clone ID: PAT_MRT3847_101238C.1
gggggggcccgaaaaaataaaaaaatgcctttttttgactttggggttatttttgattttgccaattaaatttcccattcacagccgtccattacacatgagttgggccttttccaacttaaaagcaggggataacattggcccatgacccgacacatgccccccctaaaaatcataattttacatttttacattcaaaatacaaagacttttaatttttaaaagaagaaaagagattaaccgatccttttaatgaaatgaaacccaaacccccaaacattggcttgatttttggtgttggtggtggtcccaacttgattaaacatgaaccctttgattgaatcacttggacttgaagggaaaggcccttattaccacctggtggtaaagtgcttcaaa

SEQ ID NO: 1373 - DNA, 326 bp, Glycine max
  Clone ID: PAT_MRT3847_101239C.1
tttttccaccaccaaaacacaccaactcaatctggcatactgtaaccgcccaatcagggtatgatcgggatacggactcggagacactagacacacttgtacgcaactcccgccaaatgctcttgctatctgtatcaaagcacacaattacaaggaaccaaacatccgtatgatatcaatcacgaaccatagcggtacatgagaattatcaaagactctgaaatctctaaacagtatgtatctaagagaggtcctggacactggactaacatctttgagaagatttccactcgaacatatgatggcggcactatacattaataggc

SEQ ID NO: 1374 - DNA, 264 bp, Glycine max
  Clone ID: PAT_MRT3847_10123C.1
ggcatgggtgctggagaagaaggagcggcacaggcgccagggcagggaagtcagacctgacacccagtacaccggccgcaagcgcaagccccgcttctaagtcaccacgcggttctggaaaggcacttgcctctgcacttttctatattgttcagctgacaaagtagtattttagaaaagttctaaagttataaaaatgttttctgcagtaaaaaaaaagttctctgggccgggcgtggtggctcacacctgtaatcccagcac

SEQ ID NO: 1375 - DNA, 341 bp, Glycine max
  Clone ID: PAT_MRT3847_101240C.1
ggggggggaaagcttttttttttttttttttttgggggagaaaaccaaccgaacataaattccccaaataaggctcaaactgggggcccaacttgcaacaacccacaaatttaccggcggggaggaaaatcccaagtggggttgggactttcctccttcagggggtggccacaaaaaagaaattttctgcccttaagaaaaaaagggaagaaagacccctcagaggggccccttttatgggggccccacccctgggtaggtggacaaaaaaaccagcctgaaatgctttttagggggaaacccccaaaaaattttggggggtcccccaccccccgccgccg

SEQ ID NO: 1376 - DNA, 619 bp, Glycine max
  unsure (1)..(619): unsure at all n locations
  Clone ID: PAT_MRT3847_101241C.1
cgctggctttgtttgttttcttttctctcttccaactttactcaattaccattaattctcgatctcggtgtttctcaaaaggatctcatcttatcgatggaatttagcacgatgaagaagaagaagaagaagcatttgcacgatggaagaacaattgctctcaaccccgaaactgaaactttcctcgttatcaggattcccgatgcgcttgttttgcgcattgtgtctcgctcgttgatcgtggccatggttctcgcagccttgcctttcttgggaactgttctcgaaggattctatttctcgtccagttttgttcccaatctcgacactgggtctctcgacgtgggactattgaattcgattctccatgatttcgctgaagagggtctcctcagagagaacgataaggcactcattgtgaactctcccgttcccgatatcttcagagaaaagattgatgctgtcatgaattctgattgggagagtaagagcttgttcgctgatgagtcttatgattttgtgttcacctctggtgccattgatgctgagtttattgatcgcattctgaaaaatgatggcattgtggctctcccgttgnggactaaatcgtcaaactctg

SEQ ID NO: 1377 - DNA, 472 bp, Glycine max
  Clone ID: PAT_MRT3847_101242C.1
cgtcacttaaaagaacggcggggaaccccgggaaatcccggaccagtcccagagggggccccaacactcccaaacatgagacaaaaaaaagctggaaaaaacaaagggcaaagcgggcaccgggggaaaaaagtgacaaaataaaagtcgcacaaaaagccccccggcaaacaaaaaaaaaaaacgggggatgcccagtgggggcccaaaaccacgctaataggagaggggtcccgtgccgcgctccaaggaggaaaacctgtcaaacccgtgaaaaaaaaaaaataacaaagcccggcaaaaggcggttgagagagaggccccaaaggggccacactgtgataccccagaaaccgcaaaaaacgggagacgctgtacaccccggccacaaaaaaaaagaaaaaaaggggaacaaccggggtcccccacggagagaaaaaaaccgaaaaaaggcggctaaaagggggaaaaa

SEQ ID NO: 1378 - DNA, 304 bp, Glycine max
  unsure (1)..(304): unsure at all n locations
  Clone ID: PAT_MRT3847_101243C.1
acttgtcttgcaatnccgaggagacntcgaagaggacatttaatagctagaggcaactcnngaatggattcgnaaangangtgacgccagcgngncancgacngatatgnttcactataggatggtgtattctcngcaacgagaaacntggaggatcgactctngtgaaancacattagagtgcgtcctaaatgcnggttngcagatatactgtnttctacnaggcantcgaggtagtgaagcnttgtcacaacgctgtcatngcgaanggtccacctgcttnatcnggactctgcccngatgt

SEQ ID NO: 1379 - DNA, 263 bp, Glycine max
  Clone ID: PAT_MRT3847_101244C.1
tctagatgagtgtctctctatgtctgcaatctccctcacatacattttgttttatagctcatacttcagataagtgtgcgtgtgtgtttattatctgtttcttgaaattacgttgcataattgtttgcacatgcttgttcagacacccccacattttttttcaatatcttatatttatacagttttaaaagcagtgttatcattgatggatggtgacgtatggcagaggataacatttgggcacataaacacaccattggggc

SEQ ID NO: 1380 - DNA, 161 bp, Glycine max
  Clone ID: PAT_MRT3847_101245C.1
gggccctatagtttgaagaccttattaatgtatacatataatgaccggcataatagtcatgctttcatgttgataaaggaaccaacggatctctctttgatggggcctgctagtataattataagtacaaatgtgtctaacagtgccggcgacaggagtat

SEQ ID NO: 1381 - DNA, 637 bp, Glycine max
  Clone ID: PAT_MRT3847_101246C.1
cccgcgtccggtcgaggctccggttcagcctgcctcggcccggaaaaggtcgaggaagtccgaggagccgaaaacctcggaggatgctatgagcgaggaagaggttaagagcgacgtggtggatcttcagagcgatgataataatcacgtgggagaatgagaatccgcggcaatgcaggtttgtgaagaggaaccgaagatgttggaacctaaacctgaacctgttatcagcgaagaggaaccgaaggtgttggatgatgttatcaatgaagaggaagctgttgtggccgagacgttgaagggagaggagcctatcgtggctgagacattgaaggaagaggttgtggatgagatggcagaacaacccctttgtaaagaggaatcggagaagggtgtttcggatgagatggcagaacaacccctttgtgaagaggaatcggagaagggtgtttcggatgagatggcagaacaacccctttgtgaagaggaaccggagaaaggtggtgtttcggaggagaaagattctaatggggtagccctagctttgggtaatgatgatggtgatgaggggaataagaagaagaggagaatgaagaaccggttggagatgccttagtctgagagaaggtttacgcgg

SEQ ID NO: 1382 - DNA, 1067 bp, Glycine max
  unsure (1)..(1067): unsure at all n locations
  Clone ID: PAT_MRT3847_101247C.1
ggtccggnaattcccggngtcgacccacgccgtccgggaaggcgaaatggaaaatcaaaatctggaagagaaaacgcatccccatcgcagggttagttttggcattaagatctctttcagcccttcttcaaccaaacccaacctgtcttttattttacgaccccaaatctcaaatcaaatcattcactatttcttctttcccttttttccaaaccctaactttccttcccctttcaaacccaacaacaatcctcccccacgcgcatgtgcaatcctcgcaatttctcgaatcttccgtaattgatttcgttttatcgtgattttttgtctcatcaataggttcattcaatggccaagggcgccgattccgacgagttcgtggtgctttctagggttcgtacgggtctcaagagggagttcgcattcgccatgaaggcccaatctgagatctgcggcggctctctgggccgaacgcgggccagcaagaaccgggtcgaggccccggttcagcccccctcggcccggaaaaggtcgaggaagtccgaggaggcgaaaaccttggaggatgctatgagcgaggaagaggtcaagagcgacgtggtggatcttcagagcgatgatgaacctaagaataataatcacgtgggagaatcagaatccgcggcaatgcaggtttgtgaggaggaacccaagtgacgtggtgctagagactcttatcagcgaagagcaaccgaagatgttagaacctgaatctgttatcagcgaagaggaaccgaaggtgttggatgatgttatcaatgaagaggaagcgattgtggccgagacgttgaaggaacaggaacctattgtgcctgagacattgaaggaagaggttgtggatgagatggcagaacaacccctttgtatagaggaatcggaggagaaagattctaatggggttgccctagctttggttaatgatggtgctagggggaagaagacatgagaaagcggttggagagacctaatcggagaagagggttaacgncgtcggcattgaaggtaaaatccgaggaaacaacgatggg

SEQ ID NO: 1383 - DNA, 489 bp, Glycine max
  Clone ID: PAT_MRT3847_101248C.1
atgaagcttcataagacaagaaagtcaaacttttttctatagcatcaatacacatatggtgcaaaaaactcactaaccctatacatagatcacaattcacaagttcatatttcttttttaatctagggagtagaagattcaacaatcatcattcaaagactagaactagaaatatatactaatgtaattctgttcattagtggacgagtggtcaacgaaaagagaattatatcaaagttgttttcttaactcctcttttatgaaaaaataaaaagaaaaaaaagtggcatctatccaatcattgcagagcttgcatttgcctcaagaggtatcattcttaactcctctttgataaaaaaaaaaaaagaatgacatctatccacatcatccagagcttgcatttgccttgataggtatcataagacagaaccggccttcaacttagctgcagtttgcttgacaaagaaactagaaagcacacttttactg

SEQ ID NO: 1384 - DNA, 276 bp, Glycine max
  Clone ID: PAT_MRT3847_101249C.1
caaaaactaaacactaacaacgttttgggctctgagcaacttttacatttgagacacagattaaattaatccactttaattaggtctgttgttcatgatggctctagctactccaggtagccctagctccatgcacatgccactggtgcaaacgtccaaccctagctcacaaaattctatgacgacaattaccgaaaggagaggaagtgtagtagttctacaaacgaaaagaaaacatgatggaggaaaaggacgtgatccacaaactaatagcat

SEQ ID NO: 1385 - DNA, 286 bp, Glycine max
  Clone ID: PAT_MRT3847_10124C.1
ctcgaggttcaaaatgtgattaattacaagcgtcttaactttggagaaatatgagatcatggggcatacattatggaatcaggcgagaaaccacatcaaaacgatgacaaaaataatcatggagcataaaaatatggagtaagacgaaaaatcacatcaaagcgatgacaacaatatgatcgcaagtaatttctaataaaatggcagagtattttgtcgataattaaacacagttatgaaaatacaagattaaatgtgacttttggtcttttgtattttaatgttt

SEQ ID NO: 1386 - DNA, 449 bp, Glycine max
  Clone ID: PAT_MRT3847_101250C.1
taagtatattagtttctgagagagagagagtcttaattgattaatcctgctatgaattcagagaagcctgtgagtcctgagatttcaagtgaagaaaatgatcatgatcaagaagatgacactggtggaaccaaacgctcttatgagtgcacattctgcaaaagaggcttcacaaacgctcaggctttaggcggccatatgaacatccataggagagacagggccaaggccaagcaattcacacttgatgcttcaccttcagttaacaaattcaatagtaacaacaatgattccatggcccttccctttgtctcagaaattatgaaccaacccacaaggcctaattactcccctttggagtctcagatgaactttcatccaccacatgccttttattatgagttttgtaactcaaggtctcagccttttagtttgaacaaccaagagct

SEQ ID NO: 1387 - DNA, 124 bp, Glycine max
  Clone ID: PAT_MRT3847_101251C.1
ccacgcgtccgatcggtcgttagatcactacacatcgtcgaccgttctacctaatcacatgattgggacctgtgactaagtacactatctagagtcataccatatcttctaccatacaacctct

SEQ ID NO: 1388 - DNA, 231 bp, Glycine max
  Clone ID: PAT_MRT3847_101252C.1
gcccgctttctccactttttttagggttttctttaaattggtctctcttttggggggggctttgagttttttgtgaaaaaaaaaattccccaatacgaaaattgggctttgtgccttttttatgaaaaacataaaacctcttccaaatttgactcggggcggtccttttgggtcttaccacgggaaacactgtggaagagaaattctaccaagactgaaaaaccttcttca

SEQ ID NO: 1389 - DNA, 142 bp, Glycine max
  Clone ID: PAT_MRT3847_101253C.1
ggactgacgatgcttgattaaattcttcataagtgcataatgacaatttaaatatgtatgatattgaatacataacagttacaacaagggggaaaacgagctgtttggctagaaacattttagctaaactaatcattacatg

SEQ ID NO: 1390 - DNA, 341 bp, Glycine max
  Clone ID: PAT_MRT3847_101255C.1
cacatagtaactattattctctgtacagtaattgccgaatctgcgggggttttctaataatggccaaagacgttgagcaggtcacagagcaaggtgaatactccgcgaaggactaccatgaccctcctgcggcacacgtgatcgacccagatgagctcacaaagtgatccttgtacagagccgccatagctgagttcatagcaacactcctttttctctacatcaccgcggtgaccattattggctacaagagacagagggacaccaaaatccccttttacaccgaatgggacaacaaggaatacccggcatcccttgggccttcagaggcatgatcttca

SEQ ID NO: 1391 - DNA, 144 bp, Glycine max
  Clone ID: PAT_MRT3847_101256C.1
gcatcctattgctgcactgctctaggctgatctcatcactctaatcctcataatgcagtctaggagcagaggcccgctgctgccttatcagactgcggggagcctcattctagcaggggctattgcgaatgccatagtgcagac

SEQ ID NO: 1392 - DNA, 661 bp, Glycine max
  Clone ID: PAT_MRT3847_101257C.1
gccgcccgtggtcgtttttttttttttttttagtttttttttttttttaattttttttttttttttttttttttttttttgtttttttttttttttttttttttttttggggggggaaaaaccccctgaaaaaaaagggggcaaaaaattttggggcccttggttttggttcaaggggttttaaaaaaaaggggaaacaaaaaacggacccaaaagcaccttgtttaaatcctaaaaaaaaaaaaaaatttgggaaaaaaaagcttcaaacccgggaatggtttttttccaaaggggggggaacttttaccaaaaaaaaaaaaagcggggggggaaaatgttttaaaggggggtggcggggtgtttcaaaaagggggtacaccttggggggggaaccccccttgggttcgcccggggatttccctaaaaaaggtttcaagggatccaatttagctttgcccctaagggaaaaaaatcccggacggggggggttaaaaggcccaaagggggcctttttgtccaatccaaaagggaaaacccggtttttttttgaaggaggggggggaaaaatttttgttttttaaaaaaacggggaaaaaccctctttaaaacccattttttttttgttggggaaaaaaaaaaaaaaaaagacccgtttggg

SEQ ID NO: 1393 - DNA, 189 bp, Glycine max
  unsure (1)..(189): unsure at all n locations
  Clone ID: PAT_MRT3847_101258C.1
tgcanagagngnnntcgtncacncaagatntnagttagaatgagngtnnccatctngtaacngagaacgagcgtgtagnattcngatctatnnganagtaagtngattantaantaggngnttcgcggagtctaaaatcgtnggtagaaatggnaattcacacnncatantttggcggctcgtgagatg

SEQ ID NO: 1394 - DNA, 672 bp, Glycine max
  unsure (1)..(672): unsure at all n locations
  Clone ID: PAT_MRT3847_101259C.1
tgacttttcattttgccatctccacgattttcggcaccttctccaccgccgctgcacccaaatgcgccttcgtcaatagcctttaccgctccagcttcagtttgttgattgaagacaacaacttccagcgaagcagcgtaagtgttagtaaaagattttatttttctctctctctcttccttctaaacgccgcttccgcatctctcttccttttctaactatagattttatttttccctctgattcttcctttttattttatgtttttttctccgatgtgactggcgtttgttttgtgtgtttttcgtgtgcgccaaagcctttgcgttcgttaattttgttttgtgtattcggatcgagttgtttcacgttcggttacggggatcttcggtttaggtttgtttagggattttttgtttctttgtttatgttgtggatgagtttttcgttggatttgttgtgttctgtgagattgatggattttttctaatttatattccttcaatgttttttcttttttggcaaaatgaatattttatttatggacagaatagatttgcgattnttggctcttaaattcatgtttgaacggtggtgtgactttcctatttggttctatttttatgaagcctgttgactgcaatttgttcttgaaaaatataagggaatgtg

SEQ ID NO: 1395 - DNA, 682 bp, Glycine max
  unsure (1)..(682): unsure at all n locations
  Clone ID: PAT_MRT3847_10125C.1
ggctcgagggaaataggaaaaaaaaaaattcctgtgaacggaaattagggctctcaagttgcaatttcggttgcagattggggtggtaccgttgcaattgcaataatttttgaagaggaaaaaaaagattcggaccacttccgaagtagttccttaaccccgattagtcatttgcatcctccaattttgatggaatatgtttaatctatgatttcgttctcttaatgctttgaagtttatctagggtttgctattgcaatttggtatcagaagattgattaacctttatctatggcccgagcacgcaatctaattgtcgctgtgggtttagttgctttcgctgcagcaggcatgacatttcccttctacatggcttcatcaaggaaacctgttattgacccaacaaagccacttccaccacaagcaacttttctagggccttacattaacacagggtcgcgtgatgttggtccccagaagaaatgaagcaagttcagttatttgatcaagctcatatatgtgctcattgtctgaggttaaatttttatacctcagtttggtggatcatgactttgaaggaaactatggatgggaaatnntntctgtaagaagtgttacacaatctgtatgtatgggttatgttgatcttagcaatttaataaaaagctgaatgatggtaatt

SEQ ID NO: 1396 - DNA, 501 bp, Glycine max
  Clone ID: PAT_MRT3847_101260C.1
gttgggtggggtaggggtacccaaattggtcccttaaaagcactttagtcctaagtgttccataaatgcaatctttagggactaaattgtgtttgtttaattttttcaagactcaattgagtgtttattttaattttttttttttctggggtgcttgctttaatattatgatcactgcaatctgatttggtctaccagctgctgcagtgtgacattctagttcatgtttcttctgcgatcaccgaatcagtcaagcaataggaatgggttcaaatttgatacactattaacataaagtagtaaatgctattatgttttttacacttatattctgttgaaaataatttgcaacacctaccttgcttcacatcacatacaatgaatgttttaggctcatttttgctctagctttgacaatgatgtagaatgagacaaccaaacaaaggaaaaaggaatcctcaggtttcctataagaacaatgaatactttagaattgaaaaa

SEQ ID NO: 1397 - DNA, 450 bp, Glycine max
  Clone ID: PAT_MRT3847_101261C.1
tctagaaaagatgaaaaaaaaaaaaaaaaaaaaaaaaaaaaaattaaaaaaaaaaaaaaaaaaaaaaaaaaccggccgcccaaaaggatcaaacctaacttacccttgaatgcaacttcaaacccctccaaaagtgtcaccaaaattcaattcacgggccttcttttaaaaacttcttaacgggaaaaaccctgcctttaccaaacttaacccccttgcacaaaatccccctttcgcaacctggcttaataccaaaaaggcccgcaccattcgcccttccaaaaatttgcccaccctaaatggcaaatggaacccgccttgtaacggcccattaaacccggcgggtttggtggttacccccaactttaccgctaaacttgccaacgccctaacgcccgcccctttccctttcttcccttcctttcccccaactttccccggttttccccg

SEQ ID NO: 1398 - DNA, 477 bp, Glycine max
  Clone ID: PAT_MRT3847_101262C.1
gggcccacccttcgttcatttttttataccttaaaaaattaacggcacatggctcaaaatttcaaaaaagggtccggattctcttaattcccaaaaatcgggagtttttttttaaaggaaaaggtttcctaaaaactcaacggcaaaaccgggaaaaaagaagtaatagggccttttcatcctcaaggaccaaaaaaatttttgaaaaaaaaaatcacattttttcaacaaacgccaggcataacttttcctcgaagcagccatcaagttcctgggtttattaaaacaatggcggaaaagcagggatttttttggagcagccctcctagattattaagaccaaagttaaaaatcagcgccggggggggctatcaattcaacctacaaactgggtttatatcggattcaagggttagcattgaccaagtttctgaggacatattggaagaaacccccatggttgaaggaagctagttc

SEQ ID NO: 1399 - DNA, 318 bp, Glycine max
  Clone ID: PAT_MRT3847_101263C.1
atatggaaacggacttatttttcaaaggaaagccccatacccaaatccaaaaattactacacactctttcacaaacacaaattttcacttatgaaccccaaatttaaaactcttaccggtcttattaaaccgcgtgaccataaaaacacccgcgttacaacaacataattcccttctgaacacacaaaccattagccaggaaagcttattaaaaagaagccccccccgtacgaacatcccaacaattacccatcccaaatactgaaatgaacccccccttgatctttccattaaaatcggtaactgtagaacttatcc

SEQ ID NO: 1400 - DNA, 995 bp, Glycine max
  Clone ID: PAT_MRT3847_101264C.1
atgttttatccttgagtgattattttttgtacgacgcccttgtcttaaatcaaatcgcttggaacgggtttcaacgtctcttcctttcctgtggtgaatcactaaaagccattgcagcagaataatattagattagcaacatgaatagaggatagagatcaaacatacttttgtatctagcagcatatctccgttgttatcagtaattatgctggccccatgtgctttcaaccattctgaacactcttccaatgcatctgtctctctctcatcgctcactccatttgtggccacgccagttgaaaacccaagaacctgagaaatgtatgaaacaggtagagttggacgatatgaccggcacatgcagttcacagccttatagcgcatcttttcaacatagagatctgtggatattaaaaaattcatttcagtttattccccttggacatatatgttaggtgttaccaacaagctacaaaaaccagttgattaaaaatacccacccataaggcaggtgtttaagttaggagctgctttgtacagtctcccttctgtcgtcttctcgcagccgtctcgtgttttttcggctcgagctcgagccgttattttctgtcgatacccttgtaaatcaaatcgcttagaacgattttcacgtctcttcctttggtgtatcactaaaagccattgcagcggaataatatgccgtcaaactttgttccttgtcactatcactagatgcatcaccattttcagaagcaatagaagcatctgtaacactctgcttcttaaatggcctttcaagagccttattaaataatctatgcagtaatggagaaaatttagtattcctaaacccgtccttgctttctttgttttccactgccacctttctgtccttttcattaggtacccaattcctgtatttaacagtatcataactgattaaccttggattgttaactggcttcccctaaggcattggatcccacctcctt

SEQ ID NO: 1401 - DNA, 178 bp, Glycine max
  Clone ID: PAT_MRT3847_101265C.1
tactgctgcgagaagacgacagaaggggggtactgactatagagcaacaaatggaaacgggccgggtcggtatattaaaacccctacttcataagaggcaaaactccgatccacttttaggttggagctttgagtgagtcaaacactaaagtagaattatgtcgtatctgaagactgg

SEQ ID NO: 1402 - DNA, 345 bp, Glycine max
  Clone ID: PAT_MRT3847_101266C.1
gcacaaacctgcacgacacatacggttactaacctgcacgcaccgtccacttcactaggacccagccccaatatcccttctcttaccctcccattgacccagtcaacttcgatctcatcatcgtccacaccgccctatcagaatccatcatcaccgttgacagctccaacgataacaaaaccatactacaacttgacccacactacttatactgcagccacttcaattctctatatctccacgacatcacttactacctttcttacccgcactacctacccttcgacgacgccacaaccactgactactacgaccgtcttatcatcgacttacatcaacaacccc

SEQ ID NO: 1403 - DNA, 1148 bp, Glycine max
  Clone ID: PAT_MRT3847_101267C.1
gtaagttcggaattctgctcattcaaagtttggcagagatagtggtggtggttgaagagaaggaccaaaaccaaaaccaaaagcaagatagtcatagtagtagtactttttttgggggtaacaattcattgtttgattgtatttacttgggaaagatcctacaagtgctagaactaccacttggcttaccaagaaggcttacaatcccagtggtgagtgaggagaaatggtcaaagccatatgcagtaatatctgtcacactagcacctgttttgttggcaattcttttcaacacacaaagtgaaaacgtgggttcaaggagtggtattgtcacatacatagtagctgcattgattgggatagttttgggcaacatggcatgtgtgacaactgaaaggtgcaacccacccagaaagtccttgttcccttggcttgctggtggctttgcaatgagtgtaacatggacttacataattgctgaggagcttgtttctctcttggtatcaattgggagcatcataggggttagcccttcaattctaggactaactgtcctagcttggggtaactcacttggtgacttgatagccaatggtgccatggcaatgaatggtgggcctgatggggtccaaatggcaatttctggctgctatgctggcccaatgtttaacaccttgatgggcttgggcttgccacttgttctctcagcttggtccgagcatccagaaccttatgtcactcctaaggacacttcactctatgagacacttttgttcttgatgggaggggtgctttgggcacttgtgattttgcctaagaagaatatgaggcttgataaatccttgggagcagggctattgagtgtgtacatgtgttttttggtcataaggatagctatggcagttggaattgtgaaattttagctagagatatgttagttttctaaagggtacttcatcatcatcaaaagagggtccattgtggtcccttcttgtggaacaagctcgtgttaaatcatacatttcatgatcaacacgtctactttgtacatttggggggaagttttagtgcggccgttcttaaaaaaatcatcagtgttcttatttagaaattttcttggaaaattaaaaatagcgtttatttttccc

SEQ ID NO: 1404 - DNA, 581 bp, Glycine max
  Clone ID: PAT_MRT3847_101268C.1
tactctacccatgcttagaagaagagttcctcctgctgtccctggaatcatgtttttgtctggtggacaatctgaagtggaagcaacactaaatcttaatgcaatgaaccagagtcccaacccatggcatgtttctttctcatatgcacgggctcttcagaacaccgtgctaaagacatggcaaggacaccctgagaatgtggaagctgctcaaaagtcccttttggtgcgtgctaaagcaaactccttggctcaacttggaagatactctgctgagggtgagagtgaagaggccaagaagggaatgtttgtcaagggctatacctactaaaactttaggagtcttttggtttcagttttgttttagctatttatcatcattccttcttagcagtgaattcgaaggggacttagatgttgtatttttattttttttcaacttctagcaaatgagagtttgaataaattgaaaagctagaaagaaaggttttcttggtaaaatggaagttggggattagtaaaaacccaaatggaaaaagaacagaagaaaaacaaagtttactgcttagcaatattttatt

SEQ ID NO: 1405 - DNA, 1828 bp, Glycine max
  Clone ID: PAT_MRT3847_101269C.1
aaataggaaaagtgggttgttgttggtcatgtttggcattgccgcttgagagctgtctcacatcacctaccgcggagtcgccaagaaaaccaaacctcatttcttttcatctcacctcactattaagtattaaactttcacgacacaacacaaaaagcatagtactatacaacaccactttctgtttctcttcactctaatggccatggcagcgtctgcaaagctcaacaccttgtcttcttcccagtggatcgcccacaattccttctctcctcgccgtggatcctcttctcgccgagtctctcttccgatccgcgcttcttcttaccaacacgaactcgtccaaaccgccaaatccattgcatcacccggccgtggaattcttgcaattgatgaatcaaatgccacatgtgggaaacgattagcatccattggattggacaataccgaggtgaatcgccaggcctataggcagctgctgctcaccacacctggccttggtgaatacatctctggtgcaattctttttgaagaaaccctttaccagtcaacaacagatggaaagcaatttgttgattgcctctgcgatcagaacattgtgcctggcatcaaagttgacaagggtctggtccctctgccagggtcaaacaatgaatcttggtgccaagggttagatggattggcttctaggtctgccgaatactacaagcaaggtgctcgatttgccaagtggaggaccgttgttagcattccatgtggtccttctgcattagctgtcaaggaagcagcgtgggggcttgcacgttatgctgctatctctcaggacaatggtcttgtgccaatcgtagagcctgaaattcttcttgatggagaccacccaattgagaggacgctggaagtggccgagaaggtctggtcagaagtcttcttctatttggctgaaaacaatgtcctttttgagggaattttgctcaaacccagcatggttacacctggggctgaacacaaggaaaaggcttctccagaaaccattgccaaatatactctaaccatgcttagaagaagagttcctcctgctgtccctggaatcatgtttttgtctggtggacaatccgaagtggaagcaacactaaatctaaatgccatgaaccaaagtcccaacccatggcatgtttctttctcatatgcacgggctcttcagaacactgtgcttaagacatggcaaggacaccctgagaatgtggaagctgctcaaaagtcccttttggtgcgtgctaaagcaaactccttggctcaacttggaagatactctgctgagggtgagagtgaagaggccaagaagggaatgtttgtcaagggctatacctactaaaacttttggagtctttggctttcagttgttttcttttagttatttatcattccttcttagcagtgaattcgaaggggacttagatgtgctgtattttattttttttcaacttctagcaaatgagtttgaataaattgaagctagaaagaaaggttttcttggtaaaatggaggttggggattagtaaaaacccaaatgggaaaagaacatgagaaaagaacagaagaaaaacaaagtttactgcatagttattgtttatttacctgttcaaacccaaatggaaaaagaacagaagaaaaacaaagtttactgcttagtaatattttatttgcctgttcagattttgctctcgacagtccagtttgtgattggagattggcatatttattccgcatctgttctgagtgccatatttacttggttttaaaatttgaaaagcaaaaaaaaaaaaaaaaa

SEQ ID NO: 1406 - DNA, 453 bp, Glycine max
  Clone ID: PAT_MRT3847_10126C.1
attcggctcgagcagggtttccttttctcacttggagctcccaattgaaacccaatttcgtgatccctccacactttctcgttcggaaaactcgcgaattggaaagacatcgacggctccgcgtgatacgttctcttcctgtctggatatcaatgttggctattagtgcaattgcatctttgcccgtattaccaccactcacaagaggtggccactgcattgaacagaatgttgcttccacattgagctttccaagacgactacagacaactaataattcaatatctctgagtagtacacagcttccattcggtagaagagctcgttctacgcaaccagcaactataatatgtgctgcagctttgaatgcaagatgtggtgcagagcaaaccccaactggtactcgccaggctcctacaattactcatgttcctggcaaggagaacgtaccac

SEQ ID NO: 1407 - DNA, 398 bp, Glycine max
  Clone ID: PAT_MRT3847_101270C.1
ctcactgccggtctggcagacaccactcaagcctttgcatgtcattccacattactacggcgaacgggtgttaatggggaatctttgacaactatatgcgtggtgagtccgctagctaccaagacaagtgtttgaagccgtgtttgaagaataaggaatggaaatgctctacttagcataggatagaattgtgttcttacataacacacattgtttttctcttgtcaaatcccatatttactggtacggcaaaaccttctgttttctaatgcaatgggaaactgtttaaatttgtggcgcctcccataacttatggcacttttgttggggggttcaacaaaggaaaccacccttttatttctggagctatataaacagtggcattggatcaacttctt

SEQ ID NO: 1408 - DNA, 449 bp, Glycine max
  Clone ID: PAT_MRT3847_101271C.1
tctatgacgctatcgatcgcacgcagtgacagtacagtcatcggaactcggcatcgaggctcgaggaaaatatctatctagccaatgccagtgtatgagcaccatgtcgaccgacacatcccacgcgtgctcaccgtgatgccggccatagtgcgttgaaagcgaggcatctgaccagctcacacatgatactctatcacctagtggctatccggccaatgtgatgcccatgatgagtctgctgctcggtataaggcgagatggatgtgtgtagtcctgactagaataactattctgacggcgaattccattgctattgctgcatcggttgccacacactttgtacaggccattttcacattggaccagactagtaacagggatgctgatcatgttatgggacgtgtgccatcgttacccgttatcctacggcctcattggaaggatag

SEQ ID NO: 1409 - DNA, 378 bp, Glycine max
  Clone ID: PAT_MRT3847_101272C.1
gagagttgcaagagcattttactagctgggatgccctgcgagctgcattgcccgttggggctgtcattggagcaccaaaggtttgtaattttctcgacttctttttagtcaactacgaatgagaaaacgtttttgttttcattttctgttttttacttttaattacaaaactgtttccttacttccaatctatttcctgttttgaaatatgtgttcaaaactttccaccttgattcattcttatgtggatgcaggtgaaggcgatggatttgattgatgagctggaggtgacaaggagggggccttacagtggaggatttggatacatctctttctctggtgagatggacattgctcttgctctcaggacaatggtat

SEQ ID NO: 1410 - DNA, 251 bp, Glycine max
  Clone ID: PAT_MRT3847_101273C.1
accaaatgtgcatgatgagaaattgattagatatgctatgacagacatctgaagccgtatcttctgatttacacatttctatgttcaacctgaggtagctatttggttaagtaacttaaatgattcattatgagcttcggctgacatatgctgtgtacaaaattgaaagcaagcaagtatgggcttgcaaacgtacaaggctactaacatataaggtagtgattaatcgatctctggcaacttttgttgca

SEQ ID NO: 1411 - DNA, 801 bp, Glycine max
  Clone ID: PAT_MRT3847_101274C.1
agccggttccttacatagatctggattatgctgccgtggatcctaaggcggagcagaaaagctccgccaccgccgacggcgtcgttcccgtgcagagcaacttcgagccattcgcctacggttacaagtacaataccactctctcacagtctcagatgagccagagtgtatcgtcgtcgtcgatggaggttggagtcgtgccggacgggaacacaatgtcggagacatcgaactgcagctacagcaaggtgcctccggtgacggtgacggtgacggcgcagttctcggcggcggatagggaggcgagagtgttgaggtacagggagaagaggaagaaccgtaagttcgagaagacgattcgttacgcatcgagaaaagcatatgcggaggcgaggccaaggatcaaagggaggtttgcgaaacgcactgacccggaccctctggctggatacggcgtcgttccgtcgtgttgatttcgctatgatgttaatcatatatatcattatatgaatatgaatgatgctgttgtttttgctgtatatacactatgctcttttcttttttgtttgaattatgcaatgtaaagttgcaaaaacacatttgtgatagattttgtagtttgttggatgtttttggatgaattttgacagcttttagggaacgatgctaatagcacctcgttttcggttatgactgcgttcagatctagcttatgaaagcctggcaatgttgatgttggcatgacgtgattaagatattttttaatcatagattatatttaatcatatctttgatatttgt

SEQ ID NO: 1412 - DNA, 295 bp, Glycine max
  unsure (1)..(295): unsure at all n locations
  Clone ID: PAT_MRT3847_101275C.1
agcacggaaggggggtcgagcgcgagccgcncgagccgggaagagncgcatttgaaaactaaacaagcgacgccaggcgtggaaaagacaagctgcagggcggggcgcacaagaacggaagcaaaancgcaaaaaactaaggacagaaggggcggaagagaaagcagagccgagacggcggaagaagagaaggggcaaccgaggacaccagggcaaaaccgacgaagcgggaaccggagaacaggaacagcaaagagaggaaaaggaggaaagacacccggacagggaggaagca

SEQ ID NO: 1413 - DNA, 259 bp, Glycine max
  unsure (1)..(259): unsure at all n locations
  Clone ID: PAT_MRT3847_101276C.1
cttcacactctnccctctcnattcaccattactccnctcttcttnaanttttgctnttcttnnananctctgcttcaagagcaaacgtgattctgcacncgaancccttgaatggagttcgaaagttngnnanncaaaaggaggantgagtnggtgattgtntccgcngccgcggaggangcgagttcggctgtggagggtgggtcgcngctgcctcctccggcggagagcgagaaagagagcggcgcctccgtggaga

SEQ ID NO: 1414 - DNA, 259 bp, Glycine max
  Clone ID: PAT_MRT3847_101277C.1
ttttatcttgctatttaatcttttcagtttttatctcaacaattctcccgacttttctgtatagtttaaaaggtaggggcttcctctctatatgatccaatcttacctactctttcatgctacttcatatctcttctataatttcacctaaattcaatttactgtccgtctctttacaatctctttaacttttaaaaccctttcattaccctacttaatcacctttcatcacatacctctttcttctatcttcttttta

SEQ ID NO: 1415 - DNA, 176 bp, Glycine max
  Clone ID: PAT_MRT3847_101278C.1
gatttagcaatggtgaaactagccatgaaggacgtaccactagagcatttcaacgccggagtgtgtctaaacgaggagatgaatttaaacggtgagggtactgacgtcgagacttgggtgcacaaggtgatcacattcctgtggtgactcgagcacactttaatggaacacaaaag

SEQ ID NO: 1416 - DNA, 377 bp, Glycine max
  Clone ID: PAT_MRT3847_101279C.1
accggaccggttttccttggtcagacccacgctctccttttcgcgctgtcgacaagttgaatgggactattgttaatatgttagcgaaccttatcatccttagacaaagtgtggttggtgatcttaaacatctctctgttgggatgctgtatgagggtaagcatattcctgtttctaatattatcgcacgggagaatcatgtcctccaaatacccctaatggcacaggaagaaattctgccattccgtgcaagagattctagaactgcaacggcgagcaaaaattgcatgcctcaagctactgcattgcatgtgggagctttcagaaattatcattgagcgttttagcaagtcctcgactgtaacatagtcaggagc

SEQ ID NO: 1417 - DNA, 387 bp, Glycine max
  unsure (1)..(387): unsure at all n locations
  Clone ID: PAT_MRT3847_10127C.1
cgaatgcataaaatcacatgtcactcgtcaatggacaacttcaaggctccgagtggattttaaacgtaatgnactgtcgaacatcttacatgaggtttcactttcaatatttagagatgttcgtacgaaccccatatccagatggaaatagcagcatcatactgacactaaccaacattgattgagcgctggtcaactgacgcgaaccatgtgcaaaccagcgttgccggtatactaacattggtcgaaaagaacgaatgggacacctccgccctgagtgccaggaagccaggccactacaagcgcatcaattttgggtagatgtcgtgtaatcacaactgggcgcccagcgacaagagcaactacgcatcgaatatccccgcacct

SEQ ID NO: 1418 - DNA, 999 bp, Glycine max
  Clone ID: PAT_MRT3847_101280C.1
atggagtcaactttccactggtcgtttttctttattaaatcaaatggtcaagtggacaaaataatttcacattattaaacggcagtctttttccggttttcccgtattaaacgacacggcagtccttttcctttattcaatggtcaattaaagagacttgacagtaacaaaagaagctgttggagttttgaacgtattaaacgacgtagggtcgtgtgactggtgaagtattaaacgattcgtctgcgtttctgatctgagaatcttagcgttttaaacgtgcacgcatttccaaaaagggaggatcgtatccgtaggacaaactacaaagtattcctcgagcaccacatgtccttgaataccataactttaggaaattgcttggcagttggcaatgacttttaatacgaaaagtcaaggaaactgcaattcaaattattcatcatttcaattttcaaccactcaagaggacgactacaaccacatctatcatgtttgattctctgcaaccggaagaacaggtcatggattggtgaaacgcgttgctcgtgaaaggagagcttcagcctcttctgcaacttccggcaagtcgcaattggaaattgtgaaaaagaagtagcaaataaatcttcggcgatgaagcatggttgtgatgcgcgcctccaagatcggttgttgaggtcttcttgggaagggaaacatcggagatcggagaattagaagaagggatgaagacatgaagtggcaactgcaaaaactaaaaggttgcatctgaagcagaagcagaaatagtcatagaaattgtttcgtctatacgtttctagagagaagagaaattaagtattcaatttgtcctgagttcaacgagattatcgagttcagttttacttctcttctttttcatatttctgaattctcgagttcgctcatcttcggcttgtttcgtccttggcttgctcctccgcgcacatccccttctgtcgtcttctcgcagccgta

SEQ ID NO: 1419 - DNA, 398 bp, Glycine max
  Clone ID: PAT_MRT3847_101281C.1
ggaaaatcaattctgatgctgcaaggtcagtgtgaagcaatgagtttccattgtcagtttgtcactttcttagtaccatctctgctagacacttgagttttgaggctagatctgacgtttaaattccagaatctattaattgtgtcgatcaatctctgaagattttatgttcaaccaagttgaatgacattgtgtgattcatttagccgacctcacctaggggataacgctttttgttgtataaattgtgttgcgatgaactgtttatgtatttggttattagcctttctctctgtgattattatttgattgtttcgaagttataatccaatttaagtaatgattaatgaaataatttgtatgatgatttggagttcggagtctagcctactctctaa

SEQ ID NO: 1420 - DNA, 517 bp, Glycine max
  Clone ID: PAT_MRT3847_101282C.1
ggggggaaatcctggaaaaatccccggccttggcagccccgcccgcccggaaaaacatcccaaagggcccccaaaattcacaacagccccaaccaaaggatccccttttcccgggaaaccaaaaaaaaaaacaggggaaccccccaaaaaaaaaattccggggccccttttattaaaaggcccccaaaaccaggggccccttaaaaacaaaggggggaaaagggcaggacattcacccccaagcaaaaaaaaaaccccgggggggtaaaaaaaaaacccccccccccctaaaaaacccttcccttcacttaattgggggggccgcaaaaaacagacccccccccccaaagcccctcccaaaaaaaaattaggagggggccaaaaaccaaaggtaaagggccaaatccccccccaaaaacccctaccaaaaaaaatttaggagggggccaaaaaccaaagttaaagggcccaattccggggaaaaaaaatgggtaaaaagggaaaaaaaggggggggg

SEQ ID NO: 1421 - DNA, 215 bp, Glycine max
  Clone ID: PAT_MRT3847_101283C.1
atctaaaaacaataaatctgtattttgggatacgtatgaaatgtttacaaatgatcaatcaatcagaagctatccatataattgttaaatcctacttatagaaattaataaatctatatgacagtttgtgattaaaaagaaacattaacatttttttctgccaataataatgattacgtctctcatgagtgtctcaactttcggaaataacaaat

SEQ ID NO: 1422 - DNA, 1780 bp, Glycine max
  unsure (1)..(1780): unsure at all n locations
  Clone ID: PAT_MRT3847_101284C.1
gaagagagttgggagagagggaaaaaaaaaaagaagagtgagcataaagaatttccaattcttacttttttatagattttaaaaataatccaattttaaagtaaccaatgctttcataaataactaaatccaatttcttttttaattctccatcccgtcaacaaattttaccacaacgcatttgaaattccccnaaaaaaaaaatgaattccccatccaaacacaactaataaatttattccaaatgcatgtcatgatttctgtctcatttcaatttttattcctaatttctgtcgaacacttcctaaaaaatggtacaaagaacctttaaactagcagtggcgcaatgaataatcctcataataacatggctttacctatacaagacctgatagatccacttcaaaaataagctttcatcttttttcacatatttagctttctattaagtgaaatttgagagccaaagacatgaaatatgaaattttaaaaccaataaaaacattttttccaaatcataaattaataaataatcatgcattgaaaagcatggctttaattagcccaatcactagtacaagcagagagtatgtttaggacgagtcctcattctctgcaaacgttgatagccttacaagggcaaatttgagctcaacaagctaagtaaattcctaaatttgccaggcataagaatccgatatattgtttgttaaaatatgcaatcgagtgaatgggtcacaatcacccgcaataaattgaaaacaatgttgataatttacaggcaagggggatgtccaaatacagacaaacggcccccaacttgctgcaacatggtaaattcatgttacaaacagaaatttgggttaggatttatcaagttaaacattccgcatcagtgaatcaatctgagcacatgaattaagcgaaggctgttgcactatttctggttcatccctcgagccacttccgagcttcgatgtgtatctcctgtgtctgtaaaagtggttgaggttgctgctcttgggctaatggataagctcgcggttgacacattctatagtaaggttctttgagctcaagttcacaggatgatgtttgaagaatccctccttgttcagccccaggaccccacgttttagctcacaattttaaatagattgtataactctgagcagtgtgagcaatcaagtgcatcctcccagtgatttcttgtcctcccatcacatatattggctgtgagagaacacagcgtaactgatcccagtgggttgtaggtgacccaggggcagtggtaaccccccttcgcgcagtactgtggatttggaataattgagtcacaaattcactcccattgcacagtacatcaacccagcatgccaacccatgtagcctggcacccacagtggctgtgaatttgagaggaacgtcaatttcatacagctcttcttcccggacgcgtgggtcgacccgggaatttcccggcgaagccgaagaaggagccgaagagaggtcggaaactgatgccaaagcgaactctcgctgcttccatttctgccctaacgattcctccattactttactactttctccaccgagccacaacccactactctctctttacttaacttctttcaaacaatacgttcatgaatgataacactacgcgtgaaactatgtgtgagtgtaattattagagaagaaatcgaaatgaaactagggtttggggttcgaaaaattgagagccgccaaaggaggtgagggtttcttcaatgttgtatgg

SEQ ID NO: 1423 - DNA, 349 bp, Glycine max
  Clone ID: PAT_MRT3847_101285C.1
tgcttaattaggggtacctgctatactcttgctaacttattgcagctcccatgaaaaaccaaagaggtgttacgccatgttaatgattgtagaaacttgaaaccaaggttgtggtacctaacacatgcacaaacccagattgtgttgttcgttagagggcgggcaaggtgggagaaaaacggcgaacctaattcgacgatgaatggatcattggaaataatgaaacggggggttccggtagacatgacacatacatcatatcttatcaatcacatgggcttagtgctcccctagctttagaacgaggagtgccgggaactataataattgggaggatgatgaccaggaa

SEQ ID NO: 1424 - DNA, 251 bp, Glycine max
  Clone ID: PAT_MRT3847_101286C.1
ctcaagccgaatctgttttagctcgagcctgtccagcacgtatatttggggacacgcatgaccgggtctactctcgcatctcctgctacagcataggcgatgcacaacctggccgaacacctcaccggtgcgacggcttaataggagacctgaagaagcccaatcggtgtctggtgcaacgagctgatatacgctcgcgacaacgacgactatgactacaatatcgtcagaggcatgcgtcgcggctctca

SEQ ID NO: 1425 - DNA, 343 bp, Glycine max
  unsure (1)..(343): unsure at all n locations
  Clone ID: PAT_MRT3847_101287C.1
tttttgnttttttttttttttttcgccccaaatggctcgctttgatattcaaaagttcttacatttgcctcacgggttgcttcgatctcaaaccggcccaatgcatcccaaatctgatgatttgatggaaaaggctcgatctcggactggcccttgccaacatattttttttcaagacttatgtacccaaagtctctcgcataaaactcgacaaccctcattggaaattttgcattatttccacagatccttatttcaaaattagcaggacaagcttttaccataagccggccaaccaacttaaccaaaaccttgggcccaaaatggctttcaacaatactgg

SEQ ID NO: 1426 - DNA, 554 bp, Glycine max
  unsure (1)..(554): unsure at all n locations
  Clone ID: PAT_MRT3847_101288C.1
ggtccggaattcccgcgtcgacccacgcgtccggaagaaaatgctggcaacagtgaaggagggaaggacgacgacgagtgtggtggcggctgaggaatacacgacggagttccgagcctacaatgacgacgcctggtacacggtgcgcgttttgctcgaaggagagagactcatagtgaagtaccagaacttctccgacgaaaacgacgaggcgtttgagccctcgcggtttggggattgtgaggacctcgaggacttcaaggagcgcttcaggccgctctccagacagctccaggacgccgagtgtcgtcggttcggtcccggcgctagggtctgcgcttgccactccttcgcccccgacgacgttcgcttctacgacgccgtcatcgacggagtgcaaganaacgagcattcttgggaaataggagaggaagaatgcttgtgcacctttctactttactggttgcatgggccaaatgcaagaaacttgactgctgaaccaattgantatatctgtgaagttcagtctgcatgggagctagatcctgcagtga

SEQ ID NO: 1427 - DNA, 403 bp, Glycine max
  Clone ID: PAT_MRT3847_101289C.1
actgactctaattctaaccaccattctaacttctcactctttaatcgcaatggtcatctcatcacctaagcaaccctctctactcgaaacggtgggaatcaccatcttggtattgggcccaggcccaatcctcgcatcgaacgcccacgatatcaatgtacggccaccgaacctctacccggaatccctaacgtgggacccacgcgcgcagcactttctgctaagatccctacgccagcgcatcatcgccgccgtctccgacacgggggtcgtggaaaccttcatgtcagacaccgaccttcccgcagacgtcgacttgctcggcctagccgtcgattccccgcgaaaccggctactcggcgtcgtacactgcagctattacctccctccgatcaacgccctc

SEQ ID NO: 1428 - DNA, 517 bp, Glycine max
  unsure (1)..(517): unsure at all n locations
  Clone ID: PAT_MRT3847_10128C.1
gaaggtttcccgtcatcactgtatgacgtcctccttctttgggggggggggggggcatgggcaaaggcgacaaaagatgagctaaaagaaaaacaggcgtgcggtgggtttagggcagggcgatttgacagaaatacccggaagcaggagaagcgcccaagtatgagccagggaggggaagggcaagctaagatagggagtatgaaccagcgaattaattaagcttgtatgatcgtcgcagcgtattgataaagaatttaatacccgtgggtaataagtgctcggcgaaatgagaaggtagtcgcagcgggttttgttatgatgccgagcgttgcagggaagggcacaacagacatgcgtgagtgaagcaggtagcaacgcgtagtgttagaaccaaacgtcgttgtaggcaggggcaaagagccacacgcgccacaggtaacagcggtaagacacataggtgttaggttaaccaccaacaacgagtnttcaaaaatttgcacgttaaggttactgg

SEQ ID NO: 1429 - DNA, 324 bp, Glycine max
  Clone ID: PAT_MRT3847_101290C.1
tcgtactgctgttataagactacataaggttaaacctatttctcttttatccctggaatcgggatcctgtgaaaacggggtacgtatcatcaaatgggtagttgcgtgttgaagttagtatattccgttctgtttctgttcttccttctaatattggttgatgtttttattatcgactctcaaacctggttaattctctcttacgtgccctacatatttgttcaacttaaggaacagttcactcaatgacttcggcgatgacttagttcgtatataaatctgatttttttgtaaagcttgtttggcttgatcttttatttcaat

SEQ ID NO: 1430 - DNA, 201 bp, Glycine max
  unsure (1)..(201): unsure at all n locations
  Clone ID: PAT_MRT3847_101291C.1
aataaggctccagattaggaggatacctaatcttgtttatcattttcttacttacctctctcgctctaccacaaaactccttctacggagtatctgtataaaaaaacaatagtaattactattatggccccnatttatcataatacaagcaacgctaattctaacattaactatatcagcggagtgaataaagtgcatttt

SEQ ID NO: 1431 - DNA, 1046 bp, Glycine max
  unsure (1)..(1046): unsure at all n locations
  Clone ID: PAT_MRT3847_101292C.1
ttggaccatctggagcattgtcaagctcagtcttgttaataagaagggtgacatacttcaaaagaaatatattttcacgagttttttcgaaagactttgctatggtatcactcatccactcaaggaaactcttcacataatcaattgtgctggatgcaacatatgtaagaaagtatataggatagttcaagttttcatcagcccaatacgattccaacatcagaataagctccaacactcgtccaacagtgtcaacaggtaataatacattgccaccttcccttagagtcttctttaagatatctccaaattctttgtcattttgacgtctgtaaggctgattgttcaaagcattgtaagcatcagttattagaacagctgnacgcacaaaagaacctagaacagttccattcaaatgcctttctttcctatgattanaatcaacagcatatatgacatcctcgccatcctttgtattttccaaatagtacctcncaaaagatgtccagcaacatgaggtgcaatcacgattccttctcccttgcctgagaaatgatgattctgagaatatgttagcctcgttacactctggaaagaagaatcaatatcatcgagcgtgaacagatcgaactccgacacttgctttcttgagaggtactggtcatacatagtgagaaggcccaatctgtagacaggctccgttgaataaaccggggcagaaagtccaagccgcttcatggcatatggaagggcaccaaggtgaagtgtatccgcatgtgaaagcaaaacagcatctatggttgatgctaccctggcgaggggttgaaggtgggaagggtcgaagtggtcgttccagccacagtcgacgaggaagttgaagccatcaatggagaccaaatacgagagagggttctcattgtacactccacacagtggcgttacttgcactgatgttcccattttgctgccacgaaattgttcttccccaaaccagtggggtttatggagagaaagagggaggaggggaaaaggaaacggacgcgtgg

SEQ ID NO: 1432 - DNA, 230 bp, Glycine max
  unsure (1)..(230): unsure at all n locations
  Clone ID: PAT_MRT3847_101293C.1
gcacatntgnnaantntngtntntcgtntcatcanttgcattgcaaagcaaaaaccttgcaaattgcaatggcttcnaacaaggntattgccaccatcttggttcnttctctccttgcctactcaacatcattcaccaatgangtggcacatgccacccanaacctactccnnctcaccctcntcnatcanggangtgccccaaggagacattgcagcnaggggtgtgtg

SEQ ID NO: 1433 - DNA, 506 bp, Glycine max
  Clone ID: PAT_MRT3847_101294C.1
tgtatgttctaaaaaaacacttcttcaagctggtaacttgaactacccttcattttctgttctatttggcagaagtgcctccaatgctagtgtgacatacaggagggttgtcacaaatgttggaaacccccaaagtgcttatgcagttaaattggaacagccaaatggagtttcagttactgttgaaccaaggaaattgaaatttgaaaaagtgggtcagaaattgagctacaaggtgacatttttgtcaattggaggagcaagagttgcaggtacctcatcatttgggtcactggtttgggtatctggcaaatataaagttagaagtcctatggcagtgacctggaaatagtgaaaatctttctaaagggtagtgtttgggagaataagagggtttattgatgactcattagattaatgctggaagttacatcatgtgcataataagttcagttgtggcaaaagggtgatttaaattgctacttgcatttaaattgcttctttgt

SEQ ID NO: 1434 - DNA, 340 bp, Glycine max
  Clone ID: PAT_MRT3847_101295C.1
gtcgtccggttgcaagaagacaacagaagggtggggttttttataatcgctcgcgtttccataggcttcattgtctgggctaacaccttgttgcatggggccttctatagagcgctcattaacccctatgggaattagggcctgatacatttagctggaccttgaccaaccactggatctactggggcgggcctcttatctgtgggggaatagctagcctagtgtacaagggtgaatatttcagacacacccactagcaggtatccaccactgactactataacgggggaattgacaattaaaaaaaaaaaaacagtgtctgattgaactcattttgaat

SEQ ID NO: 1435 - DNA, 223 bp, Glycine max
  unsure (1)..(223): unsure at all n locations
  Clone ID: PAT_MRT3847_101296C.1
cgcgnacgtaagcnnggatccgctagagcgcgcgcgcgnttttttntgtttttttttttttttttgaggccacacaaaacgagcccatgggggggattcttaacttcaataacatatttgcgcttttattaacttgacattggaaggaggcaattgaatgcagcgtaaaatctaacccaaatcaatttaattttctggatctaccattgtatacatcattcaa

SEQ ID NO: 1436 - DNA, 287 bp, Glycine max
  unsure (1)..(287): unsure at all n locations
  Clone ID: PAT_MRT3847_101297C.1
tatgtctcggccgcccttctttttctttggggtgggtttatttaaatattaggtgggttaccaccccnaaaccttcttaaaaaccaggggtgaaagacccaatgggggagcaaaacctgctcgacttttattggaatcaaaaaaaaaaaaaaccctttgcagctaacccaagggcatcacccccttaaacacaatttaccttttcacaagacccaccctacctcccgcgatgttcaatttccacaaaaatccaacactcttcaacaaaattaaattttaaaactttt

SEQ ID NO: 1437 - DNA, 411 bp, Glycine max
  Clone ID: PAT_MRT3847_101298C.1
gcatctagcacaagatactagtggtgacagacaaagaattgtgagggagatcctggctgagaatagatggcttaaatcgccgcggcggcggcggcggcgctgtgcttggcggcccttggtggacgtggccgtctgccaaggcgaagtatagcggcacaggctcatggacctgcactgcttgcaggaggtccaagagagcccgctcgacgcgtgccgccaggtccttagaccggcagcttaaccaaagcggatgcggtggcagtttcagaccgatacggtggggcacccatctacggatgcggtgctgccaccaactgaaggacctaagccacataagtcgctgtgccctcattcgcacttgtcaggggaaacaatgaggccatacctccattaaagaaaggctcaagcccg

SEQ ID NO: 1438 - DNA, 372 bp, Glycine max
  Clone ID: PAT_MRT3847_101299C.1
cggctcgaggctcaagcactgcctttcattgtgcttaattaaaaggcaaacctttgtacatgtgcgttgttttgaaacatctcatcaccacactaattatctcacactcaaagctatagaccaaattaaaatgaaaggaaacaacccctatttggttgtgattctcatacaaaccatatatgctgctatgattcttctctcaaaagtggcattcgatcatggcatggacagttttatcttcgtcttctatagacaggcagcagcaaccctctttttgacccctttcactttcttcttcgaatggaaaactgcaccacctatgcctttttggaccttctgcaagatttttttcatttctttatttgggattac

SEQ ID NO: 1439 - DNA, 2090 bp, Glycine max
  Clone ID: PAT_MRT3847_10129C.1
ggctcgagataatgtcccctcaaaattaagtgtgaactactcaaaggcttcaaaaacaaactattttgatatttatagaacttaatgataaattttgtacaccacaaaaagcataacagtatatttaatttaatcacaaagaatacttctaccctttaacatactcaccttggatggatggaatggggattgtttctaatgtgtttatagggatgcctatttatatagattagattttatccatcataaaaataaaaactgattccataatatcaggatgtaaatatactttcaacaactttataattaaaactgaaatcgtgttaataacttggaatcgtgagaaaaattaggaccactttcatttgatttcaaaatcaaaactaacacttaaaggatacaaatgaaaaggaattttgaatagaaatataccattttgaaatcaatacgacttacaacgagacacccaaggatttttaagcaatgctagaagaaatatcaaaagatacttttgtttcccactaattagtttaaaacttacttgcatagtttagtgattactactttggctgttcttcctactgtttggctccgtgacctaagtattctaagttacatatctggtaagagcttatttttggtgcaagtaatgattagttatccattaattaaagttaaagcttggtcaaataaggttttatcatacttcatggtgtccttttctgtagtgggataagctttgttgttgttgttagagggaattattatacatgagattgatcataatgtatcaagttaccacttatatttaatatttgtagcttctcaaatttcattcctctagctgttgtcattcataattggttactaattgcccatgaatttgtatgttttggcagtcagctaaatggcatattacactatcatcattatttgaaaaagcttattataaccttttacaatgtttgttatagctggtggagttgttgcatcaattttagtggttctctgcctattatgggttggcatagaggacgtaggctttcatagcaaagggaccacactcaatcttgcaactcttcctgttgctgttggtctttattgttactgctactctggacatgctgtgttcccgaacatttatacatccatggcaaatccaaaccaatttcctggagtgctcttagcatgttttggtatttgtaccttattgtatgctggggctgctgtaatgggatacacaatgtttggagaagctattctgtctcagttcactcttaacatgcctaaagaattggtagcaaccaagattgctgtctggactacggtggttaatccatttaccaagtatgcgttgactatatccccagtggcaatgagtctggaggagttgataccatcaaaccatgccaagtcttatctatattccatcttcatcagaacagggttggtactttctaccctggttattggtctctcagttcccttttttggtctggtgatgtcattgattggatcattactcacaatgcttgttactttgatactaccctgtgcttgtttcctaagaatcttgcggggcaaagtgacacgaacacaggcagcactttgcattacaattatcacagtaggtgttgtatgttctgcttttggatcatactccgcccttgccgagattgtgaagagtttgaggggatgaagttttgagactcaaatcctggaagattagatatgtgatatgtctgccgctatttagtctgtccagatattctatctagtttgattgcacatccacaattttgagtcaattttttgcttgccatgacttttccaatctgtttatttgtggtttttctgatcccctgtttccttaccataaaaagttttgctcatgtttgaaatattggtaatcatagagtgtggcagacaaaacacttaagagtttgtaagaagcgatcaaatgaacttgttgaagagattttttatttctatgttcaaagtgtctagtgcaatcttttgttgatgataaaggatatttataaccatttaatgcagcaaatgcaatatagagtacttagtcacccaaaccc

SEQ ID NO: 1440 - DNA, 623 bp, Glycine max
  Clone ID: PAT_MRT3847_1012C.1
ctcaaatttttcaaaatcctatctttctttaagattcagtgtttttgcccctccacttcaactgggtgtcctccaatttcctgtaatggctcttcagttctgctagattattgaattcccaattcgcattttttccctttttatttattattattagattggattggaagagatttaattgcatacgtgacttttggaggttttacattcttcattgtttaaaggtccttttctttcaccggattcgtaggttgagatttttatatgtggcggtgatttctatgccccggttgggtgtgtctgatattgtgttgtgtgaatttgtagtagatcatgaatttcattatcatccaaaaggggttgcttggtagtgcgtgattaggatttgggaactgtacaatagatcactggaatttttttttggagtgattaaattagatcagagatgttttatttgttaattttgtggaagattgttgtttgtattgcataattggatggctggtcttgggaatagaagggtgaggatctagacaggttgtggtggtttgtgttgttactagttggtaggtggtgttagtgtaatctgtttgttgcattgcaatgtctggtggaaccccgcg

SEQ ID NO: 1441 - DNA, 760 bp, Glycine max
  unsure (1)..(760): unsure at all n locations
  Clone ID: PAT_MRT3847_101300C.1
acccgggtcccggaaccntccacgggtacgaacccacgccgctccgtctttgttttaactactactgaacttaatttttttatttttttaatgaagaaacataaaaaaaatatcaacaatacataaatttaactacaaaattcatacaacgtaactaaaaagttgtactctaattttactccaatttttttatttttctttatctacatatttctctttaaaaaaatttttaaacaaaatttaaaaaattaatttaataaataaataattttaaaatcaattaaaaaaaatttacatatataatatttatattttataatatttttattttgttttaaaaaaaaaaaggagcaaacatggaagtcggggtggccaaacccgacttcctacgtgcatgtcaaaagtagtgtggtatgagaaagaaagaacaaactagtgtagaatggaaaaaagagaaaaggtgcatttttgtaaaaaaaaaaaaaaccacattctctctcttgaatatgtatctaccgaagagaaaagaaatggcaacaaagtagaatactagcaactagcatttcatgggaggttgaaataaattcttgcttacatctgtaagcttntcttgtgggacactaacaccgatagaaactgcaagaagttgcactgctctcacaacttgatagcatattgtgtaggactgtgatatatgataatgataatgctaaagaagtttgcgagctcagctcatatatcactggcattcaaatgagta

SEQ ID NO: 1442 - DNA, 517 bp, Glycine max
  Clone ID: PAT_MRT3847_101301C.1
tcaatattgactggcatgtatggaattctttagttcaaaatatgcattgtaacttttatgtaacccctcctccccaacttgattggaaaatagtggcatttttcaacatttgttgcaataagcatcatacttgtttgccattggattcttcagtatgttgctgcacaactattctaaatatgcaacaattataatccaatgtggttttcaactctgcagcttgctcatctagcagagatggaggtgaaacatagatgtaatcaagtactggaactcggctttccattaggtggactagccaaactgtttgctcaagactgggagggtgatgtaacagttgttatgcctgcaactcctgcccaatacttaaaaatcatacagaacccttcttatgtagagcttcaaaaggcagctaaccaaggcagaagatgcacctgggagaagctttcggccatgaaagcaaattgtggaattgagcttgctcttgatgagtctgttgcaattctcaatcatatga

SEQ ID NO: 1443 - DNA, 184 bp, Glycine max
  Clone ID: PAT_MRT3847_101302C.1
ggcacaagtgtagtaggctgatccataagctagaagcagcgtgatgaaatagaacggccttggtagattcgctgcgacaattgaggcagcatgggaatgccatgcgtacgagatgttccctgagcgaatgaacaatggctatggcggccgagctccggaagtgaaatgcaaaagatagaagctg

SEQ ID NO: 1444 - DNA, 287 bp, Glycine max
  Clone ID: PAT_MRT3847_101303C.1
tccgaatgaccgactcgtccacgcgtcctacgacacgcgtccgtcgcccgtggcccgagacacccgacgccaccaccgcggggggttggatgcttgtctactctaggcgactgtggctaccatgtacgggggtgacagcgacaacatctactgcatcatcgatgacctgctcagtggctacacactggacttacttaacctgaaggtggtttccgcctttgtgctcggctcgaatggagtgctatttctggcgctggagttcagcgcaatggagggtggcgattagt

SEQ ID NO: 1445 - DNA, 2629 bp, Glycine max
  Clone ID: PAT_MRT3847_101304C.1
ctgcgatagaagtcgtgtaatgcccggcctctctcattataatgccagggaagaatgatcgcagagagagagagggtttttattttaacgttttttgttgctattcctttacagcttatttcctgcatttctctctcacacactcgcatctcagatcgaattcgaggtcactgactgattctgcgctgttgatgtttcatatcaactagatagctacatggtggagagagacatttttctcatatgacttctattaaccatattattattgagcagtgctgctatgggcatttgtcttttgaaatggcaatggccgtggcttctttatgttctgctgatacatgttgtaatcaataaaagcgaagcaatcacccccgatggtgaggtgctgctcagctttaggacatcagttgttagttctgatggtatcctattacagtggaggccagaggatcctgacccatgtaaatggaaaggagtgaaatgtgatctgaaaaccaaaagagtaacacatctgagtctatctcaccataagttaagtgggtctatatcacctgaccttgggaagctagagaatctgagggttcttgctcttcataacaacaacttctatgggtcaattccaccagagttgggaaattgcactgaattggagggaatatttttacagggtaattaccttagtggagcgattccaagtgaaataggaaacctttcacagcttcaaaatttggatatatcaagcaattccctcagtgggaatattcctgcatcacttgggaagttgtataatctcaaaaatttcaatgtatcaaccaattttctggtcggacctataccttctgatggtgtccttgccaactttactggaagctcctttgttgggaatcgtggtttgtgtggagtgaaaataaattcaacatgtagagatgatggttggccggataccaatggtcaatctactaactcagaccaaaatcaaataggaaagaagaaatattctggccggctgctcatcagtgcatcagcaactgtgggagctctacttttggtggcacttatgtgcttctggggttgttttctttataaaaagtttggcaaaaacgacagaataagtctggcaatggatgttggtgcaggtgcatcaattgtgatgtttcatggagacttaccatattcttcaaaagacatcatcaagaaactagagactttgaatgaggaacacataatagggataggggggtttggaactgtttacaagctagcaatggatgatgggaatgtgtttgctttgaaaaggattgtaaagttgaatgaggggtttgatcgtttttttgagagggagcttgaaattcttggtagcatcaaacaccgttatctagtgaacttacgaggatattgcaattcacccacgtcaaacgttataatatatgattacgtacctattgctagtcaccaacgtcaaagtcatgaatgtatgattccactagactgggattcacgcttgaatataatcatgggagctgctaaaggactagactgggattcccgcttgaatataatcatgggagctgcaaaagggcttgcctacttgcaccatgattgttcccccaggatcatacatgctcgggtctctgattttggacttgccatacttctggaggatgaagaatctcacatcaccactattgttgctggaacgtttggttatctagctccagagtatatgcaaagtggcagagcaactgagaagtctgatgttccagagtatatgcaaagtggcagagcaactgagaagtctgatgtgtatagctttggtgtgttgacactcagggtctcaaaattgaaagcgaccaacagacgcagcattcattgaaaagggccagaatattgttggttggtctatgtttaggggtgcaaataataggccgagagaacttgctctctgtggctattcagtgcgtttcctcaagtccagaggatcgacccaccatgcaccgagtggtgcaattgcttgaatccgaggtcgtaactccatgccctagtgacttctatgactccaactccgattagaaagcttgcaaaggcaaactaaaagtatgttgttgtgtttgcacccatgtcactgcaaattccttgcaagtcagaagcgattatagagggtcagaatctgcagtgttaattttcatctcagttgcattcattcttaactggaattataatgaaagaggttcttcactacactacatggtagtagttgttgtggttctccgtcacatgtcatcattggacatgttcatacatttcttcgtctttgtgaatggagttgtatgtgttactcgatcaatcgctggttccagtcttcctcgtgttttttttttccctctattttttctctctttctctttgctagcattgtaatctttgttacatttcttcactccaatttaagtgtatatgaatgtgtacaagttcagatggcccactcttgcaagtgattcttgttatttatttttgtaatatatgtcccataaaagaattcatctaaatttatttgtaatatatgtcccatctaatgagtgtggttctcacttaaaaaaatgtgtttttattttttccatccaaaaac

SEQ ID NO: 1446 - DNA, 1397 bp, Glycine max
  Clone ID: PAT_MRT3847_101305C.1
gttggttcaggtgcatcaattgtgatgtttcacggagacctaccatattcttcaaaagacatcattaagaaactagagactttgaatgaggaacacataatagggatagggggatttggaactgtttacaagctagcaatggatgatgggaatgtatttgctttgaaaaggattgtaaagctgaatgaggggtttgatcgtttttttgagagggagcttgaaattcttggtagcatcaaacaccgttatctagtgaatttacgaggatattgcaattcacctacgtcaaagttgttaatatatgattacctaccatcttggtagtcttgacgaagcacttcatgaaagagctgatcaactagactgggattcgcgcttgaatataatcatgggagctgcaaaagggcttgcctacttgcaccatgattgttcccccaggatcatacaccgagacataaaatctagcaacattttacttgatggaaacttggaggctcgggtctctgattttggacttgccaaacttctggaggatgaagaatctcacatcaccactattgttgctggaacatttggttatctagctccagagtatatgcaaagtggcagagcaactgagaagtctgatgtgtatagctttggtgtgttgacactcgaagtgctgagtggaaagcgaccaacagacgcagcattcattgaaaagggcctcaatattgttggttggttgaattttctaattacagaaaataggccgagggaaattgtcgaccctctatgtgaaggggtgcaaatggagagccttgatgccttgctctctgtggctattcagtgtgtttcctcaagtccagaggatcgacccactatgcaccgagtggtgcaattgcttgaatcagaggtcgtaactccatgccctagtgacttctacgactccaactccgattagaaagcttgcaaagacaaacttaaattatgttgttgtgtttgcacccatgtcactgcaaattccttgcaagtcagaagcgactatagaggctcagaatctgcagtgttacttttcatctcagttgcattcattcttaactggaattataatgaaagaggcccttcattacaccactacatgatagaagttgttttggttctcagtcacatgtcatcattggacatgttcatacattttcgtctttgtgaatggagttgcatgtgttactcgatcggtggtcttcctcgtgtttatttttcctctattttttttctctctctctttctctttgctagcattgtaatctttgttacatttgttcactccaatttaagtgtatatgaatgtgtacaagttcaggtgacccactcttgcaagtgattcttgttatttatttttgtaatatatgtcccat

SEQ ID NO: 1447 - DNA, 323 bp, Glycine max
  Clone ID: PAT_MRT3847_101306C.1
gggaacaaaaatgcggggcgggtattgtgaactggcaacaaatgaaatgggcaaatggttggcaacgaatcccggcactaattacaataccaaaaacatttcttattttctaaattaggcactaggggggaaggttcaatcatggggctccacaatacttgggaacgaataaaaaacatcattccagaggtttcttggcatcagatatctggtggggtgcccggcacatttagatatccctgggggggcattcatacttcacctttttattggggcgacatgggggcacttaccaagggtgttccacaggatggagtccccag

SEQ ID NO: 1448 - DNA, 207 bp, Glycine max
  Clone ID: PAT_MRT3847_101307C.1
gcccaatcggctcgagagacctgactattatttggacgggctgaaaaggcaagtatgtaatctcagctcatagtttgtgtggtgtctccctcagtgtgactggatatcttgtaatgttatttctggattttctcttctacaaaattgtctatcaaaacaaaatgtcagttatgttttaaaataccataagaaaaaaatcgttggttt

SEQ ID NO: 1449 - DNA, 245 bp, Glycine max
  Clone ID: PAT_MRT3847_101308C.1
atcgcctgccaggctgccactgttcctgcgttctgttcgggtgcttgcgtgtctcggcgactctgctaaccgaagatccactctgtcacgcactcaactcacatcagggtctcggccaaccatcaacccacgcctttctgtctctgactccacgcctgctcagctgcctgcatggatgccggcgctatgcctttgagataggcgagtgaggcaggtcagagagcgacaatccacctcaacgcaga

SEQ ID NO: 1450 - DNA, 402 bp, Glycine max
  Clone ID: PAT_MRT3847_101309C.1
cttcaaaccccaaactctcattcttcatcggatagcccgtcacatattcttaccacggcgctgccaccaccaaattatgctcattcaaacaaggcacaattaccatgtacttaaccctacccaactaccacctccagtccttcaaattccagcccatcaaagaatccatcgagtcacgggaaatgacacgccattacatgacctacatgataacctactccgacaccgacatcataatcgtcgtatcctgttcatccgggctctcctgcacgtactatctcagcaagaacctcgacgtgagcgtcgccatagtcgatcagacagtgagccccatctgcagcacgtatctatgatgacagctcttctactcgacggtggtcctcatgcctgcgcacctcttac

SEQ ID NO: 1451 - DNA, 184 bp, Glycine max
  unsure (1)..(184): unsure at all n locations
  Clone ID: PAT_MRT3847_10130C.1
caagaacacagttggaggaatcattctgcgtagtgatcttgggaagtgcaattttagattgagaaattttcagatccaacatggagcctttaggagtttccacatcatctacggctttgctngaggtaccattctgcgtagtgatctattggcaaattttttgacagagggcaattttagagca

SEQ ID NO: 1452 - DNA, 484 bp, Glycine max
  Clone ID: PAT_MRT3847_101310C.1
cagagatttacaacttctccctattgttatgaattctttcagcaattgctacaggaatgaggatgttgaatgagtccaatttcccccttctctgttattttctttgaaggtttctctgtcctcaaactcagaattaccattcacatcataatacatcaaggaaaacatgagataaccagaataagatcctctatattacagatatataccagaattttcctactgcttcctcagttgaagttccaagtcatgagtctggctcttctaatgaatccacagatatttctactcctctaactcatgatctgggtgtttataatcaaatttcttcagatcagaatactggttctggttcctgtctttccactgttagacctgctaacattcatccacaagtctgctactgtctactgggcaaaaacagaaagccaaatgaaaatgcaagaaactgtagcaggagaaataaactttgatgatgacagtg

SEQ ID NO: 1453 - DNA, 267 bp, Glycine max
  unsure (1)..(267): unsure at all n locations
  Clone ID: PAT_MRT3847_101311C.1
agcaaacaccttcatgcactctacaaaaacaatctacaagcaactccctcgatctcttcgcacaccttcaactactctaaagatctctcgacctatcaccaccacagccagaatgtctttcttccctcgatcctactttgcncccgagtnctccttcacccctctcttccgcctcctggacgactacgacaactactcccgggaagtctccagccagcaaggacagagccagaggcccgctgggcgccgcactgcctctctccccgc

SEQ ID NO: 1454 - DNA, 545 bp, Glycine max
  Clone ID: PAT_MRT3847_101312C.1
tacaccttttaaatgttgataaatgggtcaagtttatgaatatgcgtcttaaggtggttgatggactatggctcggcgtttttacccctcaatcaaagcttcaatatacaccaaatgaggacggtctgattgttgaacgtcaaaggttgtctgaagagtggctattccctaagccttcatttattacagaagaagttaatcaagatcatgctatccctgttactttaatgactgtcctcactcattcagaggtggtatactttattttgttcacttgtgcccacactcttaacttctaactccctattgattcatgtctttttttacctatatcaacaatactactactactactactattaattattattaactaaattcatatgttgtaggtgactgctaaattcaagtgtgttgttcgagtggtagcagcaacgccatgccaagctgaaaatctgttatctagtactggggaatatagaatgcggcttacactagaggattcaacagctagaattcatgcttttgtaactgccaaggatggg

SEQ ID NO: 1455 - DNA, 226 bp, Glycine max
  Clone ID: PAT_MRT3847_101313C.1
aaaaaaaaggggtatatatccattcctttgacaaaaatcctttttactaaactacaaacaaactttttattacactaacaatctgactcacaaagtcttccaaatacctaactcttggaaccacaatttctaaaaacaatcttcacaatcaaaagaagatactgtcatcaaaataatatctcaactaaccttcaagatcacattcacatctgattaactacaacca

SEQ ID NO: 1456 - DNA, 332 bp, Glycine max
  Clone ID: PAT_MRT3847_101314C.1
acccacgccccacgcttccgttttaacaagtgatgctacacaaactcatacaggttaacaaagctggatagggctagcgcttaccctttgttcttgatttcatgaatcttgcatattttacacacttatgcctgccacgtagaatacaggaccgaagatgagtatggactatgatacacatacttattgcaaaacatgccccaagcctgtgagcatagtggggaaacattttaagattgggtacaaggctgacaatggccaagaaactgccttactccgtattttatttcattaatgaattgcacagggaagcgatggatcattggtgttag

SEQ ID NO: 1457 - DNA, 773 bp, Glycine max
  unsure (1)..(773): unsure at all n locations
  Clone ID: PAT_MRT3847_101315C.1
agcnncccccccctttttttttttttttgagaaaaggaaaacagtatctttattgtgtagttctaacaaacattcactgtgtgcacattccagtagaaagagacaaagatctttgttcaaaataagctgaaaccaaataggtaaacaaaccccatcgttgaattcacaaaaggaatgtagtattagccactcagttgagggtgcaggaaaagacaagccaaataaccgaaaggagcgtctgcccaagcagctgattagacgaggcaggcgtgggcaaggagtggcccctgccattcatgagtaggacactgggtgtaaggcaggtgactggcacacccctgcttcttcagcctccctcctagaccactcccacaaatcccaaagctggccaaatgtgacggagctccccgttacttttgggatatttggcaactgaatctcacagcttcaacccttcggtttctcgttgagacaagacatgtctgagtccacttcccttggggtaggaggcaatgaacatttacgatccttgcttcagtcatctcaggtcgacttcagccggacgggcatcactggagacagaagcatgagtgctgcatgtgatgacacaccttgcttgtaaatcactttccactgcttgccatcagcacttaatgagcacaaaccctacaccgtgagccccgatggcaactgctggaagagccagccagctcaagtgacagctctggacagacttgtctctgcttaaagtagtccatacactgtgtgctatt

SEQ ID NO: 1458 - DNA, 399 bp, Glycine max
  Clone ID: PAT_MRT3847_101316C.1
gcgtcgctgctgatgaccgccccgacaagcgccttaagaccgatgctagggtttctccttcaagagatataaatcattcctttgtgtgcatagtacagttcaagaaacttgaatgttagggtttgtgtgaaaatgacccatcgatcacgactggacctatcatggtggttcacggggattgggctgctaagcctcaacgcacggtgcgagcacttggtggagctgagcatcctcggcgttgctgcgatggcgcatgcgcagaacctgcggaagttgtggctagcgaggtgcaagatggtgacgaatatggcgattggatgtattgttatggggtacacgaggctcaagctacatgtcttgacagtgctgtcgtcgattggctgatatggcgcatgcgca

SEQ ID NO: 1459 - DNA, 392 bp, Glycine max
  Clone ID: PAT_MRT3847_101317C.1
cacaagataacacacttatacttaattaacagaaaatagtgaagaaataataaggacttttctagagtgtacacataaagccataaacacatttaagacaaacaccggttactaagaagacactagatccaaacctgactctaaaaaacatacacgctttaaatgggcccgagacactaccggctgtctgcacactcctgtatatcactaagcctgctttgcattggactggtccgatcccacgtgcagaacgacctaggcgcttacattataccaggtgctgataatctaatcgacacactttataccctgccataatctcggtagatgacgtgtggtctcccttcacggcgtaaagtataccccgatcatcctacgggaccttgtttctt

SEQ ID NO: 1460 - DNA, 346 bp, Glycine max
  unsure (1)..(346): unsure at all n locations
  Clone ID: PAT_MRT3847_101318C.1
tgatgtttggattagggacagggatgctggcagagggctggcattgaacatcgctggtggcggtgactctgatgacattgacagcgaacgcggtgtggggattttgcatcaaaactcgncctctgcgagcagtgcacttcaggggcttcttcggaaacttggtgctggtttggatgatctgcttccatcatcggctatgggctctgcgtcttcctctcaccagagtgggaggctgcaaaagatcctcttcggattgcgggccgttggcgaacaagggcggcaggttgtagcattgccacagctctgtgagatgctttccgttgggacttgggaggcacttagtaca

SEQ ID NO: 1461 - DNA, 428 bp, Glycine max
  Clone ID: PAT_MRT3847_101319C.1
tccttttttttttttttttttttttttttaaagaaaaaaaattgggattggaaaaaaaatgggctttccgggtggatcctttttaccatggcttaaaattaaggtttttccccggggttttccttccttgaaagtattaagcattttttttaaggccctacaataaactaactttttagggccttaacaaaagggttttattttggacccctttttgggagtttaaaccttttttagctgggggggaggcctttaattttaattaccacggcccttttaagatttttaataacaccggttaagctgttcacttttcccgggttcaaaaacccccggtggaagggtgggaaattcggcccctacttccttttaaatggatccttaagtttttacctaacgctttggatcacaaaaaactggttcatttc

SEQ ID NO: 1462 - DNA, 269 bp, Glycine max
  Clone ID: PAT_MRT3847_10131C.1
gcgtccggtctcatacgctgaactgaaaaggaccgtcttttatgacttgcacgcagacaatggagaggagatggttccgttagatggatggagaatgccattccaatacgaggactcagattagagactgctgcccttagctgtaggagagaatggcagcacaatatgacgttgacgatatgagcggtctaatcctccaagggaacgactctgacacgatgattgcgaagctcagtatcgctgacgatgctagtcttgactctgtaact

SEQ ID NO: 1463 - DNA, 502 bp, Glycine max
  unsure (1)..(502): unsure at all n locations
  Clone ID: PAT_MRT3847_101320C.1
ggcaatatcagagcaaaggcaatggcaatttgcctggctgtgcattgggtgataaacttcttcgtgggtctattttttttgcgctgnctggagctaattggggcgcaactcctgtatagtatttttggttcatgttgtttgatagcggtggtttttgtgaagaaatatattctggaaacaaaagggaagtcacttcaggaaattgaaattgcacttcttgcacaagaagcaaactaaagtggtcatatatggacaaggaaaatctgtgctttggttgcgtggggtcaagttttcagagtcttgatcatctcatgctatattttgagtctttttgggcaatgtaattgctaattacataattgatatcatagtttttggttttgttttttttttttaacggtttatcatggttttgattttacgtgaatacgacaggaagaattgcatgccctctccctgttcaaaattctcctaagaaaaaaattaattacttatttcatcc

SEQ ID NO: 1464 - DNA, 311 bp, Glycine max
  Clone ID: PAT_MRT3847_101321C.1
cagcgtgtcttctgctactctttgtgtagccaaaccagcgtttcaggcaaatgggaaaggcttttcacaattataaggcctcacaagctgatcaagctaccttccttcttctacaaaatctgtagaggattgccattcagtcattgcctcccagacccatgcagttggaagcagtgcaagatacaagaagggtgtgacagatgccaaactgacggccgccatcaacaggtttgcatggattcgtaagaacttcttgaggtgctggcacggtcgcaaaaactcccctcttgatgtcattgccatcaacgaca

SEQ ID NO: 1465 - DNA, 359 bp, Glycine max
  unsure (1)..(359): unsure at all n locations
  Clone ID: PAT_MRT3847_101322C.1
tggnagcnnaananngcagtcgtgtacnnnnngactgacatanagnagngcttgnnctcntatcganannagnnnganntngagtnnanttgtntnantctgntcggnanncactgnggtgngatntatggcagagagnaaanantcncttntgtcaagtngttgcatngatgagnncgcattagnggatagcnnantttggtanncctgggancangtttntctacgnnagtngtatagntnnanggnggtnaatcatnnncantagcatgactacnntnaanctaannagggtgactcttctactnagnaacatacttncgaggngccantaactcngagntnggnctggcacaatt

SEQ ID NO: 1466 - DNA, 907 bp, Glycine max
  unsure (1)..(907): unsure at all n locations
  Clone ID: PAT_MRT3847_101323C.1
gggaagtcaacaggtaatgctgtnttctagctttcataaatgataaatttggatgagttaacttcagctcgtcaggtgttgtgttgattttanctaagaattctaagaacattaaacaatctgattgcagatanattgtttgtctgaacctcacccaacacatgtttttttgtcctatttgaatttttttgtcattgcattgtatttaaagaacacaaggcacaagaagctttaaaaaatgtcgagaagcttttacaagaaacttgggggcttacattttcctaacacaggaggtatataaatatttttaccaaaattacaataaaacactattgatgtatttaataacttctgtaaacaacttttaaaatgactttttaaaactgcatacagtgcagagttaacccacattcattcctttctgcattgactaatcggcattggttacaacttccaattacgtccttactataattatgatttagatatattgagtcaatgttcagtttcatgataattatttggggaaaatccttatacattatattaaaataaatacttatattgtccgtttggtgtggacattaattttaatagatataaatgtgatttttctgtttatctttgttcgctaaatgtgctttctgtaagagttttaactgctgcactaatgtgcagaagctagaaagggttcatgtaggacttcaagaagaagagagaattgtaatgatctgaaggataggtatgctgcaggcaccaaggagcacaagcactgctattctctgttgaaagctttacaggtaagctttttctgttcatcggatgacatgtaagtggtgccatggtgcagagttaagcttgtgtatgatccttcgtaggtgataaatctgtgcctatctgataaggc

SEQ ID NO: 1467 - DNA, 1464 bp, Glycine max
  Clone ID: PAT_MRT3847_101324C.1
ctcgagccgctgtcatacccacttccccttcaagagcacacgcccagatcagcgttaacaacgtcttacaactgcgaaacaaaaccaatctgaaatgtccgaccaacaagagatttacgctgcgttccccaacgtccctcaggctcctcctgattccatcttccaattgaccgctcgttacgtcgccgacaagcatccgaacaagatcaacctgggtgtcggggcatacaggacggacgaggggaaaccttgggtcttgcccaccgtcaagaaggcttccaggcaactagaagagaaccccaatatcgaccatgaatacctccctatcacgggtcttcctcagttcaccaaggccgctcaggggttgatctttgggaaacagaacaaggctgttgacgagggaagggtcatcagcgtccagaccttgtcaggtaccggagccaaccacttggccgcgctgtttttcgccaagttttacgagttccctacggacaaggagatctacattagcaatcctacttgggccaaccacaacgccatcatatccaacgtcggggtcacgcccgtctcctacaggtattacaacaaggagaccatcgcgctcgatttcgatgggtacttggaggacttgcaaaaggccccagagagatcggtcatcttggttcatgggtgtgcccataaccctaccggagtcgacccgacggccgagcagtgggacaagatcctggacgtctttttgcaaaagaagcactacgcgttctttgactcggcttaccaagggttcgccacgggagatctcgatcgggatgccgggtccatgaggaagttcgccgagaagagggtcccgatgttggtctgccagtcgtttgccaagaacgccgggctgtacaacgaacgagtcggtgctctgcacgtcgtcgcggccgataccaaggaggccgagagggtcaagtcccagttgtccgtcttgcagcgaagcgagatctcgaaccctcccgcttacggagctcatatcgtctccatgatcctcaccaacccggaactcttcgattcgtggaagaacgacattaccaccatgtcgggtcgaatcattgagatgagggatgccctgtttgacttgctcaatgacaagttcaagacgcctcccccgcccggaaggaaggactggggtcatatcaaggagcagatcggcatgttctcgttcaccggtctcaaccctgatcagactaagaagctcgtcgaggagcattccgtctaccttaccgggaacggtcggatatcgatggccgggctaaacacccacaacgtcgagaccttcgccaaggccgtcgacgaggtcgtccgaagtacctctggtactgtccccggttctgccctctgaggggttagctagcgtcttgtccgtcatcgtggtcgtcttgtatatagcttgtcgtcggtatcgaaaatgaagagccaattgtc

SEQ ID NO: 1468 - DNA, 518 bp, Glycine max
  Clone ID: PAT_MRT3847_101325C.1
ccgcaggaaccggaccggaagacctggcacgacccacttggacgttcacaccaccgcccacgcggccgggacaacgcaggcaagacaacgcaagacggggggaacgacgccaaggcaacgccataagcctatggaactggacacaccagaccaaaccgtgccatggaacccgggggggcgaacgactcaaccaacaaggatgacctaaactctccacgggcaacaatctataaccagagtcaaagagagaggaacaacggagctcgatagcgctgacccgatataacaaacatcctggataccaacgaccctacaataacaataccaaaacacgacggcgcaactagagtgacacggagggcgaaaaacgacgggccaccaggcactgagactgcaagactcaaagtaccagcacgtccaaccaaaaccgcggagcctaatgcgttgaaaaccgacaacattggcgaagagaagagcaggaagaagacagtggaagccacaagaccaggtgagaccac

SEQ ID NO: 1469 - DNA, 876 bp, Glycine max
  Clone ID: PAT_MRT3847_101326C.1
ggctcgaggtagtcttaaaatcacacatgtaacgtgtaaaatcaaacacgctgtagtaaaatatgcttaatagagtcacaagcaatgggctatgagacatacgggattaggtgagaggaaattaacgtctgtgtaattaaattggtcaaacaaacaaaggagatagataattgtttttggaaaaactagagtctagagtgaggtttgagaattttttttgggaaggatgagatcaatcttcccttatctatctatttatatacaaaatgtgttgcaataactcttcactttgtaacattaatccacagctagcaacagaagatgtcgatcatcgagcatgtggtgttattcaaggtcaaagaagatgttgcaccgtcggaggcagataccatggtggagcgtatcaactccctagcctcgctggaacagctgcttcaccttaccgtggggccattatttcgcatccgaacctcccccccttcgttgaaattcactcacttcttccacacgcgtttcaactccaaggacgacctccgctcctatgtggcgcacccagcccacgtggccgtcgtcaaggccaacacgcccttggtcgacgacgccatggcccttgattggctcgccgaggttcccggcggcaccgtgccgccgccgggctccgccttgcgagtcacgttcttcaagttgaaggagggtgttgaagatcgtgtaaaagatgagattgtgggggccatgagaggatttcagcgtgagttcaaacaggccattcagctcacttgcgggggaaatttctctcccgcgagagccaaagggttctccattgcttcccttgaagtttttcctggattaagcgaactagaggcagcgaaggagcta

SEQ ID NO: 1470 - DNA, 691 bp, Glycine max
  Clone ID: PAT_MRT3847_101327C.1
tttttgggcaaccaatcaattgtgactttccagaaaagaatattaataatcacagcatgtgatgctcttttttcttgttctaatgaattagaaacaatcttcacactagtatttgataatagatacacacgataaaacaaatgcgataataaaaacacagccttttacaacataattcgactagaggattgacgcatctccagcctcttttccaggaacaataacaacaggtgctgctttacagtggtgaaagcagtactcaccaacacttcctgtagcacactttgaatcaagcttctgcctcgggtccccataaccacagctgcaggtttgatcctctctgcttccttgcaaattacttttcctggatcaccttccacaattcgagctactgttttcaccattagtacttgaaaagcctcaatggctaatttctccataagaccctgggttatgtcgtagacaacttggttatgcaagtcggaaacggcgtgaacgagatggatggtatcagcgagcctgcaaaggtgaaccagagcccaatcgaaagcatgtttggtattggggccatgatctatggctattattatgtcccttcctcttctcctttcccctgtttccctccccagctctggctcgcccaccactgctatcagagaaggaagcctcacttctctatagttgtatcttc

SEQ ID NO: 1471 - DNA, 841 bp, Glycine max
  Clone ID: PAT_MRT3847_101328C.1
gaaaaggggaacatgggcaaccaatcaattgtgactttccagaaaagaatattaataatcacagcatgtgatgctcttttttcttgttctaatgaattagaaacaatcttcacactagtatttgataatagatacacacgataaaacaaatgcgataataaaaacacagccttttacaacataattcgactagaggattgacgcatctccagcctctgtgaatcaaagaaatgaaactcctttaatattcggctgcaagaaaaaaatgttgaaaagaaagactaaggcaacgatggcacaccttttccaggaacaataacaacaggtgctgctttacagtggtgaaagcagtactcaccaacacttccctgtagcacactttgaatcaagcttctgcctcgggtccccataaccacagctgcaggtttgatcctctctgcttccttgcaaattacttttcctggatcaccttccacaattcgagctactgttttcaccattagtacttgaaaagcctcaatggctaatttctccataagaccctgggttatgtcgtagacaacttggttatgcaagtcggaaacggcgtgaacgagatggatggtatcagcgagcctgcaaaggtgaaccagagcccaatcgaaagcatgtttggtattggggccatgatctatggctattattatgtcccttcctcttctcctttcccctgtttccctccccagctctggctcgcccaccactgctatcagagaaggaagcctcacttctctatagttgtattcttcctcttccatcactctctccattcctatactcataagacaattaaaaaaacaga

SEQ ID NO: 1472 - DNA, 253 bp, Glycine max
  unsure (1)..(253): unsure at all n locations
  Clone ID: PAT_MRT3847_101329C.1
agaatcctatgaggcgactactaganccaagngcgaggcggctgcnatgcggcaggagcatcggcacaaagatgaaagggaggcggacgcaatggagactgaccgaggcgacgtatgggcgagagacaactatgacgcagaagcacaaaacgactccgcaacgaaagggccaggaacgcgaggcttgatttcgccagaaaaggcacggcccgacggaccaatccttgaatcccaccgccagcgggggagagtc

SEQ ID NO: 1473 - DNA, 1573 bp, Glycine max
  Clone ID: PAT_MRT3847_10132C.1
ctggtgctgagtgcattgatcctgattgtacttgggtggaacaatgggttcatcgagctgggcctcgtgaaaagatatactataagccagaagaagtaaaggcagcaattgttacttgtggagggctctgccctggtcttaatgatgcgtccggacagattgtaatcacccttgaaatatatggtgtaaaaaacatcgtggggattccttttggttatcggggattttctgacaaagaattgacagaagtgccgttgtctagaaaagtagtgcagaatattcatctttctggtggaagcctgttgggagtttcacgaggaggacctggagtcagtgatattgcgaacagtctggagaaaagagggatcaacatgctttttgtattgggtggaaatggcacacatgctggtgccaatgcaattcaccacgagtgccgcaaaagacggctgaaggtatctgtaattggcgtgcccaaaactatagacaatgatattttattgatggacaaaacttttggctttgatactgctgttgaagaagcacaaagagcaataaattctgcctacattgaggcacatagtgcatatcatggaattggggttgtgaaattgatgggccgtagcagtggattcatagcaatgcaagcatccctgtctagtggacaggttgacatatgcctgattcctgaggtacctttcaatttacatggacctcatggagtattgagtcatctcaagtaccttttagaaacgaagggatcagctgtagtctgtgtggcagagggagctggacagaatttactccaaaagactaatgctacagatgcatcaggaaatgttgtatttggagatattggtgtatatattcaacaagagaccaaaaaatatttcaaggagattggtgttcatgctgatgtgaaatatattgatccaacttatatgatccgtgcaattcgagcaaatgcatcagatggaattctatgcactgtacttggacaaaatgctgttcatggtgcgtttgcaggatatagtggcattacagtaggtttatgtaacacccactatgcctactttcccatccccgaagtgatatctcatcctaggctggtggaccccaacagtcgaatgtggcatcgttgcttaacatcaacaggtcaacctgacttcatctaataatttatcctttttttccaataaattcaagaggcttggaaattcaggtttccaaagagcatatcataagaagcaaggttcaaaatacgtctggtcaatttgtattgaacaggtatatgtgaaaataatgctaaactagtgcgactattgtaagatgtaacattatttaaccgatgttaggggccaaatggccaaaatttaatgagtaaattagctgattaactgtcgtgtttgaaattcacgccttgaatactggattgcacgttaataattgcagtccctggggatgaattttgtggctaaattgtgcaaaggttatttgcaaagcattttaaggatattttggcacccatcatggttggtgcctcggtgaaaagagacaaattcagtaaattaccctg

SEQ ID NO: 1474 - DNA, 192 bp, Glycine max
  Clone ID: PAT_MRT3847_101330C.1
ggtggcctttttttttttttgtttaaaagctataaaagaaaccgaagggtcttgcctttcctgcaacctatccaatacatttatttgttttggggtgctcccgaggaatattgcatatttcttataagggtaaggaaagccaagtattttatatacacccttagcgcttttggatgaaacattttatttttg

SEQ ID NO: 1475 - DNA, 211 bp, Glycine max
  Clone ID: PAT_MRT3847_101331C.1
cccttattgatgtgctctattatgttatccatacaaaaaaacttacaccccctaaaaaaccgcaaactaccggagaaagaataccacgattgttccccatagggggaaccaaaagggggggaccacaccagatagcttccattggcataagcagctatactccggggcccacattttggagtaagcaaacgaaccgggaaaaccggggggg

SEQ ID NO: 1476 - DNA, 294 bp, Glycine max
  unsure (1)..(294): unsure at all n locations
  Clone ID: PAT_MRT3847_101332C.1
ccggaccggaagttcccgggtacggacccaacgcgtctcgtacctggcgagaagactgacagtaagggggtgttgtatttttactactannaggaactttgggaactgtnggatgcggtctactaggagctaaaactccatagctgtaggctagaactgcaaggaaatatgattaatggaaggttgatgccttngatggcaattggaactcaaatcgacttcctcagaaagttcctcaacttctgatgtgctcgctaagatgaaaagacactcgacttccgagtgaaggagctt

SEQ ID NO: 1477 - DNA, 497 bp, Glycine max
  Clone ID: PAT_MRT3847_101333C.1
gggaaaagaaccactttttaggaccgcaaaagggaaattatcccttggacaataaaaaaaaaggaaggaatgccctgtttattttttcaaaaacttttgaaaaaaaacttttttttttttgtccaaaaccacttggggttcggaaacatcaaccggttcaaaatcattttcaaaaaattggattttaggttccaaaaaagttattatgggggggcaaaatggaccctttgggccccacaaggggtgggaaaaccccaataaaacgcccccggagattgggggtgctttccccaagaccccccctccatggggaaaaaaggggggggggtttttttaaaataataaagcttcatgtttttaaattggaaaaaaggttttgggggaaaaaaaatttccaagggcttaacctggggagggtttagggaaatcgggaacccccaagggaaaggaaaggaaagcttcccctttaaaaaagacccttgaaaaatgggcattcc

SEQ ID NO: 1478 - DNA, 358 bp, Glycine max
  unsure (1)..(358): unsure at all n locations
  Clone ID: PAT_MRT3847_101334C.1
gtaagctnggaattcgggtcgaggatgctcattaaatcttgctatgaaaaaatattgcgccccgctcaagctacaaggacgatgttacggtgcttcagaaattgtgattgtttgggtgactacggtcatgataactaaattactgtccatcagtctgtcaagccttactttatgggttgtaaattgcaaagctttctagctggggataatatcaccattactgagggtatggacaaaactagtgcaactctgcaatttagaaaggtagcacattgtgatgttctcaggagaaactgtaaccagatgtctaatgttttgcgggtggctcctgaggacaaggtgagtccatggtcacaac

SEQ ID NO: 1479 - DNA, 355 bp, Glycine max
  Clone ID: PAT_MRT3847_101335C.1
ttttttatcaaacaatcaaatgaaatccgtgttttttttttttatcactaaaaccacaaacatttcaacatcaaccttaattgtttcacttttattttacaactcaaagcaatgccaccatacattatggcactttattccacaatatgttgcaatcgatattaacttaaaatttaaaataatataatcacaatatccggaaaaatatatatgaacaaaaatcctttccaaaaagcttcacaagctttcaaattcctacatataaaatgattgaaaaatttattttaaaaatattaaatcttaaaattttactttcgtaacccaccaaaattatattttctcctcctaacgcttc

SEQ ID NO: 1480 - DNA, 435 bp, Glycine max
  Clone ID: PAT_MRT3847_101336C.1
gttatgcgcgcagcagactttactgccgtgactccaatgtaaagtatagtagggggaatccgcttgctatacagatgcatgaatatgcttgaagaatgctgctaacatacccgcaaaaaatcatgatgctgcaactcagctagatgacatcatagcgctttgtggagctagccctcatggcaggtgtctgctatcataaagtgtcagatgtgacactatggggcatccactcatctactcatgtgcctgactacataaatgctatattggatagtgtgccatgcaaagaggaggcttaggatcataagtggacggaggaacaggtcactgaaaaggctcataagagaggtgaagcacttattcaaaaatggggacgatcatgaggtgcataaacttctgtgtcaatagggatgccataggatctttagtactcct

SEQ ID NO: 1481 - DNA, 208 bp, Glycine max
  Clone ID: PAT_MRT3847_101337C.1
tcttattaatcttatcaaactcagccaagagaaggtccattcctttcttatcatatctcagtgaaggtgtttttaaatccctttcaactttgtccaatgcatttatcttcagagcctccgccccaagatcatctgtgagaactcttttggctcttatttccttcagagcaaagataagtccgagcatttggatatcctgtgtctcaat

SEQ ID NO: 1482 - DNA, 474 bp, Glycine max
  Clone ID: PAT_MRT3847_101338C.1
ccacgcgtccggcttcaaaccctaacgcttgcttcttcaacactctcgcaggatcaattttgagcttcaatggaggcttctcagatgtcactgattgaatggcaatagctcagaggtgggtttttgaacaacatatttgtagaaactttttgttgatcttactcaatctactattctattccctagctatcaattgagacaatgccaagcaaaagaagcaatctcttgaccctgcttctccagattttcttcctcttccttcatttgaacagtgctttccaaagagcgcctgtgaacacagggaagtcactcatgaagaaactggtcatgtgctcaaagctccctttcgtcgagttcacctgtgtggggaagccggacactttgttccctatgacactggcggcgcccagaatgtaaacccatggacaggacttccaaaattgtgcggagggtgggttttttggagggagaaac

SEQ ID NO: 1483 - DNA, 537 bp, Glycine max
  Clone ID: PAT_MRT3847_101339C.1
ggctcgaggaaaagtgcagagatctttggtggagttggagaacattcataataatggccaaggagaaaatttatttttgccttctgctgatggacaaaaccatgataacaaggtgttgaagagccaactatttgcggaaaaatttactgaaagtgtccaatatactttcttggattacttggcggggggatttgaattgaatttcatggtggctgttgactttacagcttcaaatggaaatccacgccttccagattctttgcattatattgatccttcaggacgaccaaatgcataccagagggcaattgtcgaggttggggaagtgttacagttgtatgattcagacaaacgatttcctacttggggatttggagcacgaccaattgatggtcctgtttgccattgtttcaacttgaacggaagttgtcattactgtgaagtggaagggatccaaggaattctgatggcttacacaagtgccctgcttaatgtatctgttgcaggacctacactctttggaccggtcataagcac

SEQ ID NO: 1484 - DNA, 652 bp, Glycine max
  Clone ID: PAT_MRT3847_10133C.1
cggctcgagctcgagccgaatcggctcgagcggctcgagctcaatcaggaacccattagttacaagatcgagagaagtatatggatgataatggaagtgacttttgtgaagaaccctgcatgattgctggaagtcattcgtgcacccttgacagattgtatgcatgggagagaaaactttatgatgaagtaaaggctggtgagttcatcaagaaggattttgatcgaaaatgtgacctgctaaggcatcaatttgcaaaagaagaaggcaataaagtgattgacaaaacccgaacagtagtgaaggatctgcattcacggataatagtggctatttattctgttgatttaatatctaaacgaatcgagaggatgagagatgaagaattgttcccacaacttttggaattaactcaagggttgatgaggatgtggaaggctatgcttgaatgtcatcatgcacaatacattactatctctttggcttatcattcaaggaactcaatgagaactttggaaggagatacccgaagagagataatggctcagctactagaagaatttgagtgctttggtctaagcttttctaactgtatcgacagccacacctcatacattgaagctctcaatgtatggctacaaaattgtatact

SEQ ID NO: 1485 - DNA, 886 bp, Glycine max
  Clone ID: PAT_MRT3847_101340C.1
cgagatccccgcgcgtgtggtcatgaagagcggtcaacccacgcgtccggaaaagggaagtaacttatgtgaataatatgaagggcggtcaagaaatctcaaaaacaccgtcctcttctaagagaacactaagtcagggttcagttgatatatatgctgctcagtgcaaaaattgcttgaaatggagagagattgatacacaggaagagtttgaagagattagaagtaaagttgctgaggaaccttttctttgcagcagaaaggctaatagttcctgtgatgaacctggtgatattaaatatgattcctctcggacatgggtgattgacaagcctaacctcccaaagactccacaaggttttaagaggagcttggtgcttagaaaagattactccaaattggacgcttactacatcacacctgcaggcaaaaaactgagaacccgcaatgagattgctgcgtttctaaaagataatccagaattcaaaggtgtgtctgcttcagattttgatttttcttccccaaagataatgcaagacaccatccctgagattattgagcagaaggattctgctaacaagaaagttaagatagccaaagatgaggtttgagaaatatcatctctagtttgcatgctgcgaaagatggtcattctggttggttttttggatgctactttagagactgtttgtatggtaaagccaaagcttgcggcgtcgaaaatttttttgttctctgtcttttgtattatataaacttaagtatgctattgaaaccatatgtaatcgcaattcgcacacctaaacagatatttactgcggcttgtgtggttcaaaattaaaatgtaaacggaacaccccaaaagatatcagtgtttttttatgcc

SEQ ID NO: 1486 - DNA, 430 bp, Glycine max
  Clone ID: PAT_MRT3847_101341C.1
aacccgaataaaatttacctgaccccttaaaatttggtggaataaaaaatccccctttaaatttaaaagcaggatagctttttataaacatgaatcaactttttcctttttttgggattttttttcattacaaaaaaattttttttcatactacgggggcaagactgaacaacaccttggtaataagggaaaaattgaaaataagggcccttgtaatttttacccaaaggtgaaaaaaggggaatccaatttagcttccatacttttgggcaagctttgccctcaaaatatttaaaatgttgcatgttggacgatcggaattttccaaagggtgaaggacccctctcctggccaaatttgttagggaaggaatttcgaccagtttgggataccccttcaaagaaaatgcttttaaaaggccctttttttt

SEQ ID NO: 1487 - DNA, 410 bp, Glycine max
  Clone ID: PAT_MRT3847_101342C.1
gaggggggccaaaatcgggcgaggatccaaatttaatcgagcttgaccattccccacaactgactttacctttattgggaatatacttattcgcaaaatttttaatacctaaccaaacgctaaaactctctgtttaagaggaggtcttttggcaatagctactcaagaatggaataatgagatttgacaccgacaaataaatttttaaataacagcgcaattcctactttcttgcaccatatctatttagacaatctcggaagattttgagaaggccccttctgtgctacaataactaagcctatacttatccttattgatgcatgtgcttttttatgggtgcgttgtaagggtaaatattattagacctactggctccaacacgttaaggtgggaaggggtactattag

SEQ ID NO: 1488 - DNA, 2252 bp, Glycine max
  Clone ID: PAT_MRT3847_101343C.1
caacacaacatcgtacatagacagtttgatttttgtgttggcctttcgtttgtttgtttatttaggatattgtaagagttagtatgataaataacagcacgtgcatcggaattttcattaagttttttttttttttttcagttgatagtttattgcctcagatccgccatggacgcagctccgaaggcctttgtctgatttcctctttctttcacttgtcatgggactgaatcgaactccaagacataaccctgttcttccaaccaaatctccaattctcagtcgttcacattctcgttctcagaccatgaaaacaacacagatctttggtgtgtctctctcactcattcttatcaacctggctgctataatggagcgtgcagatgaaaaccttcttccatctgtctacaaagaagttagtgaaacatttaatgctggaccatcagatttgggttacctaacattcgtaaggaactttgttcagggattatcatctcctctagctggtatacttgttatcaactatgatcgcccgacaattcttgccatgggcactttctgctgggctttatctactgctgctgtgggcgtttgccacgattttctgcaggttgcattctggagagcaataaatggctttggcttggcaattgtgattccagcactccagtctttcatcgctgatagctacaaggatggagtgagaggaaccgggtttggattgctgagtctcgttggtaacttaggaggcataggaggtggtgttttggctactgtcatggccggccaacagttttggggcatacaaggatggcggtgcgccttcattttgatggcaactttgagtgcattaattggattccttgttttactatacgttgttgacccaagaaaaagatttcctaccacacgtgatgctagtgagagttcagacagggatgacactgtctataaaggcaatgctagtgcagcatcaatatggatagactcttgggcagccacgaaagctgtgatcaaagtgaaaacatttcaaataattgtcttacaaggcattattgggtcactgccgtggactgccatggtgttcttcacaatgtggttcgaactaattggttttgataacaatacgtcagcaaccctcctgagtctttttgctattggatgtgctatggggtcattcattggtggatcaatagctgatcaactatcacaagtctaccctcattctgctcgtaccatgtgcgcacaatttagtgcctttatgggcattccattctcatggtttcttcttaaggtgatccctcagtcagtaagtagttttcctatcttttctgtcaccctctttataatgggtctaactcgagccgctcgagccgctcgagccgctcgagccgctcgagccgtgcggctgcaaatgctcctatgtttgctgaggttgtccctgtaaaacaccgtaccatgatttatgcatttgatcgagcttttgaaggctcgttttcttctattgcggctcctctggttgggattctttctgagaagatgtttggctataattcaaagtctgttgatcccatcaaaggatcttcaccagaggctcttgccttgtccaagggccttctttccatgatggctgttccatttggtttgtgttgtttatgctacacccctctatattacatatttaggcgggaccgtgaaaatgctagaatgcttgctgtgaaagaggaggagatgatgtgagacacaacacaacacaacacacgtttttaagtatggtagatcattttaaaggagccctctagctctcctctgcttgtgaattgggtccccatttaattggagtttaaagctccgaaaaacacgtggttccgacttttgaatccaacttcgaacaatgacctcatttgatttttttatttgaagaatccaggttaatcatacattcatggttccgtcatggctaggttgcttattaccgaggattgaactcactctggcttctgagccatttcttgagatggcatctgtagctgaatggatcagaaatatcaggatatttaacccaggctcatactgttttgtggcgagatcatcttgttttcatacgattgtacactataaaatacacaagtaaatttgcattcttggttcaacacttcgactacacaaaacaacaatgctaatgaagtattttgaataacttcaataaaaaaaaaaaatggacgaccacaggccggccacctagttagtcc

SEQ ID NO: 1489 - DNA, 450 bp, Glycine max
  Clone ID: PAT_MRT3847_101344C.1
atggggattctttttgaagtgaatttcatagcccacactaaaccttgaaagaggggaacacccctataaaagctaagtccaaacccaaatggaacctaagtgaaaactgaacaccccttaaaaaattacggggtgacaatcaaggaagtacaattaaagcgggagcccaccactggcaacaatgacaaaaaagctgtggggagcgccacttgggggtccccccccttgaaaaatgaaaacaccattctattgagaaagaactttaccaaaaacaacatgccaaaagaccaaacaactatttgtcacggatgtactgtaaaaaagagaaccattgttgtgaggaccaagatttgccatccatggaagtccaaaaccaggatgccttagctagaaggccccatcttcgaactttaataaaaaaatggaccctcccggacgcatgggacgacc

SEQ ID NO: 1490 - DNA, 349 bp, Glycine max
  Clone ID: PAT_MRT3847_101345C.1
tccgttcttgtgggaaggcgtgtataacttttttttttttttatccccttttttgattgctttttgtgagttatttgtgcccaaggggaaaaaaaaacgctttcgaaaggcaccttgttggggctccccccccacaacaaaaggctttaaatttttttctccaccgggggggaaaaagaggggaaaaccggtcctaacaaaaaacccccccaagggggggggggcggggggaaaaaatgtttttcccgagggaaggggggggaacaaaccaagtgggaggggaaccggcttttacagaacaccaaaatttccctacgtgggaccctggcccagggagggcttagaaccc

SEQ ID NO: 1491 - DNA, 351 bp, Glycine max
  Clone ID: PAT_MRT3847_101346C.1
ccagacgacaacagacgggttcttgcttcaccaacacatccatggattgctatactggtaaccttcttctacaatcatctcatactagaattggtactttgattaatagcccgttttttacattgcagtggaatcatacctcaagattcgaaggaaggaatagatcaatatcatcttgggagatacaattctcacggcactgggcattgctatataaaactccaactgtgtgagttctaaaatacaagaaaatgccctaggtgatttttgaggcttaagctaaatgtataaccgatgaactaaatatgacgccacttatttttggcaatataagattaacgaatcattatt

SEQ ID NO: 1492 - DNA, 895 bp, Glycine max
  Clone ID: PAT_MRT3847_101347C.1
agtcaaagaagcaatagattttattctaatcaagggggcataggggtacaccattttaagggggggcacaatagaatacatatattccaaggcacacagatacagaagaaactggctaagtacatataatatagagcttaagggaaatgaactagtattatacatacgacaccacctttagatgttgggagttcttcattctggtttagatgcttattctcgtaacataaagaaaggggcctttattatatgccttggcatgtaaactgtgaagatccattgacagaagagagggagcatgccggtgaacacattggattcatctaatatggaaggagttgtagccagaattctttgcaatgttcatctgaattcttccccagacatcagcatttctgcagtggctttctgtagggtgctgccctttgcttccactgcatccttcattgcaagtttcagcattgcttttccggcgccgctcgttatgtctggccaagcgtctccggcagcttcttttagcttcatcaaactctgccagctcttggaacctgctacattgctggcaaaacctctgcctcagtcctgcaaccatcacagaaggagccttggaatgaagctcacacaccttatggcggcgatggtacctctttgcaacagtcaaatcagcaccacacatctctgcctgacaagaaggtggaaaaaatccacttgaccctcttctcccactccctccaccacctttcttcttctcatcttctgcaagaccaccctcaccaccaaccacactttcatcctcctcttcttcatcttcaacttcaactgtgctgtctctcctcaccttttcaattgacacttgtatcctctctctactcttgatctccattgtgagtggtgg

SEQ ID NO: 1493 - DNA, 314 bp, Glycine max
  Clone ID: PAT_MRT3847_101348C.1
gctatgcttacggtgaattcatgcaattattttccgtcagtagacttgatattaaaagcgcggggcaaatatgccaaactgacgatcgtcaccttaggcaaatgattgccagggtaggagactaacgcatactatatcaaccctggacatggtgactaacttgggatctgcatctggagcaacgccagataactctaatgagagtactactgcatgctgagaaatatctgttctagaaatgactgcattcgtaagagcggctaatgaatctatacatcaatcatcattaggtcatatttgcacaagccacacat

SEQ ID NO: 1494 - DNA, 412 bp, Glycine max
  Clone ID: PAT_MRT3847_101349C.1
aacacgcgtccgcacagacatagaggaagactctatcgccacgaagcggttggagcttacgaaacgacccaaagagggagcttaactcatccagagcagctcacttttatcgagtcctgcagcgtgattgtctgatatgtgccaagaatgatctgaagctgggctgaagacaagcatcacgaagagacccacacggtcaaaagctatggcaagcatgacaaagcgatccacatgatcatgactatgatcatgcatccgaagaaaaatcatttgaacagatccgtaagacggcgtagaaaaagcatttttaacaagaaacttgtaggactgtcttacagatagatacgctgcagatgatgattgaagcaccatgacatggtaaaagagtgacatgtatgtcgcagcataacat

SEQ ID NO: 1495 - DNA, 345 bp, Glycine max
  Clone ID: PAT_MRT3847_10134C.1
aactgccaaaggatttctttattgctctctacagcttattgccttcatgaaagagaccctaagatatatattatatatctgtggagatgactcgatatgcacttctcccccatggctgcctttattattccctattatacatccaccaacggtgctgaaaaacatccacatcttataaactctggttatgacggttgacatttatattgggcggttatgcacatccacggcagtcgtcattacccgagtaatggccatacatatctggagatgcattgtgcgcgtgctcacccttcatatccgtatattgcgtgtggtactatgggcaccaacgccctacccttt

SEQ ID NO: 1496 - DNA, 213 bp, Glycine max
  Clone ID: PAT_MRT3847_101350C.1
gaaaaagtaaaaatagggttccgagaacgaagaacctggattgttcgcagcccaaaaccaccttcctcctctctttccgttaagggtttcgtggtggtcttcttgttcccccctaacaaccggagttgggtgaaatttttgtaaaatggggtgagaccggaaacagatatcgttcgcaaagagacactgatggggaccggaaaaatcaaaaag

SEQ ID NO: 1497 - DNA, 515 bp, Glycine max
  Clone ID: PAT_MRT3847_101351C.1
tcgtgatcccaaaaaatggctttgagattccagagaaagctgctgcaaatgagccaatagcaatcttcaccagctccctctttcttaaaccaaaccaaattctgaaaaatatatgtctttctccgctgctcattttgttctgttcctttagcacagaaggctcagtgatatttatttggacctctccctgcacctctactagtggtctagtttcatcaagaaaatcttcttcacatacacttctattcttggaaactatagctctatccatttaacatttaaagctggttagagttcttcctccatactgtttggtcgataatatacataaaaaatgtacattaaatggtcaattacctagattcaggaactggttcaaggttctgcatgctgcataatgtactatagaatctgcttgtgttcaacaaactctggtgtgttcctgtcttggcaacttgtccattctctactacagcaatcatatttgcatttacaactgttgagagcctgggtgc

SEQ ID NO: 1498 - DNA, 319 bp, Glycine max
  Clone ID: PAT_MRT3847_101352C.1
tcttgacatgtgcatgacatgcctgaattaagagcaagttcaggttttctacgagaagctctctgcttctgctgccgacatgactgctaatatcggcatttagcaactcttccacatttcgacattggagactaagactttgaaccgttgcgatgttcaatgtactcatgctgaacgcgctgatgtgtatactattcatgttactccagaggatggcttctggtgtgcatgctacataactgttggttatgactgcaaagccgataatcttgactatatggtcctatatctatagtcatgtttccgtctcactgggttt

SEQ ID NO: 1499 - DNA, 261 bp, Glycine max
  Clone ID: PAT_MRT3847_101353C.1
tttgggagctactatgcctgtgggaatggattttcctcctccgtttactatgttagaggacaaagacagtgcatttgtggtggatgatcagaaatcaggggatataaaaccaatgacaaagggtaagcctccacgccatgcttcgggtttgaggcacagcgttagcaccaccagattgctggctgtagcagatttgagtttggatgtgggggttactgggagcaagtcatcttctgaagaaaagacggagtttctaccaat

SEQ ID NO: 1500 - DNA, 221 bp, Glycine max
  unsure (1)..(221): unsure at all n locations
  Clone ID: PAT_MRT3847_101354C.1
cccactcttcctgtgttgtttcactattcttgccattgagctttcaaccacttctggaggcagcctctttaactggtttgtttgtaaccatacnatttaatatataaacttnnnnnncttaacatattttacttattttttttttattttatattttattattttttttatttttttattaatatttatattactattattttttattaatttattatttt

SEQ ID NO: 1501 - DNA, 616 bp, Glycine max
  unsure (1)..(616): unsure at all n locations
  Clone ID: PAT_MRT3847_101355C.1
ggctcgagccaaacacgtacccttgattctagtcttatacattctttaccaaagtcttacagtgtggcttgtgagctcaatccttgtgtagtttgcacaattttttgtacatccccttttattcttataaataggtatcaaattgttcctgttctgctcatctagtggtttcttgatctctgtctcattgaacaagttactaagctatgttatacccttcccccttaaaaattcaagtttgaataagaatattatctggttcaattgttttaccattgtttatctttctctagcctgttcttttcttgaaattcttgaattctgtgtaaaatgtataattatgactatgttctttagtgaatagtgattaactctcaatatttgttattgtcgcatccccttcattgagtagcttgtagaaataagtcatccattttttcatgatatcttgcataattaccaaagctttntacaccttctcttcttttntaatgagtttcacttgacctacttttgcctttgctgtgcttcttatccttccaaaccttacatagctgatcacctgaccccaggtccttgcanaagagaaattatttgtatgctgatacgtcaaaca

SEQ ID NO: 1502 - DNA, 295 bp, Glycine max
  Clone ID: PAT_MRT3847_101356C.1
ggccaatacatctagtaaatagtctggccataaaatttaacttttcttcatagagtgtgaagtttgagtggcagttaccatttgatcctaagagagagcttggtgaaaggaattcttaaaccatgtaaatgaactgaagtgtaattatggaaagctatagtgtgcattcacatgcttcttacctcttgtctttttttagtgtgccagaggtgatctccttacccatcaccgggggcaatcttaaatatttagagtggattaaagagagcacaagggactgactatcaagtttata

SEQ ID NO: 1503 - DNA, 434 bp, Glycine max
  Clone ID: PAT_MRT3847_101357C.1
cctatgctttcggtacattcttgcatggaggctatcaacgcgctagcgtcctctatccacaatgtgcagctgtacagacgatcttgctttgcacgcaatagacgaccacccattatttactccctgcacggacacccatagtccaagaaatacaactggtgcacgtgcccaaaattcattctatcacaacgactacattcttttacgacgaccccaacaaacgttcactagtatcacgtgcaacacgaagcatctgcatcctgagtgacgaactctcagagctcgcttgtccatacccaacgtcaagccaaaatgggcttctgacccgtagattcataatgcttcatggatggacgtgctcttgcgataacggttgcatttgctgctcaaacatattcggtaggaatgcttcaacatcttgttgcagactggtc

SEQ ID NO: 1504 - DNA, 415 bp, Glycine max
  Clone ID: PAT_MRT3847_101358C.1
cccaaaaaaattgggttcctttttggataccaaaaaaacccaagggttgcgccgaccaaatttttccgaaaaaaaaaaattcctcccccttatttaaaaaaccagggcccccgttttattcctttggaggggcgaaaaaaatgttttttttttccttgtggcaaaacctgggccccccctttatttttaaataaacccccctttttttttcccaaccaaaaaaaaaaaaaccgggccctggccccctttgaatgttggggccccccccttttccccgggggccctctaaaaaccccctccccttccccccttgggggggtccaggggccctcccaaaaattttccaaacctttccccaggaagttttttggggtgttccccaacacctccatttccccaaaatttttccgttccc

SEQ ID NO: 1505 - DNA, 1880 bp, Glycine max
  Clone ID: PAT_MRT3847_101359C.1
aggtgacctccctcagactatgagctcactttcacgcataaccaccatgtatctgcaaaataaccagtttacaggcactattgatgtccttgctaatctgcctctggataatctgaatgtggaaaataataattttactggatggataccagaacagttgaagaacataaacctacagaccggtggtaatgcatggagctcagggcctgcacccccacctcctcctgggacacctccagcacctaaaagcaaccagcaccacaagtctggtggtggaagcaccaccccctcagatactgccactggcagcagctcaattgacgagggaaaaaaatctggtacaggaggtggtgccatagccggaattgtgatctctgtcatagttgtgggggcaatagtagcattctttctggtgaagagaaaatccaagaagtcatcttctgatttagaaaagcaggataatcagtcctttgctccacttccttcaaatgaagtgcatgaagaaaagtccatgcaaacttcctctgtaacagacttgaagacgtttgatacttctgcctcaataaatcttaaacccccacctattgaccgtcataaatcatttgatgatgaagaattctccaagaggcccacaattgtgaagaagactgtaacagctcctgcaaatgtgaaatcatattctattgctgaactgcagattgctactggcagcttcagtgtggatcaccttgttggtgaggggtcttttgggcgtgtataccatgctcaatttgatggacaggttcttgctgtgaagaagatagattcatctgtccttcccaatgatttgacagatgattttatagaaataatttcaaacatctccaatttacatcatccaaatgtgacagagcttgtaggttattgctcagagtatggacaacacctcttggtctatgagtttcataaaaacggatcactgcatgacttccttcacctaccagatgaatatagtaaaccattgatatggaattcgcgtgtcaagattgctttggggactgcacgtgctctagagtacctacatgaagttagttcgccatcagttgttcataagaatattaagtcagccaacatattacttgatacagaacttaatcctcatctttcagatagtggattggcaagttatattccaaatgccgaccagatattgaatcataatgttggatctggatatgatgcacctgaagttgccttgtctggtcagtatactttgaaaagtgatgtctacagctttggagtcgtcatgttggaacttctcagtggacggaacccttttgatagctcaaggccaagatctgagcagtctttggttcgatgggcaacacctcaactccatgatattgatgcattggctaaaatggttgatcctgcaatgaaagggttatatcctgttaagtctctttctcgatttgccgatgttattgctctttgcgttcagccggagccagaattccgaccaccgatgtcagaagtggttcaagcactggtgcgactagtgcagcgagctaacatgagcaagcgaacatttagtagtagtgatcatggaggatcccaacgagggagtgatgagccagttctacgagacatctaaatcccaaagcaaatgtagttatatttttctcccaagctagttcggttatttgtaatataatttccaatagttgcaaatttgaattgatgggttccatattctgttgatacctatgtaaacctgtccaaatcagcttattacaatgacagtaacggttgcactggcaatgtaaccagcctttcacactaagtaccaacgatagatgacaataaaattcaatagaggacaatactaactttaaatcgag

SEQ ID NO: 1506 - DNA, 743 bp, Glycine max
  Clone ID: PAT_MRT3847_10135C.1
ctaggtagctgttgtgatccccggaaagaacggtcatttgatgtttgggcaaaagatcaccaagtggacagatgaagtttaaatctttatgggatattcttaaagcaagaaagtacatttgtgtgattatcctcaacagcatttgtcagaaaaccaacctagaggatttgagcctctaaaagccattcattctggaaccaactccctttgacatggagagaaatttaataactcctacactcaaattgaagaaaccacaattgcttaagtccacaaggattcgtttgatcaactttacaaggaagcaaatggagcaatggcgtaaaccttgcagcaagcggccttgcttttgtgcaacaatttttaagatttctgctagttaagaaaaatccatttggccttctgtgttttttggttcattattgtattgactgaagtgcaaaaccataagcatagatagaatatgccatatgctgaaacagcagctccatatgtcattcttgtaaaaaatcacgtaaataaattgtgtggcccatgccaaaaaaaaaaaaaaaaaaaaaaaaaaaaaaaaaaaaaaaaaaaataataaaaaaaaaagaactcaggaaaactaatgtataaatgtgaaacataaaagataaaaaaaaaactaacttataatatagttacctgactttaagataatatatattgggggggggtcttttgggggatccatatttttttttttagcccgttaaacg

SEQ ID NO: 1507 - DNA, 1933 bp, Glycine max
  Clone ID: PAT_MRT3847_101360C.1
tgaaacgaacttgtgagatcatatgaaactaacagagatgatatgacgtcatctatcgttgagaattaaacaatctacatttggacccgtttacacagtaggcatcaacagaatatgaatttaaaccgagcttcaaatttgcaactattggaaattatattacaaatataactacatttgctttgggatttagatgtctcgtagaactggctcatcactccctcgttgggatcctccatgatcactactactaaatgttcgcttgctcatgttagctcgctgcactaatcgcaccagtgcttgaaccacttctgacattggtggtcggaattctggctccggctgaacgcaaagagcaataacatcggcaaatcgagaaagagacttaacaggatatagccctttcattgcaggatcaaccattttagccaatgcatcaatatcatggagttgaggtgttgcccatcgaaccaaagactgctcagatcttggccttgagctatcaaatggtttccgtccgctgagaagttccaacatgacaactccaaagctgtagacatcacttttcaaagtatactgaccagacaaggcaacttcaggtgcatcatatccagatccaacattatggttcaatatctggtccgcatttggaatataacttgccaatccactatctgaaagatgaggattaagctctgtatccagtaatatgttggctgacttaatattcttatgaacaactgatggcgaactaacttcatgtaggtactctagagcacgtgcagtccccaaagcaatcttgacacgcgaattccatatcaatggtttactatattcatctggtaggtgaaggaagtcatgcagtgatccgtttttatgaaactcatagaccaagaggtgttgtccatactctgagcaataacctacaagctctgtcacatttggatgatgtaaattggagatgttgaaattatttctataaaatcatctgtcaaatcattgggaaggacagatgaatctatcttcttcacagcaagaacctgtccatcaaattgagcatggtatacacgcccaaaagacccctcaccaacaaggtgatccacactgaagctgccagtagcaatctgcagttcagcaatagaatatgatttcacatttgcaggagctgttacagtcttcttcacaattgtgggcttcttggagaattcttcctcatcaaatgatttatgacgatcaataggtgggggtttaagatttattgagccagaagtatcaaacgtcttccagtctgttacagaggaagtttgcatggacttttcttcatgcacttcatttgaaggaagtggagcaaaggactgattatcctgcttttctaaatcagaagatgacttcttggattttctcttcaccagaaagaatgctactattgcccccaaaactatgaccgagatcacaattccagctatggcaccacctccgataccagattttttgccctcttcaattgagctgctgccactgccagtatctgagggggtggtacttccaccaccagacttgtggtgctggttgcttttaggtgctggaggcgtccctggaggaggtgggggtgcaggacctgagctccatgcattaccaccggtctgtaggtttatgttcttcaactgttccggtatccatccagtaaaattattgttttccacattcctgagaataatttaagatagtaaataaaattggctttagtttttctttatgaaaataggatattccagctatgttatatgatacaacagagacacacagattatccagaggcagattagcaaggacatcaatagtgcctgtaaactggttattttgcagatacatggtggttatgcgtgaaagtgagctcatagtctgagggaggtcacctgttagagaattgaag

SEQ ID NO: 1508 - DNA, 162 bp, Glycine max
  Clone ID: PAT_MRT3847_101361C.1
aaaaaaccatcgaaattaaaagtaggggcaatgttacatgattacactagactaacacccgaaatgaaaggcagacacaacttcaattctaaccaaataaactcaacaaaagcattacataaattactcaaacagactgcaacccatgttattcattagatc

SEQ ID NO: 1509 - DNA, 1216 bp, Glycine max
  Clone ID: PAT_MRT3847_101362C.1
ctattttcttgtttttttattttctattttcctgtttcagttctttctttggtcacttctttctccctgccttgtttcagttctttctttggtcactcactgctctctaacctagttccacatttttccactcaccaagtctctatctttcatctcatatttctcttcattcacatcacttctctgatctgtctcttcactctctttgacccagatcaaattttttaccttttgttcttctctctttctctccgttaatgctttgcttcaaaccattctcagaaaaaccaatgcttccatctgggtctaccctctttctggatttttgttatctgattttgtaaaatgggttgttttttatatgcagaaatttgattcaatataggagatttcttacagagaaattttagtacattttgacaacaagggcttttggcaatgggcagaggcagaggaaaagggaagaagcaatctgttattgctgaggatcctggaagtggtgaagaggataaagtcccagcttatagaagaaggggaagaccagtgaagccactaacagatgaaattgaagaagtggaagtaactgaaataattgagaaagacgaggagaatgtgaaaggcaatggttctacggatgatttgaaaactcaggctatcacagttaataaaagaaaaaggaagagatctacacaggttaaagagaagatagatcccttgaaagaggacaatggcatcctagcaaagtcaggccctgaagattcaataaagactactggattccgacagaatggtagccggcgtaagaacaagcctcaccgtgctgctgaagctggggtagattgcaagtgagcaaggttctcatgatatttctgttttaagccctcggaatagatggagtttgttatcacaagacagggattgtttgattgtgtaaggcttgttatgtttgcttgttattactcattttgcttttgtgactttcatgtgctatttctgattttaattttgagtattcatagcagactgtgctcctttagtcttctataaaactattgccaaaagaaagcctgaaattttgtagatattcttttttcattacgagtaggtacaagaggatttctcatttctcttgattaacaaagttcttgatacatttgtttacttactcaacaagcatgagtgatgtctagtaatctaactcttgaagaatggaccc

SEQ ID NO: 1510 - DNA, 293 bp, Glycine max
  Clone ID: PAT_MRT3847_101363C.1
aaccagactcaaacagaaggacacgtttcacaggtttttgttggagctgaaaccaatcggcttttaaagctcattcctagatacctgattgcctctgcatagctaaatatgtaaagtctgtacttttcccacttgcacctcatagacaggtgtttcatagacggatactctaaaatcagacctgagccctgcgtcatggaccagcaagcgtgccttccatccgcacagtagccttttcaacatccacaacgagcctacatcatcattccgactcatcatgactccactaaaat

SEQ ID NO: 1511 - DNA, 186 bp, Glycine max
  Clone ID: PAT_MRT3847_101364C.1
gccgaacttgggtcgtttcactaatccccctgattggcaggaaattcttacctattttcgtggatctgatctgcagagttattgtactcggattctacaggcttgtttgttggctatcatcaagcctctgtatgttgaccatatgccatcagctgtgcaagggtatgtggggcaggtgctagacca

SEQ ID NO: 1512 - DNA, 456 bp, Glycine max
  Clone ID: PAT_MRT3847_101365C.1
ctttgttttttttgttttttttttttttttttttttttttttttttttttttttttttttttttttttttttttttttttttggggagaaaagaggttttttaaaaccttttaaaatccccaaccatttaatcaaaagtttaaaaattccaaaacataagacccggggtggcaaaggatttttataaaaaggggcccccggaatggtaaacggggaaaaaatttgcctttaattcaaaaaataactttgccccggtcccccgagaaacattgttttcaaaagggaaaaataataaaaaaacagggggcccacccccgccaacttttgcaacccacaaggtgaagttggtcaagccaaaaaaaaactggtgaaaacagcaattgcaaaatggggtttggggtccaaaacccacttgagaagctcctttttttggacctaaaacttttcctttaaaac

SEQ ID NO: 1513 - DNA, 158 bp, Glycine max
  Clone ID: PAT_MRT3847_101366C.1
catgaatgggaatatggctgaacttgggattccttctactagtcagtccagatatttggttgcaggaatccaatccggcaattcctctataacagaagccattgcaaccaagggcagctttagcgtttttgttgtctgacagggggaattttttccga

SEQ ID NO: 1514 - DNA, 473 bp, Glycine max
  unsure (1)..(473): unsure at all n locations
  Clone ID: PAT_MRT3847_101367C.1
tggaacctttgggctgatttatgtgcttgcatggtcgtgagaagatgatagaaggggataaaaacttacctctaaccgagaaagtgaagtgtacagaactgaaagaggggaaaagaaaaagaaaagccagggccagggaccccgagagacggtactgatcaagaagactatttcgaagagcctggatggcgaggttcctgaggcggaggaggtggcggtgtcggagctgtagatgactaagtatacgactgaggatgatcgtgttgatagcggaactttctcttttaacgctattagtaagacctcggtgaaggccactgagcatcgtaagaagtatgccgaggtgaatagcgtcgacgagaagtttagcgaggacgcgtctaaggtccgggatgcggaccctgctaatgtcgactaggttatctctcctgactctacctcggtcgtanatcatccgaatactaagagttccc

SEQ ID NO: 1515 - DNA, 255 bp, Glycine max
  Clone ID: PAT_MRT3847_101368C.1
aaggtatgcatccgagtatgaagcatctacctgctgaggcttctagatgttgtactctattgagaagctgccatatcaagattgcatagcaacactgcgttaattctttacatcagcgtgttgatcattattggctacaagagacagagtgacacctaaatccccgtgtaaaaccgaatgtgacggcgttggcattttgggcatcgcttgggccttcggtggcatgatcttcatccttgtttactgcactgccgg

SEQ ID NO: 1516 - DNA, 208 bp, Glycine max
  Clone ID: PAT_MRT3847_101369C.1
gcactccatcttccagcgatttcgctactagtaatatattctttttactaagtgaccctcttatggtcatagctaagttttccactatgctttcgtacatccttattgttcaaacattatgattctttcctacttaaactattactattacattacttacattgtactttgccgtatgacagactgcattatattcaacatcaacatt

SEQ ID NO: 1517 - DNA, 657 bp, Glycine max
  Clone ID: PAT_MRT3847_10136C.1
caaggagattggtgttcatgctgatgtgaaatatattgatccaacttatatgatccgtgcaattcgagcaaatgcatcagatggaattctatgcactgtacttggacaaaatgctgttcatggtgcgtttgcaggatatagtggcattacagtaggtttatgtaacacccactatgtttactttcccatccccgaagtgatatcccatcctaggttggtggaccccaacagtcgaatgtggcatcgttgcttaacttcaacaggtcaacccgatttcatctgataatttaccctttttccaataaattcaagaggcttggaaattcaggttaccaaaaagcatatatcataggaagaaagcttcaaactatgtctggccaatttgttgaacaggtatatgtgaaaataatattaaggatgacatttcctccttatttgaaaaattggttatttgtatagcatggcagtttcaagtcctgtcaattgcattcatattatactttagaggaatcaccaagcactacgtgcttcattttgatcgatttgtaagttgtaacattatttaaccgatgttaggggtcaaatggcccaaatttaatgagtaaattagcagatgaactgttgtgtttgaaaaaaaaaaaaaaacccacgcgtccg

SEQ ID NO: 1518 - DNA, 533 bp, Glycine max
  Clone ID: PAT_MRT3847_101370C.1
actctatgccttgccattgggttttggtgatggttgtggaaactgatggtgatatggagatgcatccccgccatctcgaaaattttcttcattgaatattagctgcacaacagcgacaagcgtaaaactacaagtaaaatctcccgagttccaaaaaagcgaagctctcatttcaaaaacaactcttttaacatacgtattttcttgtttcttcccataaatttccagaaacctttcaccaaaaagttgagttttcatctcctggaaactctgcttcgtcttgtcgtccgaattggaggacttgcataataagctatatccatagctcttcccagatccagatcatcttcctcatcacttgcatcatcagatctccatctaggtccaccattgatgtttacttcggtatttaatttcttctcaacaaggctctgagaaacatccattggatcattagtggaccccatgttccaacttctatcatctttatgtgattggacattcctactagatatatttgagagatcatttgc

SEQ ID NO: 1519 - DNA, 465 bp, Glycine max
  Clone ID: PAT_MRT3847_101371C.1
tttattggctcgtgacatggtgcaagttttaaaagaagctgatgttaacgtggacgaaagaataatagatctggccaattcttctaaaagatacataaaagaaattaggcgaggaaatacgcaagtagaaagtaggcggcaaaattttggaagaaatcgcaggcaagatcaaatgtattagagtttaattattctaatggtacctcttctgtaaaattcatctagttagtctttttccataaaagcatgtaactgtttgattgtaaataaaaagctcgatgagcttcatgctcattcaatttatttccaatgaaataagtctaaaatttagtttattgaaaagagttgaggataaaagtaatgttagaaacatgaaatttagccattgccttcacaggttttgtatgaattcaatgaatacaggttttattgttgaaatcatgtgttattaaaatgatgtttgtt

SEQ ID NO: 1520 - DNA, 371 bp, Glycine max
  Clone ID: PAT_MRT3847_101372C.1
aagcaccttatcttacacttttctttttacatcttgcttttgtgtcctcccttgggtgtggaaaaaaaatacaaccccctgtaaaaagggttgggttttacatcaatgccctaggccgccccccttattgaaaaacccaacaccgcccaaagtattttattgggggacagatccgctcctccaacaaaaaattacaattggggggccgaaaaagcccccgaaaaagagaaattacttagatgggcggtgcccgagagaaaaaacaaagttgggatttgcccctcccccccccggggggaaaacaagggcggactcttggacgggcgctaggataaaaccaaaaaaattttttttgcacccgggggggggcc

SEQ ID NO: 1521 - DNA, 395 bp, Glycine max
  Clone ID: PAT_MRT3847_101373C.1
aggtctactctaaaggatactctcggggaattccatgttccacattttcatgatataatgaggctaaaaggttcatctatgatttggattgatgtgttttcttattaagcgtatcctgaacccgaaggagatgagatgggaattcctcggggaattccaattcgacatgttcaagagatggcgatgccaaggtgttcatagatgaagtggacataattgtctgcctcgtcagggtatctggtgaccaccggaattgagattcgaatgcctcggggaattctaattccacattttccctgcgtgcagatgcattagtggtcatgtatgcttcggcaatacttctcatgttattacgctgaacatgatcccttgggcaatgaggatccgatatccgt

SEQ ID NO: 1522 - DNA, 525 bp, Glycine max
  Clone ID: PAT_MRT3847_101374C.1
gcgtacggctgcgagaagacgacagaaggggagccaagtgaagggtgaatcatctcctctcctctcttctacgatggccatggacagtgtttatgcttcgtctttaactagcaatttatatttatagatatgttcctcccctcttcttcttcattttcagccacccgcgccatttctacctcgcagtcgataggctccagttcaaaatgcaaacagtgattgaactggtggctcgacgtccatgcttcctcatcgtggtctgctgcagcacgcgcaacgacctcgactctctctgctctccccttcctttcgtcttctgctctgctctctctcaaactcattttcttcctcgtaatttacacgcgctacagtgttttcctaattcgctcttgtttcctccgtttccatttcccacgtgtcagtacagtgaccttggcgaagacgagcgcgcttttatcttaaagaaattcccacaggggacgtcactgtggagcaccgatgaggatgagcgatcttatattataa

SEQ ID NO: 1523 - DNA, 1396 bp, Glycine max
  Clone ID: PAT_MRT3847_101375C.1
ctcgagccgaatcggctcgagaacgaagtaaaggatcgaaatggaaatagacgggaatagagtggtaatcctaggaggtggcgttgcgggatccgtcgtcgctaaatctcttcaattccatgcccatgtcacactcgttgatccgaaggaatattttgagattacatgggcgagtttgaggtcaatggttgagccatcttttgcagagaggtcagtgatcaatcacagagattactttaccaatggcgacatcgttacgtccaatgccgtcaatgttacagaaacagaagtgttgactgcagatggccatcgaattggctatgactatcttgttattgccactggccatgcagatcctctccccaaaagtaggagggaaagacttaatcagttcaaagaagacaatcaaaagataaaatctgctcaatccattctgattattggaggaggtcccactggtgtggaacttgctggagagatagctgttgattttccagataagaaacttacactagtgcacaaaggagcgaggctgctggaattcataggggcaaaagctggggataagactctaaattggttgaaatcaaagaatgttgtggtgaaactagagcaatcagttgacttgaatgcattcaaagatggacagaagatatatcaaacttccaacggagagaccattgaagcagattgtcatttcttatgtatagggaaaccacttgcttcagcatggcttaaggaaactgtgttgaagaatgacttggatggtcaaggaaggatcaaggtagatgaaaaattaagagtcaagggcaaggacaacatttttgcaattggagatattacagatattccagaaatcaagcaaggttttttggcacagcagcaggctgaagtggttgtgaagaacttgaaggtgatattagagggaggaagagaatgtaggatggaaacttacaagccacattcagcaatagcaatagtttcacttgggaggaaagatgctgtggcacagttaccattcttgacaatcggtggaagaattcctggattcatcaagtctggagatttgtttgttggtaaaacaagaaaacaaatgggactcaatccagatattgtacaagcttgactagatatcgtgcatggtgtgtatataaattacaaaaccgatctgtttcattgtttgtgtggtttattgcagtattttcaattgattcctataaagaacacatatgtactatatgtaaaatatccttatgcttaagtggtgtttctagaaatcatgaaatggaattgtgagttagaagcaggatgctgattttaccatggaaccattgtatcattgacatatatatatggttttgataaaattgattggatgctttgttggtttgtctgc

SEQ ID NO: 1524 - DNA, 482 bp, Glycine max
  Clone ID: PAT_MRT3847_101376C.1
tttttgggggttttttttttttttttttttttttttttttttttttttttttttgtttttttttaaaacaaaagccccctttggtccccagtataaggggggtccctgccccaaaaaaaacttttaatcagaccaaccccgggggggcatggaattagattctccattacagttttgggccttgcatccaaaccctataaaaagaccagagttttgcgccccccaagaagaaaaatcccacccccatttaccccgggagtgtcctaaaccgcattacaagggcccaaattggagatgtcctaaaccggtttaaagaggcacaatttcaagtggtcttggaagaggacccaaaaataaaagcttttgagtggtcccccctggatccagaattaccattccgggaaacccccaaaggggttaaccctttttgggaatggttgttggaaaaccaccccaaacctttggaaaggccccccccaaag

SEQ ID NO: 1525 - DNA, 692 bp, Glycine max
  Clone ID: PAT_MRT3847_101377C.1
aaagaaattaatggaaatccttgatcctgatttaaatacggctgcgagaagacgacagaagggatctagtgaaagtgaactattacaatatttgaggattgcttttgaatgtctggatgagagaccataccggcggccaactatgatacaagtgatggctatgtttaaagagcttcaggttgacacagataatgatatgcttgatagcttctctctcagagacaatgttattgatgaagcttgagaagaggatcttttctacaagactcaaagccctttgacagttgagaaggaaataaagaggttctcaaaatttggagtgttgctgactaagttgacaattctggtgacactgatctatatctatcctatctgaaattggaggagggttctttcacctttttttgatgtatataagacacttaatgagaccaagagatcaaaggcaatcatggattgaattgaaggttgagacttaaggttatagacagttttgtatgcttcttttttgccgatctagtgttcagccacttgaaattggtagatatatatgtatttttcctatgaacttcacacactccatcatcaatgccacttttgctgatcacttcaatattttgtttgccatttccattgggttctgatactacagttttgctcggaaaaaaaaaaaaaaaaaaatataaaataaa

SEQ ID NO: 1526 - DNA, 236 bp, Glycine max
  Clone ID: PAT_MRT3847_101378C.1
cttcgaactttgggctgagttgggtgcttacttatctgcttgcaaagtcgcaaaagtgatcccaaggcaaatacgcacagaacaccttagaggtgcgcccaataaatgtagcggtgcccgtattacgcaactacatcacccggtctaacaacacgcatccgaactaacgaccaccaaacacactcaacgcaatacaaaacccccaccgacagcaaccatcaccactcctatacccc

SEQ ID NO: 1527 - DNA, 154 bp, Glycine max
  Clone ID: PAT_MRT3847_101379C.1
gtaatggtcacgggcgttattacgagactgtgtatgaagcggttaatgcggagccggatgatggggtatcagaaggtgtgatatattcacatccagggggttatgtacagaaggtaaatcgtcccttagagatgagaatgttgtgttcttagga

SEQ ID NO: 1528 - DNA, 520 bp, Glycine max
  Clone ID: PAT_MRT3847_10137C.1
gcacgcgttgctgcgtctgaatctgtagagggtagtggtctgtggattagaggtcctcccgcaagcatggctgatgacacacctaatgagatgaaggacgaagtaccatgaaataggatcttttgatcctaccaagaagaagacgatgaagaacattacaatctgttgatactgctgatgaacctgtggtgaaatatggctagcaagacatagaacctcttagtttccaaggagggtgagactgcatttactggtttgaaaaataagaagaagaaccctgttgacatgggtaacttgaatgatgagagtgtagatgcaatcgatgattaggatgatcaccctggagatgatcaaagagaaatggctgttccccaagctcgttattcttgagaagggagtgatcattattattaatatgaagagctacgcttacatctctacacattggtttaatacggtgatattatgggctgcttggcagggtgtttaacattctacgtgaaaataatccttaacttgc

SEQ ID NO: 1529 - DNA, 214 bp, Glycine max
  Clone ID: PAT_MRT3847_101380C.1
tttttggactaaattctcggtacttttcttgtgatttaaatattataagagggggacgtttttaccaatgcgacatgagtgataccattgctccattacatgcataagctgagcaaatagagcgcaatcaatcaatgttattattcggaaggaaacttttggcttccaaaaatattgatgaaaaaaccttgtatatctccacacaaaataattt

SEQ ID NO: 1530 - DNA, 215 bp, Glycine max
  unsure (1)..(215): unsure at all n locations
  Clone ID: PAT_MRT3847_101381C.1
ttcatgctgctttgcaatagctgatagtactggcgaagaagcttcttgttcttgttgtctaggtggnatgatttttaggccaccaagagtaacatttgccagacacacagtccttttttcaatcccagtcaacaagaactcaatgaggctgagagacattttcttaacactggaccaggttacttgtggagggggcgcggatggtaacgtgacgg

SEQ ID NO: 1531 - DNA, 261 bp, Glycine max
  Clone ID: PAT_MRT3847_101382C.1
gataacgggacaataaaacacacatactcttttctgtttttatactaatctcatgtaggtgtgacagacaatgtcattcttggcttatatgagggtatcaataatgctcttctgaatcgaggctcttcacgcttccctcatgtggtttcccctcaaataattgtttcccaccaaaaaaagctcccatctcttacagcatcaacatccacacccacgcgcgtcccatattcccctccaccttcctccatctgcttcccctcc

SEQ ID NO: 1532 - DNA, 298 bp, Glycine max
  Clone ID: PAT_MRT3847_101383C.1
agaaataagagaagaagatgggtttgaagaacaacatggtggtgctaaaggtgtgtttggtgcaacatttccttgtggggggtactacaaatgccaacttgaggcagattaagcttggcctgcgcactacaactgatcatcatcaatacgcaaatgatgatgattcttcaaaagcatgctgtgatcaatgcacatgcacaatgtccaaccctcctcaatgccactgttcagacatcatgctgaactcatgccattcatcttgcaaatcttgtaattgcgcattaacgtatcctgcaca

SEQ ID NO: 1533 - DNA, 229 bp, Glycine max
  Clone ID: PAT_MRT3847_101384C.1
aaatttcttagcagacttggaatgctcaaacgcctgagggggtaattatataggtgggcatgcttacaatcattgctacgactcgagtgcatattaacatacatgatctatggagaccagttatgcattcgaaccttcactctgacgagtgagtaaaggttatgcatccaattgacccccacaaaagcaaatcaagaggaaagtcactaaggataacattgcacaaggt

SEQ ID NO: 1534 - DNA, 137 bp, Glycine max
  Clone ID: PAT_MRT3847_101385C.1
atttcccaactttccctataacagtcctattttacctttaggtaatcatattaataccttgcttcattataaaattagcttcctcctacaattaaacacaatcccctaaccatttcacataaaattataaaacctga

SEQ ID NO: 1535 - DNA, 260 bp, Glycine max
  Clone ID: PAT_MRT3847_101386C.1
gacgccgcgccaagcgacgaagagcgactccgacagacccagcttaactcgcaaggccccgagcccaaggcgcccatctggcagccccaagcacaggtcgccgacaagtggacgttgtctgtgccgccctccgagaagttccgcatccagtccaccgtcccggagatccgacctggaatcgtccgccggatacgcacgtcgcgtcccgagggcgagtcgttggcggacaagaacggcgaggtggatacgttgatcggggc

SEQ ID NO: 1536 - DNA, 296 bp, Glycine max
  Clone ID: PAT_MRT3847_101387C.1
caattattttactgttctatctattgatacatgagtttactactatcatcttactgattacactcagggctttgattattgggtacagggcatgatctttttttatagaaaggtgttagggttggaccgaacgcgtgctaacaaatttgctcatgctcatactgcatccactttctctgctacatacattgaccgaaagcaatacaaaagatttaagctctaattttgccgtaataaaaatcttggtatgcatcgccttgcataatttacaaattctcgcccttaataattcattt

SEQ ID NO: 1537 - DNA, 1473 bp, Glycine max
  unsure (1)..(1473): unsure at all n locations
  Clone ID: PAT_MRT3847_101388C.1
accggtccggattcccgggtcgacccagcgtccggcttatgttcccattatgttgtttacaaatgggtttggatttagttgaagagtctagtctatcataattcatagcgggtcgaaccaatgctcaaattcctgtaaggagaggtgttcgcatttagagctcaaccatgtctcaatcaggattgcctcacaagaaggatatggatatatttagggaaaagaaaaaaaatgtttcattggctggaattgttctttttttggcattttgtgtgttgttctttctgattatcttggtaaatatttgtgtctttacaatgtgttctttaaatagggagaagaatttgcacttcttgaattattttaagttggaatcttacgagggttgaatttctgtgggcatgtatatgtgtaaaaaggatgtctgtgtacatctctgaaatttgatatatcttgatttaaggatggagctgcaaagaccattgtcttccaatttcagtgtgtgacatggaaattggagaaactgatgagcaatttgccgtatgacgatttggacatctcagaggaagtcaaggagggggtggatttggtgagaacacaattgagacgggccacggataaatatgggtttatgatttcaaagatgccatctcatgaattatcccagccactggctgaagaaattagtcaggttcttggcaaatctgtgagtaggttgcacaaacaacaaagctgccctgaaaatttatcagaactagacagcattcctatcaacgatgaagggaaatgctgcagcacaaatcctgccagatctcgcttggaaagaacaaggagcatccctactgaagttgaaggttccttaaatgcaattgaacctgaaagtcaagaaatttctgagacaaagagtctacctgaggttaaaaagactgaaggaattgtgatccctgaagattatctttgccctatatccttggaactaatgagggatcctgttattgtagccactggtcagacatatgagagatcttacatacagagatggatagattgtggaaatacaacatgtccgaaaactcagcagaagctccagcatttgacccttacaccaaattatgttttaaggagccttatttctcagtggtgtatagagcacaacattgagcagccaacaggactaaccaatggaaaattaaagaaaagtgatggatcgttcagagatgttacaggtgacatagcagcaatcgaagctctggtccggaagctctcctgccgatctgttgaggagcgtagagcagctgttactgaacttcgatcgctatccaaacgaagtactgataatagaatactaattgctgaagctggagcaattccagttctagtcaaccttctaacatcagaagatgtattgacacaagacaatgcagttacttcaattctcaacctttccatatatgaaaacaacangggactttatat

SEQ ID NO: 1538 - DNA, 376 bp, Glycine max
  Clone ID: PAT_MRT3847_101389C.1
ggctctcgacctttgggctgatttatgtgcttgtttatgtgcttgtttatctgcttgcgtggtcgtgaagatgatagtagggggcctcagtgcgcgcgaccgccgcgatctgcctcctcctgctgccactcctcctccccgccgcccgcgcgctcgcccccctctctattcgaaaacgctccgtcgtggcggcaatcgcggccgtagcagtgttcgtaagcgtactaattgtcgtggaggtcgtaagacgcatttacatccgagtcatattgagctaattattattgacattccggctacgggagcggtattagccaaagtctaacctgagagcgtcgaaacgggcgcctttgtcgagaatgacggtcgtacacgc

SEQ ID NO: 1539 - DNA, 2286 bp, Glycine max
  Clone ID: PAT_MRT3847_10138C.1
gttggaattgccagaggactttgcttccttcaccatgaatgttacccagctatatctcttggtgactgcaaaccggaaaacattgtatttgatgaaaatatggaaccccatttggcagaatttgggttcaagcaagtattgaggtggagcaaaggctcatcaccaaccagaaataagtgggaaacagtcacaaaagaggaactgtgtatggatatctacaagtttggggagatgattctggaaattgtgactggcggaaggttgacaaatgcaggagccagcatacacagcaaaccatgggaggttcttttgagagaaatttataatgagaatgaagggacttctgcaagttcattgcatgagatcaaacagggtttcgacctcgctcggcttcgcacccaaggcagcttatccgaacgacaattcacgtcgaaagtcctcagtcttccgccaggcttatatgttgatctgtccaagaacaactttgttggtgggattccctcagatatttctcaagccacccaactggagtatttcaatgtctcttataatccgcaattaggaggcatcatcccttcccaaacatggtcattgccccaacttcagaatttttcagcatcttcttgtggtatttctagtgatcttcccctatttgaatcctgcaaatcaatttcagttattgatctagatagcaatagcttatctggaaccatcccaaacggtgtttccaaatgtcaagctcttgagaaaatcaacctatccaacaataatctgacaggtcatatacctgatgagcttgcctctattcctgttcttggtgtagtggacctatcaaacaacaagttcaatggccccataccagccaagtttggtagttcttcaaatttacaactcctcaatgtgtctttcaacaatatctctggttcaataccaacagcaaagtcattcaaattgatgggaagaagtgcatttgttggaaattcagagctatgtggagcaccattgcaaccatgtcctgattcagttggaatattgggaagcaaaggcacgtggaaggttacacgtattgtgcttctctctgtagggttgttaatagtccttctgggacttgtttttggaattctttacttgagaaggggaatcaaaagtcaatggaagatggtctcattcgctggtctacctcaattcacagcaaacgatattttgacaagcctcagtgccacaacaaaacctacagatattcaatcaccatcagttacaaagactgttctgcctacaggaataacagttttggtcaagaagattgaattggaagcaagaagcataaaggttgtgtcagaatttataatgaggctaggaaatgcaaggcacaagaacttaatcagattgttggggttctgccacaaccagcacctagtctatcttttgtatgattacttgcccaatgggaatttggctgagaaaatggaaatgaaatgggattgggcagcaaaattcagaacagtggttggaattgcaaggggactttgcttccttcaccatgaatgttacccagctataccccatggagacttgaggcctagcaacattgtattcgatgaaaatatggaaccccatttggcagaatttgggttcaaacatgtgtcgaggtggagcaaaggctcatcacccaccacaactaagtgggaaacagaatacaatgaagccacaaaagaggaactgagcatggatatctacaaatttggggagatgattctggaaattttaaccagggaaaggttggcaaattcaggagccagcatacacagcaaaccatgggaggttctcttaagagaaatttacaatgagaatggagcaagttcggcaagttcattgcaagagattaaacttgttcttgaggtagcaatgctttgcacccgaagcaggtcatctgaccggccatccatggaagatgttcttaagcttctgtcagggttaaaacatctagaggatggcagaacttcgaaagaagggcaataaaatgttcatttgcatcactgcgttgaaaaccattagaaacatatagtaattgcttagataacaagtttgcacgtatgtaattaaaggagtttgcagcttgtataatagatatttccattgtttcagtgtgccaaacaattctgtcccagcctcagtcagtctacttcataaaatatttttttatttgaaaaagcaaaaaaaaaaaaaaaaaaaagatttggtgccacaataaacttgctctatggggaacaaacttgtggccaggga

SEQ ID NO: 1540 - DNA, 210 bp, Glycine max
  unsure (1)..(210): unsure at all n locations
  Clone ID: PAT_MRT3847_101390C.1
gcggcctttttttctttttttgcttgggggggggttttggagtacattgaagaatgttgggcctttgttctgtgttatgaaagtggggatatgagagaggtggtctttntnctttgttngagaattgacacgtagattttgttcttttaanacgcttnctatagatttggtggagggggttcacatgagtgatgtggacttatcctatgc

SEQ ID NO: 1541 - DNA, 1184 bp, Glycine max
  Clone ID: PAT_MRT3847_101391C.1
cacgcgtccgcccacgcgtccgcagagaccttgcatgaggatagtatccagttgactgcttcagcaggaagtcaagttaatagttattttgatgacaatgaccttggttttattaatgtcttgtatggaagatctgcaggcaagaccaatgttgctgtctctttctcatgtgaactttcaacttctgggtcaaggacacagtcaaggttttacagttcatctttatcagttacagtgattcctgatcttcccctggctttgggagtccccataacctggattcttcctccctattatacaatgacaagccctttgccttcatcatcagaatcccattctcagaatgatagtcggaatcgcagaggaaccattagctattctttattgagaagtttggagaaaaatgaagctctgcaaaaagatgctatattcattgatgcggatagaattaaaacaaccaaaagtaacaatcttgcttgcattcaagctaaagatcgtacaactggaagaacagagattgcttcttgtgtcaaggttgctgaggtgactcaaattagaatagccagtaaggaggttctgctcaatataattaaccttgccgttggtgcagaacttgatcttccaacaagcttttatgatgctctaggaaatcctttccatgaagcatacaatgcagtacctttttatgctgaaactaactaccctgatgttctctgcgtaaacaaaacagctgatggaaaaggcaatgtccatatcaaggcaattcagcatggtaaagctcttgtgcgtgtagcaattagtgaagatctgcaaaaatcagattatgtgctgattagagtgggtgcccatatatatcctcaaaatccagttcttcacataggaagtcctcttaacctaagcataaaaggtttgagtgatacaatttctggacagtggtttaccacaaatggaagtgtaatatcagttgatacattatctgggatggccaaagctattggggaaggttcagcacaagtatctttccattacggaagattgagactacaaacaacaattacagtgttgaaaggaaattatatttttgtgaatgctccaaaagagacgttaactaatgtcccgtacccttcaaaaggatacaacttctccgtgaaattcagtgaatcccttggtgcacctggagaaaa

SEQ ID NO: 1542 - DNA, 494 bp, Glycine max
  Clone ID: PAT_MRT3847_101392C.1
attccgttccaggaaggtttcccgtcatcactgtatgacgtcctccttctttgggggggggggggaggaagcttaaagatagaaaaagccaaatggggcgggtgaagggcaacccgtggcgtttaatagcttggcacgtgacaggcaacgtgcggccaaagagcgaggcggagtaaccgttatgggtaatatacaaaggtccagcaaaagcggtggggactaatgggcaggatattcacataaagtaagcgttatatacggccccccgaaagaaataaagataaaccgtaacatgtaatatgatacgatggaggaggacattgcaaacagtagacggcacacgtgtgagccatagtaattttaagtgcactggtagtgggtgttaaagtaaggcgccgtgcacggtacaggtgcacgcaatgtgcctacgatttggcgccatgacaggtatagcaaggacccgtgattcgtatcccctgaatagtgaggagagt

SEQ ID NO: 1543 - DNA, 342 bp, Glycine max
  Clone ID: PAT_MRT3847_101393C.1
cccgggccgaccaacccttccataaggctccaaaaaaacaccaaaaggggaacccaaataatcccaattgcaattattaattggccttgcttctaaggatgccaaaaaaattggtggaaaaaattttaaggttgtaccaaaaaaagggtttccaaaatcaccatctcggaacaaaagatagcaagctgatattactgactccaaggatggagcaacaagcaagatgcagaaacacgacagccacgcatcccgatccattctagatctaaatatgcctgtagacgatggtgaagagggtgtcaatgacaatgaccatgagagtgactccatgtcataaaacac

SEQ ID NO: 1544 - DNA, 675 bp, Glycine max
  unsure (1)..(675): unsure at all n locations
  Clone ID: PAT_MRT3847_101394C.1
caccactgaagctgctggacctcagtttgcttgcaggggcagtgggtcgttcccagttaagttacaaggggtgcagttgtcttccagcaatcggagaaaacttgaggaagtttcagtgtgaaattccagttttcaaattccaaccttgaggacaaggttgatttttaggaagggtgttgataagcataagcataagccacacatcaccaaggtgtacacccacaaacagcgagcaagagaagcaataaccatggaccaccagcagcagggcgcacaacacccaaggggtgcaaaccacccaacagttacgacccacccaaaaggtgcaaggtcagaagatgggaatcaaggggacatgacccttgtgaacagtcacaaccaaccattatgatccgccctagggatgcaaggtcaagagatgtgaatcaagggaacatgatccttgggaacagtcacaaccaactgatattatccgcctaaggggtgcaaggttaggagatgcgaatcaagggggcataacccttgggaacaattacaatcattcagaataattgtgtccattagatgtagtataaatagaagtaaaccaaaatgggaaagacactctggaattaggaagaatctgaattgtggagagacaggctctcaaaagnctgnntaataaaatatctcaaa

SEQ ID NO: 1545 - DNA, 756 bp, Glycine max
  Clone ID: PAT_MRT3847_101395C.1
tggtcaaggaaggatcaaggtagatgaaaaattaagagtcaagggcaaggacaacatttttgcaattggagatattacagatattccagtaagtgcttttcattagtaacttttattcagctttcacatttatataattttttttgcagttaccttcttttataacaaactcaataagttgccaagtctttttctgttcacatgatgttctgtgtatttttctcttgagctagactaagatcatgctttattgcctgggttttggccagaatttagtttcttcttttgggaaattgaaatattgtgataagcataagcataagccacacatcaccaaggtgtacagccgcaaacagcgagcaagagaagcaataatcatggaccaccagcagcagggtgcacaacacctaaggggtgcaaaccacccaacagttatgacccacccaaagggtgtaaatcacccaatagttacgattcacccaaagagtgcaaggtcagaagatgtgaatcaaggggacatgaccattgagaacagtcacaaccaatcaaagggacatgacccttgagaacagtcacaactaactgttatgatctgcccaagggatgcaaggttaggagatgtgaatcaagtgggcatgacccttaggaacagtcacaaccattcagaataattgtgtccattagatgtagtataaatagaagtaaaccaaaatgggaaaggcactcgggaattaggaaaaatctgaattgtggaga

SEQ ID NO: 1546 - DNA, 818 bp, Glycine max
  Clone ID: PAT_MRT3847_101396C.1
aaacacgaaaccaaaaatctcaacattcgcaacaaaaaagaatatatcaaagactcggacagtatatcatttcatataatccaaaaaccctaattttacttgaaaaacatactcagtctaatttaaagcagcagtagcagcagcagcaaaaattaaaggcttacgaaataaataaaaagcaccaaaacacgaaacgagaagagaataaaacaaagtcttacatctgaagccaaaagagtctccatgaacaacatcaacatcagtacctcctggtgaaggggaaggcctgttgaacaggaacagggtcaacctgtgtgatgccggggatgtcgttgattccgagggaatgaagcatgtcaagggtttctttgtcgacttcgatgtggtcggtgttgatggcggagacgtcggggacgaagtccatgcggcgctcgcgctcctcctcctggagcttgagggagatgccgcgaacgggacccttctggatgcgcttcatgagatgcgtggagaaacccgcgatcttgttccgcagcctcttggaagggatgatggccacttcttcgagaagctttttgtttgtgtggaagtcgagggtcatgcgcgagtagtaacgctcaatcacctggcgggaggatttcttcaccgtttttgttctcacgcgacccattgtgtgtggtggtggttgttcttctgttgccgccgccgccgccgctgaggtcagttctttctctctgtcttacctgcgcagaatgatctgagacgaagcccccttctgtcgtcttctcgcagccgtacggacgcgtgggcggacgcgtggg

SEQ ID NO: 1547 - DNA, 1463 bp, Glycine max
  Clone ID: PAT_MRT3847_101397C.1
aggcatcaaaatcttcaaggcaggatacaggcggttgacatgggtatggaagatgatcgacggtgatgcattacccccatttcaaggaaaagaagatgtcaacggggtatgaagtttacattttagaagctacatacaaggatccggtgggttgtgctgctaggaatgtccatggatttacacaggaagacatagaaaagatgtctaagcaatgggaagaagctccatccttgtatctgcagcttgatgtgaagtcattatttcatggagatgatctaaaggaaagcagaatacaggaggttgacatggatatggaagatgatctgggtgatgcattacctccatttcaaggaaaagaagatgataaagttgttgaccctcctgttggggaagatgcaagtttcctaaaggctgggaagaattgggatgctgaagaggaacatccaacagaagtcagggaattgggtaaaagcaaatggtcagaagattttggtgaagatgacattgatcaaactgaaggtatgaagggcaatattaatgctctgtctgggttaattcatcattatggcaaggaacgaaaatctgtacattggggtgatcagggtggcaaaacagggttttcaataggggctgcaaagaaggtaaatgctttgtctttagtgatcggacctggtgctggatataacctgaaatctaatccattacctgaagaggatagtccaacccgtaatagtgtggattcaaagaagcatagcatatttcaagaacaaatccgggctgaacgagaatctttcaaagctatttttgataggagacggcacaggattggtggacttgatgtggaagaggactaaaagaaagccacccaatgcagaaatgctttcacaaaacagagtatggggagggtagatatatcatgtattcagctttatccctccctgcgttggagaagttgttaccaggatttgaatcctccacaagacggatgtggagactgattccgaattttggttttaatgtcatcaaaacagacggattacttgaaagtcatacttccatgtattagaggagtttaggtgaaagaatagagttgagttgtttggttggctgggaaaagaacatgatgttcccaatgagtttttgtggaatgatgtaaaattttattcaaggattaatatgaaatatttatactgtgataaggtcaactcagcgtctatgtgagtgtaggtttatgtttttcttttcttgtaccagcccgctatttgacatttatagacattacgtactctgaaagaagaatacgttatcggtttaacagacgtctgaagaggaaatacactcatgtgattgtccttcaaatataaacaatcgtgtatgatgatgtttattttattgataggaatatacgatgggatgtatataactcagaatttgcttgcacttttactttttgtatttaaaaa

SEQ ID NO: 1548 - DNA, 152 bp, Glycine max
  Clone ID: PAT_MRT3847_101398C.1
gccgccagccacgctaggggagttttcgagggctacaatagggccgcacaacaccagccagcagtgagggaacatatacaccaacaaggatcacaaagcgacaacactcaaaaaagcaaagcagccccccagcactatccgaacaccaacaa

SEQ ID NO: 1549 - DNA, 425 bp, Glycine max
  Clone ID: PAT_MRT3847_101399C.1
gcctatgcttcttcccctttctctggcttcttgcgattgtttttttcattctcttgctgtaaactttcacggaatatatagccattgaaggttttgcgcccacgcgtcttaacacgtcgatcaaccgggagatggtagcagtaggagctagctgttagatatctgatcctattttcaattctctagttattctctttatatgtgatcctattatactcgtgcaagttggaaaaaataggatgattttttttttcaataaactaaaatccaaaatggctgcaataacttgatttttgaccgaagggaaactgaaaaatcaaattattgcagccattttgaacttattttccactagaccaagaacattaaatatgattaagtttcaaaacttaaaaaaaaaaaaaaaaaaaaaaaaaaagggcggc

SEQ ID NO: 1550 - DNA, 468 bp, Glycine max
  unsure (1)..(468): unsure at all n locations
  Clone ID: PAT_MRT3847_10139C.1
cggggcaaaaatatcaaaatatatatgaccggcngccgacaaccccggggggcatggaaaaactttaacaggcggatagagcagcagccgcacgacccgttatatgatctaaatatgataatgtatcaacgggggacaaaatgaaagtccacaaaactggaagaaaaaggagtcaaactggcgatccccaaaaagagagggcacaccacgcgctcggtgggaacagcaacgaggcccggggatcttggagcgccgaggccgaacacgtcacccatgctcatgctactgggcgtcatgccatacggcaaaagccacgtgaagcagagaaggaggcgcgccaacgaaaaattgagcgcgaagagaccgaacaccatcccggggcgggacctgcgaccccacccgaagggcatgaacccgaagctgcacccttagaaatagggcacgcccggttaaagaaaccgggcgggg

SEQ ID NO: 1551 - DNA, 413 bp, Glycine max
  Clone ID: PAT_MRT3847_1013C.1
caacatattgagttcacgagttcaaaaataaaaattattactcaatttggtatatgaacgagtttggacgaattgcattaaatttgacctaaacattcaaaatctaaatctatactcgtaattaaacaccggcccatacttttacatctgtagcttacaacaatttctttttataaatgatgatttatatgatgtcatttgtagttttttattaaggatttcatgatgtcgttttaagtatttcataatatatagacttgttatgtgtgtgtcaccacacaaacatacatttttttaaaaaaaaaaccttaaggactttgatgatgtggttttaagtattctttaacatgtatgtatccaaaaaaatattttcttataaacatgcaaacttattttttttagtggaatttaaa

SEQ ID NO: 1552 - DNA, 390 bp, Glycine max
  Clone ID: PAT_MRT3847_101400C.1
ccaaaaaataaaggtaacccaaaaaccaaaaactagcaaaaggacaacgcttcatgcacatcacaatcataaaaaagcggatacacgaggaatataaacatagaccaaagccaacggacaacgaaaaacactggagggaaacaaaaaaagtgcaaagcgagcaaacaaaatgcctaaataaaatagtgaatagccgagcgacccgaaaatccaaggtgccaaagcttaagaacacaccaactaaggcagcaactatgggaagataacaaacgacagaaaaacacccacaaattgaaaccacaaattgtgtggacaagatgacgcaacaacggcatcagcatggcaagcaaagaatatacagcgaacgcctccgttggatggcaggcataa

SEQ ID NO: 1553 - DNA, 772 bp, Glycine max
  Clone ID: PAT_MRT3847_101401C.1
agaaattagaacagtgggtcatggagacaaatctgaagaaccatggtggccaaatctcaaaacaccaaaagaccttattgacatcatcaccaccatagcttggacagcatctgctcatcatgcagctgttaactttacccaatatacttatggaggctattttcctaatcgaccgaacattattagaaccaaaatacctacagaagatccttctaaggaagagtgggaaacttttctaaacaatcctgagcaaactcttttggagtctttcccatcacaaatccaagcaactacaatgatgttagtttttaacatactatcatatcattccccagatgaagagtatattgggcaatacttgaagccatcatgggctgaggatccaactataaaggcatcctttgaaaggttcaatgggagactcaaggaaattgaaggtattatagactcaaggaatgcagattgtaatatgaaaaatagacatggtgttggggtggtgccttatgagcagatgaagccattttcaggacctggaatcactggaaaaggaattccatatagcgtatccatttaaagactcatactttttaagtggaatattcattgataattttttttgttgcaatatttggtactgtcctcaacaacaagcattttgatataagacttttcatttcccacatttttagtgagcaagaatcatattgtcctacaatagatcttatgttgctatctcaattggttcatatgaaatatattgatggtgaagtac

SEQ ID NO: 1554 - DNA, 340 bp, Glycine max
  Clone ID: PAT_MRT3847_101402C.1
tgtaaaaaaaattttttttatacagaaaaaaaaaataaaagggggggaggaattaaaataaaaaaatgaaaaaaattaaaaaaaaatttaaaaaaaaaaaaaattttataaacaaaaaaaaacttataaaaaaaaaaaaaaaggggcggcccccgactatggacctctccaccccgggatttaattccggcccggtccctgagggcgacccacctttccttattgggagtcaatttaaaccttggcgaaaacatggccatatctgttcccgggttaaaatgtttttccgttacaatttccacacattttacaatcccgaaacctaaaattgaaaaccctg

SEQ ID NO: 1555 - DNA, 429 bp, Glycine max
  Clone ID: PAT_MRT3847_101403C.1
tcatgtttttcgtactataggtgtcgtcggacccgggggtgatgctaccgttacaagggttggtaactatgctggtgtgggatgtggttataccactcctatgcatggaattgttaggcatgtgagcacggaatatcaacaggggggtatgggtgtggcttgtatgggaaatgaactatttggggctgtagagaccataactaggcaagctgattctattgttttggaaatggggcttgtccagactgtttaagcgggaacaagagatagagaggggcttgtcttaccgggccttgaacaagaactcgtgacaagggtggctagggaacctaaaggcccagttatcttgctaatcatgtttggaggcccaggtgatatctagttagccaaaaatgaccccaagattagtgccattttgagggttggata

SEQ ID NO: 1556 - DNA, 391 bp, Glycine max
  Clone ID: PAT_MRT3847_101404C.1
aaataacaattgaaattcatttattaaaaacacacacacacacacacatatatatatatatatatatatatatatataacagaacaggatatcaagcttttgtctaaaaaattttttctatgctgcagggatgcttgactaataaagagagagagaatttccttggaagcaacccaaaaacctgctataaaaatatatggtagatggcattccagcctatggcaaaagcagggtagctataataaataaaattatagacaacattctaaaagcaagttgtaagaagtaaaagtttaaaactcgtaaaaaagtacacaagccacgaacttacgagataatatcataagcctcatagcattagtggggatgaacagagagaaattcaaacagc

SEQ ID NO: 1557 - DNA, 185 bp, Glycine max
  Clone ID: PAT_MRT3847_101405C.1
accattttctactactttcggtgacgccggacgatcacagagtagcctgtgatctcgaagatggctcctcccagaggtggcggtgggctcaagggtggtaggggtgacagagtagaggaacgggtggcggaggatgaagaggaggagacatgcgtacgctcgtcaaagctagaggcagcggccgc

SEQ ID NO: 1558 - DNA, 309 bp, Glycine max
  Clone ID: PAT_MRT3847_101406C.1
gggggggttttgaacaaaagaacattttaaattattggtaccagttaaaattaggccccccattagtttttttagtcccctacaaaatgaatttttttttaaccgttcaaggtcttcaggaaccaaaaaaaaaattaacaatacacccttgctttcatggggaagggcaatgcctctttggcgtctctgaaaccataaacggagaaacaaaaaaaaatctctatgaaaagaggagagaaggggggccataatatcaaggggatgctttaacataggccctctggggtgcctaaaaattaaaattaactg

SEQ ID NO: 1559 - DNA, 549 bp, Glycine max
  Clone ID: PAT_MRT3847_101407C.1
gcacggggtaagcaagtttgcggtgaaactctgagaccaaaccttgctgatgctgttgatgaaggtgaagaaagccatcacaggtcatcagaggacagagaatatgcatactgaaaatgttgatgttcctggcaagcgagtctgctgatggtgaggagtgttctggagaagagcacgaggttggggaacatgttatcatggctgacagtgaaggtgaagctgtatgaatagctgatgcccatgatgttgaacgagatggaatgatattgccatattctgaacgctttctactaactgtgaagcctctagcacagcatgttcctcccatgttgcatgacaaggacaggatttcacgagttttctctggcaatgattccttttatgtgctgcttagactgcatgatactttgtatgagacgatacagtcatcacagatagactcgtcatctgctgataggaagtggaaggcttcaagtgatacaggctccactgatcatatgacatgttcatgaatgcccttttccagttgctggatgggtctttctgata

SEQ ID NO: 1560 - DNA, 351 bp, Glycine max
  Clone ID: PAT_MRT3847_101408C.1
tggaaacttaacatacgagaactactctttgatgtaatgttaaaaatttattggctacacgttgatagcagaagcgaatccaaatataatagtgttatacaacaagaaaactgagtaaaaggcacaccgttctcatcttctttggtttctttgttctttcctccatttcccctttcgttcgaatcactgtcttcgtaccgttaggcccattttcttcccgcttgtgctttctggtctggggctgatactctgattgttcattttaataaccatatgaatcaattttttctgttctgttgggctgcatcatcatactgctctgcaagtttctttactttctcgccttccttt

SEQ ID NO: 1561 - DNA, 423 bp, Glycine max
  Clone ID: PAT_MRT3847_101409C.1
cactaaacggcggtcgccctttattttttatgtttttttaaccaaagtcctcttaaaccaaaaacgccaactcccgcaacccaggcgaccgttttaaggtctaaagcccaacacaaacgaccaagccacctttcgggccaagtaccacttgactaccaccaccgcccaaaccctaaaagcccacccgatgcaaaacaagcacgaaaaacataagaggaacacacagacgggaaaaacctaaaaactctgacaaggaaacgatctcatgctacaagaaaaagaaaaaagcgcccattcatcaatagcacttgcaaacggaactctagaacggtggcagacacacacagctctttgcaaactttactcagacttaacggtggggaaagcgagaggccaagccaagttcataagccttaaaaagac

SEQ ID NO: 1562 - DNA, 345 bp, Glycine max
  Clone ID: PAT_MRT3847_10140C.1
gggttgtccacatgtgcagaacttgaagcttcgtacgagtgcttttctgtcatacaagggattactatcaggtttcatggctgccccatgagtttagatcctgtttttgccagagtgacttcgtcttcttcatagtgcgctccttggtgtcctttttaactgtcgtttgtgtttaacgttccatatttgatctccctgcgtttttataactgtgcccatgtcgattttcttcagctttactcggtcatgatcatttttagcatgggggtcctatttatcctatcccttctgaaccgtgtcccttcttgtcccttggccgtcatgttcctgttttaccttcctctt

SEQ ID NO: 1563 - DNA, 524 bp, Glycine max
  Clone ID: PAT_MRT3847_101410C.1
atgatcacatgctttctgctcttcattgttgcctcctggttgcaactgtgttgggtttcaatcttgttcagtttgtgatgttttgctctgtggagtggaacaccaaaatcatggagggtttgaatgtgtatgagaaagtggtggcgtcgttgtttcaagtcacaaacgcgagacactctggtgaatctgtctttgatctctcctccatatcttcagccatattggtactcttcgttgtcatgatgtacctcccaccatacacaacatttttaccagtaagagagcacgaaaatgatgtgaagagaaacgaaaaaagcgtagtggagtgtcttgtattctctcaactctcttacttggtcattttcattattttgatttgcatcactgagagcaacagcttaaaagaggatcccctcaactttaatgtgtggaacatcaccctagaagtcatcagtgcttatgggaacgtagggttgtcaatgggatacagctgtgctaggcaattgaaacctgatgcgacgtgc

SEQ ID NO: 1564 - DNA, 386 bp, Glycine max
  Clone ID: PAT_MRT3847_101411C.1
cccatgaccaccaccacaggatgccggggcctaacaccggtaacgatggtacacctcaccatgattcgatgaatgtatcaatatctacctccgtacgcgcggacacaaccttacagcaacgaaaatgactgtgtgcgctctgcacacacttacgaacatataccgtttgacgatctaggacgagaacctgaacactctgctatcctatataggactcggtgtcagactgacactgaccgtgcccatctgtgacatctccgtctaatccaaagtcgacgctggtaggctgtgggagtagagctacaactatcccatttagcataagaccaaaatggattgcatcctctattgctgtgaggtctttcactgtgtcgacaccaccgaga

SEQ ID NO: 1565 - DNA, 369 bp, Glycine max
  Clone ID: PAT_MRT3847_101412C.1
gggtaaaaaacaaaaggggattggttttaaacccaacaccccataaatttggttctttaatcacaattatcaaaattttcaattaatggtctaaactaaattaaaaattttatgggttttaacttaaagggcggtttttcatttgaatttgaaaaaaaatatttcagtaaagagatccctccaaaactttttctgtgtttttctttatcctaaaattaatggtgaaattctttatttttataattaaaaatcttttctataaagttttgggttgttatattatatattttttttaattgttcccaaatttgtcttttttgataaattttaagggtctttttttatatttttttagccaatttataaata

SEQ ID NO: 1566 - DNA, 250 bp, Glycine max
  Clone ID: PAT_MRT3847_101413C.1
tgcgcagaaatgtagctaaaatttagagagcactaatgaccatagacaatatttacgagcatattgactgcgatagtcattcagatgacctccaaagtcttacatcgttgtacatagggcaagcatatttttatgacaatatatttctgctgatggagacgccatccactaaagccacaagtgaagccgggctcatacactgtgcgcaccacatgctgggcgtctgtagatgacagcacgagcattacca

SEQ ID NO: 1567 - DNA, 205 bp, Glycine max
  Clone ID: PAT_MRT3847_101414C.1
caaaaagcaaaccaaacggtacggagagagtgcaaaaaatactcctgaactgatccttgtcttaaccatagatacaagatgcacaatttttaaaactaacgcaagaaaagcatccactgggactgggaaaattaaacatttgtttatatacacatttaaatagtgaacacagaagttttgactatatatcgaaaattggggccaa

SEQ ID NO: 1568 - DNA, 274 bp, Glycine max
  Clone ID: PAT_MRT3847_101415C.1
ggctcgagctcatatactgcgtgcttcatttatattgctaaatccacccatcgatctttggctatggggtgcattcaacctaaacctgctcctccagctcatctgagccgttttaactaccacacattagcggctggcagaacttctggccgattcatttttcacccaccaaattgctggcgcagccaaagtatctgcaccagcagcgaatggttgtccatcatctgtcaactatcatccaagagaacttttattctccaaacaatggagatct

SEQ ID NO: 1569 - DNA, 177 bp, Glycine max
  Clone ID: PAT_MRT3847_101416C.1
gcaagtcataaatagaatgggatattccctattacctacctttatgtctgatatgtttctacgagcggacgattttatcaaacttacttcaccgtcaatgcatccattacttactttttcttttattatacctctaaacttaaaacttatatacttttctaaccaacaattcatcaa

SEQ ID NO: 1570 - DNA, 1037 bp, Glycine max
  Clone ID: PAT_MRT3847_101417C.1
gtcttatagtgcctcctcctctttgacttcatccctatcttccgaattttcctagttttgaaaaatcctacacacgcttttgcttccacctcctttcctcaccttaaattaaattattgttcaacaatcaatatcaatataattcaattccttcaaattccagataccaaaaacatatattctttctctttgttttcttgtctgtggtattgtctctgagttgttaattttgttttctttcctttctcatggggcagcaatcgttgatttacagcttcgtggcgcgcggcacgatgatcctggcggagcacactgatttcagtggaaactttgcggaggtggctttgcagtgcctgcagaggctcccagcctccgacaacaaattcacctacaacgccgatggccacaccttcaactacctcacctataatggattcacttactgtgttgtggcagtagagtctgttggtcgccaacttgcaatggcctatcttgaacgcatcatggaggatttttccaagagatatggtggaggaaaagctacaacagccactgctaaaagcttaaacaaagaatttggatccaagttgaaggaacatatgcagtattgtgtggaacacccagaagaggttagcaaacttgcaaaagtgaaagctcaggtttcagaagtccaacaagttatgagggcaaacattgatcaggttcttgatcgtcaagtgaagattgacgttttagtgggtcaaactgaggaccttcgcaatcaggcgggggttttcagggagcggggagaccagataaggagaaagatgtggtatcaaaacatgaagataaagttaatagtacttgccatcgtgattgccatcattttaataattgtcttattggtcacctagaattgttacaactcgaccccttttttgtaatttaataaatatagttgtataatataaacattataaatttgtttatttgattgacatcacaacactacaaagaaaaatattttctatggttaatttttacattttatgttggtt

SEQ ID NO: 1571 - DNA, 122 bp, Glycine max
  unsure (1)..(122): unsure at all n locations
  Clone ID: PAT_MRT3847_101418C.1
ccacgcgnncgntccctgcctccactatgtcnctctatgggcaggattcttcactttccggcagacattcttcagctcttgttcgtgttggtgctcctattgttactacgggaatacaaaca

SEQ ID NO: 1572 - DNA, 436 bp, Glycine max
  Clone ID: PAT_MRT3847_101419C.1
ggaacaaatttggttcccccatctttttctttagatgaattaaatgggtcaaatcaaaaagttttttaaataataaatagcaggtgggaatacaaaacatgtggaacaccctcaagacaaaaattgtttacaatcggttgccaataaaatacattaataattgaatttaaataaaatttgtcatccccatcgaactacaatttcaacagaatttttgaaactttgccctttgggggctgacgatgcctattttatcagcatgacttttttccattaaggggggtttacaaataaaacagggaaatttcaagggtttgatttggggggaaaaacttggcatgctggcttgtatgccttcttggttgaagcctgttaatactttttttcagcagtatcattttcatttaaactagtctgaacgaaaaacctttttccc

SEQ ID NO: 1573 - DNA, 460 bp, Glycine max
  Clone ID: PAT_MRT3847_10141C.1
gcatgttattagtggtggctacaacatcaagacaggacctggctgtttgattgaacttatgaaatttgatatgggcggttctgctgcagtttttggagcagcaaaagctctaggtcagatcaaacctcttggagtggaggtctgtcatttatatcattgctcactacttttcattttattgtttcacattttctgttatcttgctaactttcaaagtaatgttaaaagcctctgcttggtaactagttagtagtcagtggtggctttatgtatgcaagaatgagaggaaaattttatctcgttttagatgtttcatcattgaactattgaatatgaattgggtggctactctgctttagaataatctgttcggagttactgtggcagtttctcttgactccttttaaaggttttggtaacaggaaagaggccaaaattttgcagtagtgattactgagta

SEQ ID NO: 1574 - DNA, 477 bp, Glycine max
  Clone ID: PAT_MRT3847_101420C.1
tgcgagaagacgacagaagggcatcatgaggttgttgcagatttggtgcagacaagctttcttttttctatccccatggatggtccaatgtccttctcaactcaacatgtatctgtgcagtgggttctccgctttgaatttttcacaactccaaagcatgtagattggaaaaagtatgagcatcctcttctaattgagggaagggaaaaaacggaatgggttcttccaattactgtacatgctccaccaccaagaggagctcctgcttctggcacaagaagtgagaaacttttctctttggatcctatgtgggtacacaattgaagttaaattaaactgaagctgaaatgtatggaaccgaccattgtagccttttgaaaacccgaagcttcagttccttaatgtacaaaatattcacaaaatagcagccattgaaatgtcagaatgatcatttgtggcgtatcagaattcggtcaa

SEQ ID NO: 1575 - DNA, 534 bp, Glycine max
  Clone ID: PAT_MRT3847_101421C.1
attttattattgtcctaaactccaaagtctttcacaatgggagttgtcaaaggcatctgtgaagatcatcataggagaaagcgtgtggtgggaagcattgaaatggaatgcagcagagtggggagatgctggtcgacccaatgtttttgaacgaattttttcaccaatcagtgaggaggctgacatcatgactcaactggctgcacatcaagagactcaattaagtacagatcacgatgagtttctgggaaccaaacaaaggcatgatgatagtaagttaccatcaaatcctgaagaagtagaagacctacggcgtgactcagctgcaaatcctttgattgcattcacttatgatgagttaaagattatcacagaaaattttaggcaagatcgtgtgttggggggagtaggatttggaagggtttacaaaggattcatttctgaggagttaataaggaaagggcttccaacacttgatgtagctgttaaggttcatgatggggaccacagtcatcaagggcacagagaatggct

SEQ ID NO: 1576 - DNA, 1745 bp, Glycine max
  Clone ID: PAT_MRT3847_101422C.1
agcacaaaggtcactgtcacaacccctttatcagagaatgtactcgaaaaatgaataatgaaaagttgcagaaaaagtacaaagaaattccttaaataggtgacaactcataagtgatgcgctaaggacaattacttctacgcaaatcatagttcctaaaaaagactccttcaatttccagacttctgtgccaagcataagaggaatcgtgctaagtgacaaacgtgcggagatcaaatcttcactcaaagcattctcaggtagtccagtgtgaaactcaattccattcaggctaagcccagctcccgaaactcttcactcctttgaagtgatattgataagcctacaccaccaccctcatttaagtcatattgcatcatctttcattttcaaaccagattcaggaacctcactgattatggtcaatgtttttccaatagggacctctgtgtgtgcctgcaaaggctccaatgaatccacaatatctcgcattagaggccttgctttcgggttgcggttcaagcaatgatatgcaagcattgcagccttgtgaactgctttaattggataatcaccatccaaccttggatctatgatgtttagaaatttcttcttttcccacagcacaggaagagcccattctgcaaagttctgctctaaagcacgtcttaacgtgtctaaagattttcttacagtgagaaatctgtaaacatcacttttgatatacagatgacctgtcgctaagtattcaggtgcggcataaccatatgttcccattactcgagtagaaacatgggatttgtctccaactggtccatccttagcaaggccaaagtcggaaagttttgcattgtactcgggaagttttgaattgtactcctggtccaataaaatatttgatgtcttgaaatctcgatagatgacaggtttctctgcttcatgaagaaatgcaagtccctttgcagcgccaaacgcaaacaacggtggtatggccggtggctatttgaacaaatagttttccagacctccccgggacatgtactcatatattagtaccctatggttgtcttcgcagcagtacccaattactttgactagatttggatgtgaaagctgccccaaaaatacgacttgcgccagccattctctgtgcccttgatgactgttgtcaccatcatgaaccttaacagctacagcaagtgttggaagcccttccctcattaactcctcagaaatgaatcctttgtaaaaccttccaaatcctcctccccccaacacacgatcttgcctaaaatttgctgtgataatctttaactcatcataagtgaatgcaatcaaaggatttgcagctgagtcacgccgtaggtcttctacttcttcaggatttgatggtaacttactatcatcatgcctctgtttggttccctggttttgttctgacttgagtctcttgaggagcacctgtagactctggaggctagcctcctcactgattggtaaaaaaattagctcaaatacattggatctgcagaaactctatactctgttgtataccatttcaatgactcccacctacaccgcaattacccattataccaacttcaaacacacctttgacagcaccagctacctttatcaacaccccatcataaaaaccccaacttttctttttctttttattattttttgtgtgttgttatctcacacctcaagaaacatggcttagatttaggaacgaggaaggg

SEQ ID NO: 1577 - DNA, 237 bp, Glycine max
  unsure (1)..(237): unsure at all n locations
  Clone ID: PAT_MRT3847_101423C.1
atcagatacaaagagatcgngcaatggcattagtgtctncatttctcctgcgacccttcttcggttcaacaacactttgaaccattggttggatgtgtcagtctggagaggttacattagcacgtcacaccgtgnagtacgatgtggatcgctttcacgtatgcaacatcatcaangttctatgacttgtgacagtgtgctgtaagatggcacaccgtngtctatgagacaggtctt

SEQ ID NO: 1578 - DNA, 326 bp, Glycine max
  unsure (1)..(326): unsure at all n locations
  Clone ID: PAT_MRT3847_101424C.1
acgtcgcangcacgcgtacgtaagctcggaattcggctcnagnananagttaancaanaagntnacntntatgccagagacctcgaagtccatcccaaggacacatttntgntcagtatananggcancggactctcnaatatnccatacnacnnaanacatggatatggngtggagaaatttaactcgaccntgtannatnantgngttaacaagggcaatgcaccggcactgcccgnnactctnaaganttanaacaagctggtntctcttggcntcangattanattcttntcaggnagacnactggacatacaggncgtann

SEQ ID NO: 1579 - DNA, 611 bp, Glycine max
  unsure (1)..(611): unsure at all n locations
  Clone ID: PAT_MRT3847_101425C.1
cccgcgtccgcgcacttctatgtgagtgatctttttattccatttcgccttctctcgcgataccaggattctctggtgctgctctctatggttttctggaattcctaaagtgaacttcattgccagaaatttggtagatattagaattttttttttattggaatgggctctagtaagcagtctgctggtattcttgatacgctgaaaatgcagagggttagaactattctaacccacacttatccttaccctcacgagcattcccgccatgctgtaattgctgttgttgtgggttgcctctttttcatctcatctgacaatatacatactcttgtagaaaaattagataacaatgttaaatggtggtctatgtatgcctgcttgtttgggtttttttatttcttttcatcaccatttataggaaagactttcaaaccaagctattcaaatttcagtcgatggtacatagcttggattttagtggcagctgtgtatcatcttcctagctttcagtcaatgggagtggatatgaggatgaatctatctttgnttntgacaatatatctctcttccatcttggttcttcttggnttttcacattatattttctt

SEQ ID NO: 1580 - DNA, 436 bp, Glycine max
  unsure (1)..(436): unsure at all n locations
  Clone ID: PAT_MRT3847_101426C.1
aaagatcactcaatttttttaaatgtgatttgactcctctcatgcttaagtccgcatcataaatttatttaaatgattatttggtccctctcatgtctatgtctataacaccttttttttttttaaatgtgattcaactcctgaagccaacatgcattcacaaatcacaacctcttcctgatttattttttgcatttaactattacgtatagtaaaaccctggtgttaatcttggcttggctactaacacgagtggctcaagaagcataaccccattattagccttaacaaggttgacacttgatacatttggaggtgcactccaaganaaggcatgaaccaacctagcnnntaacattacagtcattgtagaaccaagtactattgcaggacaacctctccttccagtgccaaatgatatgaactttaaatctgg

SEQ ID NO: 1581 - DNA, 469 bp, Glycine max
  Clone ID: PAT_MRT3847_101427C.1
ctcaggaggaataatcggaagaaagaaaggggctgtagccatccgtatcaactacaaaggcattcgaatggtgttcatctcgtgccacctctctgctcatgctcgcaacgtggaagaaagaaattcacaatgcaggcatatatcacactccctcttttctaagttctgcaacccatattctagaccatcccatattacaatttggttaggagatctaaactacaggcttcaagggattgatacatatcctgctagaagtttgatagagcaaaaccttcaccggcggttgcatggcaaagatcaactcttacaggaagctggtcgacgacaaatcttcaacggcttttgtgagggaacattgaattacaagcccacctataagtacaataaaggaagtagcaattatgatacaagtcataagatacgagtgcctgcatggacagaccgtatattgctcagaattgaacac

SEQ ID NO: 1582 - DNA, 330 bp, Glycine max
  Clone ID: PAT_MRT3847_101428C.1
aatgaccgactcgacctacgcgttcgttacgtctcaaacctctgagggagtaagatgcattccattccctacaaatcggtcaatgacccaactcgggtggtcaccactggaccctcaggacagattgtatttgcattcagcacctacgacatgctgggggagggatgctgggacctgacctatccgtgacactacagatgattcacattcctacatgggcaaaatcgtcgaatggggatcaaacagtaatgtatgaacaagcacactctctcgatagaggagtcgaagctacaacccatgtgggagaagtaagcactgttatacatatgg

SEQ ID NO: 1583 - DNA, 207 bp, Glycine max
  Clone ID: PAT_MRT3847_101429C.1
gccaccgcataaactatttctggggggggtgtatttggcaccggaggtcctacttaaggttctcttccggcatcttctattttcaaacccgatttgcattggttcccccctttaaaagggtaatacccatttccttcccatgatcttgccaggttaccaaaaaaaacatgtccaaacctatttaccacatgctttgtttcccttggc

SEQ ID NO: 1584 - DNA, 500 bp, Glycine max
  unsure (1)..(500): unsure at all n locations
  Clone ID: PAT_MRT3847_10142C.1
attaatacacaataatactataaattaatatgataaaaacattctctcccttgtcacaattagagtaaaaatgaaaaaaaaaacctttcgtcttccataacccccctcaatgcccatctcctttatcttttctgtcccaaaaccttgggtgccaaccttgcaccagcaccagaaccaaagcaccagcaccaccaccagcaccaccaccaaccaaagcaccaggaccagaaccaacatctagtgtgccaaccttnnnnccatatcaccatcgtcaccaaccaaaccgccaccaaccaccaaccacccgcaacccaagccaccatcaccaatcaaaccacnnncgcaccatcgacacgcntngcacattttttacataacaaatttnnnacaaaaataagcaaaatgtcttcagctttacacacaaattaatcatccaagcaatcaacaccaaacatgagctctcatgttcgacttcaaccaacaaatcacacattattgac

SEQ ID NO: 1585 - DNA, 294 bp, Glycine max
  Clone ID: PAT_MRT3847_101430C.1
cggctcgcccgggcgcgacctgtgccccacgttgcgcaaccgcgccactaggggggctgcacctgtttgcaggcaattttcgctcgaccggccagtgcccaccccgcagggcggatggcagctcgtccctcaccggcgtgcgatgcactgatgctgggtggccgctgggatgtacgcaccgggcgcacgcacccgttcgatgcgattcactgagcggtgccgaaggccgcttgtcctggctggcgcacagcagggggcgccactgctacacacccacacatcggggcgctgtct

SEQ ID NO: 1586 - DNA, 234 bp, Glycine max
  Clone ID: PAT_MRT3847_101431C.1
ctcaagagtgctgtagagcagaagagtctgatgaggctgaagtttgaaggtctggaaaataacgaggaaattaccaagaaggaaggcaggttcttcaacgacaagcttggatacgcaacgcacaactttgcgtactacccatgttacgagtgcaagcaaccttacttcggaggtatgagacgctgtgaccagaacgcaggtgacgggcaccgatcttttaatggaaaagagttg

SEQ ID NO: 1587 - DNA, 1044 bp, Glycine max
  Clone ID: PAT_MRT3847_101432C.1
ctataatcactcactttcccactctctgtaaggctcgaccttaattatcgttctttctcctctgtgttgcgccattcctttgttctcagcttcttctccttcgccggaacacttctccgaacgatcaattttccggcattctctccggcgattcttctccgattattcctcactcagatccatagctctcacaatctccgaaccactttttttcctcttccagatccgaatcccggcgcgaaaatccgggaagaacgaacgaaccgttcaccgttgatacatggattagcatcacctcgatgaaaacctcttccacaagcgtctcacgaaacgattcgttttcctcttccacaaaatcaccaccatcaccatcaccatcaccatcatcgttcagtcctagggttagggttttttgctcagtacgataaagtgttcaagaaaatcatgaaaggcgggcacaagaagcccgctaagtccgacgccagcgatccggttccgccgccgtacgccgccgcaaccgtagcgctccggcggctccctccgccaatgccgtctccaaccacgcctcgcgcatctcctcgaccccgctgacactctcttccggcggctccatcgagccggtgccgctgttccgcgacgctcctgtcgcggaacgccagaacctcttcctccggaagctccacgtgtgctgctacgtcctcgacttctccgacacgctgaagaacgttagggagaaagaaatcaaacgccaggcgctcatggacctcgtcgatttcatccaatccggctccggcaagataaacgagaattgccaggaagagatgatcaggatgatctccgtcaacattttccggtgcctccctccggcgtcgcacgaaaacaccggccaagaacccaccgatcccgaggaagaagaacctttctttgacccttcctggccccaccttcagctcgtctacgaacttctcctcagatacattggttcctccgacaccgatacgaaaatcgcgaaacggtacatcgatcactcctttgttcttaaat

SEQ ID NO: 1588 - DNA, 232 bp, Glycine max
  Clone ID: PAT_MRT3847_101433C.1
acggtttcccttactgttgctgggtctctttctcctggcttttgtttctgtctctttcggccttgctttctgcgataaagagattcccacacacaccctgtgtctccatagtctctttattgacatagactcgtacattaacccagtctgcctcgctctttgtttcttttttatggtgtagaaatatgaatgtgaagacgttgttattgcactctctctaccactaccacat

SEQ ID NO: 1589 - DNA, 260 bp, Glycine max
  unsure (1)..(260): unsure at all n locations
  Clone ID: PAT_MRT3847_101434C.1
tgttnggagagggggggggcatttatttttgtatatctgagaactgaggacaatgtctttttgaatcgccaagaancggccacggaaagagagggggtcattttcaaagccacccggcgatgctcctatttctcaagcggtgccaaattcaagataatttcgaaccgttttttttcgcgggggtgagagaccctcttcgccgacagctccacagggaaacattgtttgtagacatcaacagggcgtttttcccaaaccct

SEQ ID NO: 1590 - DNA, 318 bp, Glycine max
  Clone ID: PAT_MRT3847_101435C.1
acggctgcgaaaagaccacagaaggggacttgtatcacagtggtgccttatcgctgcggttttgggggccttccggatattatatgggggattttaacttatcttcgacgcacgccgaaacaatggccggaaaaggagagggacctgctatcggaatcgatctcggaaccacctactcttgtgtcggtgtgtggcaacacgaccgaattgaaatcatcggcgaccaccaagggaacagaacgacgccgggttacgtcgggttgacagataccgagcgtctcattggagacgcgcgtaataaccaagtggacatgaacc

SEQ ID NO: 1591 - DNA, 152 bp, Glycine max
  Clone ID: PAT_MRT3847_101436C.1
ggctcgatgttcatttctacacatgcctagctcggtcgttccgtcgttgacgatggcgtttcgggtgcgaactctgacctccgctctctctatcttcgcgctctcttgtccaacgcttccgacaatgtcttcttcgaagagcgtgtcgatga

SEQ ID NO: 1592 - DNA, 409 bp, Glycine max
  Clone ID: PAT_MRT3847_101437C.1
aaaccccggtcgacccagcgttttgttagcgaactgtggttacacagaagtgtaggtggactttctaatcacctggagaatgtgtctaacactagctcatactaaacaacgataacatgtacaacgtaaatgcgagggcagcccgacaacgcatgtttgactgccgtgggctgctctcctaccgaaacatggtaagggtggggatggctgaacagacacacgagcacaatgctgggtgcggaagccaagctccactgacaaggggtgaccgctccctcatatgctaaggccaccatctgaaaggacataaagaactaggggagccaccccaggagcatcacgaactccagttgctgcagtagaacaagggaaagagttgctacgggggaagaatccccacagccttaaa

SEQ ID NO: 1593 - DNA, 279 bp, Glycine max
  unsure (1)..(279): unsure at all n locations
  Clone ID: PAT_MRT3847_101438C.1
nccacannccgntgccaccncntcgccancaccacggctacgntngngggnnanggtnacncnggtcggcnntcggcgnngntantnngctgttgancnntctnnttnngcgnntttnnntnntnntngngcngcgtnnctncccatngctntattgctngtttantgtncntngtgnagtcgnctttgggttggtnngnnngttgtcttttttctctgnnttgnnngtgngtntgttcancantactcgtnncgnncgtgccgttnggntntgtnttn

SEQ ID NO: 1594 - DNA, 306 bp, Glycine max
  Clone ID: PAT_MRT3847_101439C.1
agagagcacacattcctcctaaattcccactgcttgccttaataatatcacaggtgacatataataatgaaatacatgatgcactctaacaaacaaaacgaaggttattgcttgagcaaaactaattgctacaaagggtgagagagagagagaaaaagggaggaatactattgggagctgtcagggctaaactaaggaaggaaggtgtctatacttattctttgaaaaccatgatatttgacttgaggcaatgcatttttggtattgcacacatgagagttgactctctaagaacatgggtggggg

SEQ ID NO: 1595 - DNA, 421 bp, Glycine max
  Clone ID: PAT_MRT3847_10143C.1
ggctcgagcggctccagatcacctgttttaagtgttagaagaaaaggcaagaaaactctcggtgaacttttattgtaatggccgtacaaagccgaatccaatgcacctgaggctggaaggcaccaagaggctggtcacaagagcctattgcagagcgatgcccatttaccagcatcttacgaagacaagtgtttacccatgagaacctgagtgcctgaaggaactgctagagtacactgatagccacgcattgactgtcatgtttacatatggaaaccaagggcagctcttgaacatgctgcttaagcccatcaatgccaagaacaccatggaaattggtgtgtacactgggtatttagttcatggcaccgctgtcgctgttcctgaagatgggaagatcgtgtccatgtacattaacagg

SEQ ID NO: 1596 - DNA, 236 bp, Glycine max
  Clone ID: PAT_MRT3847_101440C.1
ctgacgcgttcaatggcttctgatgtccaagcgcatatgaatgtatccacttacaggaacggggactttcatagcatcctaatattatgaatggacattcacagcatccttcttaaaacatttttttcaagaattccaatctcaggatctacctccagatttaacttgtttaatcacttaacatgcattccataaggcaagtgttacccttcttaatagtccactaagcctaaaaa

SEQ ID NO: 1597 - DNA, 716 bp, Glycine max
  Clone ID: PAT_MRT3847_101441C.1
aaaagggtaatggttcaactgaggaagctactggggctaataatttggtggctgaacttgcagggcttgagataccagatttgagtctgttgaccctgccaccaccaccatctgttgctgcggatgctgctgggattgagccaaattttgggcttgattttgattggctgtcgtttaatgattatggacagggttttgaggatttcggtggcttggagaacattcatattggtgggtttgatgacactgagcctagtgagcttcctgacttcgattttggtgattttggtgctgatgagtttgctggttggattgaggaacccctcaatataccttgtgcctaagttttgttatttgttatggcctcaagttctgttagttttgttttttgttttatttattatttgtgagatctcaggaatttgcaataccaatttctgagcgagtgaatgttactttatgcgttttatattttcatttgtttttgagggagttgttaagttcttagtaagagttagagcagtgagatggggagagaatcttttgggtttttcccgtgctgttaagagccgtccaaggggatctcgaaccatgttatactatgtattaatttaaggttcttctatggcagagtattttaatgaaatgaacttcgatgttttgcatcgttttttctaccgtcttttttaaaaaaaaaaaaaaacaagcggccgctc

SEQ ID NO: 1598 - DNA, 437 bp, Glycine max
  Clone ID: PAT_MRT3847_101442C.1
aatttgtgttgtgtgtgcatatggaaagttactactattctggctggcctctggctcaattcaactctgcaccaaacagtgatcaattatctcctttttcagtcccaacaacaacacaacaaacactccctcttgttgctacttcaacttctgaccctgcagctgcagcctctcttcaatttggtgagttcccttcgtggcctgcccccattgcagcagaagatagagctgcaagtgcttccaagagccacagccaagcagagaaaaggcgcagggacaggataatgcacagcttgcaactctcagaaaactcattcccatgtctgataagatggacaaagcaacattactagggagtgtggtagaccatgtgaaagatctaaagcgaaaagccatggatgtcagcaaagccattactgttccaactgaaactgatg

SEQ ID NO: 1599 - DNA, 368 bp, Glycine max
  Clone ID: PAT_MRT3847_101443C.1
gttgtggaaagttgcatacaaatgctactgatggggctggcaattgcaatcgccatgcagatataattaatgaatccaaaaatcttgatgttgcggctaaaattacagccacaaactgtttttaaaacaacgataaccattcataggtttgaacgggtttcgcaagtgaggtgtgaagaaacctagttgtactatttaataagttttattgcatgtgttgcatattttattttctgtcagagcatttgtgcccataacgccttaatttgtcagtgtcaagcaacaatagtgctattctaaacttgttctttggcaaaaaaaaacagggataccaaaaaaaaaaagcggccgctctagaggatccaagc

SEQ ID NO: 1600 - DNA, 1746 bp, Glycine max
  Clone ID: PAT_MRT3847_101444C.1
gtttcataagacgcgttcggagacatgataatgcacagccacacaaaatagaatagaaagagtgatgactcactaaaatgatggatgtggcgaagaacggttagcagcacatggcttcttctacactcgctcccactctcagcctctccaccaaatcccactgctatctccccaacaccaaacaccggttttcatgtcccagaataaagttattctactccaagcaccgctccttctccgtctcagcttctgcttctgcttccacctcaaattcgcttcaggctctcatattcgactgcgacggcgtgatcctcgagtctgagcacctgcatcgccaagcctacaacgatgcctttgttcacttcaacgttcgctgcccctcttcttcttctccgggcccactcaattgggacgttcaattctacgacgaactccagaacctcattggtggaggcaaacccaaaatgcgatggtactttaaggaacacgggtggcctaacgtccacgttgttcgagacgcctcccactaatgatgaggatcgggccaagttgattgacactcttcaggattggaagactgagagatacaaagaaataatcaagtcaggaactgtaaaacccagacctggagttctgagattgatggatgaggccagagatgcagggaaaaagctagctgtttgctccgcagcgactaaaagttcagttattctctgtcttgaaaaccttataggaattgagcgctttcaaggccttgattgcttccttgctggtgatgatgtgaaggaaaagaagcctagcccatcaatatacgtgacagcttccaagaagctaggtatatcagagaaagactgcttggttgtagaggatagtgttattggattgcaggcagcaacacaagcagggatgtcatgcgtggttacctacacaccttccacagcagaacaggatttcaaagaagccatagcaatctaccctgacttgagtaacgtaagattgaaagatttggaattactacttcaagatgtagtagctgctaaatagaagatttccttgtgccttggaaatattgctattttagctgccctgcagtggtttctatcaggaaaatggattgaaatatttgatgtttatcacaaggttaagatctctctcttaaaaaaaaagaagaagaaacatttttccatgtattaattgacagcggatgatgtatacgtgcaaatcaaaatgtgacaacaattctttgcaagatgtattaaagatcagaatctattgtttgtgttttgctcagaagaagaaacatttttccatgtattaattgacagcggatgatgtatacgtgcaaatcaaaatgtgacatcaattctttgcaagatgtattaaagatcagaatctattgtttgtgttttgctcattaaattataatgcttgacagatatttcctttgacaattcattatgttcaatgcaagaaaacagcgataatttagtaaactcgagatttgcttgtgccttggaaatgttgctattttagctgccctgcagtggtttctatcgggaaaatggattgacatatttgatgtttaagatctctctctaaaataactttttttttcatatattaattgactgccgatgatgtatacgtgcaagttaaaatgtaacaacaattctttgcaagatgtagtaaagatcataatctactgttagtgtttttctcattaaaaaaagtattgggtaaattaag

SEQ ID NO: 1601 - DNA, 856 bp, Glycine max
  Clone ID: PAT_MRT3847_101445C.1
agtgtgttttggcgccacgatgtgctcctaatggtttgggtttcacgagttattcgttcctcaacctgggtccgtcgtgcccttcgttttgcctccaccccgggctgtgagcgccccgtgcgcgcagtgcagtggcaacaaatatttgcattagatgacagagatgatcatatacaatgcaatccttctggtgacataatggtgattgttctaagacatcaaaatttcaaaaacttgcctgctaaaagacacaggtgactggatattgctcttttgctcaatcaagaaaaagatcattgggctgggaggtgaagcttgcctaatgatacagcacacgaatcagatgcatccatacaactcaatacttcgtccaaaggcatgggctaggaactaaaaagtctttcagcctcatcattggcttctgcttgtattctcaggatagaaatcaggggcccttggactgaatttaaaggggcccacctttctatatacattagacagagctgccacagcaacagttaccctttcgccttcttgtgctggcagatcaacagtcttagttgcaaatctatgagtgcgagccagaccagaaggggtctgcaccacaatagagtgaacagcagcaggaatgctttgcttcatcagtttcacgtatcttaaccccctttcccatgcagctgggactttgctgtcaacgtggcacattcgagccaacatccaaatctctttttcagcagcttcttttaggtcattgatgcgagacagaagaacatcatattgagataaaagctgttgtttgatcgcagttacttctactgatttctgtggaagctgattaaactgaggaagaacaaca

SEQ ID NO: 1602 - DNA, 121 bp, Glycine max
  Clone ID: PAT_MRT3847_101446C.1
ctcggattcggcttcagtttcaagggtgttctattgttaggttccaaagtcatatacatttctgatctctgatctcattccaatagatcaaatatgccttccaaacgatggtatagtcccc

SEQ ID NO: 1603 - DNA, 128 bp, Glycine max
  Clone ID: PAT_MRT3847_101447C.1
agtccttactgcaaacgatgtgaccagtacgccaacactgtgacatgtaacgtcaagaggtcgcgtaaccgacgatttgcgtcatgtacttccacgccgagatgcaccacactgaatccacggtcatt

SEQ ID NO: 1604 - DNA, 158 bp, Glycine max
  Clone ID: PAT_MRT3847_101448C.1
cgtacaatttgtgggtctcttaccaactagaacaaccaaccaagcatggctatactactatagaacaacaacttcacttctcaaactgtcagaataatatttcataccatcccaatccaattattcaccctcttcctatttcactccctcattctctc

SEQ ID NO: 1605 - DNA, 309 bp, Glycine max
  Clone ID: PAT_MRT3847_101449C.1
ggttcactttcttccaacctctaacctacctctttttcttctctctcaacaacttcaacttcttcctcctcgattaagttccaatttaaaggcaaattacaagattaacctaaccgcaaaaccgccttcaattggaatccctgaaaagggtattcttcctgccgataattcaacagggacaattggcaaccttttggccagcatcattgtaaaaacaattgaatccaacaggcaagctcttagggagctgcttttcattgctcctgatgttcttcaatatctcattggtgtcatcctctttaaggaaac

SEQ ID NO: 1606 - DNA, 231 bp, Glycine max
  Clone ID: PAT_MRT3847_10144C.1
gttgaaacattgatcaaagtttgggctagccattattttgagccaggtgattcgtttggcggattggatcttaagcccaattaaaaagaaaagtttaaatttatattttggaatgaaatggaaagagctgggttgaatttgtgttaaggtgttgctaggtgcacctaacatttttttcaaaatgtcaaagttgtccctcatttgtgttgggtgtgcatgagaggttggttt

SEQ ID NO: 1607 - DNA, 310 bp, Glycine max
  Clone ID: PAT_MRT3847_101450C.1
ccgggggggaaaaaaaatcacggttttattcctggatcaaccccaacattgatccagggggggggcctttttttgggaaaacaaatttcctgtccaaaaatatcaccttccttaaaatgaccgctttcatgggaaataatttccttcctggggggttaaattccttcatgctggcagatttttgttactaaacaaacatttttttttgccccttgttcttaaaaaaaatttgaactgggctgattcagggctcattttattataaaattcggggcaacaaacccggcgttggctttcctttggttttccc

SEQ ID NO: 1608 - DNA, 202 bp, Glycine max
  Clone ID: PAT_MRT3847_101451C.1
tacggctgcgagaagacgacagaaggatacggctgcgagaacaccacagaggggcgattgtttgaatactatactaggagattcacacggctcatacgaagcacaccgatcgtgagtccacaggaggaaaggcttctaggaagcactttacaaccaaggctgaacattttttttccccaactactgttggtgaaaagacccc

SEQ ID NO: 1609 - DNA, 183 bp, Glycine max
  Clone ID: PAT_MRT3847_101452C.1
gggggccaaaaaaaaaatttaattggggcctttggtttttacaggcaatggagggaacaggggatgatttttggaatcccgagttttattttttcggggtggtgaaaagagccaaatgttatcagctttttttgccccctggggcaacagattggttgggggaacaaaaccctgatgactttc

SEQ ID NO: 1610 - DNA, 496 bp, Glycine max
  Clone ID: PAT_MRT3847_101453C.1
caaatcgaggtaaaactcacaaagaataataatatggctgacagctaaatgggaattcttcccacaatcttctaattgaccctgcctataatttcaatacgaggggcatgcagccgacgagtgtgcaagcagctttggctgcagaaatttattactgccagagaacatacatttgttgtcatacatagttgaatagagacaaaaagtatagtttcatttttcactacattcacataatgaagattgttttcggtgggacccggtaaccacctaagtggacaagatgttatatgtaagatatgctttgtagttctgatatgttcttttggccgatctagtactgctatgttttgtgttcatcagaacttagaagaaagtgagctggtacattatttgttttaaaacaaaggttaattagtttacagtttactttatttatcatatcaaatgtgtctccgggttgacattgcttttgcattagtgttcctcttttttt

SEQ ID NO: 1611 - DNA, 1227 bp, Glycine max
  Clone ID: PAT_MRT3847_101454C.1
attggtatagagcatctgaacaattttgtttcaactttgtacgaccattgatctcatgttcatttatttggctgattgttttgctagtctcacctttgagaccatttatctagggaaaccttacattaaaataaagcagatgtacgagatgaaggaagagctgggaagaggcaaatttggggtgactaatctgtgtgtagagaaagccacaggacgagcgtatgcatgcaaatccatagcaaagaagaagccgcaaaaagtggaggatgttagaagagaggtcatgattctgcagcatctttcagagcagcataacatagtggaattcaagggagcttatgaggacgggaagaacatgcaccttgtcatggagctatgcagtggggagggaactactcggagcctgaagccaccacaatcatcagacagattgtgaatgtggttcacgtctgccatttcatgggtgtgatgcatcgggacctcaagccggagaatttcttgttcgccaccaagtcgagtgttatgaatcagcccaaggtggagtaattcagcacagagcaatccaacaccgaagaagaaacagcagcaaacaaggtggagacagcctgttatgattaggaacaaggaacaacaacaaaatgcagcaggtagtggagtgagcaagggctgtccttctgcggctgtgcagtacaattccgttgggattgctttttcactttggaatcttccttttgcttttcctccaaggcaatatgccacaacaccattagctaagtgatagcagaccaagatcttatatatagcaaacaatgtattcaaatgaaaaaaagcaatataatcaaaagttcctttccttaaccccctttttctggagacacctaggtctcgaaagctaggatccttatgagcagaatttctgctcataacattgaggatgccccattgaaactcacggattttgaatcccaacaactgctgcagctgccagtgcactctttaacgtatggtagatcataaaatgtgacaagccttatttatgattcagaaactaaagtaatgtccgccacttgatcaaatgagaaatgtcaaacacatgatagtccgaacacttttttagacacattttctacatcattggcaaaaatatattagtgttcttgtagctagatcgtgtgtggagaacaggaaacctaacccaaaagcatttagtgtgaagtgtaacctggt

SEQ ID NO: 1612 - DNA, 258 bp, Glycine max
  Clone ID: PAT_MRT3847_101455C.1
ccaccagcttaatgaacctcattcaagttaagccactgcatttaatattgcagaggctaggctgtattaacccaacacccaccgaatatcgataaaaaatacctgcgaaataaacaggatttttaatattgaactcatatatttgatgatgaaatatgccaaaacaatcgtgactaaacagaacaacagacaatatgaaactgactaattaattcacttagtgataaattattcacggaaatattgacgatacccagt

SEQ ID NO: 1613 - DNA, 876 bp, Glycine max
  Clone ID: PAT_MRT3847_101456C.1
gaggcgtccgaacgttttgtgccctggcgcctattcccgtacggacacggagaagaagaagccgaagcgcgcaaattgagagaagatgagtagaaacgattccaagtacttctccaccaccaagaagggtgaaatccctgagctcaaagaagagctcaattcgcagtacaaggataaaagaaaagatgccgtgaaaaaggtgattgccgcaatgactgtcggtaaggatgtctcgtcattgttcacagatgtggtgaattgcatgcaaacagagaatttggagctgaaaaagttggtttacttatatctgatcaattatgcaaagagccagcctgatcttgcgatacttgcagtgaatacatttgtgaaggattcacaagatccaaatcctttaattcgtgccttagctgtacggacaatgggctgtattcgtgtcgataaaattactgagtatctatgtgatccccttcaaagatgcctaaaggacgatgatccatatgttcgtaagacagcagctatttgtgttgcaaagctttatgatataaatgcagagttagttgaggacaggggttttttggattctctgaaggatttgatatctgataataatccaatggttgtcgctaatgctgtggcagcacttgcggaagttcaggaaaacagtagtagacccatctttgagatcaccagtcacacactgtcgaagctccttactgctttaaatgaatgtacagaatggggtcaagtttttatattggacgctctttctagatacaaggcagctgatgctcgtgaggctgaaaacatagtagaaagagttactcctcgcttacagcatgccaattgtgcagttgttctatcagctgttaagatgat

SEQ ID NO: 1614 - DNA, 525 bp, Glycine max
  Clone ID: PAT_MRT3847_101457C.1
gttgaaacattcaatgggctccacaaatgcttaatatacagaggagataaagctactcaaaatcgtactttcaacggtaacgtacgtattgacagatgcaacaaaaccactggggaacaaagcgcatgtgcttacgggtctctaaaaccatcagggggacagtgggttaatcattgtccccttgagagcaaactgcacttggcctggaacccatggcggattccggcggtctgggattttaactgtgggaacctgacccatacgtgtctatcatactacccagttttgctgccgtattggggagtgacttctacgtccctatgcacatgtattttgtacaacatagttggccacatgagagaccaggtcagtagtacatgcctgcttaacggggccaaaatgcaatgcatgcgatctgtgcacataatacatgagctgtcctgacgcgtacaccgtgtagcatctgaccttggcccgtatatgatcggggaggactgatgataccactacggtggcagacactgc

SEQ ID NO: 1615 - DNA, 672 bp, Glycine max
  Clone ID: PAT_MRT3847_101458C.1
gagggtgttctgtgtttcctcccttccctccccttccccggtcagcggtgttgttttgttcggaatctgaaatcggaaatcggaagaatagtcttcacttcagaggcagaagagaagggaaaatcgatgagtaggaacgattccaagtacttttccaccaccaagaagggtgaaatccctgagctcaaagaagagctcaattctcagtacaaggacaaaagaaaagatgctgtcaaaaaggttattgctgcaatgactgttgggaaggatgtctcatcactgttcactgacgtggtgaattgcatgcaaacagaaaatttggagctaaaaaagctagtttacttgtatctgataaattatgcaaagagccaacctgacctagcaatacttgcagtgaatacatttgtgaaggactcacaagatccaaatcctttaatccgtgccttagctgtacggacaatgggctgcattcgtgtagataaaattactgaatatctgtgtgatccccttcaaagatgcctaaaggatgatgacccatatgttcgtaagacagcagctatttgtgttgccaaactttatgacataaatgcagaattagttgaggacaggggctttttggaatcccctgaggatttgatatctgataataacccaatggttgtcgctaatgct

SEQ ID NO: 1616 - DNA, 305 bp, Glycine max
  Clone ID: PAT_MRT3847_101459C.1
cgattggaatttggaatagaccattaaattgggttggaaatgatttttttacccaaattaaattctggcccaattaattattcccattaaacttggacttaaattaaaaaccggacttaaaggccgattaaagaaaattttttttttcgcattttcccggggtccttgccatggcacattttccacctttccacaagttttttgtttttaaggtccaccaaacccggttgaaagaatatttttgctgttgtggattccaccagtcctttttaattggaattgggaagcgtaaactggacctcccg

SEQ ID NO: 1617 - DNA, 463 bp, Glycine max
  Clone ID: PAT_MRT3847_10145C.1
ggtacattgagacttgaaaatgtgttaacattctttgcaggagttctactagagaagcagatagttgttgtctgttctaatttgggaatcctatctgcttcagttttatcagttattccgctaatccagccttaccggtggcaaagcctgttaatgccagttttaccaaatgacatgcttgagtttttagatgcacctgtcccttatgtagtcggtattaagaacaagaccagtgaagttcagtcaaagtttaccaatgttattctggttgatgccgatagaaacctggtttgaagatcacagaaagagctgccttcgaattgctgttttgtgtttctacgatttctagactgctagccatttattttcacatacagcacaattaattgcttttcatgtgcttatctgctaacatcaatgtagactcacatgggttcttaatttcttatcacattgctattat

SEQ ID NO: 1618 - DNA, 499 bp, Glycine max
  Clone ID: PAT_MRT3847_101460C.1
ggaaaagagggtgctacgacgccgttctgtgtattatccttccccttccccggtcagcggtgttgttttgttcggaatctgaaatcggaaattggaagcagaagaatagtcttcagagaagggtaaaatcgatgagtaggaacgattccaagtacttctccaccaccaagaagggtgaaatccctgagctcaaagaagagctcaattctcagtacaaggacaaaagaaaagatgctgtcaaaaaggttattgctgccatgactgttgggaaggatgtctcatcattgttcactgacgtggtgaattgcatgcaaacagaaaatttggagctaaaaaagctagtctacttatatctgataaattatgcaaagagccaacctgacctagcaatacttgcagtgaatacatttgtgaaggattcacaagatccaaatcctttgatccgtgccttagctgtacggacaatgggctgcattcgtgttgataaaattactgaata

SEQ ID NO: 1619 - DNA, 302 bp, Glycine max
  Clone ID: PAT_MRT3847_101461C.1
ggcacgaggctggttcagagaagctgagagagactgctgttaatggtaacaggcatctggacattgattctttccctgtcagaactgatgatacagttaagaagagccaaacttatgttacaatcaatgttccagaccctgattttcataattttgacttggatagagatgaaaattcctttgcagaggaccaggtctgggctgcttatgatgacgatgatggaatgcctcgttattatgctaaaattcacaaggtgatctccatgaagccatttaaaatgcggatcagttggcttaactct

SEQ ID NO: 1620 - DNA, 314 bp, Glycine max
  unsure (1)..(314): unsure at all n locations
  Clone ID: PAT_MRT3847_101462C.1
ggaattccttttttttttttttttttttttttttttttttttttttttttttttttggcagcaaaaaaaacatgtatttggaagttggttttcaataggggacaaactttacacctttgctgattattccaaaacatttgaacccctccaaagggtgtgttcaagccagggnnnnnnnnnnnnnnanaaggcaccaataggccggggtganancaccaaaaatgcccaaaatttaccctcccnctcccccaaccctcccaggggggggaaaatagtttataacccccgagaagggaaaggggagcccccaaaaa

SEQ ID NO: 1621 - DNA, 305 bp, Glycine max
  Clone ID: PAT_MRT3847_101463C.1
gcctatcggaacaaccaaagcgagatctaatgcgaattctaagattttagggaatgggaagcggacattctatgtcaccctatctacgatcaacttgagtcggcgcacgtcttttgcctcataaatgcctcaccagtggaccagcttcctaggatcgatgctcaaataaagcacacatattgcgtgaatgaaaagtactctggacttgcacacaacggtgtcgatgaagagaaagatcttgatcagttcatgacccattatgttctgatgctctgtgcctataaagaacaactgtatcaatatgt

SEQ ID NO: 1622 - DNA, 404 bp, Glycine max
  Clone ID: PAT_MRT3847_101464C.1
cccacgcgtccgcttcaacaaagaatatctggagatggatgtgatgtgatcaaacaagaataacaacttctttaactgttttctcaaaaatgttctcaaagctacactcacaacactcacaacagcctcaaccttttcaattctctcgggaatgtcaatcctctaaagaggatgatatcccaagcacttgtgatcaaaataatgagaccacaagtgaaataatgcggcgccctagaggacgcccatccggttccaaaaacaggcccaagccgcctctcataataacgtgcgagcccgagcccgtcatgagcccgttcattctagaaatcccgggcggaagcggcgtcgttgaggccctagcccgcttcagccgcagaaagaacaccggcctttgcgttttaacc

SEQ ID NO: 1623 - DNA, 335 bp, Glycine max
  Clone ID: PAT_MRT3847_101465C.1
aaaaattcaaaaaatctcctgctcgtttacaaaacacgaataattggagggggcttcatttgaaggaaaaaaacctttttcttttaaagcttactttcaatttttcactcattttcccccgcatttgaaaaaaaaaaaaaaagggaagcaaccccttttccctagtgaagccacagtccgccgaacttttttggggggacatacaaattttaattgatggaaatggccttattgaatttgaattgaagacccagctgatgggatttcattggttcgggggtcagccttttttaaacaaaccccacaaggattttttttaaccaccagggcaggga

SEQ ID NO: 1624 - DNA, 310 bp, Glycine max
  Clone ID: PAT_MRT3847_101466C.1
gatcgctcgagagacatgcgagttccactatagatcggtccatgcatgttcagcactccttgtccatgatggaactgacgatggcagttccgatcacctacgagatgctagaacgttgatgcattttactgcagtcaaagatattggggtagggatacgcgtaccggaccgcgccttaataggttgtttgagattctctaaggcactacttcttgcatcaatagggcaaagatactgaaaggatacccacgcttcaatcactttttatgtaagaaatcatttactggacggaaaaaaggatacaagctta

SEQ ID NO: 1625 - DNA, 966 bp, Glycine max
  Clone ID: PAT_MRT3847_101467C.1
ttcagtaggttccaggagaagcgttgataatagggagggaaagctatcagtaaaattgaaggcgggtagaatttcacgtgacttacatcctgcatcccacaaattatcttcaatagaggtccgggttgaggatgctaaagacacagccagggtccaagctaaaaaatcttctgaactaaagaatagtcatttgcttgaaggtggtgttcatgttgaacaacctggttattgtgctaatggtaaacgttatgaggagaaagtaaacaaggacaatcaggaaagtgaattttcttggcagaaatctggtaaggtttcatcattgcacagcaaggagaaggacagaaagtctggttctcatgttggtacagataagatgaagatttcagtttcagagactggtggttattcaaaaaaaagtgggaagtatgattcagcagttgatcccagtaatcatgaatctggtgctgagtcaaaaaataatgctaaatatatttctccaaagtctaaaagtgaaattgactgtattagtcagaaaagtgctttaagacatgggccaaatgaaactggaaagcaaactgagataaaacaaagagactttgagaattcaattctgaagatggatgctcaatgtagcactgataataataagcctatcccctggcaaaacctgactcaggattttgagggagaaaacaaagctaatctcacagaatcaagagttgggaaatccaaagttctctcgtctgcagtggatgaagtaaaaagggaagcattgagtgtgggttctagaactgtacctcagcatcaaaagggaggcatgtctaatgagcatcatgtccatgtttctggcaatgatgatatggccaagtcaatgagaaattatgctgatgttagtaacaatgctggagttaattatagttctggaaattttgcacctgatcagcaacttacgttgttaagtccttt

SEQ ID NO: 1626 - DNA, 273 bp, Glycine max
  Clone ID: PAT_MRT3847_101468C.1
ggaggcccccagcaattgcaacttaaatttggccatttttggagaacaaaaaacttttagttcttactgctgaacggggggccggccaaatttctcaaaaattttggagagggtcctggaaggttttagtggttttcaagcctaatgggagcccctttttttttttttttaccgggttaccgataatcattttctaaaaatatggaacagtttttttttggaagcataaacgagaatttttttactttttttgggggccaacaatctaataat

SEQ ID NO: 1627 - DNA, 214 bp, Glycine max
  Clone ID: PAT_MRT3847_101469C.1
tgaaattctatgcaaggttggtctgatccctcaagatacagcactcccatggttcagaaccggggtgttcccgcctgcacgaacctactactactgggtagactcctactcactgttcgagtttgagatggcactgatggtatttgcaaagcacagaagattcctggactggctcaaaccaggctctatgtacaaacaatacttcctaggacta

SEQ ID NO: 1628 - DNA, 180 bp, Glycine max
  Clone ID: PAT_MRT3847_10146C.1
gctctggctcctctaagagcactgttggctttttcacgaacaccgctgtgatcagagagggggaggcgtttgctctcgagcacgaccaatgttctcagagagaacgaccccctaccgctccaaatccacgcgctggaacgtcgcctattgccgcgcgatctgtgctctacggattgcatc

SEQ ID NO: 1629 - DNA, 104 bp, Glycine max
  Clone ID: PAT_MRT3847_101470C.1
atctcacaatatgcttcttcttaagtttcatgactcccactaaacacaaacgggtcgtacaacttaaccctgagagagccctaccattttccattttaaattca

SEQ ID NO: 1630 - DNA, 284 bp, Glycine max
  unsure (1)..(284): unsure at all n locations
  Clone ID: PAT_MRT3847_101471C.1
tcatcatngccacctctgcnattcagcaatcagcattcgnnccgtcaaactgctctgaagcagctcaatgngttggtccgncagaccggtggcgccggnaaaggtcgcaccaacatgcgncgtaccgtcaagagtgctcctcagagcattggtatggcnntgatcgncccaagnacctgggncnattctcagancngattncgtcatanctgaccggagaattccccggtgactacggatggnacatgctggactatcagntganccggaaancttcnccaggt

SEQ ID NO: 1631 - DNA, 588 bp, Glycine max
  unsure (1)..(588): unsure at all n locations
  Clone ID: PAT_MRT3847_101472C.1
ccacgcgtccgcttcttcttcctcttcttctgtgactccattcatttcatcaattcactttccttagtttcttgcagcttcacactgtgccactgctccgttttagggttgcaatggcgctgttcctcctctacgagtcggcgtcgggttacgcgctcttggaggcgcacggcctcgacgaaatcgggcacactacggaggccgttcggaactccgtttccgacctcaacaggttcggcaaggtcgtcaagcttcgctccttcaaccccttcacctccgccctcgacgctctcaaacagtgcaacgccgtttccgaagggctgttgactgatgagctgagaacggttttggagactaacttacctaaagttaaggaaggtaagaagtccaagttcagtttaggtgtatcggatccaaagattggttcccagatatctgaacttactaaaattccttgccaaagtaatgagtttgtcgccgagctgcttcgcggagagcgcctccattttgataggtttgtcagagatctcaagtccggggatttggaaaaggcacaacttggtctggggcatagntacagcagagcaa

SEQ ID NO: 1632 - DNA, 284 bp, Glycine max
  Clone ID: PAT_MRT3847_101473C.1
ctgaggctataacttgtattgaaacccttttaggaggacttttccttgatatagctacgcttttacagaatacgagatcgatgacccaacgactacattgaccatatgtggcaacggttgccgacaacccagcacagccacgactcatagcatatgtgctaaatgtggaatgcaagctcttgatgcttggagcggactagcgggttattgctgagcccatgggtcttcgagagtgctgacttacggtgacggagacgcgaatgactcgtgacgcagatcctgac

SEQ ID NO: 1633 - DNA, 343 bp, Glycine max
  Clone ID: PAT_MRT3847_101474C.1
gtgatgggggacgcctgcggaccccaagcccagctcaatggtggggtgtcctatctgccccaatggctgtcaataatcgcggacttatactgtggctgtactacctcgcatacatatattgtcgcaagcagagcacatgattccggggctgccacggatcaatagatagcctgtgatgaacagctcttgctcgaactcatcttccctgagcttcgtgataacgcacattctgaactcttcaagaagagggagctatttcaagatctgttccattgctatggaattctttttgttcaatagctttacttttgtaggaaattatttcattttacccttctttttt

SEQ ID NO: 1634 - DNA, 454 bp, Glycine max
  Clone ID: PAT_MRT3847_101475C.1
ggctcgagcgtgttgaggaatgagctgactggacagacccactctagggggcacgcgggttctgaccctggaacggaatattgctgctccgctggaccctgcagcattctctgattcaggggtccaaattgatctggctaatgcgggtgatgaggaacgtattgctaagagcatctattcttcagaccttgacttttcaagagacggcgataccttttctgtggttgatggcactgggggtgatccaccacctgcaactaccaaacctgatgagggggaccggcctccatactctattattgagggtgagcctgagcgggatgtcattataccatttgacatctacatacctaagatcttgcggcgacggacatgtctgacctagagtcttgaaagcctgcggatattgcttcagagcttggagcttgtccaggaatgtgttaggtacaagttg

SEQ ID NO: 1635 - DNA, 346 bp, Glycine max
  unsure (1)..(346): unsure at all n locations
  Clone ID: PAT_MRT3847_101476C.1
ngagaaaaaaacataggaaccttagatcacttgactagtgtgcggtaacataatggatactctaccctactcattcatgcacgttctcgttctcaagacaacaccaggtatagaccgggaacgaccattacctcttgcaatggcaactcggctacccggatatatcggactaggggatgcaccgcatgatatctctcgcacggtgccggattcagagcggaatccttctattacacatgctatggcctattcgaacaaacaccacaccctcttattaattcttgtgccggtctactaaatcaacttcatggtgttcttgaagctcttcctgattctaatgtggaaa

SEQ ID NO: 1636 - DNA, 457 bp, Glycine max
  Clone ID: PAT_MRT3847_101477C.1
tggcttggaacctttgggctgattgatgtgcttgcatggcgtgagaagatgatagaaggggctctcgaaaagtaatatcacaggtgaaggatcccgggccgggacccgggaaccagggccacctgtgcggtgaagacgaccgaggcggccccgaatgactgaccggggaagaaggcgtgtgcgaagcgtaatgatgacgacattactggtgattcgaagaagtccgcggtggtctagatcggtataagagttgataagacttgtacttagaagcggcatattactcataaggactatactatctctaaggaccatgagacttacgatggtacgggctctgaatctcatcataatcaaatataataaggctcacctttactctaacctcctccccaaccgacatcagggccccgccccccagggcctttgaaccccgacccgccccctcgtcacaact

SEQ ID NO: 1637 - DNA, 844 bp, Glycine max
  Clone ID: PAT_MRT3847_101478C.1
ccctactttacaacactgaccttaaaggaatgctctgttttctgttatctctcattgcatgcatatatacataaacctaaacacccttttattatcacgtcccaaatcataatttccttacagcaacataagcctgcaattcaagttaatttttcattagaaagcttggttaatcctaaatcttgttatggagatgaattcagttcctggtgttatgtctgaggcagaatatgaagaagatactttctatgctgagattaggaggcagattctgctattgacatctgaagacaatgaagatttactagaaacaagaagtttcaaccccattaatgtcacaaatggtggttcaaacaggtcagcttacagctttaactgtgcatctccatccgcaagcaacttttctttgtgggaaagacatagttctggttcaccacccctttggctagtgaacttgtggaagaatggtaaaggtactggggtgttcattccacaagtggcatgcaggaaaaaccaaagaccaggaagaatgaacaatagcaggagaaaaatctatagaccagtggtaaataaggattgaagattaaggaaatttgtatttagtgaaaattgattattgtcgcttgctcataataaatatagcataggttacaatgatgattcgtttgaggacaaattgcagaagataaaaagggagaaaagtctgtacaaagtttgccttttcattctatggtgatttttgttcaacttactgatatgtaccgtcattacaggggatgtgatactttcttaatgtaattttctattagatgaaaaaaaaggtgtcatcatagttttggtgttt

SEQ ID NO: 1638 - DNA, 893 bp, Glycine max
  Clone ID: PAT_MRT3847_101479C.1
ggccaatcccataaatgataatggggtttcatacacaaatgtttttgatgcaaattttgataccttggtctctgccctcgaaaaagtaggatatgggaacatgccaattttggtaggagaggtggggtggcccacagatggtgacaaaaatgctaatgtaggcaatgcatttaggttctataatgggcttttaccgaggcttgcaataaacaaagggaccccacttaggcctggatttattgaagtttacctatttgggctcattgatgaggatgccaagaccattgccccagggaactttgagagacattggggcatttttgggtatgatgggaagcccaagtttccaatggacctttctggaaaaggccaaaacaagctactagttggtgcacaaaatgtgcactatcttgagccaaactggtgcatgtttaaccctgatgcacaggacctaagcaaacttgctgataatataaactatgcatgcacctttgctgattgcactgcacttggatatggttcttcttgcaacaacttggatgccaatggaaatgcctcatatgcatttaatatgtactaccagacacaggatcagaattacatggcctgcaattttgaaggcttggcaagactcacaacaagcaatatttcaacacctacttgcaattttattgttcagataaatccttccttgtcctcttctttaaggcccccaatagtagcttccttgtttgtcactctactacccttgattctatttttgtaggatcttgtacataacattattattataggtgctattatttatatggatattttcatcagttgttgttcttggtattatagtttcaagattcatttaataaagaattttatagacttaagcaatttca

SEQ ID NO: 1639 - DNA, 253 bp, Glycine max
  Clone ID: PAT_MRT3847_10147C.1
cacaagcatcctccgacctccacgaaggcaatagctgccgctatagatgagctcttcaacgctgtcaagaatggtacattccagcgactcaagtgcagctacgacggatgggctctaccagctaacctccattcaccgcggtcgcgactccgttatagactacaatgattcgtacctcatcgacatcatcaccatgcacggagtcgacatttccgtttccgaaggcgaatctcccaacagcttgttaattatc

SEQ ID NO: 1640 - DNA, 447 bp, Glycine max
  Clone ID: PAT_MRT3847_101480C.1
ggagcgaggaacacaactttcattagtcattgaacatttaacaccttacagacaaacatgaacaaataaaacagttactattacttcaaccaagggtgtatcaaactacactactataagcttaagacatgtattatccaactaaagttcaagttttgcagaactatgtttagttaatataaagcccttacattcggggaaacttcaaaaccagtattatccatccaaagtattcagagcttaggggacgcaacatcgttgcctcagatagttgacgtcaaattatctgtatattaacctccagcgtcagaacaggatttttttccgaacaatatgaactggagcttatcataaccagaaagcactcaagcacctgcaacagcgcgtaatatgtttgcaccatcacctttaaagagtgactgattaccctatttagcgactatcatt

SEQ ID NO: 1641 - DNA, 418 bp, Glycine max
  Clone ID: PAT_MRT3847_101481C.1
tacggctgcgagaagacgacagaagggatagttaaaagaaagaaactttatcgaaagtagtcaatcagattttttttaataaaaattaatcattaataaaattaaaatttgtaacttcatgatcagcaagagggtacttcaataaaatgcaagaatttctttgcatttcttcacaattttgagcaaagggttttttactaggtcctacaccgtttttttaaatttctttgctatttgaacccaatcaatcgaaggaagtttcataccttcctcctactttcttcctttcttacttatttatattgtaacagagcataaaatgataaaattatgcaaaaaataaaatcctacaagataataaaaaattattaaaaacaatttaaaaattattttattttatgcagcttaaaagtttttt

SEQ ID NO: 1642 - DNA, 173 bp, Glycine max
  Clone ID: PAT_MRT3847_101482C.1
gtggtttccctcatcatgaatcatatgctaaacttctacatagttacactaaaaatttacttgcatccaccatttggtcatgaatgaacaaattgaattttaggtcatctttattctgaattaaatataatatttattggatgtgccttcgtatgtggtttagatgttcttgt

SEQ ID NO: 1643 - DNA, 263 bp, Glycine max
  Clone ID: PAT_MRT3847_101483C.1
aactcttcaaggtcgtagccttaactttgctggtgttatggtcatgttggagctttgatgtatcagtacgctaccctcaactctttttactcacaaatgagtgcagcggatttaccaccgcaaattacgacttacccactttcttctaaaatctaaacgcaagtttcgcagacctgagagagcaggtgaccaaccaaagcaagcaatttgccattcctcaatcaaccatcggaacaagtcctgtctatgccatgtttcaatgc

SEQ ID NO: 1644 - DNA, 461 bp, Glycine max
  Clone ID: PAT_MRT3847_101484C.1
ctcggcctcgagtagggtatttccatgttttctcttctgatgtcagataaagatttctctctgtgttttggtttttagtttcctgtgatccaagattgtttttttagtttttttcattgatagactattgtgggtgagattcagaggattttttctttcttttggtgtgttgcccatcaccctttttggcatgttttttacttgtattgtctgcatgaattaaaatttcaatgcgttttatgtgagctgaaattctgaattgcgggtgtggtggatcttaattaagaagctcttgggtttgtacgagaacggatcgttgattctaatgctcaggggtcatacatgcttatactggggaccaagaataaagtataatttcccaatttctcataattactgataactgaagagattattgatggtgtgtgaggaaaacattagatatttctaagaatatggga

SEQ ID NO: 1645 - DNA, 1444 bp, Glycine max
  Clone ID: PAT_MRT3847_101485C.1
accaaaagacaataataattcatacaaaaacccaccattccattctcatttctttctcttaaaaattacacaaaatcaaagctatcataattttaatcatagacctaacttcacatagtataaaataaaaatatatcacattaatcatgacatccgttttttaaataaaaaaaaaacttattcctcgtttttcacaatttatataacatttatataacattccacttcttcctctatagtagtctttggcaaagagagaatttacacgtcttacacgtcacattaaacaacaaaagcagaggtttaatagaatttttagaaacacactcagaaaccgattccaccaccacctttattatccattcccctgcttcagtgcttccgttcccaacgaccaatatctacaaccattacacaacacatcgccacgtgccagtcttcagacgagggtcttgcatgtcgaagtctgcgggtcccacatcgctggcacgaggtaccttcttccattcgcaccatgcgcattgtagctagccccggttgctttatccacgagaacccgacccggataacccgggtacgatccgctaccgaaaacgcccgtgcaagcggaaacggcctccaacggcgcggtcggggggccttggaagtaaccgttgttgaaagggttcgtaacggtgccagcgagaagagtggccaagttaataaccattccgtcaactccgacgtcgccgttaggcgcgactaacggcggcgtctggggcccgtaaatgggttggtggaatggccacgcgcattgcccggggcactgagtttcggagtttccaacccaaatataagctgtccgggcagcgtttttgacgttgcgggtagagccgtgggtcccgcagcggctcatgcaaaagccctcaacggcgacgtctttcgccgttaatacgaccgttatggatttcagttcgttgaacttggacgcgagtgcgaggacgtctttccctttgagatttttccctaacgagtaagccgagtgtaggaactgcttccctacgacgagcgcagaggatcctcctcccaccttgtacttctccgtggttttccaccacgtggcagtcgaggggagaggcgcgtttggcgcgctgcttaacgagtttatgaagtccacgattatggaccgttggatcggggtgaaggtgccgtaccagatgagattgacggtgatgcgccccttcaggagttggccgttgtggtacttgaggactagtggctgctcctccacgagctcccctacggttggtaggggaaagaggagcagcgtgagcaccgcagagaaggcgagggcaatgttgtaatttaaggccattatttttgtggattagaacgattgagtcagagagtgaaagcagaagaataagaagatgagagtgtttgaactcaagtttgacctcgagcc

SEQ ID NO: 1646 - DNA, 377 bp, Glycine max
  Clone ID: PAT_MRT3847_101486C.1
gtgtagcggtctcaagcatgagaaactccaataaaaaaaataaaagggaaaacgaatttgctcatatggagtacatgaacataactgtaattacttcgaacaaaccttatgggatatctgatggctccaacccattttttgatggcctcaaagttcctaaattcaatctaaagaaaggcggggtgcatagtggtcatgttcaacaagggcttagagataaattttgttttgtgaagaatgggaaagggagatgtcaggacggttatacagctgaggtggatggtcctgactcggtgaaggtacttgtcgccactaaagcaaagcctaacagggacgttaggaattagcttgacaaaaaaatattttaaaagcttttt

SEQ ID NO: 1647 - DNA, 2623 bp, Glycine max
  unsure (1)..(2623): unsure at all n locations
  Clone ID: PAT_MRT3847_101487C.1
ccgcgcgtccgggtgccccacaaccaaatcatcgtcttcatcgctctccgacacttgaacctctcatgttgttcctctagaaacctcttccgctccaccgtggaattttcctgcttctgtagcacaaaaccacacacacacacaaactctgctttaatattattcacgcctgtcctttgtcgtggtgctggttacaagatagggtttgcactttttaatcagaaactagccatgaccaggtacagaaaactactgtgttagttaaaaaacattcatcgattattagcaactttttcagtagtagtgtagccttgtaggtgaactgtgtgttaggattttgaagtttgattaatagccgtgtgtagaaactagaaaggttagtgattgttgtagaatcaatggtaggtgttgatcagagtaatatgaatatgaatcgaaatagtggtgtatttggttcatcatctgggggtgctcttagacccccaaatcgattgaataatcaaatgggtgttgctgagaaccagaaccagaaaccctatggtatgccaccctcacaccctaataccaatattctgaattcatccgtttaagatgcacggtcggagaacctggtggagagtctctccgctcaagagcgtttgggttctcccaatttgagtcctgcgtcgtcccattccaggtctttgtctcagccctcttttttctctctggattccttgcccccattgagtccttccccttacaaagaaccttccttttctgactcaatttcgaccgacgtgtctgctgaggaaagcttgcctacctctcatgcccctttgcctaatcgtggacacgcgcttcagcttggccattctcttcctcctcgtaaaggacataggcgctctaacagtgattcccctttaggaatcgctgattttattcagtctgcccctcaatatgatacctgtgggacttggagctattgtgaaaataatgcttataggggagggaactctggttttgagaagccgattcagttagtgttaaaggaaccaattaaggatatggaccgtgttgatggttttggtggagaacctatggttgggaggaaagaggatgatgcactggatgatttgtttagtgcatatatgaatttggacaatattgatggtctcaatttttctggtatggaagataaggatttggatagcagaactagtggttccaagacagttgagagcagtgataacgaagttgagagtcatgcaaatggcaaagtgactggttctcaaggggctagttcccgctgttctgaagagaggagggaaggagtgaagaggagttctaatggagacgttgcacctggttcccgacaccggagaagtttctcattggacagctccataggaaatttccatattggagatgaatcgcctaagcttcctccttcacaaaaccgatttggtcaacactctcctagcagttcaatagatggtaagacatctgaaacaagcatggagtttggaaatggtgaattcagctcagaggagctaaagaaaataaaggagaacgataaacttgctgaaattgccatggccgatcctaagcgtgctaaaaggattttggctaatcgtctatcagctgctcgctcaaaagagaggaagatgcggtacatttctgaattagagctcaaagtacaaacacttcagacagagacaaccacattgtctactcagtttaccaaattacagatggataattcagagctgaaaagtgagaataatgagtacaaattgaggattcaagccttggaacagcagtcccaactaaaagatgctctgaatgagaccttggatgctgaagtgcggcgtttaagacgcacagttgcagaacttggtggagagtctcttctctcaagtcgcatggctcaacagcttgctattagccaacaagtgttccagttacagcaccagcagcaccctaaccagcttagacatgttcaactggacaatagccattcccaggagcagacacagactcagtcacagtgccacaatggcaaagctactgcctactgattagcactctgataccatgtatgctcaatgtttgtgatatgaatctgaataggatattgcatgaccaaacaagctcaagtaaaaaaaaaaaagactcgattctaagagaggacccgttaacaaaaagaaaagttcaaaagatacaagaggcaaaaggagtctgtgaatgcaattcctatctaataaggttgtagttcgacttgtgcaagcccaaggatatgattatatgaagactcaaaatagtgtataattgttaactttattgcctaagatttgtagttattatttgtaaatctaatgatgatttgagatagatttcattagaatttatgattgattttattaagatttgttttaattgattttttaaaatttgtttcgtctattaaaaagaagattctatcatttgtttggaaatgtttcttattattatgatttgttttctattttaaatcttctatcatttaaactcacaattggttaaatgaattaagagctttcatctggctcatgtaatttaagttagattntgaatgaaatatcaaatatgagtttctccaaaa

SEQ ID NO: 1648 - DNA, 638 bp, Glycine max
  Clone ID: PAT_MRT3847_101488C.1
agaacttggtggagagtctcttctctcaagtcgcatggctcaacagcttgctattagccaacaagtgtttcagttaaaggaacagcagcaccctaaccagcttagacatgttcaagtgcacaatacccattcccaggagcagacacagactcagtctcagcgccacaatggcaaagctactgcttactgattacattgattgtacataagtattctactaccatgtatactcaatgtttgtgatatgaatcagaataggatattgcatggccaagctcaaggaaaaaaaagactcgattccaagtgatgacctgttaacaaaagaaaagttcaaaagatacaagaggcaaaaggagttcatgtgaaggcaattcttatctaataaggttgtagttcgacttgtgcaagcccaaggatatgattatatgaagactcaaaataaagtgtagaattgttgattttattgcctaagttttttagttattatttgtaaatctaatggtgatttgagatagatttcattaggatttatgattgattttattaagatttgtttaattgtttttaaattttgtttcttctattaaaatgaggattctatcaaaaaaaaaaacggggcgtggttgtcctgatcatac

SEQ ID NO: 1649 - DNA, 677 bp, Glycine max
  Clone ID: PAT_MRT3847_101489C.1
cttcagtcttcactttggtacttcacaagtatagctgggctttttttgtttgcttttccattacattttcaaactcttcatacaaattcatccaagcgtcactggtaatattccacttgtttgtaggaacggatcttgaaaatatttgagggatattaaaggtgaacgcactttaacatgcataataatctttttgtatggtaattaatgtctcaaatattctgcaatgtagagtgtaatgcacttaattatttgtcatcagatctatctttttctttgtcatggccactggacaactattctcccgtactacacaatctttattttacaactacaagcaactttacatccagaggatgcttgattttgacttcctttgtggtttgtataggctctatcatcttgattttcttctaggcggattgcagaaaatgatacatttgacattaatatttgttcttaatactaatggaagctccaattttgtgttcttaggcagggaaacaccatcagtttctggaataattagccctggttctgagggatttcaaaaacttttttttggtcaggaggaaattgccatcccagttcatgctaccattgaagcagcttgtgctgcacatcctactgctgatgtcttcatcaactttgcttcatttagaagcgctgcagcagca

SEQ ID NO: 1650 - DNA, 262 bp, Glycine max
  Clone ID: PAT_MRT3847_10148C.1
ggggattaaaaacatgagcggaacaatcccaaagatgtccttttattaaaacatacaaatatattctcaacataaagcccaaaccttcaaaagaacgagcttctcaacatataaaagatgagggtataaatctcctccctgtaaaatggctacatactaacctcatattctgcctatcttgaaaataacataaatgccattaaacacagaatcttctgtcctagagacaataaaccaccccctcctttaagatctatacttt

SEQ ID NO: 1651 - DNA, 2895 bp, Glycine max
  Clone ID: PAT_MRT3847_101490C.1
ggtcgaccacgcgtgccccacgcgtccgcccacgcgtccgcccacgcgtccgcccacgcgtccgagatgactcgctcagagagaagaaagaacgaacaattttagcttcaaacacacacaaacacatcgtcatcatcttcatcactctccgacacttgaaactctcatgttgttcctctagaaacctcttccgcaccaccgtggaattttcctgctccttttgcacaaaacacacactctgcttctattataattcatgcttgtccttgtccttgtccttgtgctggtttttttctagatagggtttgcactttttaatcagaactagccaagaccaggtacagaaagtactgtgttagttaaaaaaaaaaaaaactttcatcaattattatcaactttattcggtagtgtagccttgtaggtgaactatgtgtcaggattttgaagtttgattctcttttatattgattgaatagttgtgtgtagaaactagaaaggttagtgattattattgagtcaatggaaggtgttgatcagagtaatatgaatcgaaatagttgtgtatttggttcatcttcatcttcatcatcagggggtgctcttagacccccaaatcgattgaatagtaatgttatgcttattaatcaaatgggtgttactgagaaccagaaaccctatggtataccaccctcacaccctaataccaatatttatctgaaacaagcatggagtttggaaatggtgaattcagctcagaggagctaaagaaaataaaggagaacgataaacttgctgaaattgccatggccgatcctaagcgtgctaaaaggattttggctaatcgtctatcagctgctcgctcaaaagagaggaagatgcggtacatttctgaattagagctcaaagtacaaacacttcagacagagacaaccacattgtctactcagtttaccaaattacaggtgtgtacggtctgagttgagccaatattcccttttcttcagtttttcaattatattttattgtgttgaataatgtttgcttctagcattcatttattcttttctttcctttcttttgttgtgcttgtctacagatggataattcagagctgaaaagtgagaataatgagtacaaattgaggattcaagccttggaacagcagtcccaactaaaagatggtatgcatatgcatttctcttctactttatctattagctcaaatctgctctagcttgttccacccagtaaagggtgaacttttccaactttatacagaaataacttatatttatcatctggttcaatgatctctgattttcatttagtaaatggattttatgtgtgataacacggttcaatattgtgttggttctcaacatgtaaatggctgatgttaattcactaaaagttgagtgattttctatccaattatgttcaaaatctctgcacaactgcgcctttgaaatctacctgtctggtctaggaatttgattcaatcttgcagaatgcaaagtacatttgcactagtagtctagtaccatgtttttctaaagttcttgttttgcatttcatggcctctttagaactgcatatgagaaaatgttagtgtaattttgccaacacagatggtgtcacttaaactctccttgatgccaaaatagaaagaaaaagagagagagaacacgatactaggaagggaattctgatagtcaaggttcaaatgttctttttattgtacatactaaaataatagaactctttatatatgatgtttcgattcttaatggaaaatagttgaaaactacactaatttcgttattaccacaaaacttctgttgtcttcatgcctaatgcctttatcagcagtgacttctttactagatgtttctttgtaatgcaattatacactgtaaacttgtatctccaagaccaaggcattggcaatatgtttttagcagcttgaacttgtaactcaatatgtatctccatttcatcagcctctcccttctaaaatgcactgtactgccttgtttttgtgctggagatgaatactttagctgtgctatccatcatttgtgtgcttgttttggcagctctgaatgagaccttggatgctgaagtgcggcgtttaagacgcacagttgcagaacttggtggagagtctcttctgctcaagtcgcatggctcaacagcttgctattagccaacaagtgttcccagttacagcaccagcagcaccctaaccagcttagacatgttcaactggacaatagccattcccaggagcagacacagactcagtcacagtgccacaatggcaaagctactgcctactgattagcactctgataccatgtatgctcaatgtttgtgatatgaatctgaataggatattgcatgaccaaacaagctcaagtaaaaaaaaaaaagactcgattctaagagaggacccgttaacaaaaagaaaagttcaaaagatacaagaggcaaaaggagtctgtgaatgcaattcctatctaataaggttgtagttcgacttgtgcaagcccaaggatatgattatatgaagactcaaaatagtgtataattgttaactttattgcctaagatttgtagttattatttgtaaatctaatgatgatttgagatagatttcattagaatttatgattgattttattaagatttgttttaattgatttttttaaaatttgtttcgtctattaaaatgaagattctatcatttgtttggatatgtttcttattattatgatttgttttctatttttcttcttctatcatttaaactcacaattgtttaaatgaattaagagctttcatctggctcatgtaatttaagttagattttgaatgaaatatcaaatatgagtt

SEQ ID NO: 1652 - DNA, 559 bp, Glycine max
  Clone ID: PAT_MRT3847_101491C.1
catgctatctttttttgcaccatcaacactttgtgacacctgcaatgactgcttatcaattacctcgaccctatgctttgacttcatcgtgttatacattctatcctatccttccaccatgtgcactttttgactcatgtaagctctcttaaccttccaatccgtgacacaacaactacccttcttcctattgctataaggtattgaaaaacctagggcgactcatatgctctcagatatgtgcctcagacttattgacattatctccaggcagcttacatattaactttgaacggcatacagggggtagcatgaacatggggagagggggtttggtattggacatggccatttcgaggagacccaggcggttttttaggctgtgctagtccgactctatgtccttcgagaggacctggcgccctaggcttaaccactagagacggccgatacctaattctgtgaagttcgaggcccatagcaaggtgatcactctcttctgccacgggatagccatactctagaacaccatgtgccaggtcatacctaggagggacgc

SEQ ID NO: 1653 - DNA, 233 bp, Glycine max
  Clone ID: PAT_MRT3847_101492C.1
gttctcactaactattacttgcacatgacgtacgagtgtgctagagggggaagtgtagccaaagatgaggtttcatgggatgcagggaggggatttgcggttgaaggagtagaggtggcagcaccacaagctggtgaatagcgtttgaagatcgtctaaacctctctttgccagactgattaggagtggtgggaagggattggtgatgctggatgggttgctggtatatttgg

SEQ ID NO: 1654 - DNA, 357 bp, Glycine max
  Clone ID: PAT_MRT3847_101493C.1
cactatgcgcggccttcctttttttttttgaaattgaatgaaattttttcttgattggtttatggagggcaaaatgtatcccataccacactataattcccactaaaactatgacgcactggtctcaaaggaaacgttacaacatcattctataaaatgtgttccaagattaccttttttacaacaaaatattataatctcttttaaacttgtacactgaataaattttttactttattattaaaatcaccactttcaaaccttggatccgtgcatgatacctgttataaacaaaaatgacttatttttggctaaacattgctatgactttcagcgggttcaattaattttttccat

SEQ ID NO: 1655 - DNA, 532 bp, Glycine max
  Clone ID: PAT_MRT3847_101494C.1
cgaaatgattatcaattatcaattttaaaattaaatatccacttttatctcggcaagaggaaaatgtaagcgtgcgtggggttgttggcttggcagggggggggagattgataaaagccgcgccatctctttacggtaatagcaggtatagtactggatacaaacactcgtttttttagcacaaatctaaagacattcgctagtgaatggacaaaggcaataaagtacgcacaaatgctctcttggtcctggatgcttacaatgaatcatttctcgactacttctatcttgtggtttttgcatattacccagttatctttctgtatatccaatgtcattattttatggcttttgtttgctgtcgcataatttcttgatgtaacattcgttgcattcgacacttcccaatgtttgaattgtggagccgtaaacacaaaaatcgaataatattaatattttcttcttctttaggtcaaaatttgactctttaccattttaataatatatcgaataattatatatttttcccatc

SEQ ID NO: 1656 - DNA, 421 bp, Glycine max
  unsure (1)..(421): unsure at all n locations
  Clone ID: PAT_MRT3847_101495C.1
ggcttcctcatatacttcctctaccattacagctattaccatctccacaccaagttcccagaagaatggatcactcttaaaaagcacaaaagcttcttttcttagtaaagagaaactaaagagaaacagttttacagcaccagttaaagcacaatccagcactacagtatattcagttactaaacctaataaacctctagtattcccagtcagcacccctcctccgtaactagataacagtttaccaagagattgtaactgtaatcccctgagtcttaaatctaatcctaagagcctgagatgnaatgtccaagcagagcttatacactacagatgaaccatgttagaaactgctggcattttcatcccagaattcctcacatatattaatatcctgaacaccccttcataatacactagc

SEQ ID NO: 1657 - DNA, 310 bp, Glycine max
  unsure (1)..(310): unsure at all n locations
  Clone ID: PAT_MRT3847_101496C.1
tgtttattattctacgtatggacatgttgagaagctagctagagagatagaaaaaggggctgtttctgtggagggagtagaagcaaaactgtggcaggtacctgaaacattgcctgaagacgtccttgctcatgtgggagcacctgcagagagtgatgtctcaatgattactcgcaatgagctacctgaggctgatggcgttgtagtagcttatcccacaagattgggatctatggccgctcaatttatagcattgattgatgctactgcaggccgtctgcgtacacaggcactagcantgaaggtcgca

SEQ ID NO: 1658 - DNA, 310 bp, Glycine max
  Clone ID: PAT_MRT3847_101497C.1
ggggaagggtaaggctgcttggaaccaaaacaaaggaggcgataccagaagaagccttcttattaaaggcccttctcggaaaaaccggatttcttcccttcttcccttctctttcgtttcaatcttcgatccctgaaaatgaaagagtgcatttcaatccacatcggtcatgccggtattcaggtcgggaacgcctgctgggagtctctgtaggcaattcagtcacatttagcatgatgggtacattcttggatgttcttatgttgagggacagtaagacacgcattatgtttacaacagtgaaactggg

SEQ ID NO: 1659 - DNA, 448 bp, Glycine max
  Clone ID: PAT_MRT3847_101498C.1
aaaccaacgggcaaaaaaaaaatccccgccccgactaataatgaaaataaatttaacaattttcacatttctaagggtttatttaatctaaggggggaaataaggtgttttgtttatggggggtcccccttttaaaacagattcaccttggggaatattcacatggccgtggaggaacaaactcgttagagtaaaggcggtttacttttcttcccaaaaaaacttggcatttttatgaaatttgaccctttgggaatgcggggaaacgcaagcccttttcgaggttcacccccatttggcatgatataaccttaatacggtttacccttttcgattcacaagaaaggcctttaatgaattccaactaaacccccccatcccttgtttactactggggttagcggcccctcctttttctctacaattgacaattttaaccttggggggt

SEQ ID NO: 1660 - DNA, 348 bp, Glycine max
  unsure (1)..(348): unsure at all n locations
  Clone ID: PAT_MRT3847_101499C.1
caaaagttattaaattttgtgattaccattatcaaaaaaaactgcgtgcggggttatcaagttggggtcaggccatactccatgcaatgcaacagatgggccaacagatgactgattaagttcaaccatattctgtgttagcattattctaatttttattgtttttttacctagcaagntatgagcaaaanggcaaaaatgataaacactctttgtggtggtgatacaaaatttatgcgtgaaaggacacacccgctgttttcttgttgatcaaggattgtaatttctaagaaagatgttagacgagttgaatttttaatcccttcaaaatttcctttcacagatatt

SEQ ID NO: 1661 - DNA, 479 bp, Glycine max
  Clone ID: PAT_MRT3847_10149C.1
ggacaagggtctgaaacctaatttttcagtgtacaaaaagattaggaaacatctggagaagaaggatgagaaagatttgtctttggaattattaagaagatactcgagtttggttgaaaaataaagaaaggtgctagattttgtgcaaaatgctgtgatgttattcagtgtttgctaaatagtctcgcttcctactgatcggttcagcaaatgatatttacttcaaatttattcatgaatgcactatcccacttcaggtaatggttgccactactgagaaaaaattatattgtgatgatctttatgttttaatgatgacaaaaactgacctggtttggtcatgcaagaagaatagtagaggctcctcagatgaatgaagtggatggaatcaaatgaaagatggctaaaatggataaaggaaaaccaaaaaaaaaaaaaaaacgatggaaaaagcccgctaaaaaagacctttgaattat

SEQ ID NO: 1662 - DNA, 650 bp, Glycine max
  Clone ID: PAT_MRT3847_1014C.1
gaaaacagaagaaaaactcgttaatataacaaagacgtatacaaggatgtggtcttctgatgaatagtttaaataagacaaacagcttcttcaaaagaatggaaggtatgttcatagtattacaaaaaaaataaacaaccttaaataatttgattctaatttgatttcttctgtatggaccattaactgcacataacttaaacatgatttcttcttctgtatggaccataaactgcacataacttaaatcagcaagaataaatatcaaaatctgtaaacaaaagaattggaagacaatcacaacattcccaggaggcttatgttgttggttgaaacaggtgagtggcaagttgttgttctatctgccagcttttatttctctagcagttgattccacactgctcaacatcaggaccagtgactcttgtcgtaaacgggtcaattcggacccacaacagagagaagatagatgcaagaagaatggaccagacccccacaatggttggtgttctgttctggcgacccatgagacctttgaggaaagggtagagatggatgatcacccaaaatgcaaagaaaagcttaccaaagaggggaccccatgattggtaacccctgttgatggcataggaaatgcctgcaacaacccc

SEQ ID NO: 1663 - DNA, 386 bp, Glycine max
  unsure (1)..(386): unsure at all n locations
  Clone ID: PAT_MRT3847_101500C.1
aaaaaanactcaaaaanatagacttatttcccgggtttcngntctagcataaactncaccgccccgctttattataaaaagcgccccggcccnnatcactatcttatatcttattcccnntctcaanattcaacttttannaacaaaaanntctccaaacacatanaaacacttttttttatttattntccaantcataatattcaaccttaacaccactcactcacttataaaaagcactttaacaccaaacttaatctctctatcaaaaaaacctacctannaccttcacctatttntatcttctacaatatcctaaactntttttcttcttcttcatcaccatntctttactttcanacctcatcaacctcaatctcttaaaa

SEQ ID NO: 1664 - DNA, 307 bp, Glycine max
  unsure (1)..(307): unsure at all n locations
  Clone ID: PAT_MRT3847_101501C.1
cggggtggtcgcgcttcgtaggccgccctcgtcctttttttttagaccatggttaaaaccggcccctggggggaggggttaccattttttggaggtgaaattaatttaatacagccacagcaccactaaatgccgtnttcaaacacttggagcttgtctgcgtcgccacactatattgtttagaataagctggctgcgccaaaaaaacacatcatagtattaagaaccatgcgagaagtgtcggccttgatggtaacctcctccaaaaatggatgcaccctacaattatttttaactttgctggaaa

SEQ ID NO: 1665 - DNA, 486 bp, Glycine max
  Clone ID: PAT_MRT3847_101502C.1
gccgccgctatgatgagagcgcggttcccattactgttgctgggagttgttttcctggcatcaaaacctgtctcatttggcattgcgtattgggaaaagcataaccccagtcacaaaaagtgcctacgaagttgcagtagcgagagagacttttacaggaacctagcatgcctcgctgggtgcaacctccttaacgcggaggaagaaaaaaatgggaccaaggtcaaattgtcgaccacgaccacttcacccggcgagggaacctcaacgacacggttagaaggaggattactaaggtgagcaaacacttttattgccattgggaagcccacgccaacctctttaaaaggaagagcgcgtgcatcaagaggaacactaacggcatcggaaggaggaaaaactcggttgaaaggggagtccaaaggaacaagattaacgtgtataggcaggccctcaccaaccttttaaaaacgaggaggaaaagca

SEQ ID NO: 1666 - DNA, 232 bp, Glycine max
  Clone ID: PAT_MRT3847_101503C.1
ggcaaagttaataaaattctttgagttgaacacaggggccaagattccttctgttgggttaggcacttggcaagctgagcctggtgtagtaaccaaagctgtcaccccagccattctggttggatacaggcatattgattgtgctcaaacgtagtacaatcaagcacagattggttctgctcttaataaactatgtgatgatggtgtggtgaaacgtgatgacttatggatg

SEQ ID NO: 1667 - DNA, 321 bp, Glycine max
  Clone ID: PAT_MRT3847_101504C.1
caaacatcaacaattcatagatattacatctacctaattacatggggaagacaaggatatagggagctatacatatgccaggccaacaaacacgccaatgggttcttgccaacccgccggtcaacgaccccgtcatcgagggcaaggacgcgacctttgagctcaagaccgtcgacctcccaagcccaagcgctgaccaggtcctcatcaagatcctctacttatcaaatgacccaccgcaaagaggatggattcaaaaggatatggaccccgagcgcctctacgttccgccagtaaacgaaggcgacatcatgcgttcct

SEQ ID NO: 1668 - DNA, 508 bp, Glycine max
  Clone ID: PAT_MRT3847_101505C.1
ccctcgcagccggccgggattgacctaaactcttaaaaattacaacacgctgtcggctcttggcttcaagattgtacttcttgtcaggaagatatcttgacaaaatggacggaacagaagcacacctaaagaaggctgtcttccacacatggcagcatataattctcaaggcatccacatgttatcactccaaatgcactgttatacaaatcagcactgagagagaatctgttgaagaacatatacagaaatggtggaatcattgcagaccaatggatcgatctgcttgaagaccacagaggctaaagcaggacctttaagcttcctaatcccatgtactacattgagtagtaccttcacctgtctcaacaatctagctagagtttgctcactatctatatgtaataaggcatgctgatatgcactattcatataggagcattagctatgctcgataatgtcactgtatgttatgagcataagtcacctaagacactgcacgtaccta

SEQ ID NO: 1669 - DNA, 202 bp, Glycine max
  Clone ID: PAT_MRT3847_101506C.1
cgacgcaagctcggaatccggctcgagctaccaaacacttactaggccgctgagagaccaaaccaaggggggggcaacgaatctgggcccagccaaccacctacacaaacgagacacaacaaaggcaacccccccacaacagaagcaacccaacagagcggagggcgcgacgccaaggtctccgcacagccaacagccagag

SEQ ID NO: 1670 - DNA, 1100 bp, Glycine max
  Clone ID: PAT_MRT3847_101507C.1
actgctgcgagaagacgacagaagggggcatcacgtatccccccacacatcaccctctacctactttgcacctctcacccttctctctataggaaatagcaagcgtgttttcccagctatagtaatctatcaaacaaaacctctgctacactctagcatcctacacccccactttttctagtaataatagtactacattatctagtgttcgagagagagagagttcatagttcaatgctcagttcttcttcggcttcgtttttgaggcagttaagtgcaaaaaaggagggttggaaagagagatactataatagtggtagtggtggctggggaatgagctttggagggtgtgaggcaagtgtgaaactaatggaagggtttaacatgcaggggaatgtggggaggaagagggtgatggtggtggttgatgacacctcacattccaagcatgcaatgttgtgggcactcactcatgttgccaacaagggtgattccttgactcttcttcacgttgtgcctcctcacaggggtcctgaatcttcttgctccacttatcttgtcaattatcttgggtcactttgcaaagattgcaagcctggggtggaagtggaagcgctcttaatccaaggaccaaaactggccactgtaatgagccaagtaaagaagctggaggtctctgtcctggtactgggccaaaagaagccatcttctcttttaagctgtctttgtggaagcagcggaagcagtagtacagaggagtttgtggagcattgcatcaataaagcagagtgcttgacaattggagtgaggaagagaagccagggcacgaatggataccttgtcagcactagatggcagaagaacttctggcttttggcttagattgaaagtttagttgctgctagttcagatcttagaggggataaatggggaaatggtaaaattaaccttagtatttgcaacatcatctataatctgagtaaaaataatcatctatatcaccctgtaactagttctaactatatcgtgtactaatgtcactatgagtaaaaagaatcaaattgtccatgcttgtgaacaaaaaaaaaaaaaaagaaaag

SEQ ID NO: 1671 - DNA, 154 bp, Glycine max
  Clone ID: PAT_MRT3847_101508C.1
gaaaatgctcttgaacaatattttttggggcatctgacacctgcggggcaaaaagctgggactttactaacattaaccaatttgcattgcaaaaaacccattcaaaaaaaaaaaaaagattttttggccccaaagctccttcccttaaaagaaa

SEQ ID NO: 1672 - DNA, 445 bp, Glycine max
  Clone ID: PAT_MRT3847_101509C.1
gaaatctgcagcacaagatttgatcttcatcatgcttgctactttgcggtggccaccttattagcatgtttttgtgtgtctccgaaaagtggtgatcagttttttgatgtggaatagtgtgaattggcatggtaggtagaaaatttgttttaacttttgttttttcttttcagggtggtagttagaggcggatcaagtggcaataggcaaagataaatttttctttacgtttactttgcttctgtttaaaggttcatctttttttttagctgacaatatcccatatttctcttgcttttacatttaattgttttacattatttaaaggtgtgaactctgtttcggttctccaaacaagtattttgattccgcaataaaaggtttctgaatattgcaccactgctttagtttacaaggttgcactccacaatgcgttttcatcctc

SEQ ID NO: 1673 - DNA, 455 bp, Glycine max
  Clone ID: PAT_MRT3847_10150C.1
ctgtacccatcactgaaacgcccggaccgcctggacccagcactgaaacgcccggaccgtctggacccagcactgaaacgcccggaccgcctggacccaccactgaaacgcccggacccagtactgacacacctggaccgcctggacccagcactgagacacctggaccgcctggacccagtactgcaacacccggaccgcctggacccagcactgaaacacctggaccgcctggacccagtactgaaacgcccggaccgcctggacccagcactgcaacacctggaccgcctggacccagcactgaaacacctggaccgcctggacccagcactgaaacacctggaccgcctgaacccagcactgaaacacccggaccgcctggacccagcactgaaacacctggaccgcctggacccagcagtgaaacacccggaccgtctggacccagcact

SEQ ID NO: 1674 - DNA, 309 bp, Glycine max
  Clone ID: PAT_MRT3847_101510C.1
ctcaagctttgtaccaaatagcaattttgctgacccttcaatttaaaggtgagtctatctttggtgtgacatcaggagtaaatgacacattgattggcaacacatttgttctttgtcaagtgttcaatgaattcaatgcaaggaagatggagaagaagaatgtcttcaaaagcatacacaagaaccaggtggttttaagccttaatggcctaaccaatattcttcaaggggggattggtgaagttcttaaaaaatttggttaccccaaaaaggttaattggggaccattggggattttgattgggttaa

SEQ ID NO: 1675 - DNA, 335 bp, Glycine max
  Clone ID: PAT_MRT3847_101511C.1
taaccataacaagctgaaatttccatatggagaaattttacacgggggggttgtcataatgggcgcttacaacaacaaaagtctacatataactattctttaaaaatataacacatatgatttaaaggacgtcctgttgtcagcagtataacttatattctctcttgtacaacaaccaagctccctcaaccaaaacaatttatttctaagcaaatactctaaaacatgtaagacaattaattagtttatatttaacataatcatcactatatagtttgggccatggtaaaattaggggtgcttatctaaattaatttggttatacctaatcttca

SEQ ID NO: 1676 - DNA, 379 bp, Glycine max
  Clone ID: PAT_MRT3847_101512C.1
accaaactctatttgaagtatagagagacaggaatgtattagggactatatcactctcactcagggaccgccattagtccctataaactcgacatataaaaccttaaacgtcaaggaccagggttcatgtgccacagcaccggggaagcctggcagcttacactctcaatgaccagcaccacccaagaagcgatactaatacgccttttgctccaccagctgcttataagctcaagtgcggaccaccaccgtacaaatattcatttcctacaccaccaactaaaaagggctacatgtacccatcacccccacctgcagtgtacaatacaaattaccaccaccaccggtttacaaggccaggtcccgaccaccaccacca

SEQ ID NO: 1677 - DNA, 328 bp, Glycine max
  Clone ID: PAT_MRT3847_101513C.1
caaggcatcacacatattgcttgacaacaactttcatgctcaagttccctatttccgtctatctctacatgcaccctacggctgtgtttattatctatctactatactcatgggaacatttgcgtatgtatccccccaatatgccatgaccggacacctacttgatataagcgacgtttatgcctacggtgtcgctttgcttgacctggtcaccggatggcaacctctctatatgtcacatccatctggacgcgacatcctgggcccttgtgcacggccagttcttatatatcagcaccatctggaacaacttgccgtatctatgctc

SEQ ID NO: 1678 - DNA, 295 bp, Glycine max
  Clone ID: PAT_MRT3847_101514C.1
tttttatttagatgcttaggaatcacatctatagggggggttaaatttaaatagggtcgctgaatgaacaacaacttgggcaatcaaaccttgttaatgatagaatagggtcagaaattggcgtttacacaaagagaacattttgtgtccatacatgaactttaatatggatatggaattcaaactttcaatgacataggaggagatgaacgcactgtaatttggttggttaataaaaggttcatgccttacaatttcattaaaaaattataaatgtaatcccattatcagttag

SEQ ID NO: 1679 - DNA, 318 bp, Glycine max
  Clone ID: PAT_MRT3847_101515C.1
tcctttgcgaacggacagcgagagagagagattctcacagagaatggcattgaatccattagagccaaacataacataacatgtgtaatcatgatcattgctacagcacgttagggtaagacaatccactcactgcgagtccgattccgactgatggaggttctggctgaccgatcactgcggaacgtcactctgatgctgagaggaccaccctggcatcaacccgtctcacgacgaagtatgcgacctccaccgtacagagcatgcgaaccggttagggttcggcgttgaatatgatccccatcgccgaacgactgg

SEQ ID NO: 1680 - DNA, 772 bp, Glycine max
  Clone ID: PAT_MRT3847_101516C.1
gagcgtgccacgtgcccccactgtcaccgtccagacccaattttccgtccaagttcattttcccggaaaatcttcttggaagattcccctgttttttccttgcaattgggcactgtaaaaagggatttttttttttttattttcagtgtggagcatctgggaaaaaatggcagcaccaacgccgattcacaaaactgaagaggaatggaaggtcattctctcccccgagcagtttcggatccttcgccagaaaggaactgaattgaagggtacaggagaatataacaagttttttgaagaaggaatttacaactgtgctggctgtgggactcctctttacaagtcttcaaccaagtttgattctggttgtggttggcctgctttctttgagggttttcccggcgccatcaatcgaacccctgacccagatgggaggaggactgagataacctgtgcagcctgtggtgggcacttgggtcatgttttcaaaggagagggattcaagaccccaactgatgaacgccattgtgtcaatagtatttctgtcaaatttgttccaggaaatgctagttcttcaatatgaaaccctacatttactctattggaggtgtctattgaaagattgtcttgtttgtagtcttttatagacagttagctctgaaggataaaatccttttctttgtttagtcttttaccttgcctttctgtttcatcgagtaaagatttggtaggtctgcatgaatcatatataaatcagcatttcttgatatcc

SEQ ID NO: 1681 - DNA, 420 bp, Glycine max
  unsure (1)..(420): unsure at all n locations
  Clone ID: PAT_MRT3847_101517C.1
ggctcgagcggctttatcaacttctcgacttcttcgcaaaagcttctactccgcttctcatattanaattcagacaaagcctcatacatcatagttcagatccattctttctctctattttgnttttcttttaaatttttctttaaatttctcaattaatcaaagatcttcagcaaaccgttcaattttttttatttttgccagatataatatgttattataatgctacacttatttataccttttctctcgttcctaccttaaattcatactgctgataggaaataaccatttatagataaatgtatatttactgcgatcctttttgtcaatttacctttttgccaaacacatttccttctttttgaatacccccaaacaaccaattttttttcctcttttttttaattcctttttttt

SEQ ID NO: 1682 - DNA, 658 bp, Glycine max
  Clone ID: PAT_MRT3847_101518C.1
cccacgcgtccgaagacgacagaaggggggggtgtgctgaccaatttcaggagttggctcaagtactccttggcttgttcgtatttcaacaatggctaagaaatctgtgaagtactatgtggttgacgcattcactgattcagcgtttaagggaaaccctgcagcagtgtgtttcttagaagaggagagggatgaagagtggttgcaagctgttgccaccgagttcaatgtccctgtcacctgttacttaactcgcattgccgagtcccatcacaaccttaactcgttccgtggaacctctaacattccacgttttcacctcagatggtttactcatactaatgaggttaaactttgtggccatgccacgttagcggctgcacacacactattttcgtatggtttggtgaatttcaatattattgagttttttactgcatctggggtactaactaccaaaaagatcccaccgatcaataactgtaccagtggctcaaacttgcaaaatggggtggctcgggatggattttatattgagttagatcttcctgctcaccctatcatagaattcaactgtgatgagtcttcacaaatttccggggcattgaatggtgcttccatttgtgatataaagaggacactaattggagatgacata

SEQ ID NO: 1683 - DNA, 316 bp, Glycine max
  Clone ID: PAT_MRT3847_101519C.1
tcggcccgacctcttttttttttttactttttaaacctcatccgccatgtactgaccaagacggaggcctaaggtcttcaaagccattgtctgtgggcccatatgcaagaacccatgttagccttgttacatttaatcactaaccgtacttaagctactgacagttacacgggcatacagttgagcatgtctttaccgatgacctggagatactaaattcggaggaacgccttgccaatattaaactgatcaatgttgctgagacacaagagaatgggtccacctgaaccattatataaactatattacgtctttg

SEQ ID NO: 1684 - DNA, 242 bp, Glycine max
  unsure (1)..(242): unsure at all n locations
  Clone ID: PAT_MRT3847_10151C.1
cctcgagccgctcgagccgctccagccgctcgcgncgctcgagccgctcttgctcttcccaacttctctcactaaagaatataatactcaaaattcatccatttttattttatttttcttaaaacacaaagcgcgtatcgtctcacgcccccgacgatgggttttcccgtaggatacccgagctgctggttccgaaactgttcctccacgcgctctccctccccgcgtggctgcgctccctc

SEQ ID NO: 1685 - DNA, 265 bp, Glycine max
  Clone ID: PAT_MRT3847_101520C.1
ggcttcaaagcgcatccttaaggagcttatggacttgcggaacgacccaccaacttcttgcagcgctggtccagtggctgaggacatgttccattggcaagcaacgattatgggtcctgctgatagaacttatgctggaggtgtattcctagtcactattcactctcctacggattatccatttatacctaccaaggttgactttatgactaaggtgtgtcatcctaacatcatcagcgatgctcgcatttgtcttatattctta

SEQ ID NO: 1686 - DNA, 443 bp, Glycine max
  unsure (1)..(443): unsure at all n locations
  Clone ID: PAT_MRT3847_101521C.1
tacggctgcgagaagacgacagaagggggaaactgtaaggcctacgggtcggtggccccaaaccatcctctgctaagggacacagtagactgtgtgctgtgcaagagctgcataatatagggacataaattaccctccatccatcatttttgctacttcttcaccacactttaaattattttcccttcttacaaaataatgcacagttcacaagaatatgaggaaaatgtattgttagaggggcaaggaaacagacaaaagagtgtgtgtgtgtgagagagagagagagaatttgagataatatgggtatgcgtatgggtggacaagtatgctaagtattatttatgtagaagacatcaaatgattgaggaataaggggaagaaatgccggttgctagtgaagcaaaattttatgcataacaaaacaatagctagcttgnggg

SEQ ID NO: 1687 - DNA, 984 bp, Glycine max
  unsure (1)..(984): unsure at all n locations
  Clone ID: PAT_MRT3847_101522C.1
cccacgcgtcccaacccaacccaaaactcaagctaaattctcactctcacaacttcaatctctttctctctctctctctctctctctctctaccaaaaaaatggctttggaaactctcaactcaccaacaacaaccgccccatctttccccttcgacgacccaactattccatgggccaaaagaaaacgttcaaagcgttgttcacgcgaccacccttcggaggaagagtacctcgctctctgcctcatcatgctcgctcgcggcggcaccacccgccgcgtcagcactccaccgccgcaaccgactccagatccttccaccaagctcagttacaaatgctccgtttgcaacaaaagcttcccctcttaccaagcgctcggtggacacaaggccagtcaccggaaactcgctgcctccggcggcgaagaccaacccaccaccacctcctccgccgccagctccgccaacaccgcctccggaggtaggacccacgagtgctccatctgccacaagtccttccccaccggacaggccctcggcggacacaaacgttgtcactacgaaggtaacagtaatggaaataacaacaacagtaacagctctgtcaccgccgcctcggaaggcgtggggtccacccacaccgtgagtcacggccaccaccgagacttcgatctcaacatcccggcttttccggatttttcgaccaaggtcggagaagacgaggttgagagccctcaccctgtcatgaagaagcctcgccccttcgtcattcccaagatcgaaatccctcaatatcaatgaactctatgaattttttatttttatttttttcgattattttggagaattttgagatttactataatttgattttgtacatagtcctacctggaagttttgttgaaccgtacgtaccggacccagttctctgatttaggttgtactttcacagtgncagatttgcaattcaattcaatttcttt

SEQ ID NO: 1688 - DNA, 398 bp, Glycine max
  Clone ID: PAT_MRT3847_101523C.1
caaccaaaccaggggttcctttataaattaaattcatctgtacccgggcttagaaaaaaattcataaaaattttttgttcaaaacttgggggagttgaccaaattgggtttttgggatttacaccagacgagatttttttataacaattcttcttaccttagcaggcgatgtcgggcacacttgttttccaaagacccccaagaaagacaaatttttttggctagagatcagacttgaacaaatgtccggggtttttttttagctctttttccaatcgggtttttccatagcgagatttttggtctatccaaccaataatttcggggaatacaatctggaaattttggggtggcttttcatacaatagacccggccccatttttggataccactttta

SEQ ID NO: 1689 - DNA, 248 bp, Glycine max
  Clone ID: PAT_MRT3847_101524C.1
gcggcgggagcgctcgatctcgtgacggtgcttgacgttaataacagcatgagcggcgcacagtttcacatgctaaagcgcgccatgcgtttggttatatcgtcactcggcccggctgaccggctcgccgtcgtggcttcctcggctaataccaaacggttgttacctctgaggagaatgacggctcagggacaacgcgcggcgcggcgcgtcgtggatcggctcgtgtgtgaccatggaaacagcgt

SEQ ID NO: 1690 - DNA, 1526 bp, Glycine max
  unsure (1)..(1526): unsure at all n locations
  Clone ID: PAT_MRT3847_101525C.1
gagaaactcaattcattttatcttcataatttcttctcccatatgtacgcatggagagaagtttatcctttctccgccttccttttctgcgctccggatatctctttcgtcagtcttttacctttgtctcttgtgctccccagcttgtgccagccatgttcggaatgtttgtctacaaggctgctgttctggtgcaagcttatagagacaatgaaggtttacggtttgtatttcccgaaaatgaagatggatcaagctattgaaatatttattttgctatgctcagcactcagcagctgagtacactactcactatacccttggacattggaaatgctgagctgcatccttaactgagcactgattacaagttacaacccttcaccgcattcatcttcttgttgaattttagaatgatgctatttcaagtgtattaatatcatgtctctgaattcaaaacatgacataaatggatgcatattggatagccattagcctccgtcccacttttattttgtacccataaaaattgtcagcgtcacgaattcaagacgaaaatgaatatttagtttttttttttttcaaaggtggtattgaaatgtgggtaaggtagctccatttttagtgcagggctttcattacatcgatgccatggataccctctcaaggattagattcccccccacttgttacagccttcagttaccaaaaatctctgcattatctcgtttcccaaatgctttttccaaaaccactcaccaggtttcagtgctaagagtaagagcttctcgtccttcagtgagtaatgcagacgaggatgtcttgcaaatattttttaaggagagagaattaaatggggattttatatcaagagcttccgatttactatggagaagagatttcagaagttctggtgattatgatattagcgagctcaccaacaacacttctcaacaaactgagcagatcatagagactgacaatgatgctggttttttgaaacttacaagaacccaagagtggttaacaggtgacaattctctattagagtctctttggcgaagtaagcaagagttcagtcctagtcatctgttgaatttcagcacaagttagctaagcataagcaagagttcaatcctatcctgaagccaaaaatagcactgttacatgagcaggtgtaaataaaaattgaatttgagcaaaaggtagccaagtactcacattgtgtactcttctggctgaaaaaaggctctttcatgggtgaagtgttcaaaaaatattcatcagttgtagcttaattattcattgacaaatacctcacccttgtaacttctacttttattgaattactagttctgccaccgttagctctatcattntagccccaacttaagtaatacttaatccttggcacagtatcttttttcttgtcattgtcactcagtcctttgttctgctgaaagctaattggttgaaactcattttttagtgagtaatgcagacgaagatgtcttgcaaatattttt

SEQ ID NO: 1691 - DNA, 1047 bp, Glycine max
  Clone ID: PAT_MRT3847_101526C.1
ttcggtccggggccccgggtcgacccacgcgtccggtgcttggaaggttgagacactgcaatgttgttcctttgagggcttactatttcgccaaagatgagaagttgcttgtgtccgattacatgcccaatggtagcttgtcctggctcctccacgggtacccagatcaaactagagttattattttgatttttgggtaggggtccatgttgatgcaatgaagattttgaagttggaccatgtgattatgcatctttgtttgcaacacgggatcaacaggtaaccgaggaccgggacggaccccactggattggaccacgcgggtgaaactcgcagctggagcggcacgaggcatagccttcattcacaacagtgataagctcacccacggtaatatcaaatccacgaacgttcttgtcgacgtggtgggcaacgcgtgcgtgtcggatttcgggctctcctccatcttcgccggccccacgtgtgctcgatccaacgggtacctcgcgccggaggcatcattggatggccggaagcagacccatatgtctgacgtgtactccttcggggtcctcctgatggagattctgacggggaagtgcccctccgctgccgcggaggcgctggagcttccccggtgggtccgttcagtggtgagggaggaatggacggcggaggtgttcgatctcgagctgatgaggtacaaggacattgaggaggagatggtggcgctgttgcagattgctatggcgtgcactgtggcggcgcctgatcaacgacccaggatgagccacgtagcgaaaatgatcgaggacttgagtgggatccacgtgtcgccgtctcatgacgcgttggacttggtttcggagtcgccttctgtgcctgaagatgcgtgtacaggaggaggtggagctagtgctagtcaatgaacttggactttgtaaattaaattattatttagtgttgaatatgtttttcaattaaccttttctggaacttttatttgtatttcatatatattattcaatataagctaatttttacgag

SEQ ID NO: 1692 - DNA, 334 bp, Glycine max
  Clone ID: PAT_MRT3847_101527C.1
gtggaacttttaaaatgagcaggggagttggttgtcttcagaaaaggaaggaacggcaaaatcttagcttagcacccagttttctgttcttattaactgaagatgtgaacataaacagatgatgcttgtgcttacatgtttgctgcatgcaggtactttgctggtgttccctatagggaaaagatgaaattgaagtctaagaaaggatggaaatctattgtaccacttcgtttgaaaggaaaatcagcaacccattttttgttatttcgcaaagtaaattgtgttggctatggacctggcaaaacaccagtatatctgaatgtgtgtgacatga

SEQ ID NO: 1693 - DNA, 479 bp, Glycine max
  Clone ID: PAT_MRT3847_101528C.1
tttgactcggtatgtgatgaattacataagtttgatctctgattacaaggttactttgaatgagcttatagtgtcgaagccctcaacggggtctaggtattctggtgatcctgggatacctgatatggatttgagtgagtttgaggagaagacacctttggatgttcacttgatttggattattgtgatattgcaattcaacttggatgggaagagtaagcactacagggatgcgtctttggctcacctttttgtcatgaacaatgtgcactacattgttcagaaggtgagggggagtcccgagttgagggagatgataggggatgactacttgaagaagctcacggggaagttccggcaggccgccacgagctaccagagggccacgtgggtgagggtcttgtattgtttgagggacgaggggttgcatgtgagtggggggttttcttccggggtgtccaagagtgctcttagggaga

SEQ ID NO: 1694 - DNA, 110 bp, Glycine max
  Clone ID: PAT_MRT3847_101529C.1
ggaattcggcgcgagacgcactccgcgtgggcaacggtgcggcgcggcaacccctatctctcttgctataaaaaacgttgtaatttctcgctcttcctttcgactccaaa

SEQ ID NO: 1695 - DNA, 688 bp, Glycine max
  Clone ID: PAT_MRT3847_10152C.1
ctcgagccgatgagcttaagtgcagccatttttattcaacactcattggagtaaggataaccttttcaaaaccttaactaaactcttaacagaaggagtctctagatttcactttggtgaagctttattgtcatgcagtaatgtaatatattctgtctgtttctttattggatcaaagcataatgccctggatttgagcatataatctaataatactaacaggatagtaaaagttgctggatattaattttgtggaagattacacacttgtacatatgaacttacctccagtttgcctaatattgtattcattcatgaccttacgtttgtagccctgcctgttttaaacctcattaaggttttccttttcttgagcaatgaagctagctttaaaaatttactatgtcatgtagtttgtactctaaaatgtcctgtacttctaggagttgatctttgctgtcaacattgagacgcagtcgaaagttagatttttttttttctctcagtgaaagcagaaagctaaaatggcttcttttatgtgcttagggtgaaaaataaaataaaataaacacaccttacttcctagcaaagcatcatgcaatagagaaatgttagatttgcaggaggttttcaccagatagctacttccctccgaattgatatattataggtctttgtcttttgatat

SEQ ID NO: 1696 - DNA, 228 bp, Glycine max
  Clone ID: PAT_MRT3847_101530C.1
ctagatgttagcaatgatgaatcataccaaatcatatgaaaatggagaggagagctttgaggagttgcaacaactttttgaagacatgttacaagcggatatacgcttggatggcagccccactcttgcttctacggattcctcaacttcatctgcctacatgacctacactgataaggcgaggtcgaataaacgcaattccactgagatgaatatcgggaaggcaga

SEQ ID NO: 1697 - DNA, 822 bp, Glycine max
  Clone ID: PAT_MRT3847_101531C.1
tccggccggaattccgggtacctaagcgtgctcgagcccgcgtcgagcgagtgccaaggttgagatccaaaccaaacattacataaagttaaccatccaatccaaactcagctcctcctagggttttttcaattccaaatcttccttccctctgcttttatcgatctccaacgaaaccaaacgatgtcgctcaggccaaatgccagaaccgaggttcgccgcaaccgttacaaggtcgccgtcgacgccgacgagggccgccggagaagagaggacaacatggtcgagatccgcaagagcaagcgcgaagagagtttgctcaagaagcgtcgtgaaggcctccaagctcagcaacagtttcccgctcctcttcagaactccaccgtcgacaagaagctggagagtcttcctgcaatggttgctggagtttggtcggatgataatagtattcaacttgaagccactacgcaatttcgcaagctgctttcgattgaacggagccctccgattgaggaagttattcaagctggtgttgttccacgttttgttgagtttcttgttagagaggatttccctcaacttcagtttgaggctgcgtgggctctcacaaacattgcatctgggacttctgagaacactaaggtggtaattgatcatggggcagttcctatatttgtcaagctacttagttcacctagtgatgatgttcgggagcaggcagtgtgggctttgggaaatggtgctggtgactcccctaggtgtagagatctagtgctcagccaaggtgccctcgccccactggttgccccagtgaatgagcat

SEQ ID NO: 1698 - DNA, 259 bp, Glycine max
  Clone ID: PAT_MRT3847_101532C.1
ctctgtccactcccataggctacagaaaaagtcacaagcgcatggtttccaaccatatgtgttttctgcagttatttctcttgttctggccaaacaaccctaaaaatccttaccattccacaaagttggaccatcacttgtgcacccactttgactatgagtataccaccacattgcatttctgtttgcaccatgtcttccaggagactagactactgttgtccagggtcaatttgagtgtaaagaaaatgtagacaag

SEQ ID NO: 1699 - DNA, 526 bp, Glycine max
  Clone ID: PAT_MRT3847_101533C.1
cgagcatgcgcatgcaggtaaggaagtcagcttgctgagattgattggggaaacacatccttccctctcctatcggatatacctccctgctttttcttttgtggagatgaatgaagcaactattgattttcatccatcttgaaagattggagaaggaatgtatgggattgcttacgacggactccttccctgcatgcatgctgccatatgaatgccaccctcttatggctgacatagtttattatacttcctccatcaggtatctggcttgagtaaggacatacatccctgcctgctctcactaatggctatctgtacacactctcgctcacttgtgtatgcgtacataaacgatggcttccttgacatccatctcgcccacaaagaaatcaacccacttccatggctcattcaaatatccattgccactgacgtatgctccgctctaatcttccctcactccagcgaggcttgaatcatgcatgtgagtttcctacctaggaacgccctccttgctgccaacttg

SEQ ID NO: 1700 - DNA, 359 bp, Glycine max
  Clone ID: PAT_MRT3847_101534C.1
caaaaagggaggtcttttatttaaaaattgcttcttagggaccatagcgaaaaaattgaataacctttaaagcaaacctggacagggtttttccacattttattggcaacccctaacatagggaagcttctattttctccccccctttaaacagttttccttgttttaataaaaagcttattatttccctaaacgtgcatataaaacctctcctgaccaaatgatcaaaaaatttccgtgtatacccacttttgcaaaggcttagttggggccaattgaaagggaactgggaagttagattcccctgccacatcaccttgtttggttaagtgccaacaactctggaatttctaatccct

SEQ ID NO: 1701 - DNA, 324 bp, Glycine max
  Clone ID: PAT_MRT3847_101535C.1
gggaaagacacagtttgcatcatagaggccaaagctgtacaggtgctaaaagggatggatcaggacctgaatctccatctggaaaaagtattaaaatctggagacattcagaggttttcatgcagaatgtctcagacacacattgataggaaaggacaaatgggcatttattgatatgagtgcacgtcccttatgatggcgaccagctaattgtggacaaagagtgcgtacagaatcaagtttaccgactgtgtaaaaaacaatacgttctgttttagaaatgtaagaacaaaaagctgaagaccgatcgcaaaatggtataca

SEQ ID NO: 1702 - DNA, 612 bp, Glycine max
  Clone ID: PAT_MRT3847_101536C.1
ctcgagccggggacttctgtgggttctccagaggttcatctatctgcaagacttcaggttacaggagaagcagaatatactgatgacacaccaatgcctcccaatggtttgcatgctgcctttgttttgagtaaaaaacctcatgctcgaataaatagaattgatgattcaggggccatatctttgcctggatttgtgagcttatttctggccaaagatgtaccgagtgataataaaattggaccggttgttgctgatgaggatctctttgctgtagattatgtcacttgtgtgggacaggttataggagtagttgtggccgatactcatgaaaatgcaaagattgctgcacgaaaagttattgttgagtatgaagagctcccagccatcctttcaatacgggatgccatcaatgctagaagttttcatcccaatacagaaaagtgtttgagtaaaggtgatgttgatcactgttttcaatcaggtcagtgtgaccgaataattgaaagggaagttcatatgggacgtcaggaacacttttatctggaaccacatagcactttgatatggacagtggatggtggaaatgaagttcatatgatatcatctagt

SEQ ID NO: 1703 - DNA, 244 bp, Glycine max
  Clone ID: PAT_MRT3847_101537C.1
aaacaatttttacttgccgagatttggacctcttgggtggttattattccattaccacctaatttaaaaaaattcttccgccattcctttaggggcgctcggaccccctggtgaattacatttttcccaccttttcccatggtgcaattacaccttagggggattttgcgaatatttctattttccggctatttttacaacggcgataccaaatctgggcttaaaaccaaaaaaaattttgttt

SEQ ID NO: 1704 - DNA, 484 bp, Glycine max
  Clone ID: PAT_MRT3847_101538C.1
ctttctctctttcgtctttctttgatactttttttttttttttttttttccaccggccaagttctttcaattcacattattttgacggatcactggattaatcttttcccggagcctaccattcaccttgggatctggcaataaatcttttctaaaacgatttccccacgaaaccgcgtcctgatggttatctcttggaggcaaaccggggcctaaactcccaaaacctgatatccccggttgactatcactcttgacagacccccccttatcggtaataaaacccaatatgggccccagaatccggcttccttaaaagcaagccttctgcacacaatgtggacatttcatttctgggctgaaccttcctccaagcctagtaatgcaaatgataaaccgtcttactttataacatctttagaccaggattttcaaagacattacacgtggcgctagaaaaactttgggaagacaaaagcttggg

SEQ ID NO: 1705 - DNA, 2348 bp, Glycine max
  Clone ID: PAT_MRT3847_101539C.1
cgtgtgtctcatgaaccattacataaactctttacctttgtttattcataactactatatatgtatatagaccctccttacacccttttcttccacgcgtccgaaaaaacaagtctttttctgaaaacttaatttctctctgattttctccctcacttttatttctctctttctggattattctctctgtgtagattgtggcgtgttctcgatgatgatgatgatgagccgcagcggcgccaaccgggtagcgaacaccgcaatgtttgtggcgaagggtttaagcggcgaagttggtggtttaagagcattatatggcggtggtgtgaggagtgagagcactttggctttgtcagagaaggaaaagattgagaagaaggttggtttgtcttctgctggtgggaacaaagaagaaaaagtgatcgtgagttattggggcattcaaccctccaagatcacaaaaaaagatggcacagaatggaagtggaattgctttaggccatgggagacatacaaagcagatctttccattgatctggagaagcaccatgctccaaccacgtttctggacaaaatggctttttggactgtcaaggttctcagataccccaccgatgtgtttttccagaggcgatatggatgccgagcaatgatgctagaaacagtggctgcagtccctgggatggtagcaggcatgctacttcactgcaaatccctaagaagatttgagcacagtggtggttggatcaaagcactgctggaagaagcagagaacgagcgtatgcacctaatgaccttcatggaagtggcaaagccaaagtggtatgagcgtgcactagtgataactgtgcaaggtgttttcttcaatgcatacttcttggggtatttgttgtcacctaaattcgcacaccgcatggttggttacctggaggaggaagcaattcactcctacacagagttccttaaggagctggacaagggcaatatcgaaaatgtgccggctccagccattgccattgactactggcagctcccaccaggctccactttaagggatgttgtcatggttgtaagagctgatgaggcacaccatcgtgatgtcaaccactttgcatcggacattcactatcaagggcgagagttacgagaggctgctgctccaattggttatcactaattttttttgcctcttctgatgttggagtgtggaaatttaagacaaattttggtgtcattttgactagaataaataaaattgctcgtgacagactatacagtgtttttttttttgttgtgtctcatgatgccaatgtaaatagggtgtggtggagtctttatttgttcaaagtcatatttggagtatttgtaattctactgtgcactctgtaaggtacgagtggagttatatgatatctcacacacctccaagatatagtttttgcctactaaaaaaaagatttattcctttttgaaaatggtttttgtttcgtcttggacttcgccttattgaagatcaataggcagaaagaattgaggttgaaatcagtataattactgtcctggaagttataagcatcatcatgaatatgataccaaaatgaggacgtcgtgtgtgaaacagacaagcgaagattgagtccatgttgaggaatttctttgatattgaaataaaataatgttttgttctcaatcaagaagaaacttaaccgttagattttacataatgtcactaagtatgcaggtttctaagcagacctacatagagaaagtgactatgttatcagaatcctaagggtcttgctctcagatcctatattatgctcatggagccattgtgtaggataaacaaggtttttttgttagtccaacaagagcctaaagtcttggcaaacggggcacattcagaggcagagaatgacagaggggtagaggttctcaaggagtaaggactacttacaggcataaaattatgtatgcgttgtgggaagaaaagaatgggcatacggcataccattgacatgttatagaaagcttggtttcccacctaacctacgtatattttcgaagaggactaagtggttacaaatgatcaagccagtactagttaaattgaagtatcattgaagaggactaaattgaactatttctcaagttcagtagaatacccacataggagaagtggctttcactagagaattgaagtatcattgactccttgacctactcaaaggacatgttctgtctcaaaaggatcaagccagtactagttaaattgcccgatgcttcaaatgtttttttagacttatgttgtggccctttttgtccaattaagacaaaagaattgaagc

SEQ ID NO: 1706 - DNA, 362 bp, Glycine max
  Clone ID: PAT_MRT3847_10153C.1
gtttggagagattcaggaaaaaggagccttgaaattatcacaagacgaatttcttacagctcggtcaactcaagtgcgtactgcaacaactgtgtgggctgatgggagtccatatttgtatgcagggtgccatgatatgctatggtctacaataccatgtgattcagtcattaggagtcaagttgacaaccataaacaatatgcgagcatatgggctcaatactggtatttaacgatctcgtctacagggcgccatttctaattccatatcacagcatactgccaggaactaaactggctccgcgagaacaccattgaattttgattctagcaagcagagcttaagccagaactgtattgac

SEQ ID NO: 1707 - DNA, 514 bp, Glycine max
  Clone ID: PAT_MRT3847_101540C.1
ccacgcgtccgcaggcaacaacgcactgccggctaaacatcgggaacagactctatccctaagacctccaaacgttcttgatgtgccctcacactttagctcctgagtacttaaaaggagtgagctgcaaaattcggtcacgtgacttcactcgccaagcattcaggatcttatggatcaatacaatgatttctatgagcgatcagaatacaatgcatgattcatcacctgagccattagtaaaaagtctctctctactgatactcaattaccaacaccattacaatagagggacatggacacatagcacaacctctatatggatcgatcataaatacaaggaaagatacaggcacaaacactttgcaaaatcaatacacgaacttggccctagctactgtagacgctgcactcccagctaccgactaatgcctgcagatcatccaactgctacagactgtcacagatactagcttagcactcaaggcttgaatgacattgggcatctaacact

SEQ ID NO: 1708 - DNA, 283 bp, Glycine max
  Clone ID: PAT_MRT3847_101541C.1
actggttgacaacttaaggctgccttctttgaagacacaccctaacatgattacagaagtatatgccaatgattatactccgtaggcctaaaagatcccaacaacgcctttccccactggtcaagccagggatgctactggtgttgctgttttaaagaggaaaatgcaaagtactgatgagacaatggagcctatggcaatcaactgctaggcctcttcttatggaaacgaaacttatgtcaatgttgaatgtgaagctgcatcaatgtatgatctgcaaaat

SEQ ID NO: 1709 - DNA, 484 bp, Glycine max
  Clone ID: PAT_MRT3847_101542C.1
gcccgttccattctttctttaatgcgattggcgatctatagagtgagcggggggaatctgtttcatgatagtgggtgataaagacaagctgaagatgcaggtcagagacttcaccaccggtaagagggccgaggcaattcatccagaggctgtgacaggggcttttgatgacatcatgtccaaatgtatcatcggggttcatggctgatgctcagaaagcccctaccaacaaaatgattagcgacggcaactgaaaccacatgccgaggggagcatataatctccaaattacattttttggggtctatggcagctgcgtagaccgtgtacaccagaccgagggtgatcatgatctccaacaccaaggtgtgtgcctttgcaactggaaagaagagcttgattgctggaacagtgtaggcatcgaccaaggccatcaggaggtaggcgactatgtactcctggagttgggcgatgacttaaatga

SEQ ID NO: 1710 - DNA, 254 bp, Glycine max
  unsure (1)..(254): unsure at all n locations
  Clone ID: PAT_MRT3847_101543C.1
gcgtnacaagtngcgttccgagcttgccaacgcanacgtatcgagccagcctcacaagcnagggtcnntcaccgcgntccacccttcttccctccgcccttcgtcccctccaattggaatgagtaacagaattcatatgctggtagtngacattttgaaattgnaactgtggngggagcaataatatannttnacanccatcatggagatacagactngtggcaggccggnccgacaccttgctaganaaangg

SEQ ID NO: 1711 - DNA, 574 bp, Glycine max
  Clone ID: PAT_MRT3847_101544C.1
cgagctcaccatattcttgttctcatttttctgccacagtctctcaattaggttcctcaaccaattggccatcctcatttgcgcaccacaagatgcaatgtcattggtgaccccagagtacttaaccgagattttggagaaaggaacttttttgaacactgttgggaacaggatcttctactcagcacttcctcttttgctttggatctttgggccagtgctggttttcttgtgctctattgcaatgttgcccgtgttttacaaccttgactttgtttgtgggagagtaaaagcaaagatggtggtgatcaatgataaaagtgactttgcttgatgtattaatattattattattcagctaagactaagaacatggaatagataagattagtatatattgggtatgcgtcatcatgcgtatgtgttgtttacttgtttacaacttttatgttgtaaaggtagtggtattttactcgcacaaaataattaagtgcatgcatgtcgaagcgctttaccgaaataattcaaaatggcttttgataaaaaaaaaaaaaaaaaaaaactcaagactagc

SEQ ID NO: 1712 - DNA, 1691 bp, Glycine max
  Clone ID: PAT_MRT3847_101545C.1
ctcgagcctcctcttaattacttaatactgctaacaaccatagacacaaaagtgcatatacttcacaaccatgggaaccgagactccgacgagtggaaatcctattgcttcagggggagaaaaggttgctttcccagcagcagagattgataaaagaacagcggagcagaaggcaattgatgattggcttcccataacttcttcaaggaacgcaaaatggtggtactcagcttttcacaacgtcactgccatggttggagctggtgttctaagccttccttctgccatggcaagtcttggatggggtcctggggtggtgattcttgtattgtcatggataatcacactctacacactatggcaaatggtggagatgcatgagatggtccctgggaaaaggtttgacaggtaccatgagctggggcagcatgcctttggggagaagctaggcctgtggatcgtggtgccacagcaactgatatgtgaagttggtgtggacattgtgtacatggtcactggaggaaaatcactgcagaaaatccatgaccttgtgtgccaacacagaaaagattgcaaaaacatcaagaccacttacttcatcatgatctttgcttctgttcattttgtcctctctcaccttcccaacttcaatgccatcttcggctccagcttggctgcagcaatcatgtctctcagctactcaaccattgcatgggtggcttccgtggacaaaagagttcataatcacgtagatgtggctgttgagtatggctacaaagccagcacttcagcaggaaacgttttcaattttttcaatgccttaggagatgttgcttttgcctacgctggacacaacgtggtgttggagattcaagcaaccatcccttcctccccagagaagccatcaaaaggtcccatgtggaggggggtgctaatagcatatttagttgtggccttgtgctacttccctgttgctctcattggctattgggtgtttggtaattccgttgatgacaacatcctcatcaccctaaacaaacccacttggctcatagtaactgccaacatgtttgttgtcatccatgtcattggaagctaccagctatatgcaatgccggtttttgacatgatcgagaccgtgatggttaaacaattgcgcttcaagccaacttggcagctacgatttgttgtgcgcaatgtttatgttgcatttacaatgtttgtgggcattacgttccctttctttggtgccctcctcggattttttggaggatttgcatttgcgccaacaacatactttctcccctgtattatctggcttgctatttacaaacctaagaagttcagcttatcctggatcaccaactggatctgcattatatttggcctcctactcatgattctgtcaccaattggtggattaaggagtatcatactcaatgccaagaattatgggttttaccaatgagggagaatgtgttgaaagaaaggtgttaatgcgtgtgatacaagcacttttctaacacttaattgaattcattctccgcaagaaccatagttcaactttcattttataaatactataaacatgcatgaatataaatgtgagactatctttgccaaaaactactttatttttctgcaaaacaagggatcaaaaagtatgtttgaaataataaaaaattgaaatc

SEQ ID NO: 1713 - DNA, 466 bp, Glycine max
  Clone ID: PAT_MRT3847_101546C.1
cgtgtctacctcattcactgtaacactgatgaaaggaacataggtttgctcctatcattatcattagtctaggaacagatgttaattatgaaaagacggcggttacaaagattctttaaatcggataggcattgccttcagcttattccgtgatactgggccatcctgatggctcttataacctagacctgtatgcattgaagcatgtgctttgctatatcatctagaactgatagcatcattaccatccttctgctgaagcaaatgaatcactggatgcataaagagcacaccagtgtgactattcatataccaattatgactgtagagctaacaacaatcttagaaacaacacctcaacaactgcccgcttgcttagtctacacttcagaggaggatgcgaacatgctggtccatctactggggccatgaccgtcgcacacgaattacactgccgatggctgtg

SEQ ID NO: 1714 - DNA, 488 bp, Glycine max
  Clone ID: PAT_MRT3847_101547C.1
tgagaaaaaaaaaaaaaaaaaaaaaaaaaaaaaaaaaaaaaaaaaaaaaaagcgggcgcgccgaataataataaaccaaaaaaaacgattaaaaaatagaacctgcacatcgtgcagacacaacctattggggggggggcccccccattggggctcgctgccccggtaattttttttgcgcccggttcttgggggccccccccttttcctttaaaggggcgatttttaggctgggaaaaaagaggcgcctggggtttcccttgagaaaaattattaccctttaaattgcccccccaatttcccccccgggaattttatggggcaccctggggggccctattggggagcgcaccccccttgtggtgggggggcctttttcgcccgtttcccagtggtgaaactttttttccccgttgttttttaaaattcctccccccccggggaggggggttttttattttgggcccccgggggttttttttttttcc

SEQ ID NO: 1715 - DNA, 449 bp, Glycine max
  Clone ID: PAT_MRT3847_101548C.1
cacgcgtccgtgcttacaaagtctccaccaacgcacaagagaggcgcacgcaccacgctctcgctctcactctcagctcctcctcctcctccgtccaatcgccgccactaaccgccatcgtcgtccgccgccaccgcctctgcttccattccacgtctcaggtccctttgtatttccggaagtgtttcagacaacataagctggcttattcttttagttggtgtttggaagaagatactgtaaatattgtgttgtaagagagttaatggagctgaaagtttcatctccaaaacctgagtctgtgcaccgtctgattgcgcaggtgatcctgggaaaaggaggggagtgatgatgatgatgaagatccggatacaagcattgggagggagcctcgtcgaacttgagagagagtttcaattctgtaatagaggcatcaaaagcgtacaaat

SEQ ID NO: 1716 - DNA, 297 bp, Glycine max
  Clone ID: PAT_MRT3847_101549C.1
actaaattctttttctttttattaaacgaagcaaattaaattccaaagatgcaaccttgcagtcctgaaataaaaacatttgcgatgaagcttggaactcaaaaaactccaaaaatcacaacttcgtgtattacatttacagggctgaaccaacaaaaacaaaaatcatcaaatgactttcattggtttaaaagctcttgggaaaaacaccctatgttggggacaaaacattcctttctaacaggggctttttccaaaatccattgccataaagcatttggaagaacaactttattc

SEQ ID NO: 1717 - DNA, 2017 bp, Glycine max
  Clone ID: PAT_MRT3847_10154C.1
ggctcgagtggatttggagtgtcctagattcgtgtcctggtttggtttggtttggttcgtactgttgtacgagttttgactttttctggatttggagttttcaatcagataatgttcaacggagccgcttggtgggttcagattcagaagccgagagggagagggtgtttgtgattgcaagtgttggtgaattcaaaagagagagtaagaagagtgtgcatgaacatcatgagtagtagtagaagcagaagcagctggtgcggtttgtggcctggttccttcaatatggaaactgagttgactattagaggaaagagttttggtggcatttttggctcctctgctaagcctagatccctcagggttcagccttctgatgaagatgttgaagatcttctcccctctaatatttcgggcaaaccttctggaactgttctgccctatgttggtgttgcttgccttggagccatgttatttggttatcatcttggggtggtaaatggttctcttgagtaccttgccaaggatcttggaatcacccaaaacactgttatacaaggatggattgtcagtgcactgcttgctggtgctactgttggttcatttaccggcggagcattggctgacaaatttggccggactaggacttttcagttggatgcaatccctctagcaattggaggatttctttgtgctactgctcagagtgttcaaacaatgatcattggtcgcttgctagctggcataggaattggtgtaacatctgcaattgtaccactttacatatctgagatttctccaaccgaaattcggggtgcgcttggatctgttaatcaacttttcatatgtattgggattcttgcagcattactggctggtttgcctctggtgggaaatcctatatggtggcggacaatgtttggaattactgtagttccatctgttctgttagcacttggaatgactatctctccagaaagtcctcggtggctctttcagcaaggaaaaatatctgaagctgaaaaagctgttaaaacactatatggaaaagaaagagtggctttggttatgcatgacttgacagcagcaagtgaaggttcttctgaacctgaagcaggatggtttgatctgtttagtagtcgatataggaaagtggtcagtgtaggggcaacacttttcttgctccagcagttggctggaataaatgctgtggtctattattcaacttctgttttccgcagtgctggaattacttctgatgttgcagcaagtgcactggttggtgcatcaaatgtttttggcacaattgttgcgtggaggttaattcgagatcgattgccgactaagtctaatctacggagaaggcaaatagatataagtgacagcctatgtcctttctgcagtattaaggacgaaactgcatctcatctcttttttgaatgcagcaaaatacaacatctgtggtgggaatcccaatcatggatagggacttcgggggcataccctataaatcctaggcaccattttttgcagcacaacattgggatgaaaggtgggaagatatacaagaggtggaagtgctggtgggttgctctaaattggtccatctggcagcagaggaataaggttatttttatgaacgccccattcaatggtagtaagctgttggaagatgcactatttgtggcatggacatggttcagagcaatggaggaaaactttacaatacatttcaacttttggtcaagcaatcttccagctggttttcagtaaactaggatgacaccagctgtggttctgtaatcgttgtagctttatagtaggctagtaatctcctatcagtctgtactcagcctgatatgaggatttactagctttacttacatactcttgtatctatagtacctctggtactttttcatatatcaatatatattatttttgctgaccaaaaaaaaaaaacaattgttgcttcgtccttgatggacaaaaaaggaaggaaaagtctccttatcac

SEQ ID NO: 1718 - DNA, 466 bp, Glycine max
  Clone ID: PAT_MRT3847_101550C.1
accaggttgcctccaagttggaaatcaaagcctttgttttgatgagtggaggagctctggtggataagactgtttacttttagattccaaacccaactttgaggtcatgtgggctgtttttatgtcaccaaagacaatattattaagattattcctaatctaatctcaataataaaaaaaatcatgtaggtttctagccttttaacttataataatggcattattggtcataagaataatgaagtgtgactttgctgatgatatccattcgtgacttataataaattaataatatattttcttatcctcttttattggtttcaagagacaaattctgatgcataattgttgagcatcatcacttgtattcataattctcttaatgcgtgtgttgtgtggctctatctgagaagttgcttccaagttggaaattaaagcaattcctaccttttgtttgatgaatgga

SEQ ID NO: 1719 - DNA, 169 bp, Glycine max
  Clone ID: PAT_MRT3847_101551C.1
gggctggggagccaggattgggccatgttgcatggaaagaaagagttgttggctggaagatgaaaccataaaagaatgttgctccaatgagcacaggccaggctgcttttgaaagaggagctggggatattgatgctcgtactgatgtgcctgtagatgattctttatt

SEQ ID NO: 1720 - DNA, 984 bp, Glycine max
  Clone ID: PAT_MRT3847_101552C.1
acggtgatgatggcaacatctcatcacatataactgaaagattcatcaaagtcttgcttaccatcattgaggcctctgatgacgctgaagcgatggttactgctatgggtatcatctctaaactaccacaggagtctcacatgactcagtggcttctagattctggggcacttaaaactattttgacttgtcttaccgaccaacataagcatgtctcacacaaaaaacaagtcatagagaattctgttcaagctctttgtcgttttactgtctcaacaaatttggagtggcagaagagagtggcattagaaggcataatcccagtgctggtgcagttgctgcattccggaacaccctttacaaaacaaaatgcagccatttcaatcaagcagttttcagaaagttcatatcgcttgagcgagccaataaagaagcctagcattttcaaatgctgccttgtagccaaagaaactggttgtccagcacacttaggcacctgctcagttgagtcttcattctgcattttgcaagctaatgccttggagccccttgtgcgcatgcttgcagatcaagatgatggaacgcgtgaagcttccttaaatgcactgctaactttggttgatagtgaagcaccacagagtggaagtaaggtacttgcaaattcaaatgctattgcaccaatgatacaactatcgagtgttccaattccgccctcgcggccaagaattctaatagctttagaaagaatttttcaactagatgatgtgagaaataagtacaaagttgtggccacgatgcacttggtagaaataactcaggggaaagatagtcgaatgagaagtcttgctgccaagtgccttgctcaattgggtgaacttaataaacagtcctcttatttttagaaacggcctcacaattgtttggttacttgcacaagaattaaataaacagaaattctacacaagctaaattcctgtttcaagg

SEQ ID NO: 1721 - DNA, 223 bp, Glycine max
  Clone ID: PAT_MRT3847_101553C.1
gccgcaagatcattatcgatacttatggaggatggggtgctcatggtggtggtgctttctccgggaaggaccctaccaaggttgatacgagtggggggtggggtgtgagacaggctgctaatagcactttggcacgtgcatttgccagaacgtgcactgtgccagtgtcttatcccattcatctgcctgagcctttatctgtttttgttgaccactatagccc

SEQ ID NO: 1722 - DNA, 518 bp, Glycine max
  Clone ID: PAT_MRT3847_101554C.1
ccacgcgtccgaccggaccgggctggagctggaggcgtggcggcgccggcgcgtccatcaggaggagaaggggcagggatggtgctgggcggcggcatggcggcagcggccgtaggcggggacgacgccgtcgtcatgcagctgggcgccgccgagggcgaggagaccgtcgtcaccgtcaactgccccgaccagacaggcctgggctgcgacctctgccgcaccatcctcgagttcggcctccgcatcacccgcgccgacgtgtccacggacggccactggtgcttcgtggtgttctgggtcgtgccccgctcctcgtccatcaaggtccggtgggcgagcctcaagaaccggctcatgtccatgtgcccttcctcctactccatccccttcttctaccgggacgtgagccagccagagccagggcccttgcagttctaccttctcaagctcatgtcgccggaccgcaaaggattgctgcatgatgtgacgcacatactatcggatctggagctcat

SEQ ID NO: 1723 - DNA, 1413 bp, Glycine max
  Clone ID: PAT_MRT3847_101555C.1
ctattacggctgcgagaagacgacagaagggggaggtttgtgaagtgttaagtaattaatggcagcttcaagtagcatcatctccatctcctctgcttcactcttcactccaaaaatccaatgcctccccaaacacaacaaggaccatgatcatgttccaattccatcatcatcatccttcacaacacatgcttctctcaagatatcaagaccaacaacaacgtttggaatcaccacaacaaccacaaggcttaattttcctcctcgtaggttgagttgttcagcatcagcttcttcctcttccactcttccctcggctcttctatttgactgtgatggagtccttgtggatactgagaaagatggccatcgcatatctttcaaccaaaccttccaagagagagaactaggtgttacctgggatgtggacttgtacggggaattgctgaaaattggaggcggaaaagaaaggatgacagcatactttaacaaggtgggttggcctgcgaatgccccaacaggtgaacaagaaagaaaagaattcatagcttcactccacaaacaaaagacagaactatttatggcccttatagagaaaaaactgttgcctcttcgtccaggtgttgcaaagattatcgatcaggcttttgctcaaggagtccaagttgcagtttgcagcacttccaacgagaaggcggtctctgcaatagtatcattcttgctgggacctgagagagcagaaaaaatcaagatatttgcaggagacgtggttccccgtaaaaagcctgatcctgccatctacctattagcagccagcactctgaatgttgaaccttcaagatgtgttgtggtggaggacagtgccataggcttagcagctgctaaagcagctggaatgacgtgtatagtaacaaagagcggctatacagcagatgaagatttcttaaatgcagatgcagtctttgactgcattggtgatcctcctgaggagagatttgacttggcattctgtggaagccttcttgagaagcaatacgtgagctagcacattgttaagtgatactcaaagattttgtttgattcaagtctccttcaatatttcctatgagtgcccaattcgacttatgtgttcaagcccaccctttcaagtcaatgatgaaaatatcaccatgggttcaataaagaatcttcatttcttgttaagcttaatttcatttcaagtacttttttttttattattcgtataaatagaatgaatgaggcttaaaattttaaattaattctggaaatatcaaagcttcaatctcttgtaaactaggagaagttgttagattctgagtttcattatcagtttggtttccctctacgaaatgggactaagatttgttatggttaaaatacccttttaattcg

SEQ ID NO: 1724 - DNA, 1587 bp, Glycine max
  unsure (1)..(1587): unsure at all n locations
  Clone ID: PAT_MRT3847_101556C.1
ggaacaggggaggtggtgaactcttccgcggtgaatgatggtgaactctttcacagtgtacttggagggctaggtcagtttggcattataacaagagcaagaatattcctggaaccagcacctgccatggtaataatgcatcaaggacaataataatataccagaaacaaggtcctatcaattttaattagtggtatgcaattaagtaccggttgtgatcatggagtatttctgtttttgaacaggtaaaatggatcagggtgttgtatgcagatttcacagcattcattagagaccaagagaaattaatatttgcagaaaaggcctttgattatgttgaaggatttgtgataataaacagaactggtctgctaaataactggagctcatccttcaacccacaagacccagttcaagctagtgagttcaagtcagatggaagaactctcttctgcctagaattggccaaatactacaatcttgaagaaacccttctagtgaatcaggaagttgagaaacatttgtcccgcttgaactatatcccatcaacactttttctaacggaagtcacatatgtagactttctagacagggtgcatacctcagaggtcaagttgcgttcaaaaggcttgtgggatgttccacacccatggctcaatctttttatacccaaaaccaaaatacaccatttcgcagaggttgtcttcgggaacatcgttacagaaacaagcaacggccctgtccttatctacccagtaaataaatcaaaatgggacaacagaacttctgttgtgattccagaggaagatattttctacttagtggcatttcttacatctgcagttccatcttcaaatggaactgatggcctagaacacatactaagtcagaacaaaagaatattagaattctgtgaaagagcacaacttggagtgaagcagtatttgccccactacaacacacagcaagaatggagggcccattttggtcctcaatgggagacttttctgctgagaaagtccgtttatgatccattagcaatactcgcccctggccaacgtatatttcaaaaagcaataaccttctcatgaccacatttttattattaattattaaaaatctgaaaaaaaaaaagagaagaaaagtccttcatggcatgtgccaaaatgaaaaaaaaatgttatatgatccagacaggttttgacattgaccatacagaatgcaattgcaaaggaagaaggttcattgatagtagagaaaaagagggagaaaaagagattacaaaatgatgactggtgagatttgtatgccttgcaggttaatgaggaaagttgtcagtgtatgtaggtatgtaccattactgatggaaaaattgccttacgtgctgagtgtagcaccaagacagcacaagagttactgggtcaatacaagagaacaaaggtttcaaacgtgaattattattatagggtttcaaaaaatataccaatattatcagtgctagaaacgaatgtatatatcaattttgcaagcactcccttatttgttctctgtctcacatgtatccgaattcattaagannnnatnnaa

SEQ ID NO: 1725 - DNA, 1142 bp, Glycine max
  Clone ID: PAT_MRT3847_101557C.1
gggaacaggggaggtgttgaactgttccgcggagaataatggggatctctttcatggtgttctaggggggcttggccaatttggcattataacccgggcaagaattgtcctagaaccagcacctaccatggtaaaatggattagagtgctgtactcagatttcacagcattcacaagagaccaagagaggttaatatctgcagaaaagacttttgactacattgaaggatttgtgataataaacagaactggtcttctaaataactggcgattatccttcaacccacgagacccggtccaagctagtcatttcaagtcggatggaagaactctcttctgccttgaaatggccaaatacttaaacgtggaagaaatcgatgcagcaaatcaggaagttgaggaacatttgtcccgtttaagctacatcccatcaactcttttttcaacagaagtcacatttgtagatttcttagacagggtgcacatatccgaggtcaagttgcgttcaaaaggcttgtgggatgttccacatccatggctcaatcttctaatacccaaaagccaaatactcaactttgcacaagtcgtcttcgggaacatcctatcagaaactagcaacggccccgtccttatctacccagtaaacaaatcaaagtgggacaacagaacttctgttgtgattccagaggaagatattttctacttagtggcatttcttacatctgcagttccatcttcaaatggaactgatggcctagaacacatactaagtcagaacaaaagaatattagaattctgtgaaagagcacaacttggagtgaagcagtatttgccccactacaacacacagcaagaatggagggcccattttggtcctcaatgggagacttttctgctgagaaagtccgtttatgatccattagcaatactcgcccctggccaacgtatatttcaaaaagcaataaccttctcatgaccacatttttattattaattattaaaaatctgaaaaaaaaaaagagaagaaaagtccttcatggcatgtgccaaaatgaaaaaaaaatgttatatgatccagacaggttttgacattgaccatacagaatgcaattgcaaaggaagaaggttcattgatagtagag

SEQ ID NO: 1726 - DNA, 487 bp, Glycine max
  Clone ID: PAT_MRT3847_101558C.1
acgagaaataaaacaatgtagaagcaagcgcaaaatatatcaacgtaaaaattaaggcaagaaggaattagttacaatacatctttcatttgataattttatatagaaacaacaaaagggatccttttatttatttatcttttaaaaggaaagcaaaaacgttattttaaaagaatttaatgtggaattgaattcgattgataaattatttccctaaataaattcgttaattactgtcttaaataaaattaaaaactcatgaaaattattaccttaaataaaatatattttgaattctattatgattatttgtgtttgcattgttttaaattaaagtagttctagaaataaatttaatattacattgtcgattttttgtacaattgttcctaattaataataaaatatagcttattttctcatacttttcaattaaaatatacaccaaatataagaaattaaattcatataaaaatatgtataaaat

SEQ ID NO: 1727 - DNA, 255 bp, Glycine max
  unsure (1)..(255): unsure at all n locations
  Clone ID: PAT_MRT3847_101559C.1
anaaaatatcnnatacngagccaganacagntnaatgttacgntaacgtgttgtgcttgttntgggtttggaattgnattgattcaaagganttaacgccatgctcagatcantgccgaagctctcactcntcttttcctcagccaggaatccccttatctttcaagtgctcagcgctccatatcnnnanggncnatcacngctcnaagagtcatcntgcgcgtngcnnngcctnccactcggncaaaagngncc

SEQ ID NO: 1728 - DNA, 402 bp, Glycine max
  Clone ID: PAT_MRT3847_10155C.1
aaaatggcaaaagggccctttacgtatttaattgcggggggggaaaaccccagacttaagattttgaaaatgacccaaacttgtacccccgaacgaacttttgctataagagacttttttttttttctttttttccccggaactgggtcccaattatttaaagaacccctcttttttttcactttttaaaggagggaagctatccccacggaatatcggaggttccaacccctgcaagaagacgaaaacttgttttttgatgggtcgtaaaggaaatccactggccgtgcttttataacgtcgggactgggaaacccctgccgggacccaattgagagcccttgcttcaaattccttttttcccggttggcctgatacttaaaaaggcccaggcgaatgcct

SEQ ID NO: 1729 - DNA, 547 bp, Glycine max
  Clone ID: PAT_MRT3847_101560C.1
gaaacgtgttatctcatatatacagttcctatgcaggttggcataagtcagtctaaccatgacacaacatgggctctttaaaaagctgtgtataaaccaggcttgtcaggatgctactacagcctagggaaaaactttaaaatgttttaaccaataaatagagcaaggaactataaaaaacacacggtgttggagcagagcaaacactgcttgcttgcactgtgactatacatgctgaacccatgacccccttgattgtggaaactgcaaaactttattacaaagcattaaacaaaaacctaaaaacgtttgtcagagtgatctacagacctgggctacaaaatacttgaaaggtctgaccccgggttataaccggggacctattgggtgcgagactagggggacaaccaactacaccgcccagacaagaaggacagcatttgcatcgtctttacccgaatagtttaaacccggagtggatgtgggaaaacaaacaaaagtttattttaacacgattacgctgctgaacaaatgatcatgacagtta

SEQ ID NO: 1730 - DNA, 252 bp, Glycine max
  unsure (1)..(252): unsure at all n locations
  Clone ID: PAT_MRT3847_101561C.1
ggtggggaatacggggggcgctccgcgggcgccgattgaaacgcgcgcagcagcgaggggacagcggggggaaagtgtcgcggaagagaagaggcatggcggcncgaacacggcggagcgactgggagaacgcgggcggggcccaaggcacgcgactggcagcacagggcgcggtacgccagcgggcgtaatagggaaggggcccgaaccgagcgccctaccgaacagtggcgcagccagaatggcgaaggg

SEQ ID NO: 1731 - DNA, 207 bp, Glycine max
  Clone ID: PAT_MRT3847_101562C.1
gcaaaaaaaaaaaaccacaatggcagcgagggctcccattccacgcgaagagttcgtgtacatggcgaactgtccggaacaggccgagcgctacgaggagatggtggagttcatggaaaaggtctccgcctccgccgaaagcgaggagctgcccgtggaggagcgaaacttcttctcggtggctaaaaaaaacgtattgggcgctcg

SEQ ID NO: 1732 - DNA, 2390 bp, Glycine max
  unsure (1)..(2390): unsure at all n locations
  Clone ID: PAT_MRT3847_101563C.1
caggtatgcgaggagtatcccaacctctgctgttaacttggtgccatttaacttgcaaaaagctcaaccttcatttgctcaatatgatgctacgtttaatcagtagagaccacatcacaagttatataaattcttcaagaaaaaacatcacatcacaagttatataaattcttcaagatttttcattatttgatggttgatgtggtctctactgatttaacttatagtatacattcattgaattacattattggtaaacggctgcgagaagacgacagaagggggtgacgggtggagcgaaccgtacaaagaagataacgctaacgcgcgtccatccctatatgttctcccgagtctccctctaccactttctcttatctctttctcttggattttcgagagagaattcgtgctaggaagagattaaaaataattctttatcttcattttctcatgatactaattatttcaccaaattatgttcacttcaaggcggagagagaaaaagagagaggtagagaaaagcgaagagtctctctcttcctatctctctctttcaatgtcagggcacaaatcttccacctctacttcttcttcttcttccttctaacctatatcagaaggaaacgcgaaaaaagaaaaaaaaaaaagaggcagaaggttctagaagccgccaatttttatttcttttaatttgtctgagtcagagacgttcgtgattgtaaccatggattcttcgtgtgtcccaaacggcgacgtttctgggttcaaagataaggagtcaatggttgaccctttcttggtcgaggctcttgagaaccctcggcaccgtgtcaccattttgcggatggagctggatatccagaggttcctgagtaatgcagattatcagcattttgagtttcaacatttcccttcttcctatctcagactggccgcacatcgtgttgctcaacactatggtatgcaaacaatggttcaagataatggcttagatggccagggaaccagaattatggtaagaaagatggcggaaagcaggtatcccatggttcgcttatctgaaatacctgctaaacagttggaaaatgataaacctgagaagataaaaattgccataaggcctaggcctaacaaaatcagtttaaatgaagccaatgaagctggaaggaaaagcaatcctcctagaagtgtggaagagagaaaggtggaatatgatcgggcacgagcacgcatttttagtagctccagaagttgtgattcagatgatactctgtcccagacttcaactgatgagaaaaattctcttataaacaaggatgagaatgaaactagcaagacccctgtggtttattcagaacaatgctctattggtagggatattaattctactcgagttgccatcttgagagatagggaaaaggatcgcagtgatccagattatgatcgtaactatgaaaggtatgctaggagtattccaacttcttctgttaacttgatgccttttaatttgcaacaagttcgacatccatttgtgcagtatgataatgcttttaatcagttgagtcagatgtcacaaaatcaagcttcacttggctatggacctcaaccaagccctatgatgaatccttttggtgtcacagggttgaatcaggtgcctagggatgctgcttatgtacagtggccaagtgctgcagtaatgtatgcacattcatatgaccaatttagacaagctgttttccaggctccatttggtcaacgcccattgagtttcgattattcgcagaattactagatgacgtttgggaagcagttttccatttggctgcataagttattttagctattaaggatttcagagttagatataatttttctgtactgttatagatccttgtttcctattctggtttttaagttttgatggtggtagcaagtatttggcgtttttggtatttcctggcgacatttttatacaggactgtagtgaaagtacttggatttgaagtatatgaagagttatatgtgattaccttgtctaatgttaggaatgcttgacctcgttctgtctataaagtttatgcaaaaacctcaccttaattccattttaaaaaaaaaaaaaaaaaaaaaaaaaaaaaaaaaaaaaaaaaaaaaaaaaaaaaaaaaaaaaaaaaaaaaaaaaaaaaaaaaaaaaaaaaaanccccccggggggggcccggaacccatttcccccaaaaaggaagcaaataccccccccccccgggccggttttttacaacccggggaggggaaaaaccctggggtcaccccaataaatccccttgaaaaaaatccccctttccccagttgggaaaaaaagaaaaaggccccaacccatcccccttcccaa

SEQ ID NO: 1733 - DNA, 508 bp, Glycine max
  Clone ID: PAT_MRT3847_101564C.1
gcacaactagactcttaaatgaatttatgtgaactacgaattgcagaagtttggaactgttctcaaataaaaatgctcctcaaaaacagctggttctgacataaacagataaacatacactagttgcgttcagtgcgcagagaggagaggactgttgttggtattgccttcaatcatttcttttccaacacccatatatgttttgtcatgctcttataatattttatgccagctcgggaccagatggcagtgcttcataaccatcatggtgctgcttactagtatctctttcaactgggatgcacttgaggatagcagctataggcatgctaactgctccgattaccacacttagtaaccagaattgccagtttagaggcacagtgctggcaaacgttccaaggaattcaactatcaccacttgaaatgccacggtggcgaaaattatcgccaaaaatatccggctgtcaaacatgcctctgaatatgtttatcttatcaatatctct

SEQ ID NO: 1734 - DNA, 464 bp, Glycine max
  Clone ID: PAT_MRT3847_101565C.1
attgctctatatatactacatacattttgattaattttttacttggtctataatgtttgaactagaagtaaaatactaaacttatgttgatctgaattaaagaagaaaaagcgggaaaacgaataagaattttatgccgaatcagtgaatccattttaaagctaaataaaaccctcctctctttctctgtctctctaacgggaaccaaacatggcttccttccctcctctaggttcactcactctctgcgaagtcaatcgtgacctaatcactgtcgacgccctctctgacgatcgagccaaccaaacctacggaaaaatcctctcccgtcccgtttcacaatctggagaacgacgcttccgatcaagatggtgcaacgacgacggcgacaaccggcggagaaagcgttcggaggaaaagcccggtggcactcttgcagggtttatgaacagctatctcggacg

SEQ ID NO: 1735 - DNA, 1453 bp, Glycine max
  Clone ID: PAT_MRT3847_101566C.1
ctggaataactatccgcatggttactggtgataacataaatacagctaaagctatagctaaagaatgtggtttacttacagagggtggtctagccatagaaggtccagattttcgtgacttgtctcctgagcaaatgaaggatgttataccaagaatccaggtgatggcacgatccttacctctggacaagcacagattagtaaccaatttgaggaaattgtttggtgaggttgttgctgttactggtgatggaactaatgatgctcctgcactgtgcgaggcagacattggacttgcaatgggcatagcaggaactgaggttgccaaagaaaatgccgatgtcattataatggatgataacttcacgactattgtcaatgttgtcaaatggggacgtgcagtatacataaacattcaaaaatttgtgcagtttcaattgacagttaatgttgttgctctggttatcaacttcttttctgcgtgcatcactggatctgctccactcaccgctgttcagttgctttgggtcaacttgatcatggacactcttggtgcattagccctggctactgaacctcctaacgatggacttttgaaaagacccccagttgcaaggggagcaaactttatcaccaaacctatgtggaggaatatcataggtcaaagcatatatcaattaatcatcctagggattctaaattttgacgggaagaggctactcggacttagtggttcagatgcaacgaaagtgctcaacactttgatattcaactcctttgtattttgccaggtgtttaatgagataaacagcagagatattgataagataaacatattcagaggcatgtttgacagccggatatttttggcgataattttcgccaccgtggcatttcaagtggtgatagttgaattccttggaacgtttgccagcactgtgcctctaaactggcaattctggttactaagtgtggtaatcggagcagttagcatgcctatagctgctatcctcaagtgcatcccagttgaaagagatactagtaagcagcaccatgatggttatgaagcactgccatctggtcccgagctggcataaaatattataagaggcattaccctggttgctctgctgatttctcctactagtgtagtgtgcttttaatgctgtcattccttacggcattgcaaatttatgtaattttgtaaagacttgataccatacggaatttccaggcatgacaaaacatatatgggtgttggaaaagaaatgattgaaggcaataccaacaacagtcctctcctctctgcgcactgaacgcaactagtgtatgtttatctgtttatgtcagaaccagctgtttttgaggagcatttttatttgagaacagttccaaacttctgcaattcgtagttcacataaattcatttaagagtctagttgtgcaaaactaa

SEQ ID NO: 1736 - DNA, 559 bp, Glycine max
  unsure (1)..(559): unsure at all n locations
  Clone ID: PAT_MRT3847_101567C.1
cggtccggattcccgcgtcgacccacgcgtccgtgagcttgcactgtgtcatttagcacaacatgaagcaaatgcaagagacatgattagtggaggtgcaatattagagttggttcgtatatcgagagattgttcacgagaagacataaggattcttgcacgtagaacactaatctccagccccgcattccaagctgaaattaagcgtttgaagatagattattgaagaaattaagtgccgtagatagtcaagacagtatatactatgcataataatgttcaggagtattttggatgtactgtattagtcttaatttttaaagtaaccaaaacattaatggccatagtttaatcatattacgtggtttgtctttggtctgcgcttgtagtgcacagctctgttatgtaaaatgattttgtatatgaaataagcaagggaggttcactccaaaacanaaaaaaaaaaaaaaaaaaaaaaaaaaaaaaaaaaggggggacgatccaaaggaaccaaacttacctacccgtgcatgcgaacccataaacttttgtgtagggg

SEQ ID NO: 1737 - DNA, 3284 bp, Glycine max
  Clone ID: PAT_MRT3847_101568C.1
gtgacccactgggtcctcggaaagtcgggattgttcctggaagatgttgatataaactgtttgcatgaggacagaattgtgaatcttaatctttactctaaatcagcgaggagatgatggagccccattgcaggccaaattaaatagagttcctattgtggctagacgcattggaacttagtatgaaactttgacattttaggtcatggctctaaggggaatagtcgaaaatgtatttcatgtggaggctctgaatgtctcttttgttattgcaggaattgcacttgaagctttgagaactgcttttttagttctcaaagatgtcgttgttaccgaagtaccactggctatcccagtagatagtgattctctgatagacatactgataatcaaggatcctgtgcgccgtggtcttactgctagctgtacaatacttgtgtatactgctatatgcacagatcgcatggtgacattgtgacctaacaaattggtctaaagcaaaagctagataagctggaattcttagtccagatgctgctatagtgctcaacacttattatattcaactcctttgtattttgccagattttcaatgagataaacagcccgagaaatcgaaaagataaacatattcaaaggcatgtttgagagctggaataaattattgggaaccccaacataatcagcattgttggaatttggataccgtttgattgctggtggtgatttgtaagcacagcgtggaaaatataagatacttaaagttgagcctttcaattcagtccggaagaaaatgtccgtgcttgtgggtcttcctaatggaggagtccgagctttctgcaaaggtgcatcagaaataatattaaaaatgtgtgacaaaattattgattgcaatggggaagttgttgatcttcctgaagaccgggcaaataatgtctctgatgttataaatgcctttgcctctgaagctttgagaactatttgtttggccttcaaagagataaatgaaacccatgaacccaacagcattcctgatagtggctatactctgatagccttagtaggaatcaaggatcctgtacgccctggggttaaggaagctgttcaaacttgtatagctgctggaataactatccgcatggttactggtgataacataaatacagctaaagctatagctaaagaatgtggtttacttacagagggtggtctagccatagaaggtccagattttcgtgacttgtctcctgagcaaatgaaggatgtcataccaagaatccaggtgatggcacgatccttaccgctcgacaagcataagttagttaccaatttgaggaaaatgtttggtgaggttgttgctgttactggcgatggaactaatgatgcccctgcactgcgtgaggcagacattggacttgcaatgggcatagcaggaactgaggtcgctaaagaaaatgctgatgtcattataatggatgataacttcatgactattgtcaatgttgtcaaatggggacgtgcagtatatataaacattcaaaaatttgtgcagtttcaattgaaaaacaatgcccttctttggtttacaaacttgattatgtcgctgaaattttggcctttgtgggcatactacaaatttaatctttttagtttctagttttaagaatttttttcacagaaaaatggagttcgaagtattttcggaaaattagatatgatcactttaaattggatatgatcaattctcatatctccatacctatgtggaggaatatcataggtcaaagcatatatcaattaattatccttgggattctaaattttgatgggaagaggctactcggacttggtggttcagatgcaacaaaagtactcaacacgttgatattcaactcctttgtattttgccaggtgtttaatgagataaacagcagagatattgaaaagataaacatattcagaggcatgtttgacagctggatatttatggcgataattttcgccaccgctgcatttcaagtggtgatagttgaattccttggaacgtttgccagcactgtgcctctaaactggcaattctggttactaagtgtggtaatcggagcatttagcatgcctatagctgctatcctcaagtgcatcccagttgaaagagatgctagtaagcagcaccgtgatggttatgaggcactgccatctggtccggagctggcataaaatattagaagagtatggtttcgttttccctttcttttgtttttgggtcatgaacattttttggtttcgtattttggtttttaggacactaacctttcgaaaaacaagtagatgaacattgacatgaatgcctaaccaagctactttttttacatttgggcattacccggcttgctctgctgatttcttctgctagtgtagtgtgcttttaatgctgccattccttaccgcattctaattctatgtagttttgtgaagacttgataccatacggaatttccaggcatgacaaaacatatatgggtgttggaaaagaaatgattgaaggcaataccaacaacagtcctctcctctttgcgcactgaacgcaactagtgtatgtttatctgtttatgtcagaaccagctgtttgaggagcatttttatttgagaacagttccaaaacttttgcaattcgttacttcacataaattcatttaagagtcttgttgtgcaaaactcaaaaaataaaaacctttcatgacaagggggatgctcatgctatctgatactccacatattttgcactcctgcatttgagcagtgtgtggaccatttggattgtaatacaaagatctcagcacttgctacatttataatgacgttcatttttgttgtacagaaactagttagtcatcgaacttcatagttcactggtgcatttttgtaatgtacaatatatttttttgtaatatacttttttacatgtttatgtaagaagaacatagctttgcccttctatgattttcatttgtgcaaatgtcgctgaaattttggcctttgtgggcatactacaaatttaatctttttagtttctagttttaagaatttttttcacagaaaaatggagttcgaagtattttcggaaaattagatatgatcactttaaattggatatgatcaattctcaaaattatatatgaaatttgatcccgtacaattttaaaaatttagggatcttttgttttaaaaaaaaaaaaaaaaaaaaaaaaaaaaaaaaaaaaaaaaaaaaaaaaaaaaaggaaaaa

SEQ ID NO: 1738 - DNA, 574 bp, Glycine max
  Clone ID: PAT_MRT3847_101569C.1
ggaaaaaagggcgggcaaattttttctttaacaatcaaaaacaaggcccttagcaggttttcaagccaagcccctcagggggtttataaaaatccaaaaactcgacccccccccacaaaaaaaaacctcaaaagcccaaaaaagagcttaggcccccccaaaaagaaaccccccgggtttaaaaaaccgatttattcaaacccctttttttttggtcgagcaaaacactaaatcgcagttaaacaaaaacatccgggaaaaaggggaaaacaacctcctttgaagaaaccccttaaaaaaacttttgggcccccaatcccaaaaaatcaaggccccgggggctgtaccccccctcgggggcgccccaaaaaacaagcttcaaaaagtttttattaaaggcaatccccccctttgcaaaaaaaatacttgatctgctttcccccaaaaaggcgggggaaaccacattatttttaggggaaccaaaaattcccttaaactggcccttggattccccctggaaagcatttttaatttcatggaaggaagcttttttttccagccccacggggggggc

SEQ ID NO: 1739 - DNA, 385 bp, Glycine max
  unsure (1)..(385): unsure at all n locations
  Clone ID: PAT_MRT3847_10156C.1
atgataggttagcggcggttccctatgagcgttcgttagcgacgatggcgttcatccccgatccaggcgagttgagcgagctgactcaatcgagcttcgacgagttccacacgccaaacgcatctgtaagaccaggtggaccctcaactgaaaggagctgtacgacaacttcttctccctagagcaagacctaaaccacaagtccgaagccctcaagcgcacgattcacaccctagacagcttcaccaaggactccctccgctctactcgaccaacgagaaacctctctcgacgccactacccagatcgcgctccgtacgcttgacacgcgccgaaccgctgctcttttcgccctcctccatgactctgacgacacctnccccga

SEQ ID NO: 1740 - DNA, 127 bp, Glycine max
  Clone ID: PAT_MRT3847_101570C.1
tgactagttctagatcgcggcggccgctcggatcttagaactagtctagctgcttcttcagctagctccgttcgtcctcgatctcattctgattctcccaaatcttcattcacaagacaagatgggt

SEQ ID NO: 1741 - DNA, 299 bp, Glycine max
  Clone ID: PAT_MRT3847_101571C.1
tcgtaaattgcgatggacgactgtcacaggctgcattgctttcataccgggagcaagagcagtaggttctaggttctagagaattactcaatctcttcctacttgttggtgtacgatttcttaagggaaagaaaatcactctctgtgctggtcacagacttcgtgaatcattttcttttccactcttagtttatttgcttgaacactctcctatttgatataggacttcgtgtcagatttaaactttttctgtttcttccctaagtttttttttaatttcaagtttaagttgttgaaat

SEQ ID NO: 1742 - DNA, 834 bp, Glycine max
  Clone ID: PAT_MRT3847_101572C.1
ggacattgagtgttccatccatcccttcttcatcttctacttctatctccctacatactcattcaaacagacatgaaaattatggaatcattagctcttatcttctacagtactcttgttttagctacgatttcagttccagcaactaactccagaatcatccatcaaaaaaacaatgccaatctgattgaagaaacttgcaagcagacaccccatcacgacctttgcatccaatacctctcctccgaccctcgcagcaccgaagcagatgtgacagggctggcacttattatggtcaacgtaatcaaaatcaaagcaaacaatgcattggacaaaatccaccaactgcttcagaaaaaccctgaacctagtcaaaaggaaccactgagttcgtgtgctgctagatacaaagcaattgtggaagctgacgtggcacaagccgttgcgtctctgcagaaaggagaccccaagttcgcagaagatggtgccaatgatgctgctattgaggccaccacttgtgagaacagcttctctgctgggaaatcgccactcaccaatcacaacaatgctatgcacgatgttgcaaccataactgcagctatagttagacaattgctctagtgacacttactccaacggaggggatgatgcaatttaattttcgtaatatcacattataattatattttcaattaacacaacataaaatcttgctctcttgttggtctcttctgtaatggaaacacaactgcttttgccccttcacaaaaaaaaaaaaaaaaaaaaaaaaaagaaaaaagtattagtatgtattaaaaaaaaaaaaaaaaaaaa

SEQ ID NO: 1743 - DNA, 584 bp, Glycine max
  Clone ID: PAT_MRT3847_101573C.1
ctctttcaaacaaaacagcaactttttcttctccttctccttcttcccccattttttctcctcactctccttcttctcctctgtttctcgttctttcgttttcgtttcttctcgcgggtttttgtgaagccaaagcgtgcaagaaagacagaatccgagagaccgattttgttttttttgctgttaattgcttcgtggggagtgtggaaataaaaggaggaaaaaaaattcattaatattcatattcattcgaattaattgcattaattttgagagaagaaggagaaaccaaaaaaggagcggtttttgcgatctgggtgtgcgctgttttttggcgtcattcgatgataaagcatcatcaccaccaccgccaccatcatcatcatcatcatcatcatcatcatcatcatcatcatgtttcgtgtcatgggttttgctgatttgaatcatcaccactcgccaccccgccagggctttgttgttttgtgcagcgcacgcggcttgtgttgtgtgaggagcatgcgttagaagttagaacaacaacaagtgttgttacttcacgatgttctatgttgttgttttgc

SEQ ID NO: 1744 - DNA, 994 bp, Glycine max
  Clone ID: PAT_MRT3847_101574C.1
ggataaaatgatgagtaaattattttgacctaaaccttaaccttaacggctcgagaaaaaataaattattttgaaaccctaggttggagatggtggtgggaggaacagcagatttcttctacaaagaagctcaacggttagggtatgtggctcgctccgccttcaagctccttcagatacagaaccagcacaagattatcagccctggctcctccattctcgacctcggctgcgcccccggcgggtggctccaggtggcttgccagagcttgggtcccttccgcggcggcggctccgtcctcggcgtcgacacaaagaaggtcaaggtaccccctctccactgcgattctagggttcagaccatctccgctgacgtcaccacgctcccccaccagcgtctaaaagctctttctcccaaggagaaagggttctccgtgattctctcggatatgtgtcccctggtttctggaatcaccaccaaagacgctgctttgtcgtttgagcttgggatgcgtgccttggatttggctcttggcagcagaattcacctggagccaagtgattgtgtaggagtcttgaaagttggagggcaccttgttattaagcttctggagagtgaagatgcaaaaggtgctttcttgctagcgtaattgactctatgatgcaatttctatattgttcaattcgattgcttttggttgtattgaatttctttgaatgtttgttgggtgcagaaatcaaccagatttctaaacccttatttaggaagacttcgtggctcaggcctaaagcgacaaggccttcgtcaagagagatttatttgatatgtcaaggcttaaagccagacgctatgacatagataacacttccttcttttagtatgtttgcttgcacatgtaccatttgatggatgctgattgtgaaattcattatttttctagctcaaaaaaaaaaaaaaaaaaaaaaaaaaaaagcggccgctctagaggatcca

SEQ ID NO: 1745 - DNA, 270 bp, Glycine max
  Clone ID: PAT_MRT3847_101575C.1
actaaaccaaagcaacaaaacgcatcaaattcctgaaacacgcgtgcgcctaagaaaaatgtaagcaggggttccgactaacccaacagagtaatgcacagattagtaaaagcaattttgcaacagtcaataactaacccatttctgggaatcataattactacattatggcggagactgcatacttcgaccgaaaacaatgcaacttagactccaagacacttgactacagaacatacatcatacacctaatgtcacgaacatcacctg

SEQ ID NO: 1746 - DNA, 616 bp, Glycine max
  Clone ID: PAT_MRT3847_101576C.1
cgcacactttcttcacaccattccgtttctccatttcccagcaatgtcacaacacatgaattcttccgcatccaccactctcctcaataaccccatcaaccaaacccattatgatggattcactacccctctgcttcagcttcggcttcaggttcgggttccattcctccgcctctccgctgatttccctctcctgtggctgcgcacaccaaacccctccggttcggttgagtccacaacaagggtcatcgcaagaggaggaagagtctgttttcctttaccttcaacctatttccagcgaaaaccacttcgaccgtgtcctcgccaaggctcaaacgctcgacgaaggtgtcgttgtcgtttggaaaaaatattttatgctaatagtggaaatcttattggtttgccattttaactaaaaagcaacccttgacacactaggtcctactccctgctatgacgaacccattctttttattgggtgctggatgcattttatatgttgatcaaatatttcgtggctgacgactgatggagtgatctcaggtgcgaatccaaaaaaaaatagaaactgcggcgggagtgggaccctgcagtgcagttatgtagtgctgct

SEQ ID NO: 1747 - DNA, 492 bp, Glycine max
  Clone ID: PAT_MRT3847_101577C.1
gggggtagaaattgatcatcagtatactttataaataacatggctgcaaaataaaaacaaataatatacttaaaaaaaatttaggaacaagttcatttcacgagtttaggtaatgcttgaattagtgagaaaatgaaaaaaaaaatctggctgaatcataataaaacaaaatgttttagaataaaaataatattctattgtttgaatacccattttataatgaaattgaacaaaaatgcattgcataatttgaaaaaaaaaagaagactaaatagaatgattcacaactttttaattcactgttgaattatatttatatgaatcaacgggattaaattggaaaagcaggcattcttggtagggttttgcttattgaattttatttcgagatttctccatcctaaatctacttaattcaacacgctaaaactcttaagtatttcccttctgtcgtcttctcgcagccgtcggacgcgtgggcggacgcgtggg

SEQ ID NO: 1748 - DNA, 625 bp, Glycine max
  unsure (1)..(625): unsure at all n locations
  Clone ID: PAT_MRT3847_101578C.1
tcgacccacgcgtccgtacggttgcgagaagacgacagaaggggtaggatttgtctgagattagtgttgttagaaatgtagagtcaaggtgaagaaggtagtaactattgactctatattttggtttaccgcttttaatatttttcttttttagtttgatcttgttttgctgtatcattgcgataggaaccaatattatgcaaatacagacgactatttctacaatacgcagagtacacagaactttcacctttagttactctaacatgtttgcgctcctaatcacactgataccactatattgaaacaatgtctagattctttcgtataccacagaaacacgcaatcaactattctaatccacaactaaagttgaaatcaattgttgaggtatgggggaaggtcgtcaaaagttacatccaggagggttttcgtttttctatccctaacaggaaatctttgccgagttctaaacttctgatggcggcttggaatatattggaaagacatcaacttccaatcgtttccaaaagcatgatagaacgcagatataatatgtngagatatttaataaaaaataggataatctaatattggtttcaaaataaaaattgatacatttttt

SEQ ID NO: 1749 - DNA, 332 bp, Glycine max
  Clone ID: PAT_MRT3847_101579C.1
gctggttcacattcttcatatgattgtcctcaagaggacgatcaatgaaaactcaataagattgatgtctgattgagacaaatattagatgctcaatacaatgaggtgcaagctcagatggaaaaaaatttgtttaaattgtctctagatgatgtggaaactcctaaaggttccatgttggatctgaaaattactcaatctaaaattgcactttccaagaacacagttggaggaaccattctgtgtactgatctattgactaatattgtgacaaatggcaattgtaaaacaagtgttgatttgcaccgcactcatcgtattataggaatgat

SEQ ID NO: 1750 - DNA, 150 bp, Glycine max
  unsure (1)..(150): unsure at all n locations
  Clone ID: PAT_MRT3847_10157C.1
gcaaggnggatgctggagcagatctgattgtcactcagttattttatgatacgganatattcctnaaatttggggangnnnggncgcnnnattggantaacgtgcccnattgtnacctggantaatgcccattannanttacaagggcct

SEQ ID NO: 1751 - DNA, 1163 bp, Glycine max
  unsure (1)..(1163): unsure at all n locations
  Clone ID: PAT_MRT3847_101580C.1
agatcgagcgcgtcaacgaaatccggttcttcgagctaaacactggagctaatatcccttcactagggctgggaacttggctggctgatcctggtgttgttggtgatgttatagctcatgccgtcgaggttggttatcgccatattgattgtgctcaaatttacggcaatcaggaggagattggtttagcattaaagaagttatttgaagagggtgtagtcaagcgagaagatttatggatcacctctaaactctggtgtacagatcatgctccagaagatgtaccagaagctctggacagaacattgagagacttgcaacttgattatatagatttataccttattcactggccaattcgaatgaagaagggttcagtgggctttaaggctgaaaacattgtgccatcagacatacctaacacttggaaggcaatggaagctttgaataaaagtggcaaggctagagctataggtgtaagcaatttctcaactaagaagttgggagaattgcttgagtatgctcgtgttactcctgcggttaaccagtcagagtgtcatcctgcatggaggcaggacaagttgaaggccttttgcaaatctaagggtgtccacttctctggatattcacctttgggttcccctgcctggcttgaaggtgatttccttaaccatccagttataaatatgatcgcaaagaaattaggaaagactccagcacaggtagctcttcgatggggactgcaaatgggccatagtgtgcttcccaagagttctaatccagcaaggataaaggaaaactttgatatttttgactggtccattcctgaggacatgcttgataaattttttgagattcaacaggaaagattactcaaggctagcttcttccatgaaccaaatgggggttacttaccagaagacgaattgtgggatgggggtatatgaaaagtcggttgaatgattagttaaaaaagtggatggaataaaagaaacgcatcttctgtttggggtgttaggctatatgaaaatactcttatctttagctatgtgcatcctttgtcactatcagtcttttaagttgcaacccttcaactgaaaaattaaaaattttcatgtatgtctttccttaattctcattgataaaaaatcagaccgctntag

SEQ ID NO: 1752 - DNA, 975 bp, Glycine max
  Clone ID: PAT_MRT3847_101581C.1
cgaaatccggttcttcgagctaaacactggagctaatatcccttcactagggctgggaacttggctggctgatcctggtgttgttggtgatgttatagctcatgccgtcgagtttaggtcaaaccacaaccaaaccaacaccaactagctcgaaccaccggccaaatacaatcgtcgaagccaacgtagctgaacaccactgcagtggagaaatctacttttaacccaagcagacgcagacagtgatcattaaaatcctagcatatgaagatggtggtcatcgaacctgagagagaactcaaaccctcgcagaacatattttggggatttctaatttaggggttgcataacatgtgagggtgtagcgaaatgagggatttcagaactatgaaggataattttgatctttcacaaacacacaaacaattaacagattcggtaacagatgcgaaagaaatgtattttaaaagaggagatgtgcatgttggttatcgccatattgattgtgctcaaatttacggcaatcaggaggagattggtttagcattaaagaagttatttgaagagggtgtagtcaagcgagaagatttatggatcacctctaaactctggttttatttcagttccaaattaattatcttccttcttaaagttaaagtgatggtagtagaatcatgcattaagttagtctttaatatctagaactaaaggattctctatacctgaagttaagatgatggacaggtgtacagatcatgctccagaagatgtaccagaagctctggacagaacattgagagacttgcaacttgattatatagatttataccttgtatgtgttactgctcgatatctatataatcttctataaatgtttagtatgtgggttatgtctggatttaattagtgtcaaaatctacaatgataaacaatatctaagatataacttcagataaagttttgaatttcggattt

SEQ ID NO: 1753 - DNA, 196 bp, Glycine max
  Clone ID: PAT_MRT3847_101582C.1
caattcatatatgaacattttttgcctcctttttttttgtttttgaaaaaatggaattaggccctgaatttcttgcttttttacttgggatttaggaatgcctcccaaaaggcttttaacgaccatttttatgtaaaccttcgagtgtctttgtctcccacctggggattaggaacttttttttgtatgactaaat

SEQ ID NO: 1754 - DNA, 349 bp, Glycine max
  Clone ID: PAT_MRT3847_101583C.1
gggttccaaaaattaggacaaaaaaaagagcgtcccttcaacacagttgaaaatggtttgcaacaaaacaactcaatggggggaaagagaaaacttttttgagcattccccataaggttcttgaatttagagggggcaagagggatacatcctttatatgggctactggaaaggcaatatgatccaaaatcggtatgatcttggacactaaaaaggggtccccttaggggggtggacaaacttggggttttgtgaaacccccatttcctttttgaggtgggcaagaataacttccatgggaaacccccgtggccaatttgcaagaaaaccaaatttttttggttcaacc

SEQ ID NO: 1755 - DNA, 1490 bp, Glycine max
  Clone ID: PAT_MRT3847_101584C.1
ggctcgagctgttactaggcggaggcgaaggccagcattgttgatgcggcggtggaagctatgctcgcagcacattattccctttcctctctctgtcaaatattccatttcttcttcacgaaattaaaaagcctgaaaactgaccagatccttttcaaacactcttagtcctacgtcgtaccaaacacaaactgaaacaataaccaacgacaacaacgaaatctgcaatggcccacttaatcatacaaccggaatcctcctccgattcgttcttccccggtggtctcttcctccaccctcacacgcttccttcatccttcgcttccttcattccttcagaccatgtaacagtatcatgttttttttggaggcccaaaacaaggttgagggtcgaagagaggctttgcggcggtgcgttcttgtcgttgagtttgtcctttaacggaactggtgcggatcagaggtatggtcgagaatcgggtgaaattctgggacagcatcacaaggtggaagatgatggtgtgtgtcaagaagagaaagagaaagagaaggttgggctcaatggatcgggtgctatgaatatgaccaaacatctttgggccggtgctgttgctgccatggtttcaaggacttttgttgcgcctctagagagacttaagctggagtacatagttcgtggtgagcagaagaatctttatgagctcattcaggcaattgcagcttctcaagggatgagaggtttttggaaagggaattttgtgaatattcttcggacggcaccctttaaggctataaatttttatgcatatgatacgtatagaaataagctgacaaggatgttggggaatgaagaatctactaattttgagagatttgttgcgggtgctgcagctgggattacagccaccttgctctgcttgcccatggacactatgcacatggatacgatcaggacggtaatggtagcacctggtggtgaagccttgggaggtgtgattggtgccttccgccacatgattcaaacagagggcttcttttctctttacaagggtttagtaccctccattatcagcatggcaccttcaggtgctgtctactatggtatttatgatattttaaagtcagcatatctgcattcacctgaaggaatgaaaagaatccaacacatgaaagaagagggtgaagagctgaatgcactggaacaactggaattgggtcctgtcagaactttattatatggtgctattgctggttgttgttctgaagctgcaacttacccatttgaagttgtaaggagacagcttcaaatgcaagttcgggcaacaaggttgaatgcactggcaacttgtgtcaagattgttgagcaaggaggtgttcccgccctctatgtaggacttattcctagtttattgcaggtgttgccatcagctgctattagttattttgtttacgagttcatgaagatagttctcaaagtagaatcaacatag

SEQ ID NO: 1756 - DNA, 1013 bp, Glycine max
  Clone ID: PAT_MRT3847_101585C.1
cattcattaataatattcccatgcatcacattgagcgcttccaaatataatttaacacacttcaagatatcaccgacatgcatatccaagtttattttccatacaaaggaaggatctacataactaagcattcttctcgtcaaacttcacaccgattttattatacatataagcacttatccaaaggtcaagcccattattttttagtgcataacttttagagctagctatgctatgagaagatgaccatccatctcttgtttcttgctttctttcttcaccatgtcacttgctgggaaaatcaccactgaaatcggggttcatgcaaccgctacaaagtggttcaacctcttcgcaacacaactccatcatgttcaaaacctaactgatagagtgcatggaaccaagctgcatcaaggtgaagactggcatcacaacgagacagtcaagcactggacttataccatagatggtaaggttacaacatgtctggagagtattgaatccattgatgaacagagcaaaacaatcacctacaagctcttcagtggtgacattgatcataattataagaactttaagttcatctttcaagccattgatgataatgatcatggcggtactattatcaaatggaccgttgaatacgagaggcttcgtgaggaggttgatcctccatatggccacattgaatacctgcacaaatgcactaaagatattgatggtcatcttctcaaagcatagctagctctaaaagttatgcactaaaaaataatgggcttgacctttggataagtgcttatatgtataataaaatcggtgtgaagtttgacgagaagaatgcttagttatgtagatccttcctttgtatggaaaataaacttggatatgcatgtcggtgatatcttgaagtgtgttaaattatatttggaagtgctcaatgtgatgcatgggaatattattaatgaatggatgtttatgattttcgtgagtaaaaaaaaaaaaaaaaaaaa

SEQ ID NO: 1757 - DNA, 184 bp, Glycine max
  Clone ID: PAT_MRT3847_101586C.1
tatcaaggtcgacaagggtttggtgcccctagctggttcaaacgatgattcatggtgccaaagtcttaatagtcttgcgtctcactcagctacatactaccaccaaagtacccatttcgccaaataacgtactattatgatcatccccaacagtccctctactctaacaataaagaaagctacc

SEQ ID NO: 1758 - DNA, 159 bp, Glycine max
  Clone ID: PAT_MRT3847_101587C.1
ggaacccactacctcgacgcagggcaacgacggtgccagtattgctgccgtctcgacaggtgctttcgtggtcgccttggctgctaccttcttctaggcatagtcttgaatgaacattcattgtaggatcgttaaaagaacgtaaggtgccctcatcgc

SEQ ID NO: 1759 - DNA, 241 bp, Glycine max
  unsure (1)..(241): unsure at all n locations
  Clone ID: PAT_MRT3847_101588C.1
gnagaaggaggaagganagatnancgaggtttanattgctaggaagtgttatgananaaaaagattgattagagataaggaacatgtttgggttgaggttanaattgggaatgtggatgagaatggggtntacaatggnnatttatanaattttgatattttngttgttttaagggatcagggngatggtgacagtggattatatcgcttgtggcacaagaagaaaggtgaagttaaggag

SEQ ID NO: 1760 - DNA, 654 bp, Glycine max
  Clone ID: PAT_MRT3847_101589C.1
tgttttttttagactttttgttttttttttgggagaaaataagtaacttttttttaatattgagcactcaggaatcacttagtacttcccaccatttatatatatatgtatattcttcgtggcaattctatgcaaaaagggaggttttttcctccctttaactttctaattccccaattagatgttgaggatttcgaaattaaatcacaattgctattattaaaaagggacattatgaaactaccatgcgaggtgcataaacttatgggtgtcttaatgtggaaatagcatccaaagccccgatggggctgaggttcattgggttcatgtagattttacaacctgacataattcttttgcacagtaggcactatttgggcctttttttaagatggcgatgagtatggcatgcccaaaacgcctatggggctttataggggcaaaggttggaaagtggggtgcttagccccaataccatttgagggtccttgccccccaacaagctttttgggacctgaaaaacccaaaatggtggccggttgaggaaccgaaagtgttgggccatttctcccggggcttgcaaactttaaaggagggcctcttcccaatttctcctgggtgagtggggaggcaaccttttgtttcgaaattggg

SEQ ID NO: 1761 - DNA, 357 bp, Glycine max
  Clone ID: PAT_MRT3847_10158C.1
agcagtagattgctgatcattgttgagctactataatagcttgaattgctttttatgggtatcaagggtacgacatttggcagtcaacacgagatgactgataatcagcagcgagacattgttctctgaatgaagagagaacctggtttgaaaggatgaagatgacatcggactatagtagacggaactataatagggcgctatcacaaggatagtacaacactgaaccagtcactcaattattcgagaaggaaagtagaggcgattgacagtgcaggacatcctgcagggtgacgactgtcctcttatgctgctttggctagacgcttttcttcctccattctggctttgatgaac

SEQ ID NO: 1762 - DNA, 314 bp, Glycine max
  Clone ID: PAT_MRT3847_101590C.1
gaaaccgagtattattattattaagcttcttggatactgtttcgaggagagaagaaaacatgagcagcaaataaaagactgttacaacgaaagtggacttgaccttgtaaaaaagatggggggggaagaattttttttttttagaggggacttaaagggaagcaaggggtttggcccgaaagccccccttgggtgactttgagcaggtaaaaccctcagataactgggtggaaaaaaaagaaaagacccggttgcaaggccactccggtgtatggtaatccggcgaccaagatataaagagtgctaccgtgaat

SEQ ID NO: 1763 - DNA, 159 bp, Glycine max
  Clone ID: PAT_MRT3847_101591C.1
gcgacaatacttccgataaccacgaacgttacgcttttctcatacttacctttattcgatttttttagcaaatggtggctactatgatcagattctttccacagacaagctttctccccatattgcatcactgttctatctgccctaaatctctatata

SEQ ID NO: 1764 - DNA, 326 bp, Glycine max
  Clone ID: PAT_MRT3847_101592C.1
actacaaaattaagattgtccatgcaagaccgatgtggttcatatgataacacacgagcaactgttcgcagagttattttatccatgctatgccctactcatgccgcggacagtataatttacagtcacacgaatttacgatgcctgatgagttcgtaaagaacttgaaaagcgttaatattgagaatctatcatatatagctctaccacgcattcaaaatggtctatcctggacaactaactatcaaggttgcgcccatggatactgcaggcggatggtgcctcttaacatccccttcactaccgattcgtgttttccatagctc

SEQ ID NO: 1765 - DNA, 411 bp, Glycine max
  Clone ID: PAT_MRT3847_101593C.1
gtttagcccagctcaggtcccagaaatgatggcacctcacaaaggtttggcaagccactggtcaattttagatctttctgagacttctttctcccaactttgcttccttaatatccattatttacaaaatttcatcaacagtgctgaaagtggttcagagggatcttcggatgctagtgatgagaatactaaccaacaggtgtactgtttatcatcagtacttccgctctatattgttaaaagtcaattattaaatattaatatccttcctaaaatctacttgatccgctcatcattttatacttacttttttctgttcagttttctcagtaaaagtacttgaaagaactgggtcttttttcctttctgtttcttgcaatctcatgagtcatgagttgtatttcactgtag

SEQ ID NO: 1766 - DNA, 465 bp, Glycine max
  Clone ID: PAT_MRT3847_101594C.1
ctgcttgggggggggggggggggacgaggggatagaaggtagaatagcattatgttttaggccagggggtgggaaacgaaaattataaatataggcatagacatgatacgcatagggcacagtcaggatactgcgcgtatatgagccaccaccattagcctcaaactgtaaacagatgagctgcgataccggaacatggaacttggtggaggcgcatacagcctatatagaacaataaaagaggcagaaggcaaaacacaaacaaaaaaaacaagtgttgaaggacttccgtacaaaggtcggtttggcggtagacgcacaaaaagaggccgtatggacgcgacccaagaatagtggcggatgggtggtggtagttagtatttacaccccggcacaacaaagcggcgatgcagtttagcagccgccacaacctagaagtagtaggccgccaccataacacacggc

SEQ ID NO: 1767 - DNA, 177 bp, Glycine max
  Clone ID: PAT_MRT3847_101595C.1
aattcggctcgagaaacactggttccatgtttgcacgtaacccatgattcaaccgtataatgcacgccatggcaggtagcttcatgttcttggtgtacatgtgggtttattttcattcacctgtccaaaaggttagctgaatatgtttaactgtttatgctatgcatcacattgtat

SEQ ID NO: 1768 - DNA, 281 bp, Glycine max
  Clone ID: PAT_MRT3847_101596C.1
gatagtccgccgcatgcaaccacagttatattacgattccacttactgtgaccctaaggatgagttgtactagctgtgctgacatctataactttccaaatccattctcattcaatgcattagatcgaacttccaactgcgagagtttctctactgtgacatagccatggctatattcatcaacggatttgaacgtttggacacactgtcgcaaatacccccatgactgcttccactagatgataaccctaacatacattgattataggccttgacctata

SEQ ID NO: 1769 - DNA, 304 bp, Glycine max
  Clone ID: PAT_MRT3847_101597C.1
gaatgggcttcataacctacaagttctaattgctatgcgaggtgtatctttacttaaagttggtggaaaaatgatctattcaacctgctcaatgaatcctattgagaatgaagctgttgttgcagatgttttgcggaggggtggagggtccattgaacttgtagatgtctctagtgagcttccccaacttattcgccgaccaggtcttaatagatggaaggtatgtgacaagggcaagtggtttttctgttgcatagatgttcccaagcttcgtagaaatgtagtttttccctgcatgtttcca

SEQ ID NO: 1770 - DNA, 204 bp, Glycine max
  Clone ID: PAT_MRT3847_101598C.1
attcggtcgccagcgtcgacatgaagaaaatacacatacattctaatcttgtcattgagtagtatgaggctgcctaagttgcatggtggtgctggattgcatggtgtgtgccatgatgctgcacccatggcacaggccgaatcactgcggcaggtcccgcgcatgtttcgtcttcatatcttcaagcggcgaaaccgtccagcc

SEQ ID NO: 1771 - DNA, 665 bp, Glycine max
  unsure (1)..(665): unsure at all n locations
  Clone ID: PAT_MRT3847_101599C.1
tccggtcgccacgcgtccgtaccacatacacccgtacttctctcgtttcagtgcgtatcgctcactatttcggaacttcagttgaatcattttccacgttcggaaccccaaaacaaatcaaagtaaggcttcatttgttaaagtttgggatattctctgtgttttgacccttgagcactagctgtttgataaaataatccaaccattagtttccatttatgggtaagtaatgttttccaacccttgagcactatctcgacgatgattctgacactctttgacacagctgaacagagaaacagactcctcgttctagataaatagatgaatttccgttgagaacgttgtgaagttacgaaaatgctgtttctccaaaccactgtcttaactagacgcttctcacctttttgtgatgctactttgcatccattgtcattacttaatgttcaaaatcctatgttggaatgtgctcacagtttttctcattattcccctgtacctagcaaccgcactgtaaagtctatatcatgctctgtttctagaaagtcccattcaaaacctgagcctgaaccacccgaacctgaagctaattcgaaccanagagcanggcctaaggcgagaagcagaagtcaccaacctaaagatgtggaatccagtaacgacga

SEQ ID NO: 1772 - DNA, 359 bp, Glycine max
  Clone ID: PAT_MRT3847_10159C.1
accggtccgaattcccggtcaccacgcgtccgccacaccgagttaaattgacctacttggcaccttaccacccttttctctttctctttgcataccattaccaacactcaaagcagcaacaacacgccttttttctttcctctctctctctctctctctccattctgcattttcttcgagagtgggagggaaaacatggaaaccaccttggtttccaaaatgcaatttgcagcattcttttgtttggcgttggggttggcgtttcagcttgagcagggtcactggtaggggacctacgacagaaaagccatgctgatgagtggccaaaggagaatgcttggttgtggctgtatacatgg

SEQ ID NO: 1773 - DNA, 748 bp, Glycine max
  Clone ID: PAT_MRT3847_1015C.1
aattcggcaccaggggtaaccttgacattctagtgatggatatgcctcctggcactggtgacgtccagatagctatgtctcaaaatcttcaattatcaggtgcactgattgtttcaactcctcaagatgttgcattaatggatgccaggaggggagtaaagatgttcaataaagttgatgttccgattttgggaattgttgagaacatgagctgctttaagtgtccgcattgtggtgaaccttcatacatatttggtaaaggagggactcaaaggacagcctccgaaatgggattagaacttttaggcaagataccactggaagtggagatcagagaagcttgtgatcaggggcaccccatagtgttggctgcacctgattcagtagtttccagagcatacggcgaggtagctgaaaagcttgctcagaaactcaaggaacagcagttccaaccggagataatactatgaagtgctgcttttaaacatgttactccgcgaccaagttaccagtacattatgcatccttttatttaataaaagaagacctagctaattgccctgatactctgtatacgggatctgacttcttttaaattgtctaaattgtggtataagatataggcccggcccaagattagtagatatagaacttttggattgaagagttatagcatagctaaagcaacatcttgtgaaagagaatgcactgagaaatctatgattcttgaccaagtagatgtggtagt

SEQ ID NO: 1774 - DNA, 250 bp, Glycine max
  Clone ID: PAT_MRT3847_101600C.1
gtaccccccacccaaaaagaaggtttaattttttttgaaaaaatggggggatagactaaagggggcacaaacattttttggactaaagcaaaaggatggtccctaaccgggggaaaacataaaaaggtttgtgacgggcgaagggccataactggtacctcttccaagaaaaccattcccttaaaaaccgcacccaccaaaatggtgaacactgaaagggtccttcaacggtgttggggatcatctgaaa

SEQ ID NO: 1775 - DNA, 304 bp, Glycine max
  Clone ID: PAT_MRT3847_101601C.1
ccacgcgtcccataaggtcaaatccttacaatggcttttcatatttatcaacgaccttatgttttgagcgtcatatgcattgctatgattttcgctgcaggagtagtaacttgttttgagtctccactactaagctgccaggagcgatgcatagatgatccaacgtgcgactttatctgccataaaaagggttttgtcaaagggggatcttgtaagccaatcattctatattttctgtgttgctgtatgaaatgagtaatctccatgtgtgaaaaatagaataaaactattggagttagtaaga

SEQ ID NO: 1776 - DNA, 296 bp, Glycine max
  unsure (1)..(296): unsure at all n locations
  Clone ID: PAT_MRT3847_101602C.1
gacctantcctccaaaccctctcttcttttnccccaatcctcttcgccggngcggcgaggaatctggaggaaaacctcgctcaggctgccatggcgaacgcttttctccttcacggcggtgactgccccccgcgcttcaangaattcactgcccgccgcctccgtgacancttccgcgccatccttcaaatgggtgtcgccctcccgtccggcggncaaccgccccttatcaacgtgcggagactggnangtcaatttgcaaagccgagaggcgattnnatttgagagaagaatgg

SEQ ID NO: 1777 - DNA, 517 bp, Glycine max
  Clone ID: PAT_MRT3847_101603C.1
agctcggaggcggctcgaggtactttctctgcggtcgcgtgtctcacaccacaaacacactgaaagtacaattttcttgtagttacaaaactcaaacacacacacacacacacttcttctttatgtctatggctggtgagcaaggtgatagatgttcctccatcaccataccccttttggatgatgaaaaagtgcaccaagtgaatggttcagaagaggctttggtggccaaaacttgtgatctacacacagctcatgtgggtaacacctcctttttcaagacctgcttccatctaattaatgccctctcaggtttgttttgcgtgtcctcttttctctttctttcactatcattgttaattaccatatatgatgcaccttttcttgctttctttttcctgagttttgctcctttttggtatcttgttttttttgttcaactttactcttctttagcttcactatttggttctgtctttgaggattaaagatctcgttgctacacaaaatgcatgct

SEQ ID NO: 1778 - DNA, 435 bp, Glycine max
  Clone ID: PAT_MRT3847_101604C.1
gacgcgccaggcgacccgacaattgatgcaatagcttagttagaattactcatgatcttaattaatggctgagacgtctcatctaagagattcaatttataacaataatgttatttcaatgagagaaaaaaaattatgcaataacagtataaaattttttatataatcgttcaattatataataagtttattaacttttaacataactatcttaaagtaattcaagtgatggagttggatgagtcggataagaaggaaaaatacatggccttaaccgtagaggagttcaatttaagattgaaattgaagaggaattttggaaagtagcttgaaaattggaatctcttttaagataaaagacaggaaccaagctatgagggagggtgatagtaatagaaagtactttcacttgactcttaaaaaaactagggaccc

SEQ ID NO: 1779 - DNA, 395 bp, Glycine max
  Clone ID: PAT_MRT3847_101605C.1
ggggggcgacgacagagttatttgagcaagtagcaattactatattttacaagttaattaattataccaaattatggctggacagtttttgaaggcagcaggtggaaaaaattgttatttttttagttaaaggcaaacaagtaaacaagcccacctgggcaaaatatccaatgtttgactaaattttgagttagagattagttgaatccatctaatgacagggaatttctgggttttagattttttaatgatccaatcatgaagttgctaggaaattttagggtactttttgtaattggcttctaaattaaacatcatttcttctcataaatacactaatcaatataccgggaatctggggccctaaattttatgttcaatgctacttagcatac

SEQ ID NO: 1780 - DNA, 655 bp, Glycine max
  unsure (1)..(655): unsure at all n locations
  Clone ID: PAT_MRT3847_101606C.1
gtgaacccttcagaccgcacttaatcgcggactgtgggtcggttggaacttgtgctccgtttagattaaatcgaacgacggtagagcgccagctctgcctggatttttgatcttctcgatctaaccaacacatccaaaatgttcaagaatcacttggacatgatcggccgcaacgagccgatccagaggaaggccaaattctggcaatcctacgtccgctcacttaaaggaacagacgacatgcgcgcccccgacccagtgcactctaggccacgaggcatcttccgccccctgctgtctgagctgcccgacctgcacaccaccacctggccctacaaatccatctacgacgaccccaccgccgccaacgagcgcatccacgtgcccggctaccgatacgtgcccgtcagccgggagacgtacggcatcagcccccgcaacatctacccgccgtcctactacgaccgatacaggaccggtacgtactaaggagacctaccacctngacgcaccgcgacgccgcccggtcccaccaccgcacctggggcgccgtgcccgccacgcccgccacgccacggcctggcgaaagctagactgaaccgtacatgaattgagcgggaagcgccgtgccgcgcgcattttgagacggagaacg

SEQ ID NO: 1781 - DNA, 1751 bp, Glycine max
  Clone ID: PAT_MRT3847_101607C.1
gcaaggtgaaagacgacggaagaggaaacaaagcaaacgaacgtcgcagagcgaaagctaacgcactgcgctgagcaaaagcaagatgtaacaatgccattggcaacgttcgattcccacttatcttcctccttacacaccttcctaaacacagtgatcgcgctctctccactcccttctcaaatctaacgtccagagaccttgctctgctttccttcctctccctctccctctcaggactatcctccgccatctatatttgtatctcaggacccaaggattggctgaaagagcaaaaaaagaaggcctccaagtacctattggcccccgtagaaacaaggcgccaaatccttcgttcggcccttctgatgcttacggaaacttacgccgctcagcccgttgccgacttggtgaaaatggagcagctcataatatatggggccaggaatagcgtcgatgcatctcggaattctttcgtcacgatccaaaccgacaccggaggatacctattttccatttgctagtttacaatgcaattaatgtggatgcatctagctaaggacatgagtaaacttgaatgccgaagctttttaagataatcatatatgagtgatcggcccgttatgtggagcatcttgataaaccaaccttcaacttgcatcagatagcaatcaaaagcatgatgcaccttcatctggataggattgtcagaaaccatacctgatctggaccaatttgagcaggtaataagggttagccttgaaacctaaatctacatgatagcctaccctatttgataatctggcatgattgctgttaaggaacgttgaacgtttctattggtgcaagcaataaatttgtgttatcacaagtgttctgttagcagcagttttctgaatgctgtgaccctcaataaatgcttttgccttagttcaattaatacttaatatttgtcgccacttacaatctgtatgttatacttctatattaatcagtcattccttttcaaatgcaattaatcctctgagtcaattaacataggaattgaacaggctcttgatagttacttccttttatttcagctgcttgtgttcataaggatttcactttggacataatatgctgggagtcgtttgaggagtccttagccgcttgtaaaatagtggtttttacatccaagacttgtggaaagtcaacctcaaagacatcgctgtccttcaagcaactcaaacgatatgccctcgtgtccattcctgcaccaaggagaacaacctgtgcttctctgccattagtggaattaagggcatcttctagtctagaatcaaaccaaagggttcgaacggcaagaatgactccggaagtttcgcgagcattgttgagaatgtctttcttgatctttttcatggaggtttctcaagtaagtctcccctgccagcaagtcagccagtggatcatggatggcatgcttccacagagcccttcccgcagcggtttggcaagctgacctttgaagaaaatcccattctttttcgatattagcatggatttctctaacagcatcactgttcaacaagtctggaagcttcagttcttgccctgcttggtcctcagacaacccatttactactacttctttatctgacatgatcgtgtgttacacaaaatttaagggagtttgtgaagaggataatgcatgttgtttatatatagagaggagtttaaagatttgcggacgcgtgggcggacgcgtg

SEQ ID NO: 1782 - DNA, 1074 bp, Glycine max
  Clone ID: PAT_MRT3847_101608C.1
agaggccagagagtgtggtgtgtgtgtgtgtctctctctttctctgcttttgagtaattaaatgagagcaaaaatgacgctcaaaacagcggcggtggctgtggctatagtgtgcatttctgcctttagcatcactgtggtggctgaagatccatacaggttcttcaactggaatgttacatacggagacatttatccacttggtgttcgccaacaggtctttgattctctcttctactttcatctcattcattctaaacataataacatactatgtgtcttgctctcacacacactcacacaaacagggaatacttatcaacggtcaattcccaggtccagacattcattctgttaccaacgacaacctcatcatcaatgtcttcaacagcttggaccagccatttctcctctcctggtacttactttacatttgcaattagttttttttttttatctttgagaattgaagagataatacatatgctcaaccaattcaattaaatcccatgatacattttcaatccgattctaagcatcaaatgaataattagttaattcaacaaaaaaaaaatgaataattagttatgctcatgcttacgttaaacttttagtttttcttaattaaagattggtatgtgtgaatgtgatgttgcacgtttagcagtacattttggatgtttgttgagtcacatgacctgcaactggaaagtgccaactatcaaatgtccacatcctaccccttctagggggcatgggtcaacccaccaattctgatttgcggacatcaaaccagatcttaaataatatatataacagtattttaacctctgtattacatagaacaaatatttatatttatataactaaaatttataataaataaatattttaaatatataactaaaatttataataaataaatattttaaatatataaattatatcttagatttatgacaaatactagtactttatattgtactaagatgttatttttggttactgataattttttttaaaactattttaaaatttaagttggaattaaacatgtttatgactttgtgtgct

SEQ ID NO: 1783 - DNA, 129 bp, Glycine max
  Clone ID: PAT_MRT3847_101609C.1
tcccgggggcagcacgcgtgcggtgctcacttacacgagaatgctcctgggagggcgtaggagatacacccaacgtattactgaactgtgtgactttgcctatccacccaacaatgggcctccctgaat

SEQ ID NO: 1784 - DNA, 521 bp, Glycine max
  Clone ID: PAT_MRT3847_10160C.1
ggctcgaggttaaattgacctacttggcaccttcaccacccttttctctttctctttgcataccattaccaacactcaaagcagcaacaacacccttttttctttcctctctctctctctctctctccattctccattttcttcgagagtggtagggaaaacatggaaaccaccttggtttccaaaatgcaatttgcagcattcttttgtttggcgttgtggttgggttttcagcttgagcaggttcactgtagcgttacctacgacagaaaagccatcctcatcaatggccaaaggagaatccttttttctggctctatacattaccccagaagcaccccagatatgtgggaagatctcatttacaaggccaaagagggaagtctagacgtcattgaaacctacatcttttggaatgttcacgagccttctcgtggcaattataactttgaaggaaggtatgatctggtgaggttcgttaagacaatacagaaagcgggactatatgctcatcttcgcat

SEQ ID NO: 1785 - DNA, 1757 bp, Glycine max
  Clone ID: PAT_MRT3847_101610C.1
tttttaggaaaaataatatatattctatcaacgaataaaaatataatgtcgtacaaatatgcacaatctaacaataaagtaattcgttttctgagttctatgaagtaagaaatgctaaataaatattgttagctaagcagccaacatcatgtatattgtgatcaagggtatagctattgggcacaggcaaaccaagtacaccagaaatggctaattataattacgcagttgatcaaaaccaaatttacagattaaccggtccttccaaaaattctagattagaacagcagtttggtttgtcgttatgttatttctagtttgcttttagaaccacatatacactcaggatatggattttcataaaagggctcttcagtcctaaatcgtgctcggcctttaatccccggtagagaaccgtgccttttccttggagctccttgcctgttcttgtgcatgcgctgcaccatatttgacagttcccttccttctactagctctccagtttccagcatatcaaaaattccaacaagtcctttcctgtctgggttgattgtcttgcggtgacctaagaatctgcggtgtccctcaactgctctcgccatatttcctgaatatgacggaacaaatacatcactctctacacagattatgtaatcaagtgcagcagtttgggaggcgtgattggcaaaatctttcagctcttcaggagttgcaagggattccttaaagattagattagggtagcgggatgagagctccgaaagatgagtattaccaccatagatctctcctgctgcaatgtatattggtgtagatgggggatacccaagagcatgaagaaaaatgcccacctcctttggagtcagtggacaaaatcctccaactctctgttctgttgaatttatcttttttacttccaataatttgtattctccctcaaaattctaagctcttcagattctgcatctgtcagaccatatgcacaaccagtaaaagacagcatatctttctcatatctcagatggagagctatatatcttcctccatgtgatctcagccgatccaccaacctctgttttgtaaccgtcatgtatgctcagaacctttcccaaattctctataggaggagaaaatcgaagtgcatgatacattgcacgacatctcaaatgatacattgcacgacatctcaacctctgtatgtccagaggaagatcattgtttgcaagtcgagaatctgattttgcaacatgtatcacctgatagtcactccataatcttgtcatctcttcatagtaaccaactccagaccaggaagtaaagtgtttcctggcccgggggacaccttccaagtttttgggaagctcactaacaatcctgatatctcctttcagggattcgatgaaatgaagctcatcaaatacatctgaaaacacactagagtcgttccagaatgaacgcttatccaattgaggtatgactaaagttgcattcattatatgtgccacagccaccatgtctgatataccagttcgcatttgatttagtccaccattacttctcacggttagatagcgatcaaatccttgggcagctttatatttagtagtcggcttgacacattggtgtaagccatgattgaacggggtatcccaaagttgtttatagtgtacaggtaactctggcacctgatgagatttagattgttgagaaagcagagggagtggtggatcttcatcaacactgatgtgtctcacctc

SEQ ID NO: 1786 - DNA, 139 bp, Glycine max
  Clone ID: PAT_MRT3847_101611C.1
gaaaacaaaatacagtacgttgtatggcggtgccaactttgtttaccctggttacaccaaggatgatggactaggtgctgatattgtttgggcttttcttcttgcatacaccgtgttcttcggcaccgatgccgaacgt

SEQ ID NO: 1787 - DNA, 496 bp, Glycine max
  Clone ID: PAT_MRT3847_101612C.1
gtactgaataagataccttggagagtatcatgtgttatataattcttgcctccagctaattagctaaaaattgaaagaaacggttatacctccctaaatcaataaattttcctatataaagactgccttcctaaccagcctttctaaatgattctccttctcttgctcctctcttaacagaattgttatgtcctatgtgcgattgtgcctcctgattctggaagattcacctcctgatggttcttactgatcaatctcctgcaatacccatccctttctttctttgagtgaacaagccactgacatggtctttcctcaatctgggttgggtccaagtcattgtatataacagatcatttaaagagatacatactgatttaaatgattggctggttttcttcttgtcactgctaataatagatacttaacttcttcagtcactagtttgagtccttgagatattctgaaatctctctctttgggctgcaatctttat

SEQ ID NO: 1788 - DNA, 647 bp, Glycine max
  Clone ID: PAT_MRT3847_101613C.1
gaacacagttacaattttgacatttaaaaagcaaaccaacaacgcaacggcaagccccaaaactcgctgcgcttaacaaaaatgtaatcaggggttcgcacaaacacaacacattaaaacagaatgataaaaggagtcctgccaccgtcgatcaagaacccaattctgggaacaaaagatgcgagaagagggaggagacttaaaactatgaccgaaaaacaagccacctagaaacgaagacacaagggcaagaaaccaacatttatggcaaccataaaaaacgacatgccctgaagaaccaaaccggacgaagcacttgttcttctgggcagccttggtgaccttggctccagaaggagccttcttctgcacgttctggacgactcccacagcaacagcctgacgcatatgcctgacagcaaagcgaccaagtggggggcactcacagaaagtttcaaccaccatgggcttggccggaaccatcttaacaaaaccagcataagcaatcgtcaaaaacatgggttcctgtcgaagctctttgccagaacgcctgacaatctgggccaagagttcaacaaacttgacagcaatgtgggaagagcggcacccaagaacaggggcatagccacttccaatctgaccaggat

SEQ ID NO: 1789 - DNA, 327 bp, Glycine max
  Clone ID: PAT_MRT3847_101614C.1
gtgtgaacttaaaattttcactattggattatatttccattttcagacaatcttaatccaggaaaaaaaaccgtagaattttgagggccggtttttcgattttttatgatgtcaaaaagagatgattgtaaatccaggattgggaaaagcaaaaaatttacctcttcttttctgccataaaagcatatgggggagattcatgtttttccatggacttgttatcatttccttatccatgaacttgttatatatagaataaaaatttatctattgggtggggttgggccccaacaatttggctaaaatttcaaaaaagtggggcctttt

SEQ ID NO: 1790 - DNA, 269 bp, Glycine max
  Clone ID: PAT_MRT3847_101615C.1
caatagcaagacgctgtctagtgatgcaggagcaagcatttcaaagttgttccgtcacgatgtcggctatgcgatgggattggctttctcgctcgaggatgctcgtgtagggtatgtgcaatgcgcaccccgcgtggctcaatgccatgggtcatgcaccacctgcaacatatcctcgagtcttagcgacagttccgaccattagtcttcccgaggatgtttgtgtgcagaggttttatgagaaatatccggagtccaaatcccatgac

SEQ ID NO: 1791 - DNA, 364 bp, Glycine max
  unsure (1)..(364): unsure at all n locations
  Clone ID: PAT_MRT3847_101616C.1
tgcccgccgcagtaccggccggatttccgggcgacggggcgccgccaccgtcggccccacgtggcctttggcacaacaaagagttctcccatgtgccatttcctaccatttgaaagcccccgctcttcacctcgtactctcgacaggnagctctcgggtggctgcctaaggtgggacacactctggttctcagtgttacagcggaagctgcgaggcgggggagggaacctgctggcaaatgtccctgaaggaactcagcagaagctaagacaccacgattgtacagagaacgttgagagagagatcttgaatacgatgatcctaaacggattagaggaaggttggatgatctggaggaactttt

SEQ ID NO: 1792 - DNA, 184 bp, Glycine max
  unsure (1)..(184): unsure at all n locations
  Clone ID: PAT_MRT3847_101617C.1
agcgattcttgcttcaagttccagagatgggtgtgcgtcatttcattcccgatgcggaggagggtgacagtttattngaatggatacagaactgtttctggttttctgggcatggtcttcttgataagtagggaccagtttcagagattgtaactcgcttaggtggatatcggcgtgcagtcag

SEQ ID NO: 1793 - DNA, 368 bp, Glycine max
  Clone ID: PAT_MRT3847_101618C.1
ccacgcgtccgcccacgcgtccgtacggctgcgagaagacgacagaagggtttcctgttttcattttcattgaaaatgttttcagaaatccaaccaaacacattttcatcactattttctgttttcagtgaaaatgaaaacagaaaacaaccaaatcaaacatcccctatttaatctaagtgaaagtggattgggcttgaatttcttagatgagatctcaagtttgaattttgggatgataaactttacttaaggtgattaaacaagttttataacaaagattagttattaataaaatcaatagatacttcataccgaaaaaaaaaaaaaaaaaaaaaaaaaaaaaagcggccgctctagaggatcca

SEQ ID NO: 1794 - DNA, 342 bp, Glycine max
  Clone ID: PAT_MRT3847_101619C.1
cggccgccaccccccccccccctcttttttttttttttttttttttttaaaagacaaaagttatcgtctcccaaaattttaaactgctcaggtaagactacaatggggagaagaatcgtaatctttaaccccaaaagcgccatgcaagataggggcattaatagagactcaggcggggcactacaagtaagtatccacgttgaatatctcccagcaatttcgatatcaaagtcaaacaatcatcggcagctgcgggggatcacgagcttccatgagagttggttaacaatgcaccaataagtcaagcagtatatgtcgacaagatatttttctttaaagtta

SEQ ID NO: 1795 - DNA, 233 bp, Glycine max
  unsure (1)..(233): unsure at all n locations
  Clone ID: PAT_MRT3847_10161C.1
cggttagcgaattaaacgacacattaaactgatcgagcggcggacatcgaggtcagggatcgaaccagtgaaattgttgcgtttaattcgttaaccggatccattccgaaccggttttcgcgtctggaccgaaccgcttttctcggaaactcgctgctctgcgggaagcctttgcagctttgccccggaactgaggagaagaagggntaacgtttcggctgcgccanttcggg

SEQ ID NO: 1796 - DNA, 373 bp, Glycine max
  Clone ID: PAT_MRT3847_101620C.1
tgctctcgtacgttggttggttcctgttgagcggcccttttttttttgtttttttttttttttttttggttgtgggacaagggccgaagatttattaaggccgcgtaagagacagctcgttggttcgtggcgtgtcttaggtggcttacccacataacatttggtggcatttacatacatagctattgctcctctttgaatcgtgcgtatgagccttccttattacatattgattggcgcatactctatctagattgttgagagaggcgaagggtctactcaatgtggtacatgggattaggttgcttaaaggccccgctttttgctctgggggttccaagctgatcgctgcattggtctccaatgattccaa

SEQ ID NO: 1797 - DNA, 283 bp, Glycine max
  unsure (1)..(283): unsure at all n locations
  Clone ID: PAT_MRT3847_101621C.1
atttctaatatttaaaatagaaaatatagtcttatagaagcttttggaatgctccaaattctacttgagtatccgtatttatagtagcttccatgttcatgcttatcccaattgtcgcttcagtttattacttttntcttttggttcctagctagtttcctagggacatttattagcattctctttttgataatgtatcattgttagtttagcagattggttgtnttattttacaatttcctaacaatatgaactttctggatgcagaagctatggaactatg

SEQ ID NO: 1798 - DNA, 233 bp, Glycine max
  Clone ID: PAT_MRT3847_101622C.1
acctgccgaattttcttaaatcgtatgtgtctgggattttgctctgtttcttctgtctctgtggctgtctttgctttgctttgcctttttctcttttctgcataaataaaaagcagaagcataagcataagcaacagcagcagcagcggaagaagaacaagaagcaaaattcagaatcgcctattcactattcatttgggggttagtttacttagctcgctcgaatcggaaaa

SEQ ID NO: 1799 - DNA, 567 bp, Glycine max
  Clone ID: PAT_MRT3847_101623C.1
aaaagtgaaaatcaggttatttgattagattatacaaaaatctacagttgcacactggcagtaagattagaagacgccaagagggtttagacatctaaatctatatacacatgatatataccagtaatatacgtatgccgtctaaggtgtgtgccacatcaaccaaaaagcaaaaaattccttccctcaatcccctttactttccctcccatccgtcttctcccttttcacctagaagcagacgtaaaggaacagccaaggcagcagagtgactttacctggttgttgggtctttcttttgcttctccctatttaggtaagaatgaaggcctgtgagtggatagagccatggattgcaccttccttttcaaatcatggaagctattttggaagaaatgggaaacaccctcgaactctgcagcaagttctgcaatctcattaaagtccttgcataaattgtcatacctttgcatttgtggcttcaattgtatcacatcataactactcttagtacatgaatgtctccgttttatatttttgctccatcttagcctcgtgcactttgat

SEQ ID NO: 1800 - DNA, 278 bp, Glycine max
  Clone ID: PAT_MRT3847_101624C.1
tcgaaaaaaaaaagcaaaagaaaaaaaaaaaatttataaaaaaaaataaaggacagacaaatataggggataaaaagaattacaaacgcaagcatccaacgatcataaaatatactatcatgtaacataaaaacaaataaaatggcgggcggtttattatgtgggttcattggtaattctctggcgttttccaatttaatagctttttattagtatacccaaattctattttttggactatcttataaaccttctccgttggaaaatcctagcctttt

SEQ ID NO: 1801 - DNA, 336 bp, Glycine max
  Clone ID: PAT_MRT3847_101625C.1
ggaaattgcgacgacggatattgcaagaccgtcttagaatccattaggtgaaaacaaattaagacgtgtttggttcacaccgtctttgaaggattctggagacaacgacggtgttaatgtaaaacccgtctttaattttgaacaatatgatagcctttcccttctcatttgtgacgtagcgtctggcttctttgcttcataaatcataccctcactgtaccgcgtgtcgtgcttcacccaagctctcgccgtggcctcattggacctcgcgacgtcgccgtcaccctaggtcgtgccgtacgtagtggttgtagctcaggtcggtagctgtaccca

SEQ ID NO: 1802 - DNA, 504 bp, Glycine max
  Clone ID: PAT_MRT3847_101626C.1
aggtagtgttataaattcttattgtagtaaaaatgtccgaaaataagtccgaaggtggcgctgaaaagaagaagagcggtggattcaacacgaagaagtttttgttggacctcgcatccggcggaactgctgctgcagtctcaaaaaccgctgttgcacccatcgagcgtgtcaagctgttgttgcaggtgcaagatgcttccattcacatcaccgcggacaaacgctacaaaggcatcatcgacgtcctcgtccgtgttcccaaggagcagggctttctgtcgttgtggcgtggtaacctggccaacgtcatccgttactttccgactcaggcgctgaacttcgccttcaaggacacttataagcgagtcttcacgcacggagtggacaaggagaagcagttcttgaagttcttcgccatgaatttggcttcgggcggtgccgctggcgccacttcgctgtgttttgtgtaccctttggactttgcgcgaacgcgtttggcag

SEQ ID NO: 1803 - DNA, 127 bp, Glycine max
  Clone ID: PAT_MRT3847_101627C.1
acaccccctttttcggggggttcgcaagcgccggtggggcaaatgggtcttccaaattcgggagccgaggaaaaagtcacgcatatgggtcggcttcttcccggcgcccgaaaatgggggcaaaggc

SEQ ID NO: 1804 - DNA, 537 bp, Glycine max
  Clone ID: PAT_MRT3847_101628C.1
aggatacttgatgcaatgagggtttcttctggaggtgcaaactcctttggattaagttctgaagggcttttacaatccccacgcgtccggcgagttgcttagtttcaagaagtcatgcgagatccacatgtagctgcagatggttttacttatgaagctgaggctatacgaggatggcttgacggtggtcatgacaattcaccaatgactaatagtaagctggcacatcacaatcttgttcccaaccgcgctcttcgctctgcaatccaggactggcttcaaaaccactgatcaagctcattatttttctctgcccatttttattgaactgtgtatctactgtttataccatgtataggaaagaaagttgtcatttcattttgttaccttatatcagttttatttcttgtggttcttcaatcacattttatacctatcctcttgtataggttagataaccacgggattatcttacaatagttgtaaagtacatatatatcatagcatatatgtcagaagtcagaacacttctctgtg

SEQ ID NO: 1805 - DNA, 1165 bp, Glycine max
  Clone ID: PAT_MRT3847_101629C.1
gcgcgtggccgcgccgtggggctcgtgggttcaaatgcaggaaacagcttctccaaatcttggtgcacagggttgccgcccttttttagggtttggctcttctaaagcagttgcttagtttcaagaagtcatgcgagatccacatgtagctgcagatggttttacttatgaagctgaggctatacgaggatggcttgacggtggtcatgacctttcgcctatgtcgatccggaagcccgcgcctcacgggctcgttccccaccgtcagatgtttattcatttggaatcatattgttgagattgttgactgggagaccagcattgggaataacaaaggaagtgaaatatgcattagacactggaaagttgaaatccctattggatcctttggctggagactggccatttgtgcaggctgaacagttggctcgcttggctttgaggtgttgtgatatgaatagaaagagccgaccggatctttattcagatgtctggaggatacttgatgcaatgagggtttcttctggaggtgcaaactcctttggattaagttctgaagggcttttacaacctccttcatattttatttgtccaatcttccaggaagttatgagagatccacatgtagctgcagatggttttacatatgaagctgaggctatacgaggatggcttgatggtggtcatgacaattcaccaatgactaacagtaagcttgcacatcacaatcttgttcccaaccgcgctcttcgctctgcaatccaggactggcttcaaaaccactgatcaagctcattatttttctctgcccattttgattgaactgtatatctgctgtttataccatgtctaggaaagaaagttgtcatttcattgtcaccttgtatcagttttgtttcttgtggttcttcattcacattttatacctatcctcttgtatagattagataaccacgggtttatcttacaatagttgtaaagtacatatatattatagcatgtatgtcagaacagttctttgtgtgattaaaaaaaaaaaaaaaaaaaaaaaaaaaaaaaaaaaaaaaaaagggggccccactaaaattggcctttccccccgggatttattttccggagggaacacttagagctacaatatttccccaaaggggaaccatttaac

SEQ ID NO: 1806 - DNA, 137 bp, Glycine max
  Clone ID: PAT_MRT3847_10162C.1
ggcacttgcaggtatgatgatacagatcctgaagcagaaaagaaggcgtatattgatcgtattgaagacattgtctattggatcggttggtcctcagttaagatgagttacgcacgtgattactttcaggcattgta

SEQ ID NO: 1807 - DNA, 334 bp, Glycine max
  Clone ID: PAT_MRT3847_101630C.1
gtgagaatgaagtggattcaagtgtaaacaacttgcaaaccaaggtagtaaatcattcaagtgcactaattagttgaagcaatcaaattcaattggccaaaataagaaaataatattatttaggtacatttatataatttgtggaaaagagacagatggggatattcgatctaaaggaatgttgcataatattttggtgatgaacacttcaagcaacaatgattctttaatttagtagtgggaaacattgatttgagttcatgtccaatccggccgggcgcaataatctgcagtcttttgaatagtatctctgaagaaaaataacttgtatatc

SEQ ID NO: 1808 - DNA, 563 bp, Glycine max
  Clone ID: PAT_MRT3847_101631C.1
attagccaataaacaatgaaactgaagaaagatagacacaagatactcatttgagcactttacatcattttttcaacacaagtgacttctttaatggaaatggacctatcctgtttatagtaaatcttaatctcgaaaatcccttcaaagcttttgctagattaaagggtatgttcaatgtttggccaacaaaatttccagccagggttatgcatatttacaaggcaataatattttgtcagagccaccatcttatctgtacgtttgaaatatctatacgcagcagcaaaagcatgcggcgtcgctgttatgttgaagtgttcatattagcagagagcattaaacatcacacaaaatgatggaccatttcttccttgctcttcgaaaccgccccacaatggtctcagacggttcctctttggcgttatccatcaaaatggagaataaagtgtagtgttcaagcgatctttttaagcaatatatatctcaaatattttctttctataatttggctaatgcatagggttcaaactagaaattatgaatatttcatatcactttat

SEQ ID NO: 1809 - DNA, 398 bp, Glycine max
  Clone ID: PAT_MRT3847_101632C.1
ttctcccaatgccgagatatccgacatattcaggactccaaaatgcagaccactccataagctcttagtgactttcttggttaggacactgacgccattcatggccatttatgcaatgctggatcaccatgatagagagcatgacgaacgttacttctttaccctcacctgctgggtatgcgatcttcatacaggtagggacttcgacggacctatcgctgtatgtacttttatggctgcagtctggacttgttcactacactcaaaactgtatgattatcagcagcttgcttagaggtgatgggacacacaattttcttccatatgctgtcaacatcatccacgtcgtacgacagttatgtgagaggaagaacgtatagtccccatgacatgccatg

SEQ ID NO: 1810 - DNA, 386 bp, Glycine max
  Clone ID: PAT_MRT3847_101633C.1
cggcactgtcgtcaatggcggcttcccgtcatcgaataatgcctccttctgtattgcgccgtccttagaggtggaggggctgctctagaatgggggggggggagagaaaggatctttcacctaaattaactaacagggtagatgttgatcatgctggactctcaacaccagaggatctatataatgagccaattttaattgtaacctgaaacgacattcattcttatataacaacatgcatttgacaaagacaacaagtgagacataacagatataacaccatgtgacaaaaaggggcaagcttgtcattatgacatttgcatacaactatgatctatacatctccattcttggtatgaaagtctatatcacccctactctttatg

SEQ ID NO: 1811 - DNA, 2094 bp, Glycine max
  Clone ID: PAT_MRT3847_101634C.1
tttgaatctatggacgtcccgagggctctgatgttaggtggaaggttgtccccgaattgtacataatttacactcattgccaccaaccaatctttttcctttttctctctcaagtctcaactcaacaaccgaacttgatagatactgtgagtgtttttgttcctcaatcaatctaattctcccatttctcttccaatggcgtcttctctttccaccaaaccattctcagccgacgctctctccgccttcgcttctctcaattccgatctcggatccctctcccccgcctacctccgactctcactccgtcctcgtcttcccaagagacttcgcatacaggcggctgggagtacctatggaaatcactttcgtgttacaacatatggggaatcacatggaggaggtgttggttgtgttattgatggatgtcctcctcgccttcctctctctgaagctgatatgcaagtggatcttgacagaaggaggccaggtcagagccgaattacaactcctagaaaggagactgatacatgtaaaatattttcaggagtttccgaaggaatcactactggaactccaattcatgtatctgtacccaatactgatcaaagaggacatgactatagcgagatggcagtagcttataggccctcccatgcagatgctacctatgacatgaagtatggtgtcagatcagttcagggtggtggtagatcttctgcaagagaaacaattggaagggttgcttctggtgctgttgctaagaaaatccttaaagaattttctggaactgagattctggcctatgtctctcaagttcataagattgttcttccagaggaccttattgatcatgacactctgactcttgatcagattgagagtaacattgttcgatgtccagacccggagtatgcagagaagatgatatctgcaattgatgctgtgcgagtgagaggtgattctgttggtggtgttgtgacatgcattgtgaggaactgtccacgaggtctcggttcaccagtatttgacaaacttgaagctgagctggctaaagctgcaatgtcattgcctgcaaccaagggctttcagtttggtagtgggtttgcaggcacctttttgactgggagtgaacacaatgatgagttctatatagatgaacatggaaacacaagaacaagaacaaatcgctctggtgggatacagggtggaatttccaatggggaaatcattaatatgagaatagctttcaagccaacatcaacaattggaaagaagcaaaagactgtgactcgagataaaaaagaaacagagtttatagcccgtggtcgccatgatccttgtgttgtcccaagagctgtacctatggtagaagcaatggtagctttggttcttgtggaccaattgatggcacaatatgcgcagtgtaatctttttcccgtaaactcagatttgcaagaacccttggtgcccatactacggccagaagaagcgctcctctgaagaggaagggggtccataaatcagtaattggcctttgataaaatcttccttatggctagtgtttaattgacacggttaattcactttgatgacaagtccaagtgaacattgtggcagatatttttgcgggtgcaatctatcgttttgtattaatgtaagttaaactatgttttcttttcctctcttcttctattttcattctgagggtgaacattgtttctagtaaaccttgttgcaaaagcagagatagatgtattcttaaagtgaactgatattaaaaattgtaagaaacgtatcagtttttggtcttaataagtgttgctctgctttgcaataaatgaaagctttggcaactttaacaggctgttcggcggatgcattatattaacaaaaaacaaaaaaaaaaaaaaaaaaaaaaaaaaaaaaaacctccaaaaaaaaaaacaaacactaaatggaaaattgggacaccccttattaatggtaaaattaacaaacaatgggggggggggcctttttaaaaataaaattttactcccgcgggttgccaaacaaaaagtttttttatgggtcccccaaaaaatatttcac

SEQ ID NO: 1812 - DNA, 1292 bp, Glycine max
  Clone ID: PAT_MRT3847_101635C.1
aagaccaaaaactgatacgtttcttacaatttttaatatcagttcactttaagaatacatctatctctgcttctgcaagagaaacaattggaagggttgcttctggtgctgttgctaagaaaatccttaaagaattttctggaactgagattctggcctatgtctctcaagttcataagattgttcttccagaggacctgattgatcatgacactctgactcttgatcagattgagagtaacattgttcgatgtccagacccggagtatgcagagaagatgatatctgcaattgatgctgtgcgagtgagaggtgattctgttggtggtgttgtgacatgcattgtgaggaactgtccacgaggtctcggttcaccagtatttgacaaacttgaagctgagctggctaaagctgcaatgtcattgcctgcaaccaaggctttcagtttggtagtgggtttgcaggcacctttttgactgggagtgaacacaatgatgagttctatatagatgaacatgggaacacaagaacaagaacaaatcgctttggggggatacagggtgggaatttcccaatggggaaatcattaatatgagaatagctttcaagccaacatcaacaattggaaagaagcaaaatactgtgactcgagatcacgcgtccgcagagtttatagcccgtggtcgccatgatccttgtgttgtcccaagagctgtacctatggtagaggcaatggtagctttggttcttgtggaccaattgatggcacaatatgcgcagtgtaatctgtttcccgtaaactcagatttgcaagaacccctggtgcccatattacggccagaagaagcgcttctctgaagatgaagggggtgcataaaccagtaattggccttggataaaatcttccttctggctagtgtttagttggcggttaattcactttgatgacaagtccaagttccccccttgcgagcattcggctcctggtcgcattgtggcagatatttttgcgggtgcaatctatcgttttgtattaatgtaagttaaactatgtttattttcttctctcctattttctttttgagggtgaacattgtttccggtaaaccttgttgcaaaagcacagagataggggcattcttaaaagtgaactgatattaaaaattgtaagaaatgtatcagtttttggtctcaataagtgttgctatgcttttcaataaatgaaagctttggcaagtttaactagctgttaaaaaaaaaaaaaagggcgaagggcggccggtttacaggat

SEQ ID NO: 1813 - DNA, 238 bp, Glycine max
  Clone ID: PAT_MRT3847_101636C.1
tatacgagaatagtacatgatcaatgaatcaaaatcctatgtgagtttgggtttactgaaattttcgggatgcctaatacatttagatagactgtagcgccgtccaaaacaagcggagaacaaacttccatttaatttttttacaatgagtagtgatatataccctgattcctttcatgtggttaacattttaaccaacctttaaaaaccccatgatgcactcagtctatttacaatt

SEQ ID NO: 1814 - DNA, 258 bp, Glycine max
  Clone ID: PAT_MRT3847_101637C.1
tacggctgcgagaagacgacagaagggatcctagctagttaacaagatttaagtgggggacaaaaaagatgacaaggaatgagaacaggaaatttaaattattaaattctttatacatattctaaatgttacaccataggtgaatcgtcagggtaagaagcatgtatactttcttaaccacttgcccaaccaaatttaggtgcttatatacagtaacaattttatgcacacaaactacgtttgtatggagattgaatt

SEQ ID NO: 1815 - DNA, 539 bp, Glycine max
  Clone ID: PAT_MRT3847_101638C.1
accttccgttgtacaattagtagacttgaacgaatagtctctctatctatgtccggtttcactgataatcagaggatttggagagcagctcattatgaagctattcaatacgagcattcctccatacagagatgcgttctacacctcgatactggagaaaactcctgtatcaaaggtacttgttgctcatttctaacaaatgctacatacccctctaatcctaagatcactggccatgctgaaagactttttggattggcaactgatacagctggacactttacatcttgtgcaacaggggagattgatgtcgcacttgcgtctacccatgtccaaaaagtaatcactgatcctcaatttgtggcggctaaagaattactgatgaaaacaataactgacagctgggtgcccaactacatggagtgacgagatgagcactgcttggaaaatagcctactgatcacttggcatcagctattaagaatgattctatgatctacaatggccctacagcgtaatacataaatattatcgtcact

SEQ ID NO: 1816 - DNA, 333 bp, Glycine max
  unsure (1)..(333): unsure at all n locations
  Clone ID: PAT_MRT3847_101639C.1
gtttccttcttcttcttacatttttaagagtnaaacacattcacctattttgctgcttctttgattctttgttgctctcaagttgaaaagcttagcacccggatgcgagcctgttcttgtttctacacactcaaacaaatcgagagaggctgaaaatcggagaaaggggtttcacaagaaagagaattttgtttctaattgttgagtagctcttggagtacaacatagcatacttgaggagctgtatgaggtagaagattaacaatgagagatgagattccaagaaaagcaagctctcatggtcgaagagatggtcagaaagttctcatgtca

SEQ ID NO: 1817 - DNA, 531 bp, Glycine max
  Clone ID: PAT_MRT3847_10163C.1
tacggctgcgagaagacgacagaagggggctgcaaattaaaccaattttctttgtctatgcaacctacacttcaacaaagcttctctaaacccaatagctctgatttcaagatgtgttcatttagccaaaaccactatgttttagttctgttccttgttctcactgtgtggacatcccacataatgtctcgcaggttgtctgaggcctgcacttctgagagacatgagaagtggatggcacagtatggtaaggtttacaaggatgctgctgagaaggaaaaacgtttccaaatattcaaaaacaatgtgcacttcattgagtctttcaatgctgctggggacaaacctttcaaccttagcattaaccaatttgctgaccttcataatgaagaatttaaggctttactaattaatggtcagaagaaggaacatagggtggggacagcaacagaaacagaagcatcttttaagtatgacagtgtgactaggattccttctaccatggactggagaaaaagaggtgctgtcact

SEQ ID NO: 1818 - DNA, 450 bp, Glycine max
  Clone ID: PAT_MRT3847_101640C.1
ccttaaggtatttgttttatttgattttaccaataatttgctattttcggcacctcaactttatccatggcactgttttcgccttcatcgtctgacaatttttctttcacacgtccttttgctaaccttcgtccaaaattactcaatttctgttcattttggcctataaaaaacgcaaaatgcgaggatcggcattcttcgggtcttaccggcgggtttatgccacgggccaactcagaacaattgctgaacttattcaacgaatatgcaagcatcgaaaagaatgaaaagcgatttatgacggcttctgactttattcgaaagtatcttggactttacacggaagaaaattataatagagaaaccgttcgtcttttggcgagtgcggctgacacggcaaaggacggattgatttcatacgaggaattcagtgcttttgaagccagtctc

SEQ ID NO: 1819 - DNA, 288 bp, Glycine max
  Clone ID: PAT_MRT3847_101641C.1
caacaaaaaggacggatgttttattgaacaatcccagtttatcagcgggggaaaaaccaaattaaaatccccccaattttcaaagggcccttacccaaaaaagggggggatctttgggttttttttttacgggttcaaacttttggaaccggggtatgtcttaattaacatgtcaattagttagcaattaattccttacatgaaccagcttgtttaataaaaataaggacccgggcgtgtgaccttccccaaccccggtttatttcctgaccttaaaacaaggaaatt

SEQ ID NO: 1820 - DNA, 158 bp, Glycine max
  Clone ID: PAT_MRT3847_101642C.1
gccacgcgtgcgtgacaagagatcttcaaccctcacgaccaacattcccttatggcgcgcgggtatgtagcccctccactccctgctcgaccatgttggtgccccataaccaaggagcgtgtgacgtgtagaacgtgccggattcaaaaatgctttcg

SEQ ID NO: 1821 - DNA, 298 bp, Glycine max
  unsure (1)..(298): unsure at all n locations
  Clone ID: PAT_MRT3847_101643C.1
cgcggacgaagccggaatacactacagatcttgacaaaatngttgaaagacaaaaacagaaaaaaacgggcgatttttaaaaggggcggcgccccaaaaaacactgcaaaccgagaaccagcaatctgaaaaacatcaaacacatccaaaccgaaaggatcaaatcccagcagcatacaagtaaggaaccaccaaaatgaaccaagttgccaaaaatacgaaccttaaacaaaggaggctggggcaacttaaacgcttttcttatttttacttacatcaccataagcagattcctgta

SEQ ID NO: 1822 - DNA, 330 bp, Glycine max
  unsure (1)..(330): unsure at all n locations
  Clone ID: PAT_MRT3847_101644C.1
aaaaaaccaaccgacccacgcggacgcattctcctctctaaattcctcttattctattttttanacaatattaatatatcatggttccgtttttttattaaccaangacaacctccccttatctataattttcattnttaacaacattatccttcttttcaattcaacattttccaaaactgctantcctccctctctnaacccaactccatcaccaacccctacaccatacttcattaacctcacttanttactcactctnntctctccctttcacaaccttcctttatacctttaatccactaaaattatttacactttccaaaacca

SEQ ID NO: 1823 - DNA, 251 bp, Glycine max
  Clone ID: PAT_MRT3847_101645C.1
ggaaagcagaatccaatttataacataaatgcacaggtacaaattaagctgaacgtatatctaaataaccacgtatatatagcttcatgaatggaattacccatttattgtgtactatataataattttgtacggatggtggctaaatgtgaaaaataaaatacctaatcttagtttgcaaggcgtgatgctctacgttttaacctaaaattctcaaatgaggagtaaataaatgtaatctatggtgccaa

SEQ ID NO: 1824 - DNA, 680 bp, Glycine max
  Clone ID: PAT_MRT3847_101646C.1
gaaggcgaggatgggcattctcaccctgggtcaaggtttatggcgagttgggattttggctcaaggcttgctgaacggctggacacgatatatgtcagagtgttggtttggccagcggtttagggataaaggggatgtcccacattatttccatgacacacatgcaacaatgatgattatgaaattttatgcaaaactagtcatgcatgcacctgtgtggacattcaagcatcaagtttttatggtcatgtgacactagggctcaggattcatttttccttatttaagtctacccagtgtgtccaaaacatgttcttttatcaatacatgcatttatccgactctattttgggcgtacggaaaaattttcacagtactcacccttcaggtgtatacacattattttaaaaattggttatgaccagtgaatctttttcaaagaaaagctggaagttatttctcttcaaaagtatgttggcttttcatctagacaatttatttttctttttctcttttttttttctttttctatcaagttattattattttgtttattgttttttttttctaaaaaggtcgtggggatgagcgcgcacactggtttacttacgtaaaaccacaagggaaaacgaaaaaaacctgccatggtaagttgcaataaaaacaatgatgaaataact

SEQ ID NO: 1825 - DNA, 266 bp, Glycine max
  unsure (1)..(266): unsure at all n locations
  Clone ID: PAT_MRT3847_101647C.1
tcacgagttttttttttttttttttccagtggtaccttgtgcttgcacacaaaaaattggtaccttgtttggtgcaattcattggagttgttagtggcagatcatacactgccatacagtcctttcaggttgatgcaaactaatacgaggctcgttgcactttgcaaatcantcaggctggttggaggctacatcaattgccataggtctgggtcttttgtggaggcttagttgcaaaagaatgaaaaaatggagatggagtgctg

SEQ ID NO: 1826 - DNA, 1032 bp, Glycine max
  Clone ID: PAT_MRT3847_101648C.1
gtggtgatgcgttacccagaaatttggcggagggaaaacttgatagaaatccctgctacctttgttgggataattaatgattgcattgttgcaaacaaggctgtggttatagttaagggtcttgatgagtggccaaatgagtaccagaggcagtatggcacaattgatttgtattggattgtaagagatggtggtctcatgctgcttctttctcagctccttcttaccaaggagagctttgagaattgcaagattcaggtcttttgtatcgcagaagacgatgcagatgctgaggggctgaaagctgatgtgaaaaaattcctttacgatcttcggatgcaagcggaagtctttgtcataacgatgaaatgggatgcacagatggatggtggtagcgggtccccggcacaagatgagtcaatggatgcatttactagtgctcagcaaagaattgatgattacttaacccaaatgaaggcgacagcgaagagagaaggtactcctctaatggcagatggcaagcccgtggttgtgaacgagaagcaggtcgagaagtttctttacacgacacttaagctcaattcgaccattttgagatattcaagaatggctgctgttgtgttggtgagtctacctccacctccagtgagccacccagcatatttctatatggagtacatggatctgttgctggagaaaataccaaggattttgattgtaagaggatatcgtagagacgttgtaaccctattcacatagtttttaagtggagtctaggacactaatcacatttctccctcactgtttatatttttgtagcttaagtgcaagtggctcattctttttgtaccaattttcttgctcaagagggtcttttgtatccaccagattttataggaaaacatgaaattattttcaatttataatttcgttgtaattaatttcgtatcagatgacaaataatgtcctatttaacatttggaacggcttgaaaataattccacacttggcatctcaatttacccgacggtt

SEQ ID NO: 1827 - DNA, 840 bp, Glycine max
  Clone ID: PAT_MRT3847_101649C.1
cctagcgccacgaatgctatacaccgcccaacacttcgtcaacaattctgttacgctttcgaacaatttttttgcagcaatggcttctcattctgctgccacggagaggacttacaaagaatcattcgattccgccgcaaacaagctttacgctgatcacataattcctcacattctgcatctgtatggatcgtgtgcaacgtctcgcgactttgaaatctatgccgcacatgcttcatatgaggatccacttatgtgtgcacacggggtgaaacagatcaaatcagcgttctatactcttcccaaggtatttaaggagtcaaagattgtggaatatagtatcaaagaaaatatggtttcaccaggaaaaggagagatattaattgacaataagcaatactacaaattcttggggaaggatataaatatggtatcgcttatcaagttgtatattgaggagggtaaagttgttcgccatgaggactggtgggagaaaaaaccaatttcaaatagagaaacggtgaagctgccactgcttggtagaatagcagaaatgactcgcaggggatcaatgctggcaacacatgtgcttatgaggtttgggaaggacccaaatgtgtgaataactaaaatccatgcaaaatattgtatctttattatacatgggcctgtgtatgatgctcttacctgacgttgtttattcctttttgtggctttgatgaatactagaatgctgtattttgtatggaacagactttgttgccaaaactatatttagcaacctaaagcattgagtatataagttgccaaaactatattatgaaaattatatgttgcttg

SEQ ID NO: 1828 - DNA, 259 bp, Glycine max
  Clone ID: PAT_MRT3847_10164C.1
tctctgcgcttcattaatgggtgtcattttgtcccattcatgaatattgatggctatggcaatggatgggttgctgtcaccattattttttgacatatactagtccatcctacttcctgtttagagcactttagtttctggccttgttttttcactcttagcattctctatggttgtctctgaactgtcttcgatggttagtgtgtgtacacttcttgcattcaccatggtggcattattcttgctaatactaacatat

SEQ ID NO: 1829 - DNA, 282 bp, Glycine max
  Clone ID: PAT_MRT3847_101650C.1
ggctcgagaacgggtgctcctcctgatgcgcttattgcccgggctgggtcaggctcagagaaccgtgcttgatgaaaaccatggtggtttgcgatttattcttctgagggtacaccccctttggccctggtcaggtaccgagcatgatatgtcccatgagaatccgaatatgtgatctgtcggtatagctgatacatcgcatcgctctaactcatgggtgtactgtctaccttcctcgacattatgctctttctcagctgtggactgtgacatcattattgg

SEQ ID NO: 1830 - DNA, 197 bp, Glycine max
  Clone ID: PAT_MRT3847_101651C.1
cggcggtatcgtgttctacgagtgagcaacttgtgagacatggcttccaaggctgcacttctcttgtgtctcaatgttctctttttcactgtggttagttccacatatgtgccatgtcatccacccccaaaactccaacaccactgtccaagccactccccaagctagcaagctgcccaagacatattaattcggtg

SEQ ID NO: 1831 - DNA, 154 bp, Glycine max
  Clone ID: PAT_MRT3847_101652C.1
ggaaaaaaattaaaaaagcaattccaagttttgggttcttaccctgggttaacggttacccccgctttttgggtttaacccaggataaactaaggctggtttaactttcccttaaaaacctccgtaaggggcttccacaatattgtctttttta

SEQ ID NO: 1832 - DNA, 277 bp, Glycine max
  unsure (1)..(277): unsure at all n locations
  Clone ID: PAT_MRT3847_101653C.1
ctggcttgcnacgcctccatttttcccctttttcccccccggcccaagaaagaccaggcagggcacatatcaacgggagaaagccacccatagcaatatctcaagagggagatagatcgatggccatcgcgcacccgacaccgcaattgagggcagtcctgaacagaggcacgcccacccgcccgtgcaaaaatggcaacccgaaggtgtctgtagcgcccacccaacttgatggccagaacgggcccacagacacccccattgcccgggaatgccc

SEQ ID NO: 1833 - DNA, 175 bp, Glycine max
  Clone ID: PAT_MRT3847_101654C.1
tattctgctggagcgtatacacatctatcttatttttgactgaagcgtctcagccttattcggagggtctattaaaatccgttgggggggtcaacgttgaggctgcacagcatacaccaacaacagatcctgaaaatgaaacaaccggagttagcaagacccaggaaacaacccc

SEQ ID NO: 1834 - DNA, 266 bp, Glycine max
  Clone ID: PAT_MRT3847_101655C.1
ggctcgagtatggattgcttcagctctatatgctgctgttaacatcggacagcatccatatggaggttcaattctgaataggtcaactattagcaagagactcatgcctgagaaaggggctcctgaatatgatgccgtggataatagccctgagaaggagtttctgacgactatcactggcaagacagagaccgtcattgcccttacgcctatagagagagcatcctggcacgcattggatgagttttaccgtgcgcagagagatg

SEQ ID NO: 1835 - DNA, 466 bp, Glycine max
  unsure (1)..(466): unsure at all n locations
  Clone ID: PAT_MRT3847_101656C.1
ccgcaaaagagtccattanaagagtaaaggatttgcctcactaatggctgcatccaatgttcattaatgtgggggaaacangggaggtgaggggggttgcattttctnatcatttnaaaaattttangccaaagcagaccatttttgaatcttaacgggaaccagctaaattaaatcatcaacatggcccttcttgccaattggccgatttgattaaaaggaaaagagccattcatgagaatattataaatttggttcatgaacagcatcagtctaagagtaataatgaaaaggaggaaattcaattggaaatcactccttccatggagaaatgaataaaagcagcatgtggttctaatagaaatccccaaagtttcaangatgaggatcactatataagttcaataccaaaaaatcaacatatggaggcttgcctttcaataaaaactaatgaagacttttcttc

SEQ ID NO: 1836 - DNA, 321 bp, Glycine max
  Clone ID: PAT_MRT3847_10165C.1
aaaaaaaaagtttttccaaaaaactggggccacttattcaattccacttttcacacaataattaacattactttaattccatttggggtttggaacaatgaatgtaactaagctttacaattttcacctttcatttccactccaattatccttcaccttaggacccgttggtcctttctttcccaacactttatttgggaaattcttcacaatattttccaaagtagatttcagcttcccaggcaagaacttttaaagcttcctcaactcatcattcacattttaatcaattttaggaccccattccctgaaataattaag

SEQ ID NO: 1837 - DNA, 148 bp, Glycine max
  unsure (1)..(148): unsure at all n locations
  Clone ID: PAT_MRT3847_101664C.1
ggagagtgggagantggtgtttgatgaaatgcctgtnncagannatgaggttggttggactgttatgataaaggggtatgttgggagtggggttacaaaggaggttttttgctcttaaaagatgtgtttggtaaccaactgggattga

SEQ ID NO: 1838 - DNA, 459 bp, Glycine max
  Clone ID: PAT_MRT3847_101665C.1
ggaacaaaaagaaataacctataaaatggcctggtggactttcatctatgcaaaatggggaaaacattgaaaacccaacctatgaaacgggtataaaaaaagtatgcatgctattatgctactgaaacatagcccatactcatccaaggatgctaaagtgtgattcatgcgtgtaaacaatataacacttaactcgtatgtttttccactctcggcaaaagaaatgcttagaaaactccggatattcattccgacaaaatataccacccatcatcaaaaaaatcatggcgatcatcttgggatttttcttgctcgtggtgcccactctgggaagaaaggctttaaattgaagctgggcaggttgtcttccgaataacaaatgactgactatgctcggaacctgcatcagatgccaatgttttgggggaagatcctgatgaagctaactagcagctactc

SEQ ID NO: 1839 - DNA, 253 bp, Glycine max
  Clone ID: PAT_MRT3847_101666C.1
ggctctccaagctacttctcttgttcctacttctttctcaattcttaaaaaaggaaagaataatatatctctcaaagactccaccttattcaatctttcattttcaaaacctatcaaagctaacttcagctcttctacattagaatacaaaaaaaaattcgaacaaaagctctatactataaagaccaaaacagtaactacaacctctccagcaattaccaagtctacaccagaaaagaaagaaaacattaga

SEQ ID NO: 1840 - DNA, 193 bp, Glycine max
  Clone ID: PAT_MRT3847_101667C.1
aggagcgcatacttaaattgacaaacccaacacacacatgcaaccctcagtagggcccaatatataccacacacaccttaaaagtttaacactatttcagaacaataaaccaaacgcctggtgcaacaaagataggagaattttgcccattaagccatcatcatattatcacctataacaagggaacagggta

SEQ ID NO: 1841 - DNA, 305 bp, Glycine max
  Clone ID: PAT_MRT3847_101668C.1
cccacgcatacgagcgtattcaaacatttcaatgacctcatatgagctttctcatggcgaaacatttaaaattggagctcacagatttaggataccacatgatcttttccaatccattcctggttcaaacaaattctggcatgtagagctttgcaagaacttgctcattcaattcttggactgccccaaatggggattgatagcattaataagtgtgacgtacacattctaagacagttgtttaatacgctactgcatgctggtggtacagcttcaatgcaacaactaaaggaacaccttgataa

SEQ ID NO: 1842 - DNA, 247 bp, Glycine max
  Clone ID: PAT_MRT3847_101669C.1
agctcttcacttattcgaccgtgactgttataagattgatccattcgcacgttcaaaaacactttttcttatatggagccatgcacataagtgtttcatgaaaatgcacaataatggctcatttgaacatgtccctccccctcttccaaaaagaaaaactgctaatcccttctcacgtgaggcatctaaaaatgctcttactatatcccaactttctcagccattacaatcttcatctactttatct

SEQ ID NO: 1843 - DNA, 1880 bp, Glycine max
  Clone ID: PAT_MRT3847_10166C.1
tacggctgcgagaagacgacagaagggggctgcaaattaaaccaattttctttgtctatgcaacctacacttcaacaaagcttctctaaacccaatagctctgatttcaagatgagttcatttagccaaaaccactatgttttagtcctgttccttgttctcactgtgtggacattccacataatgtctcgcaggttgtttgaggcctgcacttcagaattcggctcgtggttcagtaagaatctgattagaattgaaagttaaaggttaattgtgatcactagctactatttggtgcactgtgaaaaataaacacatgttgatgaacttgaaaagagccccttgttcactataaattagttgtggtagtttccactgccttagctgcaaactaaaccaattttcttcgtctgtgtaacaaacacttcaacaatctactctatacccgatttacaagatgagttcatttagccaaaatccctatgttttagttctgttcctcgttctcactgtgtggatatcccgtgtaatgtctcgcgggctcattacatctgagagacatgagaaatggatggcacaatatggtaaggtttacaaggatgctgcagagaaggagaaacgtttccaagtattcaaaaacaatgtgcagttcattgagtcattcaatgctgctggggacaaacctttcaaccttagcattaaccaatttgcggaccttcatgatgaagaatttaaggctttactaaacaatgttcagaaaaaggcaagtagggtggagacagcaacagaaacatcgtttaggtatgagaatgtaactaagattccttctaccatggactggaggaaaagaggtgctgtcactccaatcaaggaccaaggctacacatgtggaagttgttgggcatttgcaactgtggctactgtcgagagtctccatcaaataactacaggtgaattggtgtccctatcagagcaagaactagtagattgtgttagaggtgacagtgaaggttgccgtggtggttatgtggaaaatgcctttgaatttattgctaataaaggtggaataacaagtgaagcatactatccttacaaaggaaaagatagaagttgtaaggttaagaaggagactcatggtgtggcacggattatagggtatgagagtgttccttctaatagtgaaaaggcactcctaaaagctgtggcaaatcaaccagtttcagtttatattgatgcaggagcaattgctttcaaattttactcaagtgggatttttgaagcaagaaattgtggaactcatctagaccatgctgttgcagttgttggttatggtaaacttcgtgatggtacaaagtattggctagtaaaaaattcatggagcactgcatggggtgagaaagggtacatgaggatcaagcgagacatacgtgccaagaaaggcttatgtggaattgcttcaaatgcctcttatccaatcgcttaataagtgttcttgataattcatataaatctgaaaaggtcattataatcgtatatatgcacgcatctaccaaaaaataaataatcgtatatgcacgcataggttgtgctagtactaaaattgcgtgtaaacttttatttcaaccaatatataatgagaataagatattgctagtatgaatttattcgaaataatagagttgctcttgtgcgctgtggcaaatcaacccatgttggtgaacattgatgcgcaaacaattgatgtctcactttactcgcggggaaagtttgtatcaagacaggagcgagcgcttctagaccatactcttgtaggtgttttgaagcaagaaattgtggaactcatctagaccatgctgttgctgttgtttcttatggtaaac

SEQ ID NO: 1844 - DNA, 290 bp, Glycine max
  Clone ID: PAT_MRT3847_101670C.1
cgaaccactttctaaatcatatctccatttaaataatatattttacttttcgcgacaggttcatttactaatcatgtttgtcatccattatttctcttttccaatacagttattactccttttgatctcatcaaacttcttctacataccattaattccaacctctacattctcaatataaaaatccaaccctacaatattatcttttactgctttttactattttattcctaacaattaccactttccttcttacttttcaacttatttaacttcttacgatattcccc

SEQ ID NO: 1845 - DNA, 1116 bp, Glycine max
  Clone ID: PAT_MRT3847_101671C.1
aattgatcaaccttgtaagaccctcggtttttgctgtccctctataccacagttttgtcagagatgctgttttccctttgtcatgtccctctgtctcatcatctcattgtccccttctgctctctcctactcctatcttcatagacattgcagatatattgcatcccaacctgaggccatcaccacgatctctcacttgtaacaaacattttcttatcctcatactgcaaattccatcgtcattatgcatgtatgagataataaggagactctctcattagtcataagggttaaaaaaaacgaaaacacaagtggttaaaataagttagtttctcccactctctttctttcttcaattggtaatgagaaagttaggcgacaaataagtggtgctgctaagtttatgctgttgtgatgatgggttttgaagccacaactccagtggtggcaccctttagtactactcagagaccagaccattggaagcattttgatgactcagtgaatgctgtgtcttttgggtttgttgccactgccatcctcatttctatgttccttcttctggctatctttgagaggtttcttaggcaaagatcaagtgaagccaataatgttgcaactccaatagatcttgaacgccaaatgcactttggtagaaagttggaaaatctatcacccaagatgaccatttatggaagaggagtattagtcttgatgcctggagagcagattccttcattcattgcacttcctgctcctgcaccatgttgccgtgagcccatgtcatggcctattcaagttcaacataactcatgcttccgtgcaccctcagcatcaaggagagactataatctaacaactagaaatatgatggttcatcccttttgatctgtggcaggaattaaggtcatatcatttagcagtgtgtaaaattgaagcctctagtgagactatcactgatgagcattcaaggatcataaaagtagcctaatggcatctcttttcctcacaattgaaacacatttttccctctaagagggatctgctacttagagatcatgtaaaaattttgtacatattatgttgcacaattgcatcaatgcattgcaattttca

SEQ ID NO: 1846 - DNA, 297 bp, Glycine max
  Clone ID: PAT_MRT3847_101672C.1
caatcattacgctggctgatcactggaggatggtgtaatctatgcttgcaggattaaactgctatctggctactccacacagcaccgcatactttgatggagaggccatctgtatcttgctgaatggaaggaatggagatatcacgttccttcttaaaaaagaacgagatgggggcaatataatagtggcttaagcacactccctatctagaagaagtcaatagtggacatgatcgggacgctatgcttcttgaaacagagcgttctcttgattatggaaaatgcatggaaacactt

SEQ ID NO: 1847 - DNA, 668 bp, Glycine max
  Clone ID: PAT_MRT3847_101673C.1
cttgcaccttcaacctttaaaactggctttctttcctacacaaccaacagcgcaaaagtggtatttttaaaccaaaggccacagacaaggaacttcagaggctcgaggcaatttctgcggcacctgtgacagaagcctgcaagacccataccacttctgctccctctcttgcaagatcaattatctcgtccgaacaacgggctctctctgcaactatctcttcgagtgcaactacctgccactaccggaatctggactcgacgacggattgatgacccctgactcggttctcgaaccggccggttcggcccgaacctcgtccggttcgggagggtacggaggggtggattgcagaaccaccttggcttgcactgccaccaccgaaattgtgagaaagaagaggaccggcggctccactttccggccaccgtgccggccggcgtgctcgccagtctcggaaatctcagcgggtctcatgaaccggaggaaagggaacccccagcgggccccactctattgaagaacttgcgagagagggtgaggaggttcttttgaaatgaaaacaagaaaaaatactttatcaaatatgattattctaaatattgctattattatggaggttaaatctggggttggaaccttgaacctactataccttacaggggaag

SEQ ID NO: 1848 - DNA, 229 bp, Glycine max
  Clone ID: PAT_MRT3847_101674C.1
atgtaccacatcaatcaaacgaacattctctttgcacactggatccacttcttggatggtaagaggggtacttcctatacatccatattctgctggcgcattgatagatcgaaccttcggtacgcaaagagcaaatccatcacccgcaattggttccacctgtaggaacattacgggccgtcattgtacatcatccggacatagacaaaccccataatcacccaactaa

SEQ ID NO: 1849 - DNA, 870 bp, Glycine max
  Clone ID: PAT_MRT3847_101675C.1
cccgcccgccccggatctgtagccataagcaaaaaagttaaccaaaccccaattccctagtctcgggcacagagtaacattgccaccccagcccctcgcacccacctgacaccctttttcttgtgcttccaaattcccaagcgtccctttcggtgcctcttccttcattaatcagtgtccctccttcccaaaataatacaaaagccaccaccaccaccatctttactctttactctttactctggcccgaaagggacatttttcttttcttttctttttctctgaaagatctgtgactattattattattattattatttctgatttttgtgggaaaatggctgactgggcaccggtgttgatcggggtggtgctgttcgtgctgctccaaccggggctgcttttttcctttccgggaaacgggaagcagctagagtttgggagcatgaagaccaacggcaaggccattttcatccacactctcatcttcttcgccctctactccatcctcatcctcgccgttaaagtccacatctacaccggctgaaccggttcccgggcgggatctcaggtatcatttggtttggttactgagaaatgaaaggaaagaaaaacaccaccattgctgtaacaattgcctgttcttcttcttgtgttatccttttatggaaataaataaaaaaagcaaagatttttctatttatttagtaatggaaatgcatagatctgactatcttcggtgttgatgttttacttttgattgattgaagtgtagttttgggtaaactcccctaagaaataaaaaaaaataaataaagctaaaaaaaaaaaaaaaaaaaaaaaaaaaaagcggccgctctagaggatcca

SEQ ID NO: 1850 - DNA, 214 bp, Glycine max
  Clone ID: PAT_MRT3847_101676C.1
cttgaaaccttaccaatattaaccctcgcttcgtagtgggctctggctatcttatgcatcgactttgcatattcttgatcctatcgcagcatcgttatactctccattccatggctttgcccaatcagcaaaccgtggattacccttgtgtcatactcgttatctacagtgatggacgcacacgaatgactacttctgtgctaatgcatctgac

SEQ ID NO: 1851 - DNA, 648 bp, Glycine max
  Clone ID: PAT_MRT3847_101677C.1
gcacgagcaatgttcttcatgtggaagcctcactcacattaacagtaaatttatgcactatatataaagagtagtgccataacaactagtgcagttgaaatggctgctcctattgctgtaaggagaaggggcactattggatctctagtcaggaaggaaattgaatacttcaccaagtttgacttggagtgaagagcaagttcacaaatacctcagcaacattttgtggacaatgacatggtttctggcagaatctattccttgccaaggcatagtttctgggagttgctaacaacatggaagaggaagaagagaagaggcacaagtgggtttcttccaaaaatctgttaagtttcagaagtagccgagagtaatcacttaaataagactcctggttacagctacatgatcctcaggaatgatatcaacaactttcatctctaagttactctcttgtgttagtctgcacttgtcttttgaagggaaccaaaacttgcattatattcattttatgcttcatggtgtcttgcccggcgtggcctgcgcctttctactgtggcgtctcgcttctctgtctctcttttcctgtggtgttcttccctctctttgcggcttgtctgttctctactgaggaatatgcattaatgt

SEQ ID NO: 1852 - DNA, 560 bp, Glycine max
  Clone ID: PAT_MRT3847_101678C.1
agagagagaactagtctcgagttttttttttttttttttttttcaatgcccaaaatttcatttatttattttacatgaccataaagttattttatgtacactagctaagctagaagctagaaagcacgggtcaaaagaaattcttaaaatgttacacatgtacagcatacacagtaaaaaaatctactgcatcctaaacaactctaaaacctataagtgtcactgtgccaccaaaaacacatttgatgggaagtgtgaagtgtgaaccatgtatatatctgaggtagcttttagcgagcactgatgctagtagctgttacttcatttattgaagatcctcctcctgatgttgatgactcaggcaaatcttggttctcattgaataaaaatgctggctttttgggtggggaaagaggtgtttcattgcctagcatgaaaacaacttctagcatggatggtctattgatggcattttcttgcacacgcaatagaccaatttgaatgcacctcagaacaagagcagggggataagactgacacagtgttgaatcaactatatc

SEQ ID NO: 1853 - DNA, 428 bp, Glycine max
  Clone ID: PAT_MRT3847_101679C.1
gagagaactcagaaaaagggaggcatggtaatgtgtgctactgtgcttctcatcatgtgcttcgtaatgttggttctcttaatcattaaggaaattattttgtgatccatggtgatattcgatttatttttaatatttggccacctcttgttggtgtgacctttcatttgacaccaatatcccttgcctacccggatagtaacacgcagcttgccttggagaagaccaagcagttttggagtagacaagccacattaattttctcaatttttggttgtatgtagaggccacattaattttctcaattttttttttttgttttgcaattgggaagtaaggtggagtaggtgtgttagaggcacaagaactttagaagttggtgtggtatagtaggaaaggatatttaggtcagaaaatgtataatgttt

SEQ ID NO: 1854 - DNA, 347 bp, Glycine max
  Clone ID: PAT_MRT3847_10167C.1
gcctgcggaccggccggaattatttgcgcgggtcgcgtgcttgtagtcggcggccgacctttatcctgtgtttttttttaagcaataatgatcacttactgccgaaccaaaagaacaggtatccgacaaaacaaattaaaaactatctcttatacctaaggcccaatatgagcgtgagtgggtgggaaaccgaaccaccaaggatccgagctggtggaaccaggagcagggcatatactggcgaaacatgtggcaggcacaggcacttctgcgtaacaggaatttctaaaaacatggacttgaccttgttcaaggggaacgacattcatagattctcctaaaccggg

SEQ ID NO: 1855 - DNA, 1102 bp, Glycine max
  Clone ID: PAT_MRT3847_101680C.1
ctgcgaccgattggtccgcggggggctgttggcggggctaaccctgcaacggggcttggatctgatgcgcggttcaggtggccgagccctacgcagggtttcccttcctcacacgaggtgcgatctgtcccttggttgcctcccgttctccccgtggagggcttgcccttcgatagctcttaccttgtcttccgcgaggcaagaagtgcactttctttctccagtcaagctgctgctggtacagtaacatccccaaggcaagcggctgttagccaaagcaagaggcacaggctgataaatgagatggaaaccgagtcatacccttcacagaggtcactgcaacgtggatcagcttctagtggtgaaaacaacagaattaaagtccatttgccacagagggaatcaagaactggaagcggtgggggcagcagcaccagggagcaacagcaggaagattcttcactgctcgcgcatccgggtgaacttgttgtatgcaagaagagaagaaatgacagggagaaatctgctgtgaaacctaaaactggtcctgtttcaccatctagcatgagaactccaggtccatcttcagtccccaaggatgctaggttaactcaacagggttcccatgcacaagggtgggctggccagccatctcaacaaccaaatggatctggcgggccagttgcctgggcaaaccctgtaaaaaggcttagaacagattctgggaagagaagaccaagccatacatagggtttccctttctcgggatataaggatggtaaataatggacatattgctactagtttcaggaagaattttagtggccctttcatagagtttacccccatactgttaatatagaattaggcctttaaaaaagtgcattttacggctacctaaatagttaaaatgtaagttctccaatttttttgtttggatatcttcatcgtgcagttgcagctaagctattaaaacttttctttagatgatagctgaaacttttgtatagtaatcccttgtttcatgttagtctataaaaaaatgcatctctggtagggtcctgtttccctagcttagatcatttattttatgtcgaaagga

SEQ ID NO: 1856 - DNA, 253 bp, Glycine max
  Clone ID: PAT_MRT3847_101681C.1
tcttttttatttttttttttaggtactaaaatttctcctttaataacattaacgtaaatttaacggagctcccacaaagcaggaaaaccaccaactcacaaagcaactgactttggccttacacatctcatagtccctactttcggaataaaagactactactaccaagtttaacctttcacggctatatgtaaaaagagtattgctatatgtgattaaattaattgcataacattatttcagccaaaaacta

SEQ ID NO: 1857 - DNA, 1185 bp, Glycine max
  Clone ID: PAT_MRT3847_101682C.1
ggatagccgcatcaagtaccaaagtttattcaaaagaaaataggagtatagaataacaattgaatatataattaatctaaattctaatcacacgctagctcagcgaaaggattattagaatattctattcttcgttttttcctgagcatcgagaaacgtattacttccaataccgtgtttctaaacagaaggaatatgtacactaaagacaaaaagacttaaaaaacggaattacagggaatagaaagaaagaaggaaaggtaaccaaaaaaacaaaagaagcagcgttaaaaacttgtaaatgttggggggggaaacgggatcaaacccaaccctgtttgtaacggtcgaagaggttttctgtttgggcattcctgaaggcactacaagctatgacatagacccatatgaggaccaccactgccacaatgagaatgatatttgctttcctccattcttttctgaggttacccaatagaccagccttgcacgcattacaattgtagcatagctgattctggtcattgttccacaagtagcaatctgaatcagccatagggttcacagggtttgtccatagtatggggtttacataattgtacccacaagcagtgggaggcttgcaacatcctgactgtaagggggagatatgggaattgaagaattgatcagcagtgatgtaatcctgggtgagcttagagcagacatcagaagcagccaaacagggccttatcttctgccaactcccggaaccggtgacgtggttcctcaaccaggaggagaagccgtgaagcctgtactccttgtagcctcttccggggacatcataggctccatcgggtctggtgacgacgaatgcgaagacgagaacgaggaggaggagggcgatgaggagagccatacagaagaggtagagggcgaggagaccctgtttgttccagtaggcaccgacaaaaccggccagggaaacgaggaggatgaggatgccgatgatgacaatgggccaccggaagttggccacgcactcgttgtcgggcttcgatgccagccaaatgccggaggctatgatcgggattgaggccagcgtagctatcaagttcagcactgcggtgatgttgttgcttacccccatccccaaccccaaccccaaccccaatcgcgtgggtcgacccgggattccggacc

SEQ ID NO: 1858 - DNA, 321 bp, Glycine max
  Clone ID: PAT_MRT3847_101683C.1
ggaaccctggggcgaacccgggggccaacccggaaatccgggaccggccccggaaggcgaaccagtttcccctaaagggagccaaataaaacctgggcgaaaccaaggaaaaaccgggccccagaggaaaatagtaatcccctgaaaaaaccacaaaacctccaacccggaaacaaaaaatgaaaacccgggggggccaaaaaaaagcccgaacccccaaaaaagggggggcccccacagcccgttttcaaagcgaaaaacccgttttcccaggagaaaaaaagaaacgcccaacccccgaaaaaaggcggcaaccccatg

SEQ ID NO: 1859 - DNA, 442 bp, Glycine max
  Clone ID: PAT_MRT3847_101684C.1
gtttagtgtgcaggcagaactttgcctttgtggggggattaacggtttatattcgtcacaacaatcctttgggcagatagaaaccgatgctctgctgcgtgcctacaaatccatgtaactggcttgatattatgagtgaggttaagttcgcatgtcatgctgtcatgagtagctgtggttattttggatgaggtgtggcacctggagaagtgcttggccgaggtccagaagtgggacgataacacagatctagtatcttagactgtggaccccaagaatgccgaatggctgcggacagatatgagcaggaacaaaccctgtcaagaatgcagggggggactacacagaagctgcaaggtggaacattttaccctggagaggcagagcccctgaaaattggactccagcaaaataccatccgtcttgagttaattgggaacct

SEQ ID NO: 1860 - DNA, 367 bp, Glycine max
  Clone ID: PAT_MRT3847_101685C.1
aaaggcaaaaaaaaccttttatattaactttttaacaaggaacagggaaaaaggggaccgtaccaaaagtaaagggcaaaaaaatcaaaacccaacccccccgtggcaaaatttttttgtccaaacaaacggggggcgagtatcattcatcaggggccctaattccccaactaaaggggggcctgggcaaaaccaacattaaacaaaaagggctcgggaagggacattttttttttcattgccccccaaaaaggaaaatctcagtactcggccaaactaaaaccaaaacccattggtgttcaaaaaactgaaatttggatattaggaaagccccaaattccaaaacccctaacaaaggagggggggg

SEQ ID NO: 1861 - DNA, 485 bp, Glycine max
  Clone ID: PAT_MRT3847_101686C.1
cttggcttggaacctttgggctgatttatgtgcttgcatggtcgtgagaagatgatagcaggggggcggagagaggggcatcgatctagatttatagcagctgggggtagtcctaaagcattcttataccgctcttcatctccatcgcctctcctctcctctactacccccaccccccttaactaaattaaataaaatacaagtattgtctcccctctcttgaaacttttactctttcctatcctcgagtctcggatgagactttagactctattactccctatgtatctccttactagacctatttccctgcccaatgtaaatctacaatccgaaggccaacggtcgtcttattggtaagggtctgcgttgaccatgaccactctacaaagtcctctccgattggcggtagtggcgccgggaaaagccgttcttcctcgtgccctcttgacggcctccctattatcagccctactataatcaca

SEQ ID NO: 1862 - DNA, 258 bp, Glycine max
  Clone ID: PAT_MRT3847_101687C.1
ctcgagccgaatcggctcgagtacgtgctgctagaatacgactgaagggtagctagtaaatgatgtgaggaaagtcatattagtctgagttcaagttttgagcaatacaacctaccattttttgttgttggttgtatttggttaactgtagatgtctatagctctaatatcaacgtgcttattttttttcgtttttcagaattttacagatccttatttttgcgctgcctttattgttatatctcttttcataattat

SEQ ID NO: 1863 - DNA, 466 bp, Glycine max
  unsure (1)..(466): unsure at all n locations
  Clone ID: PAT_MRT3847_101688C.1
gacaacttgttgttagtgtcctttctttgcattgattgctttattctttcaaaattcattctctttttgaagagaaaaataaacccagtaagtgacattgaagtctattatttttcaagactcacgccaatctttgtggacgaagtaatttttggccaaatttattgtcagataattaccaacatctataattgcttttgaaagtacatcatactggttcaaattgtgatttagatgatgatccaactgagttggaacttgaatttatgtgctttttttcctgttccatggtggagtgagtttcatatgttgattctcaggttgggacatgtcacatgggtctaaaaaacttgctattgcaaggttgtaagctgaacttgcatcatcttcactaggggggaaatgatactgaagttgacctggctttgaaggcatgctttatatacctgacagnttacttttcttc

SEQ ID NO: 1864 - DNA, 423 bp, Glycine max
  Clone ID: PAT_MRT3847_101689C.1
agttagataacctacccatttttctatgtataattatgtatttgaagggttattttttatattataaatataatttgaattcataatataaaaaataatccttataaatataatttgaattcttattgttaaatggtagtaaaagaaatcttattcttaaatgttagaatatattttatcatgttatttttttattatgtaattttgtcattatttaaaatttaatttatatttcaaataatttttaaattattaattgtttatagaaattttttactttataatttcttctttcctttgctcaaatattaactttactgttttttaacatttatttttccaacttaaatttcagttacttgtacttttttaattcctctttttgacctaatttaagctatttatattattttttatttattc

SEQ ID NO: 1865 - DNA, 281 bp, Glycine max
  unsure (1)..(281): unsure at all n locations
  Clone ID: PAT_MRT3847_10168C.1
ggtatgctttttttaggagagggtacgttgaacctctttttgaatgaggattgaagaagatcccaggttaaagaggcgcaaatttaataactgggcctcgtccaacgtagttttctatgttttggtccacaacgcggcttttcttctaattnggcggaactttccagaggattgggctagttagtaaattataactatatcccctgaatgcagaatccaagcaattgcttcctgcattcagttttttggaaagcttaatccgaaatgtaattttactttac

SEQ ID NO: 1866 - DNA, 782 bp, Glycine max
  unsure (1)..(782): unsure at all n locations
  Clone ID: PAT_MRT3847_101690C.1
ccacgcgtccgatgcttctctctctgatgaggatccgttttagtttcactttcgtttactaactgtcgctgctcgtcatttctcttttttttttttttgtgaattttacaaaaataatttgggttccttctgccttcttggaatcctatggtccgaggtttttagggtttttgagacatgtatgttctggttttttagggtccaagcatcatggttttgggtatagtttttttttaatatattgacttcgattttgaagtgatgatttcctttctctgatgtctttctggagacctgacgagggtgatctgtcctttgtcacaatattcagctgttttaattattttttgttgtataagatagtttcttgtttgcttgcagcttcatgtctagattcccacttttacttgcacattgttagccctgtaattttgaaagttgaaatcaatcaaattagcccctgaagacgatatggttttgggtttctgagagcgtggatgaatgctagcggcactctccgacactcttgatttaacacttcaatgattgactaaaatttattggaaagtcccacatttcatttaatgattattgatttaaatgtaggatccgtttccaataaatttttgccaattcatcgatcaagtcttagaaagagaacgtcagagaatgtagctagcattccatgagaaaaaaccgaaactgaagaggctttccaatgttaaattttttttccctccctgccccattgatacttgnctttntgtttgcaatattctgct

SEQ ID NO: 1867 - DNA, 349 bp, Glycine max
  unsure (1)..(349): unsure at all n locations
  Clone ID: PAT_MRT3847_101691C.1
agaatcttattactttttttgtaaagnanacaaataagtttcgcgcggttttatatagtcggagcgggcaaaactatactcattatacattctaaacatattttcataacttgtttgtttttgattagaactgaaataatgattttattaaaaaaacaaatattttatattttaaattatacaaactatattttggttttagtccatatactttaataatcatgtcttatttaaatcacatctaatatattcccaaccttttctttctatccttcctattaaaccaattattatataaagaaaatggcccccctccttttaattcaccttctccctcatattttaattt

SEQ ID NO: 1868 - DNA, 470 bp, Glycine max
  Clone ID: PAT_MRT3847_101692C.1
tgtttggtaggcggagcctccttgttcactggccgacagtagatgactcaacctttctgctttcttctgtgtcacctgtttcaccggttcagcaggcctctgagtatgaagatcataatgggataggatgtcttagttactgggaagagctaccatgtggaatatatagtgtgcatgttgatgcttcaaaaacaagtggatatctggtgggtgaagtcaagatacatgaatatacaaactcaatgttaaatgaacttatcaagtgggagagaatttccgttgaaccaagctctgaagacctgcatacattctgtcacaagttatccttggggcaacatgctaagcatcagccttcttcagaggcagttccaaacaaaacaggctcaattcaacctgcaattccaatgccagctcatattttgctaaatgctttaaaggaatcagtcttacggcgcacttcaatgtatact

SEQ ID NO: 1869 - DNA, 221 bp, Glycine max
  Clone ID: PAT_MRT3847_101693C.1
ggtccttaacagcatgccaaaaaaatccgcgcggttcgtttgatccgaacataaccatggtgttccaaagccctcttctgggcctgggtaacccttttcttgacattttcggcggcggcgattaaaacctcttaaaaaaatattatatcaccttcaacaatgcgattcttgccggggaccagcaccagcctatttattaagaattggctgagaaatataat

SEQ ID NO: 1870 - DNA, 225 bp, Glycine max
  Clone ID: PAT_MRT3847_101694C.1
ggagggaaaaatcattaaatccattgacttgttcggctagatggatgagcaggtatggcctgtggcaatggactttaactagggcgatcatctcaagattatcgtcgacggcgtctcataatctgatctaatattctcgggatccgatttcttcaagtgttaccacaatgatttctgactgagactgataagaaacaaaaggcctttcatcttcatgggtattcg

SEQ ID NO: 1871 - DNA, 167 bp, Glycine max
  Clone ID: PAT_MRT3847_101695C.1
cctgtctttttttttttttttttcctcaaaataaccttgattaatacaccagccgagagctgcatcacaagtacattggctgtcgcaatactaccaaagagacctaagcctaaactagaaggccaaacatgaccataaattttgaacaactagtgttatgagccacg

SEQ ID NO: 1872 - DNA, 470 bp, Glycine max
  Clone ID: PAT_MRT3847_101696C.1
tgcatgtcatcaagcaaaggtccccggacgaaattagggtatgacagttgttttgtttcaattcaaaatatgcataactttgggaacattgaacatggaaaataggtgtgtgatgtacatctttatgtaaggctaagaaggaactagctttcatcgtgacataagattaatgtcaattttgttatatcattgtataataatatgcttaaatgattatttatgtgtcaacatttaatcatgtccactttttaactatatatggagttcagaattagtgaacgaagagcagagaaagtgttatgaaatggccaacatcatgttgcagatcacaagaacatcagaggatattttaaataccgttcatgtcaatgaataggtcaaccatttattatgatattgttgtcattttcatttttatttaagatatcattttttcaattattttgtacaactgaccaaccaattattct

SEQ ID NO: 1873 - DNA, 603 bp, Glycine max
  Clone ID: PAT_MRT3847_101697C.1
cctcgagccggatcggctcgagcggctcgagaaacaacaattgattaagagtgttgagtgagatcagaatggccgacttgatgaaaagaatcctcctaatggaggccgagcaagcaagcaaatggtccaaacatgttacttcaaccatcaacagtggcaatcatcacaacaacggtaacaggtatgaccactcataccactacgatgaacgccctatttataacagaggcactttcaatggtgatggcaatgggtcacatatccagggtgactttgactcctcagaacggaactactatggtcgtcgttatggttattaattatctgtatttgatacatagtatatgctgggcaacatcatatagtatgttatgttgtactacccataaataatgttgagctaaagctctaatgggttataacaaatataaaggttttggggtgttatctaattatatatatatagtttccgtcctgtttttcactttttttctttaattttcttcgtaagcccgtcactgatccctttttaagccggtataagcaaacacttcaatttgtgatggaaaatggcgttaatatattactcctgcaagtcccccc

SEQ ID NO: 1874 - DNA, 269 bp, Glycine max
  Clone ID: PAT_MRT3847_101698C.1
caacaagccacatagacagtggaatccgtagctacaatagagcaacaatggcgaccacgatattttccctccttatgctcctagctctttcgacatgtgttgctaacgcgacaattttccatcaatgctcacaagcgcctatagcttccacttttatcgcacaccttccatcaattgtagcttcaacatgtgaacacccagctcttgaaccatgtcggattcaacatgcaatcgcagcgagcaccataccttgatcgccctggtgtttc

SEQ ID NO: 1875 - DNA, 226 bp, Glycine max
  Clone ID: PAT_MRT3847_101699C.1
ctcgagccgctcacacctcagcagcacagcaaacagcacatacacacatacatagcatacagtcatgcagtccacgctccgatccgccagctctgccttcctccgcaaggcctcacctattgccgcagccaggcagcccgggttcgccgctgctctcgccggtcccgcaggatcgaggcgaggataccaccagaacgttgtcgaccactttgagaagcctcgcaac

SEQ ID NO: 1876 - DNA, 172 bp, Glycine max
  unsure (1)..(172): unsure at all n locations
  Clone ID: PAT_MRT3847_10169C.1
anacgtcgcangcacgcgtangtnagctacngcattcggntngagngcgnnattnntgctgtncaantggaggtaggnnaactcnntacagcgncatcagatgtattttcnggagccatgcantgctttgaggngttcactgngcacaggcttgcatctgaanctaagtaac

SEQ ID NO: 1877 - DNA, 1091 bp, Glycine max
  Clone ID: PAT_MRT3847_1016C.1
gcattgcaaagaaaacagaagaaaaactcatgatagcaaagatgtatacaaggatgtggacagtcagtcttctgatgaaaagtttataaataaaacaaacagcttcttcaaaagaatggaaggtatgttcatagtattacaaaaaaataagcaaccttaaatgatttgattctaatttgatttcttctgtatggaccatcaactgcacataacttaagcctgttttcttctgtatggaccattaactgcacatacttaaacatgttttcctctgtatgaaccattaactgcacataacttaaacaagcagaagcaaatatcaaaatctgtaaacaaaagaattggaagacaaacacaacattccatcaggcttatgttgttggttgacacaggtgagtggaaagctgttgttcaatctgccagcttttatttctctagcagttgattccacactgctcaacatcaggaccagtgactcttgtcgtaaacgggtcgattcggacccacagcagagagaaaatggatgcaagaagaatggaccagactacaacaatggttggtgttctgttctggcgacccatgagacctttgaggaaggggtagagatggatgatcacccaaaatgcaaagaaaagcttaccaaagaggggaccccatgattggtaaccactgttgatggcataggagatgcctgcaacaacccccaccaggtttatgatgagaagtgtcgtgggtgggatgagaagggttgtccatttgaacaagtagagttctgcgaagtctccatcctcatctgatgcctttgaggtaacggtgaagttagtgtcaattccagcaagcactttgagtaaaccttggaacacggcaaaaagatgggccgaaacaccaccaataacccaaaattgttcatttctccaccactcatcaattccaacaccactccacctcataaaaagcggacgcgtgggtcatttatagtagagtatagatattcgaaagattcctttaaaaaccgatttataaatgatgatctatctaactatatcaacatttatcatgtttatgaattacattgtctcttcgatcaaaaa

SEQ ID NO: 1878 - DNA, 444 bp, Glycine max
  Clone ID: PAT_MRT3847_101700C.1
catacacctttaatttttttcacagctcttgaatcaagaaacctaaattcaatttactggcctttttctgtccgccgattttaatgataaaacctttccgtcacccaattaaatcgttttgcatcacattttcctttcctcatttgacttaataacaaacagtcctgaacctatctcattttcaaaatcttgcccatcctcaatttaaaatcatacacgtccttatcatttcattaatatccttgatagttttggttacccacaacgtgtacctttcattagccatttcaatatcctcctttcctttacctttttttcctttctttcaacccacctatgatcacctttccccttcaatctattaatctgagactccctttagtgttttaatttaatgctttacagaacctttaacccataaaattacattaggataattattca

SEQ ID NO: 1879 - DNA, 455 bp, Glycine max
  Clone ID: PAT_MRT3847_101701C.1
gcgtttcggtttttttttttagagctctaacattaataggattactagcacattatttttaatctcactacatcaaaaaacccaacggctcattgcaaacaacaggagatgggtataagaatacagagatagctgctactggatattttttgctaaagggggggaaaatacaaagtcttgttaccaaaactactgcacactatgatgctgaccacaggccaagtcctgcaacgatgaaagcatcatcttatatatatatgaggacaaaccaagcatgacggaacatttgatctagagcaatcagtacctcgatctaccgtctccctatgttatcacatccttgaaagatccattcctgggaatcattggcaacacatgctcctgaaggggcacactgactttaagaaggtaggggccataggtgtccaacattttatgaatttctgctctaagct

SEQ ID NO: 1880 - DNA, 473 bp, Glycine max
  Clone ID: PAT_MRT3847_101702C.1
tttttatcccaaaaataaagaaacctttttaatagaagattacataattggtctcattgaacaaatccgaaatcagctctagaacaataatgtcctcaaacattatttcatacacacctttagattttcagctgcaccagaaaatgctgaaaattgacaggcttaatatgggcatgcccaacgttaatcataacaaggcatgggtcacgccgtccctgctggttattctggtttgagaaacactgagaaaaaccagaaaacagctaaacaagaaccaaacattggggaacaaagtcaaggtaaaatacagtgcacttagaagcagcagaactcgtgtcgcggtggaatatattaaaagaaaaacttccacagaaagaaaagaaaaatttaatataactataaaatcattgatttaaagtgaaaaaaaattggccagaagctataacagcgcaacggtatttcattcatatcac

SEQ ID NO: 1881 - DNA, 406 bp, Glycine max
  Clone ID: PAT_MRT3847_101703C.1
ctacacatcatagtactgaaccaacggcggtcaaagccaccagccgacgccgctctttatccaccgactcttgaatgtataaaagagagacaaggaagtgaaccatgcctggtttattatacacattcttacctgcaaagaggtagtaggggttgcatgccaacgagctgacgccaccgattaagcatagaaaggatctaaaggatgtgcagctgctgatgcaccaagagcatgaactgttagcgcggcagcaacgtcaagtacagctgtaggtgcttgtgttctcacggaaggaactgatacaacattccagcctgattcagaatacactgactgggtgtggcctctgcttgatacatgccctgcacttagtgatttgtgtatgacgaatatagatacactctct

SEQ ID NO: 1882 - DNA, 316 bp, Glycine max
  Clone ID: PAT_MRT3847_101704C.1
aaaaaaaagggatacaagttttgattaatttggccccctttctaaaaaaataccggaaattttcctgtgtggggaacccaggggttttaaataatggcaaataatatgagccgcaaaagtttttttgatatactttttggaggcatccttcgagcatttgtaaattccctggtgatcaacccggaagaaaacgggggggcactttaatgataaaagtcaatttggttttggatgccaaaaaactttttaacataaggggaataaacctttcaaaaagccccttttaagaaaaaatgggggggtaaaaattccaatt

SEQ ID NO: 1883 - DNA, 545 bp, Glycine max
  Clone ID: PAT_MRT3847_101705C.1
aacgaaacttgaccacttgagctatgacggcaagtggcaggttacttttactttcataattttttaagtaaaactggtttgaagcacaaattcttctgttacaaaatctgctgttgttatcaagaaactgagaactataatacaccatataataacgaagggacatcaactaaaatattaatgacataggctgctaggaagtgtagtgaactgataaagataaaaagctactccatgaaagtccttatagcagcgtgaattgaactagtccgagcagaatttgtcttccgtattagggaggggggtccactccaaacagactgactattttgggggaagagaattccacataaacttgaaagcttggggttttcactatataagctctcaaggagcttacctttttgctgtttatcttgagaccccttgggtttcttctgttgcgggactgccacagcttggccttcttggtgctttgttctatattcatcatggaggagcggttgcatcaccaacatttgatttctctgccaaggttccaccat

SEQ ID NO: 1884 - DNA, 236 bp, Glycine max
  Clone ID: PAT_MRT3847_101706C.1
ggaaatctttatattttgtaaatactacaaaacacaaggtactacgttcggtgttatgttggggaataaaagaaagaagtaaagattttcacaatgaaggacacctccaccagcgttgaccgcgacaaggaacggagttccagtggctccggtagccacatttgggtgatgagaagggtcatgcaagtcaacatgttccttgctgggcctgccgtgttgtggaggttccccaaaac

SEQ ID NO: 1885 - DNA, 116 bp, Glycine max
  Clone ID: PAT_MRT3847_101707C.1
gcaaatccaaggacaaaggtttctgtcaattaactttccatttctatcaaatgttgttaaagctccctattgaaggagtcttccatgatgcatatgaacatggaggccaggttgga

SEQ ID NO: 1886 - DNA, 515 bp, Glycine max
  Clone ID: PAT_MRT3847_101708C.1
gcgtgagaggaggagttctctggtgtttagtattgattacagtactgaagttgaggctttggatggaagtggtagtgatgttggcgctcaggaaagtagcatggcgtctcctccaatcgacacaacacaagtgtccatggttgatgatcctccttcaagcagtaataatagcagcagcaacaacaacaacaacagattgtctatgttcaggaacaagtttggatttttggctggtaggaatttggtgccatgtgccttcagaaagtgggccaacattgatgacatctcaagtaccagctttcaatgatatttattttgtaagaatgggtctagtcacaactgagaggaacagtctagacccagctgcagctccgtttgctaaaaatccaagagacatagaagggcttactgagggtgctagtataattgaagtggttaagaagattaggtcacatgtgctccttggtttgtctggcgttggtggtatttttaatgaggagccttgcttcatacat

SEQ ID NO: 1887 - DNA, 787 bp, Glycine max
  Clone ID: PAT_MRT3847_101709C.1
caccatctcctaagcctcctccatacactccatatcctcaccctcacccatatcatcacccattgattgttaagattgtgggtaaagtctattgttatagatgttatgactggaaatacccccaaaagtcgcacaacaagaaacacctcaaaggtgccacggtcgaagtgacttgtgaagttgggagcaagaccataaaagcttatggtaaaactaagagcaatggaaagtacagcatcactgttgaaggctttgactatgtgaaatatggagccacagtctgcaaggctaaactccatgctcctcctaaggattcacgctgtaacatacccaccaagcttaatgagggaaccaaattgaaggtgaagtccaacgtccggtatgaagttgtgctcaaggctaagccatttgcttatgctcctgaaaagtcatatgattgcgaaaagcccaagcccaagccttcccctactccttatcacaaaccatattattacaactctcccccacccccttcaccctcaccgcacccacaccctccttactactataagtcaccacctccaccaccaccaacatactattacaaatctcctcccccaccttcttattactacaagagccctcctccaccatcaccatcacctgctccatattactataaatctcccccgccaccatcaccatcaccaccttcaccctactactataaatctccacctgctgcccacaaagatccataccatgctgcttactactacaagtgaccttctgcaccatgggcatcacc

SEQ ID NO: 1888 - DNA, 273 bp, Glycine max
  Clone ID: PAT_MRT3847_10170C.1
ttcggctcgagctcgagccgaatcggctcgagataaaaacaaaatacccttaaaacggctgatgcagacagcgcgactcgcgctcctgaacgcgacgcccaggagaatcttgcggccagcgacaacacccaagctccagctccagctccagcgccagctacagctgtaggcgagcattgtgtatcagacagaccaaccccttccggtcagtcctccactggcgaagctcttaagctcaacgatgtcgatgtctatatctcgaaacccaccgac

SEQ ID NO: 1889 - DNA, 3140 bp, Glycine max
  Clone ID: PAT_MRT3847_101710C.1
gtatcccacgtctttgagtttggctgcgatgtttctggttgccagggtttggagaggtttgcattttgtgggatttgtacggttggtgatgcagagatagagagcattgtggcaaagtgtggggcactgaggaagctgtgcataaaggggtgccccgtgtcgaatgctgggattgcggctttggcttcagggtgtcccaatttggttaagctcaaggtgaggaagtgcagaagggttaatggtgaagttgtggagtggctgcgtaaaaggaggagttctctggtgtttagtattgattacagtactgaagttgaggctttggatggaagtggtagtgatgttggcgctcaggaaagtagcatggcgtctcctccaatcgacacaacacaagtgtccatggttgatgatcctccttcaagcagtaataatagcagcagcaacaacaacaacaacagattgtctatgttcaggaacaagtttggatttttggctggtaggaatttggtgccatgtgccttcagaaagtgggccaacattgatgacatctcaagtaccagctttcaatgatatttattttgtaagaatgggtgcgcttcgcgaagctgcagatcgaataacacaaaacagcatttgtttgcatttgttttaattttcttcgcttaagcgctgtagtaggtggtgttggttgtttggtgcatttgattttgatttggaattggaagaatgtggaaggttgtgcgatacgcggccgccagatcgcggcggttctcaaccgcgattcccggtccatgcaaggttcacaagcgtggcaccgatatactccacgacccctggttcaacaaggatactgggtttcctttgactgaaagggattgattggggcttcggggcctactacctcctcgtgttatttcctttgagcatcaatatgatcgctttatgaattcgtattccgatttggagaataatacacaggggcaaccagatagagttgtttccttgatccaaatggagggatcttaaatagattgcatgacaggaatgagactctatattacagagttcttattgataacatcaaagagtttgctccaataatatatactcctacagttgggttagtgtgtcaaaattattccgggttatttaggcgtccacgtggaatgtattttagtgccaaagataaaggagagatgatgtcaatgatctataactggccagctcatgaggtagacatgattgtcttaacagatggaagtcgaattcttggcttaggtgaccttggagttcagggaattggaatccccataggaaaacttgatgtgtatgttgctgctgctggtatcaacccacaaagaatacttccagttatgctggatgttggcaccaacaatcaaaagttacttgaagatcccctttatttaggacttcggcaacctaggttggaaggtgaagagtatctatcaattgtagatgaattcatggaagctgtacatgctcgatggcccaaggctattgtgcagtttgaggattttcaaatgaagtgggcttttgaaaccctgaaacgatatcgagaaaggttttgcatgtttaatgatgatatacagggcacggctggtgttgcacttgctggactattgggaactgttagatctcaaggtcaaccattgactgattttgtgaaacaaaagatagtcgtggttggagctgggagtgcagggcttggtgttctcagcatggctgtccaggctgttgcaaggatgtctgggtgcagtgaatcagatgccaaaagccaattctatttgattgataaagatggtctagtcacaactgagaggaacagtctagacccagctgcagctccgtttgctaaaaatccaagagatcttgaagggcttactgagggtgctagtataattgaagtggttaagaaggttaagccacatgtgctccttggattgtctggagttggtggtgttttcaatgcggaggtgcttaaggcaatgagagaatctgtttcaacaaaacctgctatctttgcaatgtctaatcccaccatgaatgctgagtgcactgctattgaagctttcagtcatgctggagaaaatatagtgtttgcaagtggaagcccttttgaaaatgtagatcttggaaatggagaagttggccatgtaaatcaagccaacaacatgtacctgttcccagggattggtttgggaacacttctgtcaggtgctcgtcatataacagatggaatgttgcgagcagcagctgaatgccttgcttcatacatgacagaagaagatgtctcgaaaggaatcttgtatccatccattgactgtatacgagatgttacagcagaggttggggctgctgttgtatgtgcagcagttgcagaaaagcaggctgaaggacatggtgatgtagggttcaaagagctagagaacatgtcaaaagaagaaactgtggagtatgtcagaggcaatatgtggtaccctgagtattgccctcttgttcatgaaaaatgaacttttatgaaggctttttgctattgatatctcagttccgcgcaaccaagccctttaatattttgatttctaatcttagcaatttatgactagcaaggttttgatagttgaaggtcaattggtgagaaggggagagagagatatcctcatttgttgcagccgtgaattgtatgtgtaatgccgccctccctttcttttagtgtgtgtttggattagcgtttgtagaattaattcgagatcaacatggttttaagtaaatgtgattttagaataacgtgattcgagaagcttcataagcattatagacagttgttaagttctgtttctctcttataaggtccctattaagttgtttcaaatcatgaagtgcattagggttcctttccttattaacacctacaagcgtgcaattaattgctacattattattttcgttaataatgaattctttccaaaaagttctacgacgggattcctggtccgtgcattgttcacaagcgcggtgccgacatacttcatgacccctggttcaacaaggatacaaggtttactttgactgaaagggatatgtaggggctttagggcctcttatcttctcgtgttttatccttt

SEQ ID NO: 1890 - DNA, 349 bp, Glycine max
  Clone ID: PAT_MRT3847_101711C.1
tactattgcactaactacccgtttttgccacggggtttgtctatctatcttttaaaatttcacgcccagatggaatgggcacacatagtttcatatactcatcagaaccaatctactatcgcgaggggatgactcaaaaacggacgaaggtccctgctctctaaaaatgtttccaacaaaacgctgacaataaggtggactgtgtaactaattcgaatagcaacattgacattccttttagttagagcccgtgcagggccattttgggggaaaagaccattgagcgtgccacccgctcccgctttgggtccctcacttattatatgccccgtgcttcttataacggaaa

SEQ ID NO: 1891 - DNA, 355 bp, Glycine max
  Clone ID: PAT_MRT3847_101712C.1
ccaagccttcacccaagccttcgttacggctccaaaaaaacaaaaaaagggaaataatggaatcctgtgtaaccccaattttaaaccaaaggataataatttcaacaaaatttcctggcctttgaaaagtaccaaaaatggtcccttagaaaataacaatgctggaacgactccttacttggtgcaccatggatgcatacactttgcattcaagttttgaaatttataatgccaaaagggatgattcaaagtgtgatagccaatgtaatcgaaccatgaaaaacgatggatgctatttttataatcagttccaaggccccttggagaagatgttgttttggaatattccaaaact

SEQ ID NO: 1892 - DNA, 255 bp, Glycine max
  unsure (1)..(255): unsure at all n locations
  Clone ID: PAT_MRT3847_101713C.1
catactcgcgggcaagcccagccgccaagcaggaatcaacttatactccatggacgggacaggcccggccaanaggaaacngagcaagggcaacgaaangcagggaggcgaacaagcgagagccgaaggagcgaccaccaagcaagcaaagagcaagaaggcagaaacgacaaacaggcacngaggaggcgacgaaaaaccgaagcgngaaaggacacacccgcagaaggcccgcagaccaaggacggcaagacg

SEQ ID NO: 1893 - DNA, 197 bp, Glycine max
  Clone ID: PAT_MRT3847_101714C.1
aaacaggcaaaacgttcgtttggtatcatttgaacaaactaccctgcaagcctttccagtcctgggccccttggccgggttttgacaggaccgcatgatgaaaccccatgccccatttccattttcgggaagactttccaaaagcgctctatgatgcaacaaccaagtccttcttgagcgaaccaatgaactgtctc

SEQ ID NO: 1894 - DNA, 166 bp, Glycine max
  Clone ID: PAT_MRT3847_101715C.1
cttcgggggtttggctttcttttggaaggtctttttgattccaaccaaaacctcggaaggtttgaaggataattgatggttgtggatggattgaccacctgttaaccggttgaccattccaccatggtccaattttttggttccaaagaaaatcctgcctgatttt

SEQ ID NO: 1895 - DNA, 294 bp, Glycine max
  Clone ID: PAT_MRT3847_101716C.1
aaaaggccgggggtctctaaaagaccaagcccgaaggcacagaagcacacgcgcaaccccgaaccctcacagcggaacaaaagaagaacacgacacaacgtaccaagaaaaacagcccagggccaatacccaagaggacaaggccagggcggtccctagcacacagcgacccaggggatgctagaccccgaatcttggagcaccacgaatatcagataccgcccccagtgagggagcggacgaagctccacaggtacgggccgccacgattgcctacgacgagggggagcccca

SEQ ID NO: 1896 - DNA, 415 bp, Glycine max
  Clone ID: PAT_MRT3847_101717C.1
gaatgtctcttgctgcgcagaattcttgtgatgaagatctacatcatgtgaatactccctatataataggggctacgacaaactgactccgttgactcgttgatctgactgccctacagttgcaccacagagatcattcattccgtggctagcataacgcgctgatgctggaaactccctgactgaggatgggggggcctaagatatccgctcccctttaaaaacgagcctcacaccaaaatcgtgttcgcggcggaagatggactttcgctctcgctctattactacagccaatacggacatacatgaaatcctagctcaatcagcgtaacaacctcgtggctagaaatgttggttggcgatgccgctcatcatggaacttcgcaaggtgtttctcaaccgaaggatggctcga

SEQ ID NO: 1897 - DNA, 776 bp, Glycine max
  Clone ID: PAT_MRT3847_101718C.1
gcacaacaaaaaattgcgtttgccggcggagaaaacttgaagagaaaataaggaaaaagttttgattcatttcaacttgagaaagaaaagataaatctcctttcatcctttcagcgatatcctcgtgtttaagaaaaaaaaaactctatcgaagctcgtttcttctgtaattcgttcagctggtcgtgattgtgtgataaagcgtgcaggtaagaggatcgtggattgggaagcttagtttttgttttttttccagcatttgcttgttgtaagagcaaagtcacgacggtttctgcagtatgagaacttcgtgggcggattctgctgacaactctgccattggttctggcatcaccaatgcctcggcttgcccttcccggggagcttatgtaccgccacatcttcggaaccgggcattgtcgtcagaggttcctctggcggcagcgtcacacccggcggtggctctggggaatgaccgggttaatcatagtggtccagctcctcatcagggtggtggttactttaaacctgatcacgggcggcagcagcagcaaggatatggttctggttttcagagtggtggtggcggtggctggaatggtagaggggtggggagggaccgtgggaggcgtgaggcgaacccttttgagaatgttgaagctgaggatcaatcttttagtgagcaagagaatacggggattaactttgaggcatatgatgatatccctgtggagaccaagccggggagaatgtgccaaccgcttgggaatccattc

SEQ ID NO: 1898 - DNA, 350 bp, Glycine max
  Clone ID: PAT_MRT3847_101719C.1
atgatattgatgtgttactttacacaagaaaaccgtccaggacgggacccaaaaccaggggatcaaacaggacaagaaagcacccacaccaaaagggttataggaaaaacaaacgggacacccgccaaaacgaaaacccgggcaggggggaaaaccccttgggaaggcccggtaaaacaaatacacaggacaaattcaaaagggggacccagaacaagctaaaattaccacgagcctgcccaacctggaaccctgggaaaggggttccaagcccccactatcaaaccccaacccggccccggaaaagcaaatgcacccgcggggggacaagaagtcttccaagtacaaaa

SEQ ID NO: 1899 - DNA, 347 bp, Glycine max
  Clone ID: PAT_MRT3847_10171C.1
tcgcggtcgcgtgggtacgttgttaagttgagtcaattgaggttagaatttggagcaacgttgggtgctgcaaatgacaagataattgcaattcagattacaggaacagctacgaagaaagggaaaggttcttcttctttttcttcttcaactcgtacccagaaactaggatccattcacaccaccttcccccaaagattcatcaattctaaggcaccaacaatcgtgtgggacgcacgtgacttctgcgggtttcatctcttgctcaaacataggtccctaagtggcacgtgccatatggcacttcatgtcttacatggggagggtgatgtagtgagaatataaac

SEQ ID NO: 1900 - DNA, 438 bp, Glycine max
  Clone ID: PAT_MRT3847_101720C.1
aacaaatcctggagcatcattggccatttattattaacataagtattatattagtgcatcaaacacaacttaaagaaagtaaatgccaaattacactgaacaaggttggggagcaaatccacaacctattctaggggtttagtttccatggaaaaagccacacgaccctgcaaggtgaattttcttcacgcttcaaaaaggagatgcatagcaaggcactcattggaatgggtgctttcagattacttctgggcatggagattggctttttcttgggggcttccttctttgattccagggcaagatagcacttgctaaaaggacttaaagaagacctttctggttctaccttaagtacatgcctaccttaactacacgcttgaataggccttgcatgaaccaagggtgaatcatttttcataccggcttcacatttgg

SEQ ID NO: 1901 - DNA, 1009 bp, Glycine max
  Clone ID: PAT_MRT3847_101721C.1
ccctctcgttcgcccacgcgtccgctttctttatatgcaaagcaggaagatgatagttcacttctacgtttcctacaaagcaaatttgggaaaggaccagaaaatggtcctgagttcttctatgatcctaaatatgccttgcgtctttgcctcaaggaaaaacgaatgcgtgcatgtgttcatatatacagtatgatgtcaatgcatgaagaagcagttgctcttgccttacagattgattcagagcttgctatggccgaagctgataaggttgaagatgatgaggatttgagaaagaagctctggctcatgattgctaagcatgttgttgaacaagaaaaaggaactaagagggaaaacataaggaaggcaattgcatttcttaaagaaactgatggcctgctaaagattgaggatatattaccattctttccagattttgccctgattgacgacttcaaggaggctatctgctcatcattggaggattacaataagcaaattgaacagcttgaggaagagatgaatgatgcgccccatggtgctgacaacatcagaaatgatgtcagtgcacttgctcaaagatgcactattattgatcgagatgaggagtgtggggtattgcccttcctgatatatgtttgacaaaactgcacctgcaattctttttttggtcttaaccctttagttcatcaagggaaagggaccttgactaatccgaagtttggccaggaggtaagtaaagcctggccaagaattgtttccgtcaaaggtcgaactcgggtttgccagcgaaaaattctaactgctggcaaggaattcggcacgggccgtggctatacattagtagggcaaatggcacccttttatatctttccgtgtggacatgccttccatgcagaatgcctgattgctcatgtgactcgctgtacagttgacgcccatgctgagtatatactggacctgcagaagcaacttactttgatgggcagtgaagctaggagagaat

SEQ ID NO: 1902 - DNA, 334 bp, Glycine max
  Clone ID: PAT_MRT3847_101722C.1
ctcgagccggttttggaatttgagattttccaaatattatttatgttgtagaatttttcattttcttttcaagagattttgttttttttttttcagcaagaaaagattattggattggcaatttcccacgaaagacgaagtgtcttttgcaatgatttcgcaaattgactcttgctcaattgaatggtcttgctggctgtatctcttgttagaaatgtgagctgtcatcattcatcaatgtgatctcattgttcatctcattaaacttttgttatacaatgaaagggttacaaattcagttggagctaaattgctcccatttaccatctttact

SEQ ID NO: 1903 - DNA, 914 bp, Glycine max
  Clone ID: PAT_MRT3847_101723C.1
cttaacttcctcgcattttccgctcgtcccctacctcttgatgacccgggggttcttaaccggccacttgctttatatgctaagcaggaagatgatagttcacttctacgtttcctacaaagcaaatttgggaaaggaccagaaaatggtcatgcattattattgatcgagatgtggagcgtgcggtttgccagcaaaaaattataacttggtgcatgtgtatttagcacgggccgtggctatacattagtagggcaaatggcacccttttatatctttccgtgtggacatgccttccatgcagaatgcctgattgctcatgtgactcgctgtacagttgaggcccatgctgagtatatactggacctgcagaagcaacttactttgatgggcagtgaagcaaggagagaatccaatggtaccctttctccagaggagtccattcctagcatgaccatagacaagctccgatcacaactggatgatgctatagctagtgaatgcccattttgtggcgacttgatgatccgtgagatttctttgcctttcatcaatcctgaggaagagcagcatgtgctatcatcatgggagataaaaccaagcgctggtagccagagaaacagtatctcgttacctgcatctgcatgagttgtaatatgcttgcatacttgtgtcaataacattgctatgcagtataggactattgattgattgtccaaattccttgctagttgcaatgtgttgtttggttgtgaatgtctgaatccatattctttttaaatgtactttctctttcctttttgttatgccaaaggaaattgctgcaccccaatacacactgcaaatcctgtaccttgtattacggttgtctatttttgttactataaggttttgaaagttctttttttttaaaa

SEQ ID NO: 1904 - DNA, 179 bp, Glycine max
  Clone ID: PAT_MRT3847_101724C.1
ctgagtactaaggatcgttttgggggaaccacgaatccgttcttggaaagacgactggttatcataaaaagtatgtcaccatcacctgatactggtagtacactactattaaaatggatagaacatgaataaacagtgaatcacaaacaaaaccacatgcacccatgaaaaactataca

SEQ ID NO: 1905 - DNA, 588 bp, Glycine max
  Clone ID: PAT_MRT3847_101725C.1
gttaaggaccaatcacaagaggagcagttgtttgttgtatcatgttttgctgccagtagctctacataaagttggctaattgatagtggttgtacaaaccacatgacctatgatcgtgaactctttacagaacttgatgaggttgttttttctaaagtcaagatcagaaatgaagcatatattgatgtaaaaggcaaagaaactgtggcaatttaaggacacacaggtttgaaactaatttccaatgtgttatatgtctcggaaattagtcaaaaccttttgagtgttcctcagttgctcaaaaaaggttataaagtgttgtttgaagacaaaaattgcatgattaaagactcagaaagtagagaggtgttcaatattcaaatgaaaggcatgagttttgccttggatttcatgaacaaagagcaggctgcaatgcacaaagaggttagtagcacagtactttggcacaagagattggggcatttccatcacggtgctctaatgtttatgaaaaagaacaatcttgcaaaaaacttgcttgaattagaagaagaacttcctacgtgtgctatctgccaatatggaaag

SEQ ID NO: 1906 - DNA, 213 bp, Glycine max
  Clone ID: PAT_MRT3847_101726C.1
cccacgcgtccgggaattacatggggtgcggttaactatgatattgctatggccgtattggtacattctgagcgttcacgtgcaggctcagctactcctactgcatgaaccgactcagactactcctacacgagcaacacccaaagctaagggtaaaagtagagaagaagaactatctgaagctgaccaggtcatcattgttcaagctcatta

SEQ ID NO: 1907 - DNA, 212 bp, Glycine max
  unsure (1)..(212): unsure at all n locations
  Clone ID: PAT_MRT3847_101727C.1
gccactgaaacatttaattaattacaagagtatcgcccacgcccaatcacacatgggagacgcaatggccacttaaagaaataccgcttcaccggcccacacctcgattaattatcttganaacatgacacaacaatcaaagggagacgggatttcccctagcccatacctctcaggagggaggaaacccttctccaaagcgctcggccatt

SEQ ID NO: 1908 - DNA, 439 bp, Glycine max
  Clone ID: PAT_MRT3847_101728C.1
gcgtataattgttgtgtgagagagatctcttaagagtggggtgaaagcgctaataaaaatgtgcctcttttgcgctctcacacctctgattttgatgtggaaacgtgtgattgcatattcgagaggtgatattgaaacacagtgttgtgtgctctttatccgcgaagtagagatagtttttctgtgcaaaaaaaaacaaaagacaaaaatggcgcgcgctctctagaagccccactttcacgcacgcgcacatgccactatatatctcttatatagtgacctcaaatttcaatacagtgcccggctttacacaacctcgactctgaaaaccctgtggcgatcccactctaactcgttttgcaacatatccctctttccacatctggcgttatcgcaaagaggcccgcagcgagcgctcttcaacacatgtgcacactct

SEQ ID NO: 1909 - DNA, 211 bp, Glycine max
  Clone ID: PAT_MRT3847_101729C.1
attgtcctcaacgcaatcaaggtatttggattcactgtaatacacaatctgtaattgaggctgcgtcagtcgcaattacctaccatttatataaaggtttccacccttgtgcgaaaaaaaaaaaaaaggaagaagattggtatatagtagaaatactgctgtttggccgtgaggatatagttttttttttttttttggcgttgaggacaat

SEQ ID NO: 1910 - DNA, 423 bp, Glycine max
  unsure (1)..(423): unsure at all n locations
  Clone ID: PAT_MRT3847_10172C.1
ggctcgaggccttactccgaccgcattacgactaatccctgaccacctcatctatggtgctgtgatggcgggaggcacctggcacgagtactccanggttactggacagtcggacgctggtgcagacttgcacgatgggaatgactgtagacgagaggttgcacgcggntcataccacatactcatccatgtacttgcatgatgaaagaggcagctggcagtgcttgccgtgactataacgcacacgggtgtaatctgagtggaacctactcctatgtgacgactgacacttgtcgaaaggtgaatcattgctgccaccgttggcgatgcccatcactatggtgcacctactaagtgactcgctgcttactctgcttagccatacggcatgaacatggcttcttatactgcaattgctcatcg

SEQ ID NO: 1911 - DNA, 276 bp, Glycine max
  unsure (1)..(276): unsure at all n locations
  Clone ID: PAT_MRT3847_101730C.1
tcnagancagctaaganaataaaatatagtngcntgcnggccggtcgtnagtnccagactagctggtcagtnggggtaaganagtgttctgtnagtgntctcanagtctcagtgcgaccttgcttggtcaacaatttggagagtntgctttnacacggaaacgaagantttcgagaanaaatattaaaccgggaagngaaaaggggaaannnagtaaatnangtgcgcatatggcagganaaggaatccgattncggtaagactcgatgtgantcg

SEQ ID NO: 1912 - DNA, 283 bp, Glycine max
  Clone ID: PAT_MRT3847_101731C.1
ctctctcatatactctctctttgtctttttctacgctttctcgttcgagagccctcgggggatccactaactgaaggagaaatggggttgacattcaccaagcttttcagccggctttttgccaagaaggaaatgcgaattctgatggtgggtatcgatgcagctggtaagaccaccatcctgtacaagctcaaacttggagacgatcgtaccacaattaccaccattgggttcaatgtggagactgtggtatactagaacattagtttcactggctgggatg

SEQ ID NO: 1913 - DNA, 484 bp, Glycine max
  Clone ID: PAT_MRT3847_101732C.1
ttccaggaaggtttcccgtcatcactgtatgacgtcctccttctttgggggggggggggggagggactatgagaggaggcataaaccaagatgaaaagtccatgattaacccggagtaagtaagcggctaggcggcaaacccagcgttgtgtaagcttagaacatgctatgccgtaatcaagagggcaagtttgcgtttaggttggcgtgggccggcgaaaagcgtatataaatagccgcacgggcttgggaagtgcaccgaagtttaggtgggttcaggaaggcgcccaaagaccagccaaaaggcatgcaaaggtaaaaagtagacgtaacaagggtgcgtgcatgttaattaaaagggaaccagcagtaagcagcgtggggcgcaaggtacggcgtggcgaatcgttattcacagtacgtgcggtccgatggtttggtgcgtaagtcgcggcaccagagtgggtgcaagtgcggtgctggg

SEQ ID NO: 1914 - DNA, 710 bp, Glycine max
  Clone ID: PAT_MRT3847_101733C.1
cgcccgattcaatcgacttcaagccatcaacgacaatcaaccaaaccaagagactctccataaaccgtcaaaatggttctcgcagttgaccttctcaacccttccccggccgctgaggcccgcaagcacaagctcaagaccctcgtgcccgctccccgctccttcttcatggacgtcaagtgccccggatgcttcaccatcaccaccgtcttctcgcacgccaacacagtcgtcgtctgccagggctgctcgcaggtcctgtgccagcccactggtggcaaggcgcgattgaccgagggctgctctttccgaaggaagtaaacgtttcgtcggagtgatgacagctgggattgatgggttacgatgacgactatcatggcttaggggtgtagatctcattggcgccgatcgactcgaccgcaggatagaagagggatctttcgacccgagtcaatgcaaaagtcacaaaaacgggagttccggatatctcagcgctgatggacaaccctttttactagaatctatttccttttgttcggcatggtctttcggctttcatgtacatgcatgtgggaggagagatagcatttcagagcctttggatcagtcgtccgaggtgaggaccggcttgcaatcgaggatacctacgcatgctagcggtcctttgtaaatcaaagcgtcaaatcctcacattcatttcgcacacaaaa

SEQ ID NO: 1915 - DNA, 447 bp, Glycine max
  Clone ID: PAT_MRT3847_101734C.1
cgaaccctgaacaacataccatctgaacccactcacaagtatggcgaacgccatgcaagatgcggtccgccagcaggcgttatccataggccatcaagacttcaacacctgaacaacatctcttgataccatgtctcccccagctgccatctttgagtcttctgcccctgctgtcctcggcagtggcatagatctcaacaagaatcttgctgccaaggttgcttctgttggtcttgacggtcaggcgaagaccctggctgatcttgagaagaattgggacgcgtttacgtttgctcccatccgtgagagccaagtctccagagccatgacccgccgctacttcaaggaccttgatacgtacgccgagtctgatattgtcattgttggcgcgggatcttgcggactttcgacggcttatatgcttgcttctaagcgccccgaccttaa

SEQ ID NO: 1916 - DNA, 337 bp, Glycine max
  Clone ID: PAT_MRT3847_101735C.1
aaaggggggcaatagacaaaatttttatacaacaaagcatacaggggcaggttttaagggggggatactttcctacacatgtaaagttatacaattgactagtaaagaactgggtttaagggtttaaaattggtttttacaagagacacaatgaatttttgggtgggaaaccaatttttaaaaactaaatgggtaaagccaactcctagtttgctacagcttttaaagggggtgctaaccttacatgccaccagaaaaaatgctggtaaaatttcatgggagaccgatgaacaatgtcttagagaggcagaaaaatttcagccccaatcaatgcaat

SEQ ID NO: 1917 - DNA, 520 bp, Glycine max
  unsure (1)..(520): unsure at all n locations
  Clone ID: PAT_MRT3847_101736C.1
tcgatctatcgctagaaatgtgccagagtaccgtgcatggtgggttgaaagtttatgatgatgtatatgtatgctacagtgtaagttagcctgattaggcggactagtaacctttcttacagtgggcatacgtcgcctaagttaattcgtcaccgccagggcatagctgttcagccgatggggctgacactgctgcggttaacgccgctagttatgcccagggagcacctttggcaaggcacacagccaccagtgcatgattggccaaacccgcgagtaaacctgcggcataagcgcaatattaggaggcttttgctgggccggcctaagcatttaatgtactacatgctgaggcataatggaagccggtaataatggcagccaatgcggaatcaagccncggccgctaactaaaactggccactaaagcttagaggcctacgcgtgtggctacgtgctaaactgccgctgctgcgttgcaaacggttgtgggattactagaggctanagaggctcccga

SEQ ID NO: 1918 - DNA, 459 bp, Glycine max
  Clone ID: PAT_MRT3847_101737C.1
aggtattggagcgagctaatttgagctcgacttggatggagctacagctcccgtaaggggcttgctggataactgatgatgagcttatagcataatggcgctttgccgtctagtgaagcatgtgttacatctgtattatgcatgccctactggcttgtacaggaccctatgacttgcccttgttctttgttgcagatgccttactttggcggtcacccttgagccactatggagtgcgttctggacaaggcctctagtacgctatgacggccttcagtcattgcctgtatccttaacatggtcatcagatggcttctccgtcacaatgggcaagactggaccctggtcttgagtggcatttgccagctcttcaaggctagagtcaccagccttgaccttgtgtgcccttcttgggaacgcggcccccttatccttgtacgttgtgagcctctgcgcatt

SEQ ID NO: 1919 - DNA, 770 bp, Glycine max
  Clone ID: PAT_MRT3847_101738C.1
ccacgcgtcgtgagcaaaatgctttcccacttggtaaaggagcatccttattacataatttgttgctatgttggtctcttgttgttgttcttattagtatgttgggcactttggtgcaaaaacaagtcctctatcggcattcctccgggaaatcgaggattgcccttcgtaggagagacacttcagttcatggctgccatcaacagcagcaaaggagtctatgagtttgtccatgctcgccgcctccggtatggaaaatgcttcaaggcgaagttgtttggggagacgcacgtttttatatcgagcagggagtcagcaaaagtgattgtaaacaaggagaacgagggagggaaattctcaaagagctacataaaatcaatcgcagagctgcttgggcgcgacagcttgctctgtgcagcacaacagcatcacaaactcatacgcgcccgtctcttcagtttgttctcaacagattctttgtcttccttcgttcaactctttgattcactcgttcttcaagctacacgtacctggacctgtggatctgttgtcgtcatacaagatgaaacactcaagctggcctgtaaggcgatgtgcaagatgctaataagcatcgagagtggccaagaattagtgacgatgcataatgaggttgctcgtttgtgtgaagcaatgctagcattaccagttcaaaagcccctggaccagattctacaaaggccttcaggctcgaaaaagataatgaacatattggagaagatataagtgaa

SEQ ID NO: 1920 - DNA, 271 bp, Glycine max
  unsure (1)..(271): unsure at all n locations
  Clone ID: PAT_MRT3847_101739C.1
aaancacctctcgctcaaatcnaaattatttgtctaaacctaattagaacggagtatctacaaagctgctaactncccctattatgtggtcaacagataagatcttgtttgcatttttattcnattttaaganatcctantaagattttgattatgacttattttaaatagggttaatttttttaaccanaaannnacgacaaggncccnccgnnacncgngacanancgnncnnggactnggtagnnaagccaggncanncnncngcnca

SEQ ID NO: 1921 - DNA, 247 bp, Glycine max
  Clone ID: PAT_MRT3847_10173C.1
ggaaaacacccagaactgtgtgacaaagttggtgggcttttggcctttcatatagatgacctgcgagtttttgcccccttgtggctttcaaaaacagaagaagtacgggaagatacggttgagggggcgacaaacatttttgttgacatctatgggaaaggatggatcagtgagagggggggggactcttttggcgctgcagaagttggacttcggcacaaaatcaatgataacttaatggtctacc

SEQ ID NO: 1922 - DNA, 968 bp, Glycine max
  Clone ID: PAT_MRT3847_101740C.1
gtaatgattgctttttgattcctgttgaatttggtgactcctttgctacaaaaagtgaaaaccaacatagatataaggtgggggatgatgggtttagtggggatgaagatgttgttttggattttgatataaattctggtgcagagtctgcacctgttattgagaattggcacacttccggggatactgtgtcactgttttcggatccagggtgtacaaaggtgttcaaggccaatggatttgagttaagaagtgaacatttggagcaaaactacctagatatgaaatttgctcaatcaactgaagactcaagcatcaatggtaatgttgaagcaaacatgaaaagaagagatgtggaattatgttcagttgtacctcaagtgtctgaaggtgtaacacaaatgaggggtgatgaattagaagcagaagtctcaactcaagatcaagatattcttgaggattcgagtcaacaaatacaagaagtcccaccttctagctctactacttttactatccaagatgatagtgatggaagaagaaacagttcctgatggctgatacacccacttatgcagagaatctgcatcagctacgcaagaggctacaactgcttggaaggaaagaatcaggaacagaagaatcattagaaggaagtgtcatgtgtgatatagaatgtggtgagttaacaattgagaagttgaaatcagcactgaaagctgaaagggaggccttaaatgttgtatatgcagaactagaagaagagaggagtgcatctgcaatagcagcaaatcaaacaatggcagtgataaataggcttcaggaagagaaagcagcaatgcagatggaagctttgcagtatgagagaatgatggaagaacaatctgagtatgaccaggaagctttgcagcttttgaatgaccttatggtaaagagggagaaagagaaacttgagctagaaaaggaggttg

SEQ ID NO: 1923 - DNA, 163 bp, Glycine max
  Clone ID: PAT_MRT3847_101741C.1
gaagtatctgatttttcttacctggcaattgcttcacactcatgcaggcttctccaagctgtgaggctggtcacattctctgctccctaaaaaagctttttactgtacaactgtgggatgtctgataatgcatcagactcctagagagattgttcctgcttgt

SEQ ID NO: 1924 - DNA, 306 bp, Glycine max
  Clone ID: PAT_MRT3847_101742C.1
ggctcgaggtttactgacacttgcagagagtgtttttcttactaggttacagcggcgtgggccaagagggtgaccatggccatggtcaccaacctgctctagtctacggggttcgcggcatcatcacgacctagacatgttgaatactcttgaacgaaaaccgccccacgcacgccaccctatgcatgacgaggaactgaagtccatgtacgagcagaggctagtaaagcacggcagggcgtgcaccgcgctgcgagagaacgagaacaggatccattacttcagggacaacctgcgattcatcga

SEQ ID NO: 1925 - DNA, 232 bp, Glycine max
  Clone ID: PAT_MRT3847_101743C.1
aacaaccaaggagtttttttggagctggtccagttgctttatactttgcagcttgtccctctgccttaaaaaaatcttcccctttctttgcctaaataattgctcttctttcttcaacttccttggggattgcagcaattttgctttttatcttttctgcagcttctgccttttttttctccagttctttttaaatcttattaaggtcagcctcaaaaagagcttttttggc

SEQ ID NO: 1926 - DNA, 288 bp, Glycine max
  Clone ID: PAT_MRT3847_101744C.1
aaaagaaatcccattttgattatttaaaacactatataaccgattcatgaagggaattttcacatcatggcccttcaaaaactaaacattttaacattatgaccctcccaaaactaaacatttttttgcacatgattaaccttacaagatgttcactggggcccaaactggggggagagcaggaatttttctaacctcaaaactgtgtaccaaaggggtggaatctggaacccccatttgtttcattcccatttttaatgccactagctaatgctgatttgggatcat

SEQ ID NO: 1927 - DNA, 347 bp, Glycine max
  Clone ID: PAT_MRT3847_101745C.1
aaatgggttaaaaagggcaatgcaccggaactgcccgagactcgtaataattacaacacgctggtgtctcttggattcaagattatagtcttgtcacgaagaacactggacaaacaggccgtaacagaaccaaccttaacaaaggttgctaacaaacattggaaaaattaaatctcaatgatccacacgatccttccactccaaatgcagtttcatacaagacagcatcgagagagacactgataaagcacggatacaacattcatgggatcactgttgaacaatggagcgatatcctcggaggccacagattgaaatgcatgacctttaaacttcataatcccctg

SEQ ID NO: 1928 - DNA, 607 bp, Glycine max
  Clone ID: PAT_MRT3847_101746C.1
ggttatccatggctgtttataattttgactcttgctaattgtggttttagatttatgtgttttggatgatgttggcttcttaatcattgtgtattcgttgtttttgaataacaaaacggttagagctagacacgtgttttatgatttttttctttttcttgtgtgtgtttgtttggataagttcctttttattggatctgtttgtgggtggtgttgattttgtggaccatgtgtttgatgttggctgttgcaggggtttttgttcatgaaagaattgaatatgccgggaattgttacaaacggggttcaagatgaaggggggagtaatgagatgaatggggaccaggattcaccttttaaggaacccttgaatctggttaagtccccgaggggtggttctgtgagtcccggaagaggccagggtgatgatggtgctaattttgggggtgatgagggaggtgagccctccattgaacagctttatgagaatgtgtgtgatatgcagagaaatctgtcaggcattgaattacaggtggaatctgatatactttcccaaatgacatccagggaagaagtcctttttcaaagcttccattcgagaaagaat

SEQ ID NO: 1929 - DNA, 654 bp, Glycine max
  Clone ID: PAT_MRT3847_101747C.1
cgctcacgtgcagtttaattgtgggatcaggagagcatcaagagcagcatttttaccaggttggtgtaaaaatgacacagtccatacacttcttcacactgacagctgcagaaaagtcaaaacccaagcatcattttcgtcttggaaaacagacagtcagtgcccggtgcggtccgcaaagtcaggatggccctgcatcatggggcagccggggatgctggggaccaagggccacgggctacagtgtctgctggggtccttgttccctgggaaccagccctctccatatcctgccctgcagtgagcagggacaggacaagacaaaaaggggctccagccagcagcctgtgtattgagtctagaaactttcccagaaatcttccccacatggcttctcccattttagggggttctggaatgagtcacccctgggggtctttcccagcaatgcaataaatatgagaatttaatggagaaacgaccagcgtggcaaatgccacacggtagaaaaggctcagtttggctcctgcctccactgactcttcacagaccagggtgtctccaagtcagtggctctgggaaccccactacgcggctgggaaacacacgcgtgatggtctgtttgtagcatccaccatgggagcgggtggtgct

SEQ ID NO: 1930 - DNA, 217 bp, Glycine max
  Clone ID: PAT_MRT3847_101748C.1
aattcctcgaggggtttttttggcaagtgcaaccatagcgtgttcttgctaaccggattcagtctcgcttggcccatctagccattacagcaactgtggatcaaatgcacgggacaccattgatttgtttgcagcagcttgcagttcatgaccttggggggatttgggcaaatgggatgacacactatcaaaattcaatgaactgtaagtctcttgg

SEQ ID NO: 1931 - DNA, 1137 bp, Glycine max
  Clone ID: PAT_MRT3847_101749C.1
cacgcgtccgaattcctcatctatggacttaagtggcatatctaaacctccaaaattcatttgaatccttcttttttctaattaaaaatgaagttttttaatctcttgaaaagcagacatgtcagatcctgctcctctccttcatcatgggcctggccatcctgccaccaacccaaaaccctctctttcagagtcaccgccaccaataccaacaataacaaaaacaacgatgatgatgacaacaacatgagagacattaacttagcgttagtgtcacaaactccagaatcgttcttcaccgagtcaccagactcggcgagcttctcgacaacctcgggagttgtcccgtggcgtggaccccatcgagacggtgattcgcggcctgcgttcggatcgactcttcttcgatcgggacgatgcaagcttcatgttagagggcaaaccgacgacgaccagagccacctggagccgttcaaaaacagcgtcgttttgacgatggactcggaggaccctcacgtggatttccgcaagtccatggaggagatggtggagactctcggcgtcgaagactgggagagtctcgaggaccttctgtgctggtacctgcaggccaacgccaagagcaaccatgagtacatcattggcgctttcgtcgatttgttgttctatctcgccgcgcgtccgtcaccttgctcacaagactttgaacattctcattctcgtccttcttctcctttatcgttttatagttcttcttcttcttcttctccctcatcttcatgcagcactcgctgtaatataaaaggtgaagtggaagaggaagaggaggaggttggtgcttgtagttcttctttttctttagcgcagggtaaggaggagattacacctgaagatgaagttgcttcatcttctaacaactgattttaatggtagtggactgaattgtatgtaaacaattggcacaggaaaagagtataattagtgacatcaaaattttaatttttgttgcaatagtgtgtgacttccatggttttcgccttgttcctctccctcacacaatctgtgtgccgttgaggccacacatgtgggggaatagcaagtgtgtgatactcataggcctgcttaatttttgtttat

SEQ ID NO: 1932 - DNA, 392 bp, Glycine max
  unsure (1)..(392): unsure at all n locations
  Clone ID: PAT_MRT3847_10174C.1
atagcaagngnanannaaanaggggtcngagncanaanncgctanggagnggnncnnangngaanagcngagcnaagnagacnnggacagcncatanatganananggtaaaaganangnnaaagncatgntnanncacgnatagnnatntngaggatnnagngntcngnnaacngaaagaacnnagngnaggctcngtctagtngganangtnnatcgangnacagtgangnggtgactaaatcagggagagcnagnggacaganaaaggngngagtgcacggaggnagtnnnnagaaggnnccaangatttnangtagaacaggagtatnntggngnncnangagaanncgtnagtnanagcagagtagatgtngnctnatngagntncc

SEQ ID NO: 1933 - DNA, 366 bp, Glycine max
  Clone ID: PAT_MRT3847_101750C.1
cttcgttctttttttttttttttttttttttgtatattttttttttttttattttatttctgtgtttcatttttttttgttttttactttttctttctttcaatattacaaatttcattagatgaaaacgtagtatcaattcaagtggagaatgcttacgttcttagggggggcataagcaggaaacataataggggggggagagggaaacaagcttgaggcaaaaggatcaaaacaacccccaggaacagcaatgaggacaagctgaactgatttgacatacaaaggacctccccagaaggaatcttgattaggattaccaaaagccggctgtttcaagaactcgaaagccccttgggctgggaa

SEQ ID NO: 1934 - DNA, 1475 bp, Glycine max
  Clone ID: PAT_MRT3847_101751C.1
acggctgcgagaagacgacagaagggggagaaaaagattgtttgttgctgtgttgtgtgcatagagggggagagagagtgtggaggctgctatggggaacagagctatgttaacgctgctactcttcttcttctcgaccaaattgtttccttccgctctggctatctggctgtcgttacccaccactggcaccaagtgcgtctctgaagaaatccaacacaacattgtcgttttggccgattacgtcgttatccccagtgatcacacccacaaccccaccatcgccgtcaaggtgttcgcgctggagaacacacacgccaggccccaggggagtcctaaagctcggtatgaacttaaaaaaccatagcgtgcctctactatgttgacctgttgtaacccggatagatcacagctatttgatgagtgtgttctctaacggttcccaccatttcggggagtggcgtgcattgtacctccctcacatgtaacgaggggatggatctggaatctcgctatactggacccagggcaggcctacggctgcgagaagacgacagaaggggaaagaaaaagattgttagtttttgtgttgtgttgtgtacagagagagagagagagagagagagagagagagagagaggctgctatggggaacagagctatgttaaccttgctactactcctcttcttctcgaccaatttggttccttccgcccttgctatctggctgacgttacccaccactggcactaagtgcgtctccgatgaaatccaacacaacgtcgtcgttttggccgactacgtcgttatccccagtgatcacgcccacaacctcaccatcgccgtcaaggtgacatcaccgtatggaaacaatcttcatcacaaggagaacacaacacatggtagtattgcatttacaactcaagaggctgggaactaccttgcatgcttctgggtggatagccctagtcaaggagttggtgaggttaatgtaaaccttgattggaaaattggaattgcagctaaggattgggattcagttgctagaaaagagaagattgagggagttgagcttgagctgagaaagctagagggagcagtagaggccatccatgagaatttgctctatcttaagggcagggaagctgagatgaggattgtgagtgaaaaaacaaatggcagagtggcatggtttagcattatgtccttggctatgtgcattgcagtttctggtttgcaattgtggtatttgaagcggtacttccagaagaagaagcttatatagattagttaatttaatttgattagtgatactgcaaacatataataacttaaaaagaattttcatgaaacactatttacaagtgtagacagaaattgttgataccccaagtagagtttccaaaatctcttttccacagatgattattacaatgaattgtcctgtatgattgggatgtgaaaatctgcaggcg

SEQ ID NO: 1935 - DNA, 284 bp, Glycine max
  Clone ID: PAT_MRT3847_101752C.1
tggggttgtatgagattattggtcttctgatataaaaaaacccttgttaaaatgtggctacttgacaaatctttatgttttggagatgattacatcacgtgagacagaacaatgttgtttataattggctctagccttgggtttaacaaaatgttgtaccaaatgacctatagacaacacgggtgatctagtgaacatccaatggaaggattcttagacatttggtatattggcaaggagatgggtggcaattgtgctattaacaaatgcagtttttacttttg

SEQ ID NO: 1936 - DNA, 454 bp, Glycine max
  Clone ID: PAT_MRT3847_101753C.1
cccacgcgtccgaagacgacagaaggggacacaatattattccttttccctctctcgttccccacttccaaatcgcaattcctcttttctttctccgagtctcagcaatatccatcatccttctctctccgccgcacgcggcggcgactgttgataccctgcttcttatacagatccgccgctccttcttcctgccaacgccgcctcctggttccctctcttccccaacccctaaccacatcttttcacccaattttttctttaattattattattaatttgttaccgttttcactttcattatctaatatttttatttttttaattgcatgctgcaaccctttagttgcggacccggtttatgatgattccttggcaaacaacaaacggatactgaagaaatttgtggtttcgcaattttaccccctcaaaatcaaaagtagctagagtctac

SEQ ID NO: 1937 - DNA, 302 bp, Glycine max
  Clone ID: PAT_MRT3847_101754C.1
ggtgctcaatcaactatctattataagcatcttgtcctcctcatagtcttcttcttcatcatgttcgtgttctatctgtagcgagcatcacagattcgagatgcagctgcatggttgggtatgtgtgtgcttccggacatgggtgtggacattcgtgcagcagtgtgccctttgtgcgtgaaaggtcacgtctaatgtgacccttgcagtgcatggttatgatacatcagcaagctcctatattgccggtgctgtgactatgttgcaaggcaagatgagggttagcacagatgttgtgtaca

SEQ ID NO: 1938 - DNA, 226 bp, Glycine max
  unsure (1)..(226): unsure at all n locations
  Clone ID: PAT_MRT3847_101755C.1
gccagtntntcaccancatggccancggnnnaacgncaagnntccgnngngatntttccaggncatgtgcctngaaatgcganggttctnaccggctcttccggtaaactcaaccgggaagtgactatnaggccaatnnggtgccctcttctgcctctttcaaggttgnaagccaagnagggagagtggtnacctggnntggcctccccaacttanctcgatggca

SEQ ID NO: 1939 - DNA, 281 bp, Glycine max
  Clone ID: PAT_MRT3847_101756C.1
gcggcttaaatattattgggtgaattgggatgatagactttttttttttggggaaaccaaattttaaaaaaaatcccttaaagggaaaaggggggctctttggaagcgggaattcatttttgcatggacacattttaagcaaaacgactctaggttattgacttaagaaacaatatgattgcacgatggttttcgagaaccaaagtaaaaatcgccccccgttcaaaagttaaaaaacaaacaaaccttcttaaacctagttaaccattggggtgggcccc

SEQ ID NO: 1940 - DNA, 228 bp, Glycine max
  Clone ID: PAT_MRT3847_101757C.1
gttacatagtttttcattgttttacttaatctacaatggctgcttcaacaatggctctctcttcatcatcattagctggccatgctatcaagcttgctccctccactccctgagcttggtgttggaatggttagcatgcggaaaacatcctccaaaactgtttcctcaggatgtccattgtacggcacatcacgtgtacagatccttgggcccatcctcaggtgagcc

SEQ ID NO: 1941 - DNA, 407 bp, Glycine max
  Clone ID: PAT_MRT3847_101758C.1
gaagtggtgaactctggtccagaagacatgatttcagatttacgtaacagttacaacgcgataaatcatggaatttcagtgcgacttttagaggagcagttggcaactgcagagtctggagatgattttaagaggtcatttgtactctatgtgctgggaacgcttctgtgcccaacagctaggctggatgttagcccgtcattcctccactttttgacaaatatggatcttgtacatcagtataactggggtaaattcttgcttgataggctggttcgagaggtattgcgcttccatcaagggaagcaaagaactgttggtggttgtcttttatttttgcagcttttctactatgagaacatatctcttgaagggtcttctgctccagttccaacgattgttccata

SEQ ID NO: 1942 - DNA, 356 bp, Glycine max
  Clone ID: PAT_MRT3847_101759C.1
tcttcccaccacttattctacacatgatttttttcaactctaacatattatcctgcgcggatgcaatataatgtgccgcgggatctaaactcaatctcacaatcattactctgcaatatcttcaatgaccatgctacaactatccagagaaccaacctcaattcataatacttaatctcaaacaatcttaatttctaagcatatttctccatacaactctttccatctaccctactcacctatctaactaccaatttttatcccatacttatatcattgaacattacctagacatgttcaaggactacaaataatccaattactacaataacctaaatacttctgtcactaacttt

SEQ ID NO: 1943 - DNA, 438 bp, Glycine max
  Clone ID: PAT_MRT3847_10175C.1
ccactcaattttataattttatttgtaaactaaaatttactgtcgctactttcacggcatccatatttgtatggccatttattgggtgaaatgttaccaacacattctttagttaacaagaaattattatatggttcaagattactgtgtgtctatgatctgactaatttttacatgatatataactaaattttattaattttttcttgtaaattgaaaagctcaactacatgttacgtggagattgactggaccaagagcatggatatgtagtgatcccagattataacaatttctcctaattaacacattatttgtaacaatctttatcagtagcgggaatttattgggaatcaatgaatatatggatctaactctttatctcataattttgtcacttttgatgaattttagtcaattcaaattgttaaagaatat

SEQ ID NO: 1944 - DNA, 1025 bp, Glycine max
  Clone ID: PAT_MRT3847_101760C.1
acggaatatgcctgcagaggactttgaaaaattatacatacgtcactcaatttggatccttggaatattacaaccggtgggatttaggttcaaacaacagctacaggtacaatcatgatgtttatgatcgtttctggtatatctatggtgacaacaaggattggaaacaattaagtgcttctattcctgccgattacttaaaccagaacgattacaaaccgccagagattatcttgagtaccgcagttacaccagtaaatgcttctgcaccattggtaataagctgggagccaccagatcaaactgagctatactatgtgtacatgcacttcactgagattcaagtgttagctaagaatcaaacaagagaattcaacattgcccataatggaaagccatggtgtccaaatatgtctccaccataccagaatgtcaccacaatatataacaagttacggaccagtggaaaaaaaattgaatattcacttgagaaaacaaaggattcaagcctacctcccatcataaatgccattgaaatttacagagtaataaacttccagcaatcagatacacaccaaggagatgttgacgcgattgcaaccatcaagtcagtttatgggatgacaagagattggcaaggtgatccatgctcccctgtagcctacttgtggaatggtttgaattgtacttaccgcggaaatgagaacccgagaatcacaactttgaatttatcttcaagcgaattgtcaggaatgatagatccttccatttcatatctcaccatgttggagaagttggatttatcaaacaataacttaaatggtgaagttcctgattttctatctagattacagcacttgaagatcataaatttagataacaacaacctcacgggttcaattccatcagaactagttaaaaaatctaaggaaggtttcctatcactaagtgtgggccaaaatctgtatctatgtgaatcttgtcaatgcaacgagacgaaaaagaaaagaacattggtactccct

SEQ ID NO: 1945 - DNA, 761 bp, Glycine max
  Clone ID: PAT_MRT3847_101761C.1
ctttggttttttttttttgaaacaagtaactggatcttttataaattcatcatcaaacaacagcatctaaaaatcgaaccccaccctcgctgtatttacataaattaacctaaaaaggtttaaaaacttaagaaaatcaaattaaatcaaccaaccaaaacccctgagtcaataacaacacgtcctctcttcctgcaatattttcattccgagattagataacacaaattgattaagtggcaaaaaggtttaaaaaaaaggaagaaaaaaaaacctagtcaacaatatgttacccttttttttactttctttatagaagggtatttacgtcaattccgaatgctcctgtgccctttccccgttgttgttccttctttcttctgcggcgaggagaaaagttgtccgaagccgataaaacccgatttcgatgccccacggagggagcagacggggacgttgagcaccggcgtaaccctaacgttggcggaataagagcgttccattccgcggtgcttgaagcggggcccaccgttgaaagtgcttggactactcgagcttcgttctaagctctgaaacactattttccccgaagagttcattctagggctgtccacggaaactcccctgcacgtgaccgtttccgattcccgccggatcggactcctccccgggcgggaaagctgggaaggctggtccgacgagtgcttgttcgcgtcgaatgagttcgtgcgggttttgactaggcgaattctacggttagg

SEQ ID NO: 1946 - DNA, 256 bp, Glycine max
  Clone ID: PAT_MRT3847_101762C.1
aattgcagtggtctaaacacgccattggatcacacttgtgcaaacttctccaattagggactcgttgtgagatgctgcttgaaagaaaggttgtttaacggtcaacactgggatgtctgggaatgcatcaaccacaaggagtggttcggcctcactgggacatgtgtttttatacaaacagcaacagcacctcgcattttgatgcatgttagtggtcacaatcagaaccacattcctgggaattaacctctcccaa

SEQ ID NO: 1947 - DNA, 272 bp, Glycine max
  Clone ID: PAT_MRT3847_101763C.1
aaaagaaccgtgtgctctgctcgactcaacagcttttctccattcctcaaggctgcaggggtcggaggcagtgatgggatcagtcagtactttactgacactgcttggtgcaccatgcatgagaactttgatgtctcatgtagtagtcatgtctgcttcgccttgtaaataattctatgcttcagttcggatgccaggatgtaatacgatctatggtctatgcgacaacataagggtgtgtctcaaacattagcccgtaaattgttctgtcc

SEQ ID NO: 1948 - DNA, 626 bp, Glycine max
  unsure (1)..(626): unsure at all n locations
  Clone ID: PAT_MRT3847_101764C.1
ctaacttgtataaattgtgagagatgtaccttttttagttgagaggtttcatgcttgatgtgaaccattgttgcaattgttgaagtgataagtaggcttgaaaaatattttatggcaaatcatgtgtgataaaattatgccttctgagtttttgggcttttatggatggattgcactattctgctcatgctctttcatgtgtgatttcacccttatgctagattactctagattttgtgtttcctctcttgtcatcccttgttgcacatgcatcgattgagatgatttaggttttctttcttttagccactagctaaataaacctaccttgcattgacatccattgttaccctctttgagcctttaaccccgtctttcattttgtagctcattacaagccaaaaagtggaaaaccatgttgttttaaactttagggagaaaaggggccttggaattgttttgggagtgagtttcaaacaagtgagggggatttgtattttgtttttatgaaagttcctttatttttgtaatttcattttcttctgacttgttgcccccaccccccccantttttttccnnctctnntttatagaaaataaaaaaaggagtgtaaaaggcaaaagaa

SEQ ID NO: 1949 - DNA, 346 bp, Glycine max
  unsure (1)..(346): unsure at all n locations
  Clone ID: PAT_MRT3847_101765C.1
cgacgaagctcgcatgcgcgcgagccgagaccgcacctccagcatacaagccgccagcgtttcacttgcatggaaagcccaccaanntatgactttctcncataacgggaaggccgactcacgccagttaacccactcacccacaccgctgaagggcgtcatgcccgacgccaccgcttcgcccttggatccgcgcacacagaaggagagaagaaggaatcccgcgattggatagacacacaacaacccccagagaaacctcccgaaaagaagcaataaaacccggaagggccaatagcacttgcccaattatctaatcccgcggagcccaactaaaatggtcaga

SEQ ID NO: 1950 - DNA, 235 bp, Glycine max
  Clone ID: PAT_MRT3847_101766C.1
ttttggtttacttaacaacagcacatagcggttttcaagatgatcaagctaccctttggggctctctggcttaggctcacctgccagaagttaaaatggcccctgaaactttcctattcacatctgaataagtggacgaggggcaccctgaccagctatgggaccagacctacaaagctggctctacgcatgctaggagcaggaccctgccaaaaaggttgtctgggcaacctgc

SEQ ID NO: 1951 - DNA, 234 bp, Glycine max
  Clone ID: PAT_MRT3847_101767C.1
ttatcatctctcactagctgaccttgatatctactatactgtatacactatattccatatccaggactcattagttacatattaatgggatggaagcacacctctactaccactttcttcaccaagacatagactatgcaacctcttacaacctaaactatttcacaatatgaacctaactactaatacaactccttccccaatgcttttagcaccatcaaaaacgttataaaa

SEQ ID NO: 1952 - DNA, 1535 bp, Glycine max
  Clone ID: PAT_MRT3847_101768C.1
ccgggcacgaccttatctgtaatgctactgggtgttgggagttgagagtgaagctcctgggtgtggtgtggtgtaggtgaagtgcaatctgtgttgatgcgttccacgttttgctgtcacttgaacctttcacccgtcatgattatgaagggcttctctgctcccatttcatcatatgtttcgcctcgagctcaagccgtcactgagccaccggcgcggattggctttttgggcctcggaatcatgggctccccaatggcccacaatctccttaaagctggtgttgatctcactgtttggaataggaccaagagcaagtgtgaccctctaatcagcctcggagcaaaatataaaccatctcctgaggaagtagcagcatcttgtgatgtcacctttgccatgctcgctgatcctcaaagtgcagtggatgtcgcttgcgggaagcatggggctgcaaatggaatgggtccagggaaaggatatgtggatgtttcaactgttgatggggacacttctaaattgattaatgggcacatgaaatccactggagccttatttttggaggctccagtttccggatcaaaaaagccagcagaagatggacaattgatatttcttacagcaggggacaaaaatctttatgaagcagttggttctctcttggacatcatggggaaatctaaattttatcttggtgatgttggaaatggagctgcaatgaaacttgttgtcaatatgatcatgggcagtatgatggcatccttttctgaaggcttacttctcagcgagaaagttgggcttgatccagatgtgctagtgcaggtagtttcacagggtgccattagtgctccaatgtactcaaccaaaggtccttccatgatacagtcgctttatccaactgcgttccctctaaagcatcagcagaaggatctaagactagccttggggttagcagagtctgtttcccaacctactccgattgcatcagctgctaatgagttatataaagttgcaaaatccaatggccttagtgatcaggatttttcagctgtcattgaagcattaaaatccaaatttcagcactcggaaaccaagtgacattcttatgagagacaagttgaagttgaaaaccgtagtaagctaggtgatatgaatcaaatatagacgtacattgtgaggcttgaccatttaaattcattccctgaattgtagaaatatatttgaatatttttccaatgttgtaaaatttttggttaaaaattgttttcaatgaacatctcgtatagatgttctcctcttaaacctttttcattggatgtccacgcatagcatacctacttctcaaggggattaaaatgtacagcccaggttacacacgtaatactaagtaagtagtaaaaaaattctcagaaaaagggaaaaaaaaaaaaagtcttaaacatggccccttacaaagcttaacccaccaaaagaaatttctgaaaacttcttttgcaaacttaagattttggagagcttttaaaaattcaagggcc

SEQ ID NO: 1953 - DNA, 146 bp, Glycine max
  unsure (1)..(146): unsure at all n locations
  Clone ID: PAT_MRT3847_101769C.1
ctacatnncactnnacatgagnngctgaaannagnngctaagatacaagattattgttttagtaatattgtattagtgaattgataggaagagcttacttatcttctagattaattcttacatagttgagctagaggaacatattt

SEQ ID NO: 1954 - DNA, 184 bp, Glycine max
  Clone ID: PAT_MRT3847_10176C.1
caacacaacagaagggggtttgtgaacgctgtgactcggtcttgttcaccgttatcttcttgtttagtcgcctgtgggtatgacaaactctgacctgagaaacgcctcgctgcgctcgtaactgtcggtgccgaagctcctacaagtacatcaaccactcggtagcctgcatgatgtacccata

SEQ ID NO: 1955 - DNA, 676 bp, Glycine max
  Clone ID: PAT_MRT3847_101770C.1
gcttgcaagaacctcgctgaagagttaaggagagaaaacatcaacatcaaaccaaaccataaagatgaagcccattgacgacaaacaagagacagtgacgataagaacggtgagccacgacgaggaagggaaaaagagggtggagaagacagagcttagcactcacaacatcgacactataaggtacgtcgagaagaagctcatcaacaagggtgtccagcgacaggaccgccaccccgccgacggcatcggaatcagccggccaccgccaaagtccggccacggcggcaagttcacgtgggagggccctgctacagtggagaatagcgaactcatggcggcgccggcggccatggacgagggagaccccaactatgtggactgggaagagaacggagaagaggcgtcggagttagttgttggggaggtggaagtgtccaaggttgctcaggaacacgatgggcttgctagagttgacgttgatcctcgcttgcaagttaactaattaaccatcatcgtcggttgatttgtttcgtgtaatcgtgtatgggttcgctgatctatgtttaatcaatcttgttaagtttgggttttgatttggacttaatttgttttaaaaaaaaaaagaaagggcggctctctagacagcaaccaagacgtacgcagcgcgtgcatc

SEQ ID NO: 1956 - DNA, 448 bp, Glycine max
  Clone ID: PAT_MRT3847_101771C.1
ttattgtgctggaggacaaccactgggtgaaaaagaagcgtaacaaccatcacttaatgagtttccacatgtttacgaaaaggaagatgttgctgagcctggagagcaagatccatttgtagattaaatttctctaatggctgacatagattacataatctatgacaaaagtgatgtgatcatgccatctaatggtggcgatatggtcgatgctcttcacgataacacggcctttgcggtatacagcaaatatataacagcaaacaagtgacatatgctggcctatgagataaattgtttcctcctttcaaacgagaccagtaggattatcgatgaattgcatgaggatgcattaagtccgccacaactcttgactagcaagtctgcgatggatttctccaagactgctgtggctgagtgcatttaccttgatgacgtgcatcataat

SEQ ID NO: 1957 - DNA, 469 bp, Glycine max
  unsure (1)..(469): unsure at all n locations
  Clone ID: PAT_MRT3847_101772C.1
tttttcttcccacgcgttcngttgaggcccaagatgaaatngaattggcggagaaagattcttttgaagagcttaagaatttggctactgcatcggtgaatgggaagcctattgaggctgaatcattcaagaggcctagtcaagtcattgatcctgttaaacacagaggttttgttgcttatgagcgggaaggtgttcagtacagggatcccaatgctcgaataaatgactggaatgaagtgatgaaggaaacaaagcctggtccacttttgaaaacccaatcagcccgttgcatggactgtggtactcctttctgtcatcaggaaaagagtggcccgtgttggaagtggaccgtctggcctggcagctgctgaccaactgaataaaatgggccataccagaactgtgtatgaaagagctgattggattggagggcttatgatgtatggtgttcccaacatgaaagctg

SEQ ID NO: 1958 - DNA, 550 bp, Glycine max
  Clone ID: PAT_MRT3847_101773C.1
aaacaaacataacataaattaaatggactgggggacaggcagggggaaaagaacaaaaaatgggtattcaccccaggggggacacaggaaactgggaaaaaccaaaatcaaaaaatattcaatcggaacaaaaaacattacaggggtaaagattacaaagggggaactaaagcaatgggctttcaaaaaaggggaagcccccggggctgcaaaaaggaggaaaaaatatcccaaaatccagggccaaacttttggagccagggcaagaaaacacaaaatcggcattttcaggggctattttaaaaccggcaggctgggcatgggatagttaaaaacccttcaaaacaaaccacaggttaacatcggggaaaccactgggaccagccccatgggggggaaattcttgaattacaaaggggctttgggacccaaggggggaaaaagggtcattgggcacatttgattcaggaccaaaaaaggagccccaagttttaaaaggggccaccacttggggagccttgagggggtttttgcttgggggaaagcctat

SEQ ID NO: 1959 - DNA, 741 bp, Glycine max
  unsure (1)..(741): unsure at all n locations
  Clone ID: PAT_MRT3847_101774C.1
ggctcgagtccctcagccaccacaaactagagccccaggcaacccttggccacagtggcctcgcatataccgagtagagtccgggcaccaagaaggtgcagcaaaatttgggaaagatccaagatcttatgaggtattgactaagcggtttgtgggagatgaaaatggagttgtgaagggacttgaagtaatacgtgtcctctgggagaaggatgaaactgggaggtttcaatttaaggaaattgagggctccgaagagattcttgaggctgacctagttttactggccatgggattccttggccctgagcctacaattgcagagaagttgggtattgagcgagacaacaggtcaaacttcaaggcagagtatggtcgtttctcaaccagtcttaaaggggtgtttgcagccggagattgtcgacgtggtcagtccctggtggtatgggcaatttcagagggacgacaagctgcagcacaagttgacagtttcctcacaaatgaagacatagagcacaatgttgccggaagtccagacgacaagctgcagcacaagtttgcagtgccaaacaaacagtgattacttaggaaagccttctgagatttttctttttctacaagatggaataataagagatgggctgctggagattcattgaagctttgctggtttcgtggtttgcngccccatttaaattttaggggggaaaataataaagaagcgatttaagggtacaaggg

SEQ ID NO: 1960 - DNA, 4583 bp, Glycine max
  Clone ID: PAT_MRT3847_101775C.1
ccacgcgtccgctctaagctcattcacgagttaaataaagcctgtaatttgcggggacttctgaaatttaaagaggcagctgtgaaagtttcccttgatgaagtagaacctgctagtgagattgttaaacggttttgcactggtgccatgagttatgggtctatatcggcggaggcacacacagcattggcaactgctatgaataagattggagggaaatccaacacaggtgagggaggtgagcagccatctcgtatggagcctctttctgatggctcaaagaacccgaaaaggagtgccattaagcaggttgccagtgggagatttggagttacaagttactatcttacaaatgccgatgaattgcagataaagatggcccagggagcaaaacctggtgagggtggtgaacttcccggccacaaggttgtaggagacattgctgtcacaaggaattcaacccccggtgtaggacttatcagcccacctcctcatcatgatatttactccattgaagatcttgcccaactaattcatgatctaaagaatgccaaccctgctgctcgagttagtgtgaagttggtatctgaagctggagttggtgtagttgccagtggagttgttaaaggccatgctgatcatgtcttgatctctggccacgacggacgtacaggggcttccagatggactggcataaagaatgcttgtctcccttggcagtccttggtggggtgggacatttcagaggcaaaataaaacaggaggagatgtcgacaactacctcgtcaaagaagacaaagaccaccggaatcaggatggccttgtcaagagacagcagggcctctacaaggagcagcatggaagcagcaaacactcggtgatgagttataggttgctgctctacgaggttgcatactgatgaagtgccaaaaggaattgcgaacagaataaaattgttccaagtttgagctggagaatcattaacttatttttcatgatatcagaagaaatgacaagtgtagtgtagagaaattatgaggttgtttcggtgtttggtgtggtttcagggtgtaaagttgttgcatactcgagtgttcagttgttcaaaggaagtcattaaaagtaatgagaaactagagaacattgacctctctttattgcttagacctgcagctgaactgcggccagaagcctgctcaatactgtgttcaaaaacaagatcatggtttggacatggccttggataataagcttataggtctgtccaatgctgctttggaaaagggtcttccagtatacattgaaagtccacatccataatgtaaaccgtgcagtgggaactatgctaagccatgcggtgactaaaaagtaccacttaaatggtcttccaactgacaccatccatatcagatttaatggcagtgcaggccagagctttggtgcattcctttgtcccggcggtcagttcctggaggtgagggcaatttcagaggaatggcaagcggcaggatagttggaaaactacctcatcaaagaagaccaagaccacaggaagcagaatattgtaattggtaatgtggctctatatggggccacatctggtgaggcatatttcaatgggatggcagctgaaaggttttgtgtgcgtaattctggagctaaggcagtagtggaaggtgttggcgatcatggatgtgagtacatgactggtgggatagtagttgtgcttggaaacacaggcagaaattttgctgcaggtatgagtggtgggattgcttacgttcttgatatggatggcaaattcctatctcggtgcaaccatgagcttgtagatctggataaggttgaagaggaagaggatattactactcttagaatgttgatacaacaacatcagcgccacacaaatagtgtgcttgccaaagaagtgctcgctgactttgagaatcttgttccaaaatttatcaaggtgttccccaaggagtataaacgagttttggcaagtattaaatcgaaggaagcttccaaagatgcagcggagtctgcttctaaacatggagaggagcaagatgaaattgaattggtggagaaagatgcttttgaagagcttaagaaactggctactgcatcggtgaatgggaagcctattgaggctgaatcattcaagaggcctagtcaagtcattgatcctgttaaacacagaggttttgttgcttatgagcgggaaggtgttcagtacagggatcccaatgctcgaataaatgactggaatgaagtgatgaaggaaacaaagcctggtccacttttgaaaacccaatcagcccgttgcatggactgtggtactcctttctgtcatcaggaaaactctgggtgccctcttggaaataaaataccagaatttaatgagttagtataccaaaataggtggcgtgaagcattagagaggcttcttgagacaaataacttcccagagtttactggtagggtatgcccagcaccttgtgaaggttcttgtgtccttggtattattgagaatccagtatctattaaaagcatagaatgtgctatcatagacaaagcttttgaggaggggtggatggtgccacgacctccagctaggagaactgggaaaagagtggccgttgttggaagtggaccatctggcctggcagctgctgatcaactgaataaaatgggccatacagtaactgtgtatgaaagagctgataggattggagggcttatgatgtatggtgttcccaacatgaaagctgacaaagtggatatagttcaacggcgggtcaaccttatggcagaggagggaattaactttgtggtgaatgctaatatcgggcatgatcctttacattctctcgataggcttcgggaggaaaataatgctattgtcttggctgtaggagccacaaaaccaagggatctcccagtacctgggcgggagctgtcaggagttcattttgctatggagtttcttcatgcaaacactaaaagcttgcttgatagcaatctccaggatggtaacttcatttctgctaagggaaagaaagttgtggttattggtgggggtgacacgggcacagattgcatagggacatccattcggcatgggtgtagtagcattgtaaatctggaacttctccctcagccaccacaaactagggccccaggcaacccttggccacagtggcctcgcatataccgagtagattatgggcaccaagaaggtgcggcgaaatttgggaaagatccaagatcttatgaggtattgactaagcggtttgtgggagatgaaaatggagttgtgaagggacttgaagtaatacgtgttcgctgggagaaggatgaaactgggaggtttcaatttaaggaaattgagggctccgaggagattattgaggctgacctagttttactggccatgggattccttggccctgagtctacaattgcagagaagttgggtatagagcgagacaataggtcaaacttcaaggcagagtatggtcgcttctcaaccagtcttaaaggggtgtttgcagctggagattgtcgacgtggtcagtccttggtggtatgggcaatttcagagggacgacaagctgcagcacaagttgacagtttcctcacaaatgaagatttagagcacaatgttgccgggagtccagacgaacttatcaagaagaagcagcaaccaagggacactgtggcagtggcaaacaaacagtgattacttaggagccttctgtggtttttctattcttaaaagatggaataataaaagatgactgctggagattcattgagcattgttggttcgtagttggtgccccatataaatgtaagggggaaaataataaagaagcgatctaagggtgcaaggttagtgcacagtagaaaattaggaatgttcataggcttcgtgatggaaaggttagttcttagttaattattgtggcattgtgtggaatgaaatgtacagtttgataattaatgatttaggttattgtttccaaattgtcgacgtggtcagtccctggtggtatgggcaatttcagagggacgacaagctgcagcacaagttgacagtttcctcacaaatgaagacatagagcacaatgttgccggaagtccagacgacaagctgcagcacaagtttgcagtgccaaacaaacagtgattacttaggaaagccttctgagatttttcttttctacaagatggaataataagagatggctgctggagattcattgagcattgctggttcgtggttgcggccccatataaatttaggggggaaaataataaagaagcgatttaagggtacaaggatagtgcatagtagaaaattaggaatgttcataggctttgttatggaaaggctatttcttggttaattattgctgtgtggaatgaaaatgtacagtttggtaattaatgatttaggttattgtttccaatttaaattgctttgaaatgagtattgtgaggttcttgctcatctgactgatttttccacacagccaaatgttgattattgcaatgttcttggcagatgaagtttc

SEQ ID NO: 1961 - DNA, 437 bp, Glycine max
  Clone ID: PAT_MRT3847_101776C.1
ctttctcgtccgcccacgcgtccaagaactaatggtacatataaagatcatggccatggcaaacttggctcaaccgaaggcatactccgtaaccatgtctttatgtcgcacatggtctgacacggaggagggggttcgtgtccatatctgactaaaacgatgacatggtcattgacggccgtcccagcgaatacgtggcggccattaaagctgcacaactgggtatgtaaaccacttgcattgaaaaacgtggccctctggggggtacctgcctcaacgccggatgcatacgttgcaaggcacttgagcattctctccacatgtatcatagacagctaaacatgcgtttgccaaccatggggccacgctttcatcagtccaagttgagtcgtcattcatgatggcctcaaaagataaagcagctcttaatcttacca

SEQ ID NO: 1962 - DNA, 1009 bp, Glycine max
  unsure (1)..(1009): unsure at all n locations
  Clone ID: PAT_MRT3847_101777C.1
actgnntaattnnattcattttttttnnntttttttattattttttacttccttcatttttttttttttttntttnntntntttttttntctttttttttttttttccatcttctcgctaattacgcgcgccgcctgtgtgtcgctcgtccccgcctgcgttgtcggcgttgcggcgttgtgccgttcctgccgntagtagttctgttgtccataataacacacacacacaccacacataaccacaactacacaatatccaccatcccccccccccccccccctcccccccccccccccccccccccccccccccccccctcctccctctcctctcttcccattccttctcctcatcctcttaccaccctactcacacaatccatattcccgatcgacancagaacaaagacagtagttatctctttccatccctacctatctgtatcccctcgacaaaaatttaatcgccactttaacgtgtcgcgaagcctctttcctctctttcctctaatccccttccccatcctttctgatattagaaacctttttccgcatattttattcgattcgtcccctcaacccccggcacccgccccaaaactcacgtcattccaaccttacctaacggtcctcactcactccctctcgctccgcactccccccctaccaccagcatacccagactacaccgcccccctcggccccgatcttcaccagaacatccccccccctccccccccccccccccccccccacccccaccccccccacccccccccccctccccccccctccccccccccctccccccccccccccccccccctcccctacccccccccccccctcgccccgctccccgcccccccccccccccccgcacccctcccacaccccttgccncccnccccccctccgtgcccccccacnccccccccccgctccccccaccacctccccaccccccccccccctgcccccccccgccccncccccccgcccccccc

SEQ ID NO: 1963 - DNA, 303 bp, Glycine max
  unsure (1)..(303): unsure at all n locations
  Clone ID: PAT_MRT3847_101778C.1
atgngtatgtaagntcggnattcgaantngagtntntntntntctttntnaaaatnnttattttaaggnnntnnatgtngtttnanagangaataatntgnnttanaantattgtgnaggttnatggntngagtnaatatggggatnaatnngnaatagaanataaaaaanggaaaaangtnatttagtntanaatgnnatnnatnttgnaaatannnanntgagttananatgnannttaattgatattganntntantattnttgaagntanatnnnttaannantnannattnggnanga

SEQ ID NO: 1964 - DNA, 1160 bp, Glycine max
  Clone ID: PAT_MRT3847_101779C.1
ctcacgcgtccgcggacgcgtgggtcaaaactagccagagaaatggttctgaaatttgtttatatcataataattttgatgatatggtgcatgtatccattaacatctgcacagtatgagaatgggactataacatctgcgcagtacgagaataagactatagcatcaccaccaggttgtgatagcaaatgtggaaatgtttccattcctttccctttcggaatgcacgatcccaaatgctatgcaagcaaccagtttgaaatagaatgcagacacaataacaatacttctcaaggtcatcagaaacccgtaccccacctaaagtacataaatttggaggtaatgtatattgatattcaatacggtacggttgggatcaagaatccgattttccatcctggctgtggcaagactgttacaggcataaatcttgaaggcagtcctttcgtgtattcccagaattacaactcatttgttggcgtaggttgccaaaacgccgccataatgttgtcaaacgacacgatacttacagcctgtatgtcggtgtgttacgagcacctcgaaaaaggcaatgacatcgacatttcgagttgtcgtggctcctactgctgcgagacttcactgccgccgtatctttcagcatacaacatctcaactgaaaccgtggaagtgaaaagtaatatcaaagcagaatgttcaaattacttgctgattagagcagaatatagtaacttcaagtacgagtacgatgagtacaattccagttactgggttcccactcttggagacctaaagaaacaaaaagatgttcctgcggtgcttgaatgggagattccgattcacacgcccaacaattccttccctgaattccgtacagatgcatatggccatggcagctacaactgcagttacactaatgtcacatcttcactatattcacaatcgggttggagatgttcttgcagagatggcttcgagggaaatccctacatacaagaaggctgtaaatttgtaggtatgacccctattttacctactagtacaaccatccttcacaataatttagttaattaaatttaattttgattaatcatttagttaaaatttgtatatctgttgttttatatataaaaaaaataaaagctcacataattgatagg

SEQ ID NO: 1965 - DNA, 380 bp, Glycine max
  unsure (1)..(380): unsure at all n locations
  Clone ID: PAT_MRT3847_10177C.1
gcggccgcttttttttttttnattttttttttttttttgggagggaccccgaccctatatccccggggaggtgtgggaaacagggggtgtccccaacctcgccctgcacggatgggtattcaaaaaattcatagaattaaactactcataagtgcattcgcccaaaaaaatcataagaaaatacttatgagttccgtttgggctggaacaaattccgctttatttaaaacgatacatgatatgaaactaaactttgaaaaggtccttttttatgtactccaaaaatcggacggtaccctctcttttaatgccgactcatatatgcgaaaggaaagattcactgtccagaatcattcatcctcgaattccacgaaaagatt

SEQ ID NO: 1966 - DNA, 165 bp, Glycine max
  Clone ID: PAT_MRT3847_101780C.1
tcgaggctgtatctagctgacgtcgtggtaggcaccttctgagtgtatgactcaacacattggccgatccgttagcacgttgatggactaccaaggcagccgacaggcggaggtgcgtctattggcgtgtcctgtgcggctctcgctttgccccttctacattct

SEQ ID NO: 1967 - DNA, 851 bp, Glycine max
  Clone ID: PAT_MRT3847_101781C.1
gagaactagtctgagttttttttttttttttttacataaaagaaaatatactatgttaagcgattataaatcaggcaccatctccctcttcctctccatttccaatattctctatattctatgaatttttacacaataatttatgtgaaacataaaaaccaaaatacaaaatcaacaagcagaatgaagaggtcagcaacctttgacaatgaagtggaagaattgcacaattttgcctgttttggaaagcagccgatgctggtgctgtatttgccgaaactgttgtagccttgcagcaaaatttattccattacgtgagctgccaccgtcttcggctatgtcaccatcctgaatggttcgaaatccatcagggacattatgaaattggtaggaatcccgggagccctagcattcgcgtggctcgctatagagctcgctctcaaacccttccttgccaaggcacgtgcttcgattgacaactccgacccgccacgtgaccccgacgacgatgctcttcctaaaaccaccactgacgacgttcccgacgccgccgattctaaacccgccggcgacgtgcctcccgctgctgatactataaccaccgacgccgtctgaagtggtctctcattcatgttattttgaatttcgtcatatctcaaaactactgtccaaatgaaataatattgttagcctgttgtgcttctgttaaatttgtatattgtgttgtcggtaaatgctctgtttggtttgatttggttttaggattgaaaaaaatatcaggttgttctattctgcttgtttcccttgtcattaaatatatgtgtatatttgatttatagttaaaaaaaaaa

SEQ ID NO: 1968 - DNA, 291 bp, Glycine max
  unsure (1)..(291): unsure at all n locations
  Clone ID: PAT_MRT3847_101782C.1
gtnngangcatnanctcggaattcggctcgagcanagaatagntantaatgggntacaccgngntcanctgnntnancnncgtaataacntgnatttcggggngtaccaanncgccantaagnncggngnnggtaacaaactnttccnannaganttccntnaacggggnaaccttgggtcaacggtngttaattcgccttggggcanatnttcagttgtaatctcngaagtnnccatgangangctcccacanctctccaagccgtnaaactcctgcgctctctatttct

SEQ ID NO: 1969 - DNA, 174 bp, Glycine max
  Clone ID: PAT_MRT3847_101783C.1
ggaaaaaagggggggggaagaggattttcccctacagctgcccataggtgacatccatgctagacaaccggatgaataaaggttcacacaaaatggaaaaatcaagataccataaataattttttatgctacggaatccaagatttatgttatgttggaatcttaaaccgcgcc

SEQ ID NO: 1970 - DNA, 194 bp, Glycine max
  Clone ID: PAT_MRT3847_101784C.1
cactatatgggaaaggctggttacgctctgcacggtacctggtcgcggaatatccccgggtctgacccatttctgtccgaacttcattgatcggaataggatagggttttgctgtttttttagcagttctgatagctatgccatgttatgcattgaagatttaagctgggaacaataatattgacatctgtata

SEQ ID NO: 1971 - DNA, 445 bp, Glycine max
  Clone ID: PAT_MRT3847_101785C.1
attactaccccgcttactattctggcgcttcttccccttcctcccctagaccctttttttaccgtttacgctgggcccagagaaccttaagctccgcctcgattactgctcccttttgacccctgcccaagccacccaaatgggccttggagctggcctcgcctttggcgctgccgatggggaaatcggcgggcttgctcttgtcgagggcctttactactaaaaggacaagatagacgatagggtctttatctaccccgctgctgctgcgcgcgactattacagcgataacggagtggattctccgaactctcactactaccggtgtaggaaagagacctttgacctacgagggtggaaagatgcataaaacaaccggggtagctgagggatatgagattaccccctgtaaaatcgtatatatggcacgcatagacatcggggg

SEQ ID NO: 1972 - DNA, 582 bp, Glycine max
  Clone ID: PAT_MRT3847_101786C.1
aaaaaccttcccaacgaaaaaactttttttaattccctgggaaccaacggttgggttacaagccccaacaaaaggggggaaaaaaaaaacaaacttttttttccggaaaaagcaaaagctaaaccccttttggaagccgggacaaaaggggcaaaacctaaatcctaattcctaaaaaaacattggacccaacccccccccggaaccgggaaaaaaacttattttgccccggcccaaagggggggatcttccccaaaaaacccaaaattacaaaaactttggggggggggggaaaaaaccaaatttttttaaagttgggaaaaaagggccaaaggggaaaaacttttggggggggtatttttttcatttggggacaaacccggggggccaggcccaaacccaaaaaaaaaacccccctgccctaacaggggggggtaaaccccatggggggaagggggactttttgaacccaaaatatccccccggggggaacggatatctttcgggtaacaacccccgacaacaaaaaaaacttgtggatccttttccctccgaaacgggttccaaaaaaacccttggggg

SEQ ID NO: 1973 - DNA, 307 bp, Glycine max
  Clone ID: PAT_MRT3847_101787C.1
acagaaactgaacatacaagctaactataattttttactacaccagtataccaataccatgatgatgttttaattgaattcgttaagtctcttcagaatttggtatactgctacagtcagaaatcgtagctagcttgtttgttcagtttctgaacttagttaaaatatcatcaggcattggtatactactatagttagcttgcttgtacagtttctgaactcattctgaccaggagtttgcacatggcctatgaatatatcaatggaagaatagaatgtgcatttgcatattttgggttcttgtttt

SEQ ID NO: 1974 - DNA, 162 bp, Glycine max
  Clone ID: PAT_MRT3847_101788C.1
ggctcgagaggaccctgatcacacttcagacacggactgagactgaccttcttggcggtcaatgtccaccgagatgtccgtggtctcgccgtgattgttgaatgaggagtctatcaagtacaccctctagcagcagaatccgagaccctggtgaaggatact

SEQ ID NO: 1975 - DNA, 377 bp, Glycine max
  unsure (1)..(377): unsure at all n locations
  Clone ID: PAT_MRT3847_101789C.1
gctagtttacatacannnttgaatctcacgctatgtagtacgagtagaaggatgcatgaaattatacattcacatgacagggtgacaagtcgggacatcccatatatgcagaagtattagtgatttacaccatttttttncataaagaggggtttcacccactgcattcgaatcatgaacaaccaaaacctcttcctacagacaaagatctataggtttgcgcatttgtatcaggctctggttttttttgaggaagctgttgaccaaaagctttcacaggtcctgacacnncatcctcattttnnatggacttagcaacctcacttgcacgttactttaccttgggatcnnnccnnacctctagtgcatccactanc

SEQ ID NO: 1976 - DNA, 339 bp, Glycine max
  Clone ID: PAT_MRT3847_10178C.1
gtgatccgcaaccctatcctattctcttccacctctcaccaccccaaccaaaaccacacatttgtcactctccgttggcctcaaaccttcacgctcttctctacgctccaaatcccgattcgccgtttcctgctcccagtggacacctcctgctcctgatgcttctttgtctcggcggcgtcctgcgttcatacccatacttattccggaccctgactatgttcgcatatgcgacaccactctccgagacggcgagcagtccccgggcgcctagcatgacctcgaaagagaagctggacgtggcgcggactctaggcagagctggtcgtcgacatgatc

SEQ ID NO: 1977 - DNA, 705 bp, Glycine max
  unsure (1)..(705): unsure at all n locations
  Clone ID: PAT_MRT3847_101790C.1
cgcgatgctcgcgctcgtaatgctggtcgagatcgaattgctgtcgttagaagaggtgatttggaggatgtagaagagggaacagaagaccacaagtacccaagaatttcatataaacaacttagagaggccactggaggcttcagtgcttcaagcttaattggttcaggccggtttggacaagtctacgaaggaatgctacaagataatacaagagtagctgtgaaggtgttggatacaacgcatggtgagatttcaaggagctttagaagggaatatcaaattctgaaaaagataaggcacagaaatttaataaggatcatcacaatttgctgtaggccagaatttaatgcccttgtttttcccttgatgccaaatggtagccttgagaagtacctatatccaagccaaaggttggatgtggttcaattggtaagaatctgcagtgatgtagccgagggaatgtcctatctgcaccattactctccagtgaaagtagtgcattgtgatcttaagccaagcaatatactccttgatgaaaaaatgacagctttggttactgattttggaatttcaaggcttgtacaaagtgatgaaaatacatccatcaatgaatcagcatctnttcagttcaacacatgggtttgtctatgatggctcagtctggttatactagctcctgaatacggaatgnggaaaacatgc

SEQ ID NO: 1978 - DNA, 326 bp, Glycine max
  Clone ID: PAT_MRT3847_101791C.1
gactcacttcagtgtcattttttcttactctcttcctctctctccactctgagatacatgggaaaattacattacattatggctggttattcataagcttcagctctttggattctttttcgtctctttggcttctctgtatctagtgaaattctggttggacgtaagactgatgaatggaaggtttcagcctctgattcaaattcactcatccaatgtgcaaatgagtctcgtttccaagttgagacactatcttgtctggatatatcatggtggaatagatccagtgttgcatgtgtacactgagaactatgtgagatgcagca

SEQ ID NO: 1979 - DNA, 343 bp, Glycine max
  Clone ID: PAT_MRT3847_101792C.1
gaccagccttaatgggggttttttaactaaacctaaggttccggaacctaataagggattttgggccttaggcctctttagcaccaaaagaaaaaaaaaccttaaagggccaaggtattctaaaaagggtccttaccaaaccgtacccaccttggcaaattttggaaaaaatggcacaaaatctttttttatttaatttaaattagaagaaaaatgggttttccatatcctagtctggaggaactatgtctttgctgatggaaaaagcaaattttttcctgccccaaaaggaactttgatctcaatcctgaaaaaaaggtttgatcctgattttgccccgccc

SEQ ID NO: 1980 - DNA, 133 bp, Glycine max
  Clone ID: PAT_MRT3847_101793C.1
tgtagtggtcggcggggaagctgcggaactcgcccgtcagcggcagcaccacggtgatcttctcgcccggctgcagcgggaacatgttgacgatcggcttgccgcggctggcgcgcccgccctgcggcacctc

SEQ ID NO: 1981 - DNA, 587 bp, Glycine max
  Clone ID: PAT_MRT3847_101794C.1
gacattattcaggtaccctctaattcttttaatttatagctatcttctttaataagataagatctcatccttcactaccaaaaaagatgaccatggtcactgccctatttttcaccttattactctgctccatgctcgtccatgccatgtccataccccttgaaccagcttttcaccaagaatccttagccaaaccgcaccaacagagcgttgaggcggttgatgagagctgcgaaggcgttggagaggatgaatgcttgatgaggagaacacttgccgctcacgttgactatatttatactcaaaagcataataatccttgaaatatagtactcgtagttagtactatagcatccacaaatccacttatggaaagatataggagcgagaatctatgtttgattgtttttataaattaggagttggtacgtaactggctcattaaatttgtttggagttgagaattatttgtattttccttttctcttctcttttgcttatatgtagtgtattatatgaagagttaatgtaatggttgtgtaaggttatttcacactctcaattaataaaaaggtaatggatttttg

SEQ ID NO: 1982 - DNA, 201 bp, Glycine max
  Clone ID: PAT_MRT3847_101795C.1
aaaaggggtaaggaaaaccctaaaaaacaattccaaaaacgccgtttaccgggttggtgccaaccctcaaccaaattgaatgggtccccaagggtggctaaccccaacaaatccgaaaccttctgtttctgttactgggtttaaatacccttccgcttctgctgctgccacgtctcttgcccaagacgctcagaacaaagg

SEQ ID NO: 1983 - DNA, 280 bp, Glycine max
  Clone ID: PAT_MRT3847_101796C.1
gataaatagtaacagcgtgatgaaaaagaaggaccttggtttgttaatggctacaattgaggtagcatgtcactgccatgcatacaatatatactctctactaatgaacactggttatggtgcccggactaaggaggtgaaaagcgcaagtaggaggctcgttgtgtaagcacacatcatctttgattaagagaccattcctgaagagtgcactgaatcaacaaaggaatacatgcatggtgaacaatatcgatcatactccaaaacagttaaccaacaa

SEQ ID NO: 1984 - DNA, 516 bp, Glycine max
  unsure (1)..(516): unsure at all n locations
  Clone ID: PAT_MRT3847_101797C.1
cggctcgagcggctcgagctatttgtntatgtagganttatnaacacagggnacaaacttgcgccagggtccatgatagtaatgaacgatcgaagggatgccaacagcaacatcctcaccaagaagttgcctgtgtaattaggtcgtgcccgcgcctcatatcataacgggaaggctctcattacaacatgctgagaagaacacggtagcagactgagacttgttgtccgacgactactaattcgaagaggccattgtagcatcaatactggcacccacgaacgaatcagacagagctaattatgacacaagcagcaccacctacaggatgtagaggcttaaaggttttcaggatatcacataatgctttgagtccaaaggcctgaaaccaccaatttattctagtaaagggaattatcaactacagtagtgccttacgatggggatgaactcgctctgcacttgtataaccttattttatgtgcagggaaagaatatgctactcactgtacggat

SEQ ID NO: 1985 - DNA, 410 bp, Glycine max
  Clone ID: PAT_MRT3847_101798C.1
gtttaggcgtgtatagctttaaactgaggcgggttagaagacgagcatacatgcgtgtggaccgagttggcgggatgagaatatcctgcagaacgagatgagagccgttttgcattctttgctgagatgagagtgagtgagcctctgcaaggcctgatgcaacgcacccggggctgttactggggctctgtcattccctgagctctttagtacttccttcagatgtacttgagaaccaagccatgccagcaccctcagactccaacttcccacacggcccccgaccccgagatcaccacctcacaccggtcgctgtcttcccaccgcatgcactccacttactccagctctgcttacgcgctccctatagccaattccctcactgcgaggcacactccttattatctacg

SEQ ID NO: 1986 - DNA, 232 bp, Glycine max
  Clone ID: PAT_MRT3847_101799C.1
ctctacgcgtccgctcatattaattagttagcaaagtctcactacaaacattcccttctgtttcattaattgtgaccttaagcttttatattgaaccgtgtcaatggccgttcctgggaggactttagctcttgttgctttgcttgttgccattaatgcaatggtgtgtgaaagtagagtggtaagaaaggaccttggtttggaccttggtggggtgggaattggggcgggt

SEQ ID NO: 1987 - DNA, 419 bp, Glycine max
  Clone ID: PAT_MRT3847_10179C.1
ttattttcacaacatgaaagcacacttgttgcccataggactgcgctatatttatgtgaaataaatattacctactacttcacaaatgcaaaaggccactgattcaccacatattcgagactcttacagttctcaagaagtcacatcggcatcgggtgagcggagatggaactcataaacgccttcttaacgccaaaaagaacatcctgtaaagcgactcggccatggagccactctagaaagaaaaacattttccttaccttagccaagtgctgtgcgagtcattttgtggatatctgaagagtgatgattaactgcaaacctaatccaagcagtggcggcttaaccaccccgttgagtaacacacgttagattttcaacgacggcttcggaaagtatttgacttacaggatacagac

SEQ ID NO: 1988 - DNA, 608 bp, Glycine max
  Clone ID: PAT_MRT3847_1017C.1
gcacgagacaaactggagcttatataacaaacccaaataggttcccaataagaaagaagagtcatcacaaggaaaaaggggaaagaaaagatgccttgcctttacatctccaccaacataaacttagatggagttaacatcgatccaatcttttctcaagccaccactgcagtttccacaatcatcggcaagccagagaagtttgtgatggtcatattgaaggggtcagtgccaatatcttttgagggtaacaaagaaccagctgcatatgctgagatagtttcaatgggtggtataaatccagaagtgaagaggaagctaattaataccattggcaccatattgcagtccaacctatctataccaagaacaagattttttctcaaagtctttgacacaacactattccgtactaaatccaaaatgtaataatatgcttgatctgattatgacatgccacaatattgttccctaatcatttatcgatgagttttaacgtatgttgcccctaaaatatgcccatgtgatcttcatttttgcactcaataaaaagaatgccccgtaatatggttatgggaaaaaaatcctttaacttattttccattttt

SEQ ID NO: 1989 - DNA, 1367 bp, Glycine max
  Clone ID: PAT_MRT3847_101800C.1
gtcatgatccaaccctctcctcgtctcaccagaatagagaatttaagaatgcgaaagcgatgcatggaagggacaagcaacataaccttaggtggcccaaatggcggaaatttactgcaaaccgataggagagacggattgcaaaatcacaaaaacattggaccatctctagtatgaagtcaacagaatcaaaattatacgtcttgcaagctgctatagcggctggcgctagataagtagctgtttttgcatcagcttcagaatctttctcaaaatcaaacattaattgtagcatagaagaaagccttgtccgctatcgagctgttactcgggctgctaaacagctctctattcctgttcgagggaactgtagttccaatgcttttggctgtaatggctgttgtgccagcagagaagcttgctgtccacttccatgacacttatgggcaatcccttccaaatattcttgtgtcccttcaaatggggatcagtgcagttgattcttcagttgctggtctaggtggctgtccttatgccaagggagcttcaggaaatgtagctaccgaagatgttgtgtacatgctgaatggacttggggtgaaaaccaacgttgatctcggaaagctcatgttagccggtgagttcatcggcaagcatttggggcgcccatctggctcaaagaccgcggtagcctttagccgagtcacagctgatgcttccaagatatgataatatgttctaccataaaaataaaaataaaaattggatgcttcaagcagtgagaggacaccctattcgtttcatcaccctattgtttcatcttattaaccccgtaattatagaaaaagaataaaatgcccactcacgttgatgagttggaaaggaagaagtaatgcatgtaatctgccaatagcaagtacaagtacaagcttctcatttgagtgtaagcttgcaatttttatccctccaattttttgttttttagtttaaatcatgcactcattgtgcatgatgtttagtttataccacgcctcttgtataattctgaaaaagatcatagaaaatatcatttactcttttacaagataattaaaaattagttagcaccatttcgaggtaaaaattatcattttgcgctggtggtgagttcatcggcaagcatttggggggcccatccgggtcaaagactaccattgcctttagccgagtaactggtgaagcttccaagatatgataatatgttctgccgtaaaaaaattatatttggatgctttaagcaatgagaggaccccaaatgtttcatcttttttaccccataattattgacaaagaataaaatgccccctctcgttgatgagttgtgaagg

SEQ ID NO: 1990 - DNA, 553 bp, Glycine max
  Clone ID: PAT_MRT3847_101801C.1
gggttgctttgaaatctcactcggggacacaattggagttggtactcccggaactgtagttccaatgcttttggctgtaatggctgttgtgccagcggagaagcttgctgtccacttccatgacacttacgggcaatcccttgcaaatattcttgtgtcccttcaaatggggatcagtgcagttgattcttcagttgctggtctaggtggctgtccatatgctaagggagcttcaggaaatgtagctaccgaagatgttgtgtacatgctgaatggacttggtgtgaagaccaacgttgatctcggaaagctcatgtcagctggtgagttcatcggcaagcatttggggcgcccatccggctcaaagactaccattgcctttagccgagtaactgctgatgcttccaagatatgataatatgttctaccgtaaaaaaattatatttggatgctttaagcaatgagaggacaccatatgtttcatcttttttaccccataattattgacaaagaataaaatgcccactctcgttgatgagttgtgaaggaaaaa

SEQ ID NO: 1991 - DNA, 1521 bp, Glycine max
  Clone ID: PAT_MRT3847_101802C.1
tcgagttttttttttttttttttaaaaaaataggactttattttttattagctcaaaaatttacttggcagttttgaaattgaactagtactgtacagtcccttataaaaaggagaaatttagaactagtccatagatgagcgagaagtagcatagtagagaaagagcaattgagggacaagaaagacataaagggtgtaataaagccaatttccaactcaccaaccttgaaaagctgtaaattaaatttctgcatataaccaataggcacgaaacgtaaggctcttgctttaatcctccccccactttaatttattgagcaaagttgcagtaggtgcaatgctcttgctttatcgggagcggagaaattccaaaccactagaggaagacaggcacaaacaatttaacaaacacatcgcatctccttttattatttctttttttcctttcatttctttttctatccatcattaatcaccaacattcaaaacccaaaaatacagggaaaaaaaaaaacagttccaaacactaatatagtacagtgtagtgaaccgaaacaagacagtatatgcaaaaacactaaataaacatcaagacaatcatctctcaagaaccgatccaaaaaaaacaaagaagctgctgcataaaacgaaagcaacaaagtcggtcacgtgacttgagtagtcatccatgtcagcgtgcaaatatgatcatgcaactttgatgatatatatatagcagccaaaaatatgcagaaggtttggttcatgtgagattttaagtcgaatgcgggcacaaagttctccctggaaatactgaagttgaaaacagtagtaatattgatggatcatctgttccaggaaatatgatagggggagtcaagatatgccatttttttttgcaagttgaggtccttatagaagttcttaatgaattcttcggctgccacgtcgacttggctatcctcttcgtccttgagagggaagggtgagtcggtgactcttagctgtctgacagaagcagggctctttccgaagccaggaaagggagaattaatattgttttcgttgttgaggatctccagaaccttctgaactgaggagagggatttggtggaaaagcggttggtgcgtttggtggggatggcagggctgttgctgcagctgaactcgtagtcgcttggggagatgaaggtgctgtggtggtgggatcggcatgtgaagaaggaggtctgcatgttgtagtagtgatggttgaggatgaggttgttaagtgcaagtttgccacgtttgagcatgagatggaactccaccattattttgctcttggctatgccctttctcagcatgaagaacaacacgcgtaccatgttccataccttctttgccaccaccggcctgcttgcctcaatttccatcactgtttatttgtttttcttcttttcttttttagtatttacagagagagagagagagagaatgtgtttttggtatccccttctgtcgtcttctcgcagccgta

SEQ ID NO: 1992 - DNA, 412 bp, Glycine max
  unsure (1)..(412): unsure at all n locations
  Clone ID: PAT_MRT3847_101803C.1
cactcttccttaaacttttancacctgctaaatcatcttatctactattgcctttatagcctcatttaaaaaatggtgtccctctcacatactaactcctactcctttatcttttccattacattatcttattcttactctttcaactccaactcaactaaatttaactatattcatacatcatcctctaataaacttcctaattaattcattcaacactcataatttaatcctttgaattaatatcatcctatatattctccacctaccttattcttcttaaatctttcaatcatattaatcttttaatattctacatctttttaaatacttttatttttaattcctaaatgtcatctatttttcttaacacatcaatataccttctctttatcatcaattcatacaacac

SEQ ID NO: 1993 - DNA, 695 bp, Glycine max
  Clone ID: PAT_MRT3847_101804C.1
aatctacaatatcaattcttattcagcttagtttcaaagtccttactcctaactaaactcacaaggcacaacccaagtttgttcacgaaagagataggttacaaaagagtatttacattaactactacttaaacagatataaactaaaccaagtcaaattaaactaaaccaattcaaactaaaactaaccctacattatcatatttgtacaattttttatttacctaccaaagtaaaaaaaaaacttctaccactgcaaaatatcttcccaattattattttcatcaacattattattatcaccgtcaacaccagaattgtttatatagctctttactgagcaaacatctccggctgcggggaaattctccgccccgccctcaccaccggggctggtcgttccgtaggtctccaagaactgaaccctccttctcatgtcatccaattgtctttccatgaacaaaagtctctccttcagcgtcaaattctgctcttcaagctgtgcaatatgggtatcttgttcagcaacccttttgtccaagtttttatgttcttcaccggaattagggtacaccatttcgaacctgccggcgccggaatcacaatttcctggccggagccgaataaggcccttcatggagccgtagccgttgaatccccactgctccttcgcagccttctcgtcgaacgtcgcc

SEQ ID NO: 1994 - DNA, 116 bp, Glycine max
  unsure (1)..(116): unsure at all n locations
  Clone ID: PAT_MRT3847_101805C.1
gcatcaaccaancaaaccgactaanntgaaaataaacaaaatggtgtcgacgttcgagaagaagaagnnacctgaggcaagcttcatcatgcccttgcatncttcttcttncccca

SEQ ID NO: 1995 - DNA, 591 bp, Glycine max
  unsure (1)..(591): unsure at all n locations
  Clone ID: PAT_MRT3847_101806C.1
tcgatctgtttgtngtaccgcctgcttgggggggggggggggccaacgaataagagctagatgtggaggaatcacagggatacgggggcgggagataaaaagagatggacactacgcgacggagataatggcaacgaaaagccccggaattgtattttgggaggaggtggcagggggatagtagccggtgaaatgccagaagagctcaaagcgtagagataagaggggcttaaattggaggaggcgggccaggtagcagatgagactagtagataagactagatacctgggttatagagatgagttaaaacttggccttggtaatcactggtaagtagacggagatggatagtagggatgcaagaaaggttggtatgccggcaaccagggcaatgtgtagaaggacggggtggaaaaataaagctgccggcggggccagtaccaacacggcacgtaggatttaatagcaaaataatgctgcatagacagccgtgcgtactactagaagtggctatatagaaaacattaagggccagctagtgggccatggtagccgtacactagcatgtggtgaagcaggcagtaataagt

SEQ ID NO: 1996 - DNA, 357 bp, Glycine max
  Clone ID: PAT_MRT3847_101807C.1
ggtggaatttttttaaaaccgcaaacaaacgtgggccgtggtagatttctagagactatcatggtgtacggaccaggtggtgtctttgtcctcggtgggaagagcatcgcgctctctcgggccggggacaatcataatgaccccctgtataccaaaatctcagacaattagatcggcatggtcctatttgtaattggactcaggataggagcgaaacatttgcccgatgtctgctataacgcggagtacatgaacgtcacaactggtgtaaatgtggactctagctcaaatttgcctacttatgaattaggacgtttgaacctagaccttgcatttaagagaattttcagctactaa

SEQ ID NO: 1997 - DNA, 502 bp, Glycine max
  Clone ID: PAT_MRT3847_101808C.1
gactatatacagatgcatgatgtctataccctccaccgacagtccttccatccaaggactggcaccgctctaatatggagagaaaaggtatacgtcaaagcggagtcatttcataaaccggaaccgccctactcctggcatctatatcccacatgcacaacccgaagctcagatcgccgctcattgcgcaacggcaaaggccacgaccgacgcatcagagtgcgagagcgagactttgatggtctttccgcccgccaccgacgccgcgtcaccgaacagcttgacctcgggacccttgtccgttgagacaatctcgatgtccttgagactagctccggcgcccttggactgtgtaccgagcgccttgaacaccgcctccttcgcagcccatcgaccggcgtacgacgccgtcgggtcgggcgcgctctcgcagtactcaatctcgccttgcgtgaagttcttcgcgcggaaagtccaagaagtcggcacagccgaaatcagc

SEQ ID NO: 1998 - DNA, 142 bp, Glycine max
  Clone ID: PAT_MRT3847_101809C.1
ctctctttttgtgttaggcggcagaaacgtgaattcataagcacccgccatatgcctacacaatgagaccttaaagaaagcgggagctataacaaggtatgtaacaaaatcttattcgcacttaaaataaggggccacatgt

SEQ ID NO: 1999 - DNA, 215 bp, Glycine max
  Clone ID: PAT_MRT3847_10180C.1
gacactactaacatttctctcaaatctgtggtgctgcatttcaattgcctccgcttccacctcgcaaccatcagcagctctagaggatacacgcttagatatccgtgcatgccacgtcatagatcgactatgctgccccataaatgccattcactgggcgtcgcattaagacatcgagatggcgaatcagctggtgttacccctgatacacactt

SEQ ID NO: 2000 - DNA, 585 bp, Glycine max
  Clone ID: PAT_MRT3847_101810C.1
cactattcgaccattatgaataccttcgtttctatgacaaagagaaaatcaaagagccttactctcgaatccaagcccattgtggaatctctaccctacagtagtacgtacgaagaaggaaaatgttaatcgtgctgatgaataaattggttgcatgccttatactacgtgtgctcttctgttgggaactacgattctaatcctaagcagaaataataaaggaaaagcaatagtggaaatttctcatgtattcacttcaattctggatacacatttataagcagcacaagctaattggtgcatgtgtcccactgtgagtgcgctgaattttaataacaaaattgaacaaattgttataacagaattggttaaggaaatttagaaatattcttgtccttatgctagtgttggcctcttgatgttcctgcttggtctggtatcagccctctctgtattgctatcatcttcctacgtgcatgcctaccgaagttcctagtgttatgtcactattttttgtttgatgaacaatattatagtaggttctaaggtttcaggcacatgtacgaacagaatgtattgatatat

SEQ ID NO: 2001 - DNA, 1732 bp, Glycine max
  unsure (1)..(1732): unsure at all n locations
  Clone ID: PAT_MRT3847_101811C.1
cacctattttttcttttctcgaaaaccctaattcatacgtcgccgttttgtctttctctctctgagttctccacaggatcaggaaccgaagcgttgaaatggggtaatatgatgatgatggtgatgaatcgaatttccatttcctgatgtgaggaacaaagcaccaccaccaccttggctaggttcatgtagggtttgttgagaatcttatagttttttattttctttatcaaattcttcgcttgatcaggaattggatttgtgagttagaacaggaaataagagagagacatttgattgtgaatggatttggaatttaaattgtgtgaatattttttaattgtttgttgagaagcattgaattggattttacttgaggagtagtatattatggagaacgtgtgtgatgttaatcacttggatgcggatgttcttttgccccctcggaagcgtcttcttgctgggttgaaaaaacagagttcagatggtgatgctgctgcatctccacctttggttgttgcttcttgtgttactacagtttccgaggttgcttccccttccttaacctcctattccagtgagtttgaagccaggcttaagaatttgttgggttctcattctgataaccctanaccttacccctgaggaggtttgtggaggcttcgaaagctgcagcagtggctgcatcgaaagctgcaaaggctgcaagagctgcagccgaggaaaaagccgagactgcagcaaaggcagttgcagctgccaagagggctttggatttggttgcctctttctctgaagaggcagtgagcagcaaggagaggagcctgaagaagaacaagctcaagaagcacctcccagttcatctcttgtacaaaaaataccaacccattgaaaattgtgggactgatgaagaattggccaggaagttacatcgcgccatgaacagttctcctaggatctcaaagaattctcccaattcagactcaaaagggagtaaacacaagaaacctaagaactcttggagttttgaaatgactgaggtttctgatgcccgaatggcatttgggcaggattgcttatctttgaacaatgggcatgccgtggtgggtaaggttgattctgaaggctccattcaagaagtgtgctcgaataaggaagataagaagagtcaaatggagataacagataatggggaagcagaatcaagccaatcaaaggagaaaaacacagaagatttgtcttctgtaggtaggaagagaggaagggtgaagctaaagaagttgcccttaagcatttgcacctccaaagatagggcactgccaaaggaaggtgtgagagctagaagtgctccattgactgagatgaacactggtggcaatcatgctgttggtaacatccctttgtttccaatggagccatccactgatagggtgatcccaattgaggctacaacaacatgcaaatgccaggagttgaaggcaccggcttgtatcaaacaaaataaagctgtgcaatcataatattcagattcagatttaatttgagatgactgggggctagaactaccatcacagaagttgatagctgaggtagaaaccatcaagttttttttctttttttttacatatatggtccttttttttttcttcatctttggttttgtaatgaatttgaactgactaaatgtaaatttagatttttagttgcttgcattaaaaaaaaaaaaaaaaaa

SEQ ID NO: 2002 - DNA, 2403 bp, Glycine max
  Clone ID: PAT_MRT3847_101812C.1
cttcaccttcaccaccaccacctattgcttatgttctctcttctcgaaaaccctaattcatacgtcgccgttttgtctttctctctgagttctccacaggatcaggaaccgaagcgttggaatgggagaatatgatgataatggcgatgaatcgaatttccatttcctgatgtgaggaacaaagcatcaacaccttggctaggttcttgtagggtttgttgagaatcttatagtttttttttttctttctcgaattcttcttcgcttgatcgggaattggaattgtgagttagatcaggaaataagagagagacatttgattgtgaatggattaggaatttaaattgtctgaagatttattaattgttttgtgagaagcaagcattgaattggattttacttgaggagtagtagtattatggagaacgtgtgtgatgttaatcacttggatgctgatgttcttttgcctcctcggaagcgtcttcttgctggattgaaaaaacagagttcagacggtgatgctgctgcatccccacctatggttgttgcttcttgtgttacaacagtttctgaggttgcttcctcttcctattccagtgagtttgaagccaggcttaagaatttgttgggttctcattctgataaccctaaccttacccctgaggaggttgtggaggcttcaaaagctgcagcagtggctgcatctaaagctgcaaaggctgcaagagctgcggccaaggagaaggccgagactgcagcaaaagcagttgcagctgccaagagggctttggatttagtttcctccttctctgaagaggcagtgagcagcaaggagaggaacctaaagaagaacaagctcaagaagcacctcccgtttcatctcttgtacaaaaaataccagcccattgaaaattgtgggactgatgaagaattggccaggaagttacatcgcgccatgaacagttctcctaggatctcaaagaattctcccaattcagactcaaaagggagtaaacacaagaagcccaagaactcttcgagttttgaaatgactgaggtttctgatgcccgcatggcacttgggcaggattgcttatctttgaacaatgggcatgcagtgatgagtaaggttgattctgaaggctccattcaagaagtgtgctcaaacaaggaagataagaagagtcaaatggagataacagataatggggaagcagagtcaagccagtcaaaggagaaaaacacagaagatttgtcttctgtaggtaggaagagagggagggtgaagctaaagaagttgcccttaagcatttgcacctccaaagatagggcacagccaaaggaaggtgtgagagctagaagtgctccattgactgagatgaacactggtggcaatcatcatcctgttggtaacatccctttgtttccaatggaaccatcgactgaaagagtgattccaattgaggctacaacaacatgcaaatgccaggagttcaaggcaccggcttgtatcaaacagaataaagctgtgcaatcataatattcagattcagatttaaattgagatgactgggggctagagaactaccattacagaagttgatagctgaggtagaaatcatcaagtttttttttttttacatatatggtcttctttttttgctatcatctttggttctgtaatgaatttgaactgactaaatgtaaatttagatttttagttgcttgcattacttctttcggttcaaaagttgtgcttcaggttaattgatggccaagcttgagtttagataggaagatgccatgaattgaacagcttttccatttgtgctgcttataagctttttattccatctcgcatttgtattgagaataaaatgagaaaacttgttagtcttctgaaaaaaaaaaaaaaaaaaggccccaagggcccgggccgcccaaaaataagggatccccccggctggcagaaatccaaaacaaggttaatcaaaacggccaaccccaagggggggccgggaacccaatccccccaaaagggagccgaataaccgcggtccccgggcggcggtttaccaaggccgggatgggaaaaacccgggggtaacccaattaatccgcctggaagaccttcccccttccgcaagtgggggaataaccaaaaaggcccgaaccaatggcccttcccaaaagtgggcaagccggaaggggaaaggaaaatggaaacggtaataatttggtaaaaatcccggtaaaattttggtaaaaccactcctttttttaaaccataaggccaaaaccggaaaaacccctaataatccaaaaaataaaaccgaaaaagggtggagggtggtcccagttggaaacaaaagccaataataaagaaaggggaatcccaaggcc

SEQ ID NO: 2003 - DNA, 395 bp, Glycine max
  unsure (1)..(395): unsure at all n locations
  Clone ID: PAT_MRT3847_101813C.1
taccgatccgcaaggncgccccacgcgtccgattacatgtacagtttttgctttgtattttgtatcattgctaaatgttctccggagaggagcaaagacttttgaaaaacaaaggtaagccttagctcttgtagtgtttgcatcctgggacacaagtaatgaagtaattcaatttcgtacaacaatgagtaatccccaagcatggcgcttttgtaattaacaaagcattcttaccttaatagccataaaaaagaaagcattcactttgttctctctctgcattagctttccagattggtgcctaataccttcactgaaattaatgatcgaatgcacttatcacaaactagacatgaaaaattcattagcaaactaaatagtctacatgatttttt

SEQ ID NO: 2004 - DNA, 698 bp, Glycine max
  Clone ID: PAT_MRT3847_101814C.1
ctcatatattataatatcacgcacacatcacacacgtagcatgcggccacgcagggaaacagagaagcgcagattcgatttcgactcagccaacaccaacaactcagcctcctcctcccccaaatcaccgcggcgaaggccgaagctcttggcggtgctgatggcggggcagtcgcggaaatggatgatcctggtggccacgatttggattcaggccttcacggggaccaatttcgatttctcccagtactcgtcgtcgctcaaattcgcgcttaacgtgtcgcaggtgcagctgaactatctcgccacggcgaacgacatggggaaggttttcgggtggtcctcggggattgccctaatgcaccttccggtttctgttgttatgtttgttgcggctttcatggggttcttcgggtacggcctccagtggctcgtcatcaccggcgtcgtcaatttgccttattttctggtctttcttctgtgccttttagggggatgtagcatctgttggttcaacacagtatgttttgttctctgcattaggaattttccggttaaccgagcccttgcattatcgctcacttacttgtccctattcttaaccaaccagctttagaccctctccctcctgatgcagtaaaccgggactcagtgatatttctaatattgaactttatagcccttttaactggtcttta

SEQ ID NO: 2005 - DNA, 527 bp, Glycine max
  Clone ID: PAT_MRT3847_101815C.1
gtttttgggggtttcacttgcttttgtcattcatgagtcagcaaatccacatattgggaagatgatccggccagggtcagaagttatgtatgctcttgttcgctccacatgtgaatcatgtacatagaactgagtcaaattatagatactatcctgctttcttatggaagaatcatggaggtatcactcatatatggttaattaaaaaatactttctttcaaatgagtaccttgaacctaaaaacgatacgagactagtattgggtatttatgtatctggatacatgaataagaacataatacatttataaactttggaaagaaaatttttctgatgaacaacataattgcggaaccctttatgaatgaaagagacctttatgattcaatacatgtgcatatggagtattaaagactaccaaaatatcagcttgactgaaagaaatcacactagaatcatcagcctcagtatcggaagattgcaataatctacaacaaatggaggaatgttaactgctccagacaga

SEQ ID NO: 2006 - DNA, 273 bp, Glycine max
  Clone ID: PAT_MRT3847_101816C.1
ccccctgactctaggtgtataaatagataagagatgggtgagggggggaccaaaattagaaactcagctagctagctccccgtattgaacgggtcataatgtgatatctatatattctaatagtggggttacgtacttggagtgaggttcgaacaaagaaggtcattaattaatttcattgtttattgtacttataacaatgttaatatggaagaatcaaataatccattttgctcttcactaaacggacatatataaagcttttgacttgac

SEQ ID NO: 2007 - DNA, 119 bp, Glycine max
  Clone ID: PAT_MRT3847_101817C.1
ctacatatctgactcatctacaactttgtacataaacctatacagaccttaccgaaaagaacttgagacatgaatacaccactaatgctacacaagtaccttttcaaaaattattgatg

SEQ ID NO: 2008 - DNA, 278 bp, Glycine max
  Clone ID: PAT_MRT3847_101818C.1
gcctctcgtgatcaacatggcttgatctcctcaaggtaatatatgcttttccttttctttttcttccctttatttagctcacttttttccgctaattataagctcatgtataattattccctgttgcaccctagaaactcctgtttcagtgaagaatctgtgtacttggctaattcgattgcttcttgttttgtcccaatttgggtgagagagaatgggtcaagagtttctccgttttgacatgtgaatgtcgtctgtccgtgtaaaaaaatatggac

SEQ ID NO: 2009 - DNA, 231 bp, Glycine max
  Clone ID: PAT_MRT3847_101819C.1
aaattcctttttgtttcgaatgggggaaaaaaaggagggaccttaactgattctcagcttagaccagccttattctgaggaaacaacataagatgcctattcttaattcctaagcgagatcagaggggctataaaagaaccatgatttacgtgcagagcaggcgcaatgataactctggtcacactagatacatacattacttagctaactattaacgacgagatgtatgc

SEQ ID NO: 2010 - DNA, 284 bp, Glycine max
  Clone ID: PAT_MRT3847_10181C.1
gaatcatggtcacatctgtagtatatatagtttatagaagcggaatgccaatcgacactggtagccatcgggattgagttcagctgcttttgacgatactgacgaatgagtaaacggaagaatgaatcagatgagctccagtctggactctcattggtcaaacaggcgcaacgggccgagagagaataaaaggacaccagaagagcaagaaaaagagctgtatgataagagtccttatcctacccaccccattttttaagtttatgggaaaaaaattaaataac

SEQ ID NO: 2011 - DNA, 104 bp, Glycine max
  unsure (1)..(104): unsure at all n locations
  Clone ID: PAT_MRT3847_101820C.1
catggcgnataataatttcatggactcaggggtgaacccttccactaatgtactacctagagttacagagaatggcacgtgagagaaattatgcacaaactcaa

SEQ ID NO: 2012 - DNA, 187 bp, Glycine max
  Clone ID: PAT_MRT3847_101821C.1
ggtggtggtgtgtgtacagccgcgtcacggttgcacttctaatctgcagacacggatcttcagttctgcgactgacagtattgtaggtttggtatgcatagccgtatgtatggctcattctcttcagatttgcctaacttttagaaactccttctcaggtacataatttcttctcatgatatctaat

SEQ ID NO: 2013 - DNA, 344 bp, Glycine max
  Clone ID: PAT_MRT3847_101822C.1
cacacccgaagaagcctgggaagtctccttcatcgcttcttaactctttgagactaggtggatgctagggaccaggtgtgaagatacaagttctcttattatgaacaattaattccagatctgcgaatgaaaaccctccatttgttgttcaacatctcctagtgccgacatcaagagttcacagccactctgatggtgatgaatcttctgcacaataggaggatttgttacctgatctctgatctcgtgagtatgaataccatgagtatatctggacttcacgaactaggacttgttctagcttgattactattcataggaatcctcgttttttggacgggaca

SEQ ID NO: 2014 - DNA, 403 bp, Glycine max
  Clone ID: PAT_MRT3847_101823C.1
agtaaacagaatgaatattgataaatgcaaatgcatcttgaacaaggtttaatatacagcataatgcataaaataaatcccttaatttaagcaatacatatgagcctatgaggagagaaagcgcacatatatggaggaccagaagattttacagataagcttgattaaatcagctacttcaagtgatggattaacaatctggacaagcctgttaaatatattgagaaggtgagggaatgtctcatcaacaatgcgataaactggtaccctttcctcgtctgacttgaactcattttttctagaaagaatccgcagcacatacaaggcaccatggacttgttgatcctgtaagttatgcttcacccagtcaagaagatgaggccactgctcaggataatcagaa

SEQ ID NO: 2015 - DNA, 441 bp, Glycine max
  Clone ID: PAT_MRT3847_101824C.1
gccatgaagatcccggtccttcctgccgtggtgctcctctccctcctggtgctccactctgcccagggagccaccctgggtggtcctgaggaagaaagcaccattgagaattatgcgtcacgacccgaggcctttaacaccccgttcctgaacatcgacaaattgcgatctgcgtttaaggctgatgagttcctgaactggcacgccctctttgagtctatcaaaaggaaacttcctttcctcaactgggatgcctttcctaagctgaaaggactgaggagcgcaactcctgatgcccagtgaccatgacctccactggaagagggggctagcgtgagcgctgattctcaacctaccataactctttcctgcctcaggaactccaataaaacattttccatccaaaaaaaaaaaaaactaacaaaaaaactactgcccgac

SEQ ID NO: 2016 - DNA, 2550 bp, Glycine max
  unsure (1)..(2550): unsure at all n locations
  Clone ID: PAT_MRT3847_101825C.1
gtctctcgttgccaacaaatctctaagacgagcgaaatgcaagctaaacactaccctgctgcaccaaagtgacaagtcacacgcacaaacattttcttttatttctctatcacactccatcttgcacccaaccaattaataaaaaattaaaagactcaaaatcgtgaagaactaacacaattcactcttttcactcaaaaagattctcccccagcgatgctgttgaatggcttccacgcgcttcgggaaatgtggacgctcttaccaaggatgatgcaatacaagtgtgtcaactccagacaagggatgccgcaaggtctgccgcctgaaaaactaagggctcaagtcgtgtatgccgaggcaattcagtgtttgcagaataagcggatcagtggcagaactgaggtcgagagttttgatgtttatggtcatttagtgacttataaagaactgtattcttatacgtacagaattattgaaggtgatacttcacctattaagtctgtaatagaggttacttctagtcgcaaaaagtactcttactagacacgacaatagtaaagtgtggaagttggaataagtaattgtttataatattaaaaccgcagtatctttcctctattgcctgtagtggcagagagacaactactaagtttgtgatcctgaaagagaagtgtcattgatccatgctcatgacttgcgtatagagtctccaaaaaaaaatgggaaggctttaagtgattatacagggtaagcaaacagttgaatataatggggggtctggcggctagaactgacaaaagcaatgtgttcttgtagtgctgtgtaaaattgttcaatgagggcactccaatgccagtgctgcagcccggatgaagtgatatttggtcctgattttttccaatcactgtaatgccatctgctgtgtggtctgattttccgggaggaagttgagtttgtatcttccacatttgcacatagcattgtccatgcttttagaacctttgaacaagtgtgggaagagctgtgcaatgatatcagagaaggggttctcaccagaaatgtcaccgttccttccattcgaatggccatgtctaaactgctcaaaccaaaccctgaattagcaaacgcgatccacaaaaaatgcacgggattgagcaactggtacgggttgataccggagctttttcccaatgcaaagtatatttatggcatcatgaccgggtcgatggaaccttatttgaaaaaaatgagacattatgccggggagctgcctttgttgactgctgactatggatcctctgagggatggatagcagcaaatgtgaacccacaacttcctcccgagtatgccacttatgccgtgcttcctcacattggttactttgaattcattcctctcttagagcttgagaacaccaagcctctgggcctgactcaagtcaaggttggtcaagagtatgaaattgttatgacaaatccagcaggtttataccgttatagattgggggatgtggtgaaggttatgggattccacaattcaactccagaactcaagtttattcgaaggagcagtcttctgctcaacattaacatcgacaagaacactgagaaggatttacaattagccgtggaagctgcagggaagttgctagcagaggagaaactggaagtagttgacttcagtagccaggttgatttatccaaagaaccagggcactatgtcatcttctgggaaatcagcggagacgcgagccaagaactactccatgaatgctgtaactgtttggacaagtctttcgttgatgcaggctacaccagttcgcgcaaagtgaactgcattggtgccctcgaactacgacttgttcggagaggaacattccagaagattcttgatcattacctaggactaggaaccgctgttagtcagtacaagacaccaagatgtgttggtcctacaaacaccagagtgttgcaaatcttgagtgaaaatgttgtcaacaactatctcagtaccgctttcaattgaataaaaatttgggaataacaatctattataaagtttacttagttttaccactttgtgcaactttctagccaacattcttctctttatttcatccattctcaaccctttcttcgagtcattgtccaagtatgtttggctttgcatggtttatttatcacgcagcagattcctctctcatcatatattacgctctctgcaacacctatgtcatgtcgttagtaccaagtattgaaagctgaagattgtcgggcgtgagtgaaatatcatgcgaatcctttggactctgtcagacagctattaatgagttttcgagaaaaaaaaaaaaaaaaaaaaaaaaaaaaaaaaaaaaaaaaaaaaaaaaaaaaaaaaaaaaaaaaaaaaaaaaaaaaagaggaaagggaaaaaaaaaaacaaaanngaaggaagcggnaaaagaaacaaaaaaaaaaaaaaaaaaagggggggccggttttaaggaacccaattttattaccgggggtgggaaaggttatatttttttt

SEQ ID NO: 2017 - DNA, 235 bp, Glycine max
  Clone ID: PAT_MRT3847_101826C.1
gaccagtacaagaccgccttatgaagacatgaatgaggtccttaactccaagcactgtcatactattctgacacgttcgagatcgcataacgctggtacatataataagaatatcgaggattggccactgagaagagcagctaatggtacctgaagattctaagttgatctgaaacatggagccaatgctcgactattaaatgcattgaaactgcttcatgcgaacaaagacaaa

SEQ ID NO: 2018 - DNA, 391 bp, Glycine max
  Clone ID: PAT_MRT3847_101827C.1
ccgcaaaaaacaaaaattaaaaacaggggggaacaccaaatctcttcaaacaaaaaaggggggcaggcaaaaggccccttttattgccaaagaaacaaggcatcaaaaacaaaaagccgccccctaacttaaaaaggaaaaaaaagaaaaaagggggcccttgccggctttaaaaaccaagggaaacggccattctggaaaagccaaatgggaaataaaaaccaaaaaccggacaagaccggtaatccttggggaaaaaaaatttttgcaaaatcttatcggccccccccagggaagaaaccaaaacccgccataacccaaaaggtacccaggtaaaaagggcaggacgggcctaaaaaccgaaaggaccatcaggggccccaaaagcaaa

SEQ ID NO: 2019 - DNA, 506 bp, Glycine max
  Clone ID: PAT_MRT3847_101828C.1
gcgcatttatgataattttccttgccatacatccccctatctataagtacagatttgcttcatagatccatacagagaattatacatctgcaactttattctaagaagtaactagtgctgcagttttcattacacacacagaaaaaaactcttagaaaagtaaaaataataatatttttttcatgaaacaaactaaaccaaacaaaccttcaggccttcagcttccttttcacaaattaaaaaaaaaaagagcatttttttttgtgtggaagtatcccagaatttgaagctaattacaacttgggcttaccagaaaactttctcacagcttctttaacagaaacattggtgacactgtaacctccatccacaactaggttaaccccactcacgtactttgactcatcactagccagaaacagagctgcttctgccaaatcctcttccttcaaaaccactcccttcaggttccccgcctcagaatacactttctctaccatctcctt

SEQ ID NO: 2020 - DNA, 456 bp, Glycine max
  Clone ID: PAT_MRT3847_101829C.1
gttagaagttctctgacaaatcactcaggccacattatttgtatgttatcttgtgtcagtttgcagtatcttgtcacacattcttgaaattgcctgatttcatttatatcatccgttatgcagcctgctcgcgagacggatctgagagtgttcggagttgtgctctactattctctctttatcataacatttttggtttaaccaatgttacttccaatataagtgcagctgtgggtgctgttgtaatgctgcacattgctttgggcatgtacattttcaaagcctactccaaacctactgagcctgagaagccagctaaacaagattaaacttatcacttgttttaagttcctaggttctaagatggatttaaacaataagaacaaaactaaatattttaaaggtcaaaaattgttcataacattgtcagataatagaaatctagaggcaactttt

SEQ ID NO: 2021 - DNA, 418 bp, Glycine max
  Clone ID: PAT_MRT3847_10182C.1
aaaacaacccacacttggcacgtggttacgacaatgaaaagagggggggaaattttcaaatgggcagagcatactcaacaagaggggcatgcctaattgcctttcttgaattaaacaaactatcttgcgaaagaaaacacaatttccaaatcatgcaaaggatcccgcattttcagaatacctggcagtagcctggggaacagaaaaggctggcctaagaatattaccagcactttcaaaatcttgagagattcccaagagattttcaaaaactgtagactgtttgggattgtcaataaggaaactgaaccgccatgaaagttgattcgccctctcagaactccacctttcaaaaccattatgaggaccacatacctgtattgggaaggatctttcccaggaatggggttctgatctg

SEQ ID NO: 2022 - DNA, 355 bp, Glycine max
  Clone ID: PAT_MRT3847_101830C.1
gcgtacggctatttactacatcagacaatttgagtatgtatatacacaatcgatcatactacattcgtaaaattgtacaggaatcttgagacttaaaaattattacacgctattgtagcaatgctgaccatatgaacaccagcaatactaaatgcagaagcatatatgagtagcatatgtcatgagcaagcaataacttggtaatatggcataggacataatgtctatgtagtatctggacatgcgtaacattatgtaccgtaagcgcaagccagaagatgttattgttcgaactgacagacatattatgctgtctgaatgcaagctcttactcctatatgctatgagtatgaac

SEQ ID NO: 2023 - DNA, 532 bp, Glycine max
  Clone ID: PAT_MRT3847_101831C.1
acgagaagaataacctcaacttacatattataaagggcaactttatattacaaccttaaacccgaaggtcatgcaccacagctatgctgaccacccaccattttttttattgcccccatccttttttcataacttcccataagttatagcaaactaaagtttcaactcatcactcagtctggtcaggtgtaactagaatggacacactcaggaggccacacatggaaacctatcaatgttagagccaaattcatacaaaatgagcgttgccctagcccacttaatctgaaagacctcttggagcgcgttgagctcacccaaactaggatcattcgcccatactgatctccctaactgcgggagcaccttttagcattctctattgcatccactgacactgagaactacaacgcaatcttataccagattctgtgactcgacaagcgaaagttgatatgctccaatctgattctacacgagacccctgccgtgagccaatcctcagcattccataatcaactgtacccaccca

SEQ ID NO: 2024 - DNA, 1055 bp, Glycine max
  Clone ID: PAT_MRT3847_101832C.1
gagaagttctggacacactttctctatacaggttattccttgataataaaaaccactaaaatcaactaaatgtgaccatgtgtactcaagctaccactcagtgggaaacacgatactatgcctataatttctttgacatatgaaaaaagctacagctacatgtaccaagccatatgggcttgtacgaaaaactgcccgcaaaaaaaaaaaaaaaaaaaaaaaaaactcgagactagttctctcctcgtgccgaattcggcacgaggtgagtctttcaagccctagcagggtatttgctaatgctaagggaatagactcagcacaaaaggcccaggccgtgaggtttccagctctgtcgaggcccattcaaaagtggcctggtttggtgaagacccggcccgttcgggcgacgccggagaagatatcggagaaggtagaggagagcataaagagcgcggaggaggcgtgctcgggaggcggcggtgacgcggaatgcgcggcggcctgggacgaggtggaggagctgagcgcggcggcgagccatgccagggagaagcagaagcagtctgacccgctcgaaaattactgcaaggacaatccagagactgatgagtgccgcacctatgataattgatgactgaactcagtcattccaaagttacatgcatgcatctattacttttaccttctgttacgtacatcagacaccatgtattattaattaattcttatttataataaacacaattcaaaatctgaaaaaaaaaaaaaaaaaaaaaaaaaaaaaaaaaaaaaaaaaaaaaaaaaaaaaaaaaaaaaaaaaaaaaaaaaaaaaaaaaaacttgggggggggcccgggccccaatttccccttatggggggtgttttacccccccctcctggcccgttttttaaaacggtggggatgggaaaaccctggggttccccaatttaattgccttggaacaaaacccctttttccccggtggggtaaaaaggaaaagggccggcccggtcgccctttccaaaaattggcccaccttaatgggaaatgg

SEQ ID NO: 2025 - DNA, 136 bp, Glycine max
  Clone ID: PAT_MRT3847_101833C.1
tcggctcgaggagaatgtgtatgagggtccccttgatgatcaatatgcttcagctatcagagactgtgatcctgacggtctctgatgctctatgtctgatagatactcctggcgactgcatacggcagaattaccg

SEQ ID NO: 2026 - DNA, 144 bp, Glycine max
  Clone ID: PAT_MRT3847_101834C.1
gcacgagccgcgccgactccgacgaggcttcgtccgaagagggtggcttcatcacccctttcttcagcgaccccatgaataacttcatggcccaaatggctgagatgatggctgttatgcgccgccagatgaccgaagtgctaa

SEQ ID NO: 2027 - DNA, 541 bp, Glycine max
  unsure (1)..(541): unsure at all n locations
  Clone ID: PAT_MRT3847_101835C.1
ggctgtcggaaagaataagaagatttccaaaggaaagaaaggtggcaagaagaaagccgctgatccctttgccaagaaagactggtacaatatcaaagccccttccatctttcaggtcaagaatgtgtacaaaaccctcatctctcatacccaaagaaccaatattgcttctgaaagactcaaacatatantgtttgaagtctcattggctgatctccaaagagataaataccataccttcaagaagattcatttgagagctaaagatgttcaaaggaaaaatgttctgacaaacttttaaagaatagatttcacaactaataanttaaagtccttaataccaaaataacaaactttaatgnaatctcatataaatatcaaaaccactaataattatacattagaaatattctacattaactgtaccaagaaacatagtgatcgaatgaaagaaacctattatgcacaatcaagccgaatcagacagattcgcaataagatgatatagattataatgaaccattcatctgcctatgatgtg

SEQ ID NO: 2028 - DNA, 238 bp, Glycine max
  Clone ID: PAT_MRT3847_101836C.1
tttttgagaagaaaatattttgcctttcaaagcacagaacccaataatgatgttattaatactatcaatacaacaccttgcggctagaaaagcggtacataattgggtctaccgatatttaggatgtttcggctaaggaagataccctttatcggctctattaaggggccaaaccacattttaaattggactttaaggaacctctggccgcggcaaacatttattaacgccgaaaacc

SEQ ID NO: 2029 - DNA, 383 bp, Glycine max
  unsure (1)..(383): unsure at all n locations
  Clone ID: PAT_MRT3847_101837C.1
cttcagaacaatagttgaaaataaaaaaaattatggaattattcttccgggatacaaaagattatgttttgaattgcattgttactttcaatggcgacaggcaaaggaaggaggtggaggaggatgttttgtggtggtgcgactggtgaggaggaggtcgtgtgactgctgtgaagaaggtgaagtcatgggagaagaagttgccatggcgggagtggtttgtacaaagagaaaggtgttagggtcggagaaggatagtttggtattttcaagcaaaatgagaggtgtaagatacacatatgagagtgctccattcaaatccgttattcacctactatcaatccaggcccataaaaagaagcatttcatttttcggntcggnt

SEQ ID NO: 2030 - DNA, 238 bp, Glycine max
  Clone ID: PAT_MRT3847_101838C.1
agtaaaacctcccacgatgtcttcaaatttgcagtcgaagatgttaattagtctgatttgtaaggaattcccatctcgtttccatgatatccattgtctgacgaatttgcgaggtgctggactccgatttagatccttcaggtgttgacctgttggcagttcttgatgtcgctatacattacgttggcgcttcgtggaaaaattcaacccattcactatcaggtttcttttcctgcac

SEQ ID NO: 2031 - DNA, 972 bp, Glycine max
  unsure (1)..(972): unsure at all n locations
  Clone ID: PAT_MRT3847_101839C.1
nnnnnnnnnnnnnnnnnnnnnnnnnnnnnnnnnnnnnnnnnnnnnnnnnnnnnnnnnnnnnnnnnnnnnnnnnnnnnnnnnnnnnnnnnnnnnnnnnnnnnnnnnnnnnnacgccgcgcacgccccgaccgcccaacccccagcggttcagatcaccatttttttctcgtaactgagcttagtgggggtaggtacttctagggatagcatgagtgatggagtccaatacttcaggatgaatgaaatttaatggggtttgatgtttggtccttgtcctatctcgtactttcttccttgcaacctgatcgttgagcttgctgatatcaggttcacgcactctgtcttttttactcgtgttgccagtaattcttatgaattgcattcttgattctctttttgtttcctgaatgagatgttaactagtttccatgaagtagagaatgagtggggaatacaatacaagcattgaagatttagcataatgaagacacattcttatgaccattcttactttctatgataatgcattacatgtcaaactaaccttagaacacttattagccttttccattgcttcctggtgaagagagcgatacgccactttgacctgtgactgatcacaagagctgtcaatgcccagaaggtcatacaagtcaaagtccatcatggttgatgacgataatgccttgcatgtgagagtggaggtggaggcattggacttagagaaacacttgttgtggaggtttgaagggtgaaatccaagtggttttttgatgatgtaggaaggaagacatgcagatgcaatagttgccttgttgttgatgatggaataatgagtgtaagaggaagaagctaagggaaaaagataagacatcatcgtatcatatggtagagtttgatcacgttcggctcctatataattctatgacccacaacacaacaatgatgcaagatattttgcattctcacatc

SEQ ID NO: 2032 - DNA, 295 bp, Glycine max
  Clone ID: PAT_MRT3847_10183C.1
gaagccataacaaacctccttctcttaattatcaactaaatcgtacccaatatttaataaacaacacattttgagcacctagcccacacatgcacatgcgttaggatggcacaaatttatccataagcaaacacactgggtgcctctgacatggtgtaaagagagctggctctttgaacagccatgatagccttgggagccttcttcttcacaactttttcttttttttttgacccctctttgcctttggaaaagaggatcttccgggccaagaaaactttttttctgagatttg

SEQ ID NO: 2033 - DNA, 2517 bp, Glycine max
  Clone ID: PAT_MRT3847_101840C.1
cccatgcgacctcctacgcgtccgcggacgcgtgggcggacgcgtgcgctgaaaccctaggaagaggaggaagatgatcttcttgacgaacaagcacatcatgattactccaccaagtaccgctactagtttcagatgttactcgtagcaaccaaccaactttgcttgctcaattcgcatagtttatactttatggcatcttgcttatttatttgtgctcaagcataacgctgaaaggtatgtgaagcatacagtaataatatccaagttacaaagataaagaaatggatacacacgttcgtcaaaatattcccttgccaatatttttgcaaagtgaaccaacaaagtcaccttcaagacatcaagtagaattttcaatgtctttggtgaacaagaaagtggtaaattttaaatcccaacaagtttgggttagtatttcaaagctgagtcagagaattgataaagtatagcattcttaatgggtaaattgttatacttatacatcatctactgtgaatgtgattcatgtgtttctttatataccttacagtttattacatgggggtatatatatatatatatatatatatatatatatatatatatatatttacctgtaaaatttaaagctcctaatatatacttctacctatttctatttccaattatggacaaaagttctgtaattgccattccaatcatataccatgtagctgctgccagggtacactgcaaccaagagctgttaacaatttgcagagctagagaaccacccacatgttggtgcagtttacttgttgactcaactgggggtatttgaactgtaaccactgcagtcaatgcagtaattattggtaatccccatctgatagggctatttcgattctcatatgtttcatgatcacttgcatttgtttttttctgtcctggggtcgtaactgaaggcttttcaagtggggttggagtagttgtacttctagttgaagatggaagagcatgagttgatggagtccaatactcctcaggatgaatgaaatttaatggggtttgatgtttggtccttgtcctatctcgtactttcttccttgcaaccgcgtctctgagcttgctgatatcaggttcaggcaatttatttacaactcttgtcatgcctttttctgattttgatgagctactacttgatctaggtgtttgccagtataaccaattggaaattgatcttattgcctgaattgctgacattcttgattctctttggaggtctgtttccttagaacacttattagccttttccattgcttcctggaatctagtctgaaatttctccacatctacaaatatattagagacacgagcaccggctgtgtgagctgcacctactcttacattgccacgtggctgcttggacatcaagaactccaaagctgcaaggttggacctctcaacaaccgaaatgcaattgacaggacaagattctattgcctcatcaattttgtttggggaatcagcccactgagaaacaacccttgctcttccataaactgattcaacagcaaaagtcttttcagctaacaaagcacatttcaggcaaccaacacatttgatttcatcaacaaatattgcccgctgctcactttctgacccacaccagaccgagtatatgggtctgccagtgaagcctttgaattctgaactttttgcttgctccttatcataggcaaggcgtgcatttgggtcagagagaatggaataagcttcgttgagtatgatggccatgtcatggccagcagggccagcaatgtcagggtggcagcgcttctgaagagagcgatacgccactttgacctgtgactgatcacaagagctgtcaatgcccagaaggtcatacaagtcaaagtccatcatggttgatgacgataatgccttgcatgtgagagtggaggtggaggcattggacttagagaaacacttgttgtggaggtttgaagggtgaaatccaagtggttttttgatgatgtaggaaggaagacatgcagatgcaatagttgccttgttgttgatgatggaataatgagtgtaagaggaagaagctaagggaaaaattgagttcggctctgtcaccgcctccaacgaccaggtcacgctcgccggctattgccccgtctccgaagacctcgagccctgccgctgggagagataagacatcatcgtatcatatggtagagtttgatcacgttcggctcctatagtaattcgagtgacccacaacacaacatgcaagagcaatagcatctcgcatccattttattccaaagaagaagaagaatggtcgttaccaagaactaaaatgaaaaggggagaaccgtgatttaaaaattcctgaccaacacaattatcatgtttgtccctaagtcacaattcttccaaagaataatggctactctttaatgtctattcaacaattgctgcttgcaaattacaaatgtgaaataggtgaaagcaaagatcttgctttac

SEQ ID NO: 2034 - DNA, 216 bp, Glycine max
  unsure (1)..(216): unsure at all n locations
  Clone ID: PAT_MRT3847_101841C.1
ggggtgatgaangatggacccagttgtgctgttgataatggtactactgcaaattctacacctacttgcttatcaagatcgtgattatcttctctctcaactggtgcttatgtgaaagttctgatcttattggagagtagctgtctattattcctactaattgcaccacccatgccctggttttacccatattctaaaactaatctactatgagct

SEQ ID NO: 2035 - DNA, 1288 bp, Glycine max
  Clone ID: PAT_MRT3847_101842C.1
ggacgcgtccgacggctgcgagaagagacagaagggggacggcagtttatattccccaaccggaccaaacacacagtccaaatcctttgtgccctaatttctcaaatcggaatctttcactccaccgctctaacccctaattccgatcaacgcttttgccttcgtcgctcgccagtttgttagcgggagctcagttattctgttttattgacgaagtgataacaaatggatgattgggaggatgagcatattgcccctattgatcttacattgaaagatccagttaaaagtaattgggatgatgaagatgtggatgaaaatgatgtgaaggaatcatgggaggatgaagacgagcctgctccggcacctgcagcacctgctgtaaaaactactgaaaaggctcccaaaaaatcttctgataaagccactgaaaagaagggtaagacagtagaaccaataaaggaagaaccattagatcctgtggctgaaaaacttcgccaacaaagattaatcgaagaagcagattataaggccactaaagaattgttcagtgggggaaaagaaaaagatgaaaagaaccttgacactttcatacccaaatctgagagtgatttcttggagtatgcagagctcatctcacacaagctccgagcttttgagaaaagttatcattatattggcttgctgaaggcagtaatgagactatcaacgatatctctaaaaggggcagatgccaaagatattgcatcttcggtaactgccattgcaaacgagaagataaaggcagaaaaagaagccaatgctggtaaaaagaagataggtgggaagaaaaagcaacttaatgtcgataaacctgatgaggattttgttcctgctgatcgatatgatgctctggatgattatgatttcatgtgaaattttttggttcggttccattcagattcagttacgggattcaagtgtttcaacattgaaagttgggacaagacccttcggcatacccttgtcaaatgctaatgagtgctgtcccgtattttgtctaataagagtgttcgtcagtgtcttgttttctcattgtcaattttgtcaccaccaatatatgctcggaagttagtttatatgatttatagaacaatttgaagatggacgtggcaacattcgccatacctttaaacttgggtacattttatgttcttggattgtaggaatagaactcgaccttttcttgttaagggaacttgccattgtcttttttttgttaatgttggatgttaatagcaatgttacc

SEQ ID NO: 2036 - DNA, 684 bp, Glycine max
  Clone ID: PAT_MRT3847_101843C.1
gacacacaaactttattacagttgttgtaactaagcaagaatattattaggcaatgaagtcttctggaccttcaacaactcttgctctttttttaaccatcaatttgcttgtctttgtcatggcaagtggctgctacacttgcacacagcctaagccaaaccctagccctaacccattcccttaccctaaccccagccctaccgcaaagagctgccccagggacgcacttaagctgggtgtgtgcgcaaacgtgcttaatggaccaattggtgcgattgtggggtcaccaccggaccacccatgttgctcagtgctagaagggcttcttgaccttgaagttgcggtttgcctctgcactgccatcaaagctaacattcttggcattaaccttaacatccccatttcacttagcttgatccttaacgcctgcgagaagtctccaccctctgacttcctatgcaactagacattattaagcatgccattctcaattatccatgcactacttaatctcattgatgtgtttgtttatttgtgattttggttgccctttatgttgtggtgatgatcgtgttgttcggaccgtgctaactcatttagtgagaatgcagttgtagccgtaatttaacttctggtgttagtaatgactttctaatttttgaaatttgaggaattgttctaag

SEQ ID NO: 2037 - DNA, 448 bp, Glycine max
  Clone ID: PAT_MRT3847_101844C.1
ccctcgttttcgaccacgcgtccgcccacgcgtgggcccactcttacgtaagaaaagaccatgactccaaagatgtaatatataaaggggctttatagttggcacataggattgctagattcttcaatggatctccaaagggacaaatgagcatgaaatctgccggagtggtcccaacgactgggaagcaattggagataaaaaagctgaaggacaagatataattacagttaggcatgatagggcggatcatggagcaaagacaatcgaccggaggaagctgggcagcaagaacttgaaactgattattttcatatgcggaaaagacattgcgaaggcttaggtatacagaaccctcggcttgaacagaatgagaaacttgaatagaagaaggcagcgtatccactctatgaatatgaagagagaagcattatcaggagtcggaaag

SEQ ID NO: 2038 - DNA, 135 bp, Glycine max
  Clone ID: PAT_MRT3847_101845C.1
acgtaaaagtcctgacccctaacctactatgacctaacactctgcaacttctcagccatgggcatggcgatcgtttgtcgatgatcacctacatgagtcacattccatgaaccagctcatctcatcccgctatca

SEQ ID NO: 2039 - DNA, 857 bp, Glycine max
  unsure (1)..(857): unsure at all n locations
  Clone ID: PAT_MRT3847_101846C.1
ttttctgtctcgttctcctctttctctttctctttctctttctctttcaggaacaacacaaacacaaggatgataccgcaacagtgggcttctccatgtggaaaccaatgcaccaataaatacgctgccctaaccaaaatcccatggcgagtattctgcaaaaagggttgcgactcagatggagagacatgggaagaatgtttggaggactgcaatcaaatatgctacaaggatcccgtactaaaggaccagcagtggagtgcttatattgatcgttcccctggagctgccagttattcagaggaatgttttcatgcatgtgtatctggctgcggttacaagtttgaggttaaaccagaggaagctgataaagtcagtcctaacaggcaactgaagccggagaccaagccgaagccacaaccaaagccaaagccacaacctgtatgccccattgacccgccaagtgatatacctgatacttctgcatagtgaaagacaaacatacatatttgacaaaattccaaaatgtatacttgatactttgttggctatatgctcaggaatttttttttgtttcattttcttttttccacgcgtcacgcgtccgctaattgttatcagcatgagttacttacattttgtggacaacaccatgagtggttgtgcctatttttgccttgagaatttggaggcatcgtgttgcctttaaactgggagcattgatagttggataattacagggcttccatgatttattaaggaaagttgatgttctaggattttaaattggtgattttttttatctgatcattaccgttataaatctcnntntaaaaaaattaaatttaaaaaattat

SEQ ID NO: 2040 - DNA, 417 bp, Glycine max
  Clone ID: PAT_MRT3847_101847C.1
cccacgcgtccgcccactcttacgcgtactcatgatctaaccttcagagcaatgtttctactgaacagggctattatgttttttgcaacaagtcacacactattgccaacatatcaccacaaaatattcaatcacttcaacttcataaacgtgaattgagcaaataccgatcaatcatctcctggaactatttacatgacggaacaatttgtctatccaagcaagtgctttaaagcatatacaaggaaaataaccaaatgacaatgaacgtcatacattatgacttgcttacactctacaagaacttcaaatctaattacaagttaactccaacggaaatggcaacctaatacttatggcaatttaaatccagaaacaacatgaccacatttcttacgcttatacctttttacaact

SEQ ID NO: 2041 - DNA, 400 bp, Glycine max
  Clone ID: PAT_MRT3847_101848C.1
ctcactcgtacggtgattgaccttctataactagagggtatggttagtgaaataagcggaggatcaggagggtaggttgttactgtcaaatgaggagctgtacaaaaaaaggagggtgagtggattgctgcatcttggagaccaaaattgtcattgcgatgtgggggaagacagaatctacagtggatcttctcactattctcggggtgggaccacattgacgctagatcaggatatagaagccttcattaaaaatacaggttcttcactcattctaagacataaataccaatgaccaactttactaggctgtgatgataaatcaagggctatatatactaattgcacatgtgctcattggagagatagacgcttgtgccgttggaatcatatacagaga

SEQ ID NO: 2042 - DNA, 253 bp, Glycine max
  Clone ID: PAT_MRT3847_101849C.1
cccacgcgtccgaaaaaaaaaaaaaaaaaaaaataaaaaaaaaaaaaaaaaaaaatataaaaaaagaaaaattaaaaaaaaataaataaaaaaaaaataaatattgtgtggcgttttttaaattcaattcattggccgccgtttttcaacgttattacttttaaatccctgcccttacctaaattaatctgcttgtagtatttcaactttttgcctgttaaaatatttgctataatgacctaaattatctttt

SEQ ID NO: 2043 - DNA, 255 bp, Glycine max
  Clone ID: PAT_MRT3847_10184C.1
atggatggcctcaaggttttgtctgcatgtctcaatttggtcccaaaatttagttctcaacttgcagccccattgattcatcttgtgagagcaataattgagcttagagatgatgttagtaaagaaaggtttggaccaaccagaatggataacttcttcaaggtcaagttcaagaagccaagcattttcaaagttgatttttttgggaaaagatcttcttttggttgcatcaagataaagaaggattggagagtg

SEQ ID NO: 2044 - DNA, 340 bp, Glycine max
  Clone ID: PAT_MRT3847_101850C.1
gtgagaagcatatgaaggtcacgataagtgagtcggctattgtcttcaatgaagctaaggggacatttcatgttcaggacaatccattgtatgctgcttcctttgcagctaatggcaatgttgaatatgtggtactctatcatgaatatggatacgtctaaatcctttattcacacttcttaacactttatacagagatggatgctgctgttcttcacaaattcatatatcacatccttaagaaccttgctgttgcaaaggacgacatgccagatgcattaacagcagctagtaacaccgtctgtttagatttagacgctctgaacgggttttactgtac

SEQ ID NO: 2045 - DNA, 418 bp, Glycine max
  Clone ID: PAT_MRT3847_101851C.1
aatgattcaagtttggaattttagtaattgagataaaagtaaacagatttttgttataaaaaaaaccatatatataaatgttcacctacacaacttcagttccaccgttttgtatgcgatcagtcaggtactcaatttcttttggggtgaaagagcaaggaagtttaatctgataattgagggatcttgaatgtttacaattgcactgcttcttcttcttcggggtagccttttaatttcaaagccaggcctcggtcttgatatcaatcctcggtctttttctctatttttctctacattataactttcaccagtataatttcaatgatgtttctatctcacttagctacatcaaagaaaatgacttactccatttcattcataaagaaattgttaaaactcattgtttgtagctttt

SEQ ID NO: 2046 - DNA, 388 bp, Glycine max
  Clone ID: PAT_MRT3847_101852C.1
atctttaggagtagtattacagcatgatcaatgaagtgaaaaaaataaaaatgtagacaggaattaattaaagaaatgaaggaatcaaatcaattaacctgaaacttattttccatctatagtctttttttcttgagaattattgccaagtatagggggatgaatgaccgaatgagatgcaaacgtgtttgggttacccttcaattcaacgtaacccacatttttaataaacgtgtagttacttctccgttttgtgcattggaatgcgcaatcagacatttagtatctctcaaaccacaattcaaatacgcacttagtgtccttggccaggacttggacccgaatccttaatttcgccaagggtctcactgttggtaaatttgtgctg

SEQ ID NO: 2047 - DNA, 261 bp, Glycine max
  Clone ID: PAT_MRT3847_101853C.1
cccacacgtacactattattttatagtataatacattctgtcatatatctgtgtaggaatgggggtctttctttgcaaggaaaaatatggcgtgctattgggcaatgactggactgcaaccttatgaatatggccacaacttttgtatctcaaatgaaagtgacgatgacgatgatgataacacgccgcattgatgtgctcccggacggcatataagaatttcgcaaaacatgcctaaatgaggaggatgaggagggatat

SEQ ID NO: 2048 - DNA, 338 bp, Glycine max
  Clone ID: PAT_MRT3847_101854C.1
gatgagacaacccgcgaccacagggcgccgcgggggaaaaccggaaacaaacgcccgcgctacccgaccccaagaacctaccaagggcgcccaacccccgggggcacgaccccccaagggaaagaaaaccactctccgcgctggccacagacctcgcgaagcaccgtccgccccaccctaagaccatgcgctgaacactcccctatccgacataggacttcgggccagatccaaacaagagctgccgctctcacagccccccgcggaacaacaagctcaagctggggaaaacccggattagcgctcccacctctcctaaccgggaaaggaccacgggg

SEQ ID NO: 2049 - DNA, 102 bp, Glycine max
  Clone ID: PAT_MRT3847_101855C.1
ctgaggtctacgggttcggcttccaggtgggtgcggcggagtggagcatttcgccgtacgaggggaagaacaaggtcgtgagtggggagacgatagagagtg

SEQ ID NO: 2050 - DNA, 295 bp, Glycine max
  Clone ID: PAT_MRT3847_101856C.1
atggcaaaaataaggaaatgaattggttttcacatttgggggggggacccccactttttttatcagcaaaacacattttttggttagggttaaaaaactttgaactaggggaacatattatccactaaaaaatttatgccatgttttaaaaacaaaccttaacaaaatgcattttgctagaaattcttaacaaaaccctttttaaaaaaatagtccgtggaacctaaaaataaaaaacaaaacccggggcttcttttaagggttgccctccccctggacctttttaatttttttt

SEQ ID NO: 2051 - DNA, 364 bp, Glycine max
  Clone ID: PAT_MRT3847_101857C.1
caaggaaaaaaaaaaaaggacttttttgaaaccctttacctccaatcaatatggtttcctcaagggaaattacaattggggggtttcaccataaaaactttccaaattccaactttgccgggaaaaaggggaggccaaaaaaacttttttttttaaagaacccccggggaaaaaacattggaccccccttttaaattcttgccccccgttttcccaaatccccccccttggattgccccccccccaaacccccattttttttttttccccataaacctgttttttttgaacgggataaattgctttgcccggcccggcttgggaaaatccatttgcaaaaagggggacccactttaactggggg

SEQ ID NO: 2052 - DNA, 481 bp, Glycine max
  Clone ID: PAT_MRT3847_101858C.1
gcacccgcggggggggacgcggggccccccccgaaaaaccgggccgggccccggggggggccccatttttccataggggggggcaaataagaccggggcaaaaacagggacaaagctggcccgggggaaaaagggatacccgggcacaatcccaaaaaaaataggacccgaaaaaaaaaaggcaaacccggggggccccaaaagagagcccccccccactgaatggggggggcgcccaccgccctattaggaaagggaaacccgggggccccaataaaaaaaaaaaaccccccccccccgggggagagggggtacgcataccgcgccccggggggttttttttttaccccagggagagggccaaagggggattgccctaccgcccgggcccgagagagaggcccaccaggggccccgctgggttttgccccaaaaggaaaaacatgtgggtggggggggaaaggggggaaataaaacgggg

SEQ ID NO: 2053 - DNA, 3859 bp, Glycine max
  Clone ID: PAT_MRT3847_101859C.1
tgaaactgacgaggtgtatgcacagatgacccttcaacctgtaaacaaatatgagaaagaagcaatactggcatcagacatgggtctcaaacaaaaccgtcaacccactgagttcttttgcaaaactcttacagctagtgacactagcactcatggtggattttctgtgccacgtagagcagctgagaaaatattcccacctttggattattcaatgcaacctccagctcaggagcttgttgccaaggatttgcacgacaatacatgggcatttagacatatttatcggggacaaccaaagaggcatctattgactactggatggagtgtatttgtcagcactaaaagactgtttgccggagattctgttctttttatcagagatgaaaaacagcatcttcttttaggtataaggcgtgctaatagacagcaaccagcactctcttcgtcggtgatatccagtgacagcatgcatattggcattcttgctgctgctgctcatgctgctgcaaataacagcccattcactatattttacaatccaagggctagcccctctgaatttgttgttccattagccaagtataacaaagtcacgtacacccaagtttctcttggaatgagatttagaatgatgtttgaaactgaggagtctggggtacgcagatatatggggacaatcactgggatcaatgacttggatcctgtccgatggaaaagctcacagtggcgcaatattcaggttggatgggatgaatcaacagctggtgaacgccccagtagagtttcaatctgggaaattgaaacagtgttgactccgttctacatatgaagacctcgatttttgaggaaaaagatcccccgagaatcaggggtgctagatggcgtaatgttccaggcaccaatcatgattagagtggggcagacactggcaaatcatgttgggttgagtattaagataactcccatacctcctttattcggtaaagtggaattgatgaacatgcacaataaaaaccaatcaacttctgcacatttattagttgagcactcaattaatctaattaaacctctgccgggtgaggttccaattaatagtactaatcctttatgcagcattcagattactgtcgtttttccggggagtttgaatcacgacaactgcactctactgactcaaaccacgccactttaaaagtcgcctgtgtcatgtcctcagctgcaacaattgcagcatcaactacatctgaagcggcagcaacaacaccgacagcatcagcatcagctgctagggattgaacaacagcttcaggttcattcattgttggatgtagcaatataccatctccagcagcagagggaacaacatcttcctgaacgacaaaatttggcatggatgtgtaaactggctccacagctaggacagaaggccaaggaccgagaggcaagtaatcaatgtggatcttgaaataggcggttttcctgttcctaataaatcttggagaggatttgaaaacagtgaacagcgtatggggaaattcacatataacgaggtaccgcaaatgagcttggatggggatctaggtcaagttcccgactcaaatcattcttgtaatggacaagataatggcaacgcatagatgggaaagcttgcttctaactgtggcagctacaacaacagcagacacaattgaaactatatccattgcagttgttgcagtaaaacctgcgagagatggcacaacaacaaaccccatccaattaaatgttagtgcttaatcctacagagctacaactccaactgcagttgcaacagaaattgcagcagcagcagcagcatcaacaacgactactttccacgtctaccccacttttgctgtctcagcttctacaacaacaaaatactcaccaacaaaaccagcaattaccgcagcccctgccgcctatatctcagcatcaacctcaacaactaggcaataacgcattctcaacagagaagcttctcaacagcaacaacttatcttcgtatcttatgcaatcacagaaggtttcaatgaaccatccccagaatacacagaaatcacttaccatcactagagctccctctacactaactgagggagatgccccatcatgctcaacctctccatctactaataactgccaggtgactcccccaaacctcctgaaaagaaatcagcaattaccagccacattaaggggaagtttgatagttgagcccactagtaatctgatacaggagcttcacagtaagcctgacacgcagatcaaacaggagtttctcaatgtaaaaggacctgaccagttgaagtataaagggacaattactgatcaactagaagcttcttctggaacatcttactgtcttgatcctcctggtaatgtccagcagaacttgccactttccaacttctgcatggaaggggatgtccaatcacacccaagaaatagtttaccatttgactccaatctggatggtctaacacctgatactatgctctcaaggggctatgactctcaaaaagatcttcaaaacttgctgtctaattatggtggtgctccaagagacattgaaactgagctgtcaactgctgacattagtccacagtcgtttggggtgccaaacatgccttttaagcctggatgctcaagtgatattggcatcaatgatcctggggttttgaataataataatggcttgtgggctaatcaaactccacgaatgcgaacatatactaaggttcaaaagcgtggctctgttggaagatgtattgatgttacccgttacaagggatatgatgaactccggcatgatttggctagaatgtttgggattgaagggcagctagaagatcctctaaggactgattggaaattagtatatgtggatcatgaaaatgacattcttcttgttggtgatgacccttgggatgaatttgtaagctgtgtccagagcataaagatattgtcatctgcagaagtgcagcaaatgagcttggatggggatttaggtggtaatgttccaatccccaatcaagcttacagtgggacagacagtggcaatgcatggaggggacagtatgaagataactcagctgcctcctttaataggtaatgatgtcaaatgctgacgcttaagagagatcaacttgtgcatttcaagtggtggtggagaaccaacttcttaacctaacaaaacttctggttggtgcttctcaaatggaaagtacacattcattacaaatgatgcagtttattggggattgtattagaggtggactggacccataactgcatcctagttctcttcaccacaccacttttgatggtgagaaagtttagatcctcaaatgtagcaagagcagtttcccttacactattaatgctacagatcctataacttcggaatcagcttttcttgtggttgtttgattaggatttctttttcattttttgcaagggacaacagaatagggcagctagtgtataatatgatcgttctgatataaacattaatttttacttatctcttgtaaatcttgtcatggttaaagttgtatacggaagtttggtgtctaagtgattgcccagagcctgagacaacgaagaatgcatgccaattctagctcttgtataaagtgcctacgatgtttccacggtgtccattatggatgaagaaaaactcagtttctttttaaactcttcaattttggaattaatgtgcttcaattacaattagatatttgcgcgtccaagagagacagctttgacaaatagtttcaagatgccttcaatttccacctgtaaatttcaatggaaattcttttacctttattct

SEQ ID NO: 2054 - DNA, 885 bp, Glycine max
  Clone ID: PAT_MRT3847_10185C.1
cccacgcgtccgctattctatgacccgtttatccgagagactggtccgtttgcgtgggttgtttccgaaaccgacccgttttctcgctcttgtttctctctcctatctccttcatctctgcaagttcctcgctcgcttcctactctcccaaatactacccgccatggacaacctcttctctgattacttctccgacgacttcgattcctccccctaccgtccccaccgccgcttcctccaagaccaagaccaccaccgcgaccgcgatttcgccgccctcgagcgcctctacctcctcccctacacctggtggctggaagcggaaaacgaaggtgatcgaggagacgcagtgctttatacggtgtcatgcaattccgattccgactccgagattttgcttcatctcaggaaggaagaggaaccacacaacaacaacattggggtttctgcgcgtcagtatgccttggttcccgagggactttggttgcgtgctctcaaacggcataatgattttaataatgcagtgaaagattttggaagcatcccatatgaagaggactgtttgccagatttgttccccttgcaagttaagatatttgtttcatgggaaaccagtttactggtagcaaagataagccaaaaggaaaatgtggctgccttctatgagaaagcttgtgacattttcaattctgcatataaccctgtgcatatttgggacttttccgggcagacaacccagttcttcttgaatgacaaatctaggttgccaaacgattctcctggtcaacctggaaaagaggttgttctggagttacaagttcatggacttccagattctatggggggtgatgggggctatgagatgatgctagacaggtctcacac

SEQ ID NO: 2055 - DNA, 489 bp, Glycine max
  Clone ID: PAT_MRT3847_101860C.1
cagctggtaaaaggtccaaatagaaggcttttgtcatttgtgggtatgatttctctttacttttctcacttaattgagtttgacattttcttcttcttttctttttttctttttgaactatacgcattttgttctatggaagttttttggttctgcatatcaaagttaagttacaccggaaatacataattttgcttttttttaagaaaaagaagtactttttgcaattttacaatttttaaactataaataactatttttggtccttaaatgtataaatcaatgacaatttagtttatgacaaaatgaaatttccaatttagtcctttaatgtataaatagtgtaacaatttttttctatatttaaatttatgtgattattttgtcattaaattgtaatattcaatgattaatttaatattaagttatattttttaaataagagatcaatttatcattaaattatactcaagatataattattacact

SEQ ID NO: 2056 - DNA, 564 bp, Glycine max
  Clone ID: PAT_MRT3847_101861C.1
atgatacttgatggcatacaacttgctcatgcagcagaaaagtatatgcagattctaatatgttcttttgcaacacgtgcaaaaacatactaccaaggttgctttaagagagatggtcctgggagtattcctgtggagataagtgagttagtggaaaaggaatttttattcaaggttgagtggaaagaggtaaccagttcaagatttgagctaagttttagagtgaagaaaatgtgttgggatatgtccattattgacctcttcaaggagtcttccagcaaagatgtggtggaatgtgaagatcatgtcactgttatatcatcaatttccccacagtgctctaacaaatcactacatcttttttggttggacttgatgaacaaattctctggtgttggtcttgaaatggattctcagttggatgagaatgagacacttgatttgtccaaagattctgatgatgcaactccattgaaaaatacaaatgaagttgaaggtccaaaagtaaatgctttggtgaaggatgttgtgggctttaaccgtcttgaagtgtcaaaactataa

SEQ ID NO: 2057 - DNA, 330 bp, Glycine max
  Clone ID: PAT_MRT3847_101862C.1
ctcacgcgttcgcccacgcgtccgcccactcgtccgtgataactagaatcagggtgatggagatcatagtacttggtatcttcgatgctacaattctggtagcatggcaatgccatgcatacgatatgttccctgtacgaatgaacactggctatggtgcccatactccagaggtgaaatgcgcaagttggaggcttgatgcggaatcacacaacatctgaggctttgataccattccttaaaagtgcgttaaatctacaaatgaatacatccatggcgaacaatatacatcatactccagagcaggttaccaacacccttacttttatg

SEQ ID NO: 2058 - DNA, 355 bp, Glycine max
  Clone ID: PAT_MRT3847_101863C.1
aacataccctctaacacaatatttctttaaatatattcttttaatcaattaaaatctattgaaaattatgacatctaataaaaaaaaatcattaaacatgacatgtgatttataaaattgttattttcaattaatttcaacaaatattgtatttttcaataataaatatttatagaaaaatgattaacttttataatcactattttaaaaattaaatttttatgatattacataaaataaatttaatttaatttacttattactactttctagttactaattaatgaattagattattcctaaccctgtttacctacacaggaaggagcaggccctgcctaactcctgatgcatg

SEQ ID NO: 2059 - DNA, 339 bp, Glycine max
  Clone ID: PAT_MRT3847_101864C.1
ctcacgcgtccggcagcttgtgagccaggaaaaatggaggactctaatcatttatatttaattctcaattgagtatctgaagcaaaattgctgcaactaagacaggccgacagcaggtgcagatcttataagtgtcaagccctccaaagagtgatgatgacacgggcctgagtgtgaatagggtgtacacaatgctgtattgcaccacgttttgaactgacaccgattgggacactttaggcacaccgtacttgccaacgttggaaaacggctaaggcaggctgtacagtgtttgtttggaaacaatgattcacggcacttgcaacaaaactatcatga

SEQ ID NO: 2060 - DNA, 505 bp, Glycine max
  Clone ID: PAT_MRT3847_101865C.1
ggctcgagtttggaatgaacataacggcattctcagattggattggggattttgaatggggtttccgacctgaggatgttgagtttggggtggatgagacgcatgaaaagattggtgatcatgatcatcttcactttttgggtctgagttgggcttggaatggccctgagaatttacagcctcataaggttaatgctaaggggaatgatatgtcagtttctggtgatgttttaaatggatatcaaaattttgatgtggtgtttgatgagggcattgtggtcgatggaagcacaagggggtttctgagtgttagtcatggggactatagggttcaaagcagggaagtggaggaattgcgaaactgcactgaaattgaatgtgatgctgaaggaagtgttccacatgatgctttgttttttgtgttgggttatctaggtgtcagggaccttctctctgttgaaggggtttgcagatccttgtgtgacgctgttagaggcgatccttt

SEQ ID NO: 2061 - DNA, 456 bp, Glycine max
  Clone ID: PAT_MRT3847_101866C.1
taggtctgagcatccagacccgtatgtcactcctaagaacgcttcactctatgagacccttttgttcttgatgggaggggtgctttgggcacttgtgattttgcctaagaagaatatgaggcttgataaatccttgggggcaggcctattgagtgtgtaccggtgcttcggcttcataaggatagccatggctgttggaattgtgaaattttagctagagaagcaagtctctaaaggggtccattgtggtcctcatggaacaggcttatgttaaatcatacatttcacgatcagcatgtctactttgtacattttgcgtgtagtttttcttttcttcttcttagaatagtagtagctagtcttcgcatttataaattctcgttgaaaaatgaaaaatagagtttatttatcccaaataatatatacaaatgtacatttaagaaagataaagaaagt

SEQ ID NO: 2062 - DNA, 356 bp, Glycine max
  unsure (1)..(356): unsure at all n locations
  Clone ID: PAT_MRT3847_101867C.1
aagagatggaagtttcntttattttaattgattatcatggacatggtgggaattattcatgccagggggagtcgacttaatatttttgctattgctattgggttacttatgttcttttgtgttgccttattctcaaagaaaagcactatttgcatttataatatcattggatgcttcaactcaacagcttacttactttaatcaaaattaaattaatccttttacttgttcacgtttttacacgaactcaaacaacaaggtgaacatatttttatttacatatattttaattaaaaaaaaaatttgattctcaattttttttttaaatgaaaatatttcataatattttttttttt

SEQ ID NO: 2063 - DNA, 1776 bp, Glycine max
  Clone ID: PAT_MRT3847_101868C.1
tgaatgcttaaaggaattagaaaaggcaacaaagaagaccactatgcttttatcataatctttataagcgcataaacactggcgcaaatgatttatcatcctaattaaacaaacaacttttcacacatgaccatgctacctcattcattaactatgattgcaacactaataatcatttttcttgcacaaacacttgtgggggtgagttcacttcctgaagctgataaaataaccaatttgccggggcagccacgggtcgaatttcagcaatattctggttatgtcaccgtggatgatcaaaatcaaagagctttgttttactactttgttgaggctgaagaaaacccttcttccaagccattagtcctatggttgaatggagggcccggttgttcatcgattggagttggagcttttgctgagcatggtcctttcagaccaagtgacaacaatgttcttgagataaatgataaaagttggaacaaagtggcaaatgtgctatacttggaatcaccagctggtgttggattctcttactctagcaatgaatctttttatgccttagtgacagatgaaatcacagctagggataatcttgttttcctacagcgttggttcactaaattccctgagtactcaaataacgacttcttcatttcaggggagagctatggaggtcactatgttccacaacttgcacaacttattgttcaaaccaagaccaacttcaatctcaagggaatagcaatagggaatcctcttcttgagtttaatactgatttcaactcaagatctgagtacctttggtcccacggactgatatcagattcaacatacgaagtcttaactagagtctgcaacttttcctcaattaggagacaaatgcaaaatgggaatcttagaggggtttgtggaaaagcaaataagctattggatagtgagattagcaactatgtagatgaatatgatgtcactcttgatgtttgtttgtcatcagtaaatcaacaggcttatgtgctgaatcaactgcaagagacacagaagatagatgtttgtatcggtgataaaacaactacatacttgaacactaaagaagtccaagaagctctgcatgctaatcttgttggagtcgccaaatggtcaacttgcagctcagttctgcattatgattatcagaatctagaaataccaacaattcctattctagggtcacttgttaactctggcatcagggtcctagtgtacagtggagatcaagattcagtgcttccattattaggttcgcgatctctagttaacggattagccaaggaaattggacttgatacaaccgtggcctatagagcctggtttgagggaaaacaggtggcaggatggacacaagtatatgggaacatcttatcatatgccaccataagaggagcatctcatgaagctcccttttctcaaccacagagatcactcgggctacttaaagcctttttggaaggaaagccactacctggtgttaaataaaatacgaatagatttaattaacgctaggcgttcttatttgctgcaataaatagaaatgcttccaaaatccacacagaagcttattattgctataggattacgattatcttatgattgttatgttcgtgctctacatttctatgctttgctttctttccgaacaatgtgctaaaggtgcacaggatgaagggaagtacaaggattaaaaattacaatcagccaaaaataaactaaatccagataattgtatcgtgtttgttg

SEQ ID NO: 2064 - DNA, 652 bp, Glycine max
  Clone ID: PAT_MRT3847_101869C.1
agaaaaaaaaaaaatggatgagaaaaaagatatagtatataatatatggaaatgatttgggtggcggggaattgtctttcatctggtaagactgatgacgaagttgttatcaccttcagcaccaccatgtccatgtctaagggttccaattccaaatccaaccgtaaaatatcgatatgcatacagtcacagagggcaattgcgtgttcgatgcagtgataatagtgatgaagagaaggagaaggagaagaagaagaagaaggaaaagcggttgtctcagcagtcgtcgtgggaagcccaagacgctgagggaagagactatctctaccgacttgggaaagaggctgataacatgaacatcgccgtcggccagcgtgctggcgtcatcgattctcttttcgccggcaattttctcggcaaagattcggacattgtctttgattatcgtcaaaaagtgacgaggtcctttcaataccttcagggcgattattacatcgctcctctcttcatggacaaagttgtatgtcacattgtgaagaactacctagctcgtgtcctcaacactaaagttcctttaattctaggtatttggggaggaaaagggcaagggaaatcatttcaaaccaaactttttttttcaaggctttgggaa

SEQ ID NO: 2065 - DNA, 161 bp, Glycine max
  unsure (1)..(161): unsure at all n locations
  Clone ID: PAT_MRT3847_10186C.1
ttcacaggnacgctgagcatngaacacagaaccntagaantcaanntggnttnagcaaaggatntcaaaganttgantatattntcaaagatggatgtatatgntgtgntttcantntncggcgatcaaaagaccaagantcccgtncacacaacatacga

SEQ ID NO: 2066 - DNA, 497 bp, Glycine max
  Clone ID: PAT_MRT3847_101870C.1
aattcggcaccagagttgctgattggtacaaagttcttcatgatgtttcctggaaggatgttgatgcttgccaacccatagaagatgtggagaaacagttgcaagagattgttcttgattgtgtcacagaatgccggaaggggaagcccctttccaccttgtggtcgaagtagacacgccttgatacatgagaacaaatatgtctgttgtattattttgaacaccaaaacccatttttgtgtaactctggttgctctttttttatatcttataatcacaaattaattcgtttgcgaagcaatttgaagaaagccttcgaaatttataatatgcccaagcttcaagctggaaggattgaaaattttctgatccaacaaatgtgatgcagcagctttctgtaaccctgatgaggtccagattttatgtgcccaatttcactgaagtttaactatacatcaggactgcctcaaaagtgtttaatgcttgtgaaactagta

SEQ ID NO: 2067 - DNA, 388 bp, Glycine max
  Clone ID: PAT_MRT3847_101871C.1
ttttggtgcaaatgttggcttcgataatctgctctggagacgactggctcactgagaacacactgtttactggcaggggtttggacatgtggggcggttattgcacaatggcaactcagtttaggaaatttgtaccgcgttacattaggaggcatgtgcatacctttgggatctacattctcccatattttatgactgctggaatttaatatgggcgggatttgtgtaacattgatatttacggcttattttacgactagcgatgcaggttttgggctaaacacgagaaatatcttgctttgacagacgaggagcagacggaggtgattatgaaatagaggcattgctgctgatgattttgcggagcgagctcatgaatgtgaaaaac

SEQ ID NO: 2068 - DNA, 535 bp, Glycine max
  Clone ID: PAT_MRT3847_101872C.1
tcgccttcgtatccgtgttattccaaccatggctctaattaaagacagcaagactaaagattttattgttggcttcactgatctggggaactgtgatgatttctcgactgaaatgttagaatggagattaggcactgcaggagttattaattacagtggtgacctattgaacccacctgaaaagaagaagaagcctaagaccctcctgggagcacctaaaagaagcattcgaggaagagattcggattctgacattgatgatgaggaggacctttaagagttttgttaccttgtcaggataacacattgtattaattcgagtggaagattcaattctattaaattattgaagtgtttagtattagcaggatgatatttggtctgtatgagaggcacatggcttttggtctgtgatgtcaatttggacttgctttaaaatttaatgttacagaagtgaacttgtagtttaatttccaaatacttttgacactcctgaaatttgtgccttgttatactgatgctagatcactaccta

SEQ ID NO: 2069 - DNA, 556 bp, Glycine max
  Clone ID: PAT_MRT3847_101873C.1
acaaaaccaaaaatctcttttgtaatcattctcccctccgcaaccaaagttctcttaggcttaccaaagaaagccaacaacaccactatggcgatccacgtgaccagaaccgcaggcaccacaacagcgagagctgcaaccatccaaagcaccccaaaaaccgcaccaagaagcaccgaggcataaagtgctggccaccatgaagttgttgatgactgatcagctcgcaacttgtaccacgaaatcatggacttgaggaaattccacgaagatgtgaagagcaagccataaacaagcacaaaaatgcacacccaggtttttcttttgctcatgatttgaagcagtagcacgtaagaggaaggtgatgtgtgaattggtgtagtgggttgctcctcttcttctccacttttaccatggacatgacaacaaaaacaacctcggaaaactagccagtaccaattaccgaacaaaacaccaatctgggtttggtttggtttcttttcacaagtggaaaccttttcatactaattcaatggtctgggccgtttgggtcttt

SEQ ID NO: 2070 - DNA, 1645 bp, Glycine max
  Clone ID: PAT_MRT3847_101874C.1
ctccaagtctcgggctcgcagccagcgatcacctcccccaccctacgcattcttcaatcttccccttcgcgtcttttgggtcgtgtgtcttaggacatttcacaaacacctcctctcccctccattttccatttccattcttctctccactataaattctccttctctttctttctcgtaatcttcgcctcccttcaactccaccctctctccttcttacctccttgaccatgatgagtttcgccatggattcagtttcggtgttaaaccctaaactctcccactcccattcctctctcccattcagcaggttcccccattccctcaacttccaccccttactcaaaccccgcgcagttaacgccgccgtcccccctaacggcctcgccgcctgcttcctcaccctccaccgacggaaaccgttaaccgtcgctttcacagcttctcaccaagactcggaacacagagagattgaagtggagaaggagcgtgacgtccatgcaggctctgaagaatctcaggaagcgtggaagcaggttctggagacgtttagggaacaggcagagaagtttcagggcgtttctcaagaggcttatgaggtgtattctaagaaggctgctgtcattctgacagatgccacggagcagttaaaggtgctggcagataagacaaagaacgagttgagtgtggcagcaaaggaaatcactgacgaagggaaagagtatttgtctgcagcggcggatagttcaccacaggtgagggagattgtggaaacgtttacctcaccgcctgaggatattcagaaattgtctggagtgagggacttctatgttggtgtaccttatggtttgatgctttctcttggtggcttcctttcctttatggtaactggcaacactgcagcgataaggtttggggtgattttaggtggtgtcctcctggctttaagcattttaagtctgaaatcctacaaaaaaggacgcacctctcctctcgctttgaagggccaagctgctatagcaagtatattgtttctgcgggagataagctcaataggcaaaggatcatcttatttcactgccttgatcagtggtgcagtggtggcattctatatctatagaatagtactggaacgtaatcatcaaaagagctcaaacttggaaactgaaccaggaaactagttctatgatgagtgtaaaaaattgaagatctgcatgaagatcaggtaaaatactgaagatcgagttgaagatagtcagtaaattttggtgatcattttttatcatatagtttttcacgggctgggtcatcaagactagagactcactgctaagggttatggtttcataccttgaaaaacggagctcggagaatctggaaataatttctagttgtggtttttttctggaaaattactaatatcatattatgagtaaccttaaccggttacagattctaatgtacaagaaaaaattagatatggtgtttagggctttgtcttcttcaaattgcacttataaaacattaaaataagtacctgctgcttgcatttttaaccccacaagtgagtgaaatttaaacacttaatagttacgtaagcctggaattgtgaactaataagataagattagatctccattttatt

SEQ ID NO: 2071 - DNA, 224 bp, Glycine max
  Clone ID: PAT_MRT3847_101875C.1
ggctcgaggggaagggtgccatatgtgcttctggacgttttttatcttatggtgggggtaggaggtgtcatattcctggttgccgggaaggagcctacgttcttacagtgtactgtaaggcacattgaggtggtagttgatgttaattccttgtttgcacaaatagtgcataatgacgtacagattttttgtttgcccatggtggtggttgtatatgcagtcat

SEQ ID NO: 2072 - DNA, 256 bp, Glycine max
  Clone ID: PAT_MRT3847_101876C.1
acccacacgtccaccccgctgcgacaagataacggatcggagggacaaatacatccaatgattttgacgctaaagttcttcttcacgtgtctctagcaattatggctacatgcgattttggatatattgtgacagtgtggattgcagtccgtgctgcatatgctctacatagaccaccttgctatagatagggatggacgtcttgattcagaagcatgatcctatacatttctaatacacttggtcagtctatgtt

SEQ ID NO: 2073 - DNA, 389 bp, Glycine max
  Clone ID: PAT_MRT3847_101877C.1
ttacttttgtgtgttttattttttttggggaacataccatgaatttattaccctacctaaaactgatcaaaagattttttatttgattggccaaagtattaagattaacttcaaaaaaattgacgcattgggggaacaaacaaataaactttcttaattaaatgtggggaggcgaacaagcgaaacaaattttgctcaaatggttagctgggataaacctgaataaactcaattacctgcaatcaaacagctgtttggattccacaattggccaatgttcaaccatgtgtaaacatgttctgtaaatgcggcctttgcccccataaaaagcgcctttattccattggcaataatccaaagacagtttgataaactcgtgcctagatatt

SEQ ID NO: 2074 - DNA, 336 bp, Glycine max
  Clone ID: PAT_MRT3847_101878C.1
ggctcgagttcttgggcagacagaaaccaatggcttggtagttaataaatctggcgaaactgcactagaagcaacttaataatctgagccctgcccttcctggatgctatatgcaatgctgggggacccttatgatcaaccacgtttattggtgagggatcaggtattatccactcctccaccccctttggactctgccccttcactggcatgtgacgtgctggcctgacctccttaccgtctcgcagggcggccccaggctcttttctcgatggagctaacacggcgtccgagtgaggcttttacggccaacccagcacaggtgtttgcccctta

SEQ ID NO: 2075 - DNA, 385 bp, Glycine max
  Clone ID: PAT_MRT3847_101879C.1
ggctcgagcacagtctcatcaacgatcccttatgacggaaaggcgttattcaaaatcattaggtgcactgttgggactactgggggccatcaccagaatttctcttctgggaggccctacttacaaaacacccattgtcttacgatcgctggggacagtccagctaccaactgatttggagacagcacagcacacgctggtatatgacgcatgctagacaatgaactggcaacatactctgttgcacgggcacctcatcaaatcaagcaacttcctaaagctgtagaagctcatgccatcacctatccgttgggtttacaatctatgacacatcgacagtgttacatttagagcacctgtgcaccctctgttatggatcttgacg

SEQ ID NO: 2076 - DNA, 239 bp, Glycine max
  Clone ID: PAT_MRT3847_10187C.1
ggtaatgggaggagttcaaccgcttctttttgcgctgtaccaaggattcctgaagatgaaggcaggcagttgacacaaactgcactgacactgacaaagctgctgatgacaccgagtgtggtgatctataacataatcgagtggaccacactcttaattactccaacaaccctgatcattatgaacatggaaggtgtggatgctgcaagccaagatgcactcaatgcaagatatgcgtg

SEQ ID NO: 2077 - DNA, 389 bp, Glycine max
  Clone ID: PAT_MRT3847_101880C.1
ggtgcaacatcttgagatacaatttgatcagatgatgttcctaacttgatttagaaaatagatatatatttgtcagaaagaaagatatattggccattcaatcttattttattaagttattgaccattcaatcatattttattaagttattgaccattcaatcttatctcacaatgtagtggggtggtatttcttctgaagagcttaatgaagctttgttagctgaaactgcactttttggtgaaatttccaatcacagttctcaaaatttttcatccttgcctaatctgcaacatcatccagaacaaaatgtggatcccaagacgcaatgcctgtccacttccatgtcacaattattaaatgactctcgcttgctgaaacaacaacag

SEQ ID NO: 2078 - DNA, 168 bp, Glycine max
  Clone ID: PAT_MRT3847_101881C.1
gccacgtttataatatagacgagaagggagcacgtgtatatatgccggcgggagaggaggtcgtcgtacctattagggttaaggagatgtatactggcatacctgagaatcgactctctgtcacaattatagagtgtattatagcgaatggaaggacaataccccctg

SEQ ID NO: 2079 - DNA, 355 bp, Glycine max
  Clone ID: PAT_MRT3847_101882C.1
gaaaagcagactcaccacgtggggccttttgaaattcatagaatataagggcgaatttccaatacccattactatataaaatttgcccccgaaaaccatcatgggaataaggaaaagcataaattcccctggggggggggttcttaggcgggaacccctaatcagccttcacgggggcgggttttttacttgataaaatgagaaggcagctatttatgaaaaatatggtcgcgaaacagacaggagatcatagtagaacacctaaggggggtcaggcaattacgattatcttcaagggcttggaggaacctacagaatagataatggggtctctaaaaaccatcataaatgccct

SEQ ID NO: 2080 - DNA, 236 bp, Glycine max
  Clone ID: PAT_MRT3847_101883C.1
cggcttgtaaaggcaagaccctatcagccactgccgctaaagaaagcgagctcatagtctacgcgtagctcagacatcgaattccccgacgagctagtatcgaactgttcactcaaggggcagctagtacgccgactgcgtctgcggcagggccacagtataagtcgctcggcgtactcgaatatcgcgctgctgaagttctggaactggctggaaacgctgcgagagttgccatc

SEQ ID NO: 2081 - DNA, 391 bp, Glycine max
  Clone ID: PAT_MRT3847_101884C.1
gggggcccaaaatcaagtctcgacttttgcttaaaaaacccgggtaaaaaattaaaaaattacctttcaggaaaagtttaatctcccccgtgttttaggggggccccaaacattttaaacctcccgggggggcccttggtttttaattttaaggggggggcccccaaaaaacccgttttcaaaaatcatttttaaaaatttcccgggaaagattctggaagggcccttggccaaatatattttccaatccttgccatacttggatctgaaacaatcattttttttttttgctcgaccaaaaaaaagggggggaaaaaatttcccctaaaaataaggcaaaaaattttcaaaaaaagccgggcctgcccaaaaaaaagctccccttttttta

SEQ ID NO: 2082 - DNA, 429 bp, Glycine max
  Clone ID: PAT_MRT3847_101885C.1
ctaaactgtaacataacagagcttgagccttgaaccttgttctcttgagccacgagccaccctcagactcagtcaccaacaccgaccaacgcaacaatggcatcggcgttcgtcaagctcgacgattcccccatgttccagagacagttatattctcttgaagaaacaactgatgagttaacggatcggtgccaaaaactatataaagggtgcaagaagtttatgacagctttgggggaagcatataatggagaaatttcctttgctgattcattagaagtatttggtggtggccaagatgaccctgtcagtgtatcaattggagggcccgtgatatctaagtttatcaccacactgcgtgagctagcttcttttaaagagcttcttcgttcacaggtagagcatgtgttgattgaccggctgacagag

SEQ ID NO: 2083 - DNA, 483 bp, Glycine max
  Clone ID: PAT_MRT3847_101886C.1
aaaaaaaaaaagggggggggggccttttttgggggggggccccaaacccaaatttgggtttttgcccccctttcccccgttttgggccccccccccccccccttttggaaagccttaatcagattaaacccaaatgggcccccgccccccccatacccggtttttttccccccccaaaagggaaaaataaaaccttgggggggggggcctccccctaaattttttttttgaccccaagcaattttaatttgggcccccttttcaggggaatgggaagggggaaaaacattttattcccccactgaattcccgaattttgggccttggccccggtttccaaaacctttttccaaaaaaaaaaaaaaatttcccaattccgggggcccccttaaaaaaaaaaaaggccatgggggcccccgcctttttgctcccccctctttgaaatttttggggcccccccgaacctttttttctgggcaaatt

SEQ ID NO: 2084 - DNA, 684 bp, Glycine max
  Clone ID: PAT_MRT3847_101887C.1
gaaaagtccgcccacgcgtccggggagaaagttaatatttctcctttcaaatccttcgtaacaatacaaggagaaggtgcagataagaccattgttcaatggggtgacactgctcaaagccagccattaggaacctatggttctgcaacttttgctgtgaattcaccttatttcatagccaagaacatcacattcaaaaacactgccccaattccagcaccaggagcagttggaaagcagggagtggcattgagaatttcagcagacacagcagtattcctaggctgcaaattcttaggagcacaggacacactctatgatcatattggtaggcattactataaggattgctacattgaaggctctgttgatttcatatttggcaacgctctctctctctttgagggatgtcacgtgcatgccatagcacaacttacaggggccttaacagcgcaaggaaggaacagtttattagaagacacgggtttctcgtttgttcactgtaaggtcacgggctcaggggcactttaccttggaagggcttggggtcccttttctcgcgttgtctttgcttacacttacatggacaacatcatcattcccaaaggctggtataactggggcgaccctaaccgtgaaatgactgtattctatggacagtacaaatgcacaggaccaggagca

SEQ ID NO: 2085 - DNA, 431 bp, Glycine max
  Clone ID: PAT_MRT3847_101888C.1
aagtactgtgcaaacatatactgtacaaatcaaaataaaacattacgcatactatacaaggtttcagatccatgagggcagttgacatatgtccttacggagtgtattcttacttccccatcaggctctgataccaaagatcagcggaaaagagggatcaaatggactaataggaagtaagaatgcagggtgataaatgtatgctatgcaaaggtttataaaacaattatcaagggcacaccgaagatcggcttacaaatcccaggttttcgcaaaatataaacctaagcggaggcagagccgtacaggatcggtaagagagagagagggagatggataagaaaattgaaatttattgaaattcaaagaagcgcttacaaaagtttttctttcacagagcacctcttcctgaaacctcaaagtgtctaaaa

SEQ ID NO: 2086 - DNA, 188 bp, Glycine max
  Clone ID: PAT_MRT3847_101889C.1
gggttttaaagtaactaggagacatagctgtgccatgaataaatgataagaaggaagattccggagtccttcacactcatgtggtaggctttatcaaatggcacatccatttaaaaagggaatattgactaaaaatatctaccaaaatggaatatttcgccaaaaaaagctatcacatgagatacatc

SEQ ID NO: 2087 - DNA, 543 bp, Glycine max
  Clone ID: PAT_MRT3847_10188C.1
ctttttttttttggggttttttttttttttttttttttttttttttttttttttttttttttttttttttttttttttttttttttttttttttaccaaaaaagggggcaaaattttaaaaaaaaaaaaagggggcttttttccagctagggaaaaagggggggggggggataaaaaatatgggttccattaaattttttatttaagggcaaaggggtaattatttttcaaaggggtgggggtgggaaattgggaagaactcggagaaaaaaaagggttaatcggaacaaaatggtcttaaataactcccattttcctgggaaaaagaccgggttaaaaaaaacctttaacgggataaaccatggaaaatttccctgggtaaaaaggaagggccttccctatgggaccggggaaacaaggggggaaattatctcctttaataaccggggggagggggaaaaaacccgggggaaaaaaaggggcgggggatcttaattagggcttcccttccaaaatttttaaggaggggagaggttttccggg

SEQ ID NO: 2088 - DNA, 290 bp, Glycine max
  Clone ID: PAT_MRT3847_101890C.1
gcatattacacaagcgaataacatgtgaacattagttccaacaacaacctgtgcaacgtacaatcttgatttaggttatatgaaccattacaattaacttttttttaacccatgatgccccattgcatatatatgatagctgtgcgtgagttatttaaaaggataacttatatgctgttgccaaacacatacatcacaataaatacaacgcggctttatgaaattaaataccaaaaagcagtttctatttaaaggaatacattaactgtgctccctacgacaaaaatttt

SEQ ID NO: 2089 - DNA, 290 bp, Glycine max
  unsure (1)..(290): unsure at all n locations
  Clone ID: PAT_MRT3847_101891C.1
agaacaaaaacaagtaattttttattgtgcttaaccagaataaaaaacaagcttttcattgggttaaacctgctttagaacgagactcctatttttaccaacaagcctgcacaggggttacctcgtacnagctcctaagatggccgagcaattgtttctagagtttttcacattttacgcagaaaatacaaggctgtttatcaacaatccatccttaggagctgaggttgttttccagggcccatctttaggggctgaaatcgattcctaggggctagttttaattttac

SEQ ID NO: 2090 - DNA, 332 bp, Glycine max
  Clone ID: PAT_MRT3847_101892C.1
cgcttcttctccaatcccggcccccacgtcttccgcgacgccgtctaacagtctccctcgtcggcccccacgtagcggagttcctcatctcccaaaccccccaatcacgcaacctcttcgccaaatccatatccgcatgcacgaaaccgcagctcatgaggctgctcaaacccgccgtcgaatgcggaagcaccgacgctgtcgcggatttactcaacgctggcgcagacgcgaccgcaaccacggaatctctcatgccgctcgcaattagggttgggaacctccacgcggtgaatgctctggagcctcatgttgcaaatcgacggatcgtc

SEQ ID NO: 2091 - DNA, 298 bp, Glycine max
  unsure (1)..(298): unsure at all n locations
  Clone ID: PAT_MRT3847_101893C.1
tttttttttnnggcttagaacccattttctaaattctaacatgggggtgctttattaaaatgcatttatacaaacctgccgtataaatccaatgaatccactaaccgaactggactaaccagttttttttttataaattcaactttttttacaaaatttaaaaaaattttctttacccaaaaaatatttaaacttgaggtttagttcagttttttgtaaccatttttaaacatgaatatggttacaaaaaacccatcaataccaacccctaataaatgtagattttcctgcctctcct

SEQ ID NO: 2092 - DNA, 347 bp, Glycine max
  Clone ID: PAT_MRT3847_101894C.1
agatcgagatcagagtgcaatggtagtcaaattgccatgcagtagctatatacaccatacttagcaacacttcgcatattgatgaccttgaagattgtaaaaattgttcaaggttgatacccttttcttcaaccacaacttttgtggctacctttgaagaaactccaggaatacaaatgttactatttcatgcaatttgaagtgaccatgaaattattttacagtctttcattggatgtttttctgtgcttgttcctgtttatgggcatatagtatgaattaaaatatgagaatgccatcttcaggttcaaccaaagtttatttgacaagctgtcattctttatatc

SEQ ID NO: 2093 - DNA, 255 bp, Glycine max
  Clone ID: PAT_MRT3847_101895C.1
tgagatttggactacagtaataaatttccaattttttaaaaaggcaagatgtacacacttgaggagaaacaccttgacagttgacaccctccttcctcaccagtcacagtttgttgttgtcgtctccttccgcaaccgtgttgggtgcgccaaccaccgcatccaccaccatgccggtctccaaccaccagctctacgctcctctccgtccaaacccatcttcttcttcctcctccttctcttcccattctttta

SEQ ID NO: 2094 - DNA, 121 bp, Glycine max
  Clone ID: PAT_MRT3847_101896C.1
ggggttgtgttgtaatatcttggcactcacttttgtcccatggtcggggaaaatgaataaccaatgatttatgtttatggcgggaccacttcgtgagatttcagggccgtggaaagagtaa

SEQ ID NO: 2095 - DNA, 369 bp, Glycine max
  Clone ID: PAT_MRT3847_101897C.1
cccacgcgttctctcacgcgttcgcggacgcgtgggtagcattattgatgctgtgcatgtggaggtatgagatcgccttggtgcatgatatagttccttgacccgtgccaagccacacggtggctccgaggacacttgggacatgaaggactgtttttagttcgggcgatataaacgccgcggtttactattatggcgggggtgcctacggtaacggcggcagcggaagtggaggtggaggacaatgaggagggcgattgaaaagggcgtggatggatcagactgttgaaccaggaaaatcgtcatggttacggtttttaaaattgctgtgcctttatgatgtactactcggagtggagtggaataaag

SEQ ID NO: 2096 - DNA, 655 bp, Glycine max
  Clone ID: PAT_MRT3847_101898C.1
ttttgctgcagggtgctctgaatgagccaacactatgttgaccattaacactctttatccaacacgttgttgttcattgccttttcgattaaagaagacactgtagggttttgaactcgaaaattgtgagacagcacaaggtgactggccttgaaaatcactgtatagaacatggctccatcagatgtttgtccaaccgaggatgcagttcaggcattcatagagcacttggttgacccgttgctgccaacaaaagcaactgtccagggtaatccgacaccatctcaacagaagttagttgcaaaacaggtgcgttcagctgtcttactgtacaactactaccataggaaacagcatcctgagctagcatatctgccatttaatgaattttgcaagttggctgtggttttgaggccacctttattagcatatatgcaattcatgcaaaatttaaaggaagaagagcttaccgatgtagagaaacagctatcattcacagaaaaaatgataatggaagcatgtgatgtatggaaatgtttggatgcatcaaaggatgttcctaatatagagggatggcccattacaaaagtttctatccttttaattgaccagaaagaagggaaaactgcttttttgctgtttaagttccatttac

SEQ ID NO: 2097 - DNA, 409 bp, Glycine max
  Clone ID: PAT_MRT3847_101899C.1
gtctctcttatcaggcagattaccaaatgctgcgaaaaaagagactgcacatgggtaaatgtggctgaacacaccgtgaatctggggggtgatacgacaaggtgatgctagatgagaagattcaggaatctaggtgggtgaacaatgacacaagaggaggccattgcagataccatatctgaggtgcatcctggaacaactctgatgatcgatggggggacatataacgatcctgtggtacatgatggcgtcagtgagtaccatcccaggagagatctgtgactggagttcacgttacacccatcctacactatgtctgcatatgggcttgctcctggtattgcaacttattctctttcgagcacgatttctaagaggtttttgcagtaaactgtttgctgttagatga

SEQ ID NO: 2098 - DNA, 1272 bp, Glycine max
  unsure (1)..(1272): unsure at all n locations
  Clone ID: PAT_MRT3847_10189C.1
tgttcagagacagacactgccaactatatcatcgacagatggtatagaaaccaagggaatagttggtggtaacatggcttccaaaagaaaaagaaaggcatggtcagaagaagaggacatgcagctacgagctgctgttcaaagatggggtgaagggaattgggcaaccatggcaaaaggagacgactttcctattaagagaagtgctacacagttggctcagaggtggagcattttacgaaagaaagatggttgtacaaatacaggaaccataaccagcacacagtatactactgctgaacagctggcaactcgacactctttatctttagcccttgatatgccattcaaaaagttaactgctcctggaatgactgatgaacaaacatgttacccctttggctgataaaggtgctcaagtaaaaaatgccgtggatactactgagcctgctgttagctctttgacaaagccatctatttctaccaatttgccttctgacccaaagaacaaacacgctacccctttggctgataaagttccattgaagcaagatgttaatcccacaaaagagttacaagtttctaatccgagcaccacaccaaaagagaagttacaagaaaatgagcctcctaaagttaccactggaagccaggttgatagcaacccagagaagggaagattagaaaaaggtcaagagacgagcatacctcttgttaaaattagttgtggtgaggaagtttcaaaagataaagcaaatcaagtagtagtgtgtgaagagcaaggaagtgttaagaaggctactgagaataacaacattgacaaggggagtcaaaatttagatcatgacaagaagatagattctattaatcaaagttcaaatgatcaaaacgcgaatgataaacatgtaaatttgccagtacaagatgaactcagcctaagtgccaaggtagtaaaaagtgatggggaatgttgagtgattagtttgtgaagatgagtagattattttattgaattctaacttaaagtttggatgaaattttacgttattttaggaatttgtagcacattaatgtgttgtaatattttcttaaattcttctttagtggtaaatatattttgatgacttgcaaatttctataaatatatggatcaattgcgttatctctttgttcctnttnttgggtgattttggaattntttctattttatgtttgagttatctttattagtcaatttccaggatttgccacacttgtccattgattttgtcc

SEQ ID NO: 2099 - DNA, 390 bp, Glycine max
  Clone ID: PAT_MRT3847_1018C.1
gcaaaatgtaatttccttttcacttatgagatcaattattctattgagaaaggtaccaatacatgaagtgaacattctccacgtgctttatattcttgaaatgcaataaatgtagcaccttaaaacattgtttttggcaaattataattcccaatatactaattaccatacagagtgtacgaggtgaataacccaataaaccaccattacccattatccgtgattatagcaattttcttcttcttttgcttcttgtgtatatttctgctttgcccgccaaatttcctatctgaatttttcaaccgagttaacttaattgaggattggacccaaatgaccaagtcaaatttattagcaaaaaacaaaatttctaagttaagacgtgtaact

SEQ ID NO: 2100 - DNA, 160 bp, Glycine max
  Clone ID: PAT_MRT3847_101900C.1
gttgatggcgaggcgctgcagcggctcgaccgcgagtcctatttctggatgctgcgcgcgcagtggcgccaggcccgcggcgagctgctcgcggcggtggcggacatgcgccgcgcgctcgacgccgcgcccgaccatgtcggcacccgcaccgccttcc

SEQ ID NO: 2101 - DNA, 241 bp, Glycine max
  Clone ID: PAT_MRT3847_101901C.1
tcgtatttcacttcctcacacaatccacaccaataacaaaaccctccccaaaactaaaaacgtcgaaatcaaaattcacattactacaaaatttgtctgttattctttctctccaccaccatggctactaccatagcagagcaagaagcctcatcacgtgccccgcactgctcgactacgccaccactacatccgacgacgacacggaataggaggaggaggagctggtacacgagcaaaa

SEQ ID NO: 2102 - DNA, 839 bp, Glycine max
  Clone ID: PAT_MRT3847_101902C.1
gtatttatgaacctgagatctaggcagaattgctacatatgaaaatgagcacaatttgtaaagaaatagtccacttgtttctactagaagaaatgggaaacatgcccaatatcattcaattgaatagttgacccagctgcaccaccaaaggaatattgtgcaggactgtgaccttttgtgcctaaacggtgtgtttgcagcattactcttttaacaaagttggtccgaaaggaatattaatttgaaatgctaagagattcatgttgcagataatgcccacagttgttgatgccctttgggcttcatactgattttagatgggggtgctggttttttgtggtttttcatacccctgggaaatggttgaaagtatgaccacgatgccaaagacctgtgcttatttgacatgtagacagaacaaaatggaagtaaccatctgaattcgagctcttctcttttttttttttttttttttttttttttataaatgaacgaaattgaccatgatcgtataatgaatatgaacgaaattgatcatgatcgtataatgaatatgaatgcataataataatcgaaatcaaaagaatgtaataaataatgatcaggttctaaatcatataaaagttggctctgataccaaatgttgggaaaactatgccaataatatatattttataaaaatttagaacgccgataaaatacttgttgaagtcatcatcaaaaagatgagaatggtctatgcatactacaacctgtagaaacccaaaagccaagccttcgcttgcgtgatcacactctccttatactagagtttcaatgggacaaaccctatagagcaa

SEQ ID NO: 2103 - DNA, 642 bp, Glycine max
  Clone ID: PAT_MRT3847_101903C.1
ccacgcgtccgcccccttgtagctccgccgccgctcctccgccgcgggcaaagcctccgacgccctccccctccctctccacgtcaccaacgccttcttcttcacccttttcttctccctcgcctactacctcctccagcggtggcgcgacaagatccgctcctcctcccctctccacctcctctccctctccgacagcggcgccatcttcgttttttttgcctccgtcatctacctccttggcttcttcggcatccacttcgttcagtccttcgctgcacgtcccgccgacgaagaaccatcccaatgcgcctccattgacagagccgacgaggatatcgccaactccatcatagaaggagacgcacagccttctcccttgtgcagggtcgacaatgatatgaagggaaagaaagtcatacagcgtgctttcgaatgtaccaaaccaattcttaccgaactgatttcgtccattgacagagtggacagtgataatatcattgccgacccctggattaacggaaaagaagccgagcaaccttgtttgcaatgtgcgaaaccaattctgaccgacctgggttgggggcgccgatgatgtggtggtttgggggcctctggggtggacgggagccggggggtggg

SEQ ID NO: 2104 - DNA, 401 bp, Glycine max
  Clone ID: PAT_MRT3847_101904C.1
tacggctgcgagaagacgacagaaggggatgctgaaggacatttgtctactagccctaatcagttagatggtgacaaaagagctaccaatcataaatcagtgaatttggagggaagcctgttggttcagcacctgcaaaaaaagaagagagtccaggctttcaatgaagctcaagaagctctgatcaaagttctatatgagcaattcaaggatcacagaagatgcagttacatgatagccaatgcactggatgaggatggtaaaatcactgctgctcaagtctctcgaaaacttaagcaacttggtttatctcttcctcagaagagttctggaggcaaaatgcacccaaaggatgcagatctcatggatctttcaaatgataggattaatgaatctgatga

SEQ ID NO: 2105 - DNA, 736 bp, Glycine max
  unsure (1)..(736): unsure at all n locations
  Clone ID: PAT_MRT3847_101905C.1
ggagaaaaaatgtttcatttcttgtgcacaaatatcatgtcagcaaccatgtttcaacaattagttcccaaaaaataactaaaaagaataagcttcatcatgcaatgaataaagctcagccataaattaattggctctgcaaacatgttctatagaaggaaaaaaagaaaacgtaatcagatacaacattctaaggtccagagttttgatatgcgaacaatgtttgattgttcatgtgtgtgtgtgtatactgtaagggaaaatgtaccgctaggatgaaagtcttccagccagaattccaccaaatatgatagctccaaaccacttatttgaaacaaatttcctattgcagtcagcgcgtgaagaaaggtcgactgtccatatttgccagcccaagtgtccagacgcaactgctagagatgcataatatggcgaaactatttcagcatgatatccaggcccggctcatcttcctcatcatgcaatgaaggagggggaatagatttaatacgctggatgatatcctgaggggccgctaggatgaaagtcttccagccagaattccaccaaatatgatagctccaaaccacttatttgaaacaaatttcaaagtacagtcagcgcgtgacgaaaaggcgcctgtccagctcggcctgcccaggtgtccggtcgcagctgccaatgttccgtaagctaattgctacttcagcatnnnatccactaacagcangnnnac

SEQ ID NO: 2106 - DNA, 387 bp, Glycine max
  Clone ID: PAT_MRT3847_101906C.1
gcctaccaaggtatcctcttcaattttaggcatgcaaactcttgcactcagggaggatccaactcttgtaaacagtgaaaacgttgctctgaaatcccctattatgtccattgtgccaagggctactagacatgctgcagttcatgaaaatggttttgtgaccgcaagatctcgtggcagatctgtgatatataatatggctcgaacaccgtatgccagaatttattccacatccactctcaaaggtggggggcgtgctgttgaaggtgagccatcgtcttcaagtcagtttgcattggatcatgatgtgcattctggatctaaactagggtctgtaaaacatagaagttcaatattggataatgatataggatctgttggtcctgt

SEQ ID NO: 2107 - DNA, 378 bp, Glycine max
  Clone ID: PAT_MRT3847_101907C.1
ggggggcccaaaaaacccggaaatggggaaaagacccaaacccaaattggggtctttccccaaaaaggccccggatcccccccgggaaacaaaggaaaacactaaaccctttaccccccccgttacaaagaaccatttttcccgggaaaagggccccagggaccaaaaaaaccccgtttctggccaaaatggttgggaacaaccctaacccccgaaatttcccccaaaaaccccccccccggccccctttaaaagggcccccctaaaaaaccaaattttaaaaagctcccccccccaacgggggccaaaaaaaaaccccgaaagcccccccttaaaacccaaaaacgtaatttttaaaccccaaatggggtccaaaag

SEQ ID NO: 2108 - DNA, 646 bp, Glycine max
  Clone ID: PAT_MRT3847_101908C.1
cccacgcgtccgcattactgtgtctttcttcttacatacctcgctcatcactcattgctcatctcgcagattcaaattcgcctcagtctctaactctcgctctcagtttcagcacagttttttcgaaaatcattttctctttctcttcatttctctctgtctgatatgaacaacaaaactcgttctcagatctcaaacggtggtagttagaagagcaaggtgagaggttcacgttcctttgtttttcatctaaattttcggaaatggaggaggcgatagatgctactgcaactttggattatgcttcaattcagatttttcctaacctaaaaaggtatgaggcatttgtctgtaaggggaaacaatccgacaaagtagcagctggacatttggaacatttgttgcctcatttacctgcaataaatgatttacatgctgaaggatttgatacaaactttgatcttaaattaccagaaaatctgcatggtgctgaatggttttccaaagcaactgttcagaggttccttcattttgctaagtcaccagatttgatacatgccatcagtagtatcctagatgagatgtctcagttggaggattcagaggaatttctagttcacttgtatggggagggcaatcaagatca

SEQ ID NO: 2109 - DNA, 224 bp, Glycine max
  Clone ID: PAT_MRT3847_101909C.1
gctgggaagaggcggggtacaacgcaataaatcacggcaaaataaagtaccacttcgaatagccacacgagcgccctcccacacaaacgacgcaaaggggttcccacccaagagccaaagacaacccacacagcgaaaaaagaggttttaaacccccctcccaggaggggggggaaggccaccgaaaaaacacaaaaaaaaaaaaacccccccagggggggggc

SEQ ID NO: 2110 - DNA, 1390 bp, Glycine max
  Clone ID: PAT_MRT3847_10190C.1
ggaaattttgcttaggactctttcctaatgatgatgaatttgggatgtcttccctgtggtcattgccttctggaagtcaggctggtcctggattccagttatttggttctgatgcggatgtgtctgatgcgttggtccatctgcagcatggtcctatgaattgctcctcgtcactaaatggttatgcattggctcccaatactgctttgggatctggtagtatcttgcaagagtcctctgctggtcggtcagatgctgatttgaatggtggtttggtggacaatcctttggcctttggtggagatgatccctcacttcagatttttctccccacaagaccagcagattcatccatgcacaatgaattgagagatcaagcaagtgtggctaatggtgtctgcactgaggaggattggatatccctcagtcttggaggtgggactggtggtaacaatggtgatgcttccactcaaaatgggttgaattctagacatcaaatcccaaccagagaaggtgccacgaatactttggatgatactgtacatccctaagcttcatatcaagtttatttgagaggggctatgaaggaggattggaagctgggtattcagtttctttgcatcgagcactgctataccttctgttaaatgcttctttactccttgggatgaatgatgttagatctgacagggcaagaaggcaaagatcagatagccctttctcctttcctcgccaaaaacgttcagtaaggccccgcttgtacctttccattgattcagattcagagtaaaggtcataccttgtgtctcaagaattttaggtactcttaacaccagatttcgaatttagaaaaattgaagaaagttgagaggcatttttggtcctcatgaaatggcaattaatacataatgataatgggtctgaggcatttctggtggaacagagctacaaattaccctgtgccaaaatgcttgcacccacccccattggcaaagatgttgtggccgtaatgattctttatgcttgatatctaaattgtccttgtggcagatgttgatagatggactttatcagccaaaaactctccattatatctgctaagagctattattcccgtcaattttttatgagggtgtatgccggggttatagtgctggtttattgtatagttaatcattcaaatctggtagttcaaactttcaaaaaagttgggtggaacattatatctgcatttttgtctctgctaagagcaataacctgtaaatgtttagccatatcagatccaacagtgaaatcaaagatattgtttctggtcatttttctagaatactctgttgtgtcagtatcatgcctcatgattggccaagaatggtaaacgcctatttcatga

SEQ ID NO: 2111 - DNA, 344 bp, Glycine max
  Clone ID: PAT_MRT3847_101910C.1
tcttctgcaacgcttacaaaaaacaaatagcaagatgtatgtccactatttttgttaatgtggccactattctccctccattatgttggcatcatttgggtgtggagcatgcttctatagtccaaccatagctgttacagtaagcaataactggtttgaaagttatactctacctgactcgggctgtttaaggatctaataccattgaaacagaccatactatctatagtgcaggccaagtttgcgtctacagaaagtccaataacgaaacgtatgacatgaagtgatcactgcaattttaacataaaggatggctgaccaccttattttacacataatcttac

SEQ ID NO: 2112 - DNA, 235 bp, Glycine max
  unsure (1)..(235): unsure at all n locations
  Clone ID: PAT_MRT3847_101911C.1
aaacaggagtgacatccacctctcagcagaggaagaagccaccatagaagcaaagaccagagagtactttgatggagtcgcaccanaacgccananaaagcntcaacgaagtgaactattgagctcaatatgtcgagccntnctccaatgnncananantcttctttaactatacnagaattaacanaattcnaanncctnnagaatgntccncaagagaggaaattggtgtaca

SEQ ID NO: 2113 - DNA, 303 bp, Glycine max
  Clone ID: PAT_MRT3847_101912C.1
cttttatccatttatacctgctgaagctgggtgcggtttcaatgcagactactaagaagcaccctaattgagacagtgtccatttatacctgcagtgtgaacaagacctctatccttacactcattacccaatatatgaacacaatcaataccactatattcacatcaaacaatgaaccactctttcttttaaaaccaacaaggagcaacactttacccttgtatcatacgcacaaaataataatgcatatccgtagtgatcatccttcctacactagagtgttatccgagaaggaattcttt

SEQ ID NO: 2114 - DNA, 418 bp, Glycine max
  unsure (1)..(418): unsure at all n locations
  Clone ID: PAT_MRT3847_101913C.1
ataacaattaacaggcaaataatatatctgctatacaaatacacggacaagacaaattaatcgatacacaagcaactgcaatacttaagattagagtttatttacgtattttaagtttaaccagttcccgtgaaggggtaagaatgcacttaaaccaaatatatgcatttccacaggatgtagacattgtagccaaatttcgaggaaacagtaatctacatataccatacttcataagaaagaactcaagctggtccatcccatctccctctctgatgagaatcatgaaactggccaaatacaggctaaaggtccaagtggagaaggacgaaggcctaagtggagaaggacaaagcccccaagtggagaaggataaaggcccaagtggagaaggacgaanacccaagtggagaaggac

SEQ ID NO: 2115 - DNA, 468 bp, Glycine max
  Clone ID: PAT_MRT3847_101914C.1
ggcaaaatacaagtcttcaagaaacagatctgaataaaagaaacaaaacttgaaccaccgtgaaattcacaatgcaaatcccatgctcgtggaaccaccacaacatggtcaaagccgttcatctcccaaccacagcctgtgaaatccacggcacaaacatggtctgttccattattcagatccacagaggtttatcttctaactctgtggacaccttcaacaacgtcatcgaagctgttatgacgaagatggaggcacaactcgatcccctcctcgaccgctttcatgcgccgccgacgttcatcatctacatgtttctcttctgggccgttgccatacgcaaacagaggggtattccgatgagcgcactctggatgtggatgacaaacacatcagaaaaagatcttaggtgagagagaagatgagggtggggttgggggtttgaactgcgagagagaagagagaatc

SEQ ID NO: 2116 - DNA, 768 bp, Glycine max
  Clone ID: PAT_MRT3847_101915C.1
tatcagttcttcaccctctggggttgctttttggatgtggattgtaaggaaaccaccgaatgcgatcgccttgactccttgttcaacaaagtttccgcagttcgtcgtttagaagaccctctctccagaagagtaaaaatctcactggcactcgtcacaatctcttcctccaagcctcttactagaactccacctttaccatcctccatgagaggcagctgcttcttctgcttctcctccaaagaagcctttaaataatattacatctttccatttatcagcacaaaacacaagcttctataagatattacttaaagcatatatctcctgaaggacaatcataggaagcacacctgtagtcaatcagggagtccaaaagtacaaggagaaaatttttaatattgaactccttagataattctaataaaacccccgccacatccctatatgaaaaggaatttaatatatcataaatataaataaagaaaagacaaacttagttcctccggggcaagcaaatcagtgatttcttcattatacaattccaaaaaggtgaccttcacactgtactcagcattctggctctcaagtgtgtcaaaaatctgcttgacagccctaggaataactccagctcctggaggcaactctccattgggaccactcttggcctttttgcattccccttccattgtgtaggtttttcccgtaccagtttgaccatacgcgaatatagtgcaattaaatccctctagaacttccggacgcggg

SEQ ID NO: 2117 - DNA, 343 bp, Glycine max
  unsure (1)..(343): unsure at all n locations
  Clone ID: PAT_MRT3847_101917C.1
gcgaccggccggaattcgggcgacccacgcatagaaaatgaaaaccaagaccgcngcggacaattgacctatggagcgaaaccgcggnccgcagaagaaaaaaaaaagcgaggccaacaagaagaaaagggacaaggccagacgccaagcnggaaacaacccaaacaccaaggaaaggaccggcccggccaacaggacaccgagcaagggcaacgaaacacagaggagcgaacaagccagcccagacggcccgaccacccaaccaagaaagagcaagaaggcagaaacgaaaaacagccccggcgggggcgacgaaaaaaagaagcgggaaaagacacacccg

SEQ ID NO: 2118 - DNA, 429 bp, Glycine max
  Clone ID: PAT_MRT3847_101918C.1
aacaaaaaaaactgggacacagggataagacctttggggtttacttacaatgggggaaaaaaaaaggataaaacctaacaggcgaacataaaatgaaaagcatcccgaaaagataacgaaaaggaaatcttattgaaaatacaggggattacccccacgggaagctacccccaccgggaaaggggggaccataccccaaatttatttaacaggggggccaagacgggcaaatataagctaaggaaaaataaacgcttttgagccccacaattttactattttagctggcagggtggatttcattatcgggcacaggggaaaacatacaaaaatttgcaaccccctttaaacatcttttttctttttaaggaatataaaaaaattttaaggagaggggtttttggggataaaacaaagaagggggggggg

SEQ ID NO: 2119 - DNA, 394 bp, Glycine max
  unsure (1)..(394): unsure at all n locations
  Clone ID: PAT_MRT3847_101919C.1
cactaccccgaagtactctaaggctaccgataatcaaattctggaccaactggcttcctacttcaacaangttgcttacaacccaaacgagattccatgtgtcccgatcgctnattgggaaggtaacaacatgattcatacgtgcaccaaccttgactgatacaagggaccagctctccttgaggctcttcaccaaagcaatgaggccaaaaagccctcagacgatccactcagacttgcatgacaggatctctacaaaattagtgntattggtaccgcaccantgggacgtcttgatactgggatcataaaccccnctgtggtctgcacgttatgggccactcaacgtacaactcacgggnaatctcatcaaaatcaccatgggtctctcacg

SEQ ID NO: 2120 - DNA, 196 bp, Glycine max
  Clone ID: PAT_MRT3847_10191C.1
aaaatacaatcagggataaaatataaacttccctcaaatacacactaaataacacgattttgacaaggtaggatgtgaaatgacatggaaaatggaggggagaagtctgttactaccagattaacataacagacaggacaggaggcatcaggagagtggggaaggtgttgtaatcattgagaatatgagaggaatg

SEQ ID NO: 2121 - DNA, 471 bp, Glycine max
  Clone ID: PAT_MRT3847_101920C.1
attataaattttttgaatgatgccaaaaaaaaaagaacaaaagaaaacaaatatggaatgaaaaagttaaaaatactacatttaaagtatataaaggagaaaacagacaaaaaaagactgaaatatagcaaaatgacaagaggcaagatggaaactaaaacgatgttgagcgtcggggggcaataaaagttataggcttaatgtggataacaaatgatatgataatgtgatgaaacgctcacacggtgtgcactttacctgcaggaataaaacggcggtcgcaaaagacatccaaggttactaaccataatatgcgtaggcattactgccctttaccgaaaggcaaataaaaaaaaaagggcccgccctttcaaccttttcaaaaggcaagaacctggaatgggacaagtggttccccccctaataaatcccaattacggcggggggtgggggggttaacaccccttaaac

SEQ ID NO: 2122 - DNA, 532 bp, Glycine max
  Clone ID: PAT_MRT3847_101921C.1
taccgattccgttccaaggaaggtttcccgtcatcactgtatgacgtcctcctgtctttggggggggggggggggggggaacaagataagccaggtaggtaaggcgtactaacgttattagtggacaagcatctgcgggcgcccaacgccatggccggccagggtaacaatcgggcttattggagataggcaagaagcaaacgttagataaacgtatgatcaataagaacacgttgaagccatgaagaagaagtaatatttaatgaggtataaacggaggcaatacgtcctaataacgttggaggtataaggttagcagccaaagccgtttgaagtttgaaaagcaagtgataatggctcagatattaccgtgtttgtttttagggtacagcttcgtgacgctagggggcacaggtttggtaaaagataatagcaccggtgttgttgcgcatttgcgtttggtccgcaggaaaagtcaccttgggtgcactatgctgctacttactacttcactgggcctacgggtgcgtgg

SEQ ID NO: 2123 - DNA, 227 bp, Glycine max
  Clone ID: PAT_MRT3847_101922C.1
gtattagggagatggctaaggagtgtatcactgtccattgatcacagcatagtctatcatacccgtagatgtagctccttagctaattgggctacaactatgccatgttaggcttcactccatatagtcctttatgacgtgagataaggaaattaactactattcagcttctatctaaccaccggcttgaactgctgactgaactacaagctcatctgagtcagaag

SEQ ID NO: 2124 - DNA, 163 bp, Glycine max
  unsure (1)..(163): unsure at all n locations
  Clone ID: PAT_MRT3847_101923C.1
cnttccattcngttcatcctttgcttcccaaagaaagngaacataaaangcaancggtagcnttgaagcggaaagancaanagtaggnntggcagcaagaganccttcagggattctctccccatagacctanaatctaaganacagaggccctgatgatgtt

SEQ ID NO: 2125 - DNA, 436 bp, Glycine max
  Clone ID: PAT_MRT3847_101924C.1
aacaaaactttctaataaaaaaaatgcaaattacagacatacttaattgagagcaaaggatttggactaaaaccctatggcggattgagaattagaaaatctgatactttgaccaccaaaacggggctcattacttggtacaaacaaacagtcccgaacatgttaccggcgatcaagaagcccttttagaaggctacggatacataaaacaagtggacactttagaatataacaggtgaaacgaacacctatgactctgaacagataaactactgcctaggaacaagttactttgaaaccacgtggatgatcacatgggctcgcaaaatggccaaaatgcaatcactttttcttgtccgctatctttgtgacctgggctcccgaggagtctttattataaacactctagatgacttcaacaactactgtttgacgc

SEQ ID NO: 2126 - DNA, 677 bp, Glycine max
  unsure (1)..(677): unsure at all n locations
  Clone ID: PAT_MRT3847_101925C.1
atgaatttgaaggagggattccacccgagtttggaaatctcaccaagctgaagtatcttgatttagcagaaggtaatcttggtggtgaaattccagctgagttgggaaggctcaaattgttgaatacagttttcttgtataaaaacaaatttgaaggcaagattccaccagcaattggcaacatgacttcattggtgcagctggatctctcagacaacatgttatcaggaaatattccaggtgaaataagtaagctgaagaatttgcagcttctgaacttcatgcggaactggctatcgggtcctgtgccttctggccttggtgatttacctcaacttgaggtgcttgagctatggaacaattccttgtcagggacattgcctagaaaccttggcaagaattcaccattgcagtggttggatgtatcatccaattcactctctggtgagattccaganactctntgcaccaagggctatctcaccaagctcatacttttcaataatgccttcttgggtccaattcccgcaagcctatcaacatgtccttcacttgttcgtgttcgaattcagaacaattttcttaatgggaccattcctgtgggtctgggtaagcttgngaagcttcagaggttagaatgggctaacaatagtctcactggtgggattcctgatgac

SEQ ID NO: 2127 - DNA, 833 bp, Glycine max
  Clone ID: PAT_MRT3847_101926C.1
ccacgcgtcctcctcctcgcactctttcctctctctctctctctctctctcagaaaaaccagataccttcgaagcaagcaaatcctagggtttctcccttcaaatttgttagccatagctctctcttcacttagattttaaatgtaattcagattcatttcacttcgcatctcctctctcatcaaactttagggctttcctctctctcttccccaaaaccctctcccaagacgatttgcaattcgatcactcgatctcgccatggaatcccgtgatttaccgtcgtcgtccccgtcgtccaccaccaaccgcgacgcctccttcgccacagatgccgaggacggcgttttcaccgtcgtcgtcgctctcgccaaagacgccgcgttgcatttccagtcgggcaagttcgccgagtgcgtcgaggtcttgaaccagctcttgcagaagaagcaagacgatccaaaggtccttcataatattgcaattgcggaattcttccgagatggttgttcagatcccaagaagttgcttgaagtaattaatggcatcaagagaaaaaatgatgagcttgctctggttttggaagaacaaggagagtcagttaacaatgttggaaataaagttttggggtccaaaggaagtaatgcttcggcacaccagttttcaggtgcaaacagcaccagcaccagcaccatgtatacagactgaatttgactcttctgtggcaatgctaaatattgcaatcatttggttccatcttcatgactaggacttcaaaatattgaaccctatagatgagcagacaacagctctacatatttgccttctgctgc

SEQ ID NO: 2128 - DNA, 409 bp, Glycine max
  Clone ID: PAT_MRT3847_101927C.1
gatcgcatttgatagcactcaccctcattagcgacacgaaagcatatccgaaaccttctttggaagtctctgattatcctaatggctcctgcaaaggcactgaagaagccggcggagaataagccagcggcagagaacgcacctgcggagaagaagccggaggctgcgaatacgatctcgaaggaaggatggagctagaagaagaagaagcacacgaagaagaacctggagacctacaagatctacatcttcaacgtcctcaagcaggttcaccgcgacattggcatttacagcaaggccatgggcatcatgaacagcttcatcaacgacatcttcgataagctcgctcaggaagcgtcgcgattggctcgctactacaagatgcccaccattacctctagggagatcc

SEQ ID NO: 2129 - DNA, 138 bp, Glycine max
  Clone ID: PAT_MRT3847_101928C.1
cggctcgaggcgatcggccgctcacgatggagaggctctctctgataccgaactgtgtctcttcattagttatcgtctgccttcacacccgatgatgaaggacgtgacggttgagacagaaggaggagcatcaccatt

SEQ ID NO: 2130 - DNA, 216 bp, Glycine max
  unsure (1)..(216): unsure at all n locations
  Clone ID: PAT_MRT3847_101929C.1
gattcatattcatagagagagataggtacagggtgaagagcttgaggaagtgatggcagatcggagggtcggggaagaatatatcttatactcgactcaatctcgatctgtctccanggtgttttgtgctgcctatacttttgccgaaagaggccaaaccaaacttgttcggatattcatctcctgctcagactggaatcatggatgatctcaatg

SEQ ID NO: 2131 - DNA, 1283 bp, Glycine max
  Clone ID: PAT_MRT3847_10192C.1
actactcgtccgctgcaccatctgtgactaaatctggagctggaaactcagcaactgtacaaagtgggataaatctcaatgtttcacaaactgaatctgccagtggaaaacatgtggactctggaaacatagtcaaagatcaggcaatgagaacaaaaactgcagatggcaggtctgagagaactgaaagcattacagtgacaaaatctgatactcgtccggccacattaaactcaagagtagttcaatggtgaatggattggatgctcaatcatccttggccccgtcttctgtacaatctgggatgccaaaatctatggaaaacccaaagcaagtggaagaatccataaatagagcatcagatgaacatgggacaagaagtactgagttaagaacttcagcaaaacgttcagttcctgctagttcacttgcaaagccctcaaaacaagatcctgtaaaagaggatggtagatctggaaaacctgttgctagaacttctggttccttgagcagcgacaaggatctacaaacccatgcattggagggaagacacactggaactaccaatgtaccttcttcaaatggtaacaccatttcaggttctacaaaaggttcaaatccaccagtcaagatttcattggatggtcctggtaatgaatccaaggcagaggttggagttgccaagtcttctgatattagggcttctatggtgaaggatgatggaaatgatattactgacaatccaagaggatcctcctctcgcatagttcattcccctaggcatgaaaacacagtagttacttcaaagtctaatgatagagttcagaagagagctagttctgttgaagaacctgacagactaggtaaacgacggataggggtatgtggagcttcgagaatttgaaactgaactctgatggatggaaagagagaagatgatggatccccgagttgctgatgacaaatcgggattcattgaactaggtatgaaaacagcaagttcacttcaaagtgaaatgataaaagacaaaggcaacgaagttctgctgaagggatcacagggaaagaatggaccgtgagaggggatgtggagctaagagattttgaaaccagagaaacctactctgagagagagtgaaagatggagaagagatcgatctgttgagagtcgggaccggaggaacatggtctgtacagggcaggtgataagccaaaggaaaggatgaaagaaacagggatgatagaaataaattacgatacaatgatgcatcagcagaaaaatc

SEQ ID NO: 2132 - DNA, 389 bp, Glycine max
  Clone ID: PAT_MRT3847_101930C.1
tctacgcgagcttcttcttgctctcgtacttcatatggcgtgtgatcaagtcatcacacaagggctctctgcattggctctagctgaaacttacccttcaacatgtcaagtggcgcatggaaaagtctactgcgatgactgcactcacaactatgacttatctgatatcaaagcttctattaagggtgatggtaaaaaaactggctatggctactacagaaaatgatagctacttcaagggtgatcttaccgtagaccacacaataccttcttcttctgggaatgattgcctaacaaaacttctaggagggccagttcatctttatgtctaaaggtataaccaggtgtaccacattatcaagggcaatgatcagaacagttacaccatc

SEQ ID NO: 2133 - DNA, 766 bp, Glycine max
  unsure (1)..(766): unsure at all n locations
  Clone ID: PAT_MRT3847_101931C.1
tcctgtagnnnnngnacagttggagctcattttagnnnnnnntttgaatcacactcgtgcttctgagggcaatgttccngaaagacttaaatcactaaaatactgcttccagacagacacattggggtatcatctttctgtgttaaggcccatcttccctcatggattaacaatgttatcactctttagtggccttggtggggcagaaattgccctacaccgccttggtattaaaataaaagttgttgtctcagttgagacctccgagacaaaaagaaagattcttgagaggtggtggcgtcaatccggacaaactgggactttggttcagttggaggatattcagaagctgactagtaaaaaacttgagggtctaatcagtaaatttggtggttttgaccttgtcatttatcagaatccatgctcttactcaagttccaggcttcaagccggtgtaggtctctccgctcttgatttttcagtgttttgtgaatgtgttcgagtcttgcaacgagtaagaggtatgtatcaaaggaagtgagtgaagtgactcgtatcttttgttgtacaaaataatgtcattcgatgcctttatggtgacatttcccgttcttacttgaacatttcgttttcctgctgtatatgtgacttctatatataaatttttctgtgcagggaatttgtatgtagagttgtctttctttcttaatcgtcaataagaattgttcatatatgcaagtttatgcattggtagacattctgaatt

SEQ ID NO: 2134 - DNA, 592 bp, Glycine max
  Clone ID: PAT_MRT3847_101932C.1
gggaggtcaacgagaaaagcagagatgttgctgaagacctgatgtcacattcccgaggagctgatcctacaaaatgggtccattacgggaaatggtgagcttcatgggctgcaaaagttgaatcagtgacacagagtagtcccatcaaatacatacttcttcaacaaaatgggtccattaaataaaattcagagcttcatgatgataaaaaaatgaatcagtgatcgatttcaaaccgctctgatacattttgttcagtttaagaaattctggtatgaatggcacattttctcattttactatgtatctatgttagtcaactccatgagatgattaaaagggagggattatatactttaaaacgctctggttttgattcagattgtaatttagcgtctgaaatctttggtaccctactaaatcctcctacttttgggattaattttgaacttgtattagagagttgatgaaatttagttattgggataggtcccttcctaattgttctttttcccttgaaacaactagctgttgtgactccaaaattgcgacataaatataatatgaagattagtattgttgcacggaggat

SEQ ID NO: 2135 - DNA, 326 bp, Glycine max
  Clone ID: PAT_MRT3847_101933C.1
aaaacaatagtaattcgaatttgtttaaaaaaatcaaacccttgtgtcaattgtaaaacttggattaggaagcaaagtacatgtataaagtaaataacggatattgctggtgcagcataaagctatgttcattccggacgcacgtcttccgtcttcttttcttcaaactatacattgcactaacgcgtgaaagccgagaaaatgttgcagtgaccaggatcagcaaggggtgccatcaaattttcaatgggtccttccccagtgtaaatagcttggaaccagaacccaacaaaggccaacattgccggctcgagctcgagccgaat

SEQ ID NO: 2136 - DNA, 1056 bp, Glycine max
  Clone ID: PAT_MRT3847_101934C.1
atatcaaagatgacacgcgtcggtgatgactgggaaatcagtcccccccctgctgccgtgtctggactttgtcaagaacctgaggcaaaatcttcagtccatgatcacttgtttccagaactggttatagagcaggacgacgactacgaccaagttatgagctcctatgtcatagaggtcaactctaacctcagagaggaaagttgtggaacagcagaccttgacgaagcaatagcatgggccaaggagaagtttcaatcacgaaattctgatgaagaatcgagctcgagaaatgaaggcaatgagcaagctactacaggagtggaaggaaggtctgatgcaggtgaatgccacggtgatggaataggagaagttaaatcttcgaaggtacaaacagaaacagagaagttggacagagatataagatcgtggtcatctggcaaggaaactgacatccggctactcctttcaacgctacatcatattttatggcctgagagtggctggtatgctgttcctcttccgaacttaatagaaagttcacaagtgaagaaggcctatcagaaagcaagattatgccttcaccctgacaaactgcagcaaagaggagcgacactcctacaaaagtatattgcagagaaggctttctccattcttcaggatgcatggactgggttcatttctgaagatgtttccttataaacagtaggcgactccaattcctgataactcatttttggtttaaagctcgtggacagacatcaagatagacatttggaatgacaaaagcgatcatttccatgcggcaaatacatgatgtatatgaaatttgaaaatagcatgtcctttgtgcaaacaattgactgatggatctgctgttttgtgtttgtaccataagttgtttgataatttggtaggcattattttggaagtagttaacaggtagttattaggttggtttcagattttcagtatttgattggtatatgatgacatgaaaccaagaaatcagctttttgtcattcttttggagccttattcaattcagatctcatc

SEQ ID NO: 2137 - DNA, 1503 bp, Glycine max
  Clone ID: PAT_MRT3847_101935C.1
atgactaattttccatctaaccatttttcatgttgattttgctgcacttgaatatagtacattttgccctacgtgtatgtaacatacgtggataaaatttgctacaatgtcagcagggaatggaatatgatacacggagaagacaacattctttgacagcatgagctgctaaagaaaataaattacaaaacagcccaactaacgctgattttgttaacgcaaaatgctattattggttgtatggtgctaatgtggggatcttgcgtgaacctgtccctccattagtgccaacgggcttgttagatagcctccgcttgtaccgtttgagaacagacgccaaattttccttccccatagggaaagccacatcgcctgcggcagttccggtacgtcctttcctgccagagatggcaagctccacttccttgataagttcaagcaacgttgatgcagttgtgcatttgccctggcctggttttgtagtcgttgggggtagtatcccatttgaaagatgggggcttaacttttgctgaacttgaaggcagaagcatggagccaagggactccgaggcttaaggaaagctggatcaatgatgccctggaggcgattgagaacataggtgtatttcccccaaagctccggccggctttctacaattgagaggttaagaatactgtggatacaccatactccaaagcttattattaaatctgttttccatatacatccctgcccgcaatttggaaccgaagacaccgaaaaacctgaagaatatgccccattactcttcattgaagaaccaaatttcctatcagaaggaaaataatgagcttcatccatatgaatgacctgattcatctccctggtttcaatttcataaatcaacttctcccttgcagcagcagaatctatcagatcctcatcggctccaccattctgtctaaacaaccaatcagacccatccagtttcaagagcttcacaatgcaaagtctaatagactgaagaagtttcccctctatatccacaaatgaagtagtttcttgagcaattgcattaggcctatttccaacagcttccattgcaacattaggaattttctcagctaccccaaactgctcataaggcaatctagaccggagggatccagtatcaaaaccagaactcaactgtgaagagagtgccttgttgtaaacttcagacaaaggaagttcattgaaggccaaatgacctcctgttcttgatccagaatttaaatataatgattggtcatagcacgtcctactagcaaaagatccatatccaacagaaccatcccttggagcatttttatcagacacataaccagccctgtgggggatggagtatcctgaaatgtctggcaaactgtggtactttttagtattaactgaattgactgtattatctgcagatccagaagagcataagtcataataaaacctctcagattgtaattgggcggacgcgtgggcggacgcgtggg

SEQ ID NO: 2138 - DNA, 418 bp, Glycine max
  Clone ID: PAT_MRT3847_101936C.1
caaaggaaaggcacttctccttgactgtgttgcataacagagctgtttgacttgttcctactacccaaagctcaatcaatagtatgataaatactcctggaaaggacttgacattgtggcattcccatgcaatcattacgctgctcacgatccatgaactactgaaaacatggtggtttttgcatgtgctatgttcaaagcttaggatacaataaacaacaaagagtatgtgaatggagactatgctgttacagttgccacgtctgtgacatataccacacgtatattctcatatgatataactaaaatgatctaatccaaattccttagcgataaggatggagaagtcgtacaccgtcttgaaccctcaactcatactattaccattgacatagacgtaaggaatctgatagattca

SEQ ID NO: 2139 - DNA, 368 bp, Glycine max
  Clone ID: PAT_MRT3847_101937C.1
gcaatacagtggacggctgaaagccaactgtcaaatcaacagtacagttttcttttttggattggttgaacttggatttctgttagccggtgaatagtttttggtctagaagatagtgggttttggtataccgtgttaaaagtataagatgttgagggtgaagatagtgaaaatgttcacataaatataacgctgaactaagtaacattatatactttttgattacaaaatgttccggggcatagccaactataaccctcaacgaacgttgatttttaagttccctctcatacttctctgttgaatgttattggaattcatgctgccaaaaaaaaaaaaaaaaaaaaaaaaaaaaaaaaaaaaaaaaa

SEQ ID NO: 2140 - DNA, 266 bp, Glycine max
  Clone ID: PAT_MRT3847_101938C.1
taaagtgtagttcctctgatcgtgtggtctctgagatctaggcgctcaccgcgagcgtcacacgtgtgttcgcttgctctggtcagcttcggcgctcgacttcgtctactcttgtgcagcttccttcggtcttgccttcggttgcactgcctgatcgtccgctctcgcatgccctagctgtcgtggtcgttgccaaagtcgggctccgtaggacattgctgtccgcgcgtgacagtcgggtcacccctgacgtcggagggccagtc

SEQ ID NO: 2141 - DNA, 499 bp, Glycine max
  Clone ID: PAT_MRT3847_101939C.1
ttttcttcaacgttggggactaaattgatgaatattcaatacattaggggattacttgaatagctttattaccttaggaattgtttaggagagagaggactagttcgaagatgaaatcggtgatttacttgcattttattgctctgcgtcttgagataaaagtatggtatgcagatattataatttatagggcctatcttaaccctcaaaattaactggtatgatgaagattgcccaaacttaaagtaaaatatccttaatgtataacaaactacttaagtagtcctatatttattagaaattaaacaaagttctccctttaatattaaaatacccgtcaatatattccttaaacattaaaacaatacatcaacttagggactaaattgatgaatattcaatactttagggattacttgaatagtgttattactttagaatttatttaggggagagagtaattgttcgaagaccaaacttgtgatttacctgcattttg

SEQ ID NO: 2142 - DNA, 325 bp, Glycine max
  unsure (1)..(325): unsure at all n locations
  Clone ID: PAT_MRT3847_10193C.1
cgaggttaacttcaagaatcacaaaagatagagaaagtcttgtatagacacaatccagtaataatgctagaagcggtgagggcatcttaacttcataataacattactaatctgatatttcatgtgttaaaagtgatggttacctgatcatagatcacatgattatataaactttttgaagcaaaaaaaaaatactacattcaactaattttataaatttgaatacaccaatcattaaaaaaaaaaaaaaannnnnaaaaaaaaaaaaaaaaaaaaaaaaaaaaaaaaaaaaaaaaaaaaaaaaaaaaaaaaaaaaaaaaaaaaa

SEQ ID NO: 2143 - DNA, 750 bp, Glycine max
  unsure (1)..(750): unsure at all n locations
  Clone ID: PAT_MRT3847_101940C.1
gatgacaaatttgcaatgcaacttcacatgtaacaagctaaccctctcaccatgcaaagagtatgacttagaaatgtccatataatgtcacattctcaaccccattatagtgaagtacatacaacattctcagttgcttatccacacacactcaaacatgggaacctatgtggaaaatttcgcaagtgaggaggaacatgtctttcgtagccaatactcatctgtccctgtccctgacaatgtgacattgccggaattcgtgctccaaaatgctgaattgtatgcagacaaggttgcatttgtggatgctgtgactggaaaaggggttacttttagtgaggtggtgaggggtgtacacaggttttcaaaggccttaagatctcttggtctgaggaaagggcatgttgtgattgtagtgcttccaaatgtggtagagtatgccattgttgctttggggataatggctgctggtggggtgttctcaggtgcaaatccaacatcacatgtatcagaaattaagaaacaggcagagtctgctgatgccaaattgattgtcacaaatgtcacaaactatgaaaaggtaaaggctttggagctacctattattttgctaggagatgaagttgttgaaaggtgccatgaattggaacaagttgcttgaagcagcagaccgtgcaggggatgatttgacaagggagcctattcagcagaatgatctntgtgccatgccattctcatcaggcaccacag

SEQ ID NO: 2144 - DNA, 883 bp, Glycine max
  Clone ID: PAT_MRT3847_101941C.1
gaggcaaataaaatattagcattattgaggtatcaactaacatgtaatgtgcagcagatttacaacgatgaccgaataaactattgttcagtcaatatttatttatgataaaaaaagaaagcggttaacgcctttacatcattgtgaaatcaaaacaatgtcacgacttaatcattataatactttaattcctcacaagctaccatatcaccttcagcatttgactaaagcttcagagatctgatactatttgcaaaactagggaagaaatggccttagctatggtgggagaggcacttatctctgcttctgtggagatcttgttggataggataacttctgcggagtttcgagatttctttgccaatagaaagctgaatgtgtctctcttggacgagctgaagataaagctgttgacactcaatgctgtgctcaatgatgctgaggagaaacagatcactaattcagcagtgaaggcatggcttaatgagttgaaagatgctgttctagacgctgaggatttgttggatgaaatcaacacagattctctgaggtgcaaggtggagggagaatttaaaacctttactagccaggtgaggtcattactttcttctccctttaatcaattctataggagcatgaattccaagcttgaagcaatatctagaaggctagaaaattttcttaaacagatagatagtctcggtttgaaaattgtcgctggcagagtctcttacagaaaagatacagatcgatcggtggaatatgttgttgcaagagacgatgacaaaaagaagctgttgagcatgcttttctctgatgaagatgagaataataatcacatacaagtgctgacaatatggggcatgggaggtcttggaaa

SEQ ID NO: 2145 - DNA, 345 bp, Glycine max
  Clone ID: PAT_MRT3847_101942C.1
acgaacagatcttgctatatactccatttgccgtatctgaaacttcaaacgcagaactgggactcgggcaaataataatttctcagagactcatgtgtatactatgtttacactaacgtacacacttccgtttatcaaatccaatctactgaattcaagagactactagctacttacaactagcatattctggatcatgctgacgcgactctatactctaagctcttgaatggagttggaatctatgctctcactacgaggactatactcagatattgtctgccaaagcgactacaaatctagatctcttgtcaatggcgagaacgccccgcatcatttccttga

SEQ ID NO: 2146 - DNA, 205 bp, Glycine max
  Clone ID: PAT_MRT3847_101943C.1
gtccaatcattttctgtgttccaatatttctaaatgcgatgggaggattaccaagcaagacattagcactaaaacataaatgattaacaggctcagattcatagatgatagacatattctcaaaaatgtcgactcatgaagttgcgatgtgcaaattagggacagtctgaaaaaaagtgactggacatcgtgtataggatcctaa

SEQ ID NO: 2147 - DNA, 199 bp, Glycine max
  Clone ID: PAT_MRT3847_101944C.1
ttagttcctgccacaccgtcgacaaagaaagcggaatagggttatctccaaccaactatgaagccccaaggcggaagcccaccattggctgcacaaggccatataaacccaatgctgtaactagcaaaacgccttgaatataaagggtttaacataacacttggcaacactgttttcaaccacaaaagccttaaaggga

SEQ ID NO: 2148 - DNA, 214 bp, Glycine max
  Clone ID: PAT_MRT3847_101945C.1
gtgcttaatcttaaagtttggttttctagcgaactcagccctacaaaatcgacttcatgtctaccactgtatgcaccagggcacccttgaaagctgtgatcatcaatacccaatacctagtatcctattccactagcttcaaatacgttctgcataatcttacaagtaaacattctgacatacacatatgctaaggttcagagcaacaggcatg

SEQ ID NO: 2149 - DNA, 771 bp, Glycine max
  Clone ID: PAT_MRT3847_101946C.1
gtctgctcgcgcgcgcgatctccaacccagacccatcgcgcggcagccccaaacaccaccaccaaaccagatcagatccgcaatgcctccgaccagccaccgcgcacgcgatctccgttgctttcaatgttggtgtttggctcaaatctgaacttgtgggtgctgtttgggagggttaagatggtggtaatggagttggtgtggtaggtcaagggtggggttggagcgccggcgttgggggcctgggtggtggcgttgctgagtttgagttctggaggtggtgttgttgcagtgttggtgagggtttgggtgactcgggtagggaacgagttgacacagtgagtcccagcagtggtgagaggagttgttgcgaccgaaacataatttaagtgaaagtgacgagtgaagccatcaaacgtgggtagcagcaacgagcaagagaagtactgagaccccggaaaataaccattattatcctatctaatacaatggtcccctctccattgcgaacaggaaatagcacacttttctggaagaaaatgaccaaacgcataccatcaaataataggaccagaaataaccaagcaatcctttgccctcaaatttcaatcaggtttgaataaagtgacaattaacaacatattatatataggtaactacatctgcaaatggtagctaaaagccaaaatgtgtttacggtggccataagaccaaaaccaataacgttatttatcacgggaacccctttttgcaagtatcttcttccggggg

SEQ ID NO: 2150 - DNA, 703 bp, Glycine max
  unsure (1)..(703): unsure at all n locations
  Clone ID: PAT_MRT3847_101947C.1
ccacgcgtccggggctgtcctgaaggcagatccaagttttgaggaagctccttggccatcgttatcagctgacgcaaaagattttgtgaagagactgttgaataaggattatcgtaaaaggctaactgcagctcaggctctcagtcatccatggcttgtgaatcattgtgatgatgtgaagataccttttgatatgataatccacaagcttgttaaaacttatatatgttcatcttcattacgcaaatcagcattaggggtacgtactattgtctggttatttagtattgcttatgtttaaccctttcttgttatatctgaagattgagtttggatatctcttcttaactatgatgcacactcacaggtacggttttgagtgtttgatatgacatgatacattgcctaaatataacattttttaaaattaggatacgggtacggcaaagtatattaaataaaatataattatattataaattggttatattttattagtttatttttcttgatttcttgaattttcttaataaaatggtttcccatcatcgtgatgttattgctattttttaatctcttgaaaattttattagaaatagcataatcacaatcagcttttttttttccttanaaaaagttatattcaagtntatgataacgttcccttttattatgcaggggaaaatatacattaaaagctttg

SEQ ID NO: 2151 - DNA, 407 bp, Glycine max
  unsure (1)..(407): unsure at all n locations
  Clone ID: PAT_MRT3847_101948C.1
nnntntttttttttntttttnttntttnntnnnttttttttnnntttggaaattatatatcagctccatggccaaacagaggctccatattttaatttacaatgatgggttattccaatcccatttattaaaaaattcttttttttaaataaaagggaaccctaaaaatttttttttatttttttttttccccgccaggctccttattccactaatttttttattaaacccttattaattaattcccctttagctttttggtttcccaacccttaaaaatttccaaaaatttcccccccaccccttcccaaaaaaagcccaagaaaaataaattcagggtttacaatgcgggcaaatccaaaatagttaatttaggggtggggaagagacttaattgggggcaggaa

SEQ ID NO: 2152 - DNA, 1221 bp, Glycine max
  Clone ID: PAT_MRT3847_101949C.1
ctgttccgaattaatattgtagtaaagaaattttatatggcaaagtctcttatgatcctaactatatatataagccataccaacctttctgccataataccttaatatttcaaatatccccagcagagagtaacctctcaatcctagcttcaattatattgattttttcacatttctaaatccacctctaccatatatatctccctctaattaaacctctctatccatatctaaaatttcaaaaagatctcaattaattagatttccctctctctttctctctctaactatattgcaaacctttccctctgctttcaaaatcagcaaattcatgggtcttagagacattggtgcttcactgcccccagggtttcggttttacccgagtgatgaggagttggtccttcattacctttacaaaaagatcactaatgaggaagttctgaagggtaccttgatggaaattgacttgcacacgtgcgagccatggcaactcccagaggtggctaagctcaatgcaaacgaatggtacttcttcagcttccgtgaccgtaaatatgcaaccggctttcgaaccaatcgcgcgacgacatctggctactggaaagcaacggggaaggatcgtacggtgtttgaccctgccacgcgtgaggttgtagggatgaggaagacattggtgttctacaggaacagggctccaaatggcatcaaaacgggttggatcatgcatgagtttcgcttggagacgccacatttgccacctaaggaggactgggttttgtgtagagtgtttcacaagggcaaagcagacaacagtgccaaactcatcatgtacgagagcacagttccatccctaactttggcttcgtcatctccaaccaaccaaaacaccacaccatcaattgggtataaccaatttcttgccccattctcttcctcaatggcaacccatcatcacaatcacaatcatcatattccaaaccaaagccaaaacaacaacaacaactccttgatgggtctccttcagttctctagggaaacaaacaccaacaactctagcaccgttactcaaattagtcccaaatgtgatgataataatggatatgggttcttatgggacatggacctcgaagaaaatagcttcaatgatggcgtggcatcaaacttggatggaatgagattcttcgagcttgataataataatagtgtggtcttgttatg

SEQ ID NO: 2153 - DNA, 200 bp, Glycine max
  Clone ID: PAT_MRT3847_10194C.1
gccacactatcaggttaaaacttgtcctagtgtttttacccataatattgcatcgaaggtctagttttatcctgtataagattaacttacagcatcatccttcccttataaattaatcccaagcgtcacacaaatgggactacatcacccttcctaaaaccatgattcaatactttgtacatctacaagattttaaaggc

SEQ ID NO: 2154 - DNA, 274 bp, Glycine max
  Clone ID: PAT_MRT3847_101950C.1
caccatctgaagtggcacttttgagaatgcctgatagcgcctgaaagctgatgtgttgttacttggtgtatgagagatgagtttactttgttttaacgtattggctggtaacttgtgtcacagtatttgaaggtaggtagtttcacaacggtgggtgtttttggtgggtggccatgggtctacagaggtagttctatttgctatttgagttgttattttttattttatttttttatattctttttttttttgtgttgttacttttatttttatt

SEQ ID NO: 2155 - DNA, 169 bp, Glycine max
  Clone ID: PAT_MRT3847_101951C.1
aggaaaacttttgtgttttctacctttggaaggaaaagaaccgctaggctgctcttaaaaagatttggtctatcgttttttttacctattgaacgggactacggtttgcaccttggtggctggtacaaccaagtggcaagggaagttaatcgtcttgcagcatatcctc

SEQ ID NO: 2156 - DNA, 499 bp, Glycine max
  unsure (1)..(499): unsure at all n locations
  Clone ID: PAT_MRT3847_101952C.1
gtccggaattccggctcgagaaaattcgtaccgctttaaaagcataggctgagttatgtatttttgtagaatctataagatgtttaaatcgatcgagttgaataaccccctatcatttcaggtgtatgttgtattattgctttgtgaaaaaacgttaaggtcataatgtactccgggctttgatggttttttttttttttcatttatacactgctgatgcagcaggtaggattttcccccctcctttttgttggaaatggagctatctatgtcttttttatgatttccactcaaatgttgtccatactttttcaccccataatcaacacgactttttcccacgcatcccccttttttatttgagggcgtggtttaagaattggactggaccggctggtccaattgggaattccgtgatcatattggttcggttcatggtnacttggtaaggattgcaaatacatcaaaatcggtgtgatctgggttgaaataggaaatg

SEQ ID NO: 2157 - DNA, 147 bp, Glycine max
  unsure (1)..(147): unsure at all n locations
  Clone ID: PAT_MRT3847_101953C.1
cacaaccaanaccctatattattcacttggtcaaacactctttcacttgacaaacaaacactttgtgtaggctcattggaaccgttttactgcaggaggccccttgtgccacctttgggaacctgggatgggattgatattcttcct

SEQ ID NO: 2158 - DNA, 525 bp, Glycine max
  Clone ID: PAT_MRT3847_101954C.1
ttatcatcagggttaccaacaacatcagaaccaaccctcttctgggttgcttcgttttcgctctgcgccaagttctcttctttcaaatctcactccttttgtgagtgaagactttggttctagcagcttcagagagttgcaaggaaacaacaacaagggttgttctaaggatttgagttcgatgaattcgcataagggagtgtatggtggggggttgccacctcactatccaaggcatcgtggttcttcttcctctgctgctacttcgagttctgctatggaagggtcttttggattggtgggttcaatgggaatgaatcatgaaacgccgcaaaacgggcttgggtcaagtcttctcaggcatagtacttcccctgctggccttttctccaacaataacattaactttcaaaatgggtttgccaccatgaaaggtgtttggaaactatggtggggtgaatggcagtaatggtgaacttagtccatgcattaacggattgaagaatcaggttagcttctcaccaa

SEQ ID NO: 2159 - DNA, 451 bp, Glycine max
  Clone ID: PAT_MRT3847_101955C.1
acgaggtttggtcgacatttgtacaagctaacctttggtcgactttaacaatgatttttggtcaacatcaaccatgaattttttttctattggttaggttttttagtcaatgtcaataaagactattttacggttaatgtcaactaaaaaatatcattagtcaatgtcgtccaaaaaatcttgtcaagatcagccaaaaattactctagtgaactatctattaaaaaaatcctaaccaacatctctcaaaaaataacaattgccgatgtcgaatgaaaaaaccatagctaacgtccgtctaaaaatccttccaagcattcgccaaaaatccttgtcacggtcaaccaaaaaaaatccaattgacattaagcaagaaattcctaaccaacgttactcaaaatataatcttgaccgatattgaccaaaaaaaccctaatcaatgttaaaaaaa

SEQ ID NO: 2160 - DNA, 900 bp, Glycine max
  Clone ID: PAT_MRT3847_101956C.1
atttgtgaaagctacttgaattggcctattcaattagcaaaagaaaaatccagaacagaagaaccaagctccacaaaatttttcgtttttactcaattccacagaactccaaaagtaaaatcattattatttatagtaatgtaatgtaatactattgaattataaatttatttacatatatatacacatactgagggagacactgtgactgtgataaagtaaataaaatttctgtggctttggattcttctggcaattcgtgctagccagctttacttggctatgggggcagcattagcatagacctataaaataaaaattggaacttggcataaacgggggactgcaaatccctttcagctttctgggtagggagaattttgtaagatggtagagtttcaaaggttgttggtgtgcatcaccacctgcattctatgttggatgcccaatggtgccactgccgccacagatccaaatgatgctgctgctgtgagatttttgtttcaaaatatgaactcaccaccccagctaggttggcctcctaatggtgatgatccatgtggacaatcttggaaaggcattacttgctctggcaatcgtgttacagagattaagttatctaatcttggactaactggatcgttgccttatggattacaagtcttgacatctttgaactacgtagacatgagtagcaaccgtcttggtggaagcataccttaccaacttcctccatatttgcagcgcttaaatcttgcttataataacatcacagggacagtcccttactctatttctaacttgaccgctcttacagacctgaatcttggtcacaatcagctccagcaaggactgggtgtcgactatcataatctttctactctctccacattggatctc

SEQ ID NO: 2161 - DNA, 178 bp, Glycine max
  Clone ID: PAT_MRT3847_101957C.1
tttttaaaccatggaattactttttttaattaaaaaatccattggttattccccaaacccaattaaattctaaaggtttaaataatgggctcccatgtacaataatgtattcgaaaattttgttaatcttgaatctttggtcctaattataaccaaaaaaaaaaaaaaaaccaatttt

SEQ ID NO: 2162 - DNA, 355 bp, Glycine max
  Clone ID: PAT_MRT3847_101958C.1
gggaaaggctttttttttttttttttttttttactggaaaaccttgttcaactttgcgtgattgtgcaaaaagaacaccttcttggaatttccaggagccggaaagaagaacattaaggggccaaggaaccaaacaaaaggggttataacggggggggggggccttagaacattccgtttgttttcaaaagaagaaaccattagcccagttccctggcgttctgaaaaaggagacgatcccccagtgtccggccctcctgcaagatttgggcaaaaaggcaacacggccccctttctatttgcttggccaaagggaaccacaaaacccgactttttttcttcccggtcaaaattg

SEQ ID NO: 2163 - DNA, 193 bp, Glycine max
  Clone ID: PAT_MRT3847_101959C.1
tgctcttgtacggccatgggggacctggtgcgggagtgcatttttgaagcagcacacactgtttctcattacgttgacaaacactcgcggttgtggactgactctttccattcttaagccaggttagcgaggtcccggtaataaagtcaaatagaatgtgcatgcgaaatcttatgaatgatctaatatcttc

SEQ ID NO: 2164 - DNA, 484 bp, Glycine max
  Clone ID: PAT_MRT3847_10195C.1
ccacgcgtccgaaagaagtcaatggaatggaagtgagctcaagaagatgacaaacctaaaattactatctattgaaaatgctcacttttctagaggccctgtgcatctcccaaatagtttgagagtactaaaatggtggggatatccttcaccgtctttgccacctgaatttgattcaaggagacttgttatgttagacttgtccaatagttgcaatataatgggcaaacaactcaaattcatgaagttcgagtctttgagcgaaatggttttaagaggttgcagattcataaaacaaacacctgacatgtctggagcacaaaatttaaagaagctgtgtcttgataactgcaagaatttagtagaagttcatgattcaatcgggcttcttgacaaaattacatggttcactgctgttggatgcaccaatctaaggattcttccccgtagcttcaagttaacatcacttgaacatctgtctttc

SEQ ID NO: 2165 - DNA, 734 bp, Glycine max
  unsure (1)..(734): unsure at all n locations
  Clone ID: PAT_MRT3847_101960C.1
ggctcgagttttctgatccttcttattagcatttcatgaagcatctacaaacgccctatgaccactgggctccggtatattatcaattattcaacgtggcaataacttattggtcatttcatgaaagagataacatattgcatggtcataccaccatgtccttttcttttgtgatttacgttccatatattcatcctttggtccattctttggttcagtacccacgcgtccgcccacgcggcccaccgcccacgcgtccgtgcaaaaatggcatcattcaccatgacagcttccatccttggcagcccagccgtcaccaaccggtcggcagtagcaacgcagaggagatcactcgtagtgaatgctgccaaagctgttgaagcagaaaaggtcagttatgacaatgacatggatggtagcaatggaaggaggaacttgatgttcgccgcggcggcgggctgctgtttgctctgttgctgggatggcagtggcagatgagccaaaaccaggaaccccagcagccaagaaaaagtatgctccgatttgtgtcaccatgccaactgctaggatttgtcgcaattgagggactcggtttttattttacttctgatgatcggaaatgtacattagggttgtagtaatgttttgatttcacatgatcctcactgtactagatgttcataaaactatcgactttgctttgccaaaaaaaaaaaaaaaaaaaaaaaacnaaa

SEQ ID NO: 2166 - DNA, 267 bp, Glycine max
  Clone ID: PAT_MRT3847_101961C.1
ttaactaacaaccttgatatccccaagttatccgcatgttgaaaaaaagtttatatattaatcatatatcttccgtatttcacaagaatacgacaagacttaatttaagaggaatgggggggcccagctttctagctgtgcataatatcaggattactgatgggagtgacaagactagtgcaactttgcaatttagaaagttagcagattgttgtgttctcaagagaaactttaagcagatgtctaatgtaatgtgggtagctcctg

SEQ ID NO: 2167 - DNA, 779 bp, Glycine max
  Clone ID: PAT_MRT3847_101962C.1
cccacgcgtccgtacggctgcgagagacgacagaaggggctcctcatttttctgatccttcttattagcatttcatgaagcatctacaaacgccctaggaccactgggctccattatattatcaattattcaacgtggcaataacttattgggcatttcatgaacgagataagattacatggtcctactaccacaatgccctttttttttgtgatttacgttccatatattcatcctttggttcattctttggttcagtattcagattacattgcaaaaatggcatcattcaccatgacagcttccatccttggcggcccagccgtcaccaaccggtcggcagtagcaacgcagaggagatcactcgtagtgaatgctgccaaagctgttgaagcggaaaaggtcagttatgacaatgacatatggtagcaatggaaggaggaacttgatgttcgccacggcggcggctgctgtttgctcttttgctgcagggatggcattggcagatgagcctaaaccaggaacctcagaagccaagaaaaagtatgccccggtttgtgtcaccaatcctacagctaggatttgtcgcaattgaggaacttttttgtttcacttttggaatttggaaatgtacaatgaatttgttgtaaggctttgatgatttcatttcatcctcactgtactagatgttcataaaagtatcgactttgcttcgtcgtctctttggtgttgtaatgcttaaattatatttttttttcttctaatttattatctaggtt

SEQ ID NO: 2168 - DNA, 1015 bp, Glycine max
  Clone ID: PAT_MRT3847_101963C.1
tttccttccacgcgtccgtacggctgcgagagacgacagaaggggatcctcatttttctgatccttctctacacacgccccaggaccactgggctccattatattatcagttattcaacgtggcaatagcttattgggcatttcatgaacgagataagattacatggtcctactaccacaatgccctagtttgtgatttacgttccatatattcatcctttggttcattctttggttcagtattcagattacattgcaaaaatggcatcattcaccatgacagcttccatccttggcagcccagccgtcaccaaccggtcggcagtagcaacgcagaggagatcactcgtagtgaatgctgccaaagctgttgaagcagaaaaggtcagttatgacaatgacatggatggtagcaatggaaggaggaacttgatgttcgccgcggcggcggctgctgtttgctctgttgctgggatggcagtggcagatgagcctaaaccaggaaccccagaagccaagaaaaagtatgctccgatttgtgtcaccatgccaactgctaggatttgtcgcaattgagggactttggtttttattttacttctgatgattggaaatgtacaatggggttgttgtaatgctttgatgatttcatttgatcctcactgtacaagatgttcataaaactatcgagctttgctttgtgtctttggtgtcgccagtttaatgcttaaccaagtaacattatttttccttttgattttctttgttcgcttagtttgaagttgaataagagcttactacttttccccctttgtggggagggataggttggatgtgtttcctaagaaaactgaattaactttttaaacctatccaccgcgggggtttctacctgtactctcccccttcgaggggaggaaagaaaaacaatttgcagtctatgaagatgaaaggaaatttgtgcaattttgaattccaaacatttataacaatgtgcaattcaaccattacaaaa

SEQ ID NO: 2169 - DNA, 412 bp, Glycine max
  Clone ID: PAT_MRT3847_101964C.1
ggctcgagaaaataaaaaaaaaaaaaaaataaaaaattaaaaaaaaaaaaaaaaaaacaaaaaagagagggaaaaaaataaaaaaaaaagggcggccgcccctttatattggctcacgaacccggtattaatttgggggcccgctcctggggggcccccccccccccgtttttttttccgtcctggaccttgggggaaccccggttttcccttttttcggggggacacttgccttgcccccccaatgcccccccctattcccgggggaacctttttggcgtacccccgggggccccattgggggggcctccctctcattttttgggctggggggcctgtccggtttcctgctccgcaacccttttgggccgcctgttttttggctttttccaaggggcggggctggggggct

SEQ ID NO: 2170 - DNA, 538 bp, Glycine max
  Clone ID: PAT_MRT3847_101965C.1
ggaaggggacaaccccctgcaattacattacgggaaaccatacccagttaaaagggaccattattaagggaagggccaaaacctaaacccggttaaaaaaacggggaatctttttaacaacaaaaagctctcaaacttaaattataaaatcaggggggaaacccaccttaaaaaaaacaacaaaggcgccacaccactggcggaaaaaaaacaaaaagggttctgaaattgcaaaatttgattgggttcttgaaggaaaaacattaacattagcctaccaaacacgtaggggaaaacagggtaaattacgggggggaaaattggatccccttcccaatggaggattggagttcaggctaaaggctttcgaggccttggtgctcaaaatctgaaaaagggcctaagcccaaaacttcctccactccatttttcccaagcctaaccttggaagcaaaggggggaagttcaaaaacaggggattgcccaaatgacccctccacaacatttgggactccatgggggcccttagggcaagcct

SEQ ID NO: 2171 - DNA, 322 bp, Glycine max
  Clone ID: PAT_MRT3847_101966C.1
ttgcgacctaaaaatatgtgatttagggctagctcacactaattgctgctagaaccaattcatgaccgactatgttgttactctgtggtataaggcaccaaagctcctactgtgttgtgacaactataggacatatattgatgtgatggcagtggaatgtatctatgaatagcttcttgtgcgataaccgattttccctgggtaatagtgtctcaaccagctgaaggagagtatcaatatccttggtagctaatgggtggaggatattaacttcattgataaccttatggcgaagaacactatgcaatgacttgcttattca

SEQ ID NO: 2172 - DNA, 200 bp, Glycine max
  Clone ID: PAT_MRT3847_101967C.1
ccccttacaccgtggctgtgctatatattgtgaagggattaggaacctgcgaaattttggtgaatctcttcatagaacaccactttacgaccttcttctaggggggcatagtgcctaacctcttaggagatttttcaatcactcttaagactgtgtttcacataacgaatttgctcatctgcaaaggtaaaaggtgctta

SEQ ID NO: 2173 - DNA, 310 bp, Glycine max
  Clone ID: PAT_MRT3847_101968C.1
ctcacacgttcgttcaatctttaattatctcatcgattagcaacacgaacaggaacaaaaactggattcagaattggtttcgtaaatcttgtcctatcgttcgttccattgggcggtgcgatgggcaaaggcaaattcactagcatgccccctgtttgccccccggtatacatccctgcagatatgcttgaccgaacctctaaccgtcctcaggcttttttacaggttctattctgcattctatttcgctcttcattttgcacgtctatctctaagcaaacccatcatgaagatgaagatgccgaggaag

SEQ ID NO: 2174 - DNA, 684 bp, Glycine max
  Clone ID: PAT_MRT3847_101969C.1
ccaggcaattgctgtttcaaaagctatgcgtggacattccctgcaggaaaccaaaaatgatggtcgtttccatgttcataccaagacatatctggatggtgctattttaaaagaagagatggaacgttccgctgatgtgcttgctgctggattgcttgaagtgtctgacccgtctctttcaagtaaatatttcctccgccaaaattggatggatgaatctgaagggtcaactgattctattcttaagcataagtctctctgggcttcttataactcaaaatatagcaagaaaaggagaaagaaagtaaagaaacaaggagatctacaaccaacttatggaactagagtaattcctgtgtttgtgctatcgctagctgatgtggatccaaaccttatgatggaggatgaaagtatggtatggacaagcaatgatgttgtaattgtgcttgagcatcaaaatgaaaagattcctttaagttatgtttcggaaacacaaagaagacatgctcttccatctcaggcacaacggcatatattggctggtcttgcctcagttgttggtggtttaagtgcaccatatgagaaggcttctcatgtccacgagaggcctgttgtgaattggctttgggctgctggttgtcatccatttggaccattctctatacatctgacatcaggcaaatg

SEQ ID NO: 2175 - DNA, 190 bp, Glycine max
  Clone ID: PAT_MRT3847_10196C.1
ttccgatcccgaaccagttactttctcttgcacaaaaagacttcttcacgtcaaacgtagaatatctttttctttttcccctatatctcctctaaaacaatttttactctcgcaaagaggcgcatctgaggaacgcagatccacaacccgcgacctcacctaagccggcggcaccggaacatcgaggacg

SEQ ID NO: 2176 - DNA, 447 bp, Glycine max
  unsure (1)..(447): unsure at all n locations
  Clone ID: PAT_MRT3847_101970C.1
tcttacttcttctaaagatttcannaaggggcctcattttctagcttccaaaccctaacacttctcttcctcttcgatcatcacctctccattaaggagattctcggaacatgcgtttcggttggttgcaccgttgatggaaaggatccaaaggacttgcagcaggagatttccgatggtgatgttgaggtccctctcgattgaggaagaagactttgtttctctctctttttccttctctcttatgtttgtttcgtgttttttaaatataaatctggggaaactattgaacgttttgtttaaggctattttactgttttggataatttagatgatggtttcgagaggtattattatgggctgattagtttatttctctgctcacagtatgatatgttttttgatataattttgccaatggatttttaacaaanaaaaatnnnnant

SEQ ID NO: 2177 - DNA, 1032 bp, Glycine max
  Clone ID: PAT_MRT3847_101971C.1
ccaatgtctcctcggaacggatatctcggctcttgcatcgatgaagaacgtagcgaaatgcgatacttggtgtgaattgcagaatcccgtgaaccatcgagtctttgaacgcaagttgcgcccgaagccattaggccgagggcacgcctgcctgggtgtcacacgcgggcttcgcctcattttctagcttccaaaccctaacactcctcttcctcttcgatcatcacctctccacaatgccgccgaagttcgacccctcccagatagtcgacgtcttcgtccgcgttaccggcggcgaagtcggcgcggcgagttccctggccccgaagatcggtcccctcggtctctcccccaagaagatcggagaagacatcgccaaagaaaccgccaaggactggaagggcctccgcgtcaccgtcaagctcaccgttcagaatcgtcaggcgaaggtcacggtggtcccctccgccgccgccctcgttatcaaggccctcaaggagcccgagcgcgaccgcaagaagaccaagaacatcaagcacaacggcaacatctcgctcgatgacgtcatcgagatcgctagggttatgaggccgaggtccatggccaaggacctcagcggctccattaaggagattctcgaaacgaacatgcgtttcggttggttgcaccgttgatggaaaggatccaaaggacttgcagcaggagatttccgatggtgatgttgaggtccctctcgattgaggaagaagactttgtttctctctctttttccttctctcttatgtttgtttcgtgttttttaaatataaatctggggaaactattgaacgttttgtttaaggctattttactgttttggataatttagatgatggtttcgagaggtattattatgggctgattagtttatttctctgctcacagtatgatatgttttttgatataattttgccaatggatttttagcttattatgcgcatatttgtttaaaaaaaaaaaaaaaaaaaaaaaaaaaaaaaaaaaaaagggcgg

SEQ ID NO: 2178 - DNA, 290 bp, Glycine max
  Clone ID: PAT_MRT3847_101972C.1
aattcggctcgagagcatatatgcttcagggtttggaacaaacggcaacacactttccccaaataattcaaccactgatgcatatatgtttttgtagcactagttgcactgtaggtatttgtttttgcatgtgaaagtgcatgcaataaggtggcatgtttcatgtgacttgctgcagaatataaattaccataggctaaaatagaaattaatctgtatttaaatttctctgatatttaaactcatgggaataccagtaacacttctgggattttgtctttagatgattt

SEQ ID NO: 2179 - DNA, 949 bp, Glycine max
  Clone ID: PAT_MRT3847_101973C.1
gctcagcaaagataagtaattatattaatgaaacacagtaccagaggtactgaaatacatatgtaattggatagccttacacatggttcctaatcagactaaatagagtctagagtggaaccaaaacaggctaccctgccatactaccattaagctgctactagtttatatgaattgactttcctaataccaaaacccttctctaatattactagttcactgattaaaaggtattgagaaatccttctccaaattcgatagccatgtccacaatagaaaggatgcctcatccatcattttgttactatcataggagtcgttagagaagatgatcttattccgctgctgccaaacggtccatgttacggccagccaccaacatttccatctagtcatccttatccctccaaatgtgatgaagccatgttggaggaaatgttgccttgggtcttttgggtaagctccagagatattcatcttaaaattgtgggttttggcctttttagcctaactcaaccctacaaaatcgacttttaaagtgaggattgtctccccttattacacttcgcatagtgataaaatgataatacattagtaataacgaaactttgatggcaaacatacatagaaactataaaggtgtatggagaaatgcacatcacctttcaatgatcaacgagcgtatactagcaacaacttcatcagaaatatggagtccatcagttctgatatatgttatcagacccactgctataccatcagacagttcaactccctcgtagagcttctgtgcaagcttcattgtgtgacttgccgtgaaatgcaacttgtttgcagcatcttgctgaagtgtcgatgttatataaggtgtaggaggatttcttctacttttgctttttttcaagctaacaacatgaaaatcagctgagtttatagtgctttgactggt

SEQ ID NO: 2180 - DNA, 418 bp, Glycine max
  Clone ID: PAT_MRT3847_101974C.1
aaaaaaaccattttttttttttatggtttcgggttaaatgcccaaaaggttaaagtgggtaacaaaccccaaaaacttgaaaaaccgctggaaagagaacaaggccctctttaatgctgagcacaaaaattggaagggcaaacgaaaagaaggtgaaaccatttttagaagggggaaaaaaaaaacttgaaacgccaacgaatgcatttggccgcccgcacaagactgctttttgaaaaagggaagagctgtaaaaggtaacttgaccagaaacggccgtaagccggaaaaccaagagcctttcctggtttgggaacaaacccaaaacaagcttatgggagggggggggaaaccattttccgtgatatggcccgcggggtgaccccgcaaaaaaagaacggtaccgggaggtgcccca

SEQ ID NO: 2181 - DNA, 169 bp, Glycine max
  unsure (1)..(169): unsure at all n locations
  Clone ID: PAT_MRT3847_101975C.1
ttaatcaaagggtcatcaggattcggacaccaatatctcgaatnantcctntgttgtnnttggaagangaccaagcanaggaaangaaganananatcaattttngcnagcaacaatcttnnttcttcttcttntgcgccttttcttcgctnntcttgtctagaacana

SEQ ID NO: 2182 - DNA, 368 bp, Glycine max
  Clone ID: PAT_MRT3847_101976C.1
taaagattttatattttataaaaaaaaaataataacgtgggaaaaattaataaaatggtggggttaataaattatagataaaatggaaatatgagatatgtgtataatatgaaacagttattagagtatgattataatttgtaggattataatgatttttatgagattaatacttactaagttgtatcatattcttcttttcgaaagaagatataagagtattctttcaatcctagctgacaccattatgcaagataaagaataaacgcggagagagagataaatcttgtttttttactttcttaagaaaaccaaagtgcgattaagtttttgtgaaagtatccttgtgttaagaggtacattctttt

SEQ ID NO: 2183 - DNA, 505 bp, Glycine max
  Clone ID: PAT_MRT3847_101977C.1
ccacgcgtccgctattgcaagccttgtgcaaagttaataaaatcgaaacaatactgtggcatttgcaaaaagatttggcaccattcagatggtgggaattgggtatgctgtgatggttgtaatgtttgggtgcatgctgagtgtgataaaatttccagcaaacatttcaaggatctggaaaatacggattactattgccccgattgcaagggaaaattcaactgtgaatcatcaacatcacaaacatacaagtcaaaaaatatatcattggagactggcccaaaacctgcattacctgagaatctaggggtggtatgcaatggcatgaaaggaatctatattccaaatgatcatatgattatgtgcaagtgttgcttgtgtggttcaaggacgcatacacttactgactgggaaagacatgcaggttccaaagccagaaaatggagatatagtgtgaaagtagaaagcacaatgcaaccgctcaaagaatggatcgatgaacaca

SEQ ID NO: 2184 - DNA, 425 bp, Glycine max
  Clone ID: PAT_MRT3847_101978C.1
gccagagggttgaatctccagattacacaagcttatcctcaccaacttatataaggagctcctcatacagtgaaactggcacaagtgaccagacatctgagacagtagaggaggaagttcacagtacaagtaaaccatttggtattcccaatgagaataagttgaaaatatcagcatccaatgtagagagctcatctgaagaactccggaaatcttccatgggtgcaagagctacagattctgcaagagttatgaagttcactaaggtgctttcagagacaatggttaaattagagaaattgcgtggattttcttggaggggtgttccagattatatgcgtcctacagtgtggagacttctcttgggatatgcaccacctaattcatatagaacggagggagtttagaaaaggaagcgctttgag

SEQ ID NO: 2185 - DNA, 495 bp, Glycine max
  Clone ID: PAT_MRT3847_101979C.1
ggcttgcaacctttgggctgatttatgtgcttgcatggtcgtgagaagatgatagaagggcatcgccgtgagaagatgatagaagggcatggtcggcagaagatgatagaagggcatggtcgtgagaagatgatagaagggcatggtcgtgagaagatgatagaagggcatggtcgtgagaagatgatagaaggggactttacaaaaaatataagtaaacttcaaaaagcctatcgagacacacagaatcactcctaaccctataaaacgaagaaagcgcccgctatacccgcagtctcgtcagccgcacccgcctccatagcgatagtcctagagctaaagttattagctataataaacctagtattaaacgatcataaccgcctataagcgacgaacaatccgcccgccctgcgtgcagaccattctaccggcggagacgtccgcttcctaggcgcccgccgttaaagcgccaacgtagcgaaagtaccaata

SEQ ID NO: 2186 - DNA, 784 bp, Glycine max
  unsure (1)..(784): unsure at all n locations
  Clone ID: PAT_MRT3847_10197C.1
ccacgcgtccgcggacgcgtgggcggacgcgtgggcggacgcgtgggttgtgatcgctacaaattaagaagacttttaattcttcaaaaaaagtatagagatagtgcaagcatggcttcaaagcctggaatcctcactgattggccctggaagcctcttggcagctttaagtatgtgatactagctccttcggtcgttcacagcttgtattctatgttggcgaaagataagagtgaaagggacataaccaactttctcatattaccatttttgctctggcgtatgcttcataaccaaatatggattactctctctcgtcaccgaaccgcaaaaggcaacggtagaattgttgacaagggaattgaatttgatcaagttgatagagaaagaaattgggatgaccaaatattgttgactggattaacatattacttgtcaaactatatatttgctggggcatcacgtattccattatggagaacagatgcagcagttgtgacaatacttcttcatatgggaccggtggagtttctttattactggttacacagagcacttcatcaccacttcctctactctcgttaccattctcaccatcattcttccattgtcacagaacccattacttctgtcatccatccatttgctgagcacatatcatatttatttcttttcgcaactcccttgttaatccttgtcttcacaaaaacagcctctatgatgggcccgtgtttgggatatgtgacttacatttgattttatgaacaancatgggtcatttgca

SEQ ID NO: 2187 - DNA, 201 bp, Glycine max
  Clone ID: PAT_MRT3847_101980C.1
taggggtcgttctacatatacaacgttgcataaagctattgccaccacaaacatataagccccatcctctaagcgggagcaaatgctaaggtggctgattggcacctaaattacaagtaagatcgttcaccagagacgatgtgtatcctatgaaggttgcaaccttccttacagccatgatacaatccctgcaatccaatg

SEQ ID NO: 2188 - DNA, 277 bp, Glycine max
  Clone ID: PAT_MRT3847_101981C.1
cccactcgtccgcaaagagtttttatttaataacaaggaaatggctcccgggatggtctccttcccaggtgggaccaccttcaaccacacccgctccgtcatggaagctccattcaccccccttaaatccacagctggcttccccactagtaataccaacaattacattacctccatcgttagtaactgtacgacgagaacaacccatgcatttgtgacctccaattgtcattaacaaatccgagactagttcctacttgccagacctctattatgc

SEQ ID NO: 2189 - DNA, 613 bp, Glycine max
  Clone ID: PAT_MRT3847_101982C.1
cgaattcgagctctttacccggggatcctctagagtcgacctgcagaaaatacagtactattagtttttttaattacagccctgccactttactaatcattacacaataaataaaaaaacaattatgaaggaaggaaatgatactatgttcaaaattaggccaactgtatgtaaacactgttggaaaataattaatacaaaaagaataaacatatgctttcaaagaaatgatttatgacaaaaaaaaaggcttaaatatgcttaatgtccttgataaatgactgggattttgttttgggtccctaataatttttttctttgttttgaacacctaatatattaaaatttttattttgagtttctttcgtcagttaagtgatgtcgagacaccatcacaaccgttgataatgttgaaaagatcagttagctaggaaacacgtcatcacttaactggtgataggaaatcaaaacaaaaatttcaatagtattgtggactcagaacaacgaaaaaatctattagagacctgacacaataatccgtctcttctatcaaggagccttaaacattatttaagctgaaatagaaacgattatacaatttcgttatctattg

SEQ ID NO: 2190 - DNA, 184 bp, Glycine max
  Clone ID: PAT_MRT3847_101983C.1
cggctactgctttggaggctgtcagattttccccaacttgcgctacaccgagtagaccaccaccgataccttgttcatgcaagtggccccacttaatgctcaatgggacactgcttaaatgggtgctctcgctgagaacgatgtctgcatatgtggatctaactgcgcctgtatcccctgcact

SEQ ID NO: 2191 - DNA, 350 bp, Glycine max
  Clone ID: PAT_MRT3847_101984C.1
tgccacgcgtccggctgaaacttgggcggtatttatttttgatagattattgatatatgagatgcaattggcaaatttcgcaatgtgcatgtttggatcttttttggttctaggcttcaaacattatctagatttgatgaattaatcctcagagactgaagcatttgttgaagtccattgttaattgtgtatttcttattgtttttcttttttggcatttttatttttttaaattatcattcaattcgagagtgtcttgaatactcgacttgtatgaatatacatcatatttcagaagtttttttgtttttgaaaaaaaaatccaaaaagaagaagaaaacaaaaaatat

SEQ ID NO: 2192 - DNA, 478 bp, Glycine max
  Clone ID: PAT_MRT3847_101985C.1
gcgggggaatgtaaaaatttattgtactagcatcacaattcgggcccaaccggcacacattacacgacattcgttttatgtaaaatacatgcccctctcctaagctgaaaggatgactctttgaatccctgaatcactggtcaaaagcccacccaacccttgtgatgattttcaaaactcaaggaatccatatggccataaggtacctaaaatatcagccgcatacctcatggggcactaggtgatgggattaacaataacgcagttagcacaccggactgacaaaagtcaaagtgtcccattgtccgcaaatgcaaatatcaatatactatttgtgaagcattaggattctttttctggcatctcccattagcctaataaagtctgaaaattgatgccccctaagagtttctttaacacaacccagccctgagggattttcgcggccatgacgagcaaacagcttgtgaggaacctt

SEQ ID NO: 2193 - DNA, 186 bp, Glycine max
  unsure (1)..(186): unsure at all n locations
  Clone ID: PAT_MRT3847_101986C.1
cttgtaaaaaaaaaaaagaatgaaatggagttttttgaaacatcggaaaaagtagtcgtttatatgaataaaaaaagnttagaattattaatanctcacctggnntccactgctttctttgagcgaattccgagtggatcccaggtgagtnattaacgcttgcntttcaaaaaaaaaacaaaacaa

SEQ ID NO: 2194 - DNA, 480 bp, Glycine max
  Clone ID: PAT_MRT3847_101987C.1
acgagtagtatatataagaaattttccgactttaacagccagctttatgtgtgcatgttgtggcctaaatttcctcacattttcttgatatggaagctacttgattatggaggcacccttgttaccccctgtttctgcagatccaagctacacccttggagacatgtttatagaaaaaacacaaccatattagtgttccttgaaaaaccacaaacttatatatgtagctttattttgcttttaggtttcgttgataccagaacaactaatcgataatatggacaatcacttcacactagctacttaataagtcaagacttcggtgtttcaagcaacctatgcaagtttttttttttaatatatatatatatatatcagcgagcaccctatgcattgacctacaaatgattgcaattatactaaataaaatgtttgtgggttgtatataaaaaaaaaaaaaaaaaactcgagactagggta

SEQ ID NO: 2195 - DNA, 187 bp, Glycine max
  unsure (1)..(187): unsure at all n locations
  Clone ID: PAT_MRT3847_101988C.1
tgttgctcttggtgttgaatcgcaaacgcggntccgccatgggantagnggatgancgnnagatgctcactggctccgagaccccaaagnggangaagaggaaganttagtggaccccctgacaacagtgagagancactgtgagcagttggagaagtgtgtaaaagcccgggaacgactanagtcg

SEQ ID NO: 2196 - DNA, 456 bp, Glycine max
  Clone ID: PAT_MRT3847_101989C.1
aattcggctcgagaggctgcgagaagacgacagaagggcatcgattagctttaatgcccgtataaaaatatagaatatagggaagtcactggaaactcagaggaagaaaccaaggtagatccaaaaccaaggctgagtcattaatatatatagcatgtttcgcgcctccaatgttttaatcttttcaatagaaaatctgacatttagtctctatttaatttaccattgatgctgctcttatttttacaggattgcatattgtaaatagttttattaacccattgttctattttcatcaaccaaaagaactaactcggcaaaaaaaacccaaataaaaaggagacagacataagcgattatctcaaaggtataataacaatatatgttgagattcctagaactttgttaatgttttgcctgatttctatgccaatctgatactttttgggacttaaa

SEQ ID NO: 2197 - DNA, 695 bp, Glycine max
  unsure (1)..(695): unsure at all n locations
  Clone ID: PAT_MRT3847_10198C.1
aatttataaaaggatatgtttttgttctcttcaaaatccattcaattcttatctccttgctctaccaacttggcaactttatgtttttctttatccaccactatactaaaaaaaatatcatttctgattagctttcaaaaccgtatctatcctccttcctattaatttgcaacagtacgcatgtgcacatggcaagatatatatgaatgccagtttggccacttaatgaaatttggagcagcttattggaaaaacattcgggcctaaaagaagaattttaggtcaccctatatggtgaaagggacttggggatgtatatagttaacgatgaggtctagctatagttggggaatattaatttgcaaaatactaataatagtaaggggaacttcattgataatttgtttgaagatgtagattggattgttttagtagtgtagaatataaataacagaacttatgcaaactaatcccaacaagtaataagaacatatgcgcattattaatatttgcacttttgacaatcttgatgtagctactagctaagtttaccatgatatatcattagcttgaaaatcaacgtggcgactagggatagnaccataatttacattnggaacaacattgcatgcaaattaaactaagcgtactgatgacgtaaaattatactaccattcctatgggaaaattacaat

SEQ ID NO: 2198 - DNA, 643 bp, Glycine max
  Clone ID: PAT_MRT3847_101990C.1
ccctctcgtccgcacgccatgagctctgatccagaaaagcgggtgacaagcgaggtggtggaagacgatgaactctctcccatcgaggaggttcgtctcaccggaaccaacaccgaccacccgacccgaccggtatggaccttacggatgtggttcctgagacttctctcctgctccctactctcctttctcaaccagtgtcttcgcttaccgcacggtgcctctcatcatcacacaaatcacagttcatgtcgctactctccctatcggccacttcatggccgcgtttctgcccacaaccacgttcagcattcccggattcggttccaagagcttctccttcaacccgggcccgtttaacatgaaggagcacgtgctcattaccatattcgccaatgccggaagcgcattcggatccgggtcaccctatgcggtgggtatcgttaacattatcaaagccttttacggacgcagcatctcctttgctgcttcttggcttctcatcattacaacacaggtgctaggatatggatgggccgggttacttagaaaatacgtggtggaaccggcccatatgtggtggcccagtaccctcgtccaagtctcacttttccgagctttgcatgagaaagatgaccaccga

SEQ ID NO: 2199 - DNA, 1710 bp, Glycine max
  Clone ID: PAT_MRT3847_101991C.1
atttgttacacaaaaatcaattttttttttataatttttttgagtaatggcgtcagtagggttaacttgaaggtgaagcgagatgaaccagacacatccgttagtatttagtaacactatggcggttgagaagtcaaataagcccggaataaaaattaaaaaagtcatgataacaaaaaaattggaagagagagattaagcaggtggcgcccaaagagttaggtgtaccaacctcatagcactaataacacatatttgaagacgaatagaagaaagaaagctaattggaaaattcgtttaggaacacaaaaaatggcagatattcctcgggtgaagcttggaagccaaggcctggaggtttccaagttaggatttggttgtatgggcctaagtggagtgtacaacgatcctgttcccgaagaggttggcatctctttgatcaaacacgcattcaccaaaggggtcactttctttgattctgcagatttttatggagcacgtgccaatgaagttttggtcggaaaggctctcagggactttcctcgagatcaatttcagattgccacaaagtttgggattgtcaaaatggaaaatggtaatgtgatagtgaacggttcccctgaatatgttcggtcctgttgcgagggtagcctccaacgccttggtgtcagctacattgatctctattatcagcaccgtgttgacacaactgtacccattgaagacaccatgggagagcttaaaaggctggtccaagagggaaaaataaggtacataggattgtcggaagctagccctgacacaattaggagggcacatgctgttcatcccattactgctgtgcaactggagtggtccctttggactcgtgaaattgagcaagatattgttccactttgcagggaacttggaattggaatagtaccatacagcccccttggccgtggattttttggtggcaaggctgtcgtagaaagtatacctgcaaacagttttctggcatttcaaccaaggttacgaggggagaactttgacaagaacaaaatcttatattctaggatagaaaaattggcagagaagtatggatgtacatcttcgcaacttgctcttgcatggattcttcatcaaggagacgatgtggtacccatccctggaacaactaagataaaaaatcttgatagtaatatcggttcatgtgaagtgaaactcagcaaagatgatttaaaggagattacagatgctgtaccaatatctgaggtggcaggggatcggaccactgatgcatttgttagatgttcatggaagtttgctaatactccaccaaaagcataactatatataccagttatgcacttatgcaccttagatctcagatctttcttttcatctagtttcgtatctccttgcgtgctccaaaatttaatccgctctcaataaaactaattgccattggtcctatacggacaactcacaaaacttatgttgtatgcttaattatgcacatcttattaaataatgagagagtgagactcatctgaagccaagatatccatctttgtgtcgaatcatggttcccttcaatgttttactgattattttttagagaaaaaaaaaaaaaaaaaaaaaaaaaaaaaaaaaaaaaaaaaaaaaaaaaaaaaaaaaaaaaaaaaaaaaaaaaaaaaaaaaaaaaaaaaaaaaaaaaaaaaaaaa

SEQ ID NO: 2200 - DNA, 702 bp, Glycine max
  Clone ID: PAT_MRT3847_101992C.1
tacggctgcgagaagacgacagaaggggtctctatatatataagagacattataactttcattttcaaaacaaagaaattcattactttgatgattaagtattgttgttggtgctaagggtcgaaggttttaatcttatttatttaacattttgataatttatttttctattttgcatcacgttacaccagcatcaagtcaatgtcatgcataagaaccaccatgcatttaactcatttttctaaaagtcattttcttaagttgttcatgttctaaacaaattagttatcgtgagtgtaaaataaatacaaagttttttaggcaaatgttggcccaaattttcaaggcaatgaacaaaatttgtgtctatttaataatttaaacaatcattttaaaacaaaagatgatcaaaatatgtgaagaccaatataaatgaaagaacgtttctattgttttatttttttaactttatttaaattaataaaacagaattttagtcccttattttgttgtttttcaagtttaatcctcgagtttaaaatgttttactttaatttgttaaagtatgagttatactaaattggttattttgtcaaaatttatcacattaatttaactaatttggtgtagcaagacaaaaatttaaagatattatgtcaatcaaaacccacactattaatgcaaataaaaatggaagggctc

SEQ ID NO: 2201 - DNA, 462 bp, Glycine max
  Clone ID: PAT_MRT3847_101993C.1
ctcggaagctcgggcaaggcaagtggaagcagatgagagattggcacgtgaactccaagaacaactgtatcacgatgatccttttgaaggcagagggattgatgaagatttagcatgggacctgcagcgtgcagaggctcttatgcgtgcaactattgatagccacagcataagtcaaccgagacagcttccaagggcaatcagacagcctcgtacacggtttccagaaaatccttctagaaggagagctatggctcaagcttctttctctaatagaatgtcacagtggaggagtcgtgctacaagtcggactcgagcacctagcacatcatctagaggaagaggcccccggtttcctctggatatggacttagatatgagacttgatatattggaagctttagaggattcagtaggggatttcagtgatatgggaattactgatggcatctttaatgcacg

SEQ ID NO: 2202 - DNA, 301 bp, Glycine max
  Clone ID: PAT_MRT3847_101994C.1
ggctttacagtgcatcctttatgagctcatggacttgcagaaagacccaccaacttcttgcagcgctggtccattagctgaggacatgttccattggcatgtaacaataatgggtcctgctgatacttcttatgctggaggtgtattcctagtcactattcacttcctttcggattattctttcaagcctgctatggttgcctctacgactaaggtgcttcacctcgatcttcttttacattcggttcattggtcttgatatgctgatggagcagtagagctctgcttaaccatccttaag

SEQ ID NO: 2203 - DNA, 1395 bp, Glycine max
  Clone ID: PAT_MRT3847_101995C.1
gggcctgctgcgctgtgaggttattgacgtgggagatgggaacctcctctccgttaatgactcctttctcatgctcatggggcagcctgccccactgttcaccagatatccgctgaccagcagcgtgaggggtcactcctccgttggagttctcatagctcatcccggacctctcccttggagcatgaagcggctgatttgcagtccaccccaaggtttccacaaagctcttctggagagtgagctgtggatcacgatacttcctcggaagctctggcacggcaagtggaagcagttgagagattggcacgtgaactccaagaacaactgtatcacgatgatccttttgaaggcagagggattgatgaagatttagcatgggacctgcagcgtgcagaggctcttatgcgtgcaactattgatagccacagcataagtcaaccgagacatcttccaagggcaatcagacagcctcgtacacggtttccagaaaatccttctagaaggagagctatggctcaagcttctttctctgctaaaatttcacaaagattgtatcgatccttggctccagaggaaaacatcatgcccggtgtgcaagtcatctatcacctaattcattttggaattttagtggttaatggtgctgtagtttgttatctcagccacctcattttgtctttcaaagtaaaaagcaaaaaagttgaaattgtaataggcatgctactctgttctgttcaatcctttgatacattagatatttgaaagtgaatataaaggtatagaaaaatctgcaacttgttaactttcaatgtgctgatatgctgttactgttgtcttttgaattatgattagttctgcgacatgaatgatgcacgttgagaaaactgctctgaatcacggtgtcgtaattgaacttctactgttggtgctaatgaagagtctgcaaagcagagacaactctgaaggccgtattatttcttaagatagagatatgaccatttaggaatcctaatgttgaaatgtaaccaataacattgtaattttattttaattgttatttattttaaaactaccaatttttggaggagtcgtgctacaagtcggactcgagcacctagcacatcatctagaggaagaggcccccggtttcctctggatatggacttagatatgagacttgatatattggaagctttagaggattcagtaggggatttcagtgatatgggaattactgatggcatctttaatgcacgtcgtgatttcactgacgctgattatgaaatgctattggcccttgatgagggaaatcaccaacatactggtgcatcttccaatctgatcaatagcttgccgagtccaccatccagactgacaacttcacagatgcat

SEQ ID NO: 2204 - DNA, 754 bp, Glycine max
  unsure (1)..(754): unsure at all n locations
  Clone ID: PAT_MRT3847_101996C.1
ccacgcgtccgctttaggtgaagatccggtcttgtccacatatattatanncagaggcaggaattataantccgaaaaagaggcctgtaatacctgtcatgttgtggaagccccatgaacctgtatatccccgactgattaagacaacaattaatggcttaagtattaaggaaacgaaagaaatttggaagagaggactagctgttcctgctttaacaaaatttggtatgtgcatgcatcgtattgtcttatttcggttgccagtatgctttttgtaaacattattgactctgaagtgaattgcagcaataaacggttattatgcttttttggtacccatggtcagagatgtttgccatgtaattttcttttgttgcataactataatgaagaatgccttttcagcttgcatgattaggtgcctctatagaggttttaaaattaagtctgtttgggtattataaattagaatcacttttcaaatgggattttacaaagattcttttttatggaaattgtctgggtcctacttgttaaaaaaattgattttgaagtgttgattgtagggatttttttatattcctgtntggccaattagtttaattttctagaanagcgtggaaatcctactaccctcaatcaatcttatgatatatagatattacaaatttactttgaaaaaactactgaacagattggattgtttttcatatctattcttttttatggaaattgtctgggtcctacttgttaa

SEQ ID NO: 2205 - DNA, 181 bp, Glycine max
  Clone ID: PAT_MRT3847_101997C.1
gatagagtgtgaagactcctactaaccattactggctgcagcctatatataaagtaatgcgaggcattgcctatagcatacatgatatgtacagggtcaatggctcgacgtctataagaattacatggacaagacaatactcacgcgatgtaacaccatatatctaaacagcatctgtaat

SEQ ID NO: 2206 - DNA, 1287 bp, Glycine max
  Clone ID: PAT_MRT3847_101998C.1
ttcagggccccttccagtgttcgttccgctttccaaggagggtgccaatcggcttggacggtgcgtcttttgctcgcaggttcgaaagggaactgcctttaaaatgatttacgttttggtagccaagtttttttcttttcgccgttttttaatcgttaggccagtggtttaacgttgggcaatggaataaaaatacgagccgcgaaaagaaaggggttcgcacgcaagaacctggaaaaacggcccccccaccccatattgtcctcccttttttttatattgtctttctttttttttttttttttttttttttttttttttcgtcacgcgattaacatgttaactaaggagattctaattaagtgcaacatctttctggtacatttcttgtacattattacacaagactagcagtagcagataattcaaaggtttaaattacagctagggaaactacatttcccattctttttcactaactactagtactaggaattgcaataaccccgattacaaaccaacatattgaacaattttaagttatgccaacgagataaaaggattggagaaattaaagcataaggggctgctgcctgctggtttatgaggctgcaaatctaatttttacaatatggcaaatctaagaaccatgttttggactgtgatctagagatgtcttgaaccaggaatgtcaatccaatgcaactggagctccacttccccactctcaacatttcttagtctaagaaccatgttttggacaaccttgccatccttcaacattatgtgactctcttcagctaaacagttttgtctgctaggtagcacttttgtaactatagtattgttggggagacctgacaagcgcatcttcactgcttcaataaatggacctatgaaaaactcagcatcccccattttgtcatccatgctaaatgtgtccttgtcatacacatgtagatgaattggagcatgagggtctgaaatagacaaggtcaagtcatcattccattcaggatttagattcttcttgactacccgagtcttcagcttctgccttcccattttgatgacaacataagggtcactgctcaccacatccctgatggcaagattgacacctttttcaacatgaattctcagcagacccaacaagttctccatggaaagaaaaaaaacactatgtgagggaatgaaatgaagcaaaatggattttcaatacaggacaagtggctccaagggacctgtatgagtcaaccaaagtggttgcagctatttataatctgt

SEQ ID NO: 2207 - DNA, 929 bp, Glycine max
  Clone ID: PAT_MRT3847_101999C.1
aacatgttaactaaggatgttctaattaagtgcaacatctttctgttacatttcttgtacattattacacaagactagcagataattcaaagtctaaattacagctagggaaactacatctcccattctttttcggtaactactagtaattgcaataccaacgtattaaacagtttttatgttgtgcgaaagagataaaaggataggagaaattaaagcataaggtgctgctgcctgctggtttatgaagctgcaaatctaattttcacaatatggcaagtctaagaagtaagaaccatgctttggactgtgatctagagatgccttgaaccaggaatgtcaatccaatgcaactggagctccacttccccagtctcaacatttcttagtctaagaaccatgttttggacaactttgccatccttccacacgatgtgactctcttcagctaaactgttttgtctgctaggtagcacttttgtaactatagtattgttggggagacttgataagcgcatcttcactgcttcaataaatggacctatgaaaaactctgcatcccccattttgtcatccatgctaaatgtgtccttgtcatacacatgtagatgaattggagcatgagggtcagagatagacaaggtcaagtcatcattccattcaggatttagattcttattgactacccgagtcttcagcttctgcttgcccattttgatgacaacataagggtcactgctcaccacatccctgatggcaagattgacacctttttcaacatgaattctcagcagacccaacaagttctccatggaagaaaaataaatgtgaggaatgaaatgaagcaaaatggattttcaagacagaacaagaggctacaagggacctgtatcccttctgtcgtctttcgcagccgtcggacgcgtggg

SEQ ID NO: 2208 - DNA, 571 bp, Glycine max
  Clone ID: PAT_MRT3847_10199C.1
acacaaaaaaaatacttctccatcaaataaatctgaacctaacggttccttattactttaattctgcttaaaatcacatacctattacacatccaccactcactttcttatctaacccatgctcctatattcatttcaatctctgtaaaagctaacgatacacattctttttcccttaaaaattaccatcacacattactcatgtaaccacttctacctgtattaactttcatcccatccaaagttaactctaattctccaatgacttttgatattttatccaaaacctgtacttatagtccacaatttaaaaccatcttgatccctaattactccttctacaaaataggttctttattacaaagctatcctcaaaactacaaaattcttgccaaaacctcttaactttaacttaacgtatccctccaacaaacaatatctcttaacataaaaatttactaccattttaattaacactcttggttacctaccttcttcaccattcactatgtaaaattttaccttaacaatctttttacccaacttaaccatccttattcttaacactccc

SEQ ID NO: 2209 - DNA, 303 bp, Glycine max
  Clone ID: PAT_MRT3847_1019C.1
accagcatggcccggcacgtgttcctaacggggcccccaggagttggaaaaacaacattgatccataaagccagtgaggttttaaaatcctctggtgtgcctgttgatggattttataccgaagaagtcagacagggagggagaagaataggattcgatgtcgtcacgttgtccggcacccgggggcctttatcgagagttgggttagagcctccacctggaaaacgtgaatgccgagttgggcagtgtatggccgaccagccatggttgaaggaggaagaagaaaccaaagtggaacgagca

SEQ ID NO: 2210 - DNA, 375 bp, Glycine max
  Clone ID: PAT_MRT3847_101C.1
ggccggacaaatcgatttttggggaagttgtttttacaaattttttcagtaaattccattttactgaaacaatttacatttgatttctttcaattttgaaatttatttggtaaaaaaaaattttaaattccttttggccgggattggcccaaatttaaaacctaccctttgcgggggtttcccttttaggaaaagattatttgtctggatcaggggtaaaaaaccttcgacaagcttaaaaaacattttattggaaggcatttgggttgtaaatgaacccaaagggcccaccttggggaatcctgatgatttcccatgaaacctttatatgcttgcgagcttttagagccgatttcaagtttacttccggtgctt

SEQ ID NO: 2211 - DNA, 292 bp, Glycine max
  unsure (1)..(292): unsure at all n locations
  Clone ID: PAT_MRT3847_102000C.1
ccacaaatttnaaactttacttactganacaaaaaagtgctttttgcctatgttatacagcccnngtacccaaaatatttattaaatataaatctctattcatccaacatatgaatgtaagtcggaccttcctatcataatgaaccaattatcaaaaacgacacaaagttacattactagaatgtgggccatactacaaacatattcttaataccatatgttattcgccagtttatcctgcctctacatcctgtttactaattcttataattttcttgataagtacaaattt

SEQ ID NO: 2212 - DNA, 725 bp, Glycine max
  Clone ID: PAT_MRT3847_102001C.1
cgaggtttctgcctcaatcctctaatctcctctctcccctctcataacacacgagagagagagagattgtgttgtgttgtgtcatgttaaatgcaaagtcttcttctcttcctctcgagtttccccctttcagaaacccaaggcacatgaaatggaaatgaaaatgcaaccataataacctccatttttctccctacaacccacaaaacaaaaaccaccattaacccatttctccaaaaacttgagatcttttgtgtcaaacaaccacaagtcccgcgtcgaacaaataaaagcaaacaaaagggtatataaagatagagcgattgagtccaattaaaaaaaaaatgagagacatagtttcttgtttcagtgagaacgcagtgaacgtttctcactcttcaatctcgggttcttcctattcccacaacgcgtgcctctctccctcctccattgttgtaccctccccccaaaactcaatctccagcgtctacaaactagtcctctccacgctgaagcaagttctcgtcgcggtcacatggtgtaggagccactaccaaccaaggactcaccataaccttcaacgacgaggaccctccacttttcagactcaacaccaattcacgcttcttcagaaagaaaaaaggctccaaaatcctcgaatcttctgactcatcatcatccaaggtagaaatcttatgggatctactcagcgccaagtacgaatc

SEQ ID NO: 2213 - DNA, 1272 bp, Glycine max
  Clone ID: PAT_MRT3847_102002C.1
ggtcaactttaattacaatgagttatccgtcactctcattccaattcgcaccattactctcattttctcttacagcattatccttgccaccattaccggtcttttcgaagcgttactctccatcatcatcttcacctatccccaaagccactccctctcacttattgtcactgttgggttccaaagcggagtcctcagccgtgaatcccgtggtagcacgcggcctcaaatcatgcttcaaattcctcgttcctttctctccagtgcagcctcgtcaccggaaattgggtttgggcctgcccaaactcactgtcccaagtcagagagaggagaacgagcttatttggtggccgccagagcccgttttggagctggcgcgtctcgccgtcgattctggcggcgaccccgccgctattcatcgccttcttgacccaaccattatcccgcataggtacctgattgtgaaggatcaaaggatgagcgctgtgagctcactagaactccctatggcagacgcttcgtttgtgaggaactgaacctgtatctgcagttcttgtttgaactcattgttgatcgaggtccatctgttgggttgggtgttaccttgaaccggtttgatctgttccacggtcacctttttctagcgctagactctggaagacttggtatcttattccatgcgaaggaatacccagcatatgataaacaagtgttcccatacaatatgggtttttgtcagagagggtccaatgtgacatatgatgattcaatgaatctgagaaatattctctggctggctccaatgcctggcgattctggtgaatcttgggtggcaccaggtgttctggtagtgctggatgctcgtcctgatgggatcatatatagagacctaatacctgattatgtaaattttgcaaggactatatatgaagatgatcttggggatgttgctgttgatgtgaactacttgaatgttggatctgaaaccagaaattatcaaatattcatatgctgatgttgtgctgaagataactatgacgtactttcacttcccaacgatacaccagcttatataaatgaagattgccgaagcttaaacgaataatgtatatgccaatttcatttgtagtgaagattgcatagcatatttcttccagtatgatagattactcgatagctatatgtcaggtactgtatatgctcgtgcaattattggctaactttatgcaattccatgccattataacacaaatttcctaaaaaaaaaaaaaa

SEQ ID NO: 2214 - DNA, 305 bp, Glycine max
  Clone ID: PAT_MRT3847_102003C.1
ggcaaataaaatacgtcatgccaagtctttattactagatcaaggctctgcccatttcacagtactactaataggacgtgaccttcagaaccccatgaggggccacaccatatagctacaaacgagtcacttggtgcagctttcatcacgaaagaccttagtccaattctaacgttagagccgccaccaaggcccccctgaaaccgaagttatcaccggaataaaataccgggtttagaattggatgtattccacacttgagaagagcccctattttttttctctttttttaaacccaaaacccc

SEQ ID NO: 2215 - DNA, 441 bp, Glycine max
  Clone ID: PAT_MRT3847_102004C.1
ggctcgagctagttctagatcgcgagcgaccgccctttttttttttttttcattctctgcacactttattatgtacaaacattgtggattacagacacaataaacatgatcaatcatttatactttgtgtaatcttgaagctgacaacattcatagtattgacttcagattaattaagccaagagccagaaatctttgtgacgcttagtggtaatcatgtaccctccactcttcttgctttttcttctcacagcaattgccatgcaatgtgcattctgaatgcagtactctaccaccccacctgtgactctatgccctgcccacatcatcagaagacgccatgttgtggacctcttcttctgccccaaaactagaagtgccacaccttgtttttttgcctcctccactatttttggacccttttcctttccctctattact

SEQ ID NO: 2216 - DNA, 122 bp, Glycine max
  Clone ID: PAT_MRT3847_102005C.1
tccggcctgcccataagacgacagtaaggggcgataatcttcacacgcttgatctatattaatactcatgctcatacacaaaagttctttaagtgacgagagtccatctaactggaggcatg

SEQ ID NO: 2217 - DNA, 1880 bp, Glycine max
  Clone ID: PAT_MRT3847_102006C.1
cgtaagctcggaattcggctcgagcttcatacacatcgaaagaaaaaagaaacaataacaactaaacaagcaccataaattttttaaaacctctcttctttcttctccatcgctgccggagaatgaacattccggcgaccctaacttccccgtcgatgaacaatgctcgtctctccgaccaccgtcgccacgtgttccacgaaaacactcacctccaaaaaaccttcactcccttagcctagaagaaaaaaaaaaaaacccgtacataactacatataatccctctttaattattttttcctttttctctttttttttaacctttcctctcttaagaacacgccgaatccgttattattgactggtgtaggaagtaggaacgatgaatgtgtgttgactagggtttttcccgttttgtggacaaaaagaattagaagctctgagaaaaaaaagcatggctccgatgaaggttcagccaattgcaattgacatcgattccgagaaggtgaccgcggcggcgacggcggcggcggtggtggttcggaacgagtcggtgctgaagtcgcgcctgaaaagcgtcttcgtccgccaccgcccgttaaacaacaacaaaaatattgcagaattcgaaccgagctcggtgtgcttggcgaaaatggtgcaggtgcaaattgaggtggaggagcagcccaccggcgccaccgaaatgtggtcgcaaccgctgcaactgcttcaacgccaatagctccgacgaggacgatttcgacctcttcggtgctgcaccggcaccggaatcatccaacgccgacgccactgaatcactcaatcaagagcttgatcccctgcgcgagtgtcggcgagaggaacctgctagctgacgtggcgaggattgttgagaaaaacggcaagtcgtttaagcgaaaagacgatttgaggaaggtcgtcgcagaagcactttcctctctcggttacgattcctctatctgcaaatcgaagtgggagaaaacttcctcttgtcctgctggtgagtatgaattcatcgatgcgattgtggaaggggaaaggttgattgtcgatgttgattttagatctgagtttgaagtagcgcgatcgacgggaacgtacaaggcgatgctgcaatcgctgccgttcacctacgtcggaaaatcggagaggctgacggagatcgtggcgattgtttccgaagcggcgaagcagagtctgaagaagaaagggatgcacgttccgccgtggaggaaacgcgattacatgctcgcgaagtggctctctccgtctagtattagggagaaggagaaggagaacaagcaacccccgtcctcctccgtgcaagtcgccgctgccgccgccgcgccggaaacggtgtccgatggtgatgcggcgtcgactacggagagcgattgcggtgagttggagctgattttcggcggggaaatgtcgccggagactgagtacggcgaggctaaagcggagtcggcggtggcgacgaagccggcgtggcaaccgccggcggtgaagccgaagagtgttgagagagggactaaggttgtgaccggattagcctctcttctcaaggacaaaccatagaacaacaaaaagttttgttatttttttttttttaattctggatttaaaaaaattaaaatataaagagaaaatatcagatgaggctatcctcttttttcttttttcttattaagtatttttgttttcccttcttttgtttgtaaggggaaatttgtaagaagtgactcttttttttttttaatttttggttcacaccaatgtaagtgtaagaagctgctatatgttttgtaataaaataaaaatagctgaaattaagaaaaatctaaagttgagag

SEQ ID NO: 2218 - DNA, 452 bp, Glycine max
  Clone ID: PAT_MRT3847_102007C.1
ggattcttatattttttgtttttttttgtaattttgtattttttttttttttttttaatttttttttttttaaaaaagaaaagaggttggcatttttttggtccaggggaaacccggggggccttgggaaaccctaaaattccacaaaagattcgagcgggaaacatttttttcaaaaaggggggcggaaaaaagggggggaaaaaagaggaaatcaatggggcggaagaaaaaattttcatccggaaaacctgccgaagcaaatttcattaataaaaaaaagggggaaaggggggggggcgtaaagggatagccccccaaaaaaagttggtagcccaccagggccacgggccacaacaggaaaacctttaacacctggccaattaaaaagttgcaaaaacgcgggggggggggttttttttaatttggccaaaacctgttatttttttttt

SEQ ID NO: 2219 - DNA, 304 bp, Glycine max
  Clone ID: PAT_MRT3847_102008C.1
cccacgcgttcgaaagaaacagtgtttcatcattagggtttcgcagaagagagagaaacccagggctagggagagaaactcgcagtcgcagacatgtcttccttcgatgcctatcacgacgacttgaacgtcaactcttcttacactcgccagcactacgatgaccatgacaacttatatggctacggcagctactcctgcttcaccggaggattctacgacgacggagatgtcgccgtcgatcactacggcatcgcgtacccggagatctacagattcactgattcgaatcccgcttactctc

SEQ ID NO: 2220 - DNA, 300 bp, Glycine max
  Clone ID: PAT_MRT3847_102009C.1
ctcacgcgtacgctgatgctgtgggaaagttggctgccatcatgaaaatatgccgctcatgagagcatatatttaaagaccatcttgatggcttgccgactgaacgtgataaaatgtataatgtctttgacaatcacatcgccgctgcttaaaaatggttccaatgacattagcacctttcaatggaatatataaagtaacttattactgaatctgatgggtatcaaccacatcttatagctccagaacaaggatatcgatcgctaatcgaatcttacctaataactattatgggccctg

SEQ ID NO: 2221 - DNA, 486 bp, Glycine max
  Clone ID: PAT_MRT3847_10200C.1
tttctcgtggaatcttcttacattggatcggaacaatattgttgccatttccagcagtccagttgatgtctcgagccgcaagtatggaatggccattgagaaggcaacaagcaatactacatggagttggtcaaatatatccagccccatattcagatgctcagacaaggtggtatctttgttgtcctctctccagtgcagtatactgagtatctcagtcaaggatgttcatgatggtcaaacaaaaggtgctactaaacattttgaagctatatttgtgacatctaaaacgaagaacaaggatgtatttgatccattaattgtgatccttcatggagggcctccgattgtctatttgtcacacttttcaaagtatttggcttttcaatcttcagctggatacagcttgctaattgtaaattacagaaggtccgttaggatttggtgaggaagcattacattcttttccagggaaagtatggtctc

SEQ ID NO: 2222 - DNA, 287 bp, Glycine max
  Clone ID: PAT_MRT3847_102010C.1
aatggatcttaaagttttcttataaatgtcgaggcacgtttttaacacgagtacctccgtccagctgtagtggtctgggatcaagtgggatactaccaatcttcaaaagacccgaagactcggcaaatgcattaactttgacttgcagttgagcctactgggataacatcgagcggatccttattagcagcactgatgccagatggtgcagtctccgcctgttttggggtaatagtaactgagccgatcttaaggtcaggagctagatgtcccttctaaaaagaacc

SEQ ID NO: 2223 - DNA, 249 bp, Glycine max
  unsure (1)..(249): unsure at all n locations
  Clone ID: PAT_MRT3847_102011C.1
gtaatagcctggtaactattgcaaacaagcaatgggancaactgtgttgcattcttctgcaagaactggctacttggaggttgtcaaggcccttgtgngcnaaganccagannttgcaatgagnnttnananaaaggggcagacagcantccatatggcagttanaggacngnatcttgagcnggtggatgagctcgtganattgaatccatctttggccantatngtggatgccangggaacgtngca

SEQ ID NO: 2224 - DNA, 1040 bp, Glycine max
  Clone ID: PAT_MRT3847_102012C.1
cggctgcgagaagacgacagaaggggaaggaggtagttggtgttgttagttaatagatgatagcaggagatttgaagcaaaaattgagcataaaatgtttataattgtttccacaacttccacttgcttgcttttgaataactcagcttcttcacccttgcttctgtcttgttgtatcgattcagttaaatatggctcgtttgctcttcccaagtttgaaagaagaagaagaagcaaatggagagccgttgatgggagtggcgagaagcaatcagctgttaccgtagcagcaactaccacaagtacttttgatgatgataacgacgttgttgactcagcttcagctgtgttgaagaatttctatggaggaatcaatgcgcatgacgtggattctgtagagtaccttatcgctgagaattgtgtgtatgaagatcttgtctttccccgaccctttgttggtcgtaaggaaattctagagttcttcaaaaaattcactaattctaccagcaaagatctgcagtttgttattgatgatttgtctactgaggactcctcatctgttggggtgatatggcatttagaatggaagggaaaaccttttccctttagcaaagggtgcagtttttatcgtctagaggtgatcaatggcaaaaggcaaataacatatgggcgcgactgtgttgaacctgcaatcaagcctggggatgcgactttggcagcgatcaggagtgtaacatggctactgcagcaatttcctcagttggcaaactggttatagtgaaagattctacattattttggaagcgcataatgtgcctccttttgcccttacaaaattagtctttaaaatttgatcgtagttggattgtataacataaaactattgcacggcaggtgaaagtgttgtgtgtgtatatacaagatatgggacatatgtgtcaggatgaattgacattatagctgtcaaatttttacacttatataatagctttttgtttgaagaagaaaaaaaaaaaaaaaaaaactcgagactagttctc

SEQ ID NO: 2225 - DNA, 450 bp, Glycine max
  Clone ID: PAT_MRT3847_102013C.1
aggaaataattcctaaagtagaggctttatttacattgaacagagttaagtacaaagtataaacactcaactcttagcctctggcaaataaacggccatattaataattcctaaagtagaagcctttatttacattgaagagagtcaagtacgaacactaccaataaacaacttagaaatgctactgctaagatacaagatcaaacaacacacagacatttcaaccgaaaactaccatacccaagagaagttgatcgtgtttagatgttgggtaaacttacaccccaaagtgtcatgagatgagtgtgaaaacgagacgaatagggaaatgaaagagaaagtgaacatttgtttatatttatttttagatgcccatgaacgccctacactgcgtttcccagtgctccttaacttgcttaaccctttctaccctcttcatctgaagccttt

SEQ ID NO: 2226 - DNA, 1187 bp, Glycine max
  Clone ID: PAT_MRT3847_102014C.1
ccacgcgtccgattgcattaagttacaaattttgatcttttcctcttgtcaactatttatgttatttccatcttcccttgtgcacattcattttgttttgcaatattactaaaaaacagtgtatgtaataatttgattgttatgttgagatttgagattacttttgcattccagatggatcttggggttggagcatttgttttggcaaattcactagtttctcggcaagcacgtaatatcacatcggtaagctggaagactgcaatagtttcaactagtccactgatcatcttaggatttcttcgtcttgttactacgactggtgtggattatcaggtacatgtgggtgaatatggtgtacattggaatttcttcttcacacttgctgctgtgtcaatccttacttcctttattcagatttcccctcaatattctggagttattggttcacttgtactagtagggtaccagttctgcttggtgcaaggtttaaatcattacttgctttctaatgaaagaggaatggatatcataagtcaaaacaaggaggggatttttagcatatttggatactggggaatgtaccttcttggtgttcatttgggaaactatcttatcttcggaagccattcctctggatttagaagtagcagatgggtacggatgagggtttgggttctctccatcctgttttggttattaactgtgcttctagacaggcatgtcgaaagaatttctcggagaacttgcaatcttccatatgttactatggtagtggctgacaatctacagcttatgctgtctcaatctgtaccataacccaaatttcccagcacggcactcttgagttatccttgacattctgctatcaattctaatgctagccgatcttgttcctggaagtaaaacttcaatacttgaagaagcattcaatcggaacctactggctacatttctactggcaaatattctcactgggttggtaaacttgtctgttgataccctctctgcgtcatcaatcactgccttttttatcttgcttgtctatgcttatgttttatcaattgtaattggtattgcagattattttggtattaaattaaaattttggtgatgcagtcaattgctatgctgcagtagtatgttttgttagtgttattatttattttaaaagaacgtctctttaa

SEQ ID NO: 2227 - DNA, 262 bp, Glycine max
  Clone ID: PAT_MRT3847_102015C.1
aggcgtcagtacaggtgagaaagagaacagaacgggattcacataaataactaataaagtcttccatagcccctcataaatgaggagattatcatctgtgctctcgtactcattatgtgacttcataagcacacaagaatgttcagccaacgctgaatgcgtgcgccataatgatggtggtactcatgataacggggtaagacagtagatcttgtgtggcataacagcatttggtggaataagagcaactgagctggaaatg

SEQ ID NO: 2228 - DNA, 488 bp, Glycine max
  Clone ID: PAT_MRT3847_102016C.1
aaaatgtaaaattggaaaactcttttttgaaacccgggggcccaaaaaaaagggggaaggggaaacctaaagtgccttataaaaaaactggtttaaaaaaaacctgcccccccccccccccaatttaaaataaaaaaaccccccgcccccaattctttaaaaagattttttttttaaaaaggggagaaaaaataagggttttaggtttaaaaatttcctccaaaaaaggggagagatttacatcaaattttttaatttaaaagggggggggggaaaagaaaaaacgtttttttttaaaagaggggtttgaatttttaataaaaatttaattgggggtccaaaagggccaaaaaaacccccacctgaaaccccaattttcccttggggcttcttggaaagacgcgggggttcccccggaaaattcggaacgggccctgggggggaccaatttttttttattagggggggaaaaaaaagttgggggaaaa

SEQ ID NO: 2229 - DNA, 380 bp, Glycine max
  Clone ID: PAT_MRT3847_102017C.1
gcttggatggaattgaactttgaatgaggcatttaatttttttgaaaaacttaattgaaattaactttaggcgggaaaaaaaaaacactgttttcaaaaaaaaaaaaaagagcaacaccccggggaattatacaataaaagtttggggaaaaaaaaaaatcaaaggcccaaaaaattttgagggggcaatctaaaaaaaaaaaaaggggggaaaattttccaaaaaaatggggggcccacccctttttaaaaaacggggttttttcagggggccgggggtggacccgaaaattcaggacggggcctcggagggaaccaagttttccctatgggggggcaataaaaacctgggggaaaggagggaaaaaagctgtcccggg

SEQ ID NO: 2230 - DNA, 240 bp, Glycine max
  Clone ID: PAT_MRT3847_102018C.1
tccggctgtgagaacggacagaagggcagtggggtgaacgagagaacccttttggctcttgcattctgcgcttaattcctatggaggtgcttcaaagatcaagggcctatgcaaatgggcacatgaagcatattgagagcttctatggagctcctaggccttatgattttagtcttagaacttatagtgcttttttatgcacaaactcaatttggttcttttagggaccttgtaatttga

SEQ ID NO: 2231 - DNA, 478 bp, Glycine max
  Clone ID: PAT_MRT3847_102019C.1
acggctgcgagaagacgacagaagggtaccctcatcggtgccaccattgggcttttcatcccaatagcctacattttcgagggtgtttttgagggtgacaaggaagggatcaaggcagcagcaccgcatgtttttctcttggccagccaagttttcatggaaggagtggcatcatcatcatcacaaaggttctcggctccggttcgagcttttgttccagcattctacaatgcaagaaggattttcaccattgtggattggcttaagagtgaggtctataagatagatggcgagcacagtgggtctgcttggaagattcatgttgggagagcacttgcaatggccaatatggcctactggtctttcaatctatttggattcctgttgccagtgtttcttccaaaagttttgaagctgtattactcgtctgagtacaatgacaaagaccgatgaaggaaagtttgtatgcttactcttg

SEQ ID NO: 2232 - DNA, 2982 bp, Glycine max
  Clone ID: PAT_MRT3847_10201C.1
atggcgccgagcaccggagacgtgcaactaacttcccccggcgccggccaagatttcgacgacctcgaagacattcgcctcctcgactcctacgacaaaaacgacgtcgtccacgatgaaaccaaacggattcaggtcagaatctccggcatgacctgcgccgcctgctccaactccgtccaaacggctctccggtccgttcacggcgtcaccgaagcctccgtcgctcttcttcagaacaaagccgaagtcgttttcatccccggcctcgtcaaggatgaggatattaagaatgcgattgaagacgcaggtttcgaggccgagatcttgccggactccggcgcggcggcgcacgctgccgcctccgccgccgtgttggggcagtttactatcgtcgggatgacgtgtgcggcgtgtgtgaattccgtggaaggcattctgagaaacctcaacggagtaaaaagagcggtggtggctctggccacttcgttgggcgaagttgagtacgatccccacgtgattagcaaggacgatattgtgtctgcgattgaagacgcgggtttcgagggcgcgtttgtgcagagtaacgggcgggaccagatagtgttaggggtgagtggcgtgtactctcttggtgatgctcaggttctggaagcgatgctaagtggcaccaaaggggtgaggcagtttcggttcgatacggcagtgaacgagcttgatgtggtgtttgaccctgaagttatcagctctaggtcgttggttgatgggatccagttggggagtaatggcaagtttaagttgcatgttaggaatccttacgctaggatggcttctaaagatggctcagaaagctcggctatgtttcgcctttttatttccagcttgtttctcagtattcctctcttcttcatgggggtgatttgtcctcatataccattggtttactctttattactttggagatgtgggccttttctcatgggtgactggctgaattgggcgttggtgagtgtcattcaatttgtgattgggaaacgcttctatatagcagctggaagagctcttagaaatggttcaacaaacatggatgtcctggttgctttgggaactacagcctcttatgtttattctgtttgtgctcttctgtatggtgcccttacaggattttggtctccaacatactttgaaacaagtgctatgcttataacatttgtattgttgggcaagtatttggagtgccttgccaagggaaagacctctgatgccattaagaagctagtagaacttactcctgcaacagctttattgattgtcaaagataaaggtggtagaactattgaagaaagggaaatagattccttgctcgttcaacctggtgacacattaaaagttcttcctggtacaaagattcctgctgatggtattgttacttggggctcaagttatgtaaatgagagtatggtgactggtgaatctatacccgtttcgaaggacgtcaatgcatctgttatcggaggtacgatcaatttgcatggtgtccttcacgttcaagctaccaaagtaggatctgatacagttttgagtcagataattagtttggtggagacagcccagatgtccaaagctcccattcaaaagtttgctgattatgttgcaagcatatttgttcctacagttgtggtgttggcattattgacactattgtgttggtatatagctggggctcttggagcataccctgatgaatggctgccaaaaaatggaaatcactttgtttttgcccttatgttttcaatatctgttgtggtgattgcatgtccatgtgcacttggtttggcaacaccaactgctgtcatggtggcaacaggggttggtgccaacaatggagtattaattaaaggaggagactccttggaaagggctcagatggtgaagtacgtcatatttgataaaacaggcactctaactcaggcgaaagccactgttactgctgctaaggtgtttgcaggaatggaccgtggagattttcttacattggtggcttctgctgaggctagcagtgaacacccactggcaaaagcaatatcgcaatatgcgcgccattttcatttctttgaggagtcttcccctaccagtggtaccaagaatgctgctgaggagttcaagtcagggtggctttatgatgtctcagacttctctgctcttccaggaaggggcatccagtgctttatagacgggaggcgtattttggtaatgtcttttgcatatcctaaacaggttggtaaccggaagctgctggaggaaaatggcataaatatttctacagaagtggaaagttttgttgtagagattgaagaaagtgcaaagacagggatactagtagcatatgatgatatattaattggagtcttagggattgcagacccactaaagagagaagctgctgttgttatagaaggcctacagaaaatgggagtcatacctgttatggttacaggagataactggagaacagctcgagctgtagccaaagaggttggcattcaagatgttagggcagaagttatgcctgcaggaaaggctgatgttgttcgttcattccaaaaggatggaagtatagttgcaatggtgggtgatggcatcaatgactctccagcattagctgctgcagatgttggtatggcaattggggctggaacagatgttgcaatagaagctgctaactatgtgctgatgagagataacttggaagatgtgatcacagccattgatctttccagaaagacctttttccgtattcgattgaattatgtatttgcgatggcttacaatgttgttgctataccagttgctgccggggttttctttccttctttggggatcaagctgccaccatgggttgctggtgcatgcatggctctgtcatctatccgctgcacccattggggtgcaattgtaattgtagctgccaattcattgtaa

SEQ ID NO: 2233 - DNA, 557 bp, Glycine max
  Clone ID: PAT_MRT3847_102020C.1
gagaattttaggtctgttttttgcttaataatgtttagtatggtttccctaaggtttatacaaataacacatgtctcctctctgttttcaaactatacaaaaaaacccctaattgttcattgtttgttacatagacctcccctcccttactaacgatgttaactttgaaagcagacacatattacacatgtgacttctaatgattttctctttccaaaattatcccctccttcaaccttctaacaactaaaacatttgaaaaaaatgaagcaagatcgtggcctacttatgagttggacaaaaagatcatggcttgtgtggctacctttgggttgcacacaaagatcgtcgaacctgaagataaatcacggtgctagcttttggttattaggtgaggttttgttttttattttttctttgttaatgttgttgggttgctaggttgtggagcaggtgttgtacaatttataattttttgttccccttttatgttttatgtggttgctttgtttagttgaatttttttttttgcttccttatgttgtttcaaatttttg

SEQ ID NO: 2234 - DNA, 1532 bp, Glycine max
  Clone ID: PAT_MRT3847_102021C.1
cgcaatgaccaagaacaacatgaattttctaaccttcgttactgttctactcttcatactaccagcaacctcatcttcccagtatttggggaacaaccttctcactcatcgcaagatattcctaaaaaaagacaacattattacctcgtacgctgtcatctttgacggtggtagcacaggaacccgtgtgcatgtcttccattttgaccagaatttggatctccttcccattggtgatagtcttgagcttaataaaaagatcacacccggtttaagtgcttacgaggatgatcccgagcaagctgcagaatctctgattccacttttggaggaagcagaaagtgtagttcctgaggacttgcgtcccaacacacccgttaggctaggggcaactgcaggcttaaggcttttgaaagggaatgcttctgaacaaatattgcaagcggttagggatatgctgagtaacagaagtaccctgaacctacaatctgatgcagtaactattcttgatggaaaccaagaagctgcttatatgtgggtggcattgaactatctattgggcaatttgggaaaagtgatttcaaagacggtgggagtagctgatcttggaggtggatcagttcaaatggcatatgcagtctcaaagaatacagctaaaaatgcaccacaaccaccagaaggagaagaatcatacataaagactcttgtacttaatggaaaaacttatgacctctatgttcacagttacttgcactttggtaaagaagcatctcgtgcggagatgttgaaggtcactggtgattcagctaacccttgcattttagccggttataatgggacctacacatattcgggagttaaatataaggccttggcctccacttctgggtccaatttcgataaatgtcgagaggtagctcttaaagctctgaaagtgaatgaaccatgccctcatcagaattgcacttttggcgggatatggaacggtggaggggggagtggacaaaaagtcctttatgttactacatctttctattatctggttatacaggctggtatagccgatgcaagtaaaaccagttccaaagtttatcctgcggaattcaaggccgcagctaagcgagcgtgtcaagtcaaatttgaggatgctcaatccacttatccacttatgatggaggatgcacttccatacatttgcatggatattacgtatcagtatacgttgctcgtcgatggatttggcctggatccttggaaagagattatagtagcaaatgaaattgaataccaaggtgctcttgtggaaggagcatggcctctaggcagtgccatagaagccatatcttcattgcccaaatttaataaattgatgtattttatataacacttaaagagaagtgggcttcctttaattactaaataaaatgaagctcgatgtatatcaactctttctatccttattccattgtgtgtatgtggtcaccatttccgtatgattcatttgccaatatcatacaatcacattccaaaaa

SEQ ID NO: 2235 - DNA, 1630 bp, Glycine max
  Clone ID: PAT_MRT3847_102022C.1
agcttctgaaaactgcagtgcgctacctaagggaaagatctgtccttttcaaatactgtcgtgaagaggtagccaatatgagacacaatgcactatttagaagatttataagtgctcttacacgtggaggacctggtggattgcctcgaccaattgaagtgcatgctcatgacccactacgatatgtcggtgatatgctaggctggttgcatcaggccttggcatctgaacgtgaacttgtagctgtattacttgatccagatacaattaccgattctggtccaaagcaattctccaataactctgagaatggctctgggaagacagaatctgacttgatgtttgttcttgatagaatttttgaaggagtatgttgaccatttaaattgagagttgaacaagttttacagtctcaaccaagtcttatagtatcctacaaactcagtagtacacttgaattttactgctacactatctcagatttacttgggcgagaaactgcactttgtaatacactatgggcactgaaagatgctgctcagaaaacattttttgatattttaaaaggtcgaggggaaaagcttttgcggtatcccccacttgttgctgttgatctttccccgccaccagcagtgagggaaggggtatctgtacttcttgaagttatcgacaactacaacagcatgatggttcctgcttctggccaaaaacctgcttttggtccagttatatctgctatactggatccaatagttcagatgtgtgaacaagcagcggaggcacacaagtcaaagggagccggccattcatcaagaagaagtaggatgagttccgactctggtcaacttactaaatcatcagttgatgcaattttgtcaaatagtagctctgcatcttcttcactgactagtgaaaccccttcaaagatttttctcattaactgcttgtgtgccattcaacaacctctatctggatacgaggctgttgctgattacgtgaaaagacttggagcaatgatagataatcatttgtgtgttctcgtggaaaaagaagctgatgcaatcttaagaagatgtaatttgtcagagaagatgccgcacttccagaattcaatccacaaggaaggggacaatgaagtgggtaccccattggctgagatggaggacactagtccagctgttctttcggagtgtttgaaagctctgtttggccttatcttgggaagtgaaagttccctgccggaatttgagcagatgcaggttccaaggttgcgttctgaagctactattggcgtggccaggtcactggccgaagcttatgaccttatttataaggctattatggatcccaagaatggttatccggaccccaggtcgttggcaaggcatccacctaatcagataagaactatattaggaatttaagttttgtcgatttgtttagctccgagtccgacctcttgctcattatgttcattatgtttgttaattacgtatataacctctctctttctcatttgagattgtattgatatacttacaataaataattctgttatctattaacttttgagatgctatatcggaattctattattgttgttgttaatgattataaatcaaaaaaacaa

SEQ ID NO: 2236 - DNA, 2238 bp, Glycine max
  Clone ID: PAT_MRT3847_102023C.1
ctcgagccgtttaagtagttgggccgatccaacatccactagttcaaacgttcagtgggtccccactacagacacatatcgcctcggtctcaagcataattcactgcacgcagtgatgtaccacaaaccattgtcgtcgctgactcgctcactgccactcactcactcactcacgcgccacgccgaacgagtcactgactcagattgatccctcacaccctccctgactcactcgccgccgtggccaaccacaaaccacttcaaatggactcctcctccgacgaggaagacgaccaccgcaacctcgtcgacaacaaccaccgcaagccgccgtcctcccccgctgccgtcgctttccacgttgaggatccctccccgcgcttccgccgcgcgaatttcacgctccagaagaagtacattttcgcaatcctcgctatcctcttcctcctcctcttcttctcaatcaccgatctccacaaactcttctcaacaacctcttccttcagattcgattccctcaccgatcgaatgaaggaatccgaattgcgcgccatcaacctcttaaatcaacagcagcaagcgctcttaaccgcgtggaaccacacactccgaaccaacgcttcggatccgaacctattggaggatctgaaatcttctatcttcaagcagatttcgctcaaccgcgagattcagcagattctgttaaatccgcattccacagggagcaacgcaatcgagcccgagttcgatttaaacgctactctaaacggcgtcgtttacgataggtgtagaacggcggatcagaacttttcgcagaggaaaaccatcgagtggaacccgaaggatggtaaattcttgctcgctatatgcgtttcggggcaaatgtcgaaccatttgatttgtctggagaaacacatattcttcgctgcgttgttaaatagggttttggtgattcctagctccaaggtggattaccagtacgatagggttgtggacattgatcacattaacaagtgcttggggaagaaagtggtggtttcgtttgacgtgttttcgaatttgaagaaggggcatttgcacatcgataagttcttgtgctacttttcgcagcctcagccttgttacttggatgatgaacggttgaagaagttgggagcgttgggtttgactatgagtaagcctgaggctgtttgggatgaggatacccggaagccgaagaagaagacggtgcaggatgtgctggggaagtttagctttgatgatgatgttatggcgattggggatgtgttctatgctgaagtcgaacgagaatgggtgatgcaaccgggtggaccaattgctcacaaatgcaagactctcattgaacctaatcggcttattttgctcactgctcagcggtttattcagacattcctgggaaggaacttcattgcattgcactttcgaagacatgggtttttgaaattctgtaatgctaagaagccaagttgcttttaccccattcctcaagctgcagattgcatcttgagggtggttgagatggccgatgcacctatcatttatctttctacagatgcagcagaaagtgaaactggtctgcttcagtcactagttgtgctgaatggcaggcctgttcctcttgtaatacgtccagctcgaaattcagcagaaaaatgggatgctctgttgtacaggcataatatggatggagattcacaggtggaagctatgttggacaaaactatatgtgccatgtctagtgtgttcattggagcccctggttccactttcactgaagacatcctgcggttgagaaaggactggggatcagcatccatgtgtgatgagtatctttgccaaggtgaggagccaaacattgtagcggaaaatgaatgacaacaaaaaacggttttctcgagcccatgactctggaccagcacacgtattttcttgtgccatgattggggatttgtcaatgtgagtagtcatgtatgatactagaattagccatgttaatgtaatgtataagttttgcttgttatacatattcttttgtcataatcattataatttgtatttgttgtattatcgacacattgatccagaatttgccccaaagcaattgtggcatttcaacattttatttctcttttctcattgtaaatattactgatacaataatcactagcgactagccgtgtattgaaattgaatggattattgaagttttaacgtgtt

SEQ ID NO: 2237 - DNA, 376 bp, Glycine max
  unsure (1)..(376): unsure at all n locations
  Clone ID: PAT_MRT3847_102024C.1
caggaccggaccggagaacctgggactgacccacgtgaccgttgaaacccagcacagaggagaaggaagaacagaaaagcgagcagaaggaccgcagcaagccgcacaaccacaccagggcaaggggggaccgcgcgaagaacaacacaggacacgcggagaggnacggaaagaacgcgaagccgagggagacggagaaccccgaggacgcagccggagacaggaggaaggacgagaaggacccgcaagagaaggccgagacgaagaagaggaacggcccgancgagaccaacaagcagaacgggcaacccagacggagcacgaaccagangaaccgcgcgaggaacggagagcagaaccgcgcgagcagcgacac

SEQ ID NO: 2238 - DNA, 547 bp, Glycine max
  Clone ID: PAT_MRT3847_102025C.1
cccacgcgtccggttgctgaccacaagtccttgtaggttgtatctgcaaaggttagactttgtcttactggtttgtgcatttcctctttgatattgtgtgatttaagactttaagcattatttatcaacaacatcgtagccgatcaagatgttaaaaattgcaatcttcctttaggaccccatatttaataattgagctcaattttttccttgaacacataatggctgatataagatatttgaaatatataaggcagaataaaaaaaatatatttttcttaaacaagcatgatacagtcacatgttgactttattttttgatgaacacacgttatttgactatgtaatgatgtaaacttcgatacgtttgacaggaaaatactaggatataccatgaggtctttgcttgcattcccaacaatcagatacactcaagagctgcacttcggcaaagcatggttcactggaaaagaaaacttggtcataccaccatagatatgggaatagccccagataaagtggtctgtcatgagaatggagaaatcaa

SEQ ID NO: 2239 - DNA, 416 bp, Glycine max
  Clone ID: PAT_MRT3847_102026C.1
tttttatttttttagtattctaattacgcaatggcaaacatagcatatcaattaaaacatgtcctacattagccttcttatcaactaaataacaacatggaagtttaatacccaaaaaagtaaaaacatgcaagttagaagccaaattcgtacataacattacaaacgggaggctcgactaaactaaattcacttctttcttttttttgggggctgcaactgcttctcctcctcgccttcctcatcctctctattctccttgacctcagcaccatcttcattctcttcttcacctccctcatcttttttggtatcatagtcatcgtcctcatcctcatcatcattttgatcatcaccatctttgtcttattccttccccattctcttttgtcaactgcgccccttgcgtgcctttt

SEQ ID NO: 2240 - DNA, 556 bp, Glycine max
  Clone ID: PAT_MRT3847_102027C.1
gagtatgatatttggggtttatttcgtgatattctaaggcagcatagcgataaacataatgtatttgactatattcgaataagtcctaagattgcaaggcagcatgaatttggtaaaattgtagtggtatcgggctctgagaaagctattgggtttgtgtcagatggatgccctacatctacatctacatctacatcgaatgcagcattgtttcccattctgtgatgagttgaaagctctaacgtctgctacaaatcactcatacttcatgtacgcaccggactcatacttgatgcacacaccggacgatcctgctgcttattcctttgtcaaattcggtttatccatgaaacaacaggctgcgtcaattttttcggcttgtccctccttttgccaaccttttgttagtgaatacatataaatgttaaataaataagtacctcaatagaatatttatttcttacttttttgtttaaaaatagatttgtccttgcaggttctactatataaacaattgaattatatttatgtaatttacttgctggatatttatttt

SEQ ID NO: 2241 - DNA, 291 bp, Glycine max
  Clone ID: PAT_MRT3847_102028C.1
gcactcgtacgcccacgcgtacgtccacgcttcctacagatttctcctcaagatgaacatagttctgaatcgccaatactgtaagtatctccatcttcaattaacaaaaattctacaacacaccaaaaaactacctcacattcttctatgctgaccatcataacataatccctaactcgtcaaccctctaaacctctgatcacctcatataagagatatatcgatcaaaccttcacactataaatcacaatattcaatgaccacacctgaaaagtctccaattcaatctgt

SEQ ID NO: 2242 - DNA, 402 bp, Glycine max
  unsure (1)..(402): unsure at all n locations
  Clone ID: PAT_MRT3847_102029C.1
tcccggggggacccacgccgtcgcctgtgtagttaggcttatcatgtgcagataccaacgatggtggaanggtctttaagcggagcgcgtgacactctacgggaggggtgcagtcctttcatacaaaaagggcaagtgcaaccagtacccaaacacattcccttgagccaaattgagagagtgaacaccaaataatacctantagtgtatgctaggggggagaatggctatatatacaatgctaagaggagaaaggagtgaanccattaccggtgcatatggggggaaggttactagaggctcactagaacattgaggtgtngacattcaaaattcaagtgaaaccttncacccanatctatgggagctcnagtaaaagtattgatgtgtccaattaatata

SEQ ID NO: 2243 - DNA, 721 bp, Glycine max
  unsure (1)..(721): unsure at all n locations
  Clone ID: PAT_MRT3847_10202C.1
gtatttggagtgccttgccaagggaatgacctctgatgccattaagaagctagtggaacttactcctgcaacagctttattgattgccaaagataaaggtggtagaactgttgaagaaagggaaatagattccttgctcattcaacctggtgacacattaaaagttcttcctggtacaaagattcctgctgatggtatctcgagccgaatcggctcgagtgtaaatgagagtatggtgactggtgaatctatacccgtttcaaaggaggtcaatgcatctgttattggaggtacgatcaatttgcatggcgtccttcacgttcaagccaccaaagtaggatctgatacagttttgagtcagataattagtttggtggagacagcccagatgtccaaagctcccattcaaaagtttgctgattatgttgcaagcatatttgttcctacagttgtggtgttggcattattgacactattgtgttggtatgtagctggggctcttggagcatacccagatgaatggctgccaaaaaatggaaatcactttgtttttgctcttatgttttcaatatcntgttgtggtgattgcatgtccatgtgcacttggtttggcaacaccaactgctgtcattgtggcaacaggggttggggccaacaatggtgtgttaattaaaggaggaaactccttggaaagggctcagatggtgaagtacgtcatatt

SEQ ID NO: 2244 - DNA, 218 bp, Glycine max
  Clone ID: PAT_MRT3847_102030C.1
ttgttcggctgcgagaagacgacagaagggggcaacgacgcgggtggcttgaaacacgtttttgacatcggcggatgcgattccatcgtcgcaaccaccgatgctgaggtcatgccagctggcagcagtgtcataatcgtggatggtaaggatatcaacgttgtggatgcccgggaccctgtccacctggcttgggaggacttgcggattgacaacct

SEQ ID NO: 2245 - DNA, 404 bp, Glycine max
  Clone ID: PAT_MRT3847_102031C.1
acacgaagtactcagagctcagaggtgcagaactcttaaattatggaacaaatgtggctttaccattctacatcgtaggcaatttaaaggaaaaagatagatttacattaaactcccaagactacatactatatccaacagagccaccactgagaatatcatcaagcgaaacacttcctatgttatctcggataagtgttgggccagctggttctagagcctcgtctgataatgtggtccttacagctatgcatctcatttgtgcagctttggcagcttccactccagctagcgcatcttctataacaatgcactcattggagggcacattcaatattcttgatgcagctaagaaaatatcaggagcaggtttcaaattctcaaaagcatcagcagacacaatt

SEQ ID NO: 2246 - DNA, 479 bp, Glycine max
  Clone ID: PAT_MRT3847_102032C.1
cccactcgtccggcttgctactgattttccacacttgcatactcttaggttcttccgaattctatgttaatgaccaagatgcctaaagcaagggttcacatcaacggtgaggcggtcgttcatagtggacccttgtgatggcaaacctctattaacgaagctagaaaacccctgccgaggataatgaaactccaccgcttgccatatgactggcatcgctacgcgcggccatataatgggaaccacaaaattttttggcaaccttatctggacaccctaatgtttcactgttatgatcagcccggaagctaatctatctacaccatggttacttactttgaaaagagagggtggatcaacagggcccttctgaccaaccgccacccttgaaagttaatgcatgctttttatcttctggctaaaaaacttcaaattcggaagacctaaggtttgcctggtggaaactaaatagcaagccg

SEQ ID NO: 2247 - DNA, 229 bp, Glycine max
  Clone ID: PAT_MRT3847_102033C.1
gggagctgggattcgactatgctcaaaatgatatgcgagcaagatgtacctgcattagagaactcgatgaacgaaaacttggattggctggctcaagacgcacaccaaaaagcattccttggaccctctgagccataatgataaactctttaggctcttcatgaccttcttatggtgggctcatccctctggacctgctgaggcgcagaactactcattagattactgg

SEQ ID NO: 2248 - DNA, 382 bp, Glycine max
  Clone ID: PAT_MRT3847_102034C.1
aaaaaaaaaccctttggcccggggataattttttttttttttggggagggccattttttggaaatccctttccaaactttttttttttccaagggcctttgggcccccccgggggacgttaaggggtaacaggttaatcctgatgggggggtccaatggggtcccaagcttttttgggttaaaaggatataggggctaacatgggggcccctctaaggcaaattggccccttatttggggggcaaatccgaggggggaatttctttccaaatttaaggaaccccgggtaagccccaggggttccaatcgggaacagaggggggggccctccaagggcccacgtgtcccggacccgggggcggacccgggggtcaccccggga

SEQ ID NO: 2249 - DNA, 469 bp, Glycine max
  Clone ID: PAT_MRT3847_102035C.1
ggctcgagcgacatcggctcgagctgctttgccaccacctttgaaaagcaaccacccttttgctgctaactgcaatcgtcaacggcaaacagcaaccacaaatttctagacacaaacttttttcgcggtcgcatgatttttcagaaaagaaaagctttaaagcccctcactcatgcaattaacgtggaaatatactgcaagtttacatttcagtttcctatcactgaaatgtggagatatagtatgatgcaaagtcaagtactcaagtaaaatttgtaaaggatttaggatatagacaactaagttctaaacattcaaaaactcgtgtgggaagagaatcagcaaatgttcaaatgcatgaagagacatttgatgatagcataaaagaaaagaaagcgaaaaaaaatctaggaagagaagcaccaagtgttcaaatgcatggagagacatttgatcataccataaaaga

SEQ ID NO: 2250 - DNA, 328 bp, Glycine max
  Clone ID: PAT_MRT3847_102036C.1
attttatatttacttgaaggttaaatcaggattgaacgactctatgattctcgaaacaagctgtaattgaacgactctttgattcttgaaacttgctttgattgaatgactatttcctcactaaaacatactgtgattgaactactctttgattcttgaaacaactctttggcatcatcaaaagactcatataaagcattgcttccacaatccccccctttttgatgatgacaatcctgaaatcaagagaatacatgcaagttcagcgctatcgttcactcaaacctttctttccctttctttttgaatatatgcttaatctttgaaa

SEQ ID NO: 2251 - DNA, 367 bp, Glycine max
  unsure (1)..(367): unsure at all n locations
  Clone ID: PAT_MRT3847_102037C.1
gcacgcnacgaagcgcggaattcgctcagctactctnccttaaacaagttgattcccccatctacataaaatttggtttttttaaatactatggacataaacaatctatccactccttataactactcctaaccactaatatatatctcttattgatacacaaatatttttctatttccacaaaaccacataccatactcatcatctcaaactaaaccataactaaatcatataattcctattaatcaaacttcctaccaaaatcccttttctacttttttaactttaactattctcacctaaaacaataaacacccataagtttttctccacaaaatcacttttaaatccaccaatctaattcatt

SEQ ID NO: 2252 - DNA, 514 bp, Glycine max
  Clone ID: PAT_MRT3847_102038C.1
cctctcacaaatccgaatattttaattgctttacatcaaattcagatgttggccctttcctgctccacaaatagccagtgggtgtaatctaaaatgcttaaattttgggagggtagactaggtctttacaaccaaatagtgcggagggatgcaatggcttttaaatttttttataattcataaacccgaggacccggatgataaaaacgtgaaacagggaccttgctaaaaatctaacaagccgcacactaggcttaacacctctggcaatagcgaaacgaagccttttattttttattcaatccagtcatatataatggatcctttaggaaagataataccccagggcccattcattttctgcttactaaaaaaaaatataggacatgttaacataaaatctaacccattttacataaagaataccatatttggacttctattccctaactaacacggctttgatccctcatacccaatagatagttttaaacggttggcaacaataaaagat

SEQ ID NO: 2253 - DNA, 225 bp, Glycine max
  Clone ID: PAT_MRT3847_102039C.1
ggactgccgttgctcggaggaatgttactcgggggcgccttgttctaggctcctcgtctcatcaagcctgacaacccgtcatattgatatcggaagttgaactcgaacccgttgagatccgcgaccgggtcgtctgtcggggaacgctttaatatgctcttaaaaaattcgaaactgtgaaaagaagaacaaaatgtggatgtagtgatttatgagatgtacagt

SEQ ID NO: 2254 - DNA, 814 bp, Glycine max
  Clone ID: PAT_MRT3847_10203C.1
gctggtgaggagttcaagtcagggtggctttatgatgtctcagacttctctgctcggccaggaaggggcatccagggctttatagacgggaggcgtattttggttggtaaccggaagctgctggaggaaaatggcataaatatttctacagaagtggaaagttttgttgtagagattgaagaaagtgcaaagacagggatactagtagcatatgatgatatattaattggagtcttagggattgcagacccactaaagagagaagctgctgttgttatagaaggcctacagaaaatgggagtcatacctgttatggttacactcgatttggctaaaagaaaaaaacatgtgctgtgataggttggcattcaagatgttagggcagaagttatgcctgcaggaaaggctgatgttgttcgttcattccaaaaggttatgttacaactgtcataaagaagtgacacatactccattatgatttacaatagagggctgaagaatccgatatttatagtaacaaatttaaaactgttttaattctttcaacattttcttttttggtaaattcatttctttcaaatattactattacaatatttccaacacttctcttcaaccattctcttctcagatcaatacaacaatgggatttcgtttacctggcatcagaaaggcatcaaaagcggcggacgcaccaaaaggctatcttgcagtctatgtcggagagaaattgaagcggtttgtgattcccgtatcatacttgaaccaacctttattccaggacttgttgagtcaagctgaggaagagtttgga

SEQ ID NO: 2255 - DNA, 355 bp, Glycine max
  Clone ID: PAT_MRT3847_102040C.1
caagggaaaaaacaattggcccagattttcactataacggccaacctagggttttaagtctcataccactaaaaatatccttgattactctccaccggtggacgccccaatcacgaaaaccgctcgcctaaattaacctgggcgtgcctcaaaatacggggcaagttcaaagcttactttaattcttttgggctctgattgggctcttgccacactgatgtccgcccctgaagggcagcccctactgaaaaactaaaccccccttaatgagcatccttttcacgccttagattaacataacctctttcctcgctttttttgaaacttgctggccaggacagaatccccttttttt

SEQ ID NO: 2256 - DNA, 262 bp, Glycine max
  unsure (1)..(262): unsure at all n locations
  Clone ID: PAT_MRT3847_102041C.1
caaaangccatctccccttcttacaaatcatccttctcttcaatctctctctctctcttttctctttcttcaaaccgaacatttcatctccaaatgcatcaacacgtcgaagtagaaattttgcttacattcactaatctcttcanccatcttttctctaatgatgaaattcgaattctcatccttgttctttatgctccttgtaaaaccactattctctacaagctcaaactcggatacatcctttctacacttcctacca

SEQ ID NO: 2257 - DNA, 328 bp, Glycine max
  Clone ID: PAT_MRT3847_102042C.1
gggggcggctgtacccgatgttcaatttttccaaaacaaacgggttcctctaatgactcctgaccccccaaataccaagttttccttggagttcttatttgactttcccgggggttccaattgacccagggcctttaccaaccctgggaggacctgaaaaccaatccatggaagggggtgcaaccccccatgccaggatttcagacatgatcctgtgattctcccctttcggaggaacccccatttaacccttgctttgacaaaaaaggaaatcccggataccccaaaatctggttttagacttttccctgggcccgggggcctaacc

SEQ ID NO: 2258 - DNA, 409 bp, Glycine max
  Clone ID: PAT_MRT3847_102043C.1
gagagaactagtcttgagttttttttttttttttttgcaatggaattattattttatatatattgctaaagtttgattgttttcagtatgtataaaattagaaaatgatattattccttgctgaccagcccggaaacttagctctcatatgtacattattgcatcattgcttatgctgaaattgctacttaagtcaaccccaggcatacaatgaatgtaaccattttccaccatttgatttccatacttaagctgtgaattgaacatctcaggggctgaaatgttacttacacatctattatactctccaccaaagggtacctctgacatgtcatgaattgcagcttcatgaaaagatgaattttgatcaaatccattcctcaaacccaaagagtcaactgaatttgca

SEQ ID NO: 2259 - DNA, 130 bp, Glycine max
  Clone ID: PAT_MRT3847_102044C.1
gttaaaggagacatttttcaaaacataaccagattttcagcacccttgcccaaaaacaataaatagtgcatataaatggatatctaattctaatggtgagtcttttctgttgtatagatatgggcttata

SEQ ID NO: 2260 - DNA, 1075 bp, Glycine max
  unsure (1)..(1075): unsure at all n locations
  Clone ID: PAT_MRT3847_102045C.1
attggggtggaggcaaaatgttcatttgcttgtcgatcacttggctgattggttagaaggggaaagtgataagaatcttgtctttcatactttcagcaacactggatggttaacatatggtgttattcttgaacatcttcaaaagcaggatccaactatcacggaaaggattaagggatgcattgtagactctgcacctgttgcataccctgacccataggtctgggcctcaggtttctctgctgcatttctcaagaagaatagtgtggctacaaaaggacgtgttttttccgatcaatctggcattaaagtatcaattggcagtgaagatgatttagggctcaaacctgctctaacagaagcagctttactactaattctaaagaaattttttgagatcattctggatcttccttcagtgaataggaggctctctgatgtcatgagcatgttgtcatcaagacaacctagctgtccacagttatacatgtatagctctgctgacagggttattcctgctgattcagtggaatcgtttgtagaggctcagcgcagggctggacatgatgtgagggcatgcaattttgtctcctcaccccatgttgaccactttaggaatgacccaagattgtatacatctcagctcagtcagtttttggaggagtgtgttgttagtcgttgtaaatcttactaattctttacattccttggcttactcatacaccatatagttcattcattttgatttttgaaagcagccattccattaatggatgttgccatggtggttaggactttatgaaaagtcaaccacctcaaggggattacacaattgttccctcacaggttataattgattcattgacatattgatagtgcaaatgaaagatatgttacacaattgttacctgacaccttataattgatccctcgatatattgatagtgcccttgnnggtttttgcccctttctcttccncgggcggtnnnttttaaaaaacccccccnnnnnnnnnnnnagggcggccgccgttagtgagctgtcgcccnggaataattccggccggtccgcgggt

SEQ ID NO: 2261 - DNA, 670 bp, Glycine max
  Clone ID: PAT_MRT3847_102046C.1
gcccttcttgtgacatgcaatttctcgaactgaaggttgtaacagaatgaaatgtggtaactgtgaacaatacttctgttaccgctgcaacaaagcaattgatgcatcagatccatatggacatttcagggatggttcatgtgaattgttcccacgagaaatggttgattcctgggaagagcgcattaatcatcgccaggcggtaggacaactacaggctgagctctttcctcaacatggcttggcgtgtcctagttgtcgtcaatataatccaaagattggaaataataatcacttgttttgctgggcatgccaacgccattactgctacttatgcaaagcgattgtcaggcgtggcactaagcattatggaccaaagggctgcaaacagcactctgagggatagtataagcacaatcccttagaatgttacaggttcaatacgttcttccagactggtgaagccactgtgatcaaatgcaaaggtggaaaccatctgctaaaagttcagtgagtttcaattgtattttgtaacaaaataaaatcaatatgaataggatgtgtttcaattacatttggatttcggaagaggtagtgtaaaagggttaattatatggctgtaatgggagtaaagccgagtcattttttttttaaaaatattctctacctc

SEQ ID NO: 2262 - DNA, 309 bp, Glycine max
  unsure (1)..(309): unsure at all n locations
  Clone ID: PAT_MRT3847_102047C.1
gnangngtangtaagntnggaattaggatagagttttntttttgggtgagtangttatgatgttttannttgtanaaaaaaaaaaaaaaaaaanggggggnggnggannantgagttggtggaangggganttanttggggaggggaanttgangggnnaaaagttttaggnaangtgnntggnnttagagtttggggnaataanggtaanagttgtttaatgngnnaaattnttatngggtaaaantttaananaatatagnttttntaanaaaaantnnngnnngtngntngnaggtattntngaan

SEQ ID NO: 2263 - DNA, 565 bp, Glycine max
  Clone ID: PAT_MRT3847_102048C.1
aaacaaaacaattcagacagagaaatgcaagaaattaacgaactcaagaacctcgtcatccaaagcttagaaggcaatggtgtccttggtcaaatccgtgcccaaatcagagcctccatcttcaagactatcgaaatgcaagaaacatccacaaagaaaaatgctggcttcttctgggaaaacccactctgtcagaccatctacgacaataaagaaggtaaacttgcattggagctcatcaacgatttccttgagttcttcaagatggactacactctcagtgtgttcagccacgaatcaaacttaaaagacgctgccagaagagacgaactcctcaagaaattaggcattaagggcgatactaacaagccagtgctcttccagcttataaaccaagcacatcaccatgaaggatctccttccaaggaaaaccaactttctggtggacctagagaccttggtgctgctaagcctaagcctgctgcaggtggtgccaatttgggtgctggtgccggcgctgctggtggcaagacaaccgatttccaggataactttggtcagcaga

SEQ ID NO: 2264 - DNA, 731 bp, Glycine max
  Clone ID: PAT_MRT3847_102049C.1
aaagaaagaaaaggtgcttctgcaattggtaaatgtttggttacatactctcctacgagaacaaccttaaaaagcttgaagcggaaaggttggaggatactaaagccagtgtgcaataccgtgttgatgaggctcaaaggaataatggaaaaaaaattgaagatgttgtactgaattggcagaaggaagtgaatgtttgtaatgctaatgcaaggaaacttattgactgtgaagttggttatattgtctgggacaaagtcccaatccatggacaagaaaacaacttagtaggagatttgaagaaatgatcagatttctcaagtcacgaaaaatggaaaatttgatagcatttcttacaatgctctttctgaagtcatgattttgccattttgtaaaggatatgaagcagtagactccaaaacaccaatgctgaatgagatgaaggaagttttgaaggattctaaatagttcatcatttgagtgcatgggatgggtggtttgggtaaaacaacacttacgaaagagtttgttagcttggcaagtgaaagaaagatggcttatttggtgttgtggccattgctgacgtaacccattctccagatgtgaaaaaaattcaaggccaaattgttgtggctattagactttggccatcttatctagggtcagtaaagggttttcaggcgattataccaaatgctggtaaatgtcatatttattgacgtaaaaaccat

SEQ ID NO: 2265 - DNA, 481 bp, Glycine max
  Clone ID: PAT_MRT3847_10204C.1
ttttttttttttttttttttttttttttttttttttttgggcaaaaaaaacaagtttattttcatttttgacaacaaagtccaacaacatgacataggttcacgaaacatgggggttgcgagaatgcaataaatgataaaagcctttttttggatagaaaaaggaaatggcttcataattttctggaggatatgatgttggaattaatcgagcttgggctggctgatcagctggccaaaaaagggaagaggaccaatggccttggggggaggggagggtcttcttggatatgttttcctctccaagcttccctcactaacaaatattttctcaaatttggattttcttttgttatgggaatggggcgtttgggattgggattgggataaaaaggccttggaggaaggaggggggatttttgaaatccttcaaggaaaagagagaagaggcccgaaaaaaagggggaaaagaagggtggaat

SEQ ID NO: 2266 - DNA, 346 bp, Glycine max
  Clone ID: PAT_MRT3847_102050C.1
ggggtcaaaaaacccgacccctttggttaacaaaagccttttttgacttctcaaaaaactcacccttttttaaaaacccccggaatggcaaaaaattggctccatgggggaaactgtttgagcttctaaaaattttaatccagggggacttttggccaacggaacatgtttgggcaacaatattgaccaaaaggttaaagggggtggagcccaaaaaaacttgaaacccccccaaaatattggtaaagcccggtcaatcatgattttaaagggaacccagtgaaatggggccaaagggcccagagaaaccgaagccaagagaaaacccttcaaaggtcttttatta

SEQ ID NO: 2267 - DNA, 295 bp, Glycine max
  Clone ID: PAT_MRT3847_102051C.1
caacccaatcaccttggatgcatttggatttataatacgacacgccctcaatctaacccaaaccgccgggggcactccccctgctaaagcgacgctttatcgcgtaataaatgataagcgtggaccacaccccatcctattgtagggggatctctaagaaatagctttataccgtcccaacggcaacctcttgtgcaatcgttgcctcaatttctatttgagcagcctgggattaaacctaggcccagacacaatgtactccgtgagctacaatctttccaggatgatcggcaat

SEQ ID NO: 2268 - DNA, 318 bp, Glycine max
  Clone ID: PAT_MRT3847_102052C.1
tttatttacaatctctttatttgggttttggggtatatttgtgagggggtattttcagggcggaaaaaaaatcacgttattattcctgggtcaacctaacctttgatcccggggcggtcccattttttgccaaaacaaataccctggccaaaaattttggcatcctcaaaaggacggctccaaggggaaactattgcctctcgggggggtgcaactccttgaggcgggcacatttttcactttaaacaaatgttttttatttcgcggtgggatacaaaaaaatgggaattgggctttttcctggctctattttataat

SEQ ID NO: 2269 - DNA, 210 bp, Glycine max
  Clone ID: PAT_MRT3847_102053C.1
tacaagataacgattttgacttgaatgcattggaaagccttaaaaatcttcccgcttctcagccacgtcagtcattcacctcatcggatcactctccgagacaaccgaggcaaatcaccaccatcaatgcctccgggcatctaaccgaaccttccttggaagcttcgcatattgacctatctcctcaacctcctgatcaacgcctctcgc

SEQ ID NO: 2270 - DNA, 434 bp, Glycine max
  unsure (1)..(434): unsure at all n locations
  Clone ID: PAT_MRT3847_102054C.1
gcacaaatggcgcatcccatgctggggacgtgcaaaaacaacaccccctgagaaatacttttcaaacagccctaaaatgggaataactttgtaaaatagcgcctcgttgaaaaatttgccatgcctagtgtcccaataataaaaatactgggtgcccaaaccaatttgcttctgataagcgcagctcaagatgcatctacaacataaatagggccaaatccctttcagcccacagttcctacgatgccatgacaacgagtccaccatacacaccaacgcaatatgaaattgaaatacatttcttaaagatggaaaaaaatatggccgaaaatagagacttctaaagatcggccaaggctgacgtgtgtcccaattntgtggattgtacggtgcgaacgacatattttagaaggggttgtgcggtgcgagaggat

SEQ ID NO: 2271 - DNA, 148 bp, Glycine max
  unsure (1)..(148): unsure at all n locations
  Clone ID: PAT_MRT3847_102055C.1
agactatagtattcncgcttacgtnanctcgncaattcggctcgnggcatatattcggcgaaanncctangctgngtatnagctntaaccgctganangtnntnantgcattctgcgnnngcnntgcgttcaatngtgaagngngnnn

SEQ ID NO: 2272 - DNA, 182 bp, Glycine max
  Clone ID: PAT_MRT3847_102056C.1
gagggaagaagaaaggaagagatttttcaaactaaacacggtctaaaacaagacaaaacaacaaaggcctaaaacaaacgggacaaccttggaaaaaaggatttaaattcaaacaaaaactgaccaatataaaaggtagaactataaagccttaattgtaagaagatcaacatatgtaatac

SEQ ID NO: 2273 - DNA, 1393 bp, Glycine max
  Clone ID: PAT_MRT3847_102057C.1
taagtattcttcacgttctgatccctccggtccagcgcctcgtccggtcgtttgcttttgcttagtgagcttccagttgtattcatggacttaccggagaagcttttctttgcagcatttctcattctttcagtggccattgatggaacgcaggcagacaccatggtcactggcactgtcttctgtgaccaatgcaaagacggacagagatcccttttcgattatcctattaatggtgcaaaagtaactctgtcctgtgctgacagtaatggacaaattacaatgtcaagagaagaaacaacaaactggtttggaagctatacaatgaggttcgatggcgcacccgacttgagtggttgttctgcccatgtctcgggcagtggtcaagggtcaacgggttgtggtgaagtggctggtccttcacaaaatccaaaactcatgtttaggatgtttgacatggagatgtatacagtggattctctccttgctcagcctgcacaacccatgcagtactgttctacatcttccaacccagtcccagcaccagacacaccaaccaagcctccaccacatttcaatctacctccagtaccaggatttccgccattgccgccattgccacccctgccacccctgccatcactaccacccctgccatcattgcctcccctgccatcactgcctcctctgccaccagtgatttttgcagaagcttcagcatgtccgtcagagaagtggacactgccagaatacaaatgctactggaggggtgtgaacggggacacaaaagtagcagtggcatttggaatggttgcggcgaggagatacggaacagacattacactgtggcatgggttgaaagggagaggagacccttacaggactcttctcagagaagggatcacagcacttcttaactcctataacagctttcaattttcttatcatccactcggcgtcgtccaacacatgaatttggctttgatgggctccactaggagtgtcctgcttactgctctacgcttcaagagggccaattctggtgctggaaatgtcacctgcaaattcaccacttgcaaataattactaatttataggcttcttcctttatatctagcacgtttaattagaaaggattattttgggggaaataatcccattaaaaatgcacaatagaaaattgaatattcttgtataagttttggtctgtatctggcttctatatataatatatggagggtttgcgtggtatggtgttttacctgcgccctgcgaccctcctctaggggtaggaaagaaaagaaagagagagggtggcggaggtcgaggggagggatgagggagagaggagggggacggggtgagggaagaggaggtggaggaggtgcacgag

SEQ ID NO: 2274 - DNA, 310 bp, Glycine max
  Clone ID: PAT_MRT3847_102058C.1
cacacgggcaaaacaattagtatcccatccaacaaaaatcataaaggttaaaattcaataaaaaagcatcaaataagttttaaacagattaatggatgaaagccacttccccattatgaccacttcctcaaattcttggggcccgccccacttccaccagaaggagcagcatattcattcttggttgccccagcaccagctccacccttgtcaggaccagcaccaccttggtacattttggtaatgaatggattgcagattctctccaattccttcatttgtgtctcaaatatatttgcttctgcgagct

SEQ ID NO: 2275 - DNA, 1131 bp, Glycine max
  Clone ID: PAT_MRT3847_102059C.1
gcgtccggcttttgcttagtgggcttccagctgtattcatggacttggcggagaagcttttctttgcagcatttctcattctttccgtggccattgatggaatgcaggcagacactatggtcactggcactgtcttctgtgaccaatgcaaagacggacagagatccctttttgattatcctgttaatggtgcaaaagtaattctgtcctgtgctgacagtaatgggcaaattacaatgtcaagagaagaaacaacaaactggtttggaagctatacaatgaggttcaatggcgcacccgacttgagtggttgttctgcccatgtctcaggcagtggtgaagggtcaacaacgggttgtggtgaaggggctggtccttcacaaaatcctaaactcatgtttagaatgtttgacatggaaatgtatacagtggattctctccttgctcagcccgcacaacccatgcagtactgctcaacatcttccaacccagtcccagcaccagacacaccacccaactctccaccacatttcaagctacctccagtgcctccactaccatcactgccaccacttccatcactaccacccctgccaccagtgatttttgcagaagcttcagcatgtccatcagagaagtggacactgccagaatacaaatgctactggagaggtgtgaaccgggacacaaaagttgcagtggcttttggaatggttgcggcgagaagatacggaacagacattacactgtggcatgggttgcaagggagaggagacccttacaggactcttctcagagaagggatcacagcacttcttaactcctataacagctttcaattctcttatcatccacttggcgtcgtccaacacatgaatttggctttgatgggcacaactaggagtgttctacatactgctctgcgcttcaagagggccaattctggtgctggaaatgtcacctgcaaattcaccacttgcaaataatttatttatatatagcatgtttagaaaggattgttttggggaataatccaattaaaaatgcacaatagaaaattgaatattcttgtactgtactggtgtaagttttgtctttatctttattctatatatggaggtttaccgttgt

SEQ ID NO: 2276 - DNA, 424 bp, Glycine max
  Clone ID: PAT_MRT3847_10205C.1
gcgccgagcaccggagacgtgcaactaacttcccccgcctccggcgaagattccgacgacctcgaagacgtgcgcctcctcgactcctacgacaaaaacgacgtcgttcacgatgaaacgaaaagaattcaggtcagaatcaccggcatgacctgcgccgcgtgctccaactccgtcgaaacggctctccggtccgttcacggcatcaccgaagcctccgtcgctcttcttcaaaacaaagccgacgtcgttttcgtccccggcctcgtcaaggatgaggatatcaagaatgcgattgaagacgcaggtttcgaggccgagatcttgccggactccggtgcggtggcgcacggcggagccgccgccgccgtggtggggcagttcaccatcggcgggatgacgtgtgcggcatgtgtgaattcca

SEQ ID NO: 2277 - DNA, 333 bp, Glycine max
  unsure (1)..(333): unsure at all n locations
  Clone ID: PAT_MRT3847_102060C.1
aattgntgnaatntntgantcctacattctctnaaattcgaaattctaatttcgttaggggaaagagattgnttgtgtgtgagtgagtatggctggaaaangcganggtctngctatcggnatcgatttgggaacgacgtactcttgcgtcggcgtgtggnancacgatcntgtngaaatcatacccaacgataagggtaacngaactaccccatgccnangtggctttcancgcacatcnnaacggttgatnngcgcatgcancaagaacncaggtcgctatgcccccacncaacaccgttcntgatgcnangcgtcttnatggangggttt

SEQ ID NO: 2278 - DNA, 557 bp, Glycine max
  unsure (1)..(557): unsure at all n locations
  Clone ID: PAT_MRT3847_102061C.1
gtcgcangcacgcgtacgtaagctcggaattcggctcgagaaactgattgagattgagaactttaaatcgtacaagggtcgacaaattatcggaccatttcagaggttcaccgccatcattggacccaatggctctggtaagtcaaatctcatggatgccatcagctttgtgcttggtgaaaaaaccagcaacctgagggtaaagaccctgagggacctgatacacggagctcctgtgggcaagccggctgccaaccgagcctttgtcagcatggtctactccgaggagggtgctgaggaccgcacctttgcccgagtcattgtagggggctcttctgagtacaagatcaataacaaagttgtccagctacatgaatacagtgaagagttagagaagttgggcattctcatcaaagctcgtaacttcctcgtcttccagggtgcagtggaatctattgccatgaagaaccccaaggagaggacagctttatttgaagaaattagtcgctctggggaacttgcacaggagtatgacaagcgaaagaaagaaatggtga

SEQ ID NO: 2279 - DNA, 574 bp, Glycine max
  Clone ID: PAT_MRT3847_102062C.1
acaaatacactcttaataatacattggtaacattaaaaggcaaagaagggtaaaaagagaatcacaattttaaaaaccaaggtaaatggtttcaccaaaccagaattgacatcacttttgaaaatacattactactataaagtaggtaaataggctccactacctaatcttaaccctctgaacacgttatcagtcactgcccgtgacctattcctgcttctttttttgaactctcgtcaccttcttggtccatacacttgattataataaaatcaataatttctacacaaagtaaccaaaccacctcttacaatgcacagtcctgtcaatatccacccccagaattttccctttcattttacgtggacacatctcaagtactttccttcaaccaatcaaacccctcacaaaaacagaaaactcaaatcataaataaataaaccatagattgctccttcacaaagtgatgatgcctctagattgcaacatacacaataaacacgtgtcacaaaggacaaaaataatacaatcaatggtcacacacacacttgcaacaagagtcaccacaacgtga

SEQ ID NO: 2280 - DNA, 338 bp, Glycine max
  Clone ID: PAT_MRT3847_102063C.1
cgacatactgatgacagagagggaattgtctcaagttaatgatattaataacctcaaaattgtccatctcacgacaaacatccttaaagccaagatcccaagcattaccaaaaaatatgaatttaaatcgctcagtttggtcgctcaaagtatcaatgatcaaaatggtgaccaaataacgtgtgtcgcaaaaaccctactctcgaagtctttagcgaccgaatttcacttttgtcgctaaatagcgaccaaaacaatcaatcaaaagaaaagaaaattcggtaattgcatatttggttgctattttgcttgggattagttgcgcaaccgaaatattc

SEQ ID NO: 2281 - DNA, 323 bp, Glycine max
  Clone ID: PAT_MRT3847_102064C.1
ctgcgagaagacgacagaagggggggtgggaattgacatacaacagatgtcattaatttcttggggcttcattcaagctgtctgcggggcttgtggtccttggtatcagctcctcaccgtgacgctgctctactaagacgacgactacctcgtgtgacaacatcaaatactgtgaaaaggaatcatgcaactcgagacaaacagtgtgtatgactactaggatgcacgaggtggcgttggagtccagcataccgttcatgagataatctctgagtcatggcctcaagaggcttttatgctcacagccgaggtcaacagtgcct

SEQ ID NO: 2282 - DNA, 316 bp, Glycine max
  Clone ID: PAT_MRT3847_102065C.1
ctcacctaaactttatggttttgggggggactctcttgcaaagatcaagaaaggcgccacacgaagaaaaggcgggtggccccagaaaaaaccggttttaatgtacttcaaagccggcctccaattacccgtcggaagaattggcccctctttgaagactggaaggcacacccaacacgtgggtaccaaggctcccataaactggcccggaagactcgattacatagctactgcagtgcttgatttctctgtcaatgctggaaaagccaacatgcacaactggattataatcaaacacatgctattgcatgtgatg

SEQ ID NO: 2283 - DNA, 380 bp, Glycine max
  Clone ID: PAT_MRT3847_102066C.1
tatttttttttcgcacgaatatgtctcatactgctacaagttatattaggaattgctttctgaccctcaactccaagcttggtggaaaggactaagggagggggttctatgcgttttgaaagataagccatggcggccaaagatgcaaactggtgaagagtcggttgaagcttcctttattcatatatggattgcttcagtcacccatgctgctgttcactttggacagaatccatgtggagggtttaattctaaacaggccaactattatcaggagattcatgcctgaaaaggggttttctgtatacgatgccgtggctaagatcccttcaaaggagtttttgaagactatttcttggcagaaggtgaccctcattgtc

SEQ ID NO: 2284 - DNA, 223 bp, Glycine max
  Clone ID: PAT_MRT3847_102067C.1
accaaatgcaaggcataaaaaaaattggtgtttaacagcccttaaacccaaaaaagggcggtggcccataacaaaccaaaagggtctaatctaacgaaacaaacttaacctgaaactgtatcaaaaccgtggccgtatataaccccccatccccgctaaataaacccaaaaaataaaccttaacaaacacggttgtccttaaaagatattgaagcccgtcgcc

SEQ ID NO: 2285 - DNA, 363 bp, Glycine max
  Clone ID: PAT_MRT3847_102068C.1
tgatttcacaaacttaataaatgggataatataataaataataaatgttattgataaaagctgattttcaaaaaataacaatacaattttacaaatctgacatagattttactgtgacaaaagaatcctaaggaagtatccatgggagcgaaattccattcttaatggaaatctatcacctttttgaaatcataatagggattcaccttcggacttggagtaacttgttgaaaactcatgaaatataggacttttaaaattcgggggttgaaggacaacataggccgcctttgttgttatacctctcctgtgttgcctagaattgggggtaatctgagacactaaaaacagtgagcagttttc

SEQ ID NO: 2286 - DNA, 297 bp, Glycine max
  Clone ID: PAT_MRT3847_102069C.1
gggatggaaaagagggataaatttttgggcggaagcatgatgattattaaaatcccccacttacgaatgaaacaggcaaaaagaaaacttgggtaaggatcctccacattatataaaagggaacacatggtgataaattcttggaagaaaaaagaatttaaaaacaaagggggtcctaatacacccttgacataaaagctttttttttttcaaattcaagagcccacgtgttttggttttttcctcaaaggaatttcgagcttaccttcccgtgcttgcgaaattatagtttttttt

SEQ ID NO: 2287 - DNA, 3864 bp, Glycine max
  Clone ID: PAT_MRT3847_10206C.1
atgacatcaaaactcaaaaattttttccattttcaacatgtttgatatcattatttcttttatagtgacaacaatcattatataatgtgtttttacaaatacgatatttttaggattgataccaattaaacataccaatgagtctccaatagcataggcgtaggatgaggttattctgtagaatgcggtggagattagatgaaaggggacaccattcacgtactatctttgaatcaaaatttaacacaagaagaattgatttaaggtgaagtataaattggatatgttaagtatatggttgatataaaaagtttaaacctggaaaaggatttgaaaaacattaccgcttgattgaatgagctatactttatagtaatggagaattcgaatatatacattaagcattgaaatgaattttggatttccttggcaataaaataaagaaattttattggattattaagcacacaagaattaatctcattttctttccactatcttgatttcaaaaatatggtgatttagaagcatactctgatgactgtctgtcaaatattgggtatcaattagaaattaattgactttaacgcgctatcagacatagtattaatgatcatcggtttctccaatctcaatgcagcctacgagtgggttgaggtgcacatgggctctcaaggggtttaagtgggatggatgaggacgacagtctatggatttgactatgttggtgaaacaaatcttaagttctttaattcctgtgtcaacccgagcaacaacctggataacagcaactaaaaggtggagtttaggtaacctttcggtaggatgagttcttaagtggcctcacaaggctgggcgaggtatagctcttgcaactgcagactggttgtatgtattccattcttctttctgggggtgagttcccatcatatatcattgatcttctttttattaatttgaatattttcaccttgtctcataggtcactggctgaattgggcgtgggagggggcctttcaatttgtgattgggaaacttttctgaatagcagggtgaagagatcttagagaaggttaaacgaacatatatgtctagttttcttggggaactacaactaaatatgtttattctgtttgtgctcttctgtatggtgcccttacaggattttggtctccaacatactgtgaatgaagtgctatgattataacaagttgattgtctgccagatatttgaaatcacttggtatttgcacgactgctgttgacattaggaagctagtagaacttactcctgcaaccgcttgattgattgtcaaagataaaggtggtagaattactgaagagggggaaagggcttccttgtgcgtgtgacctttagacacattaagatgcctttctggtagggctcttcctgctgatgtttttgatatttggtgctccaggcattttaactagagtatggggctgggtgaattgatgcaagattcgcagaacactatagcatgatgaatgataacttggaagatgtgatcactgccattgatctttccaaaaagacctttttccgtattcgattgaattatgtatttgcgatggcttacaatgttgttgctataccagttgctgccggggttttctttccttggttggggatcaagctgccaccatgggttgctggtgcatgcatggctctgtcgtctgtaagcgttgtatgctcttctttgcttttgagaagatatagaaaacccaaacttactacaatacttgaaatagttgtaatttaacgagaattgaaacagaataacttgagggtgcaaataaatttgacccttgtaattccaattttgtgcatttttcctttatatccgctgcacccattggggtgcaattgtaattgtagctgccgattcattgtaaatgctcttgtaatttcatagttcttcctctttaaaacaggcactctaactcaggcgaaagccactgttactgctgctaaggtgtttgcaggaatggaccgtggagattttcttacattggtggcttctgctgaggctagcagtgaacacccactggcaaaagcaatatcgcaatatgcgcgccattttcatttctttgaggagtcttcccctaccagtggtaccaagaatgctgctgaggagttcaagtcagggtggctttatgatgtctcagacttctctgctcttccaggaaggggcatccagtgctttatagacgggaggcgtattttggttggtaaccggaagctgctggaggaaaatggcataaatatttctacagaagtggaaagttttgttgtagagattgaagaaagtgcaaagacagggatactagtagcatatgatgatatattaattggagtcttagggattgcagacccactaaagagagaagctgggagcatacccagatgaatagggctaacaaaatggaaatcactttgtttttgaatgggagacagcccagatgtccaaagctcccattcaaaagtttgctgattatgttgcaagcatatttgttcctacagttgtggtgttggcattattgacactattgtgttggtatgtagctggggctcttggagcatacccagatgaatggctgccaaaaaatggaaatcactttgtttttgctcttatgttttcaatatctgttgtggtgattgcatgtccatgtgcacttggtttggcaacaccaactgctgtcatggtggcaacaggggttggggccaacaatggtgtgttaattaaaggaggagactccttggaaagggctcagatggtgaagtacgtcatatttgataaaacaggcactctaactcaggcaaaagccactgttactgttgctaaagtgtttggaggaatggaccgtggagattttcttacattggtggcttctgctgaggctagcagtgaacacccactggcaaaagcaatattgcaatacgctcgccattttcatttctttgatgagtcttctcctaccagtgataccaagagtgcttctgaggactacaagtcagggtggctttatgatgtctcagacttctctgctcttccaggaaggggcatccagtgctttatagatgggaggcgtattttggttggtaaccggaagctgctggaggaaaatggcataaatatttctacagaagtcgaaaattttgtagtagagcttgaagaaagtgcaaagacagggatactagttgcatatgatgatatattaattggagtcttagggattgcagacccactaaagagagaagctgctgttgttatagagggcctacagaaaatgggagtcatacctgtgatggttacaggagataactggagaacagctcgagctgtagccaaagaggttggcattcaagatgttagggcagaagttatgcctgcaggaaaggctgatgttgttcgttcattccaaaaggatggaagtatagttgcaatggtgggtgatggcatcaatgactctccagcattagctgctgcagatgttggtatggcaattggggctgggacagatgttgcaatagaagctgctaactatgtgctgatgagagataacttggaagatgtgatcactgccattgatctttccaaaaagacctttttccgtattcgattgaattatgtatttgcgatggcttacaatgttgttgctataccagttgctgccggggttttctttccttggttggggatcaagctgccaccatgggttgctggtgcatgcatggctctgtcgtctgtaagcgttgtatgctcttctttgcttttgagaagatatagaaaacccaaacttactacaatacttgaaatagttgtaatgtaacgagaattg

SEQ ID NO: 2288 - DNA, 309 bp, Glycine max
  Clone ID: PAT_MRT3847_102070C.1
tacggctgcgagaagacgacagaagggggagtgtgtgagttcattaacatatacaaattctctgagttgtgttgagtcacttgtgttacttgtgtagtgcgttgtacgaaatttacttcactagagaatgatgatgaaatctgctatgtgggcattggtgcttgaagcactgcttgaggttgaagtgtggcccatggttgaagctcgggtgacttgcatcccaacacaagctgactgcttgtcttgcggcaatgaattcaggttctgaaccttcaagtgcttgttgccagaagcttgatgagcataagc

SEQ ID NO: 2289 - DNA, 424 bp, Glycine max
  Clone ID: PAT_MRT3847_102071C.1
aatctgtactgagacataactggcagatagcatcacacttatacaaaattctgcaattagaaactcgtagaaagttgcgtgttcggaagaaagagctgacaaatgggcaagattgtggatgtctgataatgcaacaatcaataagagtgatagggcctaattgatgcaagagcttgaaacataacaggagcacatcagaacattgggatgcatggaagtggtactataacaagaaccacgttcctgggtaattgaatatcccattaaacgaatgtgggactaataatgggtctgaaatggggacttctgaaagaacaaatcacactccatgggatatgagcttccctatagacaattccagacaaacgacatgtctagatattctctagggaatctctcaagattcttgactggctggctatac

SEQ ID NO: 2290 - DNA, 132 bp, Glycine max
  unsure (1)..(132): unsure at all n locations
  Clone ID: PAT_MRT3847_102072C.1
tgcgaactccgccttctacaactctctcttctgctgcatcttccattcacagaacaagatccaccancttctccttctcgcnttgttccccancaactctcgnttangtcccacagttcctctctcttactg

SEQ ID NO: 2291 - DNA, 381 bp, Glycine max
  Clone ID: PAT_MRT3847_102073C.1
atattttgtggttgtctttttttggaggctgatgccccctgcattaagagctgatttctgaagtacattggacggctctgacctaaatagaccgagaccctatttgtacatttttgccttaacagtttttctgtctgcacctcaggcaccaaatttttgagactatggtaaaaccacaaaggcttaaagaaaaaggttgctccgcaccatcagctggcagaagaaaaaaaacgggacgtttagaggttatagcatcacaactagggttcaagaggaatccattgtcaaaagacaccaccttccattgaacttatttgcagcacaagattcaatgatcattggagtttaagggggccaggcgtgaaaaaactccactaaggg

SEQ ID NO: 2292 - DNA, 248 bp, Glycine max
  Clone ID: PAT_MRT3847_102074C.1
gtccagaccacaggtatcaagacaagagtaacaaacaagtaatccatttatgggaatatcctcaatcagtaaaaataattcaattaacagaccatataagtctgacgaaagacgggaagataagcgagatcctcggacttgctcgaggcccgaatcaactgaaaagcccggctgcagctctggtgatgggcctgcggattatcgatgaggcgactgatcttattgaaaacctcttcggcagctatttg

SEQ ID NO: 2293 - DNA, 249 bp, Glycine max
  unsure (1)..(249): unsure at all n locations
  Clone ID: PAT_MRT3847_102075C.1
ctttgccatcttcctaactaagcttcaccttttctcattatcatcatcttcctccttaattcaatttcagaacccttcctgntccattcttcacttcgcaattcaagaacactcataccccaatactcacgtgcttgccaagtgtccgttgaaattacccttgtcttctccttcttcgacacagcctacgattccagngtctgctgtctcatagtaacaagataaaggtggtcagagcatgcttctctc

SEQ ID NO: 2294 - DNA, 246 bp, Glycine max
  unsure (1)..(246): unsure at all n locations
  Clone ID: PAT_MRT3847_102076C.1
gttctttgcaatactaagattgatacatagttattttgaagactcagttgngaagctcaatcaatagactccataattcaatagtcttcacagcgtccaatttttctacaaccaaaaactgtcaccagtcatcagagaggggcatttgggtggcaaattgtgaagacagaaagttgaatcttggagggggggccactttggggtgnggtttcgaaaacaaagaggagagagagagaagaagggggg

SEQ ID NO: 2295 - DNA, 456 bp, Glycine max
  Clone ID: PAT_MRT3847_102077C.1
acttcacacagcacactgacaccctgctataacatgcaaatagtcatatacacatgaaaacacttcacacagcaccctgacaccctgctataacatgcaaataatcatatacacatgaaaacacttcacacagcacactgacacgctgctataacatgcaaatagtcatatacacatgaaaacacttcacacagcacagcgacacatggctataacacgcaaatagtcatatacacgtgaaaacacttcacacagcacactgacacgctgctataacaaatagtcatatacacaaaaacacttcacacagcacactgacacgctattacacgtagatagatacacgaaaacacttcacacagcacactgacacactgctgtaacatgcaagtagtcatatacacaaaaacacttcacacagcacaccgacacacggctatgtcagaaaggcgtgca

SEQ ID NO: 2296 - DNA, 367 bp, Glycine max
  Clone ID: PAT_MRT3847_102078C.1
cgaatatcttgttgtttggagcgatccgagaaaaactctgtgaacatgttggtttaccaggacctccttacaggtgatgagcttctctctgactccttccgttacaaggaaattgagaatggaatgctgtcggaagctgaggggaagtgggttgataaaggaacagttgatgtaaacattgtggctaacccttctgctgagggtggacgagaacatgagccacttgatgatccacatcttcaggaaggcggcattgttgccacattaagacttcaggagccacccccattcgataagaagccttctgctaccttcatgaagaggtgtatcaagaatttgactcccaagctccatgcagaccaacacg

SEQ ID NO: 2297 - DNA, 496 bp, Glycine max
  Clone ID: PAT_MRT3847_102079C.1
tacggctgcgagaagacgacagaagggtacttcaacaagagcatcacagtcacatctagaagcacacgtatgcacaggttcaggtcgataactctcaagctcatccaaaattgttcttagctttgtaaaataatcaataatattcatgtctccttgtttaattgaagccaatttatgttgtaaatcagaaatttgaagcaaatcaccttgtaagtatcatgcactagcatgtgctacatgtgaattacaatggttaacccacttgcttaatgattttgggattgtttacactcgatcagctcttttgttttgtgacaatcgccctattcttcacattgttgttaatcctgtctttcatgaacacacaaaacatattgagatagactgtcacattgtgcaagagaaactacattcaagtcttattaagttgttgcccattgcttttgctcaacaacttgcaaacatatatactaaagcacttccaccaagagctttc

SEQ ID NO: 2298 - DNA, 1113 bp, Glycine max
  unsure (1)..(1113): unsure at all n locations
  Clone ID: PAT_MRT3847_10207C.1
ccttcgcgtccgcccacgcgtccgcccacgcgtacgccgcgtccctctctctctcatctctctttctctctcttcgcccggaaagttggacaataccaccatcatagcgcatcatcatcagaattccaagagtgtcatgggggaacaaaaagttttatttttgttgatagagggttttactcggttgaaacgtttctgcttctgctcgcccttaaggtaattagaggaaatagtgtggtcattattgagatgatgttgtcgagaatggaggctgggaagaagggtggtggagtgaatgacaatgagaaaaatgacatatattataatcctgcgatggaaaagaggaattagaaatcgaaattcattaagcttgttctatgagctaaaatcaacttactcacttcaacttgcggagaaattagatgagaaacttttataaaaattaaatgcataagttgattttagctcatgagagaagctcaattcattttaacttcctaatttcttttccaattaagtgcttgtttatccaaacagaatcttagtcttctgatgtgaagtcctagtttgcatattttagttgtcacagttattgacttgagcaattcatgcatgagcaaggtatctatagacacaccaaatcaaaagctttagaaaatataaaaataactttcaacaatattcttttttattgttatcttcatacatccttagcttttgattggtcgtgcctataggtactttgcttacatatataataagtgctcaacctgatcccttaaactgagacttatctgtctttgatgaatttaataacatacgtgcagagatattgtgcctgagtactcaacaaaagtaatggcacttgcttctactttgtttgagttactgtcagaggctcttggccttgatcgctttcaccttaaagaaatgggttgtgatgaagggcttcttcatctgtgtcactattacccagcatgccctgagccagaattaactatgggcactagcaggcacacagacggtaacttcatgacaatacttttgcaagaccaaatgggtggccttcaaattcttcataaaatcnaaggattgatggaccgcaggcatcaa

SEQ ID NO: 2299 - DNA, 472 bp, Glycine max
  unsure (1)..(472): unsure at all n locations
  Clone ID: PAT_MRT3847_102080C.1
aattcggctcgagcttttttgtggtttatgatatacatatatgccatcttgaagttatggaaactattcttgtagtgcctgtttttcatctcattttgaaaaatgcaaactataatttgcaaagttgttgacatatgagggtgactgctgactacttgataactcatgtttagagtccatcttttaactgttaaatagcaatttatgatctttttgtcaattccctgctggtgaaagggctccattaggcctcaatatgagtcatttaataactgaatcatagtttcatggagttggattttgatatttggtacaaaaatgctttggaagatgtttttatagctatagaaataattgtagggggagttggttaagtaacaagaaacaccattttggaatgataatgtacatagtttgtgaaagggaacanacaactccttgtagtactaccctgttttggtgggatagaaac

SEQ ID NO: 2300 - DNA, 1168 bp, Glycine max
  Clone ID: PAT_MRT3847_102081C.1
aagattctcccaagcttgaggttctagctagtgaatctttatctgagattgtaagagatgcggttgatgatgatgtgacaagtgaaagtaaagttgggtctgaaccttctactaaggtgcttcctgaatcatcttctcaccttttgacaaaagacaacagtagtgcagacctagacaattcaatacaccaggatctatcagctgggtcatctggtggaagttcagtcctcaatgaacctcccgttcgtgttcctggacttgaagcttcttgctgtaaagatgctgatcagcccagtcctgtctcagtcctggagtcttcttttacagatgatgtgtcatcttgttctgattgttttgaaagtttgaacaatgacctacaagggcttcgaatgcaactccagttgctgaagttggaatctgatgaatatgtggaggggcccatggtagtaagtgatgaagatggtggggaagcatctactggaatgctagaagacaaaggattacgtaggactgaagatagctgggagtgttcctacattattgatgtcttgtctgaatctggcatcgatggagctcacccagatacaattttggaactttggcattccctagaatgccctgtgagtctttctgtttttgatgagcttgaaaagaggtatggtgattggactacttgctcaaggtctcaaaggagattgctttttgaccgtattaatttgggaattgtcaagatcaatgagcaatgcactcatgcactaccatgggtgggtccagtgaccgcaaatgttattggttctaatttgaacaagaacgggtttcgagatggccttctgaggatgttagtgagagaaggaaaagtgaagggtgatgctctggggaaggtgctggttatggaatcagagtggctggacttgagagatgacattgatgtcgtaggcagggaagttgagagaatgttgttagatgatttagtgtcagagataatcggtacttagaaattttgtacccgtgatcatattattagctcattaagatagttttccagtttttttctctctttcttttcttttttctttggggaaattagatagtttcccagtgatgtaaatcgaataggacaatgttaatttcatcaaaagatgaataaagaggtcataatctttcggcc

SEQ ID NO: 2301 - DNA, 374 bp, Glycine max
  Clone ID: PAT_MRT3847_102082C.1
gccttcaatggtgttttctttgtattggtttttaggggaacatgataaccaatttaccagatgggcaaaaataaaaattaaactgcgtggctttttttataatcatatcgattggggccgcattacatgtacccaaagggcccaaactaacttcttattagtttaaaagttttaattcgtaaaacgtccataaaccattaatatttacaatgtttttcaagttggggggcagaaataatacaattttccatttattaggggtgggtaaacaaaggaatttttacactttatgtgttttcaaatttgggcgtttggttaaccaactttttttctccttaataaaggactcccttttctgtcttaaaaggggctgt

SEQ ID NO: 2302 - DNA, 251 bp, Glycine max
  Clone ID: PAT_MRT3847_102083C.1
cttcagaattgccgctgtcgccgcccgcacatgtggaggaagaacgcacagacttcttccaatggttttctcgaggcctggattagtgttgttcccattcagtttttaggtacggcagtccgtacgctaggtatatgtatgatttatcatttatgagttgaaaaggtatatcacagtaattttcttaaattggaataaatgctggtataagccaatggtgaggatgcaataaaaaagatcgacgcaattgt

SEQ ID NO: 2303 - DNA, 1285 bp, Glycine max
  Clone ID: PAT_MRT3847_102084C.1
ggacttgtgaacagaggagctgctgtagcaaattctatatcttattggttgaatgttactatactctcactctatgtcatgttttctccttcatgtgcaaaatcttggacaggattttccaaagaggcactgcataacattccctcatttgtgaggcttgccattccttcagctgttatggtttgcttggaaatgtggtcatttgaattgatggttctcctttctggtcttcttccaaatccaaaattggaaacatcagtgctttccatctgcttgaatactacagcagctgcttggatgatcccctttggactaagtggagcaggaagcattcgtgtctcaaatgaacttggagctggtcgtccgtggaatgcacgtttagcagtgcgtgttgtcttagtactagcaattattgagggcatcatagtgggaacagtgatgatacttgtacgcaatatctggggctatgcatatagcaatgaagtagaagtggtcgaatatgtagcaactatgttcccaattctggcagcatccaactttctggatggactccaatgtgttctttcaggcactgctagaggatgtggttggcagaaaattggtgcatttgtcaatctggggtcatactatatagttgggattccatcatctatcgtgtttgcttttgtattgcatattggtgggaagggactctggttggggatcatatgtgcactcattgttcaaatgtgttctttaatgatcataactattcgtactgattgggaccaagaggcaaagaaagcaacagatagagtctataattcagtaacacttgagagcttagtttcatgaagatgcaatatcgttgcagttgcacattctgagttaaattctatttggatgaaaacaatacatgttttggtatccttcttttggcagaaaagtctaggggcaattatatatgcgcgaaagatgatagatgatgcagttggccattggaagtgaataaagtggttttattattttatttttatgtatgtgttggtaggggacgtcttgatgttttttggagggaaaagattatgttcttgtgtagaagatactaaatgtgattttgatctagttattgaaaacctttcaatttttctcattgccccactggtgagtctatggttggttatattaggggtaattttgtgactgtaaactaagtttcggatagaatagagtagtacaattattttatcttgttgtaataagtcatttgatgcactaatggaatattttcttatttcaaaaaccc

SEQ ID NO: 2304 - DNA, 320 bp, Glycine max
  Clone ID: PAT_MRT3847_102085C.1
ctcaaaactacagtttttacgaattactgctgcgtgaatgtgcatatatgaattggctacctctatagtcttatctatggctatactgaacccgaggaaatggcatcggaattgctgggggaatagacaatgtccacattatataactaaatatcagacgcagactttgtgctgtcccagtgggaatgatttgaagagctattgcgcctatcctgatgcctaagaaactgacatcggaagttctcaccatagtccaatctctcagatatgataatgccgactgctatgatgtgtatgtgtgcattgtctttatttatgcc

SEQ ID NO: 2305 - DNA, 102 bp, Glycine max
  Clone ID: PAT_MRT3847_102086C.1
ggttatcaaaaggcagaacgaaagcaatcaatagaagggtcggctacgaagcgagaaagcgaaacccaaaacatgcacacgtgggacaacccagcaggaaga

SEQ ID NO: 2306 - DNA, 478 bp, Glycine max
  Clone ID: PAT_MRT3847_102087C.1
gacggctgcgagaagacgacagaagggtaccttcactttatttgtctttcccgcagacaaatattggattaattatattggggaatacgtacccaagaccatcttgagagaagaaagcaagttatcgatgccataatacctgtcaaatgccccacaggtatattttgttcatgcacatgcatcatgtcccccaaagtttaatttgaaggggcttatatatagttttgtatttgagaaagggggaaaaaggagaggctttttcttcatcttgaccacttttccaatggattacggttatggtcatggttgggtagtgattactaaaattgccagtaaatgtaaccaatgtagccgcaattataattgtgatatgattttagagatttaagaaattgtgaatggatcataatttaaaacaattgatgaataataaattgaaaaaaaatataacagtgtacaataatgcaccttgtatacc

SEQ ID NO: 2307 - DNA, 696 bp, Glycine max
  Clone ID: PAT_MRT3847_102088C.1
gaaacccaaaataaaatcatttcctataacctttccctttaattatcccattcaaatatggacaataatattctgttctatttggggttacaaagtatgattctaacattagcagcagggggggcacattttcttcatgaaagcagggtattctgtggggcaagatatattcttttgactatcatgagtaataaatagcccaaactcagttccaataaccagaagtagagaatgtagcacttgctaccagctttaaggtcaaaccagcaatagcaatggcttaaattaaggactcaaaagctgacacaaatatctcacttggatcactgcagcaagctgggcaagtgtaaactaccctttatactcgtgcaatgggagacaaaggtgggtttagcacgtagggtcgaaaaattcccttatgaatcttggacacattcttattcccttctttggggactgagttgataaataactctacctcctcctcaagaagcattttcaatgaattgcatcgagatatctgttggttttttgccttccccgccccactgaaggtggagttgccatgcaaaatagcaacacaaatggagaaagcttgtaacggggataggtttgcatggaaatcaactgcatattgcccctcttcaaccatcgtcatgccaaaggtaggagttctctctttggctccctatgcac

SEQ ID NO: 2308 - DNA, 742 bp, Glycine max
  Clone ID: PAT_MRT3847_102089C.1
ccacgcgtccgatttcttttaagaatttaacgtatcaataatgtttagtaacaaataactacaatggtgtacttgtttctctcttctcatgcttcttgtggcagtaacgaattcattttgttgaagttactatttgctcttaagttttaatttatgataaaatttcagacttgttttggtgttgttttgttgatcgttatgggtgaattttagatttcatgtataaatttaatagacatgtattaatgaattttaaaaatactgtattgaatgctcaacttgtttgttctttgataattagcctagaattaggcttgctgtatttattttactttcaatgtagtttggtcaattctagaatgaagcttctttcttgtttacatggagaccaacaaaaaaaaaggcccaacaaaaagatacaggaaaaaaaaatttgaaaacatactaagacgattctaagaatgacaaacttagtatattcgacatattacaaccgttatttgaataaccgtcttagtatgtagtgacaatctaagacggttatagaataatcatcgtagaaactctattattaagaagacatattaaaatgatttttgtaacaaccgtcttagatttgaaggactttctaagacggttataaggataattgtcgtaaaaatgtaacatacaaagacagttgagaaaatcgtcatagtattttttttttgttttttatgacgctcatattatgacggttcaa

SEQ ID NO: 2309 - DNA, 578 bp, Glycine max
  Clone ID: PAT_MRT3847_10208C.1
ggctcgaggaaaataactgaattttccgtgctggtttctccccactgacacaagttgtagttttttaaaattatattatttacctaaaggatttcagattttgagttcatgagagcaatgtaaaagtgaagttctgaactgttaacaagtttggaaaactttgtgcagtgcagtgtgttaagatggaagctatgttcatcttcagaagcagtcatggaaaccagaaattgaagatttgaagtgatttcttcttagaaatcagaatactagaaaatactagcacagaaataatgtgggatttcctcctttctttacatgagttttgtttcatttaggagaaaaaaatgcaagttctgcatatttcatgcagcaatttttgaacttgtcctcgtattctagattctgcaagtttagacaatcagaaatcctgagccaatccatggcttttcattggttattttaatttgttgtgtcctcaggttcttaaaatttcagcattatttatagaaccaaatgaggaattccctgggtatagcctttcccataaccatatgctttatcgcttttgtgatatcgaa

SEQ ID NO: 2310 - DNA, 315 bp, Glycine max
  Clone ID: PAT_MRT3847_102090C.1
ccgatggtaggctagcgctgaccatcatggagggaccgtgttataccttgtggcgagggaatgagatcattgcgataccataaggcgggatctcacactgggtgatcacatagcctgtgaccctcaaatatatggatggaagactgagaccttattgttgtacgaagctactgcgtagccctaactttgactgacgccacaatggagcttgctcaattaaagacaagagtaacttattggaggctagctctttgactgggcaggtatacatgatgagtggcgaaggagagtaacttgcataattcattgagcatc

SEQ ID NO: 2311 - DNA, 147 bp, Glycine max
  Clone ID: PAT_MRT3847_102091C.1
gtgatgagatggagtgtgtttggtgaagaaatgaaaagagtgggttatctagcaggtcctatgatcaatgtgactttgtcacagtattttctacaaataatatcaatgatgatggttggtcacttgggtaaacttgttctctctagc

SEQ ID NO: 2312 - DNA, 227 bp, Glycine max
  Clone ID: PAT_MRT3847_102092C.1
aataagcggggcgaccgacgcgtccgttcttctgtcctctccacatgagtttttttttctacttaaagatacttgtatacagggcattggtattcagtgcacgcacaggagctcccatatctcttctattctattacagttagacatcctcttatggttgttgtcactgctgatataaatcttattgtttacaacttgcaaaaccctcaatttgattttaagagtat

SEQ ID NO: 2313 - DNA, 449 bp, Glycine max
  Clone ID: PAT_MRT3847_102093C.1
ccggaacggccggcccggcccgacccacccgaataaatgcacacgcaaaaaaggcgacgaagagggcgaggaaaaagaagagaacgggacggacacacccccacagagacgaaaaccaccaacccacgccgagacaaccaccggagcaacgggacgacaagacaaccacaaaccaaacccaaaggacacagccgagaggagccaccccacgcaccagagccagccccaccacagacgcatcgcgaaacccaagaaaccatacgccccaaaacggacgcggggacaaggacacacgaaaagagaccgagaccccaagaggcagaaaaggccagccccaaaaggggccgaagaagaaccagcgactcaaaaaccaacgcaggcccaaaaacccgacgaaggaacaggaaccaaacccgacgcggaacccaagcccgaaccaaaagaagaaa

SEQ ID NO: 2314 - DNA, 464 bp, Glycine max
  Clone ID: PAT_MRT3847_102094C.1
aataataaatattttaagtttattaaagaatcaatattaaaatatattatattaaaaaggactgttttatataaaagaaaacctcaccggattgtggataacaggagcaacatctgtttgtaacctgggactctcgctctttctgtacaaaaaacgtacactatttttgtccaaagaagggcaaaaaccgttttggaaaaaaaacgaaaccacactttttttaaaactgagtcacccaatttgatttttaacaaaaaaaaacaaattggtttttaaacaaaattgaaaaagaactgaattaaaaaaataaaatttgaactggttgaaaaaaaaatttaaacagaggggggttaaaaaagtttatgaagtgttgtttaagtagggtaaaaaagtttaaaaaaaacaactggaattgggttggaagtcaaaatctgagattgagaagaggaacccactttcacgag

SEQ ID NO: 2315 - DNA, 223 bp, Glycine max
  Clone ID: PAT_MRT3847_102095C.1
ctctgcgggtctttttgaaaaccatcaaagtttcttatccatagaaatctcgagtacaaaagcaccatcttctctcttataattctgatttacatccacaaagaaataagtatgatgcccatgatgacccggccacatcattaatgctacgaaggactgaagcgcatgcaagagccaagaatatgcattgccaccaagctgccaaacacaatgccttgaaaac

SEQ ID NO: 2316 - DNA, 1130 bp, Glycine max
  Clone ID: PAT_MRT3847_102096C.1
cgcgcacgtaagctccgttttgggctcaagggggtcagtggaggctgctgagaggaacaagctggtgtttatggagggtggagtgtacggatttgggttggaggatttgttgagggcttcggcggaggtattgggaaaagggagcatggggacttcttacaaggcgattctggaggacgggaccacggtggttgtgaagaggttgaaggacgtggcggctgcgaagagagagttcgaggcgcgaatggaggttgttgggaacgttaagcacgagaatgtggttcctctcagagcgttttactactccaaggatgagaagttgctcgtctacgattacatggccgccggcagcttgtctgcacttcttcacggaagcagagggtcagggcgaaccccgttggattgggacacccgaatgaaaatagcactgggagctgcaagaggcctcgcctgcctccacgtgtcaggaaaactggtccacggcaacatcaaatcctccaacatcctcctccacccgacccacgaagcctgtgtttcagacttcgggctcaacccgatatttgccaacccggttccctcaaaccgagttgccggttaccgggcaccagaggttcaggaaaccaaaaaaatcactttcaaatccgacgtctatagctttggcgtcttgatgctggaacttttaacaggtaaggcaccaaaccaagcctcgctgagcgaggaagggatcgacctaccacgatgggtgcagtccgtggttcgcgaagaatggaccgctgaagtgttcgatgcggaactgatgaggtaccacaacattgaggaggagatggttcagttgttgcagattgcgatgacgtgcgtttcgctcgtgccggatcagaggcccaacatggatgaggtggtgcacatgatccaggatattagccgaagcgagaccaccgatgacggcttacgccaatcgtccgatgatccttctaaaggatcggacggtcacacacccccgcaggacgctaggactacccctaggtcggacacgtcgtagtagtgaagctgtaaaggcaaaagaagaagaagaagaaaaaaaaaagaaggaaaagaaaaagaaaaattcgttggaattggaaaaggaaaaa

SEQ ID NO: 2317 - DNA, 530 bp, Glycine max
  Clone ID: PAT_MRT3847_102097C.1
cctgcgcctcccttttcggcggacacttcgttcttctgcttcgtccaccgcatccctatgcttcaagctctctctctcatctcatataattatcgagatacatgttcgcacctgacccaccttccattttcagatcactgttacaacaatatctattctatggtctgttggagggtgcccgccacctgtttgacacaatggctgtgacggatatcgaaactcatttttataatactcgtcattaaggatgaatatgatgggacatacatgtgtgatcttgggtggtgtaggtaagtcattttgctgattgaagtctaaaaggtttcctacgtcaactatctatgccaaacagaagaaaaacaagcaagggacaagttgtccctagtttctgctttctccttggtggagcttttttttcccttctgctttagttctttctccttgggttgttcctaatggcagtggctctttcccgtttgtcgtgtttttcatagttctttgcaaataaatttgcatacatttgttggatt

SEQ ID NO: 2318 - DNA, 226 bp, Glycine max
  Clone ID: PAT_MRT3847_102098C.1
atcttctgctgtgctcaggaagcaataatctccattggcctgtgttggattgatactttgatcaaaaatggttggaaaaacttttttcaaataactagaaagtggattggggcttattaataatattggcattccaaaagggcttgggatttggagagggcttgaacttatattaatactggtggtattgggtctgggggtttttctcttggaatgggcactttcc

SEQ ID NO: 2319 - DNA, 300 bp, Glycine max
  Clone ID: PAT_MRT3847_102099C.1
gtttctaccattgggttcaacgtggctactgtggtggacaagaacatttttttcactgtctgggttgttggctgccacgacaagattcgtcccttgtggaagcactgctttcaaaatacacatggtctgatttttgttgtttacaccaattacatggacagagttttttcttgtcagatattagctgcacattatgttgaatgacgatgaacttagagatgtaatatttcttttatttagctacaaacaagatacttccaatacaatgaattctgattaaaatacttacaagatgggact

SEQ ID NO: 2320 - DNA, 580 bp, Glycine max
  unsure (1)..(580): unsure at all n locations
  Clone ID: PAT_MRT3847_10209C.1
aaaaaaagatgggcacattttttttggtacaaggaaaaaagtccaacccaaaaatttctatcgggaggggaggtactgccaaaattatccaaaaagaggggacagaacaccagaaaaaggaaaacgcccccgctaaaacccgtgggcccgagttatttttaatgggcgaagtccaattcctgcttccatttccctgcgcctcccctcgctggaaacctgncccggggtgccctcttcccccccnnnnnncccccccccccccccccccccccccccccccccccccccccccccccccccccccccccccccccccccccccccccccccccccnnnctccccccccccccccccccctccccccccnccccccccccccccccccccccccccccccccncccctccccccccccccccccccctccccccccccccccccccccnncccccccccccccccccccccccccctcnccttccccccccccccnnccagccccncgacccccccccccccccccccccccncccccccccccccnccccccgcncccccccccccccccgnccccccccc

SEQ ID NO: 2321 - DNA, 287 bp, Glycine max
  Clone ID: PAT_MRT3847_1020C.1
atcctctagagcggccgcccggtttggaggaggatggtgctatgattcgcacattgggtggaggactgaccattttgatccctagcttggaatgggtggatccgacacttgcattgcccttgaagtattatgctcagtgcagagggcaattgtgaggctagcgcgcctgtgacgagcgagacagtcccaactgcatgacggacttgcaggatcgtcctaacccactacaagtttgtttcttgtgaggccaagacctggccctagaattacagtaacctgttcctgtt

SEQ ID NO: 2322 - DNA, 233 bp, Glycine max
  Clone ID: PAT_MRT3847_102100C.1
atacttcaacggtcacccttgcagctcataaccaaactacctctgcttaagatactgaagctctggcacccgctgtcaaaggatggggggctgctgacaaagccattattgctatacttggtgacagaaatgttgttcacaggccagaaatcagaaaagcttatgaggagacataccaagaggatttgatctaacgcactgagtcttcgatctctagggactctaagagaact

SEQ ID NO: 2323 - DNA, 400 bp, Glycine max
  Clone ID: PAT_MRT3847_102101C.1
aaaaaaaacctttaaaaaaaccgggaaaatgttctttaaaaacgggggaccggtccccaacaaaccagggggggaataaaacggggacccggggagaacgtgcccccaccccgggggaaaaggaaaacaaaaagggggcggtggtttccccacacccccgagggaagggagaaaagggattcagaaatgggccaatagaagaggaaaaaaccccaaaaaaaggggaacagacccccgaaaaggggcaaattagtaacaaaaaaagggagaaaaaccggcccggggggggggaaagccaaaaaaaaagggcccgctggctctcgcccagccgctccgaaaaaccaaaaataacagggccccgtgaagggggaaaaaaaaacccaaaaaacccgcgtccccc

SEQ ID NO: 2324 - DNA, 443 bp, Glycine max
  Clone ID: PAT_MRT3847_102102C.1
tccttgcgtggagtagttggatatattcgaagcgcaagatatcattacaagcaacgtacggtggttagtcattaaatgaaattataatttgagtattcaatttctgtcaagtttgacaatctggaccagctacatttgtttttaatcgttgtattaaactattaattaattgcggtttccaaattgtattattgctttttacgatctcaaatagatagaaacaaataagtttatttgcttgatggatgttagcatgggagacagacactagtctgagatttttagctttgttcgaaagagaatctggatgtaatctgtagtttagttttttttttattattattattgtcttgtgaaaaggtgagtgttcgtgtttttgaagtgtgatgcgacctgttctttgatgaaataagtctattaaatacgggggagtatgataatgg

SEQ ID NO: 2325 - DNA, 1290 bp, Glycine max
  Clone ID: PAT_MRT3847_102103C.1
ctgataactctatcggcacaagaaacaaaaagtttcggttaggagttaaatttctgcaatctacttccgttagcgttagcgttagggaaggcagaagtgaagccttcagggttaaggataaacgaggagagccgtacaagaaacgcgaccgtccctcgttgaatgatgaggtatggtgtctgaagaatataagaagaaacggtgatcttcacaaggatcttttgaagaataaaataaaaactgtcaaggatcttttgcgcttgaacacaatcggttcattacgggagaaattcggcaaggttaaaaaatgggacgaaatcatcgaacatgctgaaaaatgtgcagttgacgatgatgggttctacatgtatcgctatgatgcaaccgtttcccttgtcttgaactgcatctataaggttgaggcgattttttatgggcaacactatcggtctctgcaatctctgaatttggaggagcagcgtttggtggaaagagttaagcaggaagcataccaaaatttgcagaatctggtgccaattccgacgccaccaccacatgacatagtgaagactttgacgggtacacaatacggttcaccagatcaagggcaatcagaactttggatatccaccacctcaacatcaattgtgcatgaagcgccactaaacttgtctggtgggtcgcaggttgtccccgttgaaacatataatattgatgatggaaccggatgggacattggtcaatttgaaagttacattcttcctaaccaattattggagccagttaatccttgctcttttccctatggcgatggagcaacatctagcaatcattcgtttttcctcaaccctgctgtgtatacatcaagcaaagggaaaagcaaaacagtttggcagaagactcgaaacattctcaaatgggtcatacctcatgtcaccaaatggaaggtgttccgacctcaaatccttcaacattattaggtggactgttaagaaaagtatttcagttggttgagaagaaataatatttataaaccgactcttaatcttgatttctaagctatcgaaaaggagacaaaactttttctgtattgaataatagtactcgattctttaagtttgggatttgtatttattccctcaatatgtgtttttccaacgccaggtgtcaatttctttaatttagtatttattagtttataaattacttgtgtcaatttatctgtacccattgccattaggccatgttaattcttttctgtaaaataaaaaatagcattaaaaaagtgtg

SEQ ID NO: 2326 - DNA, 195 bp, Glycine max
  Clone ID: PAT_MRT3847_102104C.1
tccagacgcgttgacaaatgcattcgtggttcactactacagcaccttctacaccaacaggaacttgttaacgaatctctaccaagaattttccatgctcactttcaaatttcacaatatccaaatcacttccaacatctttgccaagcttacctccatcacttttcagcatttccatcactcaatctccaccgt

SEQ ID NO: 2327 - DNA, 358 bp, Glycine max
  Clone ID: PAT_MRT3847_102105C.1
ggctcgaggaaggaatggaggttgaaatgaaagccactaccctcgtggcgggcttgttcaaagatgcagaagcacaatcctccaccatataacatgctttccgccccaagccttgcttctacttaactcgccaagaggacttctctgagcgctacttggaggccgatgggatcaaacacctccaatcatctgggagcaccgctgactaacatgatgatcactagtgcttcctgggcgaaaggtgatgctaaggaacaatatgagccaccggtactgtcatgtgctgttaatgaaggtcctaatctaaacactgctcatccatctttcatagaacctacactttctgcaccaacattgg

SEQ ID NO: 2328 - DNA, 383 bp, Glycine max
  Clone ID: PAT_MRT3847_102106C.1
tttattttttaaggttaagtttttccccaacaaaaagaagaaaggagcaatttttattaattaattaaaataactgcgttatacctttttcttcattctatctaaagttgaaccacttagattgcaatcctaaaaccttatttgttcgtttatctacacaggaacaaagggcggtaccattggatgcgggctttcctacataagggagccgcaggatgctgcctctttcttgaacgacaaggtgatcttctccggttccctctgaggtggcttcttgcggtggttttagattgattggtgttggatatgatgcctacgtcgagaggagggggatggttaagttctatattaatgcgtcggtatttttactaggaaggaggggc

SEQ ID NO: 2329 - DNA, 266 bp, Glycine max
  Clone ID: PAT_MRT3847_102107C.1
ggacctgaactaaatccccttttctaaaactggcttttttccaaataggcccttaccgaattggcctttccaaaaggttcccacccagaatggcaaaagggacacgccctttgggggcccattaaacccggcggattaagcggttacccccaaggtgacccctataatttgaacgccctaatgccccgtcctttagatagatttcctttctttttttgccattttttcggctttccccaggaaggttttaaatggggggcttcttt

SEQ ID NO: 2330 - DNA, 177 bp, Glycine max
  Clone ID: PAT_MRT3847_102108C.1
gggggtgacatacaaaaggaatgtaccctgctcttggtttagaggcttcttggtggactgcagatcttgggaaaaactatgacgggaaaaacgatgccctcataagatgggaggtctcataccattgatcacgggacggcgatgatacaacacatagacgggattccaccagaccag

SEQ ID NO: 2331 - DNA, 467 bp, Glycine max
  Clone ID: PAT_MRT3847_102109C.1
tacggctgcgagaagacgacagaagggggcctgctagtgcgatacacatttcactcaagcttagttcttgtgctccactctcgtcaccacagagaagaacttgaagttgaacttgctctgagctccgagaaaatgtgcatcggagtccgttgcttaacagtgctgggcgagttcaagccatttggcctcattgccgaagctctcgacggcaagccccccgacaccgtcaccgacaagtacgattactttctcttcgatcccgaaatcgctcgtgaccgtgacgccgatgacgattgcgacgacgtcgcttctgcgccgagcaatcgtggggatcacgagctgttcatccgaggcaatcggattatatggtcgacgggtgcgagagtatttaagagatttaccttgtcatctgacatcgttaaaggttgagtttttgagttttcatgctttgaatttgaattaaatga

SEQ ID NO: 2332 - DNA, 207 bp, Glycine max
  Clone ID: PAT_MRT3847_10210C.1
ctacgcggtctcgtttgcggacgcgtgggcggacccgcgggtggcacgctcaaagactgcatgggctgcgaggagaaagacggaggggaaggagcaggctgtgttattgagagccatcaacgcctcagaatgacaaccgattgtgtcagcggtctcattgcagagctcatggccggactaccaggagccggctacacaagcgctgga

SEQ ID NO: 2333 - DNA, 204 bp, Glycine max
  unsure (1)..(204): unsure at all n locations
  Clone ID: PAT_MRT3847_102110C.1
cctctctaaagcttcatgcgtgattgcgtgttcgctgctcgtttccaccatcatcgacaccacctgcagccacctcgctgcccactacaccgccgccatcgactgtcgtcgaggcgctgttcaagaacattgatgggtcgatgtgttggggtgcgagaacccanattgggttttgtggggttntttttnatatctggantaaaa

SEQ ID NO: 2334 - DNA, 442 bp, Glycine max
  Clone ID: PAT_MRT3847_102111C.1
ggagaggaaggtttttggttcacggggtcagggccttaaggatgaaataatgggtcagaatccccttccatcatctacaagtaatgggaagagttctaatcctatcaagatagtgaagagggatgcccactctgtgagattaaaactggctgttgggtgtttgcccgaaaaattgctaacatcattgcattctgttcatgatgaacatcttaatgaggaatttgccttaaacaagtgcaatgctgttgtacaccaagtgggtaaacttgtagaagatgcggaaaatatattggctcaaggaaatcagctgggatccacattggcaaatgacttgcaagaacaggaaaatgagcttaagcaatatatggtgcaacttgaaaatgccgaggctgccagggctactttatttcccagttaaagatgcactgcaggaacaggaatc

SEQ ID NO: 2335 - DNA, 1489 bp, Glycine max
  Clone ID: PAT_MRT3847_102112C.1
accgaccacgatcatcatccctctttctcttcaatactactctcaactcattcttctctctcaaaaaccattagaaacgaaaattaagcaaataacaagaaagaaacaatgaacgacttgttctccggttccttctctcgcttccgcagcgaccagtcctccccggaccgccaccacgacatcgagatgggcgccaccgcctccggcggcggtcgcggcggcgaggtgaaccttgacaagttcttcgaggacgtggaaggcgtgaaggaggaactaaaggagttggaaggtttggctcagagtctaagaagcagccacgagcagagcaagacgctgcacaacgcgaaggcggtgagggacctgcgcgcacgcatggacggcgacgtttcggcggcgctgaagaaggcgaagctgatcaagctcaagctcgaggcgctggagcggtccaacgccgcgaaccgcaacatgccaggatgtggaccgggtgtcgtcctcgctccggacccggtcttcagggatcaggggtcagaaggggaagttattgaaggctatggggaaatataacgagtttctagatgatggcatttacgactatcgcgtcactgtgaaacctctttactactcttttaccggtgttgattctgattgtggttggcctgctttctttgagggttttcccggcgccatcaatcgaacccctgacccagatgggaggaggactgagataacctgtgcagcctgtggtgggcacttgggtcatgttttcaaaggagagggattcaagaccccaactgatgaacgccattgcgtcaatagtatttctgtcaaatttgttccgggaagtgctactttttcaatatgaaaccttacttgctctattggaggtgtctattgatttgtgcgcactggagctgagcagttgcagactgcgcggaagtaccagaagaacaccaggaaatggacctgctattgtatcatacttcttctggtgatcatcttgtttgtggtgctcttcactgtgaagccgtgggaaaatagcagtagtggcggcaatggtggtggtcagcctgcaccagctcaaacacctccatcaccttcacctcctgtcaatgcttaaccttgggggactacgagtctatatttcacgaagcattttggtttcatttattttgatttgaagattgatattttatattttgggatctagcatgggtgagagaaaaatggattggcttaagacttgggaggaaatctgttagggtgaccagcagtttcatttcaatctgggggaagggaatggttggttgttctgtcgaggtaggtttttggacatcattattttgagcatcatattctttttctgtaagtagcttatcagtttgaacagtttaattgctgactgatggtttatataatatgtatggcatctttccctacatatgatgggcagtatcttactgttcccttatgctatattactgttccctta

SEQ ID NO: 2336 - DNA, 673 bp, Glycine max
  Clone ID: PAT_MRT3847_102113C.1
tttgtgcgcactggagctgagcagttgcagactgcgcggaagcaccagaagaacaccaggaaatggacctgctattgtatcatacttcttctggtgatcatcttgtttgtggtgctcttcactgtgaagccgtgggaaaatagcagtagtggcggcaatgggggtggtcagcctgcaccagctcaaacacctccatcaccttcacctcctgttaatgcttaaccttgggggactatgagtctatatttcacgaagcatattggtttcatttattttgatttgaagattgagcttttatattttgggatgcagcacgggtgattggcttatgatttggtaggaaatctgttgggttgaccagcagtgtcatttcaatccatggaaaggttggatgattaatctgagtttgtaatctgagggaagtgaatggctgattgttctgttgaggtaggttcttggagatcattattttgagcatcatattctttttctgtaagtagtttatctgtttgaacagttgtattgctgaccgatggttataaaaacatatgggatctttccctaaatatgatgtacagtatcttactgttcccttatgctaaaaaactgttcccttattagcaaaaaaaaaaaaaaaaaaaaaaaaaaaaaagcggccgctctagaggatcca

SEQ ID NO: 2337 - DNA, 892 bp, Glycine max
  Clone ID: PAT_MRT3847_102114C.1
ttcgacccacgcgtccgaacaactgttacatttcttaccctcccacgcgttctctagtgtcatcaaatgggtaccctcggaaacgaacaaccaggtacccagatcccagaaaacgctaaaagtttttcccttttcagatacaattcacccttcattcagatcgtactcatcgggttggtctgtttctgttgcccgggaatgttcaacgccctctccggcatgggtggcggtggccaagtcaactcgaccgcctccaacaacgccctcaccgccctctacaccaccttcgccatcttcggcatcgtcgggggcggcatctacaacatcctcggaccccacctcaccctctttgcaggttgctctacctacgtcctctacgcgggctccttcctctactacaaccactaccagcaccagttcttcgccatcgtcgccggcgccatcctcggcgtcggcgccggcctcctctgggccgcgcagggcgccatcatgacctcgtaccccccggagaatcgcaaaggcacctacatttcaatcttctggagcatcttcaacatggggggtgtcatcggtggcctcattcccttcattctgaattacaatcgcggtgactctgctgccactgtcaacgacggaacctacataggattcatggtatttatgtccgttggggctgttctgtcgttgaccatcttgccggccagcaaggttgttcgcaacgatgggactcggtgtactaacatgttgtactccaatgtggcaactgaatctgttgagattctcaaacttttctacaactggaagatgcttcttattattcccgctgcttggtctagtaattttttttacacctaccagtttaaccatgtaaataagccgcagtttaatttgg

SEQ ID NO: 2338 - DNA, 1588 bp, Glycine max
  Clone ID: PAT_MRT3847_102115C.1
aaacgtcgaagggaggcatcaaaggacttggtattacatcagactgtgaatgcagtagtggaaattgtaaaagaaaattacctggttctatcaattccagaaaatgattacactataggatatgcatcagtatcagactataatgctcaaaggtttcctcataaacaataccaacatgggcagagtgttgttgcaactgttatggctcttccaagtcctgaaacatcaggaaggttgctcttacttgtcgatgtggtcaatgagacatcatctagttctaaaagaaccaagaagaagtctagctacaaagtgggaactctggttgaggcagagattactgacatcaaaacgcttgaactgaagctgaagtttggatttggtctatatggccggattcacataacagaggtatattatggaaatgttttggaaaatccattctctagctacaaagttgggcaaacagtgacagcaaggattgttgcaaaacctaatgagtcagatggcaatcggaagggctctcagtgggagctatcagtcagacctgaaatggttacaggttccagtgatatagatgatgtatctgaaaatcttgagtttaaaattgggcaatgcgtggctggttatgtatataaagtagaaagtgaatgggtctggttaacaatatcgcgaaatgtaagggctcagctatatattcttgatagtgctattgaacccagtgagcttgaggatttccagaatcgatatcatgttggacaacctgtttctggccatgttctaagtgtcaacatggagaagaagctattacggttggttgtgcgccccttttctactcttccttgcggaactagtgaagagccacacattaatgttgtggataagggtttaacagcacattttcatgaaggagatattttaggtggaagggttagtaaaatacttccaagtgttggtggattgcttgtccaagttggtcctcgcacatatggaaaagtacattttactgaacttgcagacacattggtgcctgatccgttgtctggatatcatgaagagcagtttgtcaaatgtgtagtgcttgaagtcagtcacactgtcaagggtactattcatgttgacttgtcattgggatcttccaatgtgaagctttcccaggattctgctgtgaatgctaacagcaaatgtgtggagaagattgaggatcttcatcctgatatgattgtaaagggttatattaagaatgtcacaccaaaaggttgcttcattatgctctcacgaaagattgatgccaaaattcttctgtccaatctttccgaacaatatgttcaagaacctgagaaagaatttcctgttggaaaacttgtaattggcagggttacatctgtggagcctctttcaaatcgtgttgaagttacactgaagacgtcaacggctcccaatatacccaaatctgagactatggatttgagtaagtttcacgtcggagatgttgtatctggcgcggattaagcgggttgagtcattgggtttattcattccacttgacaacacatacatggttgggttatgccctatatcagaaatttct

SEQ ID NO: 2339 - DNA, 187 bp, Glycine max
  unsure (1)..(187): unsure at all n locations
  Clone ID: PAT_MRT3847_102116C.1
ctatctcgatcgaactgtccaaggtcctgtcactgcatacaaaggagcctaaccaacacagtggcaaacgccgtccagcccacgaattaaccaataataccaacgcgtacacccaaagatgagtgtgctcgtgttcaagctggtttagcggggagccagcgtgnaccattttaggcccattagtagc

SEQ ID NO: 2340 - DNA, 636 bp, Glycine max
  Clone ID: PAT_MRT3847_102117C.1
tcgggacttcttcattcagagagagcgagacggcagcacgcgcaaaaatggtgaagtttctgaaaccaaacaaagccgtcatcgtccttcagggacgctacgccggcaaaaaagccgtgatagtgcgaaccttcgatgaaggcacgcgcgagcgcccctacgggcactgcttggtggcagggataaagaagtaccctgcgaaggtgatcaagaaggattcggccaagaagacggccaagaagtcgcgtgtgaaggcgttcgtgaagctcgtgaactaccagcacctcatgcccacgcgctacacgctcgatgtcgatttgaaggacgcggttacccccgacgtgctccaagccaaggataagaaggttactgctctcaaggagaccaagaagcgcctcgaggagaggttcaagactgggaagaatcggtggttcttcaccaagctcaggttctgagcataatattatgcatttttgttttcaaaatgtttttggatctcgctttgtttttcgtaattgatactttataatgatgtgttgagattagattttggttatattggatgtttaatgtggtttctggagatgataggataaagttgtttaaatttaattgctgaatttgagcccttttttt

SEQ ID NO: 2341 - DNA, 297 bp, Glycine max
  Clone ID: PAT_MRT3847_102118C.1
gccagaagctagtcaaagatttaagctgattaatgggcattcagctagaagaacacatcaattcagagcatcaagtacaacaaatgaaacacttggacgcaacacctagagaagctaaagtagacaaacacttgacgcaacaattgaaatggaaactcacattggaagtgatctaattgttgcaaaatctcggtcattggcttcacatactgatccccccagatctggagtattacatggtaatccattaaatagacacttggagggaaatcaacattctacatccacatctgatac

SEQ ID NO: 2342 - DNA, 285 bp, Glycine max
  Clone ID: PAT_MRT3847_102119C.1
gttttagtggttgtgtctatttgttatatcccggattcatgacgtgttctgcatatgtatatgtatatgttatgcaatttgtgatttatttttactaggtgttgtactatatgtttcctttagttgttttttgcctcagtgtgtgcccatctactgctgtctgcgtgattaattctcacaactaatctaaaaccattgaaaggggacacgtcaattgacctcagcaatgtgtatgcattaaatatcttctgctagatctgctaggacttctatttacattggtat

SEQ ID NO: 2343 - DNA, 362 bp, Glycine max
  unsure (1)..(362): unsure at all n locations
  Clone ID: PAT_MRT3847_10211C.1
tgttttttttttttttttttttttaattttttaaaaaaaannnaaaanannnaaaaaaaacaggaattaaacagntggaaaatgtgcatgtgcantgcaattaaacggaaatatcaaaattttcagccacccctttttcttttttgtggggggggaactcacattcagcagcacccaaaggaacctttacagcttatggggacaaagggaacctttttggaaggaaaaatccgcgggggtttaccccacaaggaaagatggttacctccggtattctttttcaccatccgcaccaccaaaaccgatttttttatttggcacaaactctttcccaacaaacctagaggtccacttttaatttt

SEQ ID NO: 2344 - DNA, 419 bp, Glycine max
  unsure (1)..(419): unsure at all n locations
  Clone ID: PAT_MRT3847_102120C.1
cccccggaaccggcccggaagacccggggggacccatccggccggccttgttggcaaccaacagcaccaggncggaagagggggattcttggaataatggcggcgcaacagcaaagacgatgtcatgaaatccaaaccggcgccccgacgcagggagctcggaaaacctgggagcgatccggagcaacgaggtgacctcaagcgcgcccacggatggaccgccaccccaaggcaggacggtccaagggcgccaaactgaggggaatcacatcgctattcaggaaatcgcggcgcccaggacccgattgcgttgcgaagcccacaaaaccccgaagtggacaccatcggcgctcaggactgggaattatggaacccctgctcgcacaaaagcaatgactaatgcccccccccaaaacccg

SEQ ID NO: 2345 - DNA, 350 bp, Glycine max
  Clone ID: PAT_MRT3847_102121C.1
gcaatgaaccattagccatgtacgcataagcaagaagtctatgtaccataagcattgtcttcatattatcttcattcattgcaacttgagcatggttctctctaatatttggtgctttaacatgatattcattgcaacttgagcatggttctttctattgattgatccagtattgcagttttactacgtaattgactcaaataaccaatcctgtggtttagataaaatggacctataactaggataacatcattaacataaatggacattgtttcaaactctttgtgacaaaggaaattagattctaaggttttgtgagtagctcaacaaaactaattgaatgtgagaaa

SEQ ID NO: 2346 - DNA, 545 bp, Glycine max
  Clone ID: PAT_MRT3847_102122C.1
attgggaccccggaaatttttatttttagactaaaattccaaaattgttttttattggacattctacgctgagaggctgggtcctcaacaaaggcaaggaaataattttggggttttttaaattcaaaaaaggatacaacagggcccaaaagtccattttgggcaaaagtttttaaatattttataaggggatactccagcagcaacaaaaattggtggcacttcctcgggcatttgtttttggccaaaaagtacagcaccagttgccagggggtcaaatatttgctttttttttgaaaatgcagcctgaacatagccactttccccagtccaacttttatttggttgaaacaatacaggcacaattttcacaccggaagattcccaatttttaaacctatcctgataagccattttttgaagggtcctggccccataatatagtctaacataaaaccttttcgaagaataaaatcctgactcaataagcgaccgaattggactaattccaaatccaggggcgaaaacgagaacggttccaaaat

SEQ ID NO: 2347 - DNA, 346 bp, Glycine max
  Clone ID: PAT_MRT3847_102123C.1
ggtgggtctgtatgctgcaggttacaccacctttctgtactacctcactctaggaaatattgtcaccaccattcccaccattgggtttaatgtgtaaactgtggaatataataacatcaccttcactgtctggcatgttcgatgtcacgacaatatccatccttatgtgatacattacttccaaaatacacattgacttatttttttcattaatttcaataacatgtaccaattttttacatcttaaaataaattacatagaatatttaatgaggataacttaagacatactctccttatagttagtgccatcaagcacaatctttcacattctattaatactact

SEQ ID NO: 2348 - DNA, 186 bp, Glycine max
  Clone ID: PAT_MRT3847_102124C.1
ggcaaaaaaaaaatcatgttgtttcccaaaccccataaccgctttgttttcagcttataccctaagacgaattaaccccaccaaaaatggttcaaacccttaaaagggggaaccccgggcctttaacaacggggggcccaatttggcccccttttttttaaagccccggaaatccggccccctggg

SEQ ID NO: 2349 - DNA, 498 bp, Glycine max
  Clone ID: PAT_MRT3847_102125C.1
acttaaaagatggatgtttgatttatttgtattatgaggtttacaattatcattctcctttggtggccaaaaacgggaaaaagcggtttttttataaaaataaaagcatttttcactgccaacttattagaaagacacataacgggaactcccctaattacaaaagggaccccccaggtaaaaacttctttttttcccacaggcaacaaaaagggggtaacccctccatctatattacaacaattttttacgggggccacacttctataagaaaagtgagagctttctgtctcactgagagataaaagaaacccgctgtggtgtttctgagggacacgctcgcaaaagttgttttattgtagctccctttgacactcagaagaatcttaaagcctaaaaaatgtaacgtggccactgacgtttggattaaacacgcctttgaggcacaggggaacctaaaaaataccccttggttgagaggctcaaaaacaaaatttt

SEQ ID NO: 2350 - DNA, 388 bp, Glycine max
  Clone ID: PAT_MRT3847_102126C.1
tacagatgacaaaaaaacttcagattgtgaacgagtaaaaaagaaagatcgtgtttggtattatatttaacagcgatgtagacgtattgaagatgttaaagtttggatcacacaaattctctgagaggcaagcactttttacatgagctaagagtgacaattactactactaggcaccaccagcacccttgtttgatccaggtgagttaaagtcatgctctttttacagagctttgatctcacagtttgttgccacattctttttcctctacatcactgtcttgactgtcatgggtttcaacatggcacccaacaagtgcttttctgttgtcattcaaagaatttcatgggctttttgtggcatgaatctttcccttttctacttcac

SEQ ID NO: 2351 - DNA, 839 bp, Glycine max
  unsure (1)..(839): unsure at all n locations
  Clone ID: PAT_MRT3847_102127C.1
ctcgagccggtttagagtgtcccattgtctcctcagtattacagtgagtgctctaattggttatattttattgttatttgggtatatggagtaaaacaccgtgctagaaggactgtgtatatgttttcttagataagttatatttttcttggcaatttgtgctgaactcacttagcagtctctgatccctgtaccgaaaaggggacttctttattatgagacatgtgaagcgagtcaaaattgaattacagatttctgaaaatgaaaaagctaggtagccaaaaataattttgctagagttggcatcattagtgacttatataactaccacccttgaatcataacatattttggctgcatatcatcgtattatttttgtggctaaaacgtttatgctatctatatataatattcatttttaatttgatccatataccaaaacaggctgtaatttagtccctatacgtgtaattatttccaagttggtcacataaattgtgtgtttttgttatagtattgtttcttttatagcacaagaaattgtagggagcaattataagtatcatgtgtagagactgtatatgttatgttttttttgtccttgtaaatgacaatcattntctgcttggcccctgcacttcacaataacgacatgctaactgaacagtcttataaaagaaacagatttcagggatgacattgaaaatggttatggctggaagatacataaataatgtataggctaaacatatcttgcaattgtggtacttgtattcttgtaaatatactttaactaacgtatgtacataccccagtgcctggaggctccttgttatgcg

SEQ ID NO: 2352 - DNA, 797 bp, Glycine max
  Clone ID: PAT_MRT3847_102128C.1
ggctcgagatctccttgtgcttctcctttggggaaggactggcaagtaatcatcaactagcaagaaaatggatgaagcgggctgcagatcgtggtcatagtaaagctcaatttgagcatggacttgctctcttttctgaaggagacatgatgaaggctgtggtatacttggaacttgctactcgtgctggagaaaaaggtgctgctcatgtcaagaacgcagttcttcatcggctgtcatcagtttcacgtgatcacgctatgcatctagctaacagttggcgcgcattgccatcaagttgacccaatccttatgcggtttgtgatgaagaagttgcatgaccttgatcagtcgtaagagtgagaaatcaacaaagaatgcctaagcataaaagcaaggaaagcaggaggagctgtctaagaaactgcctttgcctactaatcctgaatatagtggttttcctataatatatatataaaaaaaaactagttggtgggcgtttgtaaaactagtttgtaaaacgccctattgactagttgaaagttcctcttaagttccccccttagaactgtgcagggtagaatgtggtgggcgttttttgtcatgaatggcaaagtagaaaattgcacacgttcatactactcccatattatataatggttgaaaaggtttacctagctgtgtgtctgattttacaagagaatcagtttaacctccagtgttgttcaattctaatctacaattaattaaccatgtccaattttatattattttatgacatcgtttagtgtatcaaa

SEQ ID NO: 2353 - DNA, 403 bp, Glycine max
  Clone ID: PAT_MRT3847_102129C.1
gaagacattcctatttgcctcattacgtgcgaagaaaggaaaactggacatagctctggaaccaaatgtgaaatgctttgctaaacgcatcgcctgagcaggacctagaccgaaacctgcttgtgaaggatgcagaaaagacaacgtagtcatggactcaggagaaatcgctaccgacgccgacgatgactacaaagagatagagcgtgacacactcaagaacatcctctgtgttcatatgagatgagactggatgctcgacaactgctcggacctcgtcaacattgaacagcagagccctgatattgatcatggtgtacacggccaccttatcatatatcctgaagaaaatggtgctggtgaccattgtcacatgtatggctatgccactgatgaaacccct

SEQ ID NO: 2354 - DNA, 505 bp, Glycine max
  unsure (1)..(505): unsure at all n locations
  Clone ID: PAT_MRT3847_10212C.1
gagtgtcaccattagattggttgacttgattttgtttgcgncggnngaaanncnagaaccngnnggagggacgcaagaggcnacnannccnannncnagnccnccggcgagcggngggnnnccccccnaggacgaccgccccacgcaganganagggaaacgacacagacgccncgcgcgggcaacccagccgganggngccacanccccagggcccaccgcccgcangagncacgcgnacgggccngcgaaccnncgnagnaaacccaaaaaccacaagcnagacgcacccangcacaagcagggggagccccgcgacaggnngaaacgncngagccgnaaacaaccgaaaaaagaggcccggggcacaacgaaccaanccgcaaaccacggcnaccaacggggcaaaccaccaccgaacaccgaccagccagcaccacagacgancggcgcagaggaggaaacacgaaaccccaccgacagccacggagnccgcaagcacaaa

SEQ ID NO: 2355 - DNA, 417 bp, Glycine max
  Clone ID: PAT_MRT3847_102130C.1
tggtccacatttaattcactcactctcatgtaaaatatctttatctcatatgatatgtaatcatatatattatcattaatttcttaattcttatctttatgacaccaataaatatttcaccttaaaattatattttttgtctcaccttttattttaaataatgaagattcattaaagaaaagatgttatgactcataatcttaaatgctcttaaagaaacctactagtattaattattaaagaaaaaatggatattaaatgaagcttgactatgtttggttataaattaataaaatttggtcctttatgtaacactactttcgttttataaattaaaaaaacaaacaccagtttatcaaaactaataaaaaaaagtagttacagttagtttattttaataatattataaatttaatt

SEQ ID NO: 2356 - DNA, 513 bp, Glycine max
  Clone ID: PAT_MRT3847_102131C.1
agtacatctttctttttcgtttttccctttttctttaggctccatttttgttaaccgccgacgaaccgggtggggtcgggtattaacgagacacctcaacagagaggcataaaactaggttcgatggagttgttctgcctgaaaccgaaccacattccaaagatagccgttgcccttgtcagataggagaaggcattgctgttatacaaagggataccgtgtagagacaacaatgcatcgcgctagggtttgattatattacccagatccaaacttcccttagcggggtgtggaagcgcattttgcaatctcaataaataaatttatgggaaaaaaatcaatgtccaaaggagggggctgctcttggttcataaagtttgtcattctggctctcgtggtcactaccattgtttttaccgctaatatgacatttagtgactccggttccgataagcctgctcctggaaccggtcccgctggcgccgatgaccaaatttactacggtgcactcaa

SEQ ID NO: 2357 - DNA, 251 bp, Glycine max
  Clone ID: PAT_MRT3847_102132C.1
ctttcattttttaattttctattttcttctctcatggctggagattccaaaaaggatttccctgctgatgacaaagctggaacagtagacaataaaccatccataagatgaaacgtcatctaaagattctacagcagcacaaagagctactacagctacttctggacctgcaactggttttccaggcaacccttttgatttatcttgcaatgcctggcccgctcaatgaaacaagctttaaggaattggct

SEQ ID NO: 2358 - DNA, 739 bp, Glycine max
  Clone ID: PAT_MRT3847_102133C.1
ccagcgtcgccagctcgacggagacacgagggggggtagaagaaacaagatggaaaccgtgctcggaaaatccaaagccaaatttgaaattacctaacgtgtgttggcgttctgggttgacccacccctcctttcgttttcagcataatttctagtttttctatcttcgctcattcgccaatttacaattgaaatcgcaattacacaatctctctctctgctcgtgagctttctacggtttcgattcgatcattcccctcttgttttatggaggtataggtagatgatgggaaaacgtgtctcaagagagcactttcaacccaggccgtgttctgggaagacagagaatttaaaaaacaccgtgtttattgatgtagatgatcaagttgatgatgtggatgtggtgatcatagattacaaagagttcatgtctaaatcacatggatctggtgcgtcgagtagagacagggtatgtacgccgcagagtgttattagcattgatgatgacgatgacgaggaaagtgatgatgcggagtttcccggaggtgttgctggaggtgttggggaattggatagcgatgcctgctctagtaaaaggtctcctccagacccaagtggcttgcggaattctgtacacatagatgttgatgatgatagtggtgtttgtggaaaggagtctgaatctgatgagctaaaaagtaggaaagcatgctctacaaatggtactggcggatgtcgc

SEQ ID NO: 2359 - DNA, 385 bp, Glycine max
  Clone ID: PAT_MRT3847_102134C.1
ggcaaggggcgcgacggcttattttaattttttgtttaggaattaagagcctatgggggcaagggaaggcttttaggagctgattattatagctcttctcaaaatatctgaattatgcagtaccttccttaactagattgcctggcaaagtgtagacccaattgaccctattaaaaattttcgacttttttatcttaaaccgaatatgcattccttcgttgggagattcaattatgcaaaacatgagtaacttttatattcgttaccatcctgccatggaactaatatgcaagcgccttacgccccactgatactggatcgggatgatgtctaatatgcatggctttcccgcactaaagagggctaaacatattttagtcttgac

SEQ ID NO: 2360 - DNA, 445 bp, Glycine max
  unsure (1)..(445): unsure at all n locations
  Clone ID: PAT_MRT3847_102135C.1
gtctctggtggcgaacgaggatttccagcacattctgcgtgtgctgaacaccaaggtggatgggaagcctaagattgtgttcgcactgacctccatccacggtattggaaggagatgcgccaacattgcttgctacaaggctgatgtatgcatgagaaagatggctggatggtggactgctactgagttggatgaagagatgactgcggtggcgataccctacgtcatgcagagaaccgctactggtatttgaacggataagacngattacgctgatgtgactgactctgatagcgtgtctgatgactctgcattgaatggaagcgctgatcatgagagactcaagaatactgaagaccatcgtggcaagacgcattacgtgcgacttggcgctcgaaggtagcacacaaacactactgcggatgggagaatgagtgtggatgtc

SEQ ID NO: 2361 - DNA, 890 bp, Glycine max
  unsure (1)..(890): unsure at all n locations
  Clone ID: PAT_MRT3847_102136C.1
ggatccttctcttctttttccctctttctccttttcttcttcttctcttcttcacactcaaaggtgttttgaaaagccggttttggagttctccccttccggtgtttcttcagtatgggagcggtgtacgacatcgtgaagagcggcgtcggggttgcgtcgatgggtcacgccggagctggattgattttgtgcttgattcaagaggagcgtgaatttgacgagttgagtagccaagacagaataagccactccagaagcaccccaaacccccaccctccaacccccattgtccacaagcacactaaatccaagaaaaagagatcagatttcgagaaagatggctctgtctcttgcaacaagtgtagaccacactcctgcgacaaaatcttcatccttcccttggatcccataattatggctagtggtattttaatgaagttagaccattggaagcagagagattcaaggcgcttcgcatccagtgggcacagtattatctaaaagttagaaatcaaacataggatgttaggcaactatgtaactttaggttacttaattagtttacatattttgcattacattttttacaattgtttcattttaacattgaataacctttgttgatagctagttttttgctttgaacgtgttggttgaatatgtggaaatataatgattatgaagtgtccaaaagaatattaaaatgtagatttggaagatattgtgtctttcagtgggtgctttcccattcggattccaattctagcttgtagtaggaacgatcaaatcaaattaatgatgcatttgtatgacccactcttatgggtctgnncttctcatctctgcttcctcactctttttcgaataaaattaatatctttggctcc

SEQ ID NO: 2362 - DNA, 330 bp, Glycine max
  Clone ID: PAT_MRT3847_102137C.1
ccatacgtccgacggctgcgagaagaccacagagggggattttatagaataatcacgcattctcacccccccaacttctctctacacccaaaccctaactcccgaccctgtacccctatcgaatccgccatgaaaggaggaaagtccaagaccgaccctaacacagccgaccccaaacttgctgcgaacaagaagggagccggcaccaccgctaggaaacccgccggcacggggaaggcacctaaagaccctaacaagccaaagaggaccccaagtgccttcttcgctcccatggaggagtccaggaaggcactcaacaaagaacatcct

SEQ ID NO: 2363 - DNA, 549 bp, Glycine max
  Clone ID: PAT_MRT3847_102138C.1
tttgtgatacaaatcaaacaagcccagatgtcctgtctcttgggtatcaaggctctcttgctggtggtttaccaatgtcaaatcatagttctgtttcatctgtgcatccttcagctgggctaaattcatcacttccatcatcttctggtattggtcttagcaataacttaacatcatctggtccattggcagcccctgccagggatagtagatatggagtttcacgaactccacctttatcagttgacgaacagaagagaatacaacaatataatcagatgatatctagcagaaacatgccgcaatctaccatgtctgttccaggatctctttcaggaagtgatcttggtggtgtgcgaatgttgcctagtggaaatggtatgggcatgttgggtgggattaacagaagcattagaccagggtttcagggagtgccatcatcatctatgcttagttctggaggcatgccttcttctagtatggtggggattccaagccctgtaaatatgcatgctggagttggtgctggacaaggaaactcaatgctga

SEQ ID NO: 2364 - DNA, 935 bp, Glycine max
  Clone ID: PAT_MRT3847_102139C.1
tacaatggaggattttaaaaaacttttcatctatccacgtcgtattcggcatgagtcaactgtaggcgctggtcttcctgtgatagcatcactgaatcgcataatctcttctggtgatcccgttcatcaaattattgggagtttgagcgggacattgggttatgtaatgagtgaggttgaagatggaaagccattgagccaagttgttagagatgctaaaagtttggggtatactgaaccagatccacgtgatgaccttggtggaatggacgtcgctagaaaggctttaatacttgctcgaatacttggccatcaaattaatctggatagcattcagattgagagcttgtatcccaaagaaatggggcctggcgtaatgactgttgaagacttcttgaaccgtggactcttgttgcttgataaagatattcaagatagagttgagaaggcagcttcaaatggaaatgtgttgcgctatgtctgtgtgatcatgggttcaaggtgtgaagttggtattcaggagcttccaaagaattctcccttgggaagactaagaggaagtgataatgtgttggaaatatatactcgatgctatagtaaacaaccactggttattcaaggtgctggagctggaaatgacactactgctgctggggttcttgctgatatcgtagatattcaagacttatttccttgaagggaaatttttgtgagccatcctaattaaagaatgtagaaggtacagctgctaaaggtcttgccctggattgtagctgatgcgcgtttctctttggttgtgcattgtgaaagattggatacacattgttctgaagcaagaataaataagtagcttttatgttttttgggatatttgacatgaaatttgtgtaaacgtccatgcagaaccagacacactgaaataaaatgaattctgc

SEQ ID NO: 2365 - DNA, 328 bp, Glycine max
  Clone ID: PAT_MRT3847_10213C.1
ggctcgagcaacactggtatgagcatgctcttatgcagagaggggcctgagttataaaaagggggggacaggctaacatggctctctcatccccatcctggggtggcagggaacagcaatctggccccaacaaccccagcagcgggctgggtgagcatgaggaaaaccgcacccaagcaggtctccccaggatccccagggtacgagggcataccgaatgaggtactcggacccattctgtggcggcgcgcgtcctgcctctgcggtgagttgccatgcgactaccggtgtgacactggtgtgttctaatgacacccactcaccttcc

SEQ ID NO: 2366 - DNA, 689 bp, Glycine max
  Clone ID: PAT_MRT3847_102140C.1
ctggtcggataccgctctggagaattaatgaaccagagtttgtatttttctctgtaattctataattttttctcaaaaatttgtgttaatttcgaagctttctgtgttctctgtaatggtgcagatttgagctcacatcactgcgattttctcggtggccaagctcaaactgatccaatttcatttctggggtttcatcttttcaccatttcagacaaaaaaattgtgtttttaaagattcctgtaagattgtaaaattttcctgcgcccaaatctgtctcttaaataaacttagcatttaccccctttaaaaaattcaattttttgtgtgatttttttggttgactgggtgtagaagtatctgaatcttcaatgggtagggtttaagtgaagttttgaggttttggagtatcttagttttttctttgatttgcataaaaatggagggaagagagaattttggtgttgtggtgggtgatgaggctccagagagcttccatgtggctcctagaattgagaacaacttggacttttcaagggcgaccgtgccggcgccggcgccaccgacggagggaaaaaagaagagagggaggccgaggaagtatgggccggatgggaagccggcgttgggagcggtgacggcgctttcgccgatgccgatttcgtcgtcgattccgttgacgggcgag

SEQ ID NO: 2367 - DNA, 445 bp, Glycine max
  Clone ID: PAT_MRT3847_102141C.1
ggctcgagcgctattctaccttattttatttccctagtcaaggagatccatctctgcagcaggttgatacagaaaagaaaaaatgctgaagattggctgcgttgcggctggatatgtggcgggtccaacaatgagcatcgttggactggaacgcctcctagtctgagtggctgctgctcacattgctcatgccacgactgcaggacggaacagtgaccagttacctatctatgagccaggacttgatgatgtggtgaagcaatgtcgtgtctcgaacctttctttaagcactgagggggagacacatgtctatgaggccgacatagtggtagcaatcgctaacaccacgacaataactcgtggtgttggagccgggaaggctgcatgatggacttactgggagagtgcatgacgcaagattgctgacgtgtccaagagtgacaag

SEQ ID NO: 2368 - DNA, 410 bp, Glycine max
  Clone ID: PAT_MRT3847_102142C.1
ttttagaatgcacaaaacccttttgggtgaaacaggtggatgggaaaactgactattccccatggcacttcccgatgtggtaaaagaacgcctgtttctatagggggaggagctggaggaaagaaagctattttcatgaatatgccaaatgctgtactcacaatgtggagatattatgtcggaaatctcgactttgaagttgctaagatgacttgtccctacattaaaggtacaggttcattgtttatagcacttgggaaattgaggctgatgacaccatcagattttgaggcctctccacacaagctgatacagcgagatgagatataggaaaaagatgtagtgaaatttgtacaagaggaatttgctacagtttggtcaactcaggtgcgtgctacaacacctatgta

SEQ ID NO: 2369 - DNA, 460 bp, Glycine max
  Clone ID: PAT_MRT3847_102143C.1
gggggccgaaagggggtaaatttaaaaatatgaaagcctaaagcgggggcccccctggaagttttgaccccggatcttaccaaaacaaaagttgaaaaaaaaaaaaccctgggggttggtcccaacagggaccctagttaactattggaatcccccgggctaacgagggcctgtttcaatggcagggagacctgaaatctccttgctttgcagttaaaaaaacaatttcttttccccaaaagcccttgggggggaaaccattgggatatttacctaaataccactcccggcccgggaccggggaaaaaagtttgagttgaaccccacatgggctaaatttttaaaccccccaaaaaaaagaaaaaaatcctgatgctggcactgggaaaataaaaggagggggggttgccccccgcaaaaaccggtttatttggaaacccgaaacctggggccggggtta

SEQ ID NO: 2370 - DNA, 390 bp, Glycine max
  Clone ID: PAT_MRT3847_102144C.1
aaagtaaaatgccttaagacttatatagagagatggattgtacattgaagagtggggacaagcataaagatgattgatttacagaggtggggccctctaaccggagccagcacacacagcgagcatggggggggcgaagggcacatttttatttttcgctaatttctcaactggaccttaaacaaagacatatgcttgaaactagaaaccaaacattgcctacatacctagtctaccattcttaattaccttcacctttataagagcagattggactggatcctttgctattcccaatgagatcgcaatggaccacccagatgaagcttgtcttacaagtccaggccattaatacttctgaagttctcagccccacccacatgaactatc

SEQ ID NO: 2371 - DNA, 405 bp, Glycine max
  unsure (1)..(405): unsure at all n locations
  Clone ID: PAT_MRT3847_102145C.1
cgcggttcttttntnctttttttttttgtttttgttatttccattccatctcatnnnncctatatgtcaatggggtattcaaatgaagtgaaatgtttttaaacgatcctcattataagaattcgaacgtgaaattctaaagttattaaatggttaatcccttcttttctacctgctcctgtagttgaaggagttccttctgttcttgaatagcttccttcaaaaggacttctgcttccccagggaatgtcttggtagaagatccgacttcttcgaatttaggtctattcctgttcaattacgcccgtaactcaacacgaaatttccttccctggccaatttctactgaatcaagtcctcccttccctccagtctcaatagttattatctgttctctccccggtc

SEQ ID NO: 2372 - DNA, 769 bp, Glycine max
  Clone ID: PAT_MRT3847_102146C.1
agggaagcttgggaaaagctaaatcttcgagaaggaacacttcttgaagggaccgtaagaaagatccttccttatggagcccaaataaggataggagaaacaaatagaagtggattgctacatgtttcaaatatcactcgagcccaaattacttccatcagtgacatactttctgttgatgagaaggttaaagttctggtcgtgaagtcagtctctcatgataaaatttctttaagcattgcagaccttgagagtgaacctggactatttctatctaataaagagagagtatttctggaggctgatatgatggcaaagaaatacagggaaaagctacctcctgcttttatctctcaacgaccagatggcctccataacaatgtcctcccttttgaaaatgaagcactttatgctaactggaaatggttcaagtttgagagatgcacgagaaacaattacccttgaaagcataataacattattcataggaaagcttgattgatagaacctgacattgcatagcacaaaaagttccaaaacgggggatttcattcttggaagaaaacattgagtctataacatccaagcttttgattcagtctttattcattcataagttgattgcatgcattgcagagcacacaaggtatgtggtttcaatagtgtgatatgctttcagattattttttttcctttcattttttgccttaatatttattcaaaatgatttttttccatgcctttttagcttgttgattaataggtagat

SEQ ID NO: 2373 - DNA, 143 bp, Glycine max
  Clone ID: PAT_MRT3847_102147C.1
tgagagccgagagcctagggtgggtataccaaaatttgctggaccaaatttttagctaaaaaggaaaaagaagtcagcatcacctagactatcgctaagcaaccaattatagcaaaaatctgacaatactgagcatattacgg

SEQ ID NO: 2374 - DNA, 415 bp, Glycine max
  Clone ID: PAT_MRT3847_102148C.1
tcgcgatctagaactgagactctgaaacacgtttgcgagaactatgttgctttgcagaaacatttaaatgaattcagccaactgaggaacgcaaattttgataaagaagcaggaacagtaccgtcactgaagagaaaggccgagagtgtgaatctgtttggtattaacaactatactgagtgcagcaccatcactgaggaagaaacattcaaaaggcccaagcatagcaccgagccaaaggtttccaaagttcttacacgaacagatgcatctgataccggcttatatgtgagggacggatatcagtggagaaaatatggtcaaaaagtcaccagagataacccttctcctagggcttacttcaagtgttcatatgccccaagctgcccagtgaagaagaaggtgcaaagaagtg

SEQ ID NO: 2375 - DNA, 1220 bp, Glycine max
  Clone ID: PAT_MRT3847_10214C.1
ggagctatcggttcctctggctattcttcaccaccaatatcaaagaaaagaaaaggtcaagaactgttatttgggccaaccgtcaaggatccatcagttggcaggcaggggcaacaggcaaacaatgtcagagttcctgcaccctcctcatccttgtcacctatcccaggtgctcgtgttggaccagcaacattaggtccttcaaaattaatgtacaggtctcttttagcagacatcatacaaccacagcacctgaaggaactttgctcagttctggtgctagtatctggacaagccgctaagatgtttacagaccacaaaaatttcatggataagcatgctgaagatcagacagaaacttctcgtgcttcttcaactcaggagcaattaccaagccaaaaggaggctaatgttgagaaagctatggctgatgatgattgttcaagtgcaaaccagacagataatatcagcccggataattcttgttcagatggtgctgatgtcccaaaagggaggccaatgtctcctggaactttagcattgatgtgcgatgagcaagatacaatgttcatgactgctgcctcccctgttggatcaaggacacatgcttgcaacacatctttgcaaccgccttatgggcaagtaatgacagaggtctatgcagagcaagaaaggattgtattgacgaaatttagagattttctcaatagagttatcactatgggagaaataaatgaaacaaagtgctcttcattagccagaagtgaattagagagtcaaaagggcccaaacatgaattgcagtggaaatgacagtactgagacagcacatcagcaggcagccactaataataacattaacggtgttgccaaagctgcggcgggcaactccattttgttccctggtagtggtagttcctgaaaatggggaaacttatcctaaggtagaaaaatagatatgaaaggaatctaacatagatgagcagagataactctggaagaatattgtgtgaaggtatgctacaactctgaactgtaaaaacactttcattcttcattatatgccttctctttgaagtttgaagggggtgtcaactgtcaacccaggcccaccaactaatccaactaggatcaaaaaaaaaaaaggtcaaccttcttcttttaattccatcattcatatagaaggctgcattaattgctctgctttgtcgtctattaatt

SEQ ID NO: 2376 - DNA, 895 bp, Glycine max
  Clone ID: PAT_MRT3847_102151C.1
ctgacgcgtgggccgacgcgtgggcgtacgcgtgggtttcgatctaacccttctgcgagatcaattcctcttaccacagttagcataagtaacatacacacctttgttctaaggtctaactaactctaaccatttcgactttcaagctagattgaggtctgaggatagtgatctttgtcttcgccaacaacatcgtccacttaaaaataaaaaagccctgaaatatctgaacttaaaagccacacttttatttgttgtgtgtgaggtttgatttgatgggaaaatatcttgaatctgcggcgaggttggaagagctatcgcggattgtgtcatctgctgcgaagcccaataggtcaaagggaacgctacccagatcgcccaaccgtgttgccactcctcgaattgcgaacccaattggtgttaaggtcgaacctgcgaaaaagatggaacctttggaatggtcggacacccctcgccaaggtttgtcgcaagattgctccaagcgctggttccaggacaccctcaaggaggccaaggctggggacactaccatgcaggttttggttggccaaatgtattactctggatatggtgttgcgagggatccccaaaaggggcatgcttggattagtaaagcatcaaggaaccgaaattcagtttggaaattgtgcggtaaacggccaggttacagagcaagtgattctgattcatgtgaactggaggaaaaagataaatattttccttaatttgcaagtataactctttatttttttttcttctaaaaagattgaatttctatttcaattctatggtatagtatatgtgaacttattgtcactgatactggtggttatttattgtaacatccaaaacataagtcaaattttgttaaccg

SEQ ID NO: 2377 - DNA, 974 bp, Glycine max
  Clone ID: PAT_MRT3847_102152C.1
ataccatgcacaattacacacacctttgacctaagtgtgttgtttgtatctcgactttcaagctagattgaggtctgaggattgatcatcttcctcttaccacaaaaataaaaaagccagattgaggatagtgatctttgtcttcgccaacaacatcgtccactttgacaaaaaataaaaaaggccctgaaatatctgaacttttaaaagccgcactttttatttgttgtgtgtgagattttgatttgatgggaaaatatcttgaatctgcggcgaggctggcggagctatcgcggattgtgtcatctgctgcgaagcccaacaggccaaagagagcgctacccagatcgcccaaccgtgtggcgactcctcgaagtgcgaacccatttggtgttaaggtcgaacctgcgaaaaagatggaacctttggaagaagaacaacaatgtcggacacccctcgccaaggttgtctcagattgctccaagcgctggttccaggacaccctcaaggaggctaaggctggggacactaccatgcaggttttggttggtcaaatgtattactctggatatggtgttgcgagggatccccaaaaggggcatgcttggattagtaaagcatcaaggaaccgaaattcagtttggaaattgtgcggtaaacggccaggttacagagcaagtgattctgattcatgtgaactggaggaaaaagataaatattttccttaatttgcaagtataactcgtgtttcttcaaaaagattgaatttcaatttcaattctagagtatagtatatgtgaacttattgtaacatccaaagcataagtcaaattttgttaactgacaattgttcaacaatgatgtctctatttttgaattagttgttattgtgttgttcattgttcaggaagatgttatgatataataacttaaaacatctttctgtgtgccataatgtatgatttatttattaa

SEQ ID NO: 2378 - DNA, 457 bp, Glycine max
  Clone ID: PAT_MRT3847_102153C.1
ttttttttttttttttttttttttttttttttttttttttttttttttttttttaaaagcgcacaattttttttattttttaatttaaaactctccaacaaattttttaaaaaccaaaattaccacgaattttttttgcccattttttcacagacaatagatgcttataaagtttaaaccggggggccctataggggttttattattttcccccagacaagaaaaaaaaaatgaattcttgggggatgagaggtttataatatgaaatagttttgttttcatgcaattgggcactcgggaggaaggccctgggggaaacccttagggtcagggcaatagttgaaaatcatgtagtttttttggacccactgaatcctatcttgccctgttgaatccagggattgtttcaaccatgcttggtttgaagaaggattggtggaggaacaaaatgagcctg

SEQ ID NO: 2379 - DNA, 521 bp, Glycine max
  Clone ID: PAT_MRT3847_102154C.1
ttggaataccctttttcctttttctcctcattgtcaccggaaagctactcggggcctggcgcaccctcgcctgctacaacatccagaacgaatcaaccctccacctctgcctgcgtatccgtggtggcatgcacatcttccactagaccctcacctgcgagactatgaccctcgaagaatagagctccaacaccatatacaacgataaggctaagatccacgaacaaggagggtgtccccccataccatcataggctgatcttagactactagcagctcctggacggacgtacccttgctgactacaacatccataaggagccaactctccacttggtgtcgcgttttcttggtggaatgcatatctcatgcaagaccctaacgggtaagactattaccctggaggtggagagcttcgacaccattgacaatgtgaaggcgaagatccaagacaaggaaggaatcccaccttaccaccataggcttactttagctggcatacagctggaggatggaaggac

SEQ ID NO: 2380 - DNA, 371 bp, Glycine max
  Clone ID: PAT_MRT3847_102155C.1
caacaagtactgcagattataactctagtagaagtcgtaagccaattgctgtggttggtgaagctgggttgagaccacctgatttccagcaagaccctaatcagaaagcatatgcatatctacaatccaaaccaccttaagaaagagcttaagacaaggctagtagtagttcatgcacaaagccaaaagaagctgtggaatctgatcctagacaaaatcaagcagttgcccaaaagttacttcagatggtcaaacacccaagtcagagatgatcgacatcataggggttgtgaacataggggcagggggcaacaagaagatccagttgtcttcactctggaagaatatgaaaacagaaaggcccatacaaa

SEQ ID NO: 2381 - DNA, 281 bp, Glycine max
  Clone ID: PAT_MRT3847_102156C.1
ggacaacctgttcaatagacatggaatttgccagattccccaaaatcaagaaactacaaggtaattgtgtgtcatggaagaataccattcttgggcaaggaatgttgaataggttgagaacaatagttacttcacgaagcctatagccaatgtttcaggtcaggcagccagaacatgtggtggcttcaatgttgtggaaaacatgttgtggttagtaaagcaacttacaacccagttaggattttgtcatcaactgcaattcaagcaatagattctttctt

SEQ ID NO: 2382 - DNA, 482 bp, Glycine max
  unsure (1)..(482): unsure at all n locations
  Clone ID: PAT_MRT3847_102157C.1
ttcccacgcgtccgcccacgcgtccgtacggctgcgagaagacgacagaagggattgattttctaattctccttattttcttgtatataatgattttgtatactcattttagtttcataatctacatgtattataatttttcattttcttatgatatcgataaaaaaaatgtaataaaaaaactcataatgaggacatagaaattatatttcaataaccaaaataatagcatatagttcaaagatttataatttaaatttctattgtaaatcaaagtatgacataaaatccataacaaagtaatattagtattgtactaaacttttaatttaaatccaaaatacattataagcaaactaagggttgctagcaccagaagatcctcttgcatccaaaggtgtattaggaacacttgaagcatcatttggctgaaaaaaaaaaaaaaaaaaaaaaaaaannnagcggccgctctagaggatcca

SEQ ID NO: 2383 - DNA, 360 bp, Glycine max
  Clone ID: PAT_MRT3847_102158C.1
cttaaccggtttattcaccataatcttacaaggagggatcatgattagaaccaaaacatatgatttataaccctgtccatatccgtagtaaacacaccattgacttggatccatttgaaaaccccagccaccgcgtacatcctgtatagctgtaaaggtactgccccaagattgaccaacacattatcacccaattgcacaaaggcttgattaagctcctcctgcgtcacattaatatccaaattaccaatacaaacaagggaattattcacataattctccggcgcaacaatactcactggaccaccttatgcaggaaattgatacattgtttttggtggagcttattggtggtgaaaa

SEQ ID NO: 2384 - DNA, 434 bp, Glycine max
  unsure (1)..(434): unsure at all n locations
  Clone ID: PAT_MRT3847_102159C.1
aaagtatcacactcttgtttggacttgacgaggaaagctatgctggcgtgatccgtttacaatttcagtgacttagatgtctttgacgttggtgcaccttccagttaagcaggagttggataattgttggacatagatgaaatagtgattgttatgtctggactgattgaaggacttcctgacgctgttgcaatcangtgccttgcatgggttcccttctaccttcacccaaagttagagcttgtctctcgtgcttggcgagcagttgttcgtggccctgaactatttaaagctcgacaggagcttggttcatcggaggatctggtgtgtgtctgtgcttttgagccaaagaacttatggcagctgtatgaccctcagcgagacctctggataactcttcctgttctaccctcaagaatcaggcacctttcaca

SEQ ID NO: 2385 - DNA, 530 bp, Glycine max
  Clone ID: PAT_MRT3847_10215C.1
ccccaccgcccaaatctgatatgaacagtggattttactttaacaattccatggtttttctttgaagctccaaatccaatggcaaccgttcgatcaaactcgattaccgtcttcttcgtggcattcattatcctcacaacagcaccatctccttcccaatccctctctttctcctcttacttccgttaccgaaacctcttctccctctcgcactccctcctcatcggcgtcgccaacctccgcgccgcacgcggcgacgtcgccggcgccgatcgagccagatccatcgccgacggcctcgatcagggaaccgtcttcggcttcttgaagctcctctggacattgtcgtggacggatatgtccttcacggacctctacggcgctgtttccgacatgaacgagttgctgcggggcttgactgagttgactcgcttggaatcggtcgcggaaaggtccgcttgggtttcccgaaattaccaaagtgtcctcaccgtctttaagtccctctccagaaagctcctcaaagcgct

SEQ ID NO: 2386 - DNA, 2064 bp, Glycine max
  Clone ID: PAT_MRT3847_102160C.1
tgaatggggagtggtagtgaatcggggcacgcaaagggaaaggaaaattaatcccctcattattatatgacatacacttacacgagttattattattatttatttttattttgattcttaaaataccaaatcagaactataacctaatctatctatctagatttggttcacatatctgaaaaagaaaagaaaaccttatgggaggggaagtgacgcaaaaccgaaacgccctacgtttttctttttctctttctctttctctttctttctttctcttcccacgctcttcaagactttcacaaatcccttccgtcttcgctcttgtcttctcgttcagaaatgcaaagtatcacagtcttgtttggacttgacgaggaaagctatgctggcgtgatccgtttacaatttcagtgacttacatgtaaggacaacataaacatacgcaacggggcaagttgtaagtggtaactctttcaacttagccgtgcaagttttgttggcagcgcacgaaggaaccatcttctcttcgttttcctttttttctcaatcacactcaaatcccttccttccttcttcgctattgtcttctctttcaggtgcaccttccagtaaagcaggagtaggataattgttgaacatagatgaaaaggtgattgttatgtctggactgattgaaggacttcctgatgctgttgcaatcaggtgccttgcatgggttcccttctacctccatccaaagttagagcttgtctctcgtgcttggcgagcagttgtccgtggccctgaactatttaaagctcgacaggagcttggttcgtcagaggatttgttatgtgtctgtgcttttgaaccagagaacttatggcagttgtatgaccctctgcgagatctctggattactcttcctgttctaccctcaagaatcaggcacctttcacattttggtgctgtctccactgctggaaagttgtttgtaattggtggtggaagtgatgctgatgatcctttgacgggtgaccaagatggtctgttttgcaacaaatgaagtctggtcgtatgaccctgtagtacgggaatggtctccccgtgcatgcaatgctcgtcccgcgttctatgtttgcatgctgtgttatgaatggaaaaatagttgtggctgggggcttcactagctgcagaaagtcaatatctcaagcagaaatgtatgaccctgagaaagatgtttggattccaatgcctgatcttcatcgcacccataattcagcctgttcaggagtggtgattggaggaaaggtgcatgtactgcacaaggatatgtcaacggtgcaagttttagacaatgcaggtcagtggacggttgaggaatatgggtggctccatggtcaaatggcagttatcagggatgccctttatgtaataagctatggattaatcatcaagcaagacaaaaaaatgaggaaggttgtaggttcagcttccgagtttcgaaggagaattggatttgcaatgataggtttaggtgatgaattatatgtgattggaggtgtcattggccctgacaggtggaattgggacatcaagccactgtctgatgttgatgttcttacacttgcgagcgacagaccgacgtggcgccaagcagctccaatgacacggtgtggtggtaccattcttggttgtacactgctgagaatttaggctttcactttcatggcttatgtgatatgtgtgctcctactaaggaatgtgaattccttcaacaggagacaaagaattaggttgttcaatggcttctttgagttgtatgtaagccataatatttgtccttgttgttttgttgactattatgtggtaatatgatcaggtaatattttcaagcaaaacaatgaagttcatgcactactctaaataatattagtggatattactttcactcagaaaaaaaaaaaaaaacaagcggtaagtttagcagttaaggatcacctaagccaacaaattggtgctattcctattcccaccttgaaaatttatcactttgccaggaaaaatcaactttatttagctaaa

SEQ ID NO: 2387 - DNA, 253 bp, Glycine max
  unsure (1)..(253): unsure at all n locations
  Clone ID: PAT_MRT3847_102161C.1
gtcaacaacaattgtgatactatccaggtgggtgtcattttgttttatcctataattgttccttggaaatcgcagagggagttagatcnctgaccttcaagccgcaatggtggaggatgggatcacacatgaggtggtggataaaggtggggtcacacgcgatggtggtagacgaggttngggaactgagaaatttacggggaaggggaagggaaagggtgtaaggatttgntgagtagacaaancaaaattt

SEQ ID NO: 2388 - DNA, 884 bp, Glycine max
  Clone ID: PAT_MRT3847_102162C.1
gacaacgttaacattggcttctgttgcaagttgtaagtggtaactctttcaactcagccgtgcaagttttgttggcagcgcacgaaggaaccatcttctcttcgttttcctttttttctcaatcacacccaaatcccttccttccttcttcgctattgtcttctctttcaggtgagctaaacactagcatagtagcatgcatcattgtcataaacttgttgaaactgaagtcaaaacttgatcttgtgtgcgataaggtgatggacctctttatttacaaggttgatctctttcatccttctatataggtgcaccttccagtaaagcaggagtaggataattgttgaacatagatgaaaaggtgattgttatgtctggactgattgaaggacttcctgatgctgttgcaatcaggtgccttgcatgggttcccttctacctccatccaaagttagagcttgtctctcgtgcttggcgagcagttgtccgtggccctgaactatttaaagctcgacaggagcttggttcgtcagaggatttgttatgtgtctgtgcttttgaaccagagaacttatggcagttgtatgaccctctgcgagatctctggattactcttcctgttctaccctcaagaatcaggcacctttcacattttggtgctgtctccactgctggaaagttgtttgtaattggtggtggaagtgatgctgttgatcctttgacgggtgaccaagatggttgttttgcaacaaatgaagtctggtcgtatgaccctgtagtacggcaatggtccccccgtgcagcaatgctcgttccccgttctatgtttgcatgctgtgttatgaatggaaaaatagttgtggcccgggggcttcactagctgc

SEQ ID NO: 2389 - DNA, 341 bp, Glycine max
  Clone ID: PAT_MRT3847_102163C.1
gtgggaaactagtggttggaggccaaagatggatggtgaagtcaatgtgggagtgacaatcatgaattggtcaagtcattagttagacatccatacgctagtcgattgactaaggatgaaaatattattattactaatatgacaaagtcaatggtgaaaccaaaaaatattttactaacgttgaaggagcacaatgtcaatagttatacagcaatcaagcaaatatacaatgcaagaagtgcatattgttcttccataagaggtagtgatactaaaatgcaacaactaatgaagcttcttgaacaggatcagtatattcattggcatagagtaaaggatga

SEQ ID NO: 2390 - DNA, 749 bp, Glycine max
  Clone ID: PAT_MRT3847_102164C.1
tgcccaactattttatgatctgaattatgccaacccggctgctcggattagtgtgaagttggtatcggaagctggagtggggataattgctagtggagttgttaaaggccatgctgaccatgtattgatttcaggtcatgatggaggtactggggcttccagatggactggcataaagaatgccgggctgccttgggaacttggcctggctgagacccaccaaactttggttgctaatgatctacgtggtcgcacagtcctccaaactgatgggcaactgaaaaccgggagagatgtggccatagccactcttcttggtgcagaagagtttggtttcagtactgctccactcatcactcttggctgcatcatgatgcggaagtgccacaagaacacttgtccggttggcattgctacacaagatccagtacttagagagaagtttgctggagaacctgagcatgttatcaacttcttttttatggtggcagaggaaatgagagaaattatgtcccagcttgggtttagaagagttaatgagatggttggccgttccgatatgcttgaagttgataaggaagttgtcaagagcaacgagaaactagagaacattgacctctctctattgcttagacctgcagctgaactgcggccagaagcttctcaatactgtgtgcaaaaacaggatcatggtttggatatggccctggataataagctcataagtctgtctagtgctgcttggaaaa

SEQ ID NO: 2391 - DNA, 325 bp, Glycine max
  Clone ID: PAT_MRT3847_102165C.1
ggacattttcgaagtaagagtcgggtatgtggaggactatggtgcttttgctcatttgcgctcggctgccgggtgatgcctggggtgttttaacgtaactggcctaatcaccttttaaaagggtcattggaacctattcaaggtgccataaaattcttaaaaggaggggactaaatggaggcccaagtttctggttttgattggggaaaatcaatggttaacctatcaattttacacctcgaaaaaaatccactcttaaaaactctggacaaatgattacctcaggatggtccaactgatcctgattctataagtggtggggata

SEQ ID NO: 2392 - DNA, 560 bp, Glycine max
  Clone ID: PAT_MRT3847_102166C.1
gccatacaacttatttgttgtgtgtgttgatgctttacctttttctttgcattctaactgactttactcccccaaatttggggtaaattttgccttgaaccatatgctctcctagaatctaagcaaggtatcaagagataattatttaagttcagggttcaatttatgacaaaatcattcagcatataaagggagcaaaggatacaattatcttgcaaggtaagctgtttggtcaaaaggcttgtgtatacacaaattatggccttcatcatattctcattttacacatatcattctaaaattcaaagattcatgccaagattattaactacaggctggcggtcactcacaaagtaaggtcactctcaccagttttggttcaagcttttctttcacaatcaatctgtctactgactaacaattctaaatgcaatttcacattcttgttcgttctttgtctaacatacacacttgctcaaaatcatgaaaagaaacacaaattccatcaaaatcatgcactcaattcaaaataaagatatacacccatttttcacaaaaag

SEQ ID NO: 2393 - DNA, 249 bp, Glycine max
  unsure (1)..(249): unsure at all n locations
  Clone ID: PAT_MRT3847_102167C.1
cgcagaagaatcatcaccccaaaacccaaattaaaaaaaaaacccaaataatacaactgaagttactttaannnnnnnnnnnnnnnnnnnnnnnnnnnnnnnnntgacttcgattcatttgntaaacactctcgcngtccgcttcgtnctttttcncctcngtngctttttccgcaatgccattctcctctccgttcttcngctgccccgaaacggggtngtttngctaatccnctgggttccgccttg

SEQ ID NO: 2394 - DNA, 464 bp, Glycine max
  Clone ID: PAT_MRT3847_102168C.1
attgcggcacagtctcaaatacattattaaatttcgtggccattcatattctttcttataaaaatcagtgggagtgttcaacaagatgacatttatgtccaaattccaatgttcaataaattaagtcattaagcaaaaatttgctaaaaagatataaatgaatgaattactacaaacacctctgaccaataaaatgaattggagcctaagttcaacaagaacctccacaatcctccgacccaattgcgcaagaagatggaaaaatgtcaaggcttcgtgcgtatatacaacctgtgcctgctgaataatctatttattcccagagcaaaacagcgtgttcatccgccagggtgcgacataatagagccaatccaatcattttttcagaaatggtttctggcaaacaagaagccgctggtcactgccattcttaaggacaattacccgggcttgccaacgtactt

SEQ ID NO: 2395 - DNA, 201 bp, Glycine max
  unsure (1)..(201): unsure at all n locations
  Clone ID: PAT_MRT3847_102169C.1
ggaaaccaacagcaancaaagangnncgccannnggaaggggaangngaanacaaanacagggcancaanaaaanaaccccacgcacacagccaanatcngactgaaagttgatacagaaaaggatcaacgtggagcataacaaaatggcacagagaaatctatgtgaaggtaaaggggaagcgcatcagccggggctcaa

SEQ ID NO: 2396 - DNA, 267 bp, Glycine max
  Clone ID: PAT_MRT3847_10216C.1
attcggctcgaggttagtctctcacctatcaccgtcctcttctaacatttttttcaaaaaccgaaaatcatgcacatttttctgttacttacttgttgccttgatctatagcaccgatgaggttaataatcgtttgtttgcttcgttttaccgtcgtatattctttgttgtgattttgatgatggaaacggcgtgggggttttcaacccatagctgcggtttcggatgatgaattttgcgtaaatgctgttttatctttgtttttgt

SEQ ID NO: 2397 - DNA, 524 bp, Glycine max
  Clone ID: PAT_MRT3847_102170C.1
ttctcgatctataacctcgagccgagatcagatagtgcagacctaaccatttatgggagaatgagatggcaacgacgaatcctgcggatacttaagattatattactaacaaatcgtaatgattcattatgtgatgatggcgaagaaaccaaaaagcatatccttttttataggagttgtgcactacattacagtctgactcagatcgtgtataaaagagctaacccttggccttcctgcaacccgattttatggaatttccttttaaataacagccattcctataggttcttgctgacattaagtgatgatctcatggctaatattacctaggcgaactacgattcattaaaatattcttcgatatcaacttctatatcagaacaagattctttagccttatatgtagaaagaatctggccgatgtagaagattacatgttgcattttatatcaaaacaagatctccttctgtggaatggagtatacgaagaatgctaattcacgatattcaattattcattg

SEQ ID NO: 2398 - DNA, 429 bp, Glycine max
  Clone ID: PAT_MRT3847_102171C.1
cacaacaatcaatggcccaaattgcattgatgtaaacaaggttacttttcactcgtcaagaattctgcaaagcttcaagtttggtgccaaaaaaggagcaaccaagatgacaatgaatgaaaatactcgacgacatatttgtataaatatgagtaatgtatggatgttaacttcaatatctcatcattttcaaaccatttatttttctcacaaaatcttattcatcatagataatacatcgtgagaacttctcgacattgatgactcaaacctcttattccttgttcacccttctaacccaaaattagtcatcctttagttcaagcccacttattcctaatcccataggggtcgtataggatgtcatggtgaatcgccaatctagggagccactcccaactcaagaattcataatgcgtgcctaccaag

SEQ ID NO: 2399 - DNA, 312 bp, Glycine max
  Clone ID: PAT_MRT3847_102172C.1
cggacgcttccgcccacgcgtccgcccacgcgtccgggcgttcaaggtggtggtggacaaggacgccaccactaccacttcctgagcctattccaacgactgagccaccaacaccttttacaatttcactttcaccaccttcttcaaatccaatagatagtgccagagtgcattcgcaaactggatactgaggtatatgcatactaagaattctcgtttcaatagcaacaacagtatctacgcatataccctgatgaatttcttgaccaatctgatgcaatggagaaaggtgattatcagattgactatgtg

SEQ ID NO: 2400 - DNA, 478 bp, Glycine max
  Clone ID: PAT_MRT3847_102173C.1
ttttttttttttttagcttggaaatcataatctattcactagtttcctttacactaagcatgtatgaacacaagaaagtgagacaatagaaaaaaagaaaacaaaaggttcatgagcactaagctgttgtttctagcttggtccttctagtggctcttatataacagaaaactgacaccaaaaatgtggtagcaagcccaacaagaataactcctgctccagctctggacttgtcaaatgagtggtggcgctgctttgacaaatggacctggccatgatgagaacccaaaacttctccatcatgtggttcaatagaagttctctgatgactaggaatgctcccttcagaaatagagtgcatcttcttttcactttgtggtgcttcagatggggtaggacttttggtgtcagaggacctgatttggttatgtcggtgcataccaagtttccttccaatagagggttctgatgtgcgtgg

SEQ ID NO: 2401 - DNA, 265 bp, Glycine max
  unsure (1)..(265): unsure at all n locations
  Clone ID: PAT_MRT3847_102174C.1
caataaaacgaagtgttttgagcngtntgaaattgcnggtcatgttgtngaattcagtgcggatcaatacgggagtngattaatcaacaaaagnttgaaacagntaatacagaagaaaaaaacangggttaacanggaancaaggcaaaangccctggcttggagaacggangcntaggggataangtggtncaaaagtnnttngagnatggactggnatccnagagangagaatagccaacaaacttctnggcnangtncngac

SEQ ID NO: 2402 - DNA, 405 bp, Glycine max
  Clone ID: PAT_MRT3847_102175C.1
acaaaacccaaaattcaatagtcacaaccacaagcgcatcatcgaagtgtcgcttctcccttctttccctcactttcaggaagattatagagatatgagttctcaacttcggagagaaagaagggactggtccagggttccaccacaaggtgctactcgtcaagaatgggtccccagaggggctgctgctgcgtccagcaatgttgctcagccatcaaatttgcattcaaacaacaatgctgatgctggttcttccaatcaaggggtggccgtcgctgctccgtcgtcggtgagtcgcgctagaagcaacaatcatgggaatgattccggttcttccaatcaaggggtggccgttgctgttgtgtcggttagtcacggtagaagcaacaatcatgggactgatgc

SEQ ID NO: 2403 - DNA, 140 bp, Glycine max
  Clone ID: PAT_MRT3847_102176C.1
gggccgcaggctttaaaatcgtagttttgggattttaccggttcagggggaaaaaggttaccttaccaaaagagttgaattgttttggggttcccccttaaaattggaaggaaccttcaggttttaaggctaatattcaa

SEQ ID NO: 2404 - DNA, 426 bp, Glycine max
  Clone ID: PAT_MRT3847_102177C.1
ggggtgggtttgtttttttttttttttttttttttgtttttttttttttttttttttttttttttttttttttttttttttttaaggaaaaaaaatttttatttatattttaggggcaagcggaacaaaaaaatcccccaaaaaccccgaaaaaaaggggatcgccggggaaaccccttcaagtttaccccccaaacccccccccaaaatttttttaaccaggcttcctagcctgaaaccccaactagcacaaaactgggttggaaaaaaataatcccatctttgccccaaacaatgggctaaacaacccccctgttttaaaaggggaggaaggccgctcccaaaattggaaaacaaaaaaattcccaaccccagggaaaaacctaaaattgccccaagttggaaggggggttaagaacccccccc

SEQ ID NO: 2405 - DNA, 337 bp, Glycine max
  Clone ID: PAT_MRT3847_102178C.1
cggaacctctttctcaggttttataaaatctcatgtctgttcaaagctttcttattcttcgtattcatcatacaccacgccaaatcacaatacccttcagtttttgggaattttggctcagttgagatctctgtgaaacgggtttggaaaattttttgatcttgaggtttatgagattttaactgtggaagaaagatggtgggtgagaagttttgtgtgagcgaaatgacaagggtgtgttggagtctgtgttgggtgcaaaggctgttgcgttctttatttcagcactttccaataatgtgttttcccgtgtcgttgcgccgtcggctggtgctga

SEQ ID NO: 2406 - DNA, 233 bp, Glycine max
  Clone ID: PAT_MRT3847_102179C.1
aacagtaataataatagtatatatggcataatacaatagtatatatggcataatacaaacccaacttctttgaccgtatttagaagcggtgaaaaattattattgacctttccaaaaaaaacattaaaaggttattttactatgaattgaacaatcaaactttttttctaataagaactaaacccagcttttgaaacagcttttaaaaaaaatacacacccaccccctttttt

SEQ ID NO: 2407 - DNA, 343 bp, Glycine max
  Clone ID: PAT_MRT3847_10217C.1
agctatttgacatacacacatggcacattctctactgaccattgtcattacctactttgtttactatctctggcttacgctacttaaaattcagaagccaaaataaactcacacaggcgtcccctgatccatggaagatacctatcattgcgaaccttgataagatggtactaacatatctacttacacatcatgctctccgaaaacttgtctcgaaatatggacctttcatgcacctccaacttgatgaaatttacactatggctttgtactcccctaagatggccatgcttataatgaaaacacatgatactgcttttgttcaaaagcccgaacttctggc

SEQ ID NO: 2408 - DNA, 2257 bp, Glycine max
  Clone ID: PAT_MRT3847_102180C.1
ggcggaacctcttctgtcaggttttataaaatctcatgtctgttcaaagctttcttattcttattcatcatacaccacgccaaatcacaatacccttcaggtaattttgctctttttgtttttacgctgaatctgtttgttccccttccttgaacgtttttcattggggtttcgacccactatgttggagctcaatactaagttagattccttttgattttcatccattatctgtgattaggaacaccgatgtcaccaatttcacaacttgtgggttttagttggatgttttcaagggtttgattctagggttacttatgcagtttttgggaattttggctcagttgagatctctgtgaaacgggtttggaaaattttttgatcttgaggtttatgagattttaactgtggaagaaagatggtgggtgagaagttttgtgtgagcgaagatgacaagggtgtgttggagtctgtgttgggtgcagaggctgttgcgttctttatttcagcactttccaataatgtgttttcccgtgtcgttgcgccgtcggctggtgctgacccggctctccggcagcggttgtgccagcttgttgagggttccaagtggaattatgctgtgttttggcaggttgctggcttgaaatctgaaggaagcggggttccttgtcttgatgggcattgcagtgatcccaaaggggagaggaatggagttgggaaggaggatgaacaggagtgagaaagaaggtactgcagaagcttgatgcttgctttggtgggtctgtgttgaaagatgctaatcatgtgagattggacagggtttcggatttgctcatgttttacttatcctcaatgtgctatatatttggttttgattcgctgtgtggccctggcagttcgttcaagtccggtaaattgatttgggcttctgatgctgctggttgtttaaaccaattagaatctagatcgtttatggggaaattggctggtcttcatactgttgttttcgttcctctgaagtctggagtggtggagcttggttcgtttgaaatggtgcctgaagagcagggtgttgtggaaatggtcaggacagcatttggggaatccagtcctggacaggcaaaggtgtttccaaagatttttgggcatgagttaagcctgggggatacaaaatctcagtctataactattagtttctccccaaaggtggaagatgatccgggtttcacttcagactcctatgaagttcaagcactaggggtgaaccatgcttatggaaattcttccaatgggactttaggtgacggtaatgaaggaacattgtttcctcaattgaatcaaatgatggctgggaattttaatgctcaagcaagggttccttgtctagatctcggtaatgaagactcatcatcaattcatgcagatgagcggaagcccaaaaaaagaggtaggaaacctgccaatgggagagaggagccgctgaaccatgttgaagctgagagacaaagacgtgagaagcttaatcagaggttttatgccttgagagctgttgtccctaatatatctaaaatggacaaggcatctttgcttggtgatgccattacctttatcactgatctgcagatgaagatcaaggtgttggaagctgagaagaacatgggtaacaataaggaccaaaaattgtcattgccagatatggattttcaggaaagagaggatgacacagttgtgacagtgagatgccccttagatattcaccctgtttctaatgttgttaaaacgttcagggagcatcaaattgtggctcaagactctaatgtttcaactgcagatgataaaataattcatacattctccataagaactgagggaggggaggctgctgctatacagttgaaagaaaagcttgaagcatccctatccaaaagttgattgtcagatcatatttatgtgtagcatctcaatgatattgtaaaccatgttagaaatactctgtcttgtaggttaagtggctaacataatattgttcttagtgcactttgtttttacagtagtgtactttgttagttgtaatctgttttaaaatatgttcaggtcatcgtaaatgaccttaattatgtacttaagttgattaataattgaatttgatgttgatggatgatataagttgaactatatttaatctatcatcaatctaagtatgaaaaatgtcaacattggaacttttttttttctggcttactcagctggccggggg

SEQ ID NO: 2409 - DNA, 331 bp, Glycine max
  unsure (1)..(331): unsure at all n locations
  Clone ID: PAT_MRT3847_102181C.1
aggnatataatattgaggattagngtaagaataattgnaactactattnttgttactaatannggtgctcaggaaatgaagatgacagnatttgatattgagaggggagaatntgattgcgtaaataattatgatatantatncanatanaatagtgtattntgtgcaatgtgaancatttactgatgtnactaaataggcnannacagaagtnnacnctatgcancatggatnagttagaaggtataaanagcnggatcgggnggatatanncagttgcacgggcngggaanttcggtcggtttgntgtagantgcaggtgttgtggnct

SEQ ID NO: 2410 - DNA, 348 bp, Glycine max
  Clone ID: PAT_MRT3847_102182C.1
tcgttacttgtgctagtcattgtgtgtttcatttggaggtgcaagaagaaaaaacgaaagcaaaagtattattatccagatccttctcaaggaaaagcgagtaactattacaacagtgggcaacaccctctccctagttggcaagcaggttcaggtcctcatgggggtgaccatgttatgagggtacaacaacaacaaggaatgggaatgggaatgggaatggggatgggtatgggaatgggtcctcatagtggtggctggggtgcaccaccacattctatgatgagcagtggggaaatgagcttcaattactcattgggaacgagttctttcctcaccaggcctttc

SEQ ID NO: 2411 - DNA, 355 bp, Glycine max
  Clone ID: PAT_MRT3847_102183C.1
ttttattttttattttttattgtttttttctttttcttactttttccttctctcagcccaaaaaactgcagaggggggccccctcctatctgcatataaaccgtgcacggaaagtggaacgtgatcatccccctgctctaaacaatggaatcctctcccccaacgaaggaagctgaaccctcctcattaaccaacaaagcggggggcgaactaaggtcaccctgtctaaacaagaagtgggaacccttcgacgcacctttctgaaaccagccccctcccctggagcctcccttttttcttggggtggtgttcccacccccggaacaaaaggaggcgcccgggcagcgggctctta

SEQ ID NO: 2412 - DNA, 603 bp, Glycine max
  unsure (1)..(603): unsure at all n locations
  Clone ID: PAT_MRT3847_102184C.1
gtttaaagggtatccataatgatgcttagaagtcttaattattattattagtattttggttgaattatggtttggcttatttgtttaggaatttgccttgtgattgtgggatttgtctgtgtctgtgtgacctgctgaacaaaaaaattcattttcttgaagtcatggtctattattctgcattatgtatgttgtaagaattacccaatttacgatttcatccacgacgtgagaattctgtaattaaatctatgctatgaattccattctgatgcttaaaagtgcagaacaagtatctaaatattatcttatgtagttttacctctctacttcaattttttcgattgaagagttttatgcatactggatgaaacaggttatctctaaggtcctaaacaatcctctttcaaaaacataccgagaaaagtgtggaaatgacgacaccatcattggtagagtctctagttcttcaactccatgagatctcagctgtcaaatttggcaacttcaagctcaaatctggcatcttctcaccaatctacatagacctncgcctcatcatatcttacccttctctcctccaacagatctctcaaaccctta

SEQ ID NO: 2413 - DNA, 662 bp, Glycine max
  Clone ID: PAT_MRT3847_102185C.1
gcacgagcaacaatatcattcaaatttttcttttaccatcatcactcataatatatcccgctccgagtgaaatgctagctaaaaccaacgtgccccatgagaccttatctccacagaagattcatgtccaacatgttccaaagtgtgtgtcggataggttgctagagaagttctatgatgagtcagagttggatttcgattacgagcaaagtggattgtggtctcctccagttccacgcacggtattcttgagctcaccggggagaatattcactgagcaagaaatgcttgaaagactcagaagcaaaaatgcatcacgaagacgtggcaaaagattcagagtttgtttcagtgtacaatgataatacttcttgcttatctttccctgttccattggttcctctgcttctttcatattttgcactgaaaaaaaattctatacctttattctttttgcaggtgttctgttgtgcctgacagtgaatgtaaacaaaagtgggtaggtttttcagcaatgtttcttgttttagaatacaaagggaattaatccaaaaatttcctatgattattttatcatattcacaggaatttacatgtatttcttttctttttctctagccaaaagtcatgtatatgtgtgaatttatacatatacatacata

SEQ ID NO: 2414 - DNA, 2346 bp, Glycine max
  Clone ID: PAT_MRT3847_102186C.1
gtttaaagggtatccataatgatgcttagaagtcttaattattattattagtattttggttgaattatggtttggcttatttgtttaggaatttgccttgtgattgtgggatttgtctgtgtctgtgtgacctgctgaacaaaaaaattcattttcttgaagtcatggtctattattctgcattatgtatgttgtaagaattacccaatttacgatttcatccacgacgtgagaattctgtaattaaatctatgctatgaattccattctgatgcttaaaagtgcagaacaagtatctaaatattatcttatgtagttttacctctctacttcaattttttcgattgaagagttttatgcatactggatgaaacaacagccatcaatttggccccattcccgttttcctttactggtaagttgtaaccctataagccgttgctcccaccgccgccgcgcagatctccgtttcaacttgggttatctctaaggtcctaaacaatcctctttcaaaaacataccgagaaaagtgtggaaatgacgacaccatcattggtagagtctctagttcttcaactccatgagatctcagctgtcaaatttggcaacttcaagctcaaatctggcatcttctcaccaatctacatagacctccgcctcatcatatcttacccttctctcctccaacagatctctcaaacccttatttcttcagtctcttccacttcctttgacctcgtatgcggtgtcccttacactgccttacccattgctacatgtgtctctcttgctcagaacattcccatggtcatgcgccgcaaagaaatcaaagattatggcactgctaaagctattgaaggcgatttcaagcctggccaaagttgcttaatcattgaggatttggttaccagtggcacgtcagttttggaaactgcggcgccattgcgtgctgtgggattaaagatcagtgatgctgttgtgttgatcgatagagagcaaggtggcagagaaaacttggaggagaatggcatcaagctgcatgcaattattaaattgactgaaatggtgaaaattttgggcaatcacgggaagcttgatgaagagatggtaggggttgttacgaagttcttagaggataatcgtaaggttgctgctttggcaaaggtggagaagcctgtaactaaggtcaaagctttgccatttggggagagggctaagctgtcgaagaatccaatgggaaagaggttgtttgagataatggctgagaaggagagtaatctatgtttggctgctgatgttggaactgcagctgaattgcttgaaattgctgagaaggttggacctgagatatgcttgctgaagactcatgtggatatttttccagattttactgctgattttggctctaagcttctctcgattgcagaaaaacataacttcttaatctttgaggatcgtaaatttgctgatattggcaacacagtgaccatgcaatatgaaggaggggtttttcgtatattggattgggctcatatagtaaatgctcacataatctcaggtcctggaattgttgatggattaaaattgaagggtttacctcgtggtaggggtctattactgcttgctgaaatgagctcagctggtaaccttgccaagggagattatacaacttctgcagtaaaaattgctgaggatcattctgactttgtaattggcttcatctcagtcaatcctgcatcatggccaggggcaccaataaatccttctttcattcaggcaacccctggagttcaaatggtaactggtggcgatgctttagggcagcaatataacactccatattctgtgatccatgataggggcagtgacatcatcatcgtgggacgtggcatcatcaaagcagcaaaccctgctgagatagctcgtgaatatcgtcttcaaggatggaatgcatatttggctaaatgtaattgatgcctgcattcctagaataaaattatgagcttaaattatgttttaatgggacatctgatctcactgtaacccagatgaataaggtcttggggtacaatatgaagacatttttcggttggaatattgaagtggatttttcattttctctgaggaaaataaaattaaatataaaagatagaatggtaacatagatatgtagcagtaaggtttaagaggataattcagctcctctgctccaaggtttacttatattgaagcagaggtcttgatcaagaatagggcgaataaagtagtctaatagcaaaccaccctagctcatgtatcttgagttcgattttgcatccatgtattctatttttaacattgaatacc

SEQ ID NO: 2415 - DNA, 536 bp, Glycine max
  Clone ID: PAT_MRT3847_102187C.1
cggtgattatggtgcaaaaggggatggccttcgtaatgacaccgaggccttcctggaggcttggaaaatcgcttgttctctatctggatttataagtgtggtttttccatatgggaaaacttttcttgtccatccggttgacattggtgggccttgtcgatctaagatcactttgagggtatgctcccagagttaaatctcccacatgttgaaatctcagggacaatagttgcaccacaagatccagtagtgtggcatggtttaaatcagcgcaaatggctatacttccatggggtgaatcatcttactgtagatggtgggggggaggatcaatggaatgggacaggaatggtgggccagatcttgcaagatcaactccacaaatccatgtcatcctgctccaacggttagtggcgcgcttcagattatagaccaaaccagataatttccctgctctgatatgttatgtgttttattagctgaatatgaaaacaacatttacacgcaggccatgacttttcatagatgcaaggatc

SEQ ID NO: 2416 - DNA, 544 bp, Glycine max
  Clone ID: PAT_MRT3847_102188C.1
gttcatcgatctcttcctgaatcgttgtttaacatcagaaccatgaatcgatcgataaacctctgcatccagcgctcactcactctccttagtgcacaatcatattttggaaccctttatttttctgttttttgtttctggtgttgtttatttattgcagtttaatcaatgggttgaatctttggagtaattgatgtaaatctagatgcttacttatgcttttgttgtgatgctgatattccaattctgtgggggctattatgcagataatacagattcaatgtttaatagtattaaaagctattgctgcaatctaatgaaaatttctgaaatatttctgtgcctttttcttttgtggcgattgatcagtttcaaaagttctactgagaacgatttgaagattgagagccccatccttttttctattcctttcttgcttttcagttgttttgtgtatattattgtttgaccaataacttgtgacggtatcatcagttattgagatatcatatttatataatttcttctctttgtttctctatca

SEQ ID NO: 2417 - DNA, 531 bp, Glycine max
  Clone ID: PAT_MRT3847_102189C.1
aaaaaaaaaatggggggatttacccggcccccggcggaaggggaccctccctttttttttcccccccttggggccgttccaaaacttaaaaaacttttttccaatttttcgggggccttttaatttttcccccgggggacttggtcgttttggggctttccccaatttttacccccccccgggggcggcccccggggcggccccgggggtccccccgggaatttggggccgggccctggggggggaccacttttccttttaggggggcgtattaaaggtgggggaaaacaggggcatagctggttccggggggaaaagggtttccggtaacaattccgcccaaaataggagcggggagcataaaggtgaaaggcgggggggcccaagggggggccccccccccattattgggggggcgcctcctgccccttttccaggggggaaacctggggggccctctggattaaagaatccccccccccccggggagggggggttttgttatttgggccgcccggggggttttttttt

SEQ ID NO: 2418 - DNA, 125 bp, Glycine max
  Clone ID: PAT_MRT3847_10218C.1
atccgcaaaatccaacggtttggggggaattccagaattccaagaagatttttaacttcttgggacaaaagagccccggaccctaaaagaggttacaaaaggcttccccagagaattcaaatttt

SEQ ID NO: 2419 - DNA, 578 bp, Glycine max
  Clone ID: PAT_MRT3847_102190C.1
aaaggggcccccaccaaataaaaataaaaccctggccccccgcaaaggttggggccttttaaaaaccaaacccctgaaaaagggaaaacccgggggggacccccccttatttagggggcccctttaaaggaaaaggcccataagttggggcccctaaatttaattttggaccgggggaaaaacccccctgccggggaaaaaggaaggttcctggaaaaaagggggggaggaattaaagtcctttaggcccacaaatttttttttccaacggggcccaaaattaacccccggaaaattcaccaggaaacctttggattcaaagaaaacctggggggaaaaattgaaaatggttggaggaattcccctgggggtttaaattttccttagggggaaaaacccgggattttgggaaaaggttggaccaaaaaacggggccctttaggttcaccccggggcttaaaaaaaaaactttggttgggttggtcaagtttttccaaaacaaaattaagctttttaactttttggggcaaaaaccgggtgggctcaaaaggcggtggaaaatccctcccaaaacgtaa

SEQ ID NO: 2420 - DNA, 285 bp, Glycine max
  Clone ID: PAT_MRT3847_102191C.1
cggggattcatttcactgaagtgtccaaagaacagaagggataggtgccattgaaaagccccacacaaacaagccacatgctgtgcaggagaatgcatatcaccaactccttaccttgcgtcaggaaagttgagctcataaactgatcgcaggtacttttgactgagaagggaaactcacagaagctggggaggaacttcggcacgccaacctgttggagaaaggcttggaggatggaagtatgcaacctgacactgcttctgcctgtgggaacaatgttgtact

SEQ ID NO: 2421 - DNA, 385 bp, Glycine max
  Clone ID: PAT_MRT3847_102192C.1
ctggcgccgaatgttcggcaggtgatcaaactggcgaatctgcttagttcttgggtatgctcccatatcctcggcgtgaaagatacgaagcagcgggcgggaatcatgaagtatttcatccagacttcgatggaactacgcaatctgaacaatttctcatctatggcatcgttgatggctggtctgaattccgctccgatcttacggctcaaacggactaaagagtttttgagcgcaaagacgaatgctcagaaggttgagctggataagatgttggactcgacaaagaactttcagaattacaaggacatgcttaagaccattaatccaccttgtgtaccattcttcgggttctggttgtccgctttggtattcatcgaagacg

SEQ ID NO: 2422 - DNA, 226 bp, Glycine max
  Clone ID: PAT_MRT3847_102193C.1
ccccatagtcttcctactattgttccgacaaagccaaaaactgtctcattcttccatgtcgaggccgctaactttccctctggagctcaacggcctgacagactctgtacccatcaaccatcccatcacaaccttatttctttgttgcgagttcataaacaccgatgggctgtttgcttttcctccttccgctcgtggaactagcgactatgggatgtgaaccgcc

SEQ ID NO: 2423 - DNA, 335 bp, Glycine max
  Clone ID: PAT_MRT3847_102194C.1
atggatatctgcagaattcggcttaagcagtgataacaacgcattgtacgcggggatcaccaaaagcaccaccatgtcttcttcgcaaagcaaatcctacgactaggtgtcacgcgcccgaaacaacatcaaacccctcattaaaaagccccaactccattcgcacggcctgtttcttcgcttctccctcccttaaccaattcctccaatatgcaatcctcgccaacggcttcattattaacctaatccaaaacctctgtgccaagttcctgcctaaagaacccttttttttaacaaacacaccgttcaacatcttgttggcccttaacccttac

SEQ ID NO: 2424 - DNA, 413 bp, Glycine max
  Clone ID: PAT_MRT3847_102195C.1
tttttgttggtttttttttttattttttttttttttttgcaagatatgtgtttttcattattatgaaccactaattgaccggggaaataaaaacaaggtggcaccgtaaaaaagagtcccaataaaacatgggagggcaatattaattaatatctaaatctaatgaattgaaaagggtttatttgcccacatgcagatcccaactggcagggggcacaaaccggatctacccaccctggaaacaaagaaacaataaattggtaccgatgtcgggggcacccgtttatttggttggcctttagggaaaaagaaaaggattttgaggctttgagctgtttactagcggcctgatatcatagaaccaaaaaacccataggttaaccgaacaagaccatgaccaatcttacgtgcaa

SEQ ID NO: 2425 - DNA, 181 bp, Glycine max
  Clone ID: PAT_MRT3847_102196C.1
cccacacgttcgagtgagaacaagtagagtctcctttatgaaaccacctctctgcaaaaccgacgagagtagccagcatggggcgccagcgaaccctaaaattctcattcagaaattgaccctaacctcttggtatgcatggccgaaacagcctctaaacctcgtatcacacccgtttaca

SEQ ID NO: 2426 - DNA, 376 bp, Glycine max
  Clone ID: PAT_MRT3847_102197C.1
tggggtgtgagagagcgagcgagcgagcagtttcaaacataggatttgggattggtaacgcgagggattgcgctgcgtctcttccgcttctctttcgattcatccgtcattcatctgcgtccattcgagcaagcccatgcgtcagactcacacttagacacatctcaacgcgtatggtccctcacatggcttcacgtcgcatccacaacgagctcaatgacttggataattatctagcaacttcttgtaccgctggtccagtgactgacgagatgttcgattgtcgcgcaccgattatgggtcccgctgatcatccttattctggaaggtgtattcctagtcacttgttacagtcctccggagtattcctttcaaa

SEQ ID NO: 2427 - DNA, 474 bp, Glycine max
  Clone ID: PAT_MRT3847_102198C.1
gccgcctgcttgggggggggggggggggggggggattctaacaaactcgcggaaaggaaggaaagtaaatgccgaacaaaaacaaatgaaaaggcagaaaaatagggagccaagggaaacaaatactaggctactgcttaaaaaactacagcatttgccagtaaaatgtgacttacaaaagacggaactaccaggtcagtacgagcgaagcactgggtgtatatgcaaccgtgtgcatagatacaaaatacggcttactggagaaaacttagtattacccagcgcaacactgtaaaattcattatgggcccaaacgcttattttaagttatcttgtacagactggcgcagacagcctagccggctgataagtttgctatgtaaagagagaagacccagcacccgtggcccgggaggggggtcaacttatagcaaacagttaacgctactagcccagagctgtaatattaaaggg

SEQ ID NO: 2428 - DNA, 466 bp, Glycine max
  Clone ID: PAT_MRT3847_102199C.1
ataatacaaatatatgaacgggaaaattttatccattaggaaacatataaataataaaaggaggggatatacactaggttgaattgttggccatcctggtgaatggcaggtatggatcaaattcaaaacagacgaacaatcgcaaactaattcaattaatgtaaagaaaagaaacaaattaaggttgaattattttcaggaaaagagtgttgctgctgttgaataatttaattaacaaagctgcactgcttcctgatctcaccatcggagccagtaagcacttctatagaacccatgcgcaccattgctagggcaaatttctcagcccaacttgcagcattgtatgcgttgctttcaaccattgcccttgtggattggctcgtgtacaacgtctgatccgacgtcaacaagccacggtggttgattaatgcctcatagtatttactgtccaaacgaataggcgtgg

SEQ ID NO: 2429 - DNA, 304 bp, Glycine max
  unsure (1)..(304): unsure at all n locations
  Clone ID: PAT_MRT3847_10219C.1
cncacccggacgcaaagctcnnanttcngctcgaggcngaacaatntaanccaaaaatangcnaanacnnggnntcgatganntgcaggnntgnggcnggntganannggggcgtgnaagnccctcactnggctcncnaanacanctgatgnnnntgtntgnnaccgnaaanntnnnagnngccananntncntcgtgaatngagngtnngngngnatnggnatgtngcngntgagnacagncngannngggncgaaccngggngantgtgnagggntggcgggnannncacnaaggngcngng

SEQ ID NO: 2430 - DNA, 563 bp, Glycine max
  Clone ID: PAT_MRT3847_1021C.1
aagaacaaattatttatacaagcaacggtactatcatttcgattgctgtaataggaaaaaattattcttaaatttaagaactctataaacaagcttcattaaagtatttttctgtttatttggtatttggtattgttctgcacgcgcatatatatatatccatgatggtcagccaatacttgtagagagcgtaataaatgatgattgatgaggttgggcgagagaggaatctgctgcgtggtaaataaaccatgcaaagccaaacatatttggacattggcttgaagagatgggagacaaaggataaggattgagaaaggcctaaataaagagaagaatgcaagctaggaagttgcacaaattggtaaaactaagtaaactttataatagattgttattcccaaatttttattcaattgaaagcggtactgagatagttgttgacaacattttcactcaagatttgcaacactctggtgtttgtaggaccaacacatcttggtgtcttgtactgactaacagcggttcctagtcctaggtaatgatcaagaatcttctggaat

SEQ ID NO: 2431 - DNA, 402 bp, Glycine max
  Clone ID: PAT_MRT3847_102200C.1
ccaaagaaggggctggggcggccggagaggtagattaggcagccggtgagttttggggggttggcgcaggcgggagcagtggcgggagcggaggtttttgggattttggttgcaacggcggtggtgaacggtattttggggcctgaagctcaaaaatcgtgacttggtgagttggtcataagtaaagactagtacattgttgttgtcgatggataacgtagtgttaagtgttgaattggatatgtttgtgtctctgtaagactctgcctgctttacgtgtttatgtttgtagctttgtgatcatatcatgtaaacgaatcaatgcatctagaatctaatagccttgttcctatgtaaagaaaatcgttccttcaaaaaaaaaaaaaaaccaaaaatataaat

SEQ ID NO: 2432 - DNA, 444 bp, Glycine max
  Clone ID: PAT_MRT3847_102201C.1
gcaccagtggaaatgttgcttctgtgtcctctatgttaagatgcacaacttctgtatcatcaatacttacagttgaatttcgttagcttttggtttctttgtccacactttcctattctgtctgcacttctcttctcctattgaaatgttggatgttttattgagctgttgtactggtttgaatttcgaactgttgagtgaataataattctatcggggtagaaaattgtcagcaatcatgtttcattcattctatcccaatatttcattttctattccaagtacccattggtgctaaaaatggttttctagataatatttgcttggcttttgcctgcagtgaatatggaaaggattgcaccaaatttgagaagagagacaatctttcagttccctctggttttacatccctgacatcttttattttgaaaagggtggaaatgt

SEQ ID NO: 2433 - DNA, 1189 bp, Glycine max
  Clone ID: PAT_MRT3847_102202C.1
taaaaggaaaaggaaaagtcatcaccagactaagatatgattgtcttggaccaccgtttttactttgccggctcagtcaaaagactcaaaacctgaataatacgagtatatgattgtgaactctgaagagataatcgcattgtatggactataattgtacattgaaggtccaactttctgacaccacactgggaactagaagtcccatgaagtcccatcaggcaccataagtgaaatgtaaactccaatctttatcacccttaagctctgaacacctttgaacagatagtatatagtgccaaaggaaagcaaattgtagtttttcttgactacgatggaactctctctccaattgttgtagatccagataaggctttcatgactagaaagcctgatattgccgcaccgggagttgacattatcgctgcatggattgcaaatgacacatcagaggtttggaaaggaagaaagccctcactatacaacataatctcagggacttcaatggctactccacatgtttcagggcttgcatgcagtgtcaaaacacaaaaacccacttggagtgcctccgcaatcaaatctgccatcatgacttcagcaattcaaaacgacaatttgaaggctcccataacaacagattcagggtcgatagccacaccttacgactatggagcagggacaattacaacatctgaaccattgcaaccagggcaactagtttacgaaaccaataccgttgactacttgaactacttgtgttacattggacttaactcaaccacgataaaggtcatctctggaactgctcctgacaatttccattgccccaaggattcgagctctgatctcatatccagcatcaattacacttccatagcagtaaacttcactggcaaagcaaacgtggtcgtgagtagaaccatcacaaacgttggcgaagaagatgaaaccgtgtacttccctgttgttgaagctcctagtgaagtaattgtcacacgatttccatacaatcttcagtttacgagaagtattaaaaaataagctaccaagttactttcacaccaaaggcctccttaaagaaacatttgtttggatctatcacttggaataacggcaaatatatggttcgaattcctttagtattaactaaatagtgaaattagaaataacgatgaataaatggaag

SEQ ID NO: 2434 - DNA, 454 bp, Glycine max
  Clone ID: PAT_MRT3847_102203C.1
gccccggcattattgccgggtcgtccccctccgccccggtcgcgtgaacgggcgcgtgtgcgaaatacagatgaaccttgatcacaatgtgcggttccttaattccgtatagagacaccatggctacttgaaaaacgaatcttccttgctgtgactacgtcttggtgtacgatttcttaagggaaagaaaatcactctctaagctggccccagactacatgaagcactatctgttccactcttagttcatcagctgaacactctcctatacgatataagacttcttgtcagatttaaactgcatctgttcctttctcagctctctgcttaatcgcaagttcaagctggtgaactattggattagtgctcccactttcctatgtggaataggacttcgagggtagactatactatggctgtcctgcctatcactctgttcagctgactgatccat

SEQ ID NO: 2435 - DNA, 527 bp, Glycine max
  Clone ID: PAT_MRT3847_102204C.1
cacgcgtccgctacactttcggtcacactctttgggaaaaaggggagtttattatcttttatagacgcttgcattgttcgacgagttcttacacctggagcaccatgacgaacacgatgaagtgttgggtgagaacttgttggagaagattcatgggaacatccacgaccactattcggcatcttactacgataacgacaacgataaaacctgcgcttatgactccgtgaagagaatggttttcaggctttagcgcatacaaaatcccattcaccatgttcttggcggcggcaaacctgtctacgttatcatctggatatacacgaagatatttgcatctacactcggattagcgaccgttatatgagtgctggatgaatagcttgagtaccagcttctccacttgctgagccacttcctgatccttgggcttgcggtgttgaacgtgtggaccaatgtatacactatcatcaacaagagtccaccagagatcctacaagagcacattgcagaaaaacctgtcttag

SEQ ID NO: 2436 - DNA, 1710 bp, Glycine max
  Clone ID: PAT_MRT3847_102205C.1
ctcggtcattttttctctctctctctctctctctctctgtatttatatgttcagatctttgctttgacatctttctcaaagaatctctttcctttttctttattcctttgtctcaacctcgatttcccccctattttccgattaactctttacacgatcttatctacgaataataaaaaattaattcctcaattgattctttgtggcggtgttcgatcggtacctgcatctcttcttttccaggtttggagaatgagttctgtgcaaggaccagttgtgtgcccttctgtccgtgccaaacaagtagggttctgcagcattccaatgattggggcagtgaaaatgaacgttagacgcatccgaagtgaattttggggtctcaatggcgccaaggctaatacccgggtttctttcttgccatataaacacgcgaaagtgcaagactgtgcattgtacttttaactcaccctccaatgacagtggaagtaccgctgacaatttcaatgaaaaagatgaatattatgttatttctagtgtaatttaagctgttgaggtgaagcttggagcatttgggttgataatcaaaatgagggacggaagacacttaagatgcgtccataacaatccccagggaggacatcttccagattatgcaccacatcctgctattgtattgaagatggaagatggcactggtctacttctccctataattgttttggagatgccaagtgttttgctaatggcagcaatacgcaatgttcccatagctagacctactttgtatcaagtagtgaaggagatgattgacaagatgggttacgaagtcaaatttgtcagagtaaccaggagagttcatgaggcatactttgctcagttatatcttaccaaggttggaaatgacgcagaatatgtgagctttgatcttcgaccttcagatgctatcaatattgcagtaagatgcaaggttcctatacaagtcaacaagtacttggcatacagtgatggtatgagagtaattgaatcaggcaaattgtcaacacagttccctggtatggatggccgactattcactgaaatggaccggccaagtggtcaaccttgtgccgagaccacggagtttaatcttttacacaatatgttgaaagctgttgttgaagaacgctataaagatgctgctttgttcagggaccaacttaatcaacttagggcgggaaaaaacatgaaaaacagattctgaatgctttaattgtaaatacaatcttatattagaatatcgatggggttcggtacagctgagctgattgcagtcatgtctctcccttcctcggtctatgtatgcttacattgtctgtgtatatttgtatattgtatatatttataaacattaatgctaatgcagtcatgtgaaacttttcactgcttttctgaggcttgtttcaatcttcaaaagctgttaatatgtaatgtgttcttttatccataagatgcagtatgtgactgatgaatgtgtttcgctgtattattaaaatatttgggttttattgaaaatatttgggatgattagataaaatgctgtaaatatattacttggttctcagttatttgtgcatttgtttttttttaggtagactagctaataggagaacttttatatgtatttgtactcaaataaccattcagtgcttattcaattcgattcttccactg

SEQ ID NO: 2437 - DNA, 664 bp, Glycine max
  unsure (1)..(664): unsure at all n locations
  Clone ID: PAT_MRT3847_102206C.1
gttcagttctttggtttgacatctttctcaaagaatctcttatcttctttctttcccattttttcattccactttatctcaacctcgatttttccattttccgattaactcactcttttcacgatcttatctacatataatttcaaaatttttaatttctcaattgattgtttgtgacggtgatcgatcggtcggcgcgatcgtacctgcatctattctcttccagtgtataggtttggagaatgagttctgtgcaaggaccagttgtgcccttctgtccgtgccaaacaagtagggttctgcagcattcctatgattggggcagtgaaaatgaacgttagacgcattagaagtgaattttggggtctcaatggcgccaaggctaaacccggttttctttcttgccgtataaacacacgaaagtacaagactgtgcattgtacttttaactcaccctccaatgacagtggaagtactgctgacaatttcaatgaaaaagatgaagattatgttaattctagcgtcattgaagctgttgaggtgaagagtggagcagatggtttcataatcaaaatgagggatggaagacacttaagatgcgtncataacaatcctcanggaggacatcttccagattatgcaccacatcctgctattgtattga

SEQ ID NO: 2438 - DNA, 338 bp, Glycine max
  Clone ID: PAT_MRT3847_102207C.1
tcgggaattttagcctcacaaaagcaaagatcgaacaaacgaaggacgagaacacgatgctttgttgaacgttcgcacttggtactatatggttgcagtgatctgatcaacgttcgtagatatccatacaccagttgctaaggataatgccacttggactatcctgccaaactgcaacaagtccaaagatctgatatattgtttgggagcagctagatattttataagaggaacgtttgcagtacggactgatcagatctatccaaaaaacatggggcgttattctatatctactttggctacatgccaaccgttgttggctccacaccataattgtt

SEQ ID NO: 2439 - DNA, 378 bp, Glycine max
  unsure (1)..(378): unsure at all n locations
  Clone ID: PAT_MRT3847_102208C.1
ccgccctttttttttttttttttttttttttttttnnnnnnnnnnnnngaaaggaaccaaaaaacttttttcttttttggtttctttcgggatttataaaccaggatgaacccctgggggtagtttgggaaattcgtcttgaaaatgggctccacgttggggggattcgaggggatggggttccccaacacgtaaacgtggatggggccggttggggatttacccaagaaatgagtgtcccagtcgcagaaatgggggaactttttcagccaactcaccgtcaagtagcttttgcaaagatcgcagttaccccagggcttcttcctggagatgaagacgaggaaggagaaaaaggaaaagagaagggggaaggagaag

SEQ ID NO: 2440 - DNA, 1346 bp, Glycine max
  Clone ID: PAT_MRT3847_102209C.1
ctcacatgtcccagtctcttttcaactctactagtctaagttcgtaactcttgttgattccaaagtggcacgaccacactcaacttaccgtgcgtttttctctcccataaaaccagcaagcaactcactcccacactcaccccagtcaagagagagaatgttgaaggaagtgagccaagaaggcctgcagaggaaggactacgtagacccttcttcagcccctcttttcgaccttgtcgagatcaagctctggtccttctacagagccctcatcgtcgagttcattgccttacttctctttctctacgtcaccgtcgtcaccattattggccacaagaaacagaccggaccatgcgacggcgttggcctttttcggatttgatggaaagccttcggtggcatgatctttgtcctcgtctactacaccgtcggcatttctggtaaccctacctcgtctactccaccacctcttttttttatttatttattacttactttttcgttttgcggcgtcaacaacataacttaggtggacacattaacactgccgtgacttttggcctgttcctggcatgcaaggtgtctctcattcgtgccatgttctacatggtagcacattgtttgggtgctatctgcggttttgggttggtgaaggccttcatgaagcactcctacaactccctcggcggtggtgctaactccgttagcgctgcctacaacaaaggcagtgctctgggtgcggagatcatcgacactttcgtccttgtcaacaccattttttcagctaccgaccccaagagaagcgctccgacttcctatgtccccgtgttggccccattgcccattgggtttgccgttttcatggttcacttggccaccattcccatcaccggtaccgggatcaacccagccaggagcttgggtgcagctgttatctacaacaatggcaaagtttgggacgagcattggatattctgggttgggccattggtgggagctttggcggcggcggcataccaccagtacatccttagagcaggggctattaaggccttgggttcattcaggagcaaccctaccaactagttcccaagacaatgtcatcatcaccaattcgcctcttcttttctatttatttcttttgtttgtatgagagatcatcatgccctgtgtatggggataattcgtctttttttcttcttccttccttttatctccccgcctgtctcatttgtccgttcgcttacacttctaaccaaaattcccgtgaacacaacccacagggtttgcagtcggaaaaaaaaaaaaaaaagggcgacacgctcgtaccgctattcacagcattc

SEQ ID NO: 2441 - DNA, 658 bp, Glycine max
  Clone ID: PAT_MRT3847_10220C.1
ctaggctcaaaaaaatattttcttttccctcttttttattctgggttttctgcccattccctctcccctgtcggttatccctcacaaaccgtcggctgtctcaggtaaacagaaagtgaaaatgaagagaatgatagccttggggtttgagggttcagcgaacaagattggtgttggggtagtgaccttagatggcacaattctttcaaacccacggcacacatacatcactcctcctggccaaggctttcttcccagagagacagcacagcaccacctccaacacgttcttccccttatcaaatccgctttggaaactgcacaaatcactccacatgacattgactgcctctgctacaccaagggtcctggcatgggagctcctctgcaagtctctgctattgttgttcgtgtgctttcgcttctttggaagaagccaattgttgctgtcaatcactgtgttgcacacattgagatgggaaggattgttaccggcgctgatgaccccgttgtcttgtatgtcagtggtggcaacactcaagtcattgcttacagcgaggggcgttatcgaatctttggagagaccatcgacattgctgtgggggaattgcttggatcgctttgcaggggtctgacactttccaatgatcctagcccc

SEQ ID NO: 2442 - DNA, 715 bp, Glycine max
  Clone ID: PAT_MRT3847_102210C.1
ttgtcgttggtatggacgggggacagtggacacctgctagcaggaaccagtacaatctccgagatgcagttgcacgttgccccacacaggtataccccttttcatggactgctatttatattgcccttgacaatgtgggaatgtggaacttgaggtctgagttttgggcacgacaataccttgggcaacagttatatttacgcgtttatacagcatcaacctcaatcagagacgagttccctgttccaaagaatgcaattctttgtggtagggctagtgggagacacacgcgacccctttgagctagcaagagtttaaaggttccacgcttgaagaggcattctagctttagaatacgaaaagtagttaacttatctacttctaattttatagttgagtgctttggtttttttattttatgctatgctccagtgggatgatgaatatgtaggttgtatccctaaatgaccccagctcgaggtcacattaattatttcccagagagagatagagagtgtgtgtgagagagaatatatattatattccctttgtattatctcggattttactagtattgttatcaagaagaagggtgaatcggattgcgaaagttggcgtttggaacctggctataagcagggtctgtgattcatttaattgttgtagcagtgcagaactttttaatttcaattgctatatgcctatatcttttttc

SEQ ID NO: 2443 - DNA, 640 bp, Glycine max
  unsure (1)..(640): unsure at all n locations
  Clone ID: PAT_MRT3847_102211C.1
ccacgcgtccggtttttttggatcagggtttgaatcttgaacccaacttgtctttaagttaaattacctcccaacactgcgtcataacatatgtgtctcattccatcaatgggagtaattaattaatactccatagcttcacgtgtcaccacttttgtcatcaataaataaatccacataactcatgcgaagatgggactactattgtggtactttcacaattgctatactttgatgtctgatttttcttttcaaacataatatgggtgggataggactacacctatcataatgccattcaggagcattgtgcgtgagctcaaggagattggagagggcattagcaacatgtgtagaagaggtggagaagccaagcatgtgcatcgccatggaaaatctcacattgcaccagaatggtccttaccaccaccaccatcatcatcttcttcttcttcttcatcttcatcatggcagagccggtgggctaatttgccacccgagttgctattagacataattcaaaggggggaagccagtgaaacttcttggcctgcacgtanagcacttgtggcatgtgcctcantttgtaaggtggggagagagataacaaaggatgggggcaagacaccagaacaggggg

SEQ ID NO: 2444 - DNA, 1396 bp, Glycine max
  Clone ID: PAT_MRT3847_102212C.1
ggctcgaggttttgttaatgggctcgctatgtgttttggggaatgcgaaggtgtatgtgtttccggagctaaaacaacatgttttttgtcattctgaatatgagggaagaggacgaggaaagttttgggagaaccttaattaagggaattgagaaatttgaggcagctgttcgacaagttcagggaaacatactgagtggggaggaagcatttgtcttgtgggatacatatgggtttccattagatctcactcagcttatggctgacgaaaagggattagtttgcgatgggggccgcaaacgcagccaaaacaacaactaacgacaaagattcttccccaacacaagggaaaaccggagcaacaaaaaaagtaacacacacgcacacacgcatcatcgtataacatttgttttattttttttaaagagcgagtgttgtaacaaatggtgaagtcgaagagcgtggagaaacctgcggaggaacaacaacgaggtggtgtttcagcgtacagaggagtacggaagaggaagtgggggaagtacgtgtcggaaattaggctgcccaacagccgtcaaaggatttggttgggttcctacgacagcgccgaaaaggcggcgcgtgcattcgacgcggccatgttctgcttacgtggcagcggtgccaactttaatttcccgagcgaccggcccaacatcgctggcgggaggaacatgacgccctcgcagattcagatcgccgcggcgcgtttcgccaattcggagccccgaaaggagtgttcgggtaaacccgtggagtctttgacttcgattgaggaaacgacgtcgtttccagtaaattcggatacggatacatcttctcctctatcagtagtgacgatccaaaacgacaccgaagtagcaaccgggtcgtttccgggtatattttcgggtttcgggtcgggtaatttcgtccccgaattctccgattttccgagcttcgatgatttcggccacgatttcttcgtgcatgagcttccgggtttcgattacggagaagagaacttggatgggttgataattcaggactcgttcctgtggaatttctaagcgggtcggggttaggataattttattatatcccaaccgtgtttagaattcggatcggatccggatttgggttggtcaatttttgtgagaccatgccctctgtgttagtagttagtgatggtaatgttttttttatgtacctagtagtcaaggtttcgattttttgggatgagaatcataatttatttatttgtcatgactcatgtcattaattgtaaagttgtctgctgatagtgtaattttcttttggccattcattcaattataaaaatgataagatattttcgtctggataaaggttttaaacaacc

SEQ ID NO: 2445 - DNA, 668 bp, Glycine max
  unsure (1)..(668): unsure at all n locations
  Clone ID: PAT_MRT3847_102213C.1
cccacgcgtccgggagatcaagcaccaaacccaacacacacctctctctctctctctctctctcttgtgctgttgttctatttctcattctttcgcaagtgaatgttgaactgactctgcggttcggttcggtttttttttttttctgtttatggatccgggcgcgatgatgaacgagggttccttcgcgaacaatgcgagcggtaatacggcgccgtttagcttggcggagatctggcagcagttcccgccggcgattagtggcggcggtggattggggctcagaagcccgcagttcggtcacgggccaggagggcagtttggggatttcaccaccgggccgagccacggactcggacccagtaacagcagaaagcggcgcgactccgaggaggacgattccgctaagggcgtgtccaccagcaatgccgtgaatgagggtgatggaaaacgtgttaaagggaataggaacgagggtggtggtgatggtggtaataataaaggtgaaggtgaagtcagttcaggaaagccctgcgagcanagcgctaagccagcttcggagcctccgaagcangactactttcacgttcgagccagaaagggtcaagccactgatagtcacagtcttgcagaacgagctcgaaggaaaagattagtgaaaggatgaa

SEQ ID NO: 2446 - DNA, 720 bp, Glycine max
  unsure (1)..(720): unsure at all n locations
  Clone ID: PAT_MRT3847_102214C.1
cttttttttttttttttagacatgaaacgttcttctgaaattcaaattcaagcgaaaattagttatattgagacctccgagtggatctcaaaaaacaaaagacctgcaaaggagaacgagacgaaaaaaatacatttagatggattcttttttcttccattcgtacctccttcgtccttccaaccaaacagtaccttgtaacagataatagctcacaaaaataccactatggcttactgtgtttgggttatcattcggttgaacgtaaccactatcagtgtttttttcttcagcagctttgttgcttctccgctgggtgcctgggaaagcttgaaatgccatttggagcctttgaaatgggaaatcaaacacactatatcgtggtttatgtttgggaaaataatgagaaatgggatgggtggaagaacaactctggattaatttacatcacattaatcaatatgttacatcacactaattagaacacccaacacctangaatttgtttcaaacatctattatatatgataaaatatgagataactttcaaacacaattcattatgcatcaaaccatcaagacaaaaactatggaanaacgatcacctgtacaatagatgatacggggaggaaaaacattttgatcacttaattgatctaattttccccttcaacacatcacacaannaactattaaacagattattgacttacaatttac

SEQ ID NO: 2447 - DNA, 412 bp, Glycine max
  Clone ID: PAT_MRT3847_102215C.1
catggttctctcattcccatacttggctggcaaggtcgagaaactgggcccataagtcccataagtgggaacggtgaacatgaagaagaccgtcaccaagcaagttttcttaggaagcccatggtatggtccagaccgagtcaagtactagggcccattctctggcaagcccccatcctacctaaccggtgagttcccatgcaactacagctgggacactgctgatgctgtcgctgacccagaatcctttgtcatgaacacgtgaactcaatgtgatccactcgaggtgggccatgctctgagccttgggctgggtcttcctggagttgcttcctgctacggtgtgaagttcagataatccgtatggatcaaggactagttccatatctatgacgatggtgggctctactac

SEQ ID NO: 2448 - DNA, 383 bp, Glycine max
  Clone ID: PAT_MRT3847_102216C.1
agcgttcgctccaaacatacggatggtttccatgttgctggaagctttggaagactgggatatgcttcattgataccatatgttgagccagttgtgcaagctcaaagtgctgaagtttactgtgactgcttccctgtggaggttgatagtcaagagggagtcgctcatattggcgaattgaaatttggtgtctatgatccactgcctacaaaaactaattgggtggaaactgccaaggaatggcaactggatctaccttgtgacaaaaattctagagaactgactacaacggatgagagattggtaggcacagaacatgagggatgtgatcccttgcttggtggaattaaaaaatatgccagtcccatgatgcccctggatga

SEQ ID NO: 2449 - DNA, 883 bp, Glycine max
  Clone ID: PAT_MRT3847_102217C.1
ccaggttggaaggaagaggaggaaggagagagacaatggctgatctatttgcatggcttatctccttcttcctcctcattgccttacttgtcctcgttatgtaccagctaatgtgcctggcagacctagaatttgattatataaatccttatgactcttcagctcgaataaatatggtggttttgccagaatatattacgcaagctgtcctgtgctgcttctaccttcttaccgggcattggattatggcactcttctgtcttccttatctttctctcaatctccgattgtataggcaaggaaggcatttggttgatgttactgagatattcaacctgctctcttgggaaaagaagcaacggctcgtcaaactcttctatcttgttttcacccttttcctctctgtattttggatgatttacacatcattggattagtaactgcagtgcttgcttgtattatggagtgctgcaaactcccagatgtgtgtggtagggaacagttaattacttgtcatattgctatcctgattaacgtgtactttagggggggggaaattcaagggagagattgtcttttgaaggaagattgaatcagcatccacaggtctcaaaacatgattgaacctgctggaatagagctatgttgggttacgggaatgttgtgtacaagagtgtgctgctggggttagcaatatcattgaacaaatagactgatgcaggcagcatacattttcacttttcatgtatgattgctacaaaccagcaatgtctcaaattgaaatggtacccacactcctggtgaggcaaattggtattgtgtttcaatttgttaactttaatctgtacacagcttacaaatctaaagacattggtttaacatt

SEQ ID NO: 2450 - DNA, 459 bp, Glycine max
  Clone ID: PAT_MRT3847_102218C.1
gcaagaagggtttcctgttgtatagtaactaagtttcttccattaataagagttagagatattcctttttctttcttttagagagtaaggtattcccagagttataagctataagactaatccctcgagaaggtatcggttaagtgaaactcctccccccacatgtattgctcttcacataactagaatcaaacccttctcatatgcttaaagttaattaaactgtataaattataatgggattaagaatccaattaatggtcaaagttttgaatttgattttgccaaaaaaagaaattgaacaaaaattcttgaattgttaacaagcataaaaaatttgcaagtaaagtattgaattagtctaaatcaaatgcaaaagttccacccaaattaagaatattgttaaaaagttttaaaaacatagtttcacataacttttaccaagtgatcttacaaaat

SEQ ID NO: 2451 - DNA, 185 bp, Glycine max
  unsure (1)..(185): unsure at all n locations
  Clone ID: PAT_MRT3847_102219C.1
caaactgggactacgnttacancagcaangatttttcctgncataccagccgcttnccccagggncttncccagattccgaagagctacgancgccannnacatgnttatnccgtcaaagaattatntttttgggnnctcangtggatnnnatnactgcagattttatnnnnagtcagcttttgt

SEQ ID NO: 2452 - DNA, 262 bp, Glycine max
  Clone ID: PAT_MRT3847_10221C.1
gagatcagtcagtgatccccatgtctacgttcaacatatgtgtgcgcagttgtgtctaacctaagtcacatggggagatagtgtggacatgggagatttgtgcccgcagtgttctatctaattcagctatggctgactcggcatagaccatccaactcaagcttggcgaattgtgagatctgcatttcgagcggctctagggtgaagcaagttggcgtccctgcattgcacatgacagcgactattggcctgactgttatgt

SEQ ID NO: 2453 - DNA, 414 bp, Glycine max
  Clone ID: PAT_MRT3847_102220C.1
acggctgcgagaagacgacagaaggggactcaccattctttgtctcactacaacacaggtgtcaatttcaccctcagaaaatgaagaatttcttggtttctttgtactacttgtttcctgcaattattgcaatcattcttgtgctgctcactccaattccaagtgcacagctaacgacaagtgagaacagaatccttctccaagttcagaagcttcttgaataccctcaagctcttcatggatggaccaacttgaccaatttctgctccctcccttcctctccttctctcaatattgtgtgctccaatggccatgtaaccgagttaactgtcgttggaaattcatctgagactctcttagaaagattctccattgagtctttttttactgtcttgacaaagctctcaaatctga

SEQ ID NO: 2454 - DNA, 341 bp, Glycine max
  Clone ID: PAT_MRT3847_102221C.1
taaatttcttactgatgggaagttgtatgagggaaagcatattcctgtatctaacattagtgcagggaaaaatcatgaagataaaattcccctaatggcacaggaggaaattctgactcctagagcaagtgatgtcagaactgcaccggagggtaaaaaaagcatgccttaagctactgcaaagcatgtgggagctatagaaattttcattgacttgtttgcaagtcccgactgcaacatagttggtgcaatgctattggttgatacttatcataccaaatcctgaaaaagcagtcggaggtaatttttgttgcgccatatcagagtgggaaggcccattc

SEQ ID NO: 2455 - DNA, 467 bp, Glycine max
  Clone ID: PAT_MRT3847_102222C.1
aggcaaaattttgaattttgtttttcaaaccggcattatttggttctccaaaagttcttcaagtttaaaaggccttaagggaaaaaatgaactccctttttttgtacaaaaaacctttttttttttgctaaatgaaaaaagatgattcatcttttacctggggtctagacaaaaaaattagtaaaaagggggttcaaactcctccccgacttacttttttacctctctatattttgccttaggggcctgttccccccccgggaaccccccgctgggggaccgggccctagaaccacctgaaatgggctctccaatctgggccccaattttgtttgcggactcaacctttgccttgatttcattaacattttcccctgacattgccggtctaaaaacccaaactgcatccccaatttttttggcccccttacggggaaattctttttttgtttaacctaaactttttt

SEQ ID NO: 2456 - DNA, 616 bp, Glycine max
  Clone ID: PAT_MRT3847_102223C.1
ggctcgagggaggatgggtttagaggagagtttaatgcctttgttgggaacatacctcaccaagtgttgctgctttcgagtctgagggttttgtgggcgccaagggccaaccttggtggacggttgcctagtggctggtcggatttgtgctctctgagggtgctcaatttggcgcagaattatgttgccggtgttgttccagagagtttggggatgtgtaggaatttaagtttcttggacttgagttctaacattttggtggggtatctgccttcattgcagcttcgggttccttgtatgatgtacttcaatatcagcaggaataatatatctggcactcttcaagggtttaggaatgaaagctgtggtgcaagtgcactggatgcttcattcctagagttgaatggttttaatgtctggaggtttcaaaagaatgctctcattggatctggttttgaagagaccaacactgttgttgttagccatgatttcagttggaacagtttcagtggatccttacctttgttttctcttggagataatctgcctggtgcatatcgtaatgtctcctacactctgtctctcaataataacaagttcaatggaactctactga

SEQ ID NO: 2457 - DNA, 471 bp, Glycine max
  Clone ID: PAT_MRT3847_102224C.1
catatgagataacactgagcatcgtctagctatctcgatcgaactgtccaaggtccatgtcacgtgaatgtgggcgcggacgtggcagagggcgtagttggcgagcgaagccgacgttgcgtaagttctaccaaccaccaccaccgagtgggccccaactggcgtacggatcctaggtcacgtatgagaaccacatcagctaaaaggtcactattaggtgctaagtacagggggttagcgtcgtatggttatagtcatctttcaatgtagtgctaatttctacagcgtgcaatgcggaatccacggactacggagagctggcggccagatgaatccacgcgttacgccgggaatgccctgaagagccacaagaggactacaggctaagggagcacacagtcagaccataggttagccacaactctggctacggcccgccagcgtggagcgcaacgcctgctgaggacagcc

SEQ ID NO: 2458 - DNA, 288 bp, Glycine max
  Clone ID: PAT_MRT3847_102225C.1
tttatttttttttttttttttttttttttttttttatttttattttttttttatttgggaaaaaaaaacaccccttccaaaagggacaaaaggggtgggggtatggaaaacaaatttgatttggtgggcaaacaaagcctttaaaagcaaaactttttaaacaccgaccttgagaactgaacccaccttattaaaaggccttggctctgaaacttttacctcgccctttgggaaaaactgaatcccaaatcttattgggagaacattttttaaccccatgacccattg

SEQ ID NO: 2459 - DNA, 370 bp, Glycine max
  Clone ID: PAT_MRT3847_102226C.1
aagctggatattcggctggagggaaaagagttttaaacacgttcgaggaaaaggacaagatggaatccaggtcatctcaagaatctgatagaagttcaggagttgggacatggaaagatgaatgtgaattttttgaattggcgggaatggaagaatcgagaagggtaactcaaccaacaaagcagagtaaggatttggtgcaaggtactgaagcccaaaaacatgaccagatggaaagagaagcatctaatgtgcaagacaagcataaacaagtaaaagcaactgcagaaaattatcgggggaggagtacgagaaaaatataagcagcaaaggaggctggacatatgaaacatataaattgaagcattat

SEQ ID NO: 2460 - DNA, 249 bp, Glycine max
  Clone ID: PAT_MRT3847_102227C.1
atcttttatgcctactctatatgggagagagctctctcgtctgcggcgcccggttcattcttggtggggcacagcccgcgtcccttctgatgtgagaagatgatagatggttggtgatcatcgctggatgctatagataccagagtccactggggccttccaggaagttctcctgaacgaggtgccttatgctggaatcaatatttctctcctggacgagctaggtgggtagctcttcttcattttcct

SEQ ID NO: 2461 - DNA, 254 bp, Glycine max
  Clone ID: PAT_MRT3847_102228C.1
aatgcctactttctatagggggcaggagcctggagccaagaatgctattctcatgaatgtgccaggtgctgttctctcaatgaggagatgttgtgttggagatctcgtctctgaagcctctaacctgacttctccctacataaaatgtccagcctctttctctcattgtgtcagcaaatcgggcagaggccaccgtcaatgtagaggcctttatccacaagccggcccacttcgcatagattcaggaaaaagta

SEQ ID NO: 2462 - DNA, 412 bp, Glycine max
  Clone ID: PAT_MRT3847_102229C.1
atcagcgtgacgaccttgttgtcgtcctttttttttttgtgctatgtaagcacttctcatgtagatgtgcagggggatacacaggattattcaccttatcatgagtactttaccaaacactaatctattaactttcaaaagggattgtgtacgatgacgcttactgttcggggaccaatttgatggctttggaccacagcgctgttgttggctgggtcagcttagatgctcggctatgtttttcaatggaccctgtgccctgaaaaaggtctgagctgagagcgccacatgttggaacatggaccctcgtccggccatgagatcctgcaccttaagctgagcaagagcctctgggtcatcagtagggcccattgggtctaaactgccacctgggaaaatcgggtcaatgacc

SEQ ID NO: 2463 - DNA, 2266 bp, Glycine max
  Clone ID: PAT_MRT3847_10222C.1
ctcgagccgtgcaaatcaaacttacagagtcagctttgactgataacagacacaatttgggctaagtagattttccaagcaaaatgaagcaacttgcttatattatgtaacttaccttatttgtgctttgcagtggtgttgatgtatatactggttttggtggggcctgtggagctttatatgcccctccgcaaattcatttgcatatacaatcggttggatcattccactttctttcaatcattccaattccacaaccaacgaaaaatcattatcaacacaacaaaacaatgtcaaaaacaacaacttcttcttccgaacaaactgcacgcaaccgtttggccaccctccaaatcctcctttttgtctctctgaattccaatagttgttgtgttctgaagagagaacatgtcaagcaattcagatggcagcattagcgacggtgcatgctccatggccgtttggccatgctagctgcgccgctcacctcctcccctctcaactcactcatcacggcgccctccaccctcttctcctcccagttgccgccgacgaaccgcccaaggaagtttgaccgtcgtcgacgaaagaaccggcaagaagtaccagcttcaggtctccaaaaggcacaccgccaaccggcgactgtcaaagcttctgaattcaagaagatattgacagggaagaatgacaagggactcaagctttatgatcctggctatttgaacacggctcctgttcgatcaacaattagttatattgatggagatgaggggattcttagatatagaggttaccctattgaggagttggcagagaaaagcactttcacggaagtgtcctatctcataatgtatggaagtttgccttctgaaagtcagttagcagaatgggagtttgctatatctcagcattcggctgttccacaaggagttttggatatgatacaatctatgccccatgatgcacatcccatgggtgtgcttgttaatgccatgagtgctctttctgtttttcatcctgatgcaaatcccgctctcagaggtcttgatatttatgactcaaagcaaataagagacaaacagataacacgggttattggaaagataacaacaattgctgctgcagtttatcttagaatggcaggaaggccacctgtgcttccatccaaccaactttcttacacagagaacttcctatacatgctagattcttttggcaatcggtcatataaacccaatcctcggctaactcgtgcgctggacattatcttcatcctgcatgcagaacatgaaatgaattgctctacatctgctgtacgacacctttcatcaagtggcgttgatgtatacactgctattgccggggctgttggagctctatatggacctcttcatggtggagccaatgaggctgtcctcaaaatgttgagtgaaattggaactgttgagaacattccagcgttcattgagggtgttaaagccaggaaacggaagctcagtggttttggacatcgtgtgtacaaaaattatgatccaagagcaaaggtcttgaggaaactgacagaggaagtgttttccattgttggccggtatcctctgatagagattgttgttgccttgaagaagctttgcactgtgttgatgagtatttcatcaagaggaagctatatccaaatgttgacttctactctggactgatttatagggccatggggtttcaacctgagtttttcactgttttatttgccatccctcgaatggccgggtacttggcacattggcgagagtccttggatgatcctgatacaaagattatgagacctcaacaggtttatgttggggagtggttgaggcattatgcaccaattaatcaaaggactgcatcaagtaacactgacaaacttggtcaattggctgtatcaaacgcctcaaagaggcgtcttgctggatctggggcttaactagtgaaactgccaagtgctcaataaggtccagactccagagaaaaaattaattttttttctggtacataaaataagtttgtttgtttatgtataaaattatgatatcaaatagataaataaaatcatgaaatcaataagaccatggtttcagtattttttttttgctagaaaaaaaaagaaagactccttgtatttgcaatgtcataacataaattgtataattctgaaatctctatctcaatatggaatgtggatcagatgacagatggagggtagtacatttgttagaggttgggagag

SEQ ID NO: 2464 - DNA, 485 bp, Glycine max
  Clone ID: PAT_MRT3847_102230C.1
acctgcgagaagacgacagaagggccttcaatccgtgccatccattctttcatgattcaatcttgatcgttgatctccataaaaaaaaaaggtttacaactttaaagtaataaaccataaaaaaaggttttacgaccttaaaatcgtaaaaccaaaaaaaaaaaattacgactttaaagtcaattttttttaactaattaattttatgatttcagttttttttttaaaaaaataaggagtgataacaaatgttacgacttctaactcacctgttatgacttatccactcttaggtaattttttaaaacatacatccgataaaaaaaatgtaaaattttgtcccttttttgtaaaaaagccgtcaacatcgaaactttttttttggcttactcagccggcaaattttggaccatatgttgaaacatttttgtgtacttgatgttaacaattacatgtttattcctgttcatggtttatatgattaa

SEQ ID NO: 2465 - DNA, 995 bp, Glycine max
  unsure (1)..(995): unsure at all n locations
  Clone ID: PAT_MRT3847_102231C.1
accgagtgcacaaaggcattctgagggaggatcataagtcagataggcactctcgcagcggatctcagctccaacgaaacgaaaccttggtggttggtccacctgagtgtgtcctcactcgtgtgcgcgtctatcccaaagagagtgagcgagtcagtactgagtagggtttcaaatttccaatcggaatcggaaaaaatgggcggcggcggcggcgatcacggccatggacacggacacggcgatttcaggaacaaggtctggagtatgagcggtggcccttactgccgtcccaagcactggaagcgcaacaccgccattgccatggtcggcgtcgttctcatctgcatccccatcgctatgaaatccgctgaactcgagcaacggccacatcaccctgttcgccccatcccttctcaactctggtgcaagaactttggaactaaagactataatgatccatgattcatcaattgcataacttgagtggatgttcacatcatgtgaagcaaactttatttgttaaatgctaagaatatgaacagctttaaagattgctgttgttgatgttatgcaagacttggatctaggatcatcatgtagtgacatacttttgttttttgggcaatggacatccatttaaaaatgtgaaattaaataagtgcttatttctgattttttattttatttgagagcttgttgaaaccgatgttttactataataatggtaattgtgcttttatcagtttatctaaaaaaaaaaaaaaaaaaaaaaaaacataggggggggcccggaccccaattccccttaataggggttttattaccccccctcataggccgggtttttaaaacggnggaaggggaaaaacccgggggttccccaatttaatccctttggagaaaatcccctttttccccggtggggtaaatagaaaaaggcccccaccgatcccccttcccaaaagttggccaacctaaatggaaaatggaaa

SEQ ID NO: 2466 - DNA, 727 bp, Glycine max
  unsure (1)..(727): unsure at all n locations
  Clone ID: PAT_MRT3847_102232C.1
gcataaggcagttaggcactcttgcagcggatctcagctcgaacgaaacgaaaccttggttcctttctctctgtcctcactcgagtgcgcgtctatgccaaagagagtgagtgagtagggtttcaaattccaatcggaagaaatcggaatcggaaaaaatgggaggtggcggcggcgatcacggccatggacacggacacggtgatttcaggaacaaggtctggagtatgagcggtggcccttactgtcgcccaaagcactggaagcgcaacaccgccattgccatgttcggcgttgtcctcatctgcatccccatcgctatgaaatccgctgaactcgagcaacgaccacatcaccctgttcgccccatcccttctcaactctggtgcaagaactttggaactaaagactataatgataatgatccatgattcatcaattgcatcactggtgttcacatcatgtcaagcaacatttatttgttaaatgctgagaatatgaacagctttaaagagttgctgttgttgatgttatgcaagacttggatctaggatcatcatgtagtgacatacttttgttttcttgcctttntggcaatggacatccattttagaaacgatgaaattaaataagtgcttatttctgattntttttttttttatttgcgagcttgttgaaaccgaaattactggttactataataatggtaattgtgctttttatcagt

SEQ ID NO: 2467 - DNA, 198 bp, Glycine max
  unsure (1)..(198): unsure at all n locations
  Clone ID: PAT_MRT3847_102233C.1
gtccgaataattcccgtcgcagctactagcgcggcgccttttttttttttttnttttttgacccaagacaaaatcgatgactggagcatgttttaatgtttcatatcaggacacaactcatggcaagaattcattgttttgtaccctgcttacaaacaattgaacggtcccgattgccaaaggcctctttgccctttc

SEQ ID NO: 2468 - DNA, 238 bp, Glycine max
  unsure (1)..(238): unsure at all n locations
  Clone ID: PAT_MRT3847_102234C.1
cggaccggaaaacccgggacgacccacgcgacngccggagcccaggaaccagagccaacaaaaggggaggttggtggaaacncccacggaatggcaaccggagcgaccaagagaaaaaacccccagcgcccagaccacaacngangagagaccggcaggcacagaacacgaggggcacgagcccccccacggcggaaaacaaaaaaangccacccccaagacgcccccagaagaagaa

SEQ ID NO: 2469 - DNA, 298 bp, Glycine max
  Clone ID: PAT_MRT3847_102235C.1
gaaccatctcccacacaatgctcactccacaatgaacattccctccaacacactctattacctctaattggcctatgacgctctccacgaacctgtctttgcggttctcaaaacttcaaatcctgaacgaccattctacgattttgcagcatgctgcattccacatcttgccattaccctcaaaattcacagtgcctatttcagaccctgccctgcatggaccatatgcttccttgacacaccaaaacaacaacttggtgatgctgctgctgccaatagatcaaaccctgaagactac

SEQ ID NO: 2470 - DNA, 235 bp, Glycine max
  Clone ID: PAT_MRT3847_102236C.1
ggttcagatcgcaagaaatattcaactgctttggacctccctgtaccaaactaaagcatatagcgaacaatgaccttccaaccttcttcactatctctacactgctcttttctcaaccagcaccataattactctgactctaaccatagaaatcccgttcgaatatttgatgctaatacacctaacactttgttattaatacatgcgcaatccaattcctctaattaatcaccac

SEQ ID NO: 2471 - DNA, 906 bp, Glycine max
  Clone ID: PAT_MRT3847_102237C.1
gcacagctatagtcacagttacttccaacacacatggcctccattcccctcctctcaccacccaccaccgccacaaactccgccgtcagccacctaccctcctccatcacctccacctccagctccttcaaaccccacgccctccaccgccgccgcctcacgcggctacacgtgtcctctcccacctcctccaccccttcccccaccaccacgaccacctccggcgagaccatattcttcgacggcggggcccactacggcgacctcgcggcgaacctcctcctaggtttcaccctcttctggctccccctgacccttgcggcggtatcacgcgccatgtacctgcgctacaggttcaccaacctccgcgtgagcgtgatctcgggcctgacggggcaggaccgcagcgacttcggctacaacgtgatcaaggacgtgcaggtcgtgccgcgcttcatcggagagtggggcgacgtggtcataacgctcaaggacggcaccaaggtcgatcttaggagtgtccccaagttcagagagatcgccaagtactgtctcctcatggctcaaaaacccctcgtcttgaaccaaactggacccaaagccttctagggaaagagattcgaatgaatacaataattagatttgatgagaattttctttcttggggggtgagaaaaattatgcaaatatatgctactgcttgaaatgaagttacctactaattgttacagcacaatatttcttattcaattgttctgaattttactatgtgtgccaattctacttctttacataggattaaaagaatccaacatgaacgtgaaatgagcaaattatagaagtgtacttgaaactacatgaaacaccaaaacctttatctttaataatatgaatcattccaacaaa

SEQ ID NO: 2472 - DNA, 599 bp, Glycine max
  unsure (1)..(599): unsure at all n locations
  Clone ID: PAT_MRT3847_102238C.1
cacgcgtccgcctgaccagtgcatatgaaaaaactatattgtgagatatcaatctcttaaatggatctcagtatttcggaggattagtttttggctttcgacagagggatacctatttcaccaaaaaaaaaagtgtgtctgtgataatgccaaatgagcagctgttgttatgctccaacaaaaagtgagcgcttcagcaactgttcgatcaaaacagggccatggaagctacctatcatagggaacatactcaacattgttggctcccttccccattgtcggctaagagatttatcagcaaaatatggacccttgatgcatctgaagcttggagaggtttctaccattgtggtttcatcccctgagtatgctaaagaggtgttaaacacccatgatctcatcttttcatcaaggcctccaatactagcttcaaagataatgtcttatgattctaagggtatgtcttttgcaccttatggtgattattggagatggctaaggaagatttgtacatcggagctattaagctcanaatgcgtncaatctttccaaccaatccgagggggagagctcactantttcatcanaaggattgcatc

SEQ ID NO: 2473 - DNA, 456 bp, Glycine max
  Clone ID: PAT_MRT3847_102239C.1
aagcccaaaaaagccctaggtaattttattaatacattacatacatttttcggccctgagagtctattcattgcatagattccatgtcctcatcacttgaatgctagctagggtgatgagagaattaaacaccactcagaaactactaaaacttgacgcaatgcaaatgtaattttcctaaactagagcacatgatcacatatatatgaatatatattgggtaactagctgctaaatggtgggtttattttttatggtctcaactcaaacagtggcaagagatgaagatgattagagagatacaatagtggaattgatgaagaaagggaacaaacacttgcggctaggctaataattaaagatacctacgtgcgtaaagggggggccgggatggagtttataaagctgaaattaaattaaagggataattaattaaagaggtggtggtggtggtgg

SEQ ID NO: 2474 - DNA, 690 bp, Glycine max
  unsure (1)..(690): unsure at all n locations
  Clone ID: PAT_MRT3847_10223C.1
gtttgctatatctcagcattcggctgttcacaaggaattttggatatcatacagtctatgccccatgatgcacatcccatgggtgtgcttgttaatgccatgagtgctctttctgtttttcaccctgatgcaaatcctgctctcagaggtcttgatatttatgactcaaagcaaataagagacaaacagataacacgggttattggaaagataacaacaattgctgctgcagtttatcttagaatggcaggaaggccacctgtgcttccatccaaccacctttcttacacagagaacttcctatatatgctagattcttttggtaatcggtcatataaacccaatcctcggctaactcgtgtgctagacattatcttcatcctgcatgcagaacatgaaatgaattgttctacatctgctgtccgacaccttgcatcaaggtagacatcttacctcaatactacttaagcaatataaagcaaatataaaacagtcatattgctaagctatatatcttattcttatttcagtggcgttgatgtatacactgctattgccgggngctgttggagctctatatggaccacttcatggtggagctaatgaggctgtcctcanaagctgagtgaaattggaactgttcagacatcccnagantcattgaaagtgtcaaagccaggaaacgcaagc

SEQ ID NO: 2475 - DNA, 225 bp, Glycine max
  unsure (1)..(225): unsure at all n locations
  Clone ID: PAT_MRT3847_102240C.1
ttagggtagggcaaaatacaacagaaaaaagagtattgataggtttgcatnnngtatattcgttaatttatatactaatcttgagctgctatttgattggctgagccggcatgtgataggcaagcatgtcttgccgataaaacaagataatatattttgaaagagatgccacgagttggaagccagattttgcagtagtaaacggtgcaactatggagggtttgt

SEQ ID NO: 2476 - DNA, 473 bp, Glycine max
  unsure (1)..(473): unsure at all n locations
  Clone ID: PAT_MRT3847_102241C.1
aagtgaatgctaagggtaaacccgaatatgttctaaagcgagctgaagatctcgcagctgccggccaaaaggcagaagcagtcgatttcctctatgaacaggttacgtcaaagagaaatcgtacttggagcaagatgagcgagaagattatggtcaagttcatcgagctttgcgttgctctccaacgcggcaagcaagccaaggacggcttgcaccaatacagaatcatcacacaacagattccctcgtcgttggaagttgtgttgaagacctttttggaaagcgccaccgctgccgcatgagaggcacaaacaaaagccgaaggtatcttacttgaggttgaagatcttgaagaagacttctcggctgaacagctgttacgagctgtttctggtgaagacaccaaggatcgtacagacagaaagatcgttactncctggctgaaatttttatgggaaacatacagaaccatc

SEQ ID NO: 2477 - DNA, 579 bp, Glycine max
  Clone ID: PAT_MRT3847_102242C.1
gacgatttaaagcctttgcatccttttttccactaaatgcccacattctccatctccctcagaaaaattccttacacaactatatccattttcaggcagtgtaacttggattttctattttcttcaccatcagaatggcatcatacaatgctcatctaaaactcatgatcatcatcatggctttcatgccctcacctcttctttcatcatattcacaagaacctattcccaaagttcccacactctcatcttcaccagcaacattaacggatcctcctccatctccctcttcactatctcctttccaagagctgtccccagacattgctccactgctgccttctcctggtggtgtgttgccaactcctgctgctggctctgacattcccaccattccttccaatccaagccctccaaacccagatgacattattgctccagggcctctttctgctttctcaccatttggatcgccactttcttccaatgcccctacaacaagtctagttgctagcatagccactgctttttttgctggtttagcagtatgctggtgtttgcactgtatgagactatgag

SEQ ID NO: 2478 - DNA, 181 bp, Glycine max
  Clone ID: PAT_MRT3847_102243C.1
agatctattcgcatgtacacaagttaacaatacgccccaaacgagagatagccaacattttagcagcccaggggccagttcacaaaacagttgacaaaatactaagcatgggacaagaggcatgggaaaactccctccctgacggggttgcccaggccataaacaacaatcaaacatgctc

SEQ ID NO: 2479 - DNA, 250 bp, Glycine max
  Clone ID: PAT_MRT3847_102244C.1
agcatctctgctcaagtcttcacttgttcttgacaagtctgagagtacgaaaggacaaacccttcgccaaccttctgcatcaggtgtgacatgcaaccccaccaccccatcaggcctcaccatcaaagctggatcctatgctgatgatctctgtaaaaccccgaaaacatcggcttcaccagggaggggtattttggtcatggatgagaccaatgctacctgtgcgaaacggatggcttcaattgggcta

SEQ ID NO: 2480 - DNA, 144 bp, Glycine max
  Clone ID: PAT_MRT3847_102245C.1
gaaatgcagacggtgctctcactccgagattatcaatctccgcacttgcacacacacatctgtagttcaagtgccagccctcattgcgttagaagagtgcgcccgctggcacctttgcatgggatttctatatcagcaggagag

SEQ ID NO: 2481 - DNA, 822 bp, Glycine max
  Clone ID: PAT_MRT3847_102246C.1
gattgtatttttaattagaaaaggcgcagaaacagaaacagaaagaatggctggtcccggcaaatgcttcctcgtgacgggtcctccgggtgtgggaaaaaccactcttattatgaaagtattcgagtccctcaaagtcaatccatccctcaagcttcagggcttctacactcgggaaattaggcgcgccggccagagggttggttttgaagtggtcacactcgacggtcgcactgccccacttgcttccatcgacatttcaacccccgagtctctcagatggcctaatgttggcaagtataaagttgatgttgcttccttcgagtcactagcacttcccgagttacaggttagagaagacactgatctcttcatcattgacgaagttggtaagatggagttattcagttcctcattcttccctgcagttctaagagttttggagtcaaatatcccagttttggcttccattccagttccaaaattcggcagagacatacctgaagttgcaaggttgcggaatcatgcaggggcaacttgttttacattgagcgttagtaacagagatgctgttagagaacagatacgctcacaattggaagatatgctgacaaaacactagtcattgcaagtttgtggtctgaattcataccgtgtaatgtagaataaattatgaatttatgatgggctaatactatttagtgagagaaaaaaaagtgcaaatcttaatcgagccttaaataagttgataagctagttgagctttgaataccattagtaatatacatgactttaccgcatgatagtccttttgtaatgact

SEQ ID NO: 2482 - DNA, 397 bp, Glycine max
  Clone ID: PAT_MRT3847_102247C.1
ggctgatttatgtgcttgtttgtatatgagattatgtgcgatattaactacgtcgatggtccacataggtatgatcgagggggttcccttacgtcacctctgcgcctgataacgcgcgcggaacacacatcgcggacgataaagatggcccacttgagtactagtagacgctcatttaaccttgagcgaccaatttcccaacgaaagctttcgtcgcaggagatggaaggattaattcacgtgagagatacagaagtcgcgtcacggtcgaatagagataagctactcgtctgtatatcggtgatgtgcggatcggtaatctctgaatgtaatagatcctaactaatcggatcgatacatgaacgatcttagacacgagaaatgacagagagagaat

SEQ ID NO: 2483 - DNA, 277 bp, Glycine max
  Clone ID: PAT_MRT3847_102248C.1
ttatttagtgttttagatttgtagttgcatgagctcaatgctaggtttgatgaagataatactaaacttttacaatgtgtttcatgtttgagtccctcatcatcatttgaagcttttgatgaagataatactaaacttttacaatgtgtttcatgtttgagtccctcatcatcatttgaagcttttgatgtgaaaaaattgttgaggatggttgaactttatccaaatctcttgttgagtatgctctgcctatttgaaaatttccacacctctttta

SEQ ID NO: 2484 - DNA, 375 bp, Glycine max
  Clone ID: PAT_MRT3847_102249C.1
acgacaaacagatttgagaaggaaaaaaaggaaaacagctttaaagtttgcaataacacagcatatggataattttctgccttatccacaaattttatttatttgcaaaggggaagggaaggataaaattgggtgcaaactttagtagaccataatttcaaaaataaaaagaagccgcataaaacaaggaaaaaaaattactatctaactgctcaaacaaaatgaagttttcaaacttttaaaataactattaaaaatcaaaacccgtgggaaacaaaatttgacattcatcaacatggcatcatcaagggatcctgcatatttatctggccaaattatgtgatctaagatgaagatattaatgattgtaatggt

SEQ ID NO: 2485 - DNA, 942 bp, Glycine max
  Clone ID: PAT_MRT3847_10224C.1
ccacgcgtccgtctcactctccgtccgctgagttcagaaaatgccggtgaaggaagcgttcacgttgacgtgttgttaagttgagttagttttggtttaggatttggttgggtgaagtgacgtgtgcacttgaactgttcttctgtttgttatgtatggctttgaaagctaggcagcaacacgcatttcgatgacggtggtcggactcttcctcaccgacacgaagctcgccggagctcttttcactctcaccgtcgccgccaacgccttctcctactcccgctttcgcaagaagaaccttcgccgtttccgctcccccatcgacgaatcccaagacactctcgcacactttaacatcgccgaaggggaagatgagtttttctttggtttggcgacagcgccagcacatgttgaggacaggcttgatgatgcttggatccagtttgctgagaaaaagagtggtgaaggtggtggtgactctgaggggaagcagagagtggatgctgtgattggttctgcttctggcgatggtggttcccagccggccataacatctccgaggagcaggaagcctctcaaggtggcgatggaggccatgatcaggggaattgagaagtatatggaagtggaagggaaagaaagagaagaagaagcccgtcctaatgtaactgcttggcataatgttccatgcccggaggagaggttaaggttttggtctgatcctgaaacagaaataaagttggccaaggatacctggtgttaccagtttttcgcatgggaatagattggacaagaatcatgccagtggagccagtaagcagccttaatcaatctgttaactatgctgcattggaacggtataagcggactataaataggggtccgttctaatggaatggaaagtgatgctcactctttttcatcactcgctttcccctggct

SEQ ID NO: 2486 - DNA, 204 bp, Glycine max
  Clone ID: PAT_MRT3847_102250C.1
tacggctgcgagaagacgacagaaggggaggaaatggatattcatcacctgtgtttaatgtcatcagtgatgcaactgaggcttctgagtcaccacttagaaagcagttattgtcacctttgaatgggatgctgcttgcagatcattttaaaggtgatccactagacataggtgctggtatttatcaaagtcgttcaaaggctg

SEQ ID NO: 2487 - DNA, 281 bp, Glycine max
  Clone ID: PAT_MRT3847_102251C.1
cacgagagatggtacgttacaaaaacattcttatggtactttttcgtcaaaaattactaagtgcatagttatttatataagttgttcatcataatttttgtggatcatacaattgcatatagatttaagtattttaaataaaaatgcactttaatgttaagattgctaaagtgaatgcttaaattaattgtatgaattctatgatgcttaaaaatattatttatggtataatattgttaagtagcaattgctttataagaagccgtgtgtaaagttaaaca

SEQ ID NO: 2488 - DNA, 585 bp, Glycine max
  unsure (1)..(585): unsure at all n locations
  Clone ID: PAT_MRT3847_102252C.1
tttgatgaggatgaattggaagtagcacttgaagagttggagggtgctgaattggaagaatagtttctttagcgtgtaactacagctttaggtgcttcagtgcatgttcctgctgggtggcaacccactcaccttgtgttcggcacgaggcttgtcagggaaggtgtgtcgatcgctttgcaggctgtgttggctctttgtgcagctggctttggttaggccagaattttgcaggcattgatgtgcattataagtggcctcttttaaaatcaagagtgacacggagaattctgccccctctcatgcttgcttacctatgaaattattaaacagaccagaggatgtatataaatgttataaaaattcaatagcccttcaaaatttatactttctcctggaatgtttgttagtttaaatgttattcagactgatcagcggagaatctcgtgcgaaaaagattgatcgagaggcaatgcttgagtaatagatgattttagtttattggaatatcacaagcgcccttgaagcagggaaaaaaaaaaaaattaacgcaaagagagntaccattatgcccaaggacattca

SEQ ID NO: 2489 - DNA, 447 bp, Glycine max
  Clone ID: PAT_MRT3847_102253C.1
taggctgcgagaagacgacagaagggtacggctgcgagaagacgacagaagggtacggctgcgagaagacgacagaagggtacggctgcgagaagacgacagaagggtacggcttgcgagaagacgacagaagggtacggctgcgagaagacgacagaagggatatacctcaggtatttaagaagtcaaagatagtggaatacagtatcaaagaaaatatggtttcaccaggaaaaggagaggttagtaaatctggtatcacttaatgtagtatgtagcacttcagttttttgttctgctaaaaagttcaagtgcttgcttgcttgatctcttactggaaggtccaaattgacgaatgttgcatacagatattaattgacaataagcaatactaccaattcttgggggaaggatataaatatggtatcactaatcaaggtgtatatt

SEQ ID NO: 2490 - DNA, 337 bp, Glycine max
  Clone ID: PAT_MRT3847_102254C.1
tgtaattggacactttaattatatgggaaacaaaggcacatttgtaacaaggggaatgtcatagataaaagaaattaaccctccggtatagggaaataagagcactacctaaaaattgacgtattggtaaaacctaatgaccattaagactgaatatgctaaacttttaaccacatttaaacagctaaaccccgggctgattgtttgaaaggccacctccggacaagttgccagaaaaaactgccacaagttaggtggtctaccaagggaccttaccctacttggtgggcctcttaaaaaggcactttcaaaggttcacagttttctgccccagcac

SEQ ID NO: 2491 - DNA, 379 bp, Glycine max
  unsure (1)..(379): unsure at all n locations
  Clone ID: PAT_MRT3847_102255C.1
cccgggtcgacccacgcgtccgtacggctgcgagagacgacagaagggtcaggggctaaaaacaaaacctagaaagcttagggactaaaaagatagtaaaccctgaaaatttaaaagaaaaaggagcatggttccatagaatgacggaaattccgaactttataaccactatttggatatttcttcttgtgagatactacctccaatcctttttataagaaacaagtgatagtgtaaaatacactatcacttgttagtgacttcattccttgaatcagaatggatacaaagcaggtttaaactagagagaaatatttacgtcaatcagaatccaaaaaaaaaaaaaaaaaaaaaaaaaaaaaagcggccgtntagagga

SEQ ID NO: 2492 - DNA, 684 bp, Glycine max
  Clone ID: PAT_MRT3847_102256C.1
ctcgagccgaatcggctatagaaatatagcaatatccattgacaaaatcacaaatcacaaacataatgtgtagatcaattcatgcacccctcttgcttgttcttatgtgtttgatgaatggatcgaattttgcatatgatccttttgaatcttcccttagttttgaacctgaaccacatgtagacatcaacgtactctttgtttccttttacaatggtatggcccctaacaatccaaatgtgaacttgttctacaataaccaaaaagatggggtttatttgtcaccaggaaaaggtttctctaaattggacaatcttaacgggcgtaaatctgtagtaatgtattggaatggaaattgtgcttctttctttgcatatgatcccagcgcagaaggaaaccatcaaaagatctattggttaattaaagaagatggcatttatcatagttgggataacagctcttggcagaaaaggaaaagttggacattcaatcgttgttgaaacctctacttctcaagtaaaataatattttctatttctgtattgtcaataaatggtagttatttccggctagctttcttattgatcgggtgtaaaagttcaatatatgaatgatcattatattaaataaaacttttgttagagcatagacttgctagaaaaacaaaatattaagggttgccca

SEQ ID NO: 2493 - DNA, 319 bp, Glycine max
  unsure (1)..(319): unsure at all n locations
  Clone ID: PAT_MRT3847_102257C.1
attnangcacgcgtacgtaagctcncgaattcgnccacnagcnanncntncanacnnnaaggaagatnnntaaccnaccaaccgtnacccanccannantgtngngcantnnccaatnncgacnccngannaaataccactactaatnntnnacgnanatttaccaancctnngagnnnattgacaannncnnntattganangtttnagaaggaagntgntgaggacgnnaagnngtatnnaaagnctgacctggatgtggncaactnanggatganngnnaaattgggancancantnttattgntttgtgganttt

SEQ ID NO: 2494 - DNA, 323 bp, Glycine max
  unsure (1)..(323): unsure at all n locations
  Clone ID: PAT_MRT3847_102258C.1
ggtttattcttttttttttttttttttttttttttaaaataaagtgcagctgggatatagatagtatgcatataacagaaccagttgcatataacttgcatgaaacaagaagctagaagaagagtgaaaaagagagagagaaaatgaaaagcattggagcatgcatgattaaagtttttttttttttaccaaagggggaaaccccaanaacggccccaaagaggggggcgagaacaaccccaccagcaaagaggcggaggagaaaggncnnnagggaaggggagaacncananccagcagcaggagccaccnccggaaccacc

SEQ ID NO: 2495 - DNA, 706 bp, Glycine max
  unsure (1)..(706): unsure at all n locations
  Clone ID: PAT_MRT3847_102259C.1
attcccgggttcgcacccaccccgtccgtactacggctgcgagaagacgacagaagggctaataccttccccatgtgtaaacaactcccgaacccttattttcaaaatccatagacccctttttggtttttctaatgttttcctcaaataaacgttggtggcgactcccgcgcatcttcttcatgagaagatgcactttcctattttgccttgccctcctatcgaagggtaggttgcgacacacacaaaatgcaacaacttctctgttggagtctttgtgagctgagcccaaattaaggctcatcggtaacatgcaaaatgtctcccttattgtgtgcattttaagtttggcggtgtgcaatttttcttaattctatatttttgtagtactcttattgaaaatttgattataaattctaatactagacaaaatagtcttggtcaagaaaatagaaagctgaaagaaagggacaaaagggtcattttatggatttttctagaccccaactcgccccggctaacatctggctttcctgagccaccaaaagccttcaggcctaagcaactagctcgcctaggtgagctaggtccttcagccttaagaacccagcttgctaangcgagctgccattgcccaaaattgctttttctataaatagccatacggggagaagggtttttagggggttcatcaagttttgggaca

SEQ ID NO: 2496 - DNA, 214 bp, Glycine max
  Clone ID: PAT_MRT3847_10225C.1
agaaaaccaaaaaataatgtcaatggaaatgatggcaacggaacgtgtttgttatgttcactgcaacttctgcaacaccattctagcggttagtgttccattacagcagtttggctaacattagtgaccggtaaaattggaccatggtcccatttggtaataagttaccatggaaccttaatttaaaccttttccccttaagaaccttaaaaac

SEQ ID NO: 2497 - DNA, 965 bp, Glycine max
  Clone ID: PAT_MRT3847_102260C.1
tgggtccaacagcaaactaattttaaaaaaaagtaagcaaggtcaagcaattgcccaaatacaaaacaaagcttaattacaaaaatacacataaatggcttaatctaatatttggctcgaactagcggttagcgctccacatggtcatgtatatcatacaggttactgaaatgaatgaccgattttaattggaaaacagtaaaacctgcacgtaagttttgtcatacataaatatgaattggagaaacattacattttctatgtaattgggcagcgtagagtctagcattcaacaagcagtagctatttccagtgaacaaaaaaaggaacctaaatgttagcaattacagctgtagcattccaaaactgattttaactggcagccaacaagaaaaactgctgcacaatgatctttgctgttgtggcgtcatgcatcctactgcagattaaaaagctgagcaggccaactgcgtttgtgactgtcaggaccaacaccagcagcttctaaggatatatcaatgctgcgatgctcagtagaacggacaatgctgacacgtaaatcaatcttcacagcaggatacacctcagtgccaattgcttctggtttacccctgttttcttttccaaatcccatcgcaataggttcttgaaaggttaagattgtttgtgaccaatgtgttcttggcatgtaaggggatgtggataacacggctggtgtttctcggcagaatctgcttgaaaatccagtatcaaaccataggacaacaccataacaccagcagcatgttccagaagtacttggtttcaattccaaagtagcagttgcagtgaaatccacttcattaggcttcatggttgccaagtcaaaggactgaagaatagcagaacaggtaactaaatcttgagagtccacacatcaactataggaattcgggcagcatctatgacaagctcattcccaatgc

SEQ ID NO: 2498 - DNA, 802 bp, Glycine max
  Clone ID: PAT_MRT3847_102261C.1
cccacgcgtccgaatgaaaattggaagagggtgatgaggatttatttgacatggtgggttttgtggcattagccggtccgtgagtgagttggttgaatggcgagtagccggagaagaacgtttggcaacatgaggtcattcgtaagcaattcgatgggaggtctcaggggcggaagcaaccttgcttcttgggtcgtcgccggaaccctagcctacttcctctggatcaaaccctcccaagacttcaagcgtcaacaacaggagaaggccactcttgccgccgctgagtctgattcttatcgtaaacccattcccgaccctcaggttacgggtttgatatatggaaacaagaacaaggacaaagcaaccaaaccagaggattgattgattagcattcatgtgagtttgttgccttacttctactcagtcctacacaaatacaccatcccaagagttaatgaagatagatagatcatagatgtgagtgtgtttatgatgttcttggcacttggcaggattcaaatggatgtaattaacaatacggcatatctcgtgttttcatgcgcgctcagtttcatctttactaaatattactactgtttattgtattcacgtttatgtgtttatacagtaaattaggttgtctgttttacataacactataacagcagtgctcttcctgtcatatttgttttttttttctttttgtttcgagaatcagcatctgcaagactgtaataatccatccttccggagacaagaggcatgttattataatgaataagtccttctgccattactc

SEQ ID NO: 2499 - DNA, 1748 bp, Glycine max
  Clone ID: PAT_MRT3847_102262C.1
ctcgagccgattcggctcgaaatagattagaccataaatttgtgtggagcggactcacctagttgtggagagaacattaggcagtccaaggtgtcactcggagaaatctgtaatctgagagtgacttggttggggttataaaatagaatggcgagtagctggagaagaaacgtttggcaacatgaggtccttcgtaagcaattcgatgggtggtctcaggggcggaagcaaccttgcttcttgggtcgtcgccggaaccctagcttacttcctctggatcaaaccctcccaagacctcaagcgtgaacagcaggagaaggccgctcttgccgccgccgagtctgatccttatcgttacgttgagactcgtaaacccattcccgatcctcagttacgggtttgatatatgggaacaagaacaaggacaaaccaaccaaaccagagaattgattcattcattagcattcatggttcaaaatggagattattaataatacttcatatctctcagtttcatgcaaactcttatttccgtagatagctaacgcgtccgtgtgagtgtgtttgtgggcatgacttccggttgattcattgctacatttatgatgttcttggcagggttcaaaatggagataattaataataaggcatatctcgtgttttcatgcacgctcttattcatctttgctaatatattactactgtttattgtattcacgtttatgtgtttatactgtaaattaggttgtctgttttacatagcagcactgctcttccggtcatatttgttattatttttatttattttagttttgagtaagactgtaataatccatccttccgaagacagggggcaagttattgtaatgaataagttcttctgccattattcatgaagcaatgttaaagtttggtacatgcttactgtttccatatgagttgtgtcagcatttgtagaaattttaaaaagttgcattgcactcattaggctttgaactaagtgtgcttgtgtttgcgtattctttgaaatacacaaaactggcatttgattatagttatacctctggtttgctctctaaattttaggcttgctgcctattaagcatggacaccccttcaaaatggcatgtcggcttagatgctaacagttcttggctttaggacacccctcatttctcacttttttcctagtttgttgactctctaatctctgtttactgtttgtgctctggtgtgcactgggtttgcacttggtactacttccatggctgactgaatatactcagatggtccgtttggaagagaagaaagtgaaagaaaaaaaaaataaaggaaagcaaacacagatcaggatgtcatttcctttatttgatcttatagaaagtgaaagaaaagcaaaaagaatagttgacttcatgagacaaaaattttaacttttcttttcttctattttctcttcaattcaaatttcaattttttccttcctttcttttgtttcatctctaccaaatgttgggtaaatctataagaataagatgtcgagatagatttgatattcttcttgctctttctggatgtagtagaacgattttcacttgtgtacttgtgttgttgacactgtgcagtcaaattcaactgggcataaactcttgtaatgtaggggatcattaacaacccaaatacaatgaggatgctgtggttactttttagagaacttagaaaaaatgggcagcgaacttgaacttggg

SEQ ID NO: 2500 - DNA, 429 bp, Glycine max
  Clone ID: PAT_MRT3847_102263C.1
ggtaacggggaagaggcctatggagccagagcccacgcgtccgcccacgcgtccgcccacgcgtccgaacaatattaggagcagagaagatgctcttgaattggtggatcctaccattgcaaagcatgtcaaagaggatgccatgaaggtgttgaaaatcgcaacactgtgcaccgggaaaattccagcttcaagaccctcaatgagaatgttggttcaaatgctggaagaggcagatccatttaccacaaccaaaatgattgtgaccattgatgcttaaataagttgctccaaagaaggacaatttttctctcaactgcagacttttgagttttccactttggtaattaagcagctcaaaaagtgaggctgagaaggggtgataaatactagtaaatatgaaaacatgccttgatcttgggttcaatt

SEQ ID NO: 2501 - DNA, 256 bp, Glycine max
  unsure (1)..(256): unsure at all n locations
  Clone ID: PAT_MRT3847_102264C.1
ttntttttaattttctatcacatgatgtatcattgttttattgtgtttctgtctgtttttttacttgaacaattgtatgatctataatcccgatcaatctttctctgacatataataaaatatgattaattgttgttcttaaattaaagatcttaaataatatggcacataaggatatgttcaagatcatgaataagatgacgaagtttttatattgataatgcttgattaattgataatgacatatatgatatga

SEQ ID NO: 2502 - DNA, 323 bp, Glycine max
  Clone ID: PAT_MRT3847_102265C.1
gaaaaatatcttctccgccttatattccagtcaatgcttctctatttagtgactgcggcaaacacaggtttgctcgcagcatctttatggggactaaggacaggcagagaagactgtggagagccctacaatacctactatatgcaacatcaggccgtcttgtaaaaggctctctctctgcctagattagcaaggtgtgctccgcccctcacgacgcagcagagaagaatcatcagtcgacaatagccgtctcgatgcgtcaatgttgacaagacgatccgaccgaggctggtgaaacatccgcagctacgccatagtgtggt

SEQ ID NO: 2503 - DNA, 278 bp, Glycine max
  Clone ID: PAT_MRT3847_102266C.1
ttacaaaaaccgattttattgggaacaggagatgattgagctaacaccacactgaacacacattgcaactacgctgttgcaaactgattaaaaagttctgacatagacatccatatatctgatggagttgagctcaatcaaagatgctaggtcacccacaatttaacggaagagacacgtcgactccttgcataccgatttacgcccacacatgaagatagctcctaggttttccggccataacacagccatggacaaacacgtgcactcctatcata

SEQ ID NO: 2504 - DNA, 542 bp, Glycine max
  unsure (1)..(542): unsure at all n locations
  Clone ID: PAT_MRT3847_102267C.1
ttcttcgaaaccgaatcagattgataagcagctaaacatcattatcactgacaaggatctgaccagagttccggagggcaccaggactgaagctggattccgtcacaatatcaacgttggattgggctacctggacaactggctcagaggagttggttgcgtaccactgtacaatctgatggaggacgcggctaccgctgagatttcgcgagctcaactttggcagtggttgaaacatgaggctaaattggaagacggccgtacgatcgacgcgaacatggtgaaggacacgatttctgcggaggcggagcgtcgtctgattcgagccggttccgtagtcaatcgtatccccgaggctgcggcgctgctcgagaaattcgctactgaagatgagctcagcgacttcctcacactggatgcttatgatagactcgtttcggagggacattaattcgaaacctatttttntaattcaatggtattgttttgatagatatttcaggttaacatattataatttttcacctttttgaattatttac

SEQ ID NO: 2505 - DNA, 499 bp, Glycine max
  Clone ID: PAT_MRT3847_102268C.1
aattcggctcgagaaaggaattgaaattgtcataaggtaaggtgtgtgtttttatatttacatagattaaggatttatgaccaattatggagatatgaatgtgacaaataagccaaacccagatggttccaccaatgggtttcagtctcagcttcaagttcaacaacaaaatgggtgggagcagggatcatctagactcagacccactaaaccttaccctgcaccaacggctcggtaccaggacattgttcgtgatgcaaacctcttctggggaacgcttcaagcttttcacaaaatacttggcaccaaatacaaggttgctactgtgggaggaacgtcacttgatctacatcgcctttttgtcgaagttacatctcgtggtgggattgaaaaggtgattgttgatcgtaagtggaaggaagtgattctgaccttcaatttcaaagataccataacgagtgcatcatttgtggtgcgcaaatcctatctatcgatgctt

SEQ ID NO: 2506 - DNA, 1083 bp, Glycine max
  Clone ID: PAT_MRT3847_102269C.1
agaaaaaaatccaataatttatttcaacgttgaatctgaaaaattaatgaataaattattgagttaggccatcttttgagacgctgcaaacatgtatgcctttaggagaatatacaacagtttagtgtatccacacacctgcaagttgcaacattagtctctctaggccaacatggataactgattttgtgttaatagtactatggtcgatagtttaactatcttccatcaatttcaatgccatctcaaccagtgactgagttgttagagtgtgccggttcagtccaacagtgccagagaaaacattaaagctttcaagttctgatgtggtctctaagacaccctccaacacctcctccattcccagacccttaaaggtttctatgttttctgctttgtctttcatcatccaaatagccagctctattacgaacctccttatccttggaatcttagttgggggatactggtatttcttgagaatctgaactaatttgtttgcaagttcagcctcagtaattccagcttcttcaaatacaatgcttgattcatgagaggtcatgtatctgaaaacatttgctgctagtccaatcatcacctcttgtatcttgttgtcttctgacatgatcgcccgaagtattatgggtgttgcagtattaaccccctttagctggatgatcttatcttttccactataggtatttttacttcttagaattctagctgcattgacacggagcaatggatctttcaatgcttcagcgagcttttctagtactttcaactttaaaattcgatggcagttactcttgctttctaaagccagcattgcaagggcctcaccagcaacaatttttacatgtttctgattttctggtatgttgtgtttgaaaaatatgttgaacaattctttaagtactccacctgtgccccctattctttccgttgcatcctcttccaatgccagactggttaaaatttctatgcaaagtttctgtagaagaggatgcttctctccatgccttaaaatatctctaatattgctgatggtgaaaactatctccgcaatctctcttcgaagat

SEQ ID NO: 2507 - DNA, 819 bp, Glycine max
  unsure (1)..(819): unsure at all n locations
  Clone ID: PAT_MRT3847_10226C.1
ttgatgcctgaggtgacatcttctcaangcaacaaaatgcacaacatggtggaggttagctcttccagcacgatttattttttttatacacaagaattgaattcgagaacttaagaaaattcaaatatataccacttgaactaacagttgatcgataaaagcatatatgttaaatagcaaggaatttggataacatattttaaaaaattgagcttacactttttgcctcagtatttggtaaagaaagcaacatacctgggacacgatgacaaggataagaaatgcagggagaccaatttcagcgcaatctaccatctacaagaatcaaaagacaattattaaatatgttaccaatatatatgataagaaaagagcaatgcatgttctcttggaaatgctaataggaagagtcctaggccagtcagagtgacaaggggaaccacactaaaggggccgaggcacctgcaatatcagtatagttaataacttaatattagtgaatttttctattctaaaatatagctgatttttttcaaagaagcaaattgcactataacgatcaaaagagattctgaactcaagcatgtacattacctggcaaaaagcctccaaaatccaaaaaagccaatactgatttgaaagaccgatgcagtaataagtgccccttgtatggctctcatggaatgtataaatttctataagaaaaaatccaaccaagaaaaaaattgatattagtgacatgcactatcacttttatctncaaaactgctaataaaaactaatccttttccaaagtaactcttttaacttctcttcttc

SEQ ID NO: 2508 - DNA, 393 bp, Glycine max
  Clone ID: PAT_MRT3847_102270C.1
ttgtttttttttttttctttttttttttttttttggtgttttttaaagttaacagcctttattccctttggtcttgaaacaaggcaaaaacccggatttttggggggcaagaccaaaacgaaaaaatagtatttgggggtagaacaaaaagaacggggggaataacacttttacctttccctggaaggacccacttggttccaaaccggggggggctcagggggggcaggaagcatccaaaaggggcggttaaaacccaacaccctaaaaaacccagggggtcccaaaataccctaaccccaacaaaaaaaaaacccggtttcaagaaggggttgccacacgccccactttagttaaagggttggcgggggcgtccgaatccctttggggggg

SEQ ID NO: 2509 - DNA, 304 bp, Glycine max
  Clone ID: PAT_MRT3847_102271C.1
tttccacgcgtttgtctacagattcacggaagtacatcatcaggcattcacctgtacaatatcttggcaccgcatgcagtgcacacgcatcggaaaataaggaggcatacagagacagacggcactacatacggagaaccctaggatgcatgacgctgattgctgagaatacatcagtgctctgccatagaagactgacttgaactgtgcaacatagctctttaacacatatcacgacctcatagaaaatgttaccaaaagagggaacacactatacgacataagacgaagccctggtgaataa

SEQ ID NO: 2510 - DNA, 327 bp, Glycine max
  unsure (1)..(327): unsure at all n locations
  Clone ID: PAT_MRT3847_102272C.1
cccacgcgtncggatatagcttgtgcccttcttaatgggcagaaccatatcatgcttgtatgagagaaatatagcttgatgaccttgctctgataacacaaaccttaatggagtagccgctggtgacagaaaataacccacatcactaggtgcgtacgacgctcttattggtacagcaccactggactcgaatcaacgaagtgttgtggacccacctgagactggtaaagggcttgtgcggctctattcgtcacacaaatgcaaccgaaaacattcatcgcgaatatgaccggagtgacactggtgtatacgatactgtgcgtaagg

SEQ ID NO: 2511 - DNA, 407 bp, Glycine max
  Clone ID: PAT_MRT3847_102273C.1
gaacaaataaaagaatactcactagatgcatttctcgagtctgtaacaatatacaaaatccccgagacaatggggtatgccttgacttgacaaagcataatgaatcccacaaaacaattgtttctgtacacgccctaaacctatgttttatacaggtgggacatagttacaaaaccattggtcgatgcttgtgttggtgaataccaaaacgtgttcttcccaatttcattcatatatgctggccataccacatgtgatatagaagaactctatacaggttggtgaatactctccacaacatttcgaatctcaggaaagatggagacaagtgcaagttccaaaattgcataagcaagttgcttcacacatattttaaactgactaaagtagtgtttttcccgggcgca

SEQ ID NO: 2512 - DNA, 236 bp, Glycine max
  unsure (1)..(236): unsure at all n locations
  Clone ID: PAT_MRT3847_102274C.1
gcccccatagctgtcttatcactcagatgaacattactcattatctcctacaatgcgaatagatatcgaagatgacctacntttagttgcttgggatagctttaacgtctctcccacttctcaagcacttcttaagtactaatatcaatttcctccaataactaacccttcttcattttcaaccccacttataagatgttttttcccacaaacaacctattctttttttacgcttt

SEQ ID NO: 2513 - DNA, 361 bp, Glycine max
  Clone ID: PAT_MRT3847_102275C.1
ggaagaaatgtcatattacacttaccgaagaaaatggtgggtagacgtcggactcctactcaatactggatcgaggcatatcacaaccggtgtgcggcattacatatacgatggtcacatactccatggtaggttcaccatcctcgtgcataagcctggcatagtactacggaaactattggctaattgaatggagggctgatgattgaaagaggtgttacttggacattccatattacagaagcatggccatacacctttgaattcggcctactggagaaagggaaatatttggatatcgtattaaccgggaacttagtggtgaagctagcgtgctccgagcaatcacaacctggaaagc

SEQ ID NO: 2514 - DNA, 258 bp, Glycine max
  Clone ID: PAT_MRT3847_102276C.1
gaactctacagagggggttttcaccacgcccaccaacaaacaattgtattctcttggaacagagctatcaacttaacctacatatgcgttcacgcaactcacctcaactccagtgtagcatgactgtgtcaattcgagcaataccctacaccatggaagagaccccctaagagggtgcgtatttcgccttcgccgatataacatggcccgggttaaggaccaactgctcatgatctgagcatgccctttaacatgccc

SEQ ID NO: 2515 - DNA, 316 bp, Glycine max
  Clone ID: PAT_MRT3847_102277C.1
cccttgctcctgcttcctactataacgggcttttcgctgcaggaaatagccacaccgaattctttaaaccttgagaaattaactcgaaaggaaaaaagcttacatgctttaaatttaaattcccagaaaccccatcggcgggggggttcgaaaaccaaatacatccgggctctgaaagaaaaaaggggaatatactgggcttggagcacgggcgcaactttccctcttctaggggacatgagagcagggcccaaatagagaatacctatggcccccctactttctttttttattaataaacacacgggtgaagcgt

SEQ ID NO: 2516 - DNA, 296 bp, Glycine max
  Clone ID: PAT_MRT3847_102278C.1
tacggctgcgagaagacgacagaagggtcccttgagtcaaggttacgttcttagaaagacacaatgaacaattccaagaaattggccccttaatccagaatgaactaccaaaatcaatgaaatgcaaagacaacggacacattttcagaattcctcacaacttacacagagacttcatcagcctgacaaatgaaactatacccaaaatggatgaaaaaatgacctataatatattatggtacccaaggatcaccttttattggactttctgatatatgatcattccttaagttaaa

SEQ ID NO: 2517 - DNA, 248 bp, Glycine max
  Clone ID: PAT_MRT3847_102279C.1
tacaggccttaacttgcttcttaatgttccattcactcttcactacgaacatccgactccactaccctcccctaatcaccacataacctatttaaggatctgcattctggattaagcttctatatgtaatggtttgagtttttttaaattgtttgactcatgaagtattgttttgaaggggttttttctttttttcaattttgtgggaaatgattttgccggaaaaacccttgggattttaaattaag

SEQ ID NO: 2518 - DNA, 296 bp, Glycine max
  Clone ID: PAT_MRT3847_10227C.1
cgagttcttgaaacaccacacacgcctgggctctggatctctgctgtctctggtggttgggatgcattccctatgtcatgaactcgctcaaggacgttcagcacaagtgcggtcgttgcggcgtcctcctcgctacctggcatcgtagcggcaccaccgaggtgcacattcactcttaagtggtgtttgaatcagggcatgtacacatagtttgataacacaggaagaggcgacagaggaaggcgcataattgataccattggagtgagggggtctgcaagtgtcgcttcaagagg

SEQ ID NO: 2519 - DNA, 535 bp, Glycine max
  Clone ID: PAT_MRT3847_102280C.1
ctctctattagcaattgactcttctgcttaccaacccatacgatcagcacgtgcttatggcagaggaccacacatatacgacacctacactatactatatactctacatatctgcgatcatcgcaccggagacatgggagctgatttttatcttctatacatcgctgacattgatataccgacactactatggctggactctatcagattctctatctcatggtcaagaatattcccaaatggcaaagcagacactaacccccttgtggttaaacgctccaacattgtcatctatgagatcctgatagatggttaaaaacctcatgtcactcttttgcattgggactttccacacgctcttgaagatgaacattgaggataccgtacatctaacttattggcggattattcgggctactcaaacctctgctccaagaccttactagacagagtcagatattgagtctctttgaatgaaccctcattatttaatctcagtgtctactatggtggaacctttgccccagggatatgt

SEQ ID NO: 2520 - DNA, 231 bp, Glycine max
  Clone ID: PAT_MRT3847_102281C.1
attcggacggaaaccctatttaattcctcttggttcaaaagaatattattgaatagttattcccccccacattgttaacatgaaaatatccttaaaaggtaccctttaagaaaaactccttttcctttacttaattggggtctccatgccgaggaggaaatttaggggcctataacaagtcccaaattgtaacagttagaaaaaacattgccagaaaaaaggctttttgct

SEQ ID NO: 2521 - DNA, 166 bp, Glycine max
  Clone ID: PAT_MRT3847_102282C.1
tgaggatgtaatgccaatcgctactggtcacgagcgcgaggagcttcaggctgagctcgagggggggagtattcttcaaattttttcttccgaaggtccattctgcacgaaggaagcacgtgccgccgccaaatcttactatcaccaaaggatatcccgctgtccc

SEQ ID NO: 2522 - DNA, 199 bp, Glycine max
  unsure (1)..(199): unsure at all n locations
  Clone ID: PAT_MRT3847_102283C.1
gtggcagtccgtccagtgacacngntgattggtttatttcctctcaggngtgtgttcccaggaacctnttgtgttttangtccacnnnatccttttgtgttncntcggtggatgggnanctgaactttccctcagggcacttcccgnngtgttagcgatgcctctttctntngggggaggngctggtgcnangngtgct

SEQ ID NO: 2523 - DNA, 460 bp, Glycine max
  Clone ID: PAT_MRT3847_102284C.1
ggctcgaggcgaacatctgaagtcatggtccttttttgattgcttacacactatcatcatcatgggaagtcatttgaaaatacacttatcacataatttttgggtctgcacaggattaaaccttcaagtggtcaaaatatttctctttacttttttgagaaatacattctgcacaggactgaaagttccatcggaggctcgatttaaaatgttttttccttggttgatcatcagacaagatataaactgatgagagtactacgctcatggaattggcatctgatctacagcttctacctgcatccatcttggagagagtgtttactagaggacatagtattacacagcatattgttggaagcacatcacatgatggattacagtcttcttctacgtgttcactatagaactgcccagcatttacgttctaacgtttgatacaaccaatgtagatgcgtga

SEQ ID NO: 2524 - DNA, 1294 bp, Glycine max
  Clone ID: PAT_MRT3847_102285C.1
tttttaatgatcaatcatttggttttattttgcataagctaatggagccaaagaagaaaattccttagaagacaatagttttggtggtccgatgaatgaatcaacaatgagtaagaaaaaaagatattaccgttggctcagaatatccatccattcttcacttgtgttggtgtgcggatcagcagcaatactccttggaagattgtactatgaaaagggtggaaaaagcaagtggatgggaacacttgttcaacttgctggtttccctattcagcttccttttcactttatttcagcatccaaaaatctcaccacaaatagtagcattcatccaaaacaatcatctgcttcaatactagcatttatctatgtctcaattggcctacttttggcattagattgttatttatattcagttggactatgggaccttcctgtctctacctattcactcatttgctcatcccaattggctttcaatgctttcttctcctacttcctcaactcactcaagttcacaccttacataatcaactctctagtccttctcaccatttcttcaaccctccttgtgtttcaaaatgagtcatcatcagatgatgatgatgattcagattccacaaaaatctccaagaaaaagtatgtgattggattcatatgcacagttggtgcatctgcagggtatggactatggctttccctcacacagcttgtgttcaagaaggtcataaaaagagaaacattcaaagtggtcttggatatgatattatacacttcccttgtggctacccttgctaccttagtgggactttttgctagtggagagtggagtggtttgaagaatgaaatgaaggagtatgagttggggaaggcttcatatttgctgaacctcactttcacagccatactttggcaagtcttcaccattggttgtttgggcgatattagtgaggtttcttccctcttctctaatgccataagcgctttgggagtgcctattgttccaatgctggcagtgttgttctttcatgacaaaatggatggcattaagggtatctctatggtgttagctatttggggcattgtatcatatgtgtatcaacagtacttggatgatacaaagtccgaaaacagaaacactactagtcatgttccaaaagcttcttcacctatagaagaggttcatagatgagttacgtgggcttttaagttatcaatttgatatttgtattacaaatttacaacacttttacatacatgcatatgttagtaattgaacttttagcatcaaaaa

SEQ ID NO: 2525 - DNA, 1651 bp, Glycine max
  Clone ID: PAT_MRT3847_102286C.1
gatgaaattgtttaatgtatagaaatctttctacaggagaaaataattgtaagaggtccacagtttttccaaagaaattaacaaagctccatgctttggaaaataacgctaataattcacaagtggatacacagttcagtaagggggggcctccacaacataaattggttgtcgcttccaacacaccttttttccctctcgggttataaattgaggaaaagcataaaagaggaaaaaaaatataaaatgagaaaagagtaaacctatatactttaattggcatctcctagcttattgaaatggaacatttatatatctcgtttgagatcactgatgcatgtacatgcctatcccttgttgttctatatgccttcacgggccacaccctacaaacttgaacgcatttcaacaagggtatcaaagctgttttgcacaattattgataaaagatggtgcaatacctagccttttagtatttcaaagtttaatgatcagctgaacacagcttcctcctgaaccgtgcgtgataattgatgcacagcagctgcaatttcatccaccgtgttcagctgacacccttcctctaccttaacactaactgaggtaaggaccatatcgtcaacagtggtaacattaaggtggagaatgctgagaccaagacttaaaagaccaacaaccatcttcaaaagcatccctggtcgtttcttgcagagtatcttcatgttggcatggccatccaccaaggtcacttctatgtccgccacggcccatgatgaagggttccgtgccatgttgttattggcctcgcacgtgccagggtagcctttgctgctgctgctgctgctgctctgtgtggcacgtgtcgagtactgggggaacatgaagaactcagaaaagggtgaagagtcagagaagccactaccctcctttgttctcttcttctggcccttcatgcactgcagaagctgctccagctccttcacgaagttactggtgccaccaataatagaggcttgatcacccctttgtacttaagaaggaggcattaaggatctaggcacggcaaggtactcgttgattcgcgtccttctattgcactcaactgcaatgtgggtcatcctatggttctcgatctccttcttgttcttggcgctcttggtacgacgtcgtttgcggcggccggtggcggaggaagcggcttcgggggatgaagaagaaggaggaagagggaaggctctggggagggattgatcaacagtgcaagcttcaggggaggagtgtgaatcccattgttctttgacactttgcaacaccgaaggagaagatgaatcccaatttgcatgcagggtgtggtctatgttgttgttgttgataatgattcccacatggggtttgtcttctgatgatgcttggaaaccgtactcgtggcttcctcctccaccaccaccatcacctcctactaacgagtacaagaagtctttgttgttgcaaccgtaagtgaatggatcttgtgggaaaaccacggcctctagggccattgtttttattgtcacttgttggaaaaagttgaaattttttttcaagtggaaaagtgcaagtgtagctctcaagggagacaccactttgttcgcgttgggagaaagccccggga

SEQ ID NO: 2526 - DNA, 391 bp, Glycine max
  Clone ID: PAT_MRT3847_102287C.1
cattcatgcactcattatttttatttcattttatgccaagatatatcagtgggaggttgtagtcacacaacacttcctcctagagatcactcccctagtgttgacgatctgactaatgtttcaatttccagttcgtttgatgttccaaatatttaaattttgtgagagaatttgtacaagtctttagaacaacctatacatttttttggtagttgtacttgtacaacatgcttttgactgtttctaaagccttggattgagatcaaaacacatgtgaaaactttgtcaaactcattcaatcaaaggtctagaaactgccccttacatgttgtgtcgcacagcagctgaatatagattttcccggggtgttcatttttgtaccactgggatt

SEQ ID NO: 2527 - DNA, 144 bp, Glycine max
  Clone ID: PAT_MRT3847_102288C.1
gactagttcgagatctctagcgttcgctctttttttttttttttggacaatttattactagtatagtaatccattccctaaatctataaacccctccctctttatccactaattactccactcctattatcctatttcagctct

SEQ ID NO: 2528 - DNA, 390 bp, Glycine max
  Clone ID: PAT_MRT3847_102289C.1
gatgaatcttagtataatacgtactgtcactgccatgattgggagagtcacacgcagtccttgcatgattaactatccttaacaggcgcttctaccctacggtactctgcttacacagtagaacctctatgataagggcattgcactttactaaaaatacgctgttgcagcagggggattgatgaacatgtgcctctctaatcctaccctccttatgaacctgtcactggtctccgctaattgcaccagtggacttgacaggacctgacctatcttgagttctgcagggactcttacggtgcctcttagtggagatccttatggtgaggacaattgaatggtgctgatatgttgctcgtttccgacatggactggtgtctgagctaccct

SEQ ID NO: 2529 - DNA, 429 bp, Glycine max
  Clone ID: PAT_MRT3847_10228C.1
gccccccccataaattattctcccatttttttttttcggttttaaaatttggggaaataaaatttaaaacttacaggggcgcaaattttttttttaaaaaaacttgggtttttttttttgggacatctgggttccaagaagatcaaccccaaaatttaaatttggaaaatgtaaaaaaagcttttaaaaccaaatctttgggcttgacacttttttttttttttttacataacttggggggccgggggaatgggcccgggggcctttacctggggtgggaaataacccgggggctcacctttggctttaaaaaattagggggctttttcacataccttggggctttgggccatccttcttcacaattttttcattttgacacccccaaaaacacccccctttttccttggctccccttattttaaattt

SEQ ID NO: 2530 - DNA, 191 bp, Glycine max
  Clone ID: PAT_MRT3847_102290C.1
gtatgcaaattaagatacatgaatactgcatcttggttttcctaatagcatggcttttggcttatttcaaaataacaacttaactcattgataaatgtagatttcgtaaataatgttacatatttctcacacccctgcagaaccccatatgaaataaaattacaaaatagatggagtcaaccaaaataatc

SEQ ID NO: 2531 - DNA, 420 bp, Glycine max
  Clone ID: PAT_MRT3847_102291C.1
acccaaaccatcattacaagcatcaaaaatgccatttcattacacactacaatctaacactatggactaagaaaaagacacttgctacgcttaattttaagcccatttttttctaatcaattcaaagcttacatttcgaagacaacaaaataaattagcgaccaacatcaatggcaaatagactcaaaaactaatactgactaaccgacagccaaactgcgtgctaaccatgacaattaaccaaccttgctcaataaactcactaacccttacaacgaagtgagacctggcacatgacttgaagagaatggaccggtactagtcattgctgtgcatcatatcaaccgagctatgccttacattctagcttgtactggatctaacattcgctgaggactctttgaatggctatttaaatga

SEQ ID NO: 2532 - DNA, 330 bp, Glycine max
  Clone ID: PAT_MRT3847_102292C.1
aaaataactctcttttttttctttttttctttttttttttgagggggaggaaattttgcattatgcgggagggggcgcattatactttttcagccccggttttttttttgagggaaacaaaaaaggccccctgaaaaaaaaccttggggggatcataaaaatttttccattttacaaaaattttttggacccccctttggcttaaactaagaggaaaatttattgtgcccggcctttaaaaagaccttaaagattcccaagagaatttcagaaactgggggcacattttgacctgtcctttttgttacccacctgaaaggaacattgatt

SEQ ID NO: 2533 - DNA, 335 bp, Glycine max
  Clone ID: PAT_MRT3847_102293C.1
tacggctgcgagaagacgacagaaggggaaaacaagaagcaataacactcaaaaactcctctcttttactctactcacatttctccccgaacctgtccccacatcactgccactgcgaggtgtctgaaatagaatagcttcttctcgtttatttgttactatatcacccaccagcaccatcctttgtgctcactctttgattcctttttactcttttttcgatccctcctactgatattttccctttcacctcagctcgacgatgaatggaaggaaccgtgacactaacaggtggccctctcactcctttccagcggcaaggagcttcgaacacc

SEQ ID NO: 2534 - DNA, 232 bp, Glycine max
  Clone ID: PAT_MRT3847_102294C.1
gataccggggagggatgggtctccttaatttacgggcgtgtcctgcgagattcatcagactgtacgttgcatcttatcagatgtggttgacgtcggtgctggcttcaatttggccttcggcgtctatactccgacagattccaatggtcctgtttcttcaaagctttccagtagtatctctatgtgaacactcacaatgggtacgccttccatctgccgccgtattcgaggg

SEQ ID NO: 2535 - DNA, 410 bp, Glycine max
  Clone ID: PAT_MRT3847_102295C.1
ttaatcttggttatatagtgacagatgattcttaactccgtacacatgaatcttacctaatgaatcatcagatattaattgcccatatatttattttatgataaatcatcttgtttactggtagctcttatgcaaattttatttcatttaagctactttgttctttcattttatttaaaccacatgatagtttgtttctacaacaatatgatttctttcccacagatttaggaagtgtttcaagagattctacttgctgtaaagtcatacttatttccgttcgttgacaatactaatttctatctaccacttcacatattgatacacatagcatacaggccatattattataaatgtttttttttgggcttgtctcaaattctgattttgatatatacccatgatcttaa

SEQ ID NO: 2536 - DNA, 115 bp, Glycine max
  Clone ID: PAT_MRT3847_102296C.1
aaatatttgacatgttgtcaccacgtcatctatttctatgccctcactcatcctttgccttcgctggcccacttcccaaaccgttcatccttaagctgtccgacacttccaccac

SEQ ID NO: 2537 - DNA, 200 bp, Glycine max
  Clone ID: PAT_MRT3847_102297C.1
gagtgatgtaatgacataaatcatctaacaatttctcctgaataagacttgtttgatcccactaagaccactagattaagagggaagatacatgacttcgtgatactttaatatataacaacattgcgtgagaaatggtgcttccagaggaaaaccaggggatgacctaataaacgaccccacctcgatatttagggaaa

SEQ ID NO: 2538 - DNA, 569 bp, Glycine max
  Clone ID: PAT_MRT3847_102298C.1
ctcgagccgaatcggctcgagctcttatcacctcattactcacccacgttacgccagcaatacctaccatgtccaacaccatcccgcccactgaccccgtcgccgccgtggtttccgactcgctgcccaagccggtggcccccgcagaggccatccagcagccacccgctgccgcgctggagccgttgaccaagaccgagggcggctttttgcaacaggcccgagagaccatcctgccttacgtcgagaaggtgcaaagcacggcgaagccatacaccgacgctgccacgcacaaggtggaggagcttgtccagaagattgagggcactgccccgacgtctgcgaccaccaccgacccgaccgctacgcgggatctgaacgccccggctggtaccaccacgactggacagaccgtcgcggagaaggcccagggcgtcttcgcgcaggtctgcagcgctgtcacaagcaccttccagcaggtcaccaacaccattgagacgcgcacgacgaccgacacgcacccgggcttcatcacgcaggtgaccaacgtcgtccacaagggccaggag

SEQ ID NO: 2539 - DNA, 570 bp, Glycine max
  Clone ID: PAT_MRT3847_102299C.1
tttacaataataagcattatattattaatgtacaaaacttttaatcagcacaaccaaccaaatgatcattcatgtctataaattaattctaatgcactaatcaatcactcaaaaacactccaattggtttctatataatatataatataataacatatacacctcatatcttctttttctttatacactgctagccctctttaatcctttaaattaaattcaaaaggaaaagggactcttatcacactatgtcatctattatgctcaaactttttcactctatgtttctctttttggttacttttctctacaaatgtggtttcaaaacataacattcattttatataatttaaaagaaagatcttttggtaggtgctcttccaactgctctcatgaggttggcaatctccagaaccctggctactttagttccccttttagcctctgccgatgcctttctctcctcatcttttctttgtgcttttgctacatcattttgcattttctccagtgctcttgctcttttctcctccagcttcctctcaactttcttcatccatgaagatgctt

SEQ ID NO: 2540 - DNA, 478 bp, Glycine max
  Clone ID: PAT_MRT3847_10229C.1
gcgagtggctcggctcgcgcgccatccgttgcaactgggcgaaccagaagggccagccgtccatctcacagcagcaggccatggcctcgatgggaatgacgcctactaccccgtacggccaccaccatttccccacgcacggcgtgcagtcctacgagatggtcgtcaaccagaccccccagtggcagactacatgctacgttggcaatctgacgccctacaccacccagtcggaccttgtgcctctcttccagaacttcggttacgtcgttgagactcgctttcagagcgaccgtggcttcgctttcatcaagatggatacccacgagaatgccgccatggcaatctgccagctgaatggctacaatgtcaatggccgtcctttgaagtgcagttggggcaaggaccgtcccccgactggccagttcgatggatactccccggccggcggccccaattccgcttacccgccgacacc

SEQ ID NO: 2541 - DNA, 508 bp, Glycine max
  Clone ID: PAT_MRT3847_1022C.1
gctcggaattcggctcgaggtactgccgttcacgattttctttttatgcacaaaccctgacctgcggtaaatcattagtgtagctctgtactacatcaggttcgacaacgccttcttcttggaccgcactcgaggacggatggggcaatgtttggatgtaataacatatgtaacaatatgataacctgggtgggtagtagtactacacctgtggccagttgaatggagacgttcacaacaaaatgcttcacaccagtgtggatgacacattctacgctattgtagactaagaccgttagtgctgctgcaacgattagacactacatttccacttttgtgtcaataatgaacagaacattgactgcggctgtggctgcatggagttgatcagagaggatgactgtcagagcatcatgcgcgagctttcttcttgcagtgttaggtgagccccacttatctgaggctacagtgcagacgatgcacacgttattcttacctgcaatgacgc

SEQ ID NO: 2542 - DNA, 162 bp, Glycine max
  unsure (1)..(162): unsure at all n locations
  Clone ID: PAT_MRT3847_102300C.1
cgtcgcangcacgcntacgtcagctcggnattcggctcgannnnngctcaaaatanctntganattcaccataantaanantgcattngangcacattgtggtgcagtgagtgccatnatanntnaactgcgaactacatgactggagntngttcctntctn

SEQ ID NO: 2543 - DNA, 440 bp, Glycine max
  Clone ID: PAT_MRT3847_102301C.1
tacgacgtgattagcaggaaagatttcccgtagaagattaattagggtccctttttaggtagcttcctagttcccactttttcttctgttctgcgcggataattaatacaggtttgtgtttgctgaattggagggagattcactcaatgattttctctacaccaatttgaatgatgttggaataacgaacttggattggtttttgggtgtattcatagaggatttgcactttaagcattgagcttattggttagagaatgtccagacctctgcacagaggggtatctattcggatccctgatagcaacaacaatgacttatgggactctcaatccaaagataaatcagaaaaggaaggtttggatagaagaggttcctctggtcacccctcacccttgaggtctccctttaggttgcttttttcggataattcttattcc

SEQ ID NO: 2544 - DNA, 442 bp, Glycine max
  Clone ID: PAT_MRT3847_102302C.1
aacacatgaaaatatttggacatttatccattttgtgatcaattaaaatgcataaagactattttttttacataaacgacttaacaacccaaactaaaagcctctaaagaaagccacaatgaaagcattcgtaagcaaagaaagttgaatgcataccggaggaacatcaaaagcttggactccatgatccacacttaaactcttttttcgcaagagaatctgcgacctgattaaattctttcagcacatgatcacaagcccaaagatcaattccctctgccatgtctacaacctcattggataaatgttgccacttgtggaagcaaatcctggccacaatgatactttgcactcatcacttggacccataacttgcctttttcaatacacaacttccaacattttttcattaagataaggaattcagattcctagcaccccg

SEQ ID NO: 2545 - DNA, 158 bp, Glycine max
  Clone ID: PAT_MRT3847_102303C.1
cttgtacaatgtcacttaccctcgcgtgcagtatgtgatagcctagcgttgtggccaaaactcgcctcctggtcgctaaggcgactcagtctggaaagaagactactgcgtcgatccagacgctgctaagcgttggttcaaatatcctgatcccgtac

SEQ ID NO: 2546 - DNA, 251 bp, Glycine max
  Clone ID: PAT_MRT3847_102304C.1
agttaaggaacttaaacttgaaatatttttattgaaagataaaaaaaattaagttgttcatgatcttatgctttcttatagtttaatttattttttagttttagttgtcaatcaatactctaacaacgctggttaccaagatccttaaaagatactttatggcaggtataccctcttctggatcatgctgctaattagcaagctagcattcagctactacgtggagatattgccccttgttggtcccacaa

SEQ ID NO: 2547 - DNA, 448 bp, Glycine max
  Clone ID: PAT_MRT3847_102305C.1
gcttttgtgggactttttttttctttttccagagggatttttagtgcaagtgtgatgtctgtcttcccttgaaaaattgtcttgtgtggaaacaaacttcggaaagagaaagaaagaaagaaagaaagccactttttattcttattttttctctctctctcactaatatatctgattttctctctcacttcttctgttctatgtaatgggtgttagatgtgcttagtttcagagtgtgcaacacaacaccagcaacatgtctcagaaagagaagggtccgggtatcaggctatttggaaggaagattccggtgccggaatgtcagattccggcaaactctggacccacggatacttgctgcagcataaagaaaacagaactcaaaatacctagtgaatgtggagaaaactctgagcaacaagaaaattcttctgattcaagggatagt

SEQ ID NO: 2548 - DNA, 483 bp, Glycine max
  Clone ID: PAT_MRT3847_102306C.1
gggacctagcgagcatcatatataaaaacacgtaaaagtgatttatagtaggatatacgaataaagacatgttaaaatatatagaactgacacacgattaacatgcaaattctgttcagttcaggtgtagaatctcaccgattaattttgttggaattttattttgcatttattaaaacacgctttttttaacatttaaatatcaatttttagatatcttttaatctgctgtcaaacttagattaaaagaaatgaaaatctacacattgttacagattgaatgaacttcatagatgagagcacgttaaatgatttgtagtaagacataagaacgaagataagttaacacatgaaatagacacgcgattgacatgcaaattctctttggtccacatgtaaatcttttttgatttattttgcatttttttaaacactgtttttctccatttaaatattacttattagatttcttttaactgacat

SEQ ID NO: 2549 - DNA, 367 bp, Glycine max
  Clone ID: PAT_MRT3847_102307C.1
aatccagcttaagcggagaagagtatgatcgctattcacaccaatatgaactgatacgaaatcttaatgaagtttacgataatgatcccggaaacttcaacaagattgttgagcttatgcaaaaaatgcaagaatgtggacaaccaccaaatgatatcgtccaggagcttgctcctgattttgatttagccagtcttggccagttgtaagtccccttggaatcttgaatatgcaagcttagggcatgtgctgttgtttattaccctatgtatgtaacattaatctttatttatttatcttgaaataagaccctcattagaaaatatgcattggttatttttagctccctaaatactcaaagtaatga

SEQ ID NO: 2550 - DNA, 683 bp, Glycine max
  Clone ID: PAT_MRT3847_102308C.1
ccacgcgtccgcccacgcgtccgtacggctgcgagaagacgacagaagggggtatcaaaaaattcatcctctcttctagggtttcttccgctcccaaaacaatctcgcctccaacctctctctctctctctctctctctctcttcaattttcgttgcattcgcagggcacttctccgctcgcaatgccgtttccggcgaaaccaacgcgggatttcgacgagtcggcgagtccgtcgaacaacctgtgggtggggaatctggcggcggacgtcaccgacgctgatctgatggagctcttcgccaaatacggcgcactcgacagcgtgacttcctattccgctcgcagttacgctttcgtgttcttcaaacgcgtcgaagacgccaaagccgccaagaacgctctccaaggaacctctctccgcggcagttccttgaagattgagtttgccagaccggtttgtcctcatctttttcctttcactttctctgcacatccctgtattcttcttcaaactaacatcctcttattattattattattaaaaatgttattatttctgcattctagattttgtatcttttttctctcgttgccagttgtctcacaataaattgctcgacatgcatgcataaaaaaaaaaaaaaaaaaaaaaaaaaaaaagcggccgctctacaggatcca

SEQ ID NO: 2551 - DNA, 157 bp, Glycine max
  Clone ID: PAT_MRT3847_102309C.1
cttatgatagacgtacataagaaaaagttggcgcattaaaaaaccatgtgtaaacttttttttatgatagacgtacataatgtgtggaagattaagtttgggtgtgaggagatacaatcatttttatgatagaagtacataattttgtgagagtttt

SEQ ID NO: 2552 - DNA, 232 bp, Glycine max
  Clone ID: PAT_MRT3847_10230C.1
ggctcgaggtcttctgtttcgcctcttattttaccccttcaggatgtgatcaggatggcatggaagggctactgcgcctgtgagacaggctgcgactggtgtctctgaacctgtaatggcggtgacttttgtaccaactggactgccaaccgaagttcaggctctcgaaatgcaccatgatgcactgacagtggctcttaccggtgatcatgttggattcagtgtccagaat

SEQ ID NO: 2553 - DNA, 233 bp, Glycine max
  Clone ID: PAT_MRT3847_102310C.1
gcccaagctagatcaagtacacactatgatccacaccacaatctacttgtgcatagtttctggctgcaaacaagttgttttgtggcctccttctgctagtccctcactctatccaatgcctatatatggggaggcttctaatcacagttctgttactttagaaaatcctgattactcaatttatccaagggcagaatgctcaatggagtttgcgcaaaaggctgttcttcagg

SEQ ID NO: 2554 - DNA, 180 bp, Glycine max
  Clone ID: PAT_MRT3847_102311C.1
gaatgatgggattcttgtgtatctccattgtaaatcgaatgatcatgattttcaccaacatttgggggccgttggatagtaccaccattagtcctttagacataacattgctggcactactctttattggtgcaccatggattcacacactttgcatccatcttttgaccatttataatc

SEQ ID NO: 2555 - DNA, 557 bp, Glycine max
  Clone ID: PAT_MRT3847_102312C.1
gtgacgactcaaaaatcgccaatatttatttcaaaatcaaatttaaattttttgacaccacccgcaaggtccatgccacctcgattcacccacaaagaagaacatttcctcacatgtaaaactcaccctcgattttaaagtcacgtgccacgacttccacaaagactcctccaccctccgcctccatggccacaacctttaatccaaccagcacatcaccgctagctgcttccgcacccttaccgtcgaacctcacaaaccctttcacctctgcaagaagctttggcaaaacgatgttgtcaaaaccctaaatgaatcgaccaagaattccaatcccaataccaattcccctaacctcgttgtggttctcttccacctgaagcttttcacctaccttcttatcccttcaaccttcattttctagttttttcaatcaccgcacaattctcctccaatctccaaagtgaagactaaagaggcaaacacgtgcaagtgagaaagaagatacttgctgtcgttctcttccacctgaagcttttcacctaccttcttatccc

SEQ ID NO: 2556 - DNA, 164 bp, Glycine max
  Clone ID: PAT_MRT3847_102313C.1
gttacattctgcttcgcgtggactcgcacgttctgtaagatcacattcaatggaccccgctcagctctcagccataccctcgcctaactctagagcgtcggtataagggcctcatcttcggctcgttagcttgcttcggccggcaaactagcatcggaatctct

SEQ ID NO: 2557 - DNA, 722 bp, Glycine max
  unsure (1)..(722): unsure at all n locations
  Clone ID: PAT_MRT3847_102314C.1
gagaactgtctcgagttttttttatttttttttttttttttaaaatacattcacagaaaacaattatatattgccacttttttttacatttaacattgtaataaccaagtctcattctcggctccagtacaacgatatcataatgtaaattccacatctacacaaacatataataacttacacatgaatccaacatatacaaatatctaatcacaaggaaagcacagcacacatgtattatccaatgtccatgaagaaattcagccagtcccttgttcttcaattggaccactcttgatttcacctacaacctggtgaacctgttccacttctgcaccagaatttgtattcttggataaatcttcacctcctttttcctcggctttgccaaaccaagagccaacaacacccttaagcttgccaaccacacctttccctggactcttcacactgatctcttcacacattttatcattgccgtcatccaagtttccatcctcatttttcactggctcttcctttttcttatgtaaagcttctgaaattaactcagaaagtgccttgtcttcttcaccaggctttagcttctcagccaaatagtccttcacagaaacctcattctttgtctcagttccaacaccaccagtgctagtnnnagtcactttggacttcactgcactttctaccactgcaaccttatcataaactggagctaatttctc

SEQ ID NO: 2558 - DNA, 357 bp, Glycine max
  Clone ID: PAT_MRT3847_102315C.1
ggccctgggccaattggccccccccctggcattaatggggcccggcgggttattcaaaacccggggggaaaacaccccccccggatcaaaaaccccctggccttgggaaacagaggaaaaccggttttcaacgggttttaaaagcaaaaggcgcccccttaaggggccttagcttaaaaggaaaaaacccgaaaagggggcccaaaaggggaaaaaaaaaaggggaaaaaaacctattttttttttagggggggatttcccgcaaaaccaaaaatggggggccacattggcacttatcttcaaggaaaacaaaacgggccccagggggaggctcctggttcttaaaaaatcccttaa

SEQ ID NO: 2559 - DNA, 576 bp, Glycine max
  Clone ID: PAT_MRT3847_102316C.1
aacaacaaaaaaggccatgacttttccaaagggctggggggatggaaaaagagttttcttccctgggttttgggtcgggttggtttttttttaacgacttcctactttaaaacacaggccccggggtaagaagttttaaacctggggaggtctactatggggggttttgggggccaacaaccccccggggggggctttcggatcaggcggggagcccgggccaaaatatggcgcttcggcgagggtatgtatgcgggggagggtgatccaacatttttttcttaatatatttggcaaaaggggacaaaaaaagggaaaacgttttttaacggggacacaaaacggaacttcataaactaatcttaaacttctttatttttattttaacggtggttttcaaatatcggggcgggggaaaaaaaattaaaaaagccccctaggggtaaggttgaaaaccaaccctttttcacataaggaggggggattttatgttttttaatcaagttattaaaaattgggttgggaattaattttttgaggaaaaaataaactgtggtaaaaaaaaaaaattatttt

SEQ ID NO: 2560 - DNA, 576 bp, Glycine max
  unsure (1)..(576): unsure at all n locations
  Clone ID: PAT_MRT3847_102317C.1
atcagttataacacactattccgatttgatttctgactcaactcgcccgagtcacgccgttcttttatcgccccaagcatctcttcttaatcacaacaacaatttcttgttcccaaaccctctccctccccaattctccaccaaaacctccgccaccgcccgccgcctaacacaccctctctccgcccggctatggacgcgcgaccgccggaatccgccgcgccggcagcctcgaccgaggacttcgtccacgtcgcggatctgaagatggagagcctctctgagagcatcgttcgaatcgacgagccttccgaagccgacgccgccgcttcctccgctccggcggaatccgatcgccgtccggccacgctcccgccggaactctcaagaaacgtgagagtcctgtcgtgcgagtcctccgccgaaggcggcgtctgcgacgtttacttggtcggcaccgctcatgtctccgaggaatcgagcagagaaagtcaagctatagtgaattttctgaaacctcangttgtcttcttggaattgtgttcaagtcgagtggcagtgcttacccctcaaatc

SEQ ID NO: 2561 - DNA, 698 bp, Glycine max
  Clone ID: PAT_MRT3847_102318C.1
cagcacagcctatgtagccagtcatgcagttatgaaagagtaaccatgagctaaaatattatcacaacatatttgatctcactcagtaaagactaaagaggcttattacagacagaatacaaggtcacactgacagactttacaaggcaacctgctgtcacaaactgcaagacgttttatcaaatgatagataatatgtacagaagatgaaatggggaaggaaagaaaaacaccaatacctttatatcccttccttaagtatgtcaaacaacgtacatattctctccgttttaacaattaacagatatcagacgacaactccaatcatcaacaatcgaacttcaaagaaaacaagcagatacaactttccaacaagggagagcaaggcaacaaaagcaataactagcctcaaattttactggggcaggatgccagctttaattgtctcagattgatcactcaatagatctctcccactgcttgtaccaaggccagaactccccatcagcggtgccatcagacttccaccatgcaccctgccttcaggaactgctactgacattggtgtgtgaccatcttccccagatgggagacgagtacttgcaacttcatttagtttaacatcagaacaagttatcacaccagctgcccgtgggctacccattttcatcatatctacgtcaatatcttggttaatg

SEQ ID NO: 2562 - DNA, 613 bp, Glycine max
  unsure (1)..(613): unsure at all n locations
  Clone ID: PAT_MRT3847_102319C.1
ccacgcgtccggatttgtagagactaacccaagaaagaaccaaccaaaaacaagtgcttcttagagcttggtatagctctctctctctctctctctttgtgcgtgtgtgtgtgagggtacatgcagagcagtgagtttgagacagagaaagaagcagttcaagattgttgttcaattttgcaaaaaactgcccatcaagtacttttgttgctgtttttttttttttttttcgattttgcttcttatccaacccgtaagtttcttgaatcattgtttctctctctctctcttctctctattattttctacctttcttatgaatgagctggtttgtttgctattgttgttggatatcggggaagattgtagatttatggagatccaactaaatttggccttttgttgaatcctggggcctgggggatagtgattaatgggtttgtcgaagaatgtgattataaggagaacctgaacttctgtttcaattggtttagtgcctaatgctaagttctctgtgtttgggttctaaattgatttgcgtggatctctgtgattctcctttctaattctgcatagctgtgtaggggtgnggagntggcgagttgaaaaaggg

SEQ ID NO: 2563 - DNA, 164 bp, Glycine max
  Clone ID: PAT_MRT3847_10231C.1
tcaacaatgagatgctgttttcttttccttttctgttcaaaataattggaagccatggtgggggttaggtgaaatttgtatgtgttaatgcactgcagtgcggtacgtaactgttggatcgcaccgtgtttagacaaactacataggaaattatacttgttgtg

SEQ ID NO: 2564 - DNA, 102 bp, Glycine max
  Clone ID: PAT_MRT3847_102320C.1
cacactgcccagcaaaccaagcaagatgggtgccccgggagacgatgccatggccacagattactcctaccaatccagagacacacaagcaccgcctccata

SEQ ID NO: 2565 - DNA, 1361 bp, Glycine max
  Clone ID: PAT_MRT3847_102321C.1
cccacgcgtccggatccaaatccaagtacggttgggttggagagaaaatgcgtccctgctgaaaacaccaaaccctaaaacgcgaaaagggttctaagaatttgcgaaggaaagagctagcggagatggagattcactacagtaacagctatttcgagaggcgccccatcctcaagtccaaggctgccgctgtcaaatgggtcaaagaatgaggataccttgaagaccttgaaagaaaaggtaaaagagccttcagtgccagagccagaacctgagccaactactgaagtactttttctttgcagctatgatggctgtggaaagacattcatagatgctggtgcattgaggaaacattctcacatccatggagagaggcagtatgtttgtcactacgatggatgtggaaagaaatttctggatagctcaaagttgaaaagacattttctcattcatacaggggagagggattttgtgtgtcctcatgaaggctgtggtaaggccttctccctggatttcaacttaaggtctcacatgaaaacacattcccaagagaactatcatatctgcccatatccagattgtggaaagagatatgctcatgaatacaagctaaagaatcacattgcatctcatcatgaaaagaatgcatccgtggatgtgacaaagtacactactcccccttcagagaagcaaacaaaaacttctaaaccatctggaggggcatatggttctgcatcatctgaccgtccctatgcatgtccctatgatgggtgcgaaaaggcatacatccatgaatacaagcttagactccatttgaagagggagcatccggggcttatggctgatgaaaatgcagagcatgctcaggctaatgttgacaatgaaatggatgaagcaagtgaccatgatgcctatgttgcgaaacgatcaaatggtaaaattcagaagcagagtaagcctaaaccaaacctcaagttgcctccttccaaaattgcaaaacgcaaactgtccactccctctttaactgtaaataaaaattcttggcccgtgaaagatgaacctttcgatgaagaagatagcgaagaaacagaagaggatcgtgacaatgttgaagatggttggagatatgcaggaggaaacaatgaagatgatgatgaggaaacagaatatgaagactgaatcagttatggcatcctctatgaaacttaccttttccaagaaatatattttctcttctacaaaaaaatttcagttgtctcttttttatttggctgaggaaatgacatcttgtcaaactgtgtgttgctgttacaagcattaggaagaatttatataaataaaatgcgatttaaaatgct

SEQ ID NO: 2566 - DNA, 286 bp, Glycine max
  Clone ID: PAT_MRT3847_102322C.1
gataaaaacaaactcactcattggattcaccacatgaatgtttccttcattggggactcgatctcgatacaattcctggtattaattacggtaaacaaaagaaaggtgcttgaagatcccaaattagtcattcctttttttgcatgtcaccaacctcaaaggctgggctttgagctaacataactaactcttctggtattgagaaacccgtataatcttatccttactagaggggttatccttattgtgtagcaactcattcattacgttcactttccttacattt

SEQ ID NO: 2567 - DNA, 1793 bp, Glycine max
  Clone ID: PAT_MRT3847_102323C.1
ctgagtcgacccacgcgtccgtacggctgcgagaagacgacagaaggggagagggagagaggatccaaatccaagtacggttgggttggagagaaaatgcgtccctgctgaaaacaccaaaccctaaaacgcgaaaagggttctaagaatttgcgaaggaaagagctagcggagatggagattcactacagtaacagctatttcgagaggcgccccatcctcaagtccaaggctgccgctgtcaaatgggtcaaagaatgggttccccaagatcttgtgacaacaggagggaagtgcatgatcttaaaatgggtaacagaggataccttgaagaccttgaaagaaaaggtaaaagagccttcagtgccagagccagaacctgagccaactactgaagtactttttctttgcagctatgatggctgtggaaagacattcatagatgctggtgcattgaggaaacattctcacatccatggagagaggcagtatgtttgtcactacgatggatgtggaaagaaatttctggatagctcaaagttgaaaagacattttctcattcatacaggggagagggattttgtgtgtcctcatgaaggctgtggtaaggccttctccctggatttcaacttaaggtctcacatgaaaacacattctcaagagaactatcatatctgcccatatccagattgtggaaagagatatgctcatgaatacaagctaaagaatcacattgcatctcatcatgaaaaggttgggtagtgtttcctatttgtgtagctggtacactttccttatttttttaccactcagtctattaattaatgatgcatgttatcatgtaaagcatctctgttcttttaatccatccatttggtgtttctgcaatagtttcatttggtttgttagtatatctcagtacaaatatgtattatttttctcatgtatattgtgaatttctttataaagatgtctctaattcgaaactgatgaattactccagtggatgtgattcacaaatttttgaaactgttaacatttcttgaataaccgtttgatttggaatttcaaccttatctagcagaatgcacccttggatgtggcaaagtacactactccacctccagagaagcaaacaaaaacttctaaaccatctggaggggcatacggttctgcatcatctgaccgtccctatgcatgtccctatgatgggtgtgaaaaggcatacatccatgaatacaagcttagactccatttgaagagggagcacccggggcttatggctgatgaaaatgcagagcatgctcaggctaatgttggcaatgaaatggatgaagcaagtgaccatgatgcctatgttgcgaaacggtcaaatggtaaaattcagaagcagagtaagccaaaaccaaacctcaagttgcctccttccaaaattgcaaaacgcaaagtctccactcccactttaactgtaaataaaaattcttggcccgtgaaagatgaacctttcgatgaagaagatagtgaagaaacagaagaggatcgtgacaatgttgaagatggttggagatatgcaggaggaaacaatgaagatgatgatgaagaaacagaatatgaagactgaatcagttatggcatcctctatggaacttacctttttcaagaagtatatttctcttctacaattgttttttgggttgtcgcttttttatttggctttggaaatgacatcttgtcaaactgtgtgttggctgttacaagcattaggaagaatttatataaataaaatgcgattt

SEQ ID NO: 2568 - DNA, 302 bp, Glycine max
  Clone ID: PAT_MRT3847_102324C.1
cggaaagaaatgatctttctgggaataaaaagaaggacggattaaaattccactggctttaagaatagaaaaacatagtttgcacttaaagacggagcaaatgtacacagaacagggtaacacagggattgcaactaaatatgaaaactccgacttcgcttttccacgttaaaaagtaagcatttccaatatcatcatctcaaatgaccatccatattccgcttgtgttccaagtttgggaagcatgcactttacacaccgcttagcaagtttcattttattttgttgcatatcaaaggaca

SEQ ID NO: 2569 - DNA, 257 bp, Glycine max
  Clone ID: PAT_MRT3847_102325C.1
catggataaatccgagtcagtaacttcaacgagtgtacttgatttaactcatttgtattctttgtgtcatatgcttataaactcacaactgttgagagttaagctcaagaatcaagatacatatctaatcaagatacatgcaattgtaatatatattgaatattgaatacattatttggtcaagatctatgcaataatccaacccattgttatgaacttctagtcttctaccatcaagtttgccagtaactcaattg

SEQ ID NO: 2570 - DNA, 307 bp, Glycine max
  Clone ID: PAT_MRT3847_102326C.1
ccaagccttcacaccaaaaactctaacagacaaaaacccagtaggtgtggtcatcgttcattgatgacttgctcgtgctcatatatgaaatgtgtgtactttatacgtatctatgcattgtctgtatttgaactcaatcagacgatcatgcactagcattcacatcattcgagaggatattcaacatcgtcgtgcatttactacatagtagtcctctaatcatgtctaacaattgatgtcgtgacttaaggtctttatggttacaacatacgataatgtacttactatcaaatagacacgtaattta

SEQ ID NO: 2571 - DNA, 170 bp, Glycine max
  Clone ID: PAT_MRT3847_102327C.1
tttaaattggtttttaatatatattattcctttcaaagagacaatttacaaaaagagaagggtcccctccaaaaaactgtattttatatggcttacaaaacaagataatcaatgtcttattaactgattaaaatgttatttcatgcctaggccaccaacatggattattt

SEQ ID NO: 2572 - DNA, 434 bp, Glycine max
  unsure (1)..(434): unsure at all n locations
  Clone ID: PAT_MRT3847_102328C.1
gaaaaatgggaatgtcaagctgtgacaggtgcttttccatgtcttcaatatctttctataaggtattgtcccaagctgaaaggtgacctcccagagcaacttcttcctttaaagaagctacaaattagtgagtgcaaacaacttgaggcttcagctcccagggctctagtactagacctgaaagacactggaaagctgcaactgcaacttgactgggctactttgaaaatgctcagcatgggcggacacagcatggaagcattgttgctggaaaagtctgatactttgaaaaacctgtatatttattgttgcccgatagatgaaatgtgttgcgattgtggaatgagtgatgatggccgtgactctctaaagacttttccgctatatttcttcccagcactcaagaccctntgtctcagtggctttcgtaatct

SEQ ID NO: 2573 - DNA, 196 bp, Glycine max
  unsure (1)..(196): unsure at all n locations
  Clone ID: PAT_MRT3847_102329C.1
caaaggggttggagcaatcatctcgtccgcatttcgaatccgttttatcggctaaagcgatcctttggtacttaaagtccacggatctgcagatataatgctgtgtgttcgaattcctacccagtggtctgttgttgaggatctaccanaaagacctgctggcaaaattggttagaacaaacaggcaggggatggt

SEQ ID NO: 2574 - DNA, 403 bp, Glycine max
  Clone ID: PAT_MRT3847_10232C.1
accttccggttttggtttaaattgggttaattaattattttttccaaagaattcttttccgaaaaagaaaattattttttccaaattatggggggcgaattaggggtaaccaccacccttaaacctttaaagcttaattatttttagccgtgggttcaaccttatcctggacttgaaaatgaatgggtggcttccatggatggcccttgaccttacccagaaaattccaacctttcttttttttctttggaagaaaagaaggccattcttaattttctttttgattaaatggagtgtgatggcccttttgcccaaagcctaaaaattataattctttaaaactttgtgttctgggaaaaaatctcaagtgaccatgtttccttaaaaaacgtatataccaaaa

SEQ ID NO: 2575 - DNA, 339 bp, Glycine max
  Clone ID: PAT_MRT3847_102330C.1
cccacgcgtccggcgaaaaaaagcacatgccatccaaaaacaaaacactgcccctcgcgtgatgtctcgtgggggttatgaatatttagaaaaaaagttgatggatgagaaaagaaagaaaaaactagaggaagctactcaatctggaagcactgacaccgtcattgatcctccatctaccatcaaacgacacctgacgtggaagcttgctcgcaccaaaaaactggtgacatgacatctgaggcagcaaaagaaattcctgacaagattgatgcgcttgaggagcaggcctcataggggtcctttgttacccatggacgtcatgatatactgattgct

SEQ ID NO: 2576 - DNA, 322 bp, Glycine max
  Clone ID: PAT_MRT3847_102331C.1
aaagaaaataaaaaaaaaagggcggccaggtcgcgatctagaactcgacaatgccaggtgattttgtcattggggtcatgttgacaaccatgaacaatgtgtgtgcatatgggctcaatcctgatatttcagagtgcttgtcttgtgggcaccattcctaaacccatttcacaacaaaactgctggaatcaaatggccacagtgagaacaccattgaattttgattctagcaaacagaacttttgtcagttctctattgaccttctggggggatgaatcttattggacaaaactggagattggatcacacttattcaaaatt

SEQ ID NO: 2577 - DNA, 499 bp, Glycine max
  Clone ID: PAT_MRT3847_102332C.1
acgcccacgcgtgcgctttgaaattttttttaaagagtctttaaaaaaaccaacgttagatacgaaaacatccgaagaagacaaggcttctatagggaaaaaatccaatagccacaataaaacgtcactttacaacgaacgagactgagaaaagggggggcgtttccaaaaattcaacgccttgcaacccatccctctttcgacagatgtttttatagggaaaaggacctcaccgatcgggccttgccaactaataccgcatgctgtaggaaaaaccggacgctgccctgaattaagtgcattaagcgcacatccctttttggctactcgcagctataccgataaggttgccaccgccctacctcccgatcctttggccttctctaattgctttatgggcccccccctgggctgtccccttaaagctgtaggtgggggggttcccccccgggtgaaatttaacattttacggcacctttacccccaaccatttgattat

SEQ ID NO: 2578 - DNA, 320 bp, Glycine max
  unsure (1)..(320): unsure at all n locations
  Clone ID: PAT_MRT3847_102333C.1
aatcgcangcacgcgtacgtaagctcggaattcggctcgagctcnagcncnntcncagtcaannantcactatggnatgnaacttctatgaagaagnnancatgccnaanaatcntcacntgttctgccagnnaggaaagtcaanttgaccggttcanancttctgaatgcancacccnttgagagtnatncacaacaatancttccanttgatgtnngggnccccttgtgattnggcatcctttgatttcaaggaggnnatncaaggaggaggagnnntggangcncttcngnaacnggcaganatctcnatatggtat

SEQ ID NO: 2579 - DNA, 325 bp, Glycine max
  Clone ID: PAT_MRT3847_102334C.1
aatagcagaaacaattaacattgatgactttgacgaacatcatgatagtgcaaatagtatgtttattgcatctgttccctgtggaggtgacagctgacaacacagatctcagcttcatcaaaactcataattcatcacgataagatgacaatcattaatcacaatcatgctcagatctctgcaagtgcacatcctcaataccactgcaatacacctgtaaaaatattatgctgcattcaagctactcatagtgtaagatctgaatgtacacactctcacactcattacagtgtcgctggcgtgaacaaaacgtcttctgctacaa

SEQ ID NO: 2580 - DNA, 558 bp, Glycine max
  Clone ID: PAT_MRT3847_102335C.1
gacggtaaaggagatttgacatttggtaaaataatttgtaacagtggtataaggccgataggaatattgttcatgcaatgcagtagtttcggcatttgtaacagatgataacaaactagcgttaaaatggtgtgatgcattttgaaaccggagggatggattgcaattttctgatttcactttttccccatttggttaggaggccagtcctcgaaactgtttagtcgtgtcatttcatttgtttaccgatccatatcaaaatgttatgctgaaacaagacccacatagccgccaagcaaagccaaaacagatgatataatataagctcccaatacaatatttggttctctgaacccacgtaactggagcccgtaatgaaagggagggattctcaaaaagcgccaccaccatgctccctggaagcccttagtcatcttgaagtacaaaacctgaatgataactgataatgactcaacaatgaagattccagaagaaatgagtagcgggacgctcccctaccgattcttttttacatcccacagcttcggcagatcgctt

SEQ ID NO: 2581 - DNA, 318 bp, Glycine max
  Clone ID: PAT_MRT3847_102336C.1
actctctctcgctcgcttatggtatggccgccaattccactacccgacggatcaccgccttagggaagcgagtcgccatccggatctggacttccaacgctcctcctcccacttcaacgacgggagcacacagtagcggctcaatgtacgacatgaaccctgatgatgagatccagtccgggcatgtcccagacgatgtgatcgaggcggcaacacactccggcaaatactgggccacacatacacactactggggtacttgggctccccggaagaagtgacttcactgcctcagccgactcactctgatccgctgga

SEQ ID NO: 2582 - DNA, 252 bp, Glycine max
  Clone ID: PAT_MRT3847_102337C.1
tcgctcacacgcacgatgagcataccgtgtgatgagactggggcgttacaagatatctgagttatcagacatcgcatacccacctcggggtctctaagtcgagccctttacgctgtcccaatccatacatgggacagcgaaaccggcaaggtagccatgctgagctacatacattcaagttcagcattttcgcactcaacaaatcggactcaactgtcgggcttgccttcttgttggcacccatctgttctc

SEQ ID NO: 2583 - DNA, 263 bp, Glycine max
  unsure (1)..(263): unsure at all n locations
  Clone ID: PAT_MRT3847_102338C.1
gangacaatggctgtgtgncaacaatgtgctttgcattgctttcattattcancttaacgtnggctntngaagctcgaattcnggggatttagtctggtngtgnatggcaaagtgtnacgncagttctanggaggatctnangnttcggcaccatggggggncctgtggggatgggaacctgtacagcnaggggtacggtgtnaacanngcggcattgagcacggnatcttcaacagngggnttagctacggtgcgngttttg

SEQ ID NO: 2584 - DNA, 410 bp, Glycine max
  Clone ID: PAT_MRT3847_102339C.1
caaagaaaaagtaaacaaagcaagaaaaaggcgttgcagatcggagtttcaactgccagaatcgaagccgtggttggtggtggagcagatctgagtttccgatagaagctgtggtcggtgttggtgcagatctgagtttccactctcaatcctttcgtgccggtggcggtgcagatctgagggtcgcttatggcggatttggaagcgccgcgagtcttctccaccgccgacagaacgagatggcaaatcgtaatgcatgtctaacatggttcatttctgtgcgatttggttgctttttcccttctttttgaatgtgcacttggccaatcctaatgcatactattggcgaaagaaactatttgcctttaatttaattatcttaatgaatgggcgttgctgaatgcatctaa

SEQ ID NO: 2585 - DNA, 602 bp, Glycine max
  unsure (1)..(602): unsure at all n locations
  Clone ID: PAT_MRT3847_10233C.1
cacaggtggaaatctacgctgggttatcaagtatggatatttcgnngatgtaaaactatatcacagaaaatttgtaagtggcatcaatatttcatgcccttctgcttctcagactgctacattttctaaattcgcacaatatcagcccaaagtacaggttgcttcaaaaaatttaatttaatataatattacatcttcattctgaccgtgtacaaatcattagtcagaaatcacaagttggcttctgcaacacgagaagaatcttcaatttcaaaagttgagacttgtccacgagatgaagcatttcctaactgatcaattgtgtttggcttggtcttttctacattcttcatagctgtatttacatcattagcttgtaaacttggattttcatgttcttcacccctggatgctaccttgcattctgttaatttggtcttccactttataccaactttctttgcctgatcagcaaacagaccttctgataagggtgaaccacatatttcgttgtaagtatcacaattggcagcacatgtatttccaccttccaaaagttttgacagtggatgcaaaaccgagattgcaccatcacttctctc

SEQ ID NO: 2586 - DNA, 844 bp, Glycine max
  Clone ID: PAT_MRT3847_102340C.1
ctgaaactatcaagttctatgtatgttgaaagatcttgtgactctatggtagaggttaatattacatcttgcttttttgtatttatgaattatgattgaacccaatcaattcaagagaatggtacaatgtttttttacagaagagttcttattctggagctacactgtttctgttgttatttctttcaaaattctcataagcttgcttagtccttatgtaaaggaagaagcttgaacccaatcctaccattgaaatgcaactccaccatacgaaagtttgaaggtaacacttcctccccatgcacatggacattttgtgcagccaaattgtatgccttggtttccttgcattggaatcataaactaaggctgcaagaaggccgtagagacacgaacctaagggaatgttagtgatgaggatgttgtggttcacaccaacactgtttgggccaaaaagctctgaagtaatagatactgctgcagaaaacacaaagcctgaacttagccctatcaaggcagtgcctatgtgtaatgctgctccactgccagatatggccagcaaaatgaatgcaattggtgttggcaccaaggctgctgcaaaccatccagttcttgcaatgtgtatcctcgtggtcgttaaccacacatgttggcgaccatatcaccacacccactgtcaaccgccacaaccaccgaccatatcaccataccgcgaccaccaactaacttgctctcgagccacgttggcgaccataaaccgcaaccataaatgtttctctccaaccaaaatagagagaacatgaaaaaaacaaaaaaaaaaaaaaaaaactcgagactagttctc

SEQ ID NO: 2587 - DNA, 267 bp, Glycine max
  unsure (1)..(267): unsure at all n locations
  Clone ID: PAT_MRT3847_102341C.1
gccctttgcagagttcagagctctcgcgagcctcgtgttcaactcctcatcttgccacctgcttttgatacgcaagaaactgaggcagaaagcagggaagcaacacagctgggtagggcccagcagagtctcaccccaagtcgcaagatgctcacccacagtgctctgggcccctcccacttccacaactgcgaccttgtttttgaccttgaacttctgtctcctcctcccaaaatgctgnggaccaactgggctgcctttgacgag

SEQ ID NO: 2588 - DNA, 395 bp, Glycine max
  Clone ID: PAT_MRT3847_102342C.1
tgggaataaacaaccagtcgcttatggctgggcataaaaactggtgatcgcaactcaagaagcaccctgacctgtgcgcttgatacaattagctgggggacctctaccaaaccaagctcaaggacaatctaactctactactaacacataccacacttctctccgctttccatgcatggcacagctctaactcttcctgtcaaagacacaagctacacactgaaaacaagatcaaccgaagaaagcatcaacatatccctaggctatgtattattgggtgctcacatacatactctaacgacgtgaatctggcaataaatattcacaaactagaatacccttgactgcacagcaaactcaaccctatgttttacatactaatacagatagcacta

SEQ ID NO: 2589 - DNA, 726 bp, Glycine max
  Clone ID: PAT_MRT3847_102343C.1
caatgacactggcaaccttgtgcttcttgatggtgcctccagcagtacttgggagagttttgatgattatagagacaccttgctgccttctcagactatggaaaggggtcagaagctttcttctaaacttaggaggaatgacttcaacattggcaggtttgagctctttttccaaaatgatggtaatcttgtgatgcactctataaatttgccatctgagtatgttaatgctaactactatgcaagtggaaccattgagtccaacacatcaagtgctgggactcaattggtgtttgataggtcaggagatgtgtatattttgagagacaacaaagaaaagtataacttgtcagatgggggttctatttccaccactcaattttaccttagagcaactcttgattttgatggggtgttcacactctatcaacatccaaagggttcttctgggagtgtaggttggaccccagtgtggtctcatccagataatatatgtaaggattatctttctgctgcaagtagtggcgtttgtggatataatagcatttgcagtttgggagattataagaggccaatttgtaagtgtccaaaatggtactcactggttgatcctaatgatcctaatggtagctgcaaaccggattttgtacaatcatgttcagaagatgaacttagtcatatagatcctctctttgactaagttcatcttctgaacatgattgtaca

SEQ ID NO: 2590 - DNA, 373 bp, Glycine max
  Clone ID: PAT_MRT3847_102344C.1
cccacccgtccgggaataaacatataatattggggttccctcgattgacatgggcgagggtttgggccatttggcaatggcacctaaggacattattaaatgggtggaccccataagggccaaggggggaaccataacaggggaccctggtccagttaaggggggaactacggtaatcgccttggttaaggatcctgagggttttcctttgggactaatccaaagacctccagtccatgacccatttggtaaagtaaggcttcgggtgggggattaaaagcgctcaattaagtttaatgaaaaggctttggccttaaaggtggtaaggaaggttgataaccctgagtccaagtccactttagctttgctcggg

SEQ ID NO: 2591 - DNA, 195 bp, Glycine max
  Clone ID: PAT_MRT3847_102345C.1
gcgtacggatgggagagaaaacacgacagagggagagagagagctagcatacggtggtgctcattccaggcgaccaccgtgacggctgtacagcaggatccgagagctgctcaggacatagttttggcctgggattatcccagtgtattgtacgagctcagaagtccccactggaaaggtgctgatcacgtttac

SEQ ID NO: 2592 - DNA, 1281 bp, Glycine max
  Clone ID: PAT_MRT3847_102346C.1
acgagataattacttgtctgagggggcaaggttttgtactgttctcaaattgtcaatatgattttccttgtctaagcatcacgtgtatgtttttgcatgtaaggggaaattcaatcagatgtaaaaaatctgtagatgaaagaagaaaatctatttaactagaaaaattattacaaaaagggactgaaaatatcctccttaaaatacagcagcaaaatagccatcccatcccatagatagagataaaccctttttcgttgctttcattctatttgctacaatcgaaacccccaatttttataatacgggtgatgtacattctatgattcagagttttggttgaaggttcacttgtattgtttgccatcatggatcccaatgatgataggggtgaaagtagactctatattggtaaccttgatcttagaattacagaagctgctttgcttaaaatgttttctccctatggaaagataatttctgaggacttcttatggcacacgcgtggcccaaaacgtggggagccacgtggttttgcttttatccagtatagcacaaaagagtgagaatgcaggaagcagaattagccaaggagaaaatgcatgggaggttagcttgcagccggccattggtggttcgtcttgccggtgataagtgcatgttggaaacagttgatagctctacaaaagcagctggtgaagggcacaagatgcatctcactggtggtggtggtgccatgggacaaacaagtcgcagtgcaaaaattgccgctataaaaaacaaattgaaatccttagaggaggagagttctaggaccaagaagcagaagcaaagtgataatatttcttgagtcaattgtgcaagtatataatatgcagaatcaagggataattcaatggtgtatgaattgaaatgtggtgcaattgtttgtacccattcaattggaattcacttatttagataagcctttttttatatatatataatttaggccattagccagaattgtaactgccgaagcatactatccatctgaaattctccaaattgaatttaactgctgaatttctgttttactttgacatcatgtatgctttcgctccttaagttaagatgaaatgttaattttaaatgcaatggaatcagagcaattagtgagttcagaaattgtgagcgtgagatcgttttaaattgatgtttttattataaaaaaatggaatattttccttttttttgtgaagaacatgaaaataagaagaaatgatgttttttattttcttt

SEQ ID NO: 2593 - DNA, 587 bp, Glycine max
  Clone ID: PAT_MRT3847_102347C.1
aaaaccaagtatttaatgttttcattaaattgtttcaatacaatttcaaacaaatgccaactggaagacaatgtccaaaaactttgaagcttccaaacaagggggaagggggttgtccttcattccaaccacagtacttctgtccataatgatgcagtcaaccatccttttatccagattatcgagtatttaccacatcatcgattttcaaaatgctccgcacagtttcagttgctaaggtcaaagcactgactgacaccaacagaggctgaacaaccatttcctccaaaatgttggagatcccaccctttcggacattaatgcctgtagttttttctccttgggcatggcggtttcttaactctgttactgtagaaatgggattcaggccagcattttcagctagtgtagatggaatgacttccatagcatccgcgaaagcacgaacacagtaggactccataccactcaatgttcgggagtactttgtcagtctgagggccagctctatttctggagcaccacctcctgcaataagagctcttttctttactaagcatcggatgacacagagagcatcatgaatg

SEQ ID NO: 2594 - DNA, 486 bp, Glycine max
  Clone ID: PAT_MRT3847_102348C.1
gcgagaagacgacagaaagggtgctgaatgcacatagtgacatattctctccttttcttctcaatatattccagagctgctttgcttaaaatgttttctccctatggaaagataatttctgaggacttcttatggcacacgcgtggcccaaaacgtggggagccacgtggttttgcttttatccagtatagcacaaaagaggtaagttgattgcatacattagttacttcactttctagcaatttctgatttccattgttaaagtgagaatgcaggaagcagaattagccaaggagaaaatgcatgggaggttagcttgcagccggccattggtggttcgtcttgccggtgataagtgcatgttggaaacagttgatagctctacaaaagcagctggtgaagggcacaagatgcatctcactggtggtggtggtgccatgggacaaacaagtcgcagtgcataaattgccgctataaaaaacaaat

SEQ ID NO: 2595 - DNA, 314 bp, Glycine max
  unsure (1)..(314): unsure at all n locations
  Clone ID: PAT_MRT3847_102349C.1
atccnnncncactgtntgtgtncttttctcanntnaattaccctttcanctagacangggangagannnncttgtttcttttgtnncngattanggggagatnnttggtgncttgaccagctnttgcctatgtccaatgttgagagtggnntttacntntacactgtgtacttnnntccnncnttnngtntgatcgaantgattatttttgcnnngtntantgcttttcttcngactcnntccnnttcanttgtacatgttccatcttctacattggcttgcgggttgtncnggtgcgaactaggatctgtgca

SEQ ID NO: 2596 - DNA, 366 bp, Glycine max
  Clone ID: PAT_MRT3847_10234C.1
cgcgtatacgcccccaggcttgggaggcgtggacacaaggggtttctgaccagattgggcccaccttcacggtcggcgcagaaccgccacaaaggcccacacaaaaacgtgggccagactgaccccagtcaacctggaaaggattgccatctgaagctcaggggagaatggaccaggcctgggccatcccacctggcgaggggcggcaacccgcactgatagggccctggtgtaatacgctccgtcagcaaccagccaaagacaggcccaggtccgggtgctacaatgccaaggaggctctgtcttagtgtaggcactgggccataataatatatagacgatcttgccctaaggggaagaaggggc

SEQ ID NO: 2597 - DNA, 376 bp, Glycine max
  Clone ID: PAT_MRT3847_102350C.1
tacggttgtgataagactacatagcggggttctagtgtgtgattgaatgttgagggaactcgacacacttactttggtggactgggactggcgacgtttatactctaacaacaaaatgtcttgcttcgatggtaacatgtggaagatgaagctcctgcaaatgcagaaacaactgttgaggcttattgatgtacaaacacttgagctacactggctcaaccacacatcgagacctcaggaatgcaagactgacctgttaatacatcaatttgaagattctaaaatggattaacgatcttataactaaggctcgaaatgttgaccaaacagatgctgcaacatgtgcacttgatatatgaggtgttgggatgagcat

SEQ ID NO: 2598 - DNA, 108 bp, Glycine max
  Clone ID: PAT_MRT3847_102351C.1
ggctcgaggaaatgtgaccctagaacatgactgcccgttcgtgattaccatctttctttcctcagtctaaccataatctatgttcgcatccctctctgcatgtggctc

SEQ ID NO: 2599 - DNA, 341 bp, Glycine max
  Clone ID: PAT_MRT3847_102352C.1
tatttgcaatttttttttttttttttgttttttattaaacttgcgacccggggaattaattagaaattggggccaggttcccaacagggcacaaaaatagcggacaccagaaagatgaacacagggccaggaccaggaactaactgttacatgggaaaaaatgcaaacccggaatcacgccggacaagccaggagaaggtaccttaacggagagccgcccggggtgagctaatgagacatgaaacgcgaggtgaccccttacggcccgctggccggaaacaaaccgggcaagcggactgaatgaaaaaacaaagaaacccgcatagaaagggggaaggcgg

SEQ ID NO: 2600 - DNA, 1364 bp, Glycine max
  Clone ID: PAT_MRT3847_102353C.1
acctgggctcctccatgcccctcttcctcctcgcatctgatcttcgctgccactgcaacagggtaggttaaagttctctctttatccttcttattccaataccacaataaacctcttaacttttcactaacctacgcaactcctatcactatccgtgcaaataaatgcaatcaatgaccctttttctctctcttgaaattaccttcttcctctgtaagagctgatttgccaggatcactaatttaacagcaacaaatggccaccttcattttcaaatgcttctgagacattatttcatcaataaggaagatgcatgagttctccattgttgatggttttgtggagataagtgaatgcatggcagagatgaccaagtacgtggctaatgaaccatctgttgggcttttctttatccaacagcatgctcaaaatgcagtacccaatatcatcaaagttaagaaaaatgttgttgagaagtctcatgaaacaactttgcacacagaagatttggaggactctgtcacaatggttcaatcaatgaaagagtgtggatttcccatagctgataagatgatcagagagattaaaaaatctctgataactatggaaacaaaacaaccgaaaagagggttaatccatccagcatcaagttctcattcagaaagagctagtttcttgggtaacgctgcattttatgctcaggagggcaatgaaaaaaggagtaactatttctcaaatgttttgaagtcagcaaaagagaaggctggcagcttcaagtggcggcagcttgatactcggggatcaatagattccacggatgagaagccaccaatgtaccctaatttgccgttgttggtcacatctgcaagcattacttcatcttttcgggctgccgaaactgatgagttgcctgtatcaagccaggttgaagacgagtctcagcacaaacagaccgatgttagtgatatcagcattaatttattgtcagtatcagaaagattcgacgacttcaaagctaataaagaagctaaactagcggagtggctggacggaactggcaaccttgatgataattgcggcacaggtgatgagaaaaggtcttagtttggcatgataaagaagctatacttcaataaaatgcttcaccccgtacatgctgttgtacaacatcaagtttctctgaattgtgattataaataaaatgatttttttgtaatgctgtagagattttctttgaaatttaaacaagcatgattctgtacggggtttgatcatgcatgatattgcattccttctacctggaacttcaatatttatttcttatgtcaactgatggaaaggagattttcaagaatgttagaaaa

SEQ ID NO: 2601 - DNA, 356 bp, Glycine max
  Clone ID: PAT_MRT3847_102354C.1
tgacgagcgcataattgaccaggtgcgagaaggagagcctgcatgagatgaacaagaggtatattcaagcatgcctgggagctcgacaagctaagagctgaccacgaaccaagaactcccattgatattgttttgcgagcgtccgaaaccaccaaatgctactgcacaggcatatactcccatcaacataaggactttatcaagaacatgattactggcacccatcaacacgattgtgctgtccctatgatttactccaccactaatacgattgaaacttgttttgctaacgattgacaccacatcatgagcatgcgtcctcttgctttcacactacgcatgtgaaacaaaccatc

SEQ ID NO: 2602 - DNA, 460 bp, Glycine max
  Clone ID: PAT_MRT3847_102355C.1
tagagtttaagcagtgaataatgcaccctccttgatttgtaaggattatatgttatagactagagaataaattactatgtagagatcttaatctatctggttcagagaaagcagcgatttgactaaaaatcttgagaattgttgcttattctagaatctagatttagttgttagattttgtttttgtagctcctccgtgaatgatgagaaaataagagttttgatgtgataatcttaaacaggtgtgaagcattttcaacatacccccggacatacgatttacttcatgcatggactgtcttctctgacatagaaaataaaggttgcagtaaagaggatctattaatcgagatggatcgcatgcttcggcctactggtttcgcgatcatccgggataaacagtcagtgattgattttataaagaatcacctaagtgctttgcactgggaagcaattgatt

SEQ ID NO: 2603 - DNA, 253 bp, Glycine max
  Clone ID: PAT_MRT3847_102356C.1
tgcggaaattttcttgctctgtgggtctaaatatgtggggccttactttagtggttctaaattgaaaagctttctatattttgctttcaattccatggctgttggggttgtcataactggtgcaactttgccctttggtaaggttgcagattgtgattttctcaagagaaactttaagcagatgtctaatgttttgtgggtggctcctgaggacaaggcgagtttatggtcactacttgagtcaaagccatgt

SEQ ID NO: 2604 - DNA, 823 bp, Glycine max
  unsure (1)..(823): unsure at all n locations
  Clone ID: PAT_MRT3847_102357C.1
nggttgatgtgagggtgaggcatagagttactctggaaggaagtgtaaatgggccacgcgtccggtgctacttcccgagctgcaccatctttccctgtcgccagtgcaagctctctccaacgcaccttcttcaatcttctacctcaatctctcttctccgagtacgtgcttctcaaaccacccaaagagccataacaaggaaaagtcgaaggctgaaaagcgacgccgagatccgcaacgatatccgcgaattcctcaattcggttggcctcccggaggatcacattccctccaccaaagagcttctgctccacggatggaatgacttggcaaacattgtcagaaggagagggcataaacaaattcaggagcttcgaacaagaagctcattgaatgatgatgctgattttttgagtgctgaaactagcttagatgagggattggatgctgcaaatggttttgaagatcctttaacaggccagagtgagaaagtggacagtttggttgatgatattgaagctttgacagagattcttctaggaagtagttctggtagtttgtatgttgactctagttcaagtttaggtgaaggtactaacattgctgaagaagcctcaactaatattgtagaggatggtcttagtgaagttgaagatcatgctgaagtggtcaacgatgtgacggaggggaatttctacccaactgaattgactagtgtggataatgattatgatagttccatcatgcgtacagaaatttctggtgaattaccgtttgagcagtgtcttctggaaaatctgagtttgaggatagtctagtaggc

SEQ ID NO: 2605 - DNA, 277 bp, Glycine max
  Clone ID: PAT_MRT3847_102358C.1
atcaaaatgcacataaggtgcggtttccttcaacaaaccacatgcaccaccgcctgggtttatagaattcgaggggcggacaaaacactgtctatccctcaagcacaccacgcgcttagtactaccctgctacaagtccagaagactgtttcacatttgccccaccaaatggcttgtgtatatgttattgcaccatgaaaacaaccatggggctacactggtgtctaaaaaggctcaattttcaaacaatggggtgggtgtaacaccccgcaaagaa

SEQ ID NO: 2606 - DNA, 302 bp, Glycine max
  Clone ID: PAT_MRT3847_102359C.1
gagatcacaagccacacctccgatgttatgctcaagataaaaaatgggagcatgtcagatggatagcatgctcattgctatccctgagtggcacggtcatatatatctcggaccatgactcccatacacggaccaggggagcctgaggaatacccataaccaacaggtgtctgaggaacaccatgggtccaaccggaccatatggagccctggaatccattgtatggctagctgccggtgtacctaaccggagaattccccagcgactacgggtgggacactgctgggcttttcgcagaccc

SEQ ID NO: 2607 - DNA, 1988 bp, Glycine max
  Clone ID: PAT_MRT3847_10235C.1
ggagagaatttagatttcattttcacagaacacatatttgaaaaggaacaatatgctttaagtgtttagtcctagacatgtgattagtaacccaaaggatatcttgatgagagagagagagagatgcctatttgtgtgagagagaaaatggctacaaactttcactaacacatttgctattacattggttaccacaatctctattctaacaccacaacatcatttttattttattttttataacattgttatgagaagaaagaaaaattcattgcaatccagtgtgacaaacataagctcacacaagacccattttattcctacagcaatcttattagagagaaaccctttgtgcaagggcactgctcagagagaataaagatggtgtggaagcctaggctcaacaacagtttccagtggtattttcttaggtgtagagagcccaaaaatctcatccatattcaaatcctcattcttgacattatcaggcagtctccagttaaatccatgcaacaaattggccaaacttgcttgaatgaccttaaggccaagagggtagccagggcacatccttctcccagcaccaaatggcaatagctcatagtcatgtcctttaacatcaatctccttagtaagaaacctctctggttggaactctgtagggttgtcccaaattgaagggtctctcccaatagtccacacattcacaagcacttgtgtccctttgggggatgtcataccctccaacttggcaatcctctctggctagtcttggcaccaacattggtgccacagggtgcagcctcattgcttcctttgcaatggcattcacataaggcaaatttacaatgtccttctcttcaacccatctttctctacctattaccctgtctagctcctctgttgccttcttgaaaatctctggccttctcaatagctctgtgattgcccattccacggttactgctgaactctcagtcccacctgctattagatcctgtgtaaaagccttgactccatgcctctcaagcttgacctcaagagtaggatcctcggcaagttgcaaaagaacatcaaccatgtccttcgccacgtaatcctcaacccctttcttcctctcaatatgttcatccaagacgtgctccatgaacatatcaaacttcttgctcaaagccttcatcctctttatgtaaccctgcaggtccaagaaatccatccaaggaataaagtccccgatgttatacaccccattaagcaaaaacaactcatcaagcatcttcttgaaatcatcgggcgaaacgacggcgttttcggattcctcaaggtacttttttcccaacaccatgcggcttataacgttgaggctaaggttggaaaggtggtcttttagtaaaattgttttgtttgcggaattgaagagttcgttaagaaggccacgaagctcttgttttctaatgtattcgtattcttctaagcgtttagcactgaataattccatcaggcacattctacgggcctggcgccagtatgggccgtactgggaccaagtgatgtccgagtagttgtaggttgtgtatttgcccgccgcgaatttgggcctgccggcgagggtggcatcgtgggttttgaggatggccttcgccatgtccacggatgagcccaccacgacggggttcgacccgaaccacacgtgcatgatgggcccgtatgttttactcagcgcgtgaatcgactggtgtgggagggagccgattaagtttaggttgcctatgatgggccagggcttggggcctggggggagattgtatttacggcggcggagaccgcggaggaggaagaggaggagggcggccaaggctgccaaacatgcggctgcggttggaacccaattgggagatgccaattctattgccatcttcgagattggcaagtttgaagtgaagaagaaagcaaggcttctcgagccgctcgagccgattcggctcgag

SEQ ID NO: 2608 - DNA, 109 bp, Glycine max
  Clone ID: PAT_MRT3847_102360C.1
agcgttcgtgtttccggacgcagacgcaggtgcagggacgctgggtctgcttgcgagagtactccttcttcaaaccctagggatggatgagaagaaacgcaacatgtat

SEQ ID NO: 2609 - DNA, 251 bp, Glycine max
  unsure (1)..(251): unsure at all n locations
  Clone ID: PAT_MRT3847_102361C.1
cggctcgagttcagttctctatgtactataaagtcatgacatctgcatataganatagtttcacttcttcctttccaatctgggtacttttccccccaccgatgtcagttgccctggctgaaaccgacaatgcantgtcaaataggagaggacaatgatgtccattgtcctctcctatctgacattgcattggtggttccagcatgacaactaaacacggtgggacagatggacatcattgtcttgtttct

SEQ ID NO: 2610 - DNA, 1368 bp, Glycine max
  Clone ID: PAT_MRT3847_102362C.1
tcgcgtgggagtgtgcgtgaaacgtgattgccagtagtagtgaaaaaggcacactcacacaaacgtcctcttccatattctctcttctctcttctcaaaaatctcatgccataagtttggtactactaaccttttagctgcttttgcttacaagctcctacattctctctccaggttgggaattagtgcctttggtgatcatcatgttccttcttagaaggcaaacccagaataaccaggagaatgattcctcatatcaagatacaaaggtggctgaactcaagacaggtcttgggcccctctctggtcgtcgattaaagtattgcacagatgcatgtctaaggagatatttagaagcaagaaactggaatgttgataaagctaagaaaatgctggaggaaacactcaagtggagggcaacttataagccagaggaaatccgttgggctgaaatagcacatgagggtgaaacaggcaaagtctccagagctaactttcatgatcgacttgggaggactgtgcttattatgaggccagggatgcagaacacaacatcggctgaagataatatcaggcatttagtctatctgttggaaaatgctatcctaaatctttctgaaggtcaagaacaaatgtcatggttgatagacttcacaggattatcacttagtacaaatatgtctgttaaaacatctcgtgatattattcacattttacaaaaccactatccagaaaggcttgctattgcttttatgtacaatccaccaagaatattccaggctttctggaaggccatcagattcttcctggatcccaagacagtccagaaggtgaagtttgtttatcctaacaataaggacagtgtggagctgataaaatcactcttccccacggaaaaccttccaagtgaatttggggggaaaacaagtctaaactatgaccatgaagagttctcgcgattgatgaccgaggatgatgtgaaaactgccaagttctggggacttgatgagaagcccttcaaccctcctaagaaggggcattcgggagcagaggtggcaccggaaccagtgcctgttgaggcagtagttagttagttgagcaagttttcatattgtagtcacttataaactgaagtgactacataaccgaatcatgaaggaacaaacaatgtagtagtggctaatttaaggagccgaataagtggcatttggtatctttcaacttttaaccatgtagtcgaagcatcttgatttaatcgctgctacagtcctttccttttaggtgagcggactttaattctgatttgatgttcagactatacatgtttgtcaattcccctagactgtgcataatgaagtttcttgtgcc

SEQ ID NO: 2611 - DNA, 326 bp, Glycine max
  Clone ID: PAT_MRT3847_102363C.1
ctctagctttgaaagaccagattcataatttagttgtaaccaatagcttatcttgtttcattccgcaggggactggtgtcaaggttcagtcattgaatggagaatcaaagttgttaaattctagtaaatatgtgaagtgcttggctcatgttcatgggaaattatactgtggatgccatgacagtagtgttcaggagatacatttggccactggaacagtcaacactattcaaagtggttataaaagattacttgggaaagcaaatcctattcatgcactgcaaattcatggtgaacttatatatgcagctggctcttccttggat

SEQ ID NO: 2612 - DNA, 118 bp, Glycine max
  Clone ID: PAT_MRT3847_102364C.1
acgtgtcatgcaaaggacttggggaaaatgggctgctgaaattcgggagccaaacataggctatatgctttggctaggtactttccccactgtcattggagctgcccttgcatatgat

SEQ ID NO: 2613 - DNA, 458 bp, Glycine max
  Clone ID: PAT_MRT3847_102365C.1
agctgaatccgagtccaaaaatggaaccaatctctgagccaaagtctaagtctattaccgagacggacctgacttctggtagggaacaaactaccactgagctccgctaggatacatactcatgctaccgaacctagggctacatgttggaagatgaccgaagagacaagacgtggggccttgacctgccttgctgagataccactgcggctatctccaactactatattcttccattgatggtatcagagcctttccttcacctgtataggacttactgaggttaccgagactcattctatctatagaggtttattcggacccaactcacaacttataatcagtctgactgataaaactcagattatatatcatgactgtgcaggctgcaggcattcgatatcaatcttatctataccgtcaacctaggagggcgtccctggtcccaattactccta

SEQ ID NO: 2614 - DNA, 242 bp, Glycine max
  Clone ID: PAT_MRT3847_102366C.1
ctccctcatcagacgctccctctccctccccttccgcaccatcgaattcacacgcaagtacccctccgtcttcgaggagttcctccccgttgcctcctctttcgcctccccccatgtccgcctcacccccgaaaccctcctcctcgactccgaggagcacctccttcacctctccgaccgcttcaaacaccatgccgccgacaggttcctcaagctcctcatgatcgccagaatcacaaaat

SEQ ID NO: 2615 - DNA, 943 bp, Glycine max
  unsure (1)..(943): unsure at all n locations
  Clone ID: PAT_MRT3847_102367C.1
ctctctctcccttcacaaatggctaacaatcccttttctcattctcttcttattcttctttttttcttttattcttcactctcatgtcatcttcttccattccctcctcccctgatcacttcccccacctcggcctcggctactccatcgccatagccctagccttcctcttcctcctctccaccctcctcctctcctcctacctctgctgccgccacaaccgccgtcgcctccgccacaccaccgccgccgccacctccgacgggggcatcgtcctgccacgtgtcatcttcgtggcggaggacgaggacgaggatggcagcgtggcggtggggttcgaccagagcgtgataaactcgtatccgaggttccagtacgacagggacaacgcacggaacaataatattattaacaccacgtgctcgatatgtttgtgcgagtacaaggattcggagatgctgaggatgatgccggagtgtcgccattacttccacctatgttgtctcgattcgtggctgaagctcaatggctcttgccccgtttgcagaaactcgccgcttccgacgccgctttctacgccgctgcaggaggtggtgccgctctctcagtatgctgctgataggagaagaaataggtgaatctttttttacaaaaaaaataactttttgggttaattggtgatgtgggttttgctttttttgttgttggggtatttaaagtttttaactttcttagttttagaggttgggtaggtgtagggggagggggggaaaatagagggtttttatctttttcttttttgtttcgatttagctttgatcatgtgagggaaatgggaaaaaattattagagctagttggttgattatgtaattcttccatagggctattttgtttcgttttcccccctcttttaaatagattaattcaagtnntgnngtaga

SEQ ID NO: 2616 - DNA, 391 bp, Glycine max
  Clone ID: PAT_MRT3847_102368C.1
ggccacacccctgtgaagctcatgtattgcgttgccaaaaattgaacctttggatctctcactgatatacttgcatgattaggaaattagcaaaattgattaatctttggatttttccaaccacgaggaggtgacgggaaaaaggggaaaaacactacgcgttgagtagactcttctgttggatctgtttaaggtgtctgaggaaaatatagggctagaccttcctaacaacggaaaaagtcagcgatgcgttatgtaggcgagtagctgatatacttagggatttccttaaaggtcttttatggaggaacaagtacacttgtgaacatatatacatgtggtagagctccgatatatactgtgagaccttgatgatatataaggatgaatg

SEQ ID NO: 2617 - DNA, 390 bp, Glycine max
  Clone ID: PAT_MRT3847_102369C.1
ggctcgaggaagagagacgagcagtcaaaaaccatcacaaggggcaaccacacgacagcggacacggacaaagtctcaggccacaacagggacgccgaacacgaggacgagcagcgccaaagaggcgaacacctaggggagcagcctggcgaccacaatgctgcagccactggacagcatcaagctgatgagcacactcctcagcaccaaggaggctaagagcacaaagacgggtcgcgagacaagagcacacggcacgacccaccagcgaggagagcgacggcaacgggaacagcgagaagcagaagaagaaaaggatgaacgcacaggacatggcacaactcaggaaatggaagacagctagcatcacatgcaccactgacgggacac

SEQ ID NO: 2618 - DNA, 2081 bp, Glycine max
  Clone ID: PAT_MRT3847_10236C.1
gttctttcctcacttcaaacttgacaaaaatggcaacagaattggcatcatctcccaattgggttccaagcgcagccacatgtttggcagcctttgccgccctccttctcctcttcctccgcggtctccgccgccgccgatacaacctccccccaggcccaaagccctggcccatcataggcaacctaaacttaattgggtcccttccacatcggtcgatccacacgcttggcaaaaaatacgggcccatcatgcacgtatggttcgggtcgagctccgtggtggtgggctcgtccgttgaaattgccaaggccgtcctcaaaacccacgacgccaccctcgccggcaggccgaagttcgcggcgggcaaatacacaacctacaactactcggacatcacttggtcccagtacggcccatactggcgccaggcccgtagaatgtgcctaatggaattattcagcgctaaacgcctccaagaatacgaatacattagaaaacaagagcttcgttgccttcttaacgaactcttcaattccgccaacaaaacagttttactaaaagaccacctttccagccttagcctcaacgttatcagccgcatggtgttgggaaaaaagtaccttgaagaatcccaaaacgctgtcgtttcgcctgatgagttcaagaagatgcttgatgagttgtttttgcttaatggggtgtataacattggggactttattccttggattgatttcttggacttgcagggttacataaagaggatgaagactttgagcaagaagtttgatatgttcatggagcacgtcctggatgaacatattgagaggaagaaagggattaaggattacgtggcaaaggacatggttgatgttcttttgcaacttgccgaggatcctactcttgaggtcaagctcgagaggcatggagttaaggcttttacacaggacctaatagcaggtgggactgagagttcagctgtaacagtggaatgggcaatctcagagctattgagaaggccagagattttcaagaaggcaacagaggagctagacagggtgataggtagagagagatgggttgaagagaaggacattgtgaatttgccttatgttaatgccattgtcaaggaagcaatgaggctgcacccagtggcaccaatgttggttccaagactagccagagaggactgcaatcttggagggtatgacatccccaaagggacacaagtgcttgtgaatgtgtggactattgggagagacccttcaatttgggacaaccctaatgagttccaaccagagaggtttcttaataaggagattgatgtgaaggggcatgactatgagctattgccatttggtgctgggagaaggatgtgccctgggtaccctcttggccttaaggtcattcaagcaagtttggccaatttgttgcatggatttaactggagattgcctgataatgtgaggaaggaggatttgaatatggatgagatttttgggctctctacacctaagaaactaccactggaaactgttgtggagcctaggcttccataccatctttattctctctgagcagtgcctttgcacaaagcgtttctctctaataagattgttgtagggataatgggtcttgagtgagtttatgtttgtcacactggattgcaataaatttttctctcttttcataacaatgttagaaagagagaaaaaaaaaaaagatgttgtggtgatagggactcgtggtaaccaatgcatggcaaatgtgcaagcgaaagtattttaatgtgaccattttctctctggcagaaacatgcttttctcttcttttcctttttggttaattactacaacttttgggtatcaagatatactttgggccactaatcttatgtctaggactaaacacttgagctcattcttcctgttcaaatatgtgttctctgaaaatgagatctaaattcaccccacaagatgtgttgtcaccttgagccataataggcttttctctctcgttgatattgacgcggttaaatttttaacttggtcgtgaattaaagaaagttgaattagcac

SEQ ID NO: 2619 - DNA, 339 bp, Glycine max
  Clone ID: PAT_MRT3847_102370C.1
cgacacctggactccctctatagcacataactatcagagccatatcggtgcgcttgtgaaagattctctggcacactatgtatattctatgaagtgacaagaacaatacttagatgcttctatcggatgtggtgcattgcacctaatgagggcaccctcgccacctgggtgacgctgatccactgatctaccgaacacttgaaacaaaggatgaccactatggaccagaattgaacataatggctccaacctcctgcacacatttgatgtgagtcgcttggaatgagcgatataatgtgacacatgcaacgactaggaactcacctaactccctaatac

SEQ ID NO: 2620 - DNA, 429 bp, Glycine max
  Clone ID: PAT_MRT3847_102371C.1
ggctcgaggtggaggcgacgaaaaaagcggtgtgcgtgtccctgctctatccgacagtgtcgctgtttatatctgcggaaacctccattcagtggtcaacccacgatctcagagaacacattattcattttttaaatcgatcgacacgagatggaatggggtgttcctgcaggaggcacgctgacaccgaggccagtacggccgagcgctggcgatgcacggtcatgatagcttggcgcgattcccaattactgacgataacggatgaacttctctagttagacagatctgcgcgaactctaggcttggcgcataatcgaatagaggaccttccggtggaagtgagcacggcagtaaatgtccagggcctgaacatgaccgacaacgtcattgatagactgtcagtgggtaaagggaaactacaatctc

SEQ ID NO: 2621 - DNA, 566 bp, Glycine max
  Clone ID: PAT_MRT3847_102372C.1
acccccccgctcgaccatctcctattacgcggccgcccttttttttggttccagggccaacatggggttaccatatcatggaataatcactgggatttccaggacaaactgacaatccaacataaattactaatcctataaaacaaagcttaagtatcaccaattccataccacaagaaactctaaagggtggagtcggagcaaacatcgcgtagcagttcccaaaacgcaaactaatttcgtctactacgacagatgacaaattctgatcaaaggacctgaccaacatttgaacgcagctcctgaacttgaacgttgtaaaacttcgggatggcaaacagaattttctcgggatacttagggacaaagttgatcacaacacccttccttccgaacctgccactacaaccaattccatggagatactgctcaagctgagctgggagatcaaaattcatgactagagacacttgttggacatgaatatcctcgagccaaaaggacagtggttatcatgacacgggaagacccagaacggaatccacgcataatcttgcccctggtat

SEQ ID NO: 2622 - DNA, 1012 bp, Glycine max
  Clone ID: PAT_MRT3847_102373C.1
tacggctgcgagaagacgacagaaggggagacatatctctaattaacactaataacagcaaactaaaggtgaagtttgccagaaacaagatgggaaggaaccattttcagcagcaacactgtgctgatgggagcatgtggatggagagtcagggtcagcaacagagctatgccttccaagaagagtcttggagccctgataacaactatggccacaaccacaagcaattcccaggcatgcacatgaacatgaacaacaacaacaacaacaaaaggcttggtgcttttgctgctgtggactctgacttctcaatgcaaaaacatcatcatgggcatggcaacggcgtaggagccatgcacatgaacatgaacaggcatggtggcaagttaggaggcatgtttcaagaaggcatgcacagtgaccaccatggtggcagaaagttcccttttggtggtcatcatcatggtaataataacgcctctcaacatcattttccaaaccatggtgggcaccatgagtatttttcggaggaatccgaggagtacgaggagtcttatgcagaggagcatgttggtggagtcacggctaaggtggatgaaatgagatatgagcgtcataactggggtggtggggatactcgctatgccaatccctatggcatgaacatgaatcacaaaccccacaaatttcagtggacagcaaagggggtctaaatctataatgaacccacctacacctattaatttcctctgcacttgcttcttcctatcaaatatctatcaataaaacagtaataaaattatgtgtgctttgttgttttgttttcttcttggaataattaagaccactccaattgtatttggacctttctgatggtgcttgatgctactacttgtaatatcttctttaacttatttaagttataatataaagttgtctttgattatgatgaataaagaattgaagatattaattaagcgtttgcttactcaattttaatttgtgagactta

SEQ ID NO: 2623 - DNA, 645 bp, Glycine max
  Clone ID: PAT_MRT3847_102374C.1
gatcaggagatataatgatacatcatatctcgttgttttattacacctagcttcttcgccttgggtttggtacagaactgccgatgatgacattgaagaatcagtaccatttgatttgctggatgatgatgatccttggatcagaaccactgattttactcctagtggggcaattggtcgatgcaatttttatagaatttcaatcccacctcgccatggtgcgaaattgatgaaggccatgctttatctaaaaggtcaaagagtgcaaatacaagaacttccactcaaacagacacttaggacacagaatgaacctgattttggcatgccaatgtcagatgctttcttctatgtacattttcagaaggacattgcttttgacataatgtttttggtcaatgctattgtacataaaggcatattcaatcagcacaggttgtcggataggttttttgaattgctgagaaatcaacctaaggagcttaatgtggctgccctgaagcatttatgttcgtacaagcgcccagtatttgatgcaactaagaggctaaaaatagtccaagaatggttgctcagaaatccaaaactgtatcagatctctaaacagttggatgatattgttgaggttagaagattggttgttac

SEQ ID NO: 2624 - DNA, 844 bp, Glycine max
  unsure (1)..(844): unsure at all n locations
  Clone ID: PAT_MRT3847_102375C.1
gttcccgttctcgacccacgcgtccggcaaaaccgaggcacatcaggctcgagagcttgatttttgtttctttctcttcttcgaaatcgcatcacattcgcttatttgattgtcatcatcgtcttgtagtgaagaatggatgtaagcaccgcatatgatggttagggaagtctgcaacatgcactcagtcaatggaaagtgcaatcaaagggaagtggtgtatttacattggcaaagatatatcaatttataagagaatgatatatccaaacccaagagcaaccatttcctaatggccaatttgatctagtgtagtccatggagattggagagcatatgcctgacgaagctaagggttttctcccaccatcaggtctataacatgctcttcagattgtgattacaggacttagagcagccttcacgaggtgggtgttgcagtggtcctggcacttggcgtaacatgcattctggtatggcaattattatttcttgatgttgttttcttggatgtatatcaagtatgaacttatgatctccatgagatattaatctttcttttgatgatattaagtctaaataggattattttcaataggaatgggagcaattcctatctgaggtacttacctcccctcctttctcttctttcaagttttaatttcactatgatgctgttttcttggatgtgtatcaaattttgtctatagctagaagtcaattttcttgtagtgacttcagaacaatttgatttcttttgcaccagcggaatcaaatctgaaccatacttgtatagttngtgaatagctccagtggtcctcttaatctttcgaccaagactact

SEQ ID NO: 2625 - DNA, 871 bp, Glycine max
  Clone ID: PAT_MRT3847_102376C.1
ggtaatttgaaaaaaaaaattatagtaaatggaagtgtaatttactcaaatggaaaatgtgtttggcgccactagccactgcgtccgcttgtgagcggtgaatgcaaatttcagttctcaactacgcactgaacgaagaaagtgcgtattatcaccgtgacctaacaatggcggagacgaaccatcatatggacatcgacagcgacgaccacacttacaccgcgaggcccgacaaagctaaaagtgtcgtcgtcgccagcaaccctcccgccgccggcaaggccattccgtgggtcgaaaaatatcgccctctgtccctcgacgacgtcgccgctcatcgtgacattgtcgataccattgatcggctgaccactgagaacagattgccccatcttctgttgtatggccctcctggcacgggcaaaacatcaacgattctcgctgtggcacgcaaactatatggttcacagtaccaaaatatgattttggagctcaatgcatcagatgatgaattgatgtcgtgcgacagcagattcaagattttgctagcactcagagcttatcatttggtgtcaagtcctctgtaaaattggtattgttggatgaagcagatgccatgacaaaggatgcccaatttgcattacgtagagtgattgagaaatatacaaaaagcactaggtttgcacttatctgtaatcatgtaaacaagattattcccgcacttcaatcaagatgcactcggtttcggtttgcccctcttgatgctgtccatgtcactgaaagactgaaacatgttattaaagctgaagggcttgatgttgatggacaggggctaaccagcttttgttcggcttagcaatggtgatatgag

SEQ ID NO: 2626 - DNA, 411 bp, Glycine max
  Clone ID: PAT_MRT3847_102377C.1
tttttttctttttttttttttttctttttttttttttttttttttttttattgtcaaactgggattgttccacccactttctccaccaagcagagcgcccccgtaccaagacgcaaaatgatatccgccccccccacaaggggggaaaaaaaaatacgccgagggggacaagaaacagaaaagacggggggagcaacccccccccactaaaaaagggaaagtgggcaccaaaaaaaaaaaacgggggctgaacacaagaacccctcccatgaaggacaagtttggtggggggggggcaacatttttcaatacaaaaaaaacctagagcccgccaaaaagaggcagtacgcctggcaggaaaaaaaaaaaaaaaaagggggcggaaaaacgcacacccacccctccgtccgg

SEQ ID NO: 2627 - DNA, 920 bp, Glycine max
  Clone ID: PAT_MRT3847_102378C.1
ccacgcgtccgcttttcgttttctttttttttttctccccactttttttttttttttgtattttgcacaaatctcaagtgggttttcttctaaatgttgattatgtttctggggtttctgcatttcagggctggtgaaagcttctaaaggttttgttttcccgtcaggtggttcaaaaccctcatatttaagaaaaaggaaagttcactgtgaaagaaagtttgcacttttttttggtgaaaagaacaagcagcaaaagttgttaatgctgtggtagagtgttgataacaattttttggctcttggagaagaacactgttgagtggagtgtaaacactaacacttcacttcagcagagaagagaagagaacaacagtgtacactgtacagtgatggaatttctatgcttgttgttgtatatactggtagcttggtgtctttcaagttctgaacttgttggtgctgagcttcaggaccaagatatattacatgccatcaaccaagagctgagagtccctggatggggtgatggcaacaactcagattactgcaattggcaaggtgtcagctgtggtaacaactcaatggtggagggcttggatctgtctcaccggaatcttcgaggtaacgtaactctaatgtctgagctcaaagctttgaagcggcttgatctttcgaataataactttgatggatcgattcctactgcttttggaaatttatctgatcttgaagttctagatttgacttcaaataagttccagggttcaattccacctcagttgggtggtctcacaaacctcaaatcattgaacctttccaataatgtgcttgtgggagagattccaattgaacttcagggcttagagaaattgcaggattttcaaatttctagtaatcatttgagtggtcttgtacct

SEQ ID NO: 2628 - DNA, 290 bp, Glycine max
  Clone ID: PAT_MRT3847_102379C.1
actcgtttttttggatgcatctacatatattgtatgatatacttaggtaacgcattgcacgagcttttcaaatatcattttgacattgcagtgtgctacctggaattgtgcaacctcattacatcaataatgcatgcacggtaactgctactactaacaacccagaaacgtcggcaggggctaaaaggtacaaacatctggtatacttgcggagcaaaaaaagaagggggctaaagacagatgcttctgtgtactctcctcagccaggatgatgcagttagtacactata

SEQ ID NO: 2629 - DNA, 419 bp, Glycine max
  Clone ID: PAT_MRT3847_10237C.1
ctgtgaagcaactgtataattaacaaaagccatttcggtagcaaccggagaaaatgaagagcactagcttgttcgctatacatctactttgcaccttcatctgatacctaccttgcgacaccgcccaagacctgctcgacgaggatggctatccgatttgcaacgatctcatatactacgctctgtcagaaactagacgaaacagttgtggaatagaacgagtcaaactatgcaaagacaattgccctatcactgtattgcaaccttccaatccaaactctaatgggttagaaatcaacaccgaattttcatacccaacctattacatcaacgaaaccctaattatgtaaataaagtctaattacccacagcactctgaaagaaagaatccttgttggaccatttctaaagatatatct

SEQ ID NO: 2630 - DNA, 306 bp, Glycine max
  unsure (1)..(306): unsure at all n locations
  Clone ID: PAT_MRT3847_102380C.1
tgcaggccgagagaattggttatatagnnctggttttcgcgcgcaatatcttatttcacgtnnagagcgttatgagtgtgncgatggcgcccgtaggtanngagcatctctttnatgggcnttatgggtgnnngccccnnatttcngnnccttacncnatactcccaggtngtaaaccttcctgaatacctatggcctttagatcgttnntgtaccagaccagnnacttttagaggtgtctaagtatccccaaagtcgagaagggaaacccagtcccagatcgtaccgctataggtccctaagcaa

SEQ ID NO: 2631 - DNA, 1473 bp, Glycine max
  Clone ID: PAT_MRT3847_102381C.1
gccgcacctcggccactagacgtgatgaaatcactcttcaaaggactccggcaacacaatggttctccctgccattcataaactataacataaagcacactggggtggttaaaactttatgaatgttttcatgattcaattgtaattgcaatgtcatggttctaaatttgctgattgcacttgtgtcatttatgctctagttttaatctttgttctgtcgttttgttttaacattgttaaagcagtatttatgcgcagatgacgacaacatagacagggacatcagcactccaaaggagaatggtgactacgtctaatgggaatctctctgatgcgctcatcaaatttcttttttatttggaaatctatttttgaaacaaaaactgttatgttttctatttagagcttatatatatggttctcatagtaactactgcattcactaatcctcgttatatgcaagtgacgataaattagacagggacatcagcacttttgtgtaaagaatgatgatttgtctttgggaatctctccgatgcataatgaatatataaatgacttgttaagaaagtgtccactatgtttaatgtactggttgaaagagaaatctcaatcccttatatttgatctggttcagatttctcttataattgaaaccaccgtgttctgatgaccctgatgtcgaataaaggaataagatttctctccttgtgttttgtctggtaatgtgtgcttgactgtttgtgttgatgttcaatcgtagtttgacaagcctggcagaatacaatcaaatgcctttttttttttaatctgtttgattgtttgtgtcgatctttcgtgtgcaaatgtaaactccttgtgtcttacaaagattatttattctattgtgaagacttggccaatgatgtattcaaatgcacgtattatcagatttgttcgtgatgatacctttaattgtcactacctctgaggccatgtcttaccctgaatgtatagtctatgttatatgagtcttgtgtcatatgttctaattatcgtttttgttcaaggattgctgtaaagctgcttttatatccttaatttttctttatagtggtatagtgggtttatttgagtaattttgttcttcttttacagggttctatattgtgtattgaatctgacaaactagcttctttgtatcattgccattgttttgtaagtcatgtgtgagcttggcaatgctagtatcttacaagcctgatgattgtcaccgagaacggagatttgaagattcttttgttgaagccttaccaactatgggctccaaaagcatctcatgtaataaatcgttctatattggtattaattaattaatgaaggcttgtactttgagtccgtgatagcaaacgcatgtatgcctggtaaagaacaacactgctagacaatggtgtattgtctgttatttggaatgaaatttgagattgaaaacca

SEQ ID NO: 2632 - DNA, 302 bp, Glycine max
  unsure (1)..(302): unsure at all n locations
  Clone ID: PAT_MRT3847_102382C.1
ggaatcnccccggaccagcaacgtctcattttcgccggaaagcaacttgaggncggncgnaccntgctnatancaaatttcaganggagagtactcttcacttcgtcctccgtctccgtggtggcatgcagatcttngttaaganctcaccggcaanaccntaactctagaggttgaanagctccgaactcatcgataaagttnaagggncaanatccggnacanggnnggtatcccccgggaccaggcaangtctcattttcgncgggaaagcngttcgnggacggccgnnaccttcgcgg

SEQ ID NO: 2633 - DNA, 886 bp, Glycine max
  Clone ID: PAT_MRT3847_102383C.1
ggcccgcttcgaggggccggccgggccggggactcaaatggcacaaagcatttagcaaagccgaaaagcagctcagagtggagaccctctgaaaccttgtaatcaagcttgagacttgaggagaatggataccttcctgttcacttctgagtcggtgaacgagggtcatcccgacaagctgtgtgatcagatatctgatgcagtgctcgatgcctgcctggagcaagaccctgaaagcaaggttgcctgtgagacatgcaccaagaccaacttggtcatggtatttggagagatcaccacaaaagccaatatagactatgagaagattgtgcgcgatacgtgccgttctataggatttgtgtctggtgatgttggccttgatgctgacaagtgcaaggtattggtgtaccttgagcagcaaagtcctgacatagcacaaggagtccatggccacctcaccaagcgaccagaagacataggagctggcgatcagggtcacatgtttggctacgccacagatgaaacacctgagcttatgcctctcagccatgtccttgcaaccaagcttggcatgcagctcactgaagtgcgcaagaatgagatctgtccttggttaagacctgatggaaaaactcaagtcactgttgagtatgctaatgatcatggtgcaatggtcccggtgcgcgtccatactgttctcatatccactcaacatgatgaaaccgttaccaatgatgagatagcagcagacctgaaagagcatgttatcaagcctgttattcctgagaagtacttggatgaggagacaattttccatctcaccccatctggcgtttttgtgattggtggtcctcatggcgatgctggtctccgggtcgcaaatcat

SEQ ID NO: 2634 - DNA, 430 bp, Glycine max
  unsure (1)..(430): unsure at all n locations
  Clone ID: PAT_MRT3847_102384C.1
gaaatgttgaagggtaagttttcatatactatggatatggaacttttcaaaataccatgtctagtcatcctttaagctttggaaaattatttactattttaaaattggatatgctaatgagaaaataagggttggttttcaggtgccttaaaagtttacaggaaataaaacaggagtgttccttggtgaaaagcaagtttgaaactctcttcaaggtaaggggatgaaggtctagtacgtcttaatcaacttattagtatataacaaaggtcggcccaacagtgtgtcctaaagcaaattatatctaaaatattttttaatttgttgaatgtaaaaagtttttactctaacaaaatatgaaaattaaactctaacaagaaactttttatgtcnnaaaaaaaaaaaaaaaaaaaaaaaaaaaaaaaaaaaa

SEQ ID NO: 2635 - DNA, 264 bp, Glycine max
  Clone ID: PAT_MRT3847_102385C.1
actgcagatcacaaacactgctagatggggaactactctacgccacttctacacactatacgtctctgagaaaccctactaccctgccgcgcttgcggctgacaatatatccctgtctagaagcacatattgcctataccttattaaagagcgcaacgacgggatcatctcatcgcgggtatgaataactcagaagaagaaaaggtaccagaacaggtcaccgatacaccatgggatgattcaatccaaggtaaaatgaagcat

SEQ ID NO: 2636 - DNA, 372 bp, Glycine max
  Clone ID: PAT_MRT3847_102386C.1
gaccatcaatgatctaagccgtcacagatgtctccacagcacgcttgccaggatctgccccttctgatattatgtcatctctccatagtcatggctctggcttcctaatgttgcggatgctacctgatgcataatcatgctcctgtacttctatgagattttcctaccagctcacagggaagacccacacgtacatcagcttgtgtgtggcggaccctatccttaaagaacataggtctttgcggagtaacgttggatctcttgagggccaactcagtggcatttaccgagggttagcagatcatcgctgtctttgccaaaactgtgacatgattggacctgagcacaatggccaatgcatgcaaacatttg

SEQ ID NO: 2637 - DNA, 1184 bp, Glycine max
  Clone ID: PAT_MRT3847_102387C.1
gaagccaataaggttcactgatcagcagctaaggattgctactgataactactcttttcttttggggtcaggaggttttggagttgtttataaaggaagtttcagcaacggaaccatcgtagccgtgaaagttctacgtgggagttctgacaagagaattgatgagcagtttatggcagaagtgggtaccattggaaaagtccatcattttaatctagttcgtctatatgggttttgcttcgaaagacacttgagagcactggtttacgagtacatggtgaatggtgcactcgagaagtacctgtttcacgaaaacacaaccttatcattcgaaaagcttcatgagatcgcagttggtactgcgagaggcattgctaccttacacgaagattgccaacagagaacgttccactacgacattaaaccgggaaatattctcttggacagaaacttctgtcctaaagttgctgattttggtttggccaagctttgcaacagggacaatactcatataagcatgactgggggcagggggactcccggttatgccgcacctgagctttggttgccatttcctgtaactcacaagtgtgacgtttacagcttcggcatgctgctatttgaaatcattggcaggagaagaaaccataacattaaccttccagaaagtcaggtgtggtttccaatgtgggtttgggaaagatttgatgccgaaaatgtggaggatttgataagtgcctgtgggatagaggatcaaaatagggagattgcagaaagaattgttaaggtagctctgtcatgtgttcagtataagccagaagcaagacctataatgagtgttgtggtgaaaatgttggaaggttctgttgaagttccaaaacctctgaacccatttcaacacctgattgattggactcctcctcccactgatccggtccaagcatcgcagaccaataccgatacaagtatttgttccgactcttcggagttggtagccaaatctgtccacgtagttgccacgcctgttatgaccaagtacgagattgaattagcctctgcctaaactttattcaatgattgaaaaaaagatcaatcactacaagttgtagaaaatgtggcaaccttgtactttttatttttcatttgatttctcatggggtcatctatgatatgtctaccaagtg

SEQ ID NO: 2638 - DNA, 495 bp, Glycine max
  Clone ID: PAT_MRT3847_102388C.1
ctctcctcccacgcccgccagtactgctcgaccgccgaatcgacgcgagtgcgcctgcgacgagcaccgtaccattgttcgcagcgtcgctgtcatcgcccggctttttccccacactccgctgcgtttcaaggcgcccgttgctcgctggaccaggatacggtcatcgtcgaccacgccctcacccatcgcccgtccggaaccgcgactgcacgacgaactccattccggcgccgacgctgcgacatttcgtctcccgctgatcgactcgctcaggtacgtgctgctgtcaagtccttggttgctttgctgggacgccgactgcgtgggcttgggttcgtcagttgcccgaccctttgccctgccgtcctgtggtgcccgctggtcagcgtcagacatttgatctgacgccgcatcgcgacgctgttccgtggctctgttcgcatctcggattcttccgattggttctgtaccccgttccgtggtctgcgtttc

SEQ ID NO: 2639 - DNA, 133 bp, Glycine max
  Clone ID: PAT_MRT3847_102389C.1
ctatgctggaaaagcttggggtcaccatgaaatctgtggagcagggcctcatatgggaaacattaatataaacgtgtcatatacacctagctgccagtaaatagtgctcacatggaaatgatgatatgtcatc

SEQ ID NO: 2640 - DNA, 251 bp, Glycine max
  Clone ID: PAT_MRT3847_10238C.1
aattgtatatgtttttcttaccttaaacagtcgattgcgagtccatgtaaacgctgtgaaacgcgctaatgactgggttcacactttggactgggttcacccaatgcgaccggaacggcatgaaatgcattttcaaccggatcactggattcatgatggctgggcaataactcacctgtccctttactacaggtctgaacttactatccaaacaaaaacgcttttcagagcatagactttaataggcaacc

SEQ ID NO: 2641 - DNA, 247 bp, Glycine max
  Clone ID: PAT_MRT3847_102390C.1
gttcaaatctcacccctttccttttctactttaatattattattttccgttccctttgaaacaactcaaagcatttactcccaactagctagctagacctaacccaactcagattgcatcatttctaaacgcttccttttcattcttttctggaactccttcttctgtcatattctctactctcttatatatttgctctgtgcaaaaccaaaaacccactatttttggttcaaggtggataagatct

SEQ ID NO: 2642 - DNA, 425 bp, Glycine max
  Clone ID: PAT_MRT3847_102391C.1
cccacgcgtccgcggacgcgtggggcatggccatgattcagagccatactacctccatgccaagcacatgtacaacttggacagaatgaagcaccaggcactgaagatgtccctctcagttctagctgttttcagcattggcgttgctgttccggtgtatgccgtcattttccagcagaagaagactccctccagttgatgacagcggacatactgtggggaagttgaatatgtttacttcctcctgctgtttggaaactctgtttaagctttcattttgatcttagtttgcagaattagaaaccccgggctcagtagctcatctagagcctggtgtttcttggttaattggttttggcttgaaatctgttttgttaagctgtgatcagcttaagaataaaagtatgcattaatactgctatttc

SEQ ID NO: 2643 - DNA, 445 bp, Glycine max
  unsure (1)..(445): unsure at all n locations
  Clone ID: PAT_MRT3847_102392C.1
angggcggaaaattttataatgctacaaatgcaaaaacaagatggtgaattctttactggacgggactgcgctccactcaccctactgaacggtatcttcgggccgcgctcttgacgcgacatcttactgccaaatatgatgtgaacgccctgtattggtgctaggtctgggtactacagtgcccaatgcaatcgattttaacgttgctacgtacagcactctcctttttgccctagaaggaaagcacgttgttgtcccactaggatgcttccgaacttttatcctacctttagcaaaggctatctgaacaactgctctgtaaagagcggacttaggggcgccattatggcgcgatttataacatttcacctttctctaagatacagtctccagactcctagtattgcgctttcggaaccttgtgttcatctatgtgatctaact

SEQ ID NO: 2644 - DNA, 476 bp, Glycine max
  unsure (1)..(476): unsure at all n locations
  Clone ID: PAT_MRT3847_102393C.1
gagacgcctgctgctgctcctggtatgtttttcacttaccgtactctttctttttctacttttctgtatacaaattttgatacatgtttcttcatgttgaatttcgtttcaaattacaaagggggtcgcatgctttgtttttctttttcagccccttaattaagcttttaataaataagaaccatatctgattttgtgattttgtttcttattttgctgtggataatttaaagtaaataataattacatcatagttgtgatctttacaaccctgtctgtttacctaacaattgatactgatacgtttgattatgctaatgacattgcctgtttgaagaattctcaataatttaaacagagatatgggtttgttttcatgctgccttcatttaacagcttangtaggatttatattgtatgcatttgactatagtcagagcgatctggttttctacatgtttctattatttggattt

SEQ ID NO: 2645 - DNA, 260 bp, Glycine max
  unsure (1)..(260): unsure at all n locations
  Clone ID: PAT_MRT3847_102394C.1
tcaccctcgcgccctcgctcttcccttcctggtggcgacaatgtcnactcctgctaggaagaggctgatgagagacttcaagaggctgcaacaagacccgcctgcagggatcagcggtgccccccaggataacaacataatgctgnggaatgntgtcatatttggtcctgatgatactccnnnnntnnnagncacgtncaagttgactctccagtttactgaggataatcaaatanaccaccaactggccgatttgtgtc

SEQ ID NO: 2646 - DNA, 298 bp, Glycine max
  Clone ID: PAT_MRT3847_102395C.1
ctgaacctctcactcctaactatctgagccgttcttattatcctgcagcgacccactgaggaacaggctatcagttgcatgacataatacaacagtgttcaattagagcataatgggatccaaatatgcaaatgggaagaaccacaaggacatactagaacacatttaacgataatttgagttctagatattcatcatccagtgatgccaaggatacccttatcagttgatcctatatatttaaaggctcacacggatcctaggttccgatatgcttcaatgcgtgaaacgacagtgg

SEQ ID NO: 2647 - DNA, 177 bp, Glycine max
  Clone ID: PAT_MRT3847_102396C.1
ctgttcagtgagcaatgggatggatcaatgcagggggattcttcataaatctagctcaagtgcaaacccgttgttatgtaacacgcatttaaagaaatgagcatgtggcattgcatgctttttcagctccaagttagtgatccattaaacacggcacgcacacatgagctttgcgtc

SEQ ID NO: 2648 - DNA, 385 bp, Glycine max
  Clone ID: PAT_MRT3847_102397C.1
ttcggtttgaggttattctaagtaaaaagttaaattattatcataagttatgttgggcattagcattgtccagggttcaagcttagaggattcttgcgtgtaagcccggtaagtataaaggcattcatatgctttcaccctacaacataatgcgtttcgaagatagtttcttggttcaatgacaaatggcatactaataatcttaaacagcgatcaaagactccttcattaatgaattatggactttctcccctcaacaaatacacgtaatattaatctggtcctatgcttattctttttatgagagcttgggtgagcgttgacttattttattttggatgaaattcatttggtttacttaaatagatttaccttaggatgtttt

SEQ ID NO: 2649 - DNA, 221 bp, Glycine max
  Clone ID: PAT_MRT3847_102398C.1
tatcatcagaatctgacactctacactttactatacaacctaaccttaaactgaacagaatataaccttagctggatactataatatcatatatattcataacatacttaacttaaaaatgaaattttacttaacttaactcatgtaatatctcatcaactatatcattacaattacagctcaactaatatactacacctcacattacatcaactcaaaaa

SEQ ID NO: 2650 - DNA, 414 bp, Glycine max
  Clone ID: PAT_MRT3847_102399C.1
caaggctaaaagtaaccccacggggttaactaattttttaaaacaggaaaaatggcaaaccacccgaaaataaaccccccatccaaaaagttaaaaataggggcgagggaaataaagtccacattttttaaaaaaaatttttttggaaaagctgcttttgtccctttgaaagggggggggacaaaaaaaaaaacccgcccccataggggtttgaaaaaaccagggcccttttttgggaaaaaccccttccaaaaccaaaaaacaagggttttccccaccaaaaattggtttggggcttgggctggctcatccaactggaaaaaaaagggttggggtcccaaaaaaaaagggcttcctttctttattttggccaaaaaaaaaaagcctttgctttacccagtggctccggacctt

SEQ ID NO: 2651 - DNA, 1853 bp, Glycine max
  Clone ID: PAT_MRT3847_10239C.1
cctttctctctcttcggtcaaaaacctgtcccttgtttctctctcttcggtcagaaacatgaatttggaaacgcaaccaggaacggcgtcgtattggtgctacagctgcacccgtttcgtgcacctctctgtccaaagcaccatcgcctgcccccactgtcaaagcggtttcgtcgaagagatccgtgccggcgccggagccgaagcctcgccacgccatcgactaagtcctttccccgatgatcctcttttgctccggcgacagggcttccgccgccgtaggagagaagcttccggcaaccgctccccgttcaaccccgttatcgtcctccgcggccccggcgacgactccgccgccgccgaccacgacggcgtcagcacgttcgagctcttctacgacgacggcgacggcaccggcctccgccctcttcctcccaccatgtcggagttgctcctcggctctggctttgacagacttctcgaacagttcgcgcagatcgagatgaacggattcgggcggccggagaatccgccggcgtcgaaggcggcgatcgagtccatgccgacggtcgagatcggagaaacgcacgtggaaaccgaagcgcactgcgccgtgtgcaaagaagcgtttgagctgcacgcggaggcgcgtgagttaccgtgcaagcacatctaccactccgattgcatcctcccgtggctctcgatgcggaattcgtgcccggtgtgccgccacgagcttccttccgatttggaaactagggttcccagccagatcgacgaggagacgatagggttaacgatttggaggcttcccggcggcggattcgccgtggggagattctccggcggccggagaacaggcgagagtcatttcccggtggtgtacacggagatggacggtggactgaacacgaacggtggtgctcctaggagaatttctcgttctgttagaagcaatagggttagggaaagtcgagggtttggtagagttattagcaatttcttttcattctttggaagaattggttctagaaactcttcttctggacatgggtctgtaagtagaagccgtagtcacgtgagttcaatcttcaatagaagctcgcggagacatagcaggacttgggttatggatgattaattggtgaatggtgatggcaattttgcaaagaatagtaatactttcttttttttcagctttgggttatgagattcatttcatactgtaaatagcatgtaactagcaactatagaagcaagttttttagttttccctctctgggaatctttaatatggtttgattcaacatcaatggaaggaagagtgctattttttagctttgtggatcaaacattgtgcgttggcaccagtaactgtagcagtggaccgggcatgcattgggaaacaagaatgatgctttgttccccgtgaactgaattatttgatttgtttatattatatctttcatgttagtcttattcttttattggtgagtatcctttcgggattatgttttttgagatgcctctttcaacttgcagcaccataatgttttgaccaatatgcttgataatgatgataagtataagtcactttttcctgtgtgatccacctttgaactgattgggaatgggaataggatgctgcatactgcataggaaatgcaatttgaatgaacagcagctgctaaattattgctgtggcttggtaatcataattcatctgaactctgattcacaaattgatttgtgccattgtgcaggacttttattctattattgagctagttgttggttaatggttgcatgatgaattcccaagtttcatgagttcctttttcacttttctc

SEQ ID NO: 2652 - DNA, 153 bp, Glycine max
  Clone ID: PAT_MRT3847_1023C.1
aaaaggggatcttgtccagaaggccatccccgtttttgaatacttgggaaatgctcttgggaaatttgataatgggccatttttgcttggccaattaagtttgggggaaatggctaatattccatttgttgaaagattccaaattgtctttgc

SEQ ID NO: 2653 - DNA, 988 bp, Glycine max
  Clone ID: PAT_MRT3847_102400C.1
accatttccaacatttcaagcatttgatttgcaaattgcaaatccctccaccttttcaaaatcttttgtgatcttttccaatggccaccttcatcttaaggtctaacaaagcagtgcatgcctttggttggctttgtctgctactgatggttcataagggtgcttcctatgattttgttgttggtggccaaaagggttggagtgttccaaatgaccccagtttcaatcccttcaatcaatgggcagaaaaaagccgttttcaaattggagactcccttgtgttcaactaccaatctggccaagactcagtgctctatgtgaagagtgaagactatgccagctgcaacattaattcaccctatgcaaaatactctgatggccacacagtcatcaagctaaacaggccctcacttcttcattagtggcaacaaagacaactgcaacaagaatgagaagttgacagtgattgtgcttgctgacaggaacaaaaacaccaaccaaacaacaaccactaatgcttcccaccatcaccacaaacatcatcatctccttcatcagcacctactggccaagatcagggtcagtctccaacttcagacacaaaccaaacaccaagccctgtcagtgagccaccccctcccaatgctgctgcttcagcctttgtctcccttgctggctctgttggagcattcatggcctcagtgctagttttatctctctaagtatgcatgcataagtggttgagtattgatttcattttttttttcatacaattttttttctttaattatcttttttctgttctttgtttcctatactgagtttggaactatatattggactgtcttcggttcaaaagtgggatgatgtttgatatttgtttgtgaagattgaataataagctgacaataatttacccttttgtgtgcttctttcttactccatgatgtaaaaatgttgttcataatgaaatgaaataaaactaatt

SEQ ID NO: 2654 - DNA, 1751 bp, Glycine max
  Clone ID: PAT_MRT3847_102401C.1
ctcctatgtgcttgtattgatagcccctccgttcccaagagtataaaactgcatccaatactacaagccactaggcatggtaaattaaattgtgcctgcacctcgggatatttcatgtggggttcatcaaatatgtataattaaaaaagattaagtcttcatatattcttgtatttatagcctcgctgtcccttttaaactcccgacagagttttagactccaaggaatattacaagatgcactctcgtcacatgaagggggggaaatgatactacaagccactaggcatgggtctagcaaaggaaacaataatgggaggtggaggccgtgtggccaaagttgaaattcagcagaagaagcctctctcaagggttccaaacacaaagccaccattcactgttggccaactcaagaaagccattccaccgcactgctttcagcgttccctcctcacttcattgtcctatgttgtttatgacctttcattggctttcattttctacattgccaccacctacttccacctcctccctcaccccttttccctcattgcatggccaatctattgggttctccaaggttgcattcttactggcgtgtgggtgattgctcacgagtgtggtcaccatgccttcagcaagtacccatgggttgatgatgttatgggtttgaccgttcactcagcacttttagtcccttatttctcatggaaaataagccatcgccgccaccactccaacacgggttcccttgaccgtgatgaagtgtttgtcccaaaaccaaaatccaaagttgcatggtacaccaagtacctgaacaaccctctaggaagggctgcttctcttctcatcacactcacaatagggtggcctttgtatttagccttcaatgtctctggcagaccctatgatggttttgctagccactaccacccttatgctcccatatattcaaatcgtgagaggcttttgatctatgtctctgatgttgctttgttttctgtgacttacttgctctaccgtgttgcaactatgaaagggttggtttggctgctatgtgtttatggggtgccattgctcattgtgaacggttttcttgtgaccatcacatatctgcagcacacacactatgccttgcctcactatgattcatcagaatgggattggctgaggggtgctttggcaactatggacagagattatggaattctgaacaaggtgtttcaccacataactgatactcatgtggctcaccatcttttctctacaatgccacattaccatgcaacggaggcaaccaatgcaatgaagccaatattgggtgagtactaccgatttgatgacacaccattttacaaggcactgtggagagaagcaagagagtgcctctatgtggagccagatgaaggaacatccgagaagggcgtgtattggtacaggaacaagtattgatgaaccaagcaatgggccatagtgggagttatggaagttttgtcacttatcacttaattagtagaatgttataaataagtggatttgccgcgtaatgacttgtgtgcattgtgaaacagcttgtagcgatccatggctataatgtaaaaatatgtggaaagtgttctgcttataactttcttccttaaatgcacactccatagaacaatattattggtactaagtaaaaataattctggtattaattaccctccccctgactattgagtcgtccccccccccccccccccccttttttt

SEQ ID NO: 2655 - DNA, 1699 bp, Glycine max
  Clone ID: PAT_MRT3847_102402C.1
caaatatttgcttgtattgatagcccctccgttcccaagagtataaaactgcatcgaataatacaagccactaggcatggtaaattaaattgtgcctgcacctcgggatatttcatgtggggttcatcatatttgttgaggaaaagaaactcccgaaattgaattatgcatttatatatcctttttcatttctagatttcctgaaggcttaggtgtaggcacctagctagtagctacaatatcagcacttctctctattgataaacaattggctgtaatgccgcagtagaggacgatcacaacatttcgtgctggttactttttgttttatgggtctagcaaaggaaacaacaatgggaggtagaggtcgtgtggccaaagtggaagttcaagggaagaagcctctctcaagggttccaaacacaaagccaccattcactgttggccaactcaagaaagcaattccaccacactgctttcagcgctccctcctcacttcattctcctatgttgtttatgacctttcatttgccttcattttctacattgccaccacctacttccacctccttcctcaacccttttccctcattgcatggccaatctattgggttctccaaggttgccttctcactggtgtgtgggtgattgctcacgagtgtggtcaccatgccttcagcaagtaccaatgggttgatgatgttgtgggtttgacccttcactcaacacttttagtcccttatttctcatggaaaataagccatcgccgccatcactccaacacaggttcccttgaccgtgatgaagtgtttgtcccaaaaccaaaatccaaagttgcatggttttccaagtacttaaacaaccctctaggaagggctgtttctcttctcgtcacactcacaatagggtggcctatgtatttagccttcaatgtctctggtagaccctatgatagttttgcaagccactaccacccttatgctcccatatattctaaccgtgagaggcttctgatctatgtctctgatgttgctttgttttctgtgacttactctctctaccgtgttgcaaccctgaaagggttggtttggctgctatgtgtttatggggtgcctttgctcattgtgaacggttttcttgtgactatcacatatttgcagcacacacactttgccttgcctcattacgattcatcagaatgggactggctgaagggagctttggcaactatggacagagattatgggattctgaacaaggtgtttcatcacataactgatactcatgtggctcaccatctcttctctacaatgccacattaccatgcaatggaggcaaccaatgcaatcaagccaatattgggtgagtactaccaatttgatgacacaccattttacaaggcactgtggagagaagcgagagagtgcctctatgtggagccagatgaaggaacatccgagaagggcgtgtattggtacaggaacaagtattgatggagcaaccaatgggccatagtgggagttatggaagttttgtcatgtattagtacataattagtagaatgttataaataagtggatttgccgcgtaatgactttgtgtgtattgtgaaacagcttgttgcgatcatggttataatgtaaaaataattctggtattaattacatgtggaaagtgttctgcttatagctttctgcct

SEQ ID NO: 2656 - DNA, 368 bp, Glycine max
  Clone ID: PAT_MRT3847_102403C.1
cccacgcgtccgctgactcgtgggtccgctttatagagtataaaagatgtcgcgtttgatcgacagtttttagtgcgcggtggccgtgctactgtgcgccttagctgtctcttcttgggtggatgaggctgctaacccgatactaatggttgctactgtacaaactgatgttattctcatgatacgtcatttccagcactctctgaagtttgctatgttcatgatcaagttcttgaaaagttaccgaaacgaagaatatatgatgcacatgtactaaatattctcgcaaaaccttacgttcatacgctcccacaacaagaaccgtttgccctacactctctctgataatcattttgcttattgtactt

SEQ ID NO: 2657 - DNA, 494 bp, Glycine max
  Clone ID: PAT_MRT3847_102404C.1
ggctcgagggctagaatacaccggcacacgctgctggccctttaccttgtgcttcctgcgttcctgtgagagcccacgttctataacgcgcttctgcttatgaggctagatttctagacttcagcgttttccctgctggcatcatatttggggctggatcctcaaccttccagtttgttattaaacatgaggccggttctgatgaaaggccactagaggccactgacgttcctcaagttccacagggacggcgagatggtgccaatggggatgtaggagcagaccaatatcaccggtacagggaacatgttgagaccgtcaaggatcctacctgtggactcatccggatcgttaggtgctgggacgtctaaagagattcggggcgggttataacggggagtgcggatcaaaccgccaagctatggcacgtgcagactcggcagcagatgggcaccttcaatttcgatttcccggcgaggtccgtggatttagcg

SEQ ID NO: 2658 - DNA, 338 bp, Glycine max
  Clone ID: PAT_MRT3847_102405C.1
aaaaaaacaacatatgggtttttcatatagaatacaacatagggttacagtggaaatattacaaccgctcgggacttctaaaatctaaatatcatcaaagtacacaaattagaacggattgcatgattgcattctataatgatatcatcatctatacagtaatctctacaacacgcaagtcactaaacttaaactactatgcaaaaacatgccctaatgtctactatattgtggccaaggcatgaaaagatgccactgataggaacaaaacttttccagtagcaattctgcgaatgcacttccattaatgattacaaacctggtgctatacctctctg

SEQ ID NO: 2659 - DNA, 441 bp, Glycine max
  Clone ID: PAT_MRT3847_102406C.1
ttcctaatgatagggtcccaggtctctctacgccttggatttgccccgatggggataccaaggtaggaaaaaggcaaagacagcaagctacaattcatgaactctgcagcttccttacgccactagtctggtaccgagattgccccaaagcggctttttgcgaaattaattttaagaccagaagctagctcaaaacctctgagaattgtttttataaccctcacattctccattgttgcctccccgaagaaaatagtatcatcggcgtattgtaaaatgctgacgggtttcttatatttccccacagcgaagcttttatagtgatttctagccacagcctctctcattaggccagtaagaccttcagcagcgatgttgaacagcaggggtgcaagaggatctccttgtcggagacctctatgcggagaaaattctctagta

SEQ ID NO: 2660 - DNA, 152 bp, Glycine max
  unsure (1)..(152): unsure at all n locations
  Clone ID: PAT_MRT3847_102407C.1
ggcggctgcgagaagacgacagaaggggacttcttccaattgcaaattcttcactcacccagncgcgcttttctctgaatctcacgatgcgcacggccagaaaagcagaacccgccaacaaccacgcgcgacntaacggaacacagaacccg

SEQ ID NO: 2661 - DNA, 737 bp, Glycine max
  Clone ID: PAT_MRT3847_102408C.1
cgagcttcttaaaatttgctgcacagaggagagtgagaaggcaaggcaatggagatgacgagggtgaatgctaagagcaataactccaacgccaagactaatggcgtgaaagagaaagccaagaagatagtccgaattcaggtttccaaaaccaagaaacctttcttcttctacctcaatctcgctaagaaatacataaaacagggcaatgacgtcgagctctctgcattgggcatggctattccaactgttgtaatcatctctgagattttgaaaagcaacgggtgggcatttgagaaaaatattacgacatccactgttgctgccaaggaagacaaggaaggtcgagagattccaaaggctaagcttggggttttgctgggaaaggctggggatatggatcaaagtactgttgatgcatcgttggggaagaatgctgatgactgataataaggcatgacagttacagagtagtgccaaataatgaagcattgaagctcttctggttgtagtatatgtaaatgtaaatgaagtcccagtatatgatctatagttccttttcttttactatgtctactgtttagggaggtaatatgcagcgctgatagtccttcgaaatgtggtttgggcataaggctattaggattttatcctgtaaaaagtgttccttgtatagatgtactttctcatatttcgtattactgaagcataatagagattggaatgtgttagaagtt

SEQ ID NO: 2662 - DNA, 348 bp, Glycine max
  Clone ID: PAT_MRT3847_102409C.1
gaactgttgatcgagtcagactcatggcgtgacgttccgattttttattcacgctcttgcggactaacatgctcatctgtcataaaatttattaatcatgtcgttccgatcgaaagactacaattaccatcggtgaattgcccatagtacaagtgagattgaactgaaaactgcagctgctgatgtacgttttccgatcacagttcagaccacacactgtttcactcgcaagatatagttgcaaacatgcatgacatcaatgggtgaagattcatgtcaatgtcagaaatgtgccacagaggaacgctccctatgctcaggtaaagtggttgaaatgtggactgacca

SEQ ID NO: 2663 - DNA, 229 bp, Glycine max
  Clone ID: PAT_MRT3847_10240C.1
ggaacaagtgagtttgttgattgatataccctcaattcgtgtgaataagctgagagtccttgatttcatcgttgctgggtcttgggtattatggcactgccatgcctgcgatgtgctctctctccgaatgaacactggttatggtgctcgttatccggaagttacattcgcaagttgggtggcttgctcgttgcagtatacagggtctttcgctttgatagcagtcctc

SEQ ID NO: 2664 - DNA, 636 bp, Glycine max
  Clone ID: PAT_MRT3847_102410C.1
ctttcttttgaactcaaactcatggttgtatttgagaggattcagccatagtattacatgcttgcccccattggccataattttcaatttgcatgttgaattggatgagtgaaaacccttgtggtaaaattctgttttgatattttggacggtgttgtgagtgcattgtctttttattcatctatttgactcttcaatttctcttttttgcctctaaatacaaaggagattctgcctaattttatcaaaattttaaaccaacctccctcttcaaattccaagttaaaatatatgaggcagtggctgttttcatgttttggattgaacaggtgatactgtcttgagagtttaagaaactctaaccgttggatttttgtaaaatttgctttaaattaaactagacataaaattctataactttgcttttgaggtcctgataagataagctcaaaatggagctcatccatagcatgcaagttgacctatttgtttttgattttgaaattggcagtgctcgattttttctaaattatgtaactgggtgttgaacttcttgaaaacgtagttatcaatacttgaactggaaaaaaaataagattttaaccatgtatattaagttaattacaacctttgcct

SEQ ID NO: 2665 - DNA, 1498 bp, Glycine max
  unsure (1)..(1498): unsure at all n locations
  Clone ID: PAT_MRT3847_102411C.1
ggtcttaaccccatgccagaaaaagagactctaactaattcggagtttggccgggaggtaactaaaacttgaccaagaattgtttctaccaaagattgaactaagttcgaccttaattttaacacattaaccacgtgtacccaatcatttggttattttatgcttttgtttacttgcccaaattgaagaaaaacaaaatgtagagtcaaactgattgggaattattttgttagatattgcagttttaatcaatttagttcaacttgattaatggttaaactgagtttggttttggtgttttctaattccctgtctaagaatagtgaaagttgttttttgctggtgatgtttttatatatcaatatgtgacatgtcatccttatatttgattagccttgtttagtattctgtatgaacttggttgatttccatttgcctagcttgagctgggtattctgtcattgattttgaggaaggtgcattaaactgttaatcaagtatgttggagtttaactaatgtcttgcaagtaattgtatcaagcaatttatttaaattaatggcttgactttactgtcacatgtgcatgtttcagggacctgtcagatttagttaaggtttttgcatcatcactgtgtgaagataatatagatatggaaatctcccatgacatcaagatcaaggatgacaagctaggtgatgtaaaggaagagaagattaaggcagaagcggaactgaagcataaatcagttgagaaagagcatacaaaaagtaaggaagagaagattaaggtagaagcggaactgaagaataaatcagttgagaaagagcatacaaaaagtaaggaagagaagaaacataaagatgaagataaatcaaagaaaaagaagaaagagaaggtggaagaggaagatgaagagagagagaaaaaagaaaaagatttgaaagctaaaggggacgatggtgaagagaaaaaggagaaggataagaaggagaagaagaaaaaagaaaacaaagacaagggtgacaaaactgatgtagagaaggtcaaggggaaagaaaatgatggggaggatgatgaagagaagaaggaaaagaagaaaaaggagaagaaagacaaggatggcaaaactgatgcagagaagatcaagaagaaagaagatgatgggaaggatgattaacagaagaaggaaaagaagaaaaagtttgacaaaattgattcacagaaagtcaaagggaaagaagatgattggaaagatgaagggaataaggaaaagaaggacaaagaaaaaggagacggtgatggtgaagagaagaaggaaaagaaagataaagagaaggagaagaaaaaggaaaagaaaggataagatgaagaaacagacacattanaggaaaagggaaaaaatgatgaaggtgaaagatgatgaannngaaatagaaaaagaaaaaggattagaaggagaaagagnaaggatcacaaaaaggaaaagaaaggataag

SEQ ID NO: 2666 - DNA, 567 bp, Glycine max
  Clone ID: PAT_MRT3847_102412C.1
tcaaccttcttatacaatatctttggattttatgcgcagttcttaccaatagtattgaagtgcattgatgctagtaggaaagaggtcgagattgaacttagcaaactagtgaaactatgtcggtgggtgcatggcaagagttatttatcaattgaaagcttgaaaaagggtcggcagaagctgaagaagcttatacaaaagtatactgatattctgcaagaacccgtgtctattttctttagccaagaagttgcacaaagaggagcaaaagtgcaatcttttcatggtcatcagcccatttatgatgttctgaataagggattggttgatggtgcttttgatttgacatttttcggtgaaaacaggttcacgtggtttgacaactgcatcaagggagtagacagtgctttgcagaacttgctgcttaagaaaagtgttgaagaaattcaaagcatatttagaccttgtggtgattcccagcatacaatttacctgaaagggtggaaagctgtgtggcatacgattgaaaaaatatatactacagcggttgactatggtgatctttgg

SEQ ID NO: 2667 - DNA, 368 bp, Glycine max
  Clone ID: PAT_MRT3847_102413C.1
ggcgaatccttcacacaaaaacacataacaaacttctccattattttctatcggcaaatgttagtttgttatgatgctagttttgttaacagagcgtggatcgaacccgcgacgtttttccctcttttcttttctccatttaattgaaaccgacggaagaaaaaaaaaatatactaatttttaattcattgacggtattgtatatttgttctcgttttcgctgcagaagaagaagaagagtgatggctgagtacgacctaactccgcggatggcgccgaatctcgacaggcaccttgtgttccctctcctggagttcctgcaggagcggcagctctacgacgacgaccacatcctgaaggcgaagatc

SEQ ID NO: 2668 - DNA, 515 bp, Glycine max
  Clone ID: PAT_MRT3847_102414C.1
gctcggatttcggcttcgaggccaaaatgtctaatagaggccccggtgcttcggcagggacaagtgccggatgtctctggccctgccggagccggcaacggtgacctgcgccgacattacgggggcgaagaacctttacatcatatcggggaaagggatcactgggcgcttgaaccgtctcccctgggctggctttgacaacatggtgatggccaccgagaaaagggggaaacccgatctgaggaacaagggttagccagctgtaattgttcgccagcacaagccatggcgccgaaaggacggcgtctacatgtatttagaagataatgctggtgttatagtcaatcccaaaggataactgaaaggatctgctatcactggtcccattggaaaagagtgcgctgatctgtggccctagattgcctgcgcaaactatgctattggtcgaatgggaattcctgataaatgagatttatgattaagctcgtacgaccgaaatttgtcttagaggtttt

SEQ ID NO: 2669 - DNA, 452 bp, Glycine max
  Clone ID: PAT_MRT3847_102415C.1
ctttgggctgattagtgcttgctgggcgtgagaatagatagagggatgacaggagacataaaacgtttacaccagaaaggcgcacacggaaccatcgaatacatttgtctaaagtgatatttaaaccatatgtataattatattcccaaacctcattaaaagaaagaccaactactctcacaaaaactagatgtctcagaggacttaagtccatgcatatacgtacgttatactacagactcctcacagcgatattcaaacttaacactatcgattgcatgccccataatcatcctgatcgggaaaatttagctaccatttaatccaacttttccgtagtatacgttttccctgatagtcagtgcatcattcaacaggttcgaattgactgtatcactaaatagccctatagatcgaacgatcaacgggatctatttcgcaatggtgtacca

SEQ ID NO: 2670 - DNA, 560 bp, Glycine max
  Clone ID: PAT_MRT3847_102416C.1
cggttctataggaagacttttccatcaagttcagtagattagtacttgagtctgtttaaatccaagactaaaaagttcttttgacagcttttctactaaaagaagttttatattttcagtaaagaaactctcaaaaacacacttatatcttgtatccaaacaaattcaaaagtcacagaaaacagatttaacttgtatgaacttttcctttggaatatgttctagtggcactgacacctacttctttagagagaatatgattgctcctacacatcaccctatagtattctgctctctcttgccattgctatattaaatggtgttgcatataaattatagcacgagtatatgaaaattgatccaaataaatggtttttttagattagggaatttatatgttatcatttggatgttatttggttttattttaatttcttaaaatactagatggtgacacatgtatagttgtcattcattagggttattatataatatatgatttgcacctattgaggagatatcaaatgaagaaatctgaaatttatcttatttatctcttt

SEQ ID NO: 2671 - DNA, 438 bp, Glycine max
  Clone ID: PAT_MRT3847_102417C.1
ggctcgagctcttgttggctaacatacaaacaatatttttgatctctttaggttactaacaaaatgtgcaggatggggaggccccgcaatataaaaggctggatatggctcacgcaagtcaaaatgtgcagaggctttaaatattctataaaagacgatgacctttggaccaaatcctatagggaggcgttcgatctctatctattatatacgcgggtacacacacaacctagagctacctcaacaacataaaaggccatgtactggtctatgcgagaaaccaataaacaaacattgtgcagcgtgtgagaacaataggcccgcctaggactgcgtgaaaggagattttatagacagaccacagtgtattggaaagtgagagaatacaaccggcaaattgagtgtatcccactagaccgagtttcccagttcttactg

SEQ ID NO: 2672 - DNA, 420 bp, Glycine max
  Clone ID: PAT_MRT3847_102418C.1
ccttgatcgtcgtgattatgactttgtcggtgagaaaaaggatgaagaaaacaagcctcatcctcaggcggaggctatcgccaccgagtttcacaccgtcactgtctcagaccatggatagaaccagcgcaggctcttagacaagctttaccgatctgacagccgatctagctcttcatgtgaggaggaaggagaagatggagggaaaagggagaagaagaagaaggaaaagaaagggctgaaagagaggatcgaggagaaaatcgaggggggatcatcatgatgaccaggatgaggacacaggtgaccctgctgagaaagctgatggttgatgaaacacgcacatgctgcagaacagactggggtactcgacgagattactgagaagcttccagggcacaagccgacggacgaggccac

SEQ ID NO: 2673 - DNA, 155 bp, Glycine max
  unsure (1)..(155): unsure at all n locations
  Clone ID: PAT_MRT3847_102419C.1
cgaattccggtcgaccgcgcgtccgtacagaattgccagagtgaaaaaatggcnccaggatttgcactgcctttaaaaaaattggacggcttctcagcatgggcgggaggccttaacccctctctattgtctcctacaaaatttcgtcaccggcc

SEQ ID NO: 2674 - DNA, 131 bp, Glycine max
  unsure (1)..(131): unsure at all n locations
  Clone ID: PAT_MRT3847_10241C.1
cattattaggaattatggagtccttgnttgacaaccacaganactagcaaatattgtgccaaagnctaaaaaatgctagcctctcagtttttggtagaaacatttagcaaatgagtttgtgtctcaagcat

SEQ ID NO: 2675 - DNA, 221 bp, Glycine max
  Clone ID: PAT_MRT3847_102420C.1
ctgttcgagcgctaggtcacagatacgctcagccgccagtagcatcagtataaacctgatgttcaaaatacgtggcaatagttactctgggagtcctatgggaaacagccagccccaattgttcctatatgccgagctcgaatcattggactgcacgatgagtcaaagcagtgaaggaagccggcaatctctgagcgaagagaatcagtgcaagctccagg

SEQ ID NO: 2676 - DNA, 491 bp, Glycine max
  Clone ID: PAT_MRT3847_102421C.1
ctcgagccgctcgttgctgtcgtgcataacacaacgtacctcgtcgtctctctcgttcatttcctttatcaacatcaaaatttacgtgcccccagattcgtcatgcttaaatcaaccttcactcccattttctgggtacttacccccaaacccaaacctccaaaacttcccccccaggcaatcaccaacaccttcttcacaagcagcacgacacatgttcgacacaatgcccctctcaaccccaccaccccaccacccccttcttcagcctacattcacctgcctttctgccgcaaacgctggcactactgcgacttccccatcgtcgcccttggctgcggctggacccaaaccaacgacgaccctcgggcctccgcctacatccactggctctgccgggaaatcagtgccaccaatgtggaccaacctgctgatgccagcaccatcacaccccttaaaacggtctactttggaggcgggacaccctcgct

SEQ ID NO: 2677 - DNA, 238 bp, Glycine max
  Clone ID: PAT_MRT3847_102422C.1
aattaacaaacctgggggaagaatttgataattatcacaccaaatattacagtatataatacaataggaccttcctgctgaaatatatactgtaatatttggtgtgataattaacaaacctgggggaagaatttgataaaaaaaaaaaaaaaaaaaaaaaaaaacaaaaaaaaaaaaaaaggggggccctccaaaaaggagccgaggaccccgggaattatttccgggccgggttttg

SEQ ID NO: 2678 - DNA, 614 bp, Glycine max
  Clone ID: PAT_MRT3847_102423C.1
ctaacgtgtgtgtgtctgcctctttctccttcattcatggctcaaaatgaaaaattccgtgtttaacaacaaagcacaagttcaccaaaatcgaacttgctcctcctattcctattcctactcttctcagagggatgtctgctacaggttctttctctctctttcattccgcttttctttccgtttttgctttttttaattgaaatatgattttgcttctttccaaatgaaataaccgacagtaccatttttggtgtttcagtgattgaaaaacagtggctagttgattctcctttcatatatagtccatcacatgcttttgggttaatatttgtttcctttgatgcccctatagttttctcaacttatttaattactgtgtaaagtttatgtgaaattggaatcgtatctactggatcatggcctttacctgtgctttgtatggtttggttagacccataagttgaagggtaacgcactcagatgctatctaattcccattgatggccctgttttcatggatttgggttgtttatattatatgttttagtgcccagggtattttgggttgagagtttgaaaaaaatatctaaaaaggcactcgtagcatacat

SEQ ID NO: 2679 - DNA, 182 bp, Glycine max
  Clone ID: PAT_MRT3847_102424C.1
gtaaaaaaaaaaaaaaaaaaaaaaaaaaaaaagggaagccaatgacaagaaaagcagcagcctcaggcaataaattcgtcccaactgcatccggacagagaattttatgattacttgtgacgttgaagaagataagtttccgttcattagaaagtaataccagctaaaatttgctaatgctg

SEQ ID NO: 2680 - DNA, 574 bp, Glycine max
  Clone ID: PAT_MRT3847_102425C.1
gtaagctctgaattcggctcgagtaagaatcataattgatggttggaatagagttagctgcaaccatgaagtgcatctcagttacctctgcttgcttccttctttgtctttgtgcaattcgaagtgtgtcaacacaaaatgctatcatgcctccaagaggttggaactcctatgatagctttaactggataatttctgaagaagaatacttacagaatgttaatatagtttctcagcagttacttgctcatggatatcagtatgctgttgtggattacctctggtataggagtctaaagggtgataaaaattctcttggtttcgatgtgattgataaatggggacgaatgctccctgaccctgaaagatggccttcttcaagaggagggagagggttcactgatgtaggtaataaagtacatagaacgggtttgaagtttgggattcatcttatggctggaatcagtacacaggcattcaataacaacacaccaatacttgatacacaaacgggacaaccttacatggaatctggtcgagtctggaaagcaagagacataggaatcccatcaag

SEQ ID NO: 2681 - DNA, 136 bp, Glycine max
  Clone ID: PAT_MRT3847_102426C.1
tgactgcggggcgcgtttgtttttggttttttgaaacaccaatagatgtgaatgggcataacttcagcacagtggaggcatatctctgtcggtgacgagatacttgatttctcttcacgtcctcctctcgtggatc

SEQ ID NO: 2682 - DNA, 334 bp, Glycine max
  Clone ID: PAT_MRT3847_102427C.1
ctaatgttgttctattaatgggggattttaaacgcgttttcggctttaaaccacaacccgcgaacaccggaccggtacccgaacccaaaccagccaacccaaaagcgagaggaaaaccaaattgcctgaacaaaagacccagcggaccccggggtaaaaatggaaaccggtaagaactgcggacaacacacggggcgggaaccattaagcgaaaaaaccggggggcaagctgagtgaccaaacccaaagtagccgcggggggaaaactaaccaatttaaaggccaaaaaccacatgccccatttgcaataaggaatcgggcaacccccgaggac

SEQ ID NO: 2683 - DNA, 158 bp, Glycine max
  Clone ID: PAT_MRT3847_102428C.1
cataaaacatacgctcttcgatagccagggtaatatggttcacaggtatggcaacgctgataatcatacctactaatactgcaaccctgttcatgctactattgtcacctatttatccaccaaaactgcttctattttatacaattattacattaata

SEQ ID NO: 2684 - DNA, 277 bp, Glycine max
  Clone ID: PAT_MRT3847_102429C.1
gaaaaggcttgttcctttataaatccaatacctggaaatttagaagggtttggaggttggagaatttagggtttaactaatcgatcccgggttttccaaggcccttgaaggaccggttctggcttcggccttttaaagtgaagcaaatttcgttaccggattatgaaacctaactcatcgaaccccttttggcattcaagggccccggccgttttttttcctcgcagtagttaattgttctgaggcgtgctgttaaagtcctgaaacgtttgggggg

SEQ ID NO: 2685 - DNA, 371 bp, Glycine max
  Clone ID: PAT_MRT3847_10242C.1
aaaaaaggaccctgtccttaataaaaaaaaaacgaaacttatcgcccaacattgggttctccagtcaaatccagattcatttttaaagaccccaaaattatattaaacactgtccttaaaatgacactgtataaaatgtttaacaaacccttcaccagggtccaatgggataaaaaacctttacttttttttggggtagggtcgcacaacaaaggccaagcccaagatcaggagggggcccaggacctgcaaaattttgatcacaaattttggagttttggcaggattgtcctgaccttgttgagggggaatgaaggtcccttttaggggtacagtggatgaatcaatctcccaagtggggtttttttcca

SEQ ID NO: 2686 - DNA, 780 bp, Glycine max
  unsure (1)..(780): unsure at all n locations
  Clone ID: PAT_MRT3847_102430C.1
antttcnnnaatatggtaaagnnnagaggtgggtagaagatatnnnnatgnngatgcttaggttcaaggatgctgtttttgggattgctgtggagcctgcttctgttggaataaagnngctggccctgaagttcnttaatgtcttaaaataatgaaaagctttaaatggcaccagtaatgattaaggcatgagtgtatcatgtaataatattggcatggactccctatgcaaaagatagactcatgccttaatcattactggtgcgatttaatgtcttaaatcaatgaaaagctttaaaaaatgagcatataactgcattttgcccctggttttactttgttcaaaatggagtgacctctgaagcagggactcatggatcaaacaagttcaactgcttgtttttttagtaacattgcagcatgctgaacagttcgttatggggagttagtggccttggatacttctgcattggtggttcatatattgcaagttacctttataagactgtgtaacatggttcattatttatactatggagtgccagttgactgggtggtagaaatcgaaagtgatgcattaaaatggtcatctcgtgaactgaggaaacatggtcgtcaagcgatgcagtttattattgtaaactgttaagagaccatttactatttaatagtttatgctgtaagcgtatacacagttaatgtatttattattttataacagctgatgcacagttagtgcttcaatataatacaatttatatattggtgttcttgtgttat

SEQ ID NO: 2687 - DNA, 1534 bp, Glycine max
  Clone ID: PAT_MRT3847_102431C.1
cgcctccccattcgtctcgagaaagaatctttataaataggggactatattttttgtttaaagtaaattcatcgatctttcacttccactttcgtttttctccctctcaggacatcctgtattaacagtgaaaagtgcatctgaagagacagaatgcaaggacccgggggtggcagggatcgtttctttgattttggcgatccttttggtggttttggaggctttggttcctttggacctcccaggagtttaatctcaagcttttttgggggtagggacccatttagtgaccctttcttcgcccaaccttttggagggatgtttgagtctagtccctttggtggtcctactggatttcctttcccccctggtatgaatccatctgggttccttgagcatccagccccgggtttggatccatctgggttccttgagcatccgggtatgcatccatctgggttccttgcacggcaaaatcctgagcctagtagacaaaggaggggaccaatcattcaggaattggactctgatgaagaaaatgatgacaccgcggagaagaaagaaaatccgagaaagcatggtaggtcagatggtgaaccctctgttgaacatccagatgatgaaattgaagggaagaagatcagacaggctggaaatgagagcagaatcaatataattgggcctcagcctcaatctcacagcttctgcttccagagctcaaccgtcagctacggtggtccaaatggattgtattatacatcctcaaggacaaggaggagtggaagtgatggagtgacctttgaagagaggaaggaggctgatagttcaacaaggcaagcttctcacctaatttctagaggcattcgtggcaagggacattctctctcaagaaatctgaattcagatggtagggtagatactatgcagactctgcacaatataaatgaagatgagcttgctggctttgaagaagaatgggaggaaaagggtcaaaagtatttgcctggatggactggcagtgttgaagctagcggtagtaatagacaagcagtgcaggccaggcgcggaggttgggcactcccttcttcggagcatagtcatgccgtgggaacaatatctgaagctagagatgaagttggtcctcgcacacaggagagggttaggacaaattcaactggtaggaatgcataccgtccaggagtagagcgtggccgaaactaaggccctaatgttttgctcaaatacctgactcccaaattaaccatctactaacccctctgcaatcttcatgttagtaactgatagtgtgcttcttccttttccctatatagctatatgaccattttggccgttactcttatgcttttattggatgggtttgtccattgaaattgttatggtgatcataggggtctgagacctgaatgcataacaaaatttatagctgtcttggaaaaaattaaaccgaactatctttcaaaaaacagttctgttcgaatcaaatcatataattcgatccggtttgattttttga

SEQ ID NO: 2688 - DNA, 738 bp, Glycine max
  unsure (1)..(738): unsure at all n locations
  Clone ID: PAT_MRT3847_102432C.1
aagaatctttataaataggggactatattttttgtttaaagtaaattcatcgatctttcacttccactttcgtttttctccctctcaggacatcctgtattaacagtgaaaagtgcatctgaagagacagaatgcaaggacccgggggtggcagggatcgtttctttgattttggcgatccttttggtggttttggaggctttggttcctttggacctcccaggagtttaatctcaagcttttttgggggtagggacccatttaatgatcctttcttcgcccgaccttttggagggatgtttgagtctagtccctttggtggtcctactggatttcctttcccccctggtatgaatccatctgggttccttgagcatccagccccgggtttggatccatctggcttccttgtgcgtcaagctccagagcctagtagacaaaggaggggaccaatcattcaggaattgaactctgatgaagaaaatgaggaagcaacggaggagaggaaaggcaatccgagaaagcatggtaggtcagacagtgaaccctctgttgaacatccagatgatgaaattgaagggaagaggagtagactggctggaaatgagagcagaatcaatataactgggcctcggcctcaatctcacagcttctgcttccagagctcaactgtcagctacgggtggtccaaatgggatgtattatacatncctcagggcaaggaggagttggaaagtg

SEQ ID NO: 2689 - DNA, 497 bp, Glycine max
  unsure (1)..(497): unsure at all n locations
  Clone ID: PAT_MRT3847_102433C.1
aaaaaatttttctgttttccatatttcactgttggcgaaagttgttggccccacacaacagccacaacctttaccatttatgttgactgaagacctgcagatttctctagagtaggttttggattccagattaaatgccgctggacaaaaagaaggttctaatcaggtggcagaatttaccaaaatatgaaaacagttgggaggtcgctccngaggttgactgagcttttacttacttccacctcaagggtaagatgccagttattgggagagggggatattgatagaatatgtccctctattactcagatttataagagaagaaataaaaagaaacagttaggtaactagatgggggttacttagtgtgagttaatttctgatttgggcagtctgtagtcaggatatataataaactttataatggccaaaggtgtaaggagagagccaagaaagggttatgacaataagtggagggttcgggtttctcgaattac

SEQ ID NO: 2690 - DNA, 387 bp, Glycine max
  Clone ID: PAT_MRT3847_102434C.1
acaagagagatgacacctaatttcttgaattgcagaacataggtgacacattataattttctacattgaggcaatgaacatgaaacttgaccaaataagcaagcattgtaaaactacttactttccccaaagagccaaataataccacatgacgtatggaaagatttattcacgctgcggcttgatacttaacctaatggtatctaccacacattaaagacaagccgatccacatataaattaactaataagcaccggcaagcataactcgatacgttcttgagagcacaagctaagactcttgggaatcaacgtaaataggacctggaccgccggaggctccacacaggacattagggctcatactttatggcgcctgatacaggc

SEQ ID NO: 2691 - DNA, 321 bp, Glycine max
  unsure (1)..(321): unsure at all n locations
  Clone ID: PAT_MRT3847_102435C.1
gaatctgaaggttctataaaagcccacacccctgcttcgctgtnctcacattttctacgtattgaatctcaagattctaagagagatttggtgctctttgaagaagggtgttgcttgattttngagatgtcgctgctctcagatctcatcaaccttaacctctcagacactatgagaagtancgcagagtacatatggntcggtggancangaatcgactgnggagcaaagcaaggntctccangancagtnncgaccttcaagttcccaagtggactatgatgtccanacaggcaactctgagagnagnatgatttaccc

SEQ ID NO: 2692 - DNA, 512 bp, Glycine max
  Clone ID: PAT_MRT3847_102436C.1
aaaaaaatccagacccttagcccatacatataagggggggggggttaaaaataaaaggggaatacaaaccctgaaaattttaccccctataatcgggatggggggaaatggatcccacatactacaggggatttctaatgtaaacaaaaaaactaaaagctttggtttccacatcacaaacaaaaatttttatttcaaaacgggtaaaaaatccttttttaacaaacaaattgaacattgttattttccccacaagaaaaacatggggggggcaaactattttgcccacctccaatattttttttacctcagcccctcaagggaccaaaagttgttttttttttcccacaatgaaggggctaaaatgggaaattgtttgttttgacctaaaaccttaaaaagctgttttttgtgggaaaaagcaagggcaatccaatggggctgggggggggaccactgcagttggttaatttcacagccagcaaagtacatgcagacgggatcaatcccag

SEQ ID NO: 2693 - DNA, 232 bp, Glycine max
  Clone ID: PAT_MRT3847_102437C.1
aaaagaaaaaaaatttattttaaggggtttaggggcttctaagcgtttaaatagatttaagggccggggcccaatttaacttccccccatttaacaaaatttggttttagccttgacccaccccgtttaaaaatatagggggggaggggcccccaaataaaccctttcaagtttgcccactttttggaaaaaagggccaaactttggctgttttaaaatacaaccccccctg

SEQ ID NO: 2694 - DNA, 247 bp, Glycine max
  Clone ID: PAT_MRT3847_102438C.1
gtgttgcccacatctcacgcaagggagacccacaacaacggtgccaggcgatcctcgctgtatgaaatacattcatactcgcacagcagccgcaaagaggcgtaggcataagcggctgtggggggcgtatatcgtctcaaacacgtgacgtcgatccgcaaactgtaagagacctctcgatgagcctacgactgccaccagaggcgcatcgaactgaacaaactatgccttgaacgaaagctaatcg

SEQ ID NO: 2695 - DNA, 485 bp, Glycine max
  Clone ID: PAT_MRT3847_102439C.1
aaggaaggtttcccgtcatcactgtatgacgtcctccttctttgggggggggggggggaagatctggggtactggttgccacgaagctggcgctggtggtaggggtgtgtgttgtgagtgtttgcaccagttgtgcagggggttgtggtgtaaatgtacgccgtaacttggtgggcgggttgtggtggtacggaggggtactacgtggagttgtggtcatgttgttgtttgggttagggtaacaagtgggtcggtggcggtggtgggttggggtgtaagaaggcaggggtcagtaacaagttgtggcgcggtgggccttataattgtgcgtaaacacccaacgaaacgtgttaacggggcagcaagtgttgagtaccaccagaaagtagtgcgtgcgtgggagggaaggcggtagtaaaaggccttaacgcagtttggaacttagtacatgtaacatgtggggcgtaaaaaagtatagtaggggg

SEQ ID NO: 2696 - DNA, 160 bp, Glycine max
  Clone ID: PAT_MRT3847_10243C.1
gccaccgaagttcgatccctcgcagggggtggacgtgttcgtacgagtcacctgcggcgaggccggcccggcgagttccctcgctccacagatcggtacattgggtctctccccgaaagaacatcgtccccgacattgcgaacgaaaccgccaaggactg

SEQ ID NO: 2697 - DNA, 752 bp, Glycine max
  Clone ID: PAT_MRT3847_102440C.1
aaatcctcaacacgagccgattaacaattcaaagctttgtccgagatcaaaaaaaagataacgtaaatccctagctaagcaaagtgaggaggaggcatagcagataacacaaacacaaccttagccaacaacaaagcaaaggaaaggaaaggaaagcatgggtttactgtggtggcgaaaggggaataaaacccaagcccaacctgaagcaaagtcgaacggcgcagactcaacgaaacccctcactgaggccccagggatgaacggcgccgtggaggttccccggccctcgaacaccaccgtctcgattttcgagtttggctccgtggccgcctccaacgacaaggtcacgctcgccggctattgccccgtctccgaagacctcgagccctgccgctgggagatcctccccgccgttcagtccaacgccccccagtttcgcgtggtcttctgattctgatacccaactttttttctctcttttttgtgggatgcaaattttatctactttttttttttttttttttttgctataaaacattcgagtttaagcgcatttttctttttgttatgttatgtgtctcttttcttttcgcctgttcggttttttactcccaatattacatgactgtcactgttatgttccatttattcgtggtaactatttatcaggttgatgaattaaaaaaaaaaaaaaaaaaaaaaaaaaaaaaaaaaaaaaaaaaaaaaaaaggggcggccggttttaaagg

SEQ ID NO: 2698 - DNA, 336 bp, Glycine max
  unsure (1)..(336): unsure at all n locations
  Clone ID: PAT_MRT3847_102441C.1
gaattcgagctctgtacccggggatcctctagagtcgacctgcagctgtccaatttccggaggaatgctaccagagatattgttgaatgacaaatcactagaggcagaataaattattatgcgttaataagatcatatgatgtagaaaactcaatcagacattgaattttatctttctaaaaaagtcaatagaacttacagaatctcaatgcttctgagattcccaaattcagcaggcaaggaaccatcaaggtggttatgactcaatttcctgcatttacacgtaaatattattcaggacaccagcaatagaaaacaatgcntagtagatgacat

SEQ ID NO: 2699 - DNA, 868 bp, Glycine max
  Clone ID: PAT_MRT3847_102442C.1
cgagttccgcccgtcgccttaattcaagtagttggaacttggaagctgacaatggaagtgttccagaagccgagtctttgtcaccaaatgatcttacctctatagctaataaaacattaactgcttgggagactcttaggtctggggtggagaagttgttgttggtttatccagtaaaagtttgtaaatattgttctgaggttcatgttgggccatcaggccataaagctagactctgtggggtgttcaagtatgagagctggaaaggtgctcacttttggatgaaagctaatgtggataatttagttcccccaaagattgtatggaggcgaaggcctcaagatcctcctgtccttttgaatgaagggagaggcttttatgggcgtgttccagctgtgttggatctgtgctcaaaagctggtgctgttgtgcctgcaaagtataattgtatgatgaaggtgcaaggtttgtcttgtcaggtcaataataatttttttgggatcacaagagaatcaaactcttgagagcaacagtaagttgaattacaggtctgatcggaacgaggcacccaatcagggatagtttggggggaaaatctgacatgtccttactttaggctgcaattttttgcataattataagtgttaattatctgcttttgaactgcattacgtggctcctttatctttatcttctattgttttagtttctgttttagtcaatcagtggttcctacactttaggagcaagttaggttgttatccacagattgctaaaatcttggtaacgtgatagttttctgttttatttgaattatgataaatgtactgctgctaatgaatcaaaatgatcattccgttccttcttc

SEQ ID NO: 2700 - DNA, 300 bp, Glycine max
  Clone ID: PAT_MRT3847_102443C.1
tttaagacccaaaaactatgtattaaatgctataaaatcagcgccccttagttattgggaatcaacaccgtacaaacttacacattcacacaataactgcctaaatactaataattcctaatttcactgctaggttgtctgactagcgtgaatgctgtctagcattagcgattgctttatatcggacaaaacccaacccttttgaaaccggctttgaattccttaaacagcaacaactcccttaactttagtaaactatcatcaggtgggaaccatgtgagtctggagcaagacgccatg

SEQ ID NO: 2701 - DNA, 515 bp, Glycine max
  Clone ID: PAT_MRT3847_102444C.1
attttccaccagcccctcttgaagatgcccacgcgtatggcttgatgacaatccaaagagcttctttcctgaggaaagcaggcgtagaaacaatagtagatagtgatctttttctcaatccagcgaatagagctgatttgttggagtcagcaatcaagaatattagcaggtatttggaggcctgtcgagaaaaagacctaacggaatcagtcagggagggagttgatactctactaatgtatctgtatagagctttaaattctgtcgaggacatggagaggctggcttcttctataaactggtgtgttgtggaggaattggaacaaatgctagaagagtctgggcacctacggacacttgccttcctatgtgcaagtaaaggaatgagctcaaaagctgtgcatatttggcgcatcctggcacgaaattattcatcccgcctctggaaaagacccttctttggagaatattacacagaatagctgggaaaaccttatttctggcagggcaattgc

SEQ ID NO: 2702 - DNA, 1368 bp, Glycine max
  Clone ID: PAT_MRT3847_102445C.1
acgggaactagttgttcatagtacgaaaatgagtaattgatgggagtttgcagctgaatcagttcaattgataaaattatatttcagaatcccaagacattttgtgtaaattagttttggccttgtctttgcagattatttcctgcgattggtggtagtcatagctgctatttggaagagtacaactagtataagtatgaatcagggacctctgactggttcgattcattttatgcagctagttatcagtaaattttgcagccttcgaattggctgacaattccttttactctaattctcattccccaggtatgatgtgcaattgttcaaataacttttggcgtctgctttgacttagtttcataggctcctttttgattacgaaaatgtggaagagaacgggttttgaagaagaagcagttcaattgatcaactcagatttcagggacctaagtctagctgctaatagactcgcccatcatgccatcaaacttggtggcattggctttggagcctcttttttcggattgtttgctgccattgctgctatttatctgttgattttggatcgtacaaactggaaaacaaatattctcacagcactactcattccatacattttcttcagcttgccttcattaattttcgacgtcttcaggggagagcttggaaaatggattgctgcagttgctgttgtattacgccttttccttccaagacacttccctgattggctggaattgcctggtgctctgattcttcttatcgttgtagctccttctctaattgcaagcacctttagagacaacattgttggggtggtagtgtgcctcatcattgcatgttatttgctgcaagaacacattcgggcttctggtggtttcagaaactccttcactaaagctcacggcatatcaaattccattggcataatacttctgttggtttatcccatctgggcgctggtggtcatacttttttaggcaccaccatttggacttggttgatatgtgagaattaaaccaagtgtcttctgtatcattcatttgttgcaacttgatatctataaacacccggccattgttttgtgattcatgtttgtcctaagacctaaagttagcatgtgttaaaaagtggaataaaatctcagtttaagtcctctggtttcatagaatgtagaaaacaaaagatgaagaggattgatgtggtgtctttctagctgtcgtgtattcataaatcatgtatgatttgggaaatcgttgtatttttacctgtgggatataatataaatttacatttgttgctgctctgtattattaaaaaaaaaaaaaaaaagcaaccgccgtcctagcaactacaacagaaatc

SEQ ID NO: 2703 - DNA, 582 bp, Glycine max
  Clone ID: PAT_MRT3847_102446C.1
gggagatttcttactcgatattggaaaagaagagtttagagaaagcaagagcagctggtgtatctatctctctgtgttcattattggtaaagcattaatctccacgtggcctttccttatcatgtgcaattgttgtgcatatagataagcacatccaaatgtctgctttgacttagtttcatacactccctcctgtttgattacgaaaatgtggaagagaaggggatttgaagaagaagcagttcaattgataaactcagatttcagagacctaagtctagctggcataggctttggagcctctttcttcggattctttgctgccattgctgctatttatctgttgattttggatcgtacaaactggaagacaaatattctcacagcactactcattccatacattttcttcagcttgccttcattaattttcgacgtcttcaggggagagcttggaaaatggattgctgcagttgctgttgtattacgacttttcattcctagacacttccctgattggctggaattgccaggtgctttgattcttcttatcgtcgtagctccttctctaattgcaagcac

SEQ ID NO: 2704 - DNA, 468 bp, Glycine max
  Clone ID: PAT_MRT3847_102447C.1
tttatcttcactgtattaaaaaaaaaaaaaagaatgcaaaaatactagtatctcaaacctagctaccacatacacacaaagctaaaaggatgatactgcagccaattattaagctcctggccttaactttgatatggtggagcagtgttaatgttgaatatgcagttgcagcgacccgcgacacacgtgtaataaactctgggtgtagcccaatcaacgctaccaacacgggtagcttctttgcgaatgtcaatgagacattctcagagctgagaggagaaataaggaaccagagcaggcactttggcacatcattgaaatccaaaggagatgtcaatacatatactatgtttcaatgcagaaattatctctccagaaatgactgtcttgcttgcatcaacactgctttcacccaaatccgggatatatgcaaaatagcgaacggtgccagagtcatctacaatgact

SEQ ID NO: 2705 - DNA, 403 bp, Glycine max
  Clone ID: PAT_MRT3847_102448C.1
ggcgtaggaaaacccaacattaaggaatccctggcatattcaacagcgtcctgaagaatgatgttgtcttgccaatacaacagcttccatgaaacctcccaaattcactccctctcttatctcaaatgcggaacttcaacacatcttcccctccatacccttcgctgtggacaacgcaccggagccaccgctcctgcacacggcggcgactttgttccggcgcgcgagcgggtgacgaatgatgttgtgcgtgtggatccgaggacctcgacccaattggcgaagccggcctaggtgtcggctatgcacccgtcgaggacgtagatcttaccagcggggaaggacgccaacaatggcgaactcgcgggcgacgcgcatggggtcaggagccagctgtagaagc

SEQ ID NO: 2706 - DNA, 1052 bp, Glycine max
  unsure (1)..(1052): unsure at all n locations
  Clone ID: PAT_MRT3847_102449C.1
gtgataaaaaaaatagagcataattcaatatacanntttgatcacacatggatgctgatggaaaataagcttaatacttaataagtttgaacaaaatataattttctgagttcaagaatcacattctaacctgccaatggatgctcagaactacaagtgtaattctcacccacctctattttgtgaataggagtagaacaaaatctcccaaataaatattccaatttatactgagttgttgatagtgtagctatccttgcaaacaatttgtctcacacatgggttgcagcttaacatcttctatgtttggaattgtcaagcaaaagaaatgttcaagcttgcaatggtttgttatttttaaatcataatagtagcaggtttgatacctcttcatcatttgaaaagtttgtaacaggagatagtgtggaagaagagtaaggatatctatctttccaaaatcttggagggcaattaggcatttgttctggattttattcacgatcctgacatgtaagtgtatcgtgtttgagctccaattataagttcaacaagttttgctgtgagaaatcctatgacaggaataggctccaaaactttctccgtgctttcaagtctttgcctagtatacttgctgaaaaatggatctctcattaggtaaagaacaaatagcagctttcgccgtttaacctcatccttttctagggcagacagatgaaacattcggtccttcccaccagccactgacgatgtaatgagtgaaagaatactgtttcctatgcaatcaatagccagcgaaaggaaccaaggggtccatgaccgaataccatattttcgaataaataaaacataaataagtggtctactaataagtagaacttctccaataaaaaacagagccccacaaagacccctttcagacaatatggtgagaagtgttggtcctcccgcccttgaagttgtaggctccatagttgcttgttggtgttcaaccctgcgtaaccacactggatctgacccctttgctttttctccaaatctaaccaaagcagata

SEQ ID NO: 2707 - DNA, 160 bp, Glycine max
  Clone ID: PAT_MRT3847_10244C.1
acttagaagagggacgcgtaaggttttgcccctttcattggatcaaaccaaaatgccgtttacccttcccccccgagttaaatcttctgcattaaagaatcgcccaacccccggagaaaggtgctttgctttttggacgctcttccgtttcctagcttaa

SEQ ID NO: 2708 - DNA, 178 bp, Glycine max
  Clone ID: PAT_MRT3847_102450C.1
aatgcttttcccctttttctcttttctgactaactctatcattttagagaggctttctggaacaatgtatgggtcatgactagggttggagcggggtctactaatatccctggcctactgagcatgcaaacgcatagaccccataaaggatcaagaaaaactaaaagatctgttaaaa

SEQ ID NO: 2709 - DNA, 620 bp, Glycine max
  unsure (1)..(620): unsure at all n locations
  Clone ID: PAT_MRT3847_102451C.1
gggggggggggggggggggggtggggtaggtttcaatctagaatagtgtttccccccggctgcaggtgcaaatatgccgggagggatgatatggaatagggtatcgagttggagagaagaaaaagagagaatcctgaagccatggaagaagatgacactgatgaggtccctgagataaagcctgcccactttgaggagtctatgaagtttgctcgccggagtgtcagcgacgcagacataaggaaataccaactctttgctcagaccttgcaacagtctcggggatttggatctgagtttcggtttccagatcaaaatgagaacactgcagcaggtgcctcagaccctttctcatctgttacagctgagggagatgatgatttgtacagttagtagccatgtgagttgagtaatgtggttgattttcactatttctgcaatgacttgtagcaaatatcatgatagttttggttttgctgagggtcaatgtttctgtttcatgttaaacgagcagtctatgatgttctttttggtaagttaagactgatatatgtaacatagtcaaacctgtatgtttgtgtgtatataatttggctttatgatctanatctcagnnnnca

SEQ ID NO: 2710 - DNA, 372 bp, Glycine max
  Clone ID: PAT_MRT3847_102452C.1
ggggaaaggacaaattgatcttttaaaaaaaggcccaaacagggaaaaaaaaatttaactttggaacctgtggagagtcttacaatacattttttacctcctttttttttgcacaaataaggatccttttcccccctttggcctttttttgggaatgaattccccccaaaggtgacccaagtttataggcccttttttcacttgatgtaaaaaggaaggtccaaaacctaaagggggaagttggcccaaataacccccgaaatgcctccaaaaaaaaaacctccggggaacttggcccacccattaaaattttggagctgatcgggtttctttttggggcccgtaaaggtcaatgacggggcaggggatggg

SEQ ID NO: 2711 - DNA, 261 bp, Glycine max
  unsure (1)..(261): unsure at all n locations
  Clone ID: PAT_MRT3847_102453C.1
tatgtttataaaaaagatttgtaaaaggattgattgatnagttttgttaatgggatgtanatttaattgtttgtgggtgtgatagatggatgtatgttaagttagtgtagatgtattatttttttttttagaggggggganaagtgngttagggtagttattgatagaatggataagaagggggggattgaggtgttgagttttagatgtgttgaaatgaagtgantaattgagtgatgtatttgtgaatttttttttttt

SEQ ID NO: 2712 - DNA, 687 bp, Glycine max
  Clone ID: PAT_MRT3847_102454C.1
tccttcagctggtaattctgctcgtggacctgagacctgataaagattccatcttgccacttgggtatgtcccattctgaaattttcccccaatccccaatagcatgtgctttgttacattagtatcaatcaagtacaggaccaaaccaatttagttgaagcatattgataaatatagctctagccctcaaaagcaactgggcaagcctgttttggacgttgaggcatatgacttcgtcagcaccacctataagttgttgtccaatgaacactgctggtacagttgggcggcaaccaacctgaatcagtgccctctctatttgctgaccatttgtcattttgtcaatctcgataaccgtagggttggcaccaaagctgcatatgagagctttcacagaatggctaatggcacaagtgctcttgctgaagatcaccactggcttgtcagcagtcaaagttgccagcaagtccattgctacaaaatatgagtatttaaaaggagtaagagttggtaaactcttaactaatggtacaattggcttgaaattgtttttgttttgctctgttgaactcaagctctagagaaggtctatttatattagcttcagctggtttattctggtagatgacaccggatagtatgtagaataacatccgaaaaagaatagatgttctaaaagttttgtc

SEQ ID NO: 2713 - DNA, 410 bp, Glycine max
  Clone ID: PAT_MRT3847_102455C.1
acaacctgtataaatattgaggctctgcgtgtgtgtgtggaggagatacagaaatcgtgcacgcgtatatcaagagtcattctctaggggtttataagacgagagactatttgctggtcataggagcaccacttgctggtggtgtcgacaaagctgcgtgcttcctagccagcaagaaagctagacagatagtcattcaggccagactgactgcaggcggataatgaatgtccggcggttggtcccagaagacaaggcgagtgtatctccaccattatgttatgtggagtgtgatgaccatgcaagagcacgaagcttgtcttctcaaaatatgtagtactcgaactagatctggactggcacaaggcagctcgctcactgaaatagagacggccagctctatcgaatgg

SEQ ID NO: 2714 - DNA, 249 bp, Glycine max
  Clone ID: PAT_MRT3847_102456C.1
ttttaacattttaaaaacagcaaagaataacaagacgatggcaagcacggacctcttcctctaatatgccgttctctaactattctcctccagacactatataatacctttcctggagactactcctcctgatcaccaaattggggacctacctttttgacaaattgaacaagtactcatcttccaaaagtaaacttccaaatgactactacatttggaagtatagcaaactcaaaacgatatataaca

SEQ ID NO: 2715 - DNA, 169 bp, Glycine max
  Clone ID: PAT_MRT3847_102457C.1
ggtgtgtgtagagtgtatgtatgtgtgtcttatgtgatgttagtatctctccctcctctgactcagagacagagagatagtatcaaagttcactccaacttcgatattaaaaaaatgagaaaatagataatgagttttgatctcataaatcgccttgaaacatgtccct

SEQ ID NO: 2716 - DNA, 656 bp, Glycine max
  Clone ID: PAT_MRT3847_102458C.1
tttgtcagctgtgtccagagcataaagatattgtcatctgcagaagtgcagcaaatgagcttggatggggatttaggtggtaatgttccaatccccaatcaagcttgcagtgggacagacagtggcaatgcatggaggggacagtatgaagataactcagctgcctcctttaataggtaaaggaaggatgtcaaatgctgacacttaagagagatcaacttgtgcatttcaattggtggagaaccaacttaacctaataaaacttttggttggtgattctcaaatgaaaagtacacatgcatttcaaatgatgcagtttattggggtattgtagaagaggtggactcacataactgcatcctagttttcttcaccacatcacttttgatggtgtctagtttagatcctcaaatatagcaagagcagtttccgttactactgatgccacagatcctatacctttggaatcaacttttcttgtggttgttggattaggatttctttttcattttttgcaaggtacagcagaatagggcagctagtgtataatatgatctcttgtaaatcttgttatggttaaagttgtatacggaagtgtggtgtccaagtaatggctcagagcctcagacaatgaagaatgcatgccaattctagct

SEQ ID NO: 2717 - DNA, 331 bp, Glycine max
  Clone ID: PAT_MRT3847_102459C.1
ctaaggagagaggtagatttagaccttaaaaagagggagggcatggaagagattgacagggaacaaagcttattgagggagagtgcacactaatacaaatcatatccccacaacttaaccaactagagagactaaggtgatctattagctataagggacttgtactatttggtaacttagctagaacatcattaactctttggtttgggattgaacaccaagaaacaaaacaatcctaaagcccaaaaggttaggcattatcaaagtgaggaccctctgacttagaagggtgatatggatatactggggggaacagccactgaaatccccc

SEQ ID NO: 2718 - DNA, 427 bp, Glycine max
  unsure (1)..(427): unsure at all n locations
  Clone ID: PAT_MRT3847_10245C.1
ttgaaagcctcaagtggcttcaataataaagcatagtagtagtgactagtgaggggcattaagtattgattgtttaatgcaggtaacaggttgaagcttccatgaccgccatgcatgcatgttacgttgtatgtgaaagccaactcataagaagatattcttagttgtttgttgcagcctccgcaaccgcctttggtgctttgtctctataaattaacgtgtgtacgcgtcactccctcactctgtacggaaacttgagctatttactcaacacagatatttttaagacactgacaacagtgcctcttaaccgccctttacagtatctcctcttcctcctcaatcctacttaattgctttgnttctccttttaatttctatatatttctctctcttctggaaacaattactttaaggatgagtaaac

SEQ ID NO: 2719 - DNA, 475 bp, Glycine max
  Clone ID: PAT_MRT3847_102460C.1
gggaaaaaaaaaaccggggggggaccccttacccccaaattcaaattttaacaccccggttatgggggccctgggtggggccccccccccccaaaacaaaaaagaaaagggggcaactccaagtcttaaccccccccgggaaaaacaaaaaagggattaacagccccaaagccccccaaaaaaaaacaaaaaaccccccccccccaccctttaaagccccaagggggggcttttccagtaaaaaaaaagggtaccttcaaaaaaggaaacaaggtaacaaagcttcggggggaccaaaaaaaccgggaaccctcctggggaagccgggttgatgggaaaaaccccccggaaaaaaaaaagacccaactttaacttttattcatggggggcaagccaattcgaacatgggcccggcaaaaatcccaacaaattttagggaccccgggaccagaaccactttaaaaggggcccttgc

SEQ ID NO: 2720 - DNA, 379 bp, Glycine max
  Clone ID: PAT_MRT3847_102461C.1
tccacagcctacgtatgctgggaatgcggatagagatcacggaccgctttccgatccattttctgagaaacaccctcatcaccctcggctccggcgcccgacacgatattcttcggttaccctacagaagactacatgctctgtacagcacctggtaatgcctactataacgatgagggctactatgtggtccgacgtaggagccggatactatggctactggaaatacaagcaccaaacggaggtcggccatgcatatgaactacagaagaaagggggagcgaaagaggaaaacgttgaagtctatatgtgtggcgacattgcggtcgatgaagaggacccacggtctggattcgttgttaacagttcacactgcaaa

SEQ ID NO: 2721 - DNA, 269 bp, Glycine max
  Clone ID: PAT_MRT3847_102462C.1
ccaggccgacccttccgctgacagatgacgacagatggggggaggcatccattgggggcaagccctgtctgcgaggcatttctgtgttctaaaacatggaacctattgacaaccattttacctttttctttccccaccaccagcatcaacggccacacctccaggaccagcaccaggattcgccggcgccgacggcgaccacggagttttcggccaacggttttttgccgaacgcggatgggtcccacatgctgtacccttactcgggc

SEQ ID NO: 2722 - DNA, 348 bp, Glycine max
  Clone ID: PAT_MRT3847_102463C.1
caaggaaggtcctcactgttattacatctttctttcctctgtgcaggagatataaagacgtgctaaaaaacaacaaagtcttttcttccaatgcaaaatcaccttgatgtaccaaaccaacctaactggtatgttttgtgtcttcatattttcaccttctgatactgatttgggtctaagctcctaatgatttaatatccaatgcatctggtattctatcttgactcatataccctttttcttaatgctatatttctactttctttatctcccccattttccaatcactcataccgttatcactattttatattatattgacttccattataatgcttaaaattaaaa

SEQ ID NO: 2723 - DNA, 203 bp, Glycine max
  Clone ID: PAT_MRT3847_102464C.1
accgattccgaattcccgcccgcgccacgcgtccggtttgcttcaatggaagtgatttccgcttcgagcttgaatcccaacactccggagtgggtgcctctcgcctatcctacggttcaggatttctccgaccaatggtgggacctcgttcactccttcccctggatacgcgactactggcttcgcgagagctttcaagatcc

SEQ ID NO: 2724 - DNA, 1021 bp, Glycine max
  Clone ID: PAT_MRT3847_102465C.1
cttttggatgacaatcttagcaaggggaaacgtcctgttgctgctggccaggcctactttatatctcagacctccggggtcaattcttttgaattcctgcaccctctacttaggagtttggattatgaactgccaaagacttccctaccggtcgaccgtgctcttgttctcagcaggatttgctgggctgtttatacaatcctatatccatggctcaatcggtggtggcttccacagccattcatccttccctctgaagtacacaaggtgggagtgacccattatttctcttatcttaaagccaaagaggagattggctattttcccatggtgacctcgcgagaggggatggctttgaccatatcttactggcaagagaggaaacgaacaactctggatggaccaacaatctacgcgtggttgttttgtgtcattggaatgatctcactgttttgtggtgctttcttacctgacatagggatcatgtcccttctcagagctacatgtctatttgtctttcggtcaatgtgggtgacaaggttggtgtttcttctggctacagctgcacatattgctgaggccatttatgcttggtacctggctaagaggatggatcctgccaatgcaagaggatggttttggcaaacttttgctcttgggatgttttcgttgcgtttactattgaaaagagcaaggaaataggtaagcttttgcagattacttgtacaattacagtacaggttaggaaatcaatactgttttctgtccattgcatgacaaatgcaaactaccattaccaataatatattccactatctagcgctatgagattcttagcattggccttgttaaaactagtccatcatagtggaagatgtcgtcttttatgatcagcctcagtttttaaaatcattgttgcattatttttaggagccccaaaaataaaaacttgtccatcatacaccgttgaatgcaatttattggatatattaatattaagttgaagagctagaattaaatc

SEQ ID NO: 2725 - DNA, 311 bp, Glycine max
  Clone ID: PAT_MRT3847_102466C.1
aattacaaagcgagaaaacattagttattgggtaaataaagcactagggagcaagatagacacatgatgagagggcaaagctagtatcgtccttttaaaatcattccaaagttttcttgccatcagatatctgagggagttcccgtcacatttagatatccgtggggggccattcatacttgacctttgtattgtgggaacatgggggcacttaccaagaggattccacagaatggagtcccaaaaagtaacctcgagtggaaaactccataggtgatgtctacagctggatagatgctcacagagggagg

SEQ ID NO: 2726 - DNA, 2378 bp, Glycine max
  Clone ID: PAT_MRT3847_102467C.1
gaaaacgaattacagtattctatctgcttatatagatattattaaaagatttttgctgctaaatcggaagatattgaacataaatttcatcaaacatgacaacagattgtacttattcatagcaaagaactaaatttcataaaaggtagcttcacaaattcacgaaccaaacagaatttataaaaagaccagaacaaacaacagtttttcaaaggccactattgaccatggaaacaatttaacaagagtaaacctttcaggaacattaaaaaaaaaaacccaaagatcttcggaacttccacatgcttagacttcaagacacctacagaacattctcagacttttaaaacccaccacgaagacgcaacacaaggtgaagagtagactctttctgaatgttgtagtcagcaagagtccttccatcctccaattgcttcccagcaaatatcaacctctgctggtctggtgggataccctccttgtcctggatttttgctttgacattatcgattgtgtctgagctttcaacttccaaggtaatagtcttgcctgtcaaagtcttcacaaagatctgcatacctcccctgagacgaaggacaaggtgaagggtggactccttttggatgttgtagtctgccagtgtacgtccatcttcaagctgctttccagcaaaaatcaacctttgctggtctggaggaataccctccttgtcttggatctttgccttcacattgtcaattgtgtctgagctctctacctccaaagtaatggtcttcccagtaagggtcttcacaaagatttgcataccaccgcgcagacggagcaccaagtggagggtagattctttttggatgttgtaatcagccaaggttcggccatcttcaagctgtttgccagcaaaaatgagcctctgttggtctggtgggataccctctttgtcttggatctttgccttcacattgtcaattgtgtctgagctctccacctccaaagtaatggtcttcccagtaagggtcttcacaaagatttgcataccaccgcgcagacggagcaccaagtggagggtagattctttttggatgttgtaatcagccaaggttcggccatcttcaagctgtttgccagcaaaaatgagcctctgttggtctggtgggataccttctttgtcctgaatcttggctttgacattgtcaatagtgtcagagctctccacctcaagggtgatggtctttccagtgagagtcttgacaaagatttgcatcccaccacgaaggcggagaaccaagtggagggtagattctttttggatattgtaatcagccaaggttcagccatcttctagctgctttccagcaaacatgagcctctgttagactggtgggataccctctttgtcctgaatcttagccttaacattgtcagttgtgtcagagttctccacctcaagagtgattgaccttccggtgggagtctgaactaagaattatggccattacaccacgtagacggagtaccaagggcagaatggactcccttcaggatgttgtaatcagcaagggtacagtcatcctcaagctggtttccagcaaagatgagcctctgttgatctggtgggatacccgtcttggtcctgaatctctgccctcaagcattgtcaatggtgtcagagctctccacctcaagggtgattgtctttccggtcagagtcttaacaaagatttgcattccaccacgttgacgggagtaccaaaatgaaaagtggactccttctggatgttgtaatcagcaagggtacggccatcctcaagctgctttccagcaaagatcagcctctgttgatctggagggataccctctttgtcctgaatcttagccttaacgttgtcaatggtgtcggagctctcgacctcaagggtgattgtctttcccgtcaaggtcttaacaaagatttgcatcccaccacggagacgaagaaccaagtggagagtggactccttttggatgttataatcagcaagggtacgtccatcctcaagctgcttgccagcaaaaatgagccgttgctgatctggtgggatcccttccttgtcttgaattttggcctttacattgtctatggtatctgaactctcgacttcgagagtgatggtcttaccagtgagggtcttaacgaagatttgcatcttgaaacggtgagctagggttttctttctctgcgacaatacgaatggctaggcacctttggtacccctttcaatcgttctctcatagccttacggacgcctttctttgctcggacgagtggacgtcttgaaagttgaaaaggtaagctagggttgtctttctttctttctttgctacgataggatagattaaat

SEQ ID NO: 2727 - DNA, 540 bp, Glycine max
  Clone ID: PAT_MRT3847_102468C.1
gcagatgtgtgttagagtgaagaaagaggttgacattaacaaatcatagcatagcagaagaagaagaagaagagatacatagaaagaaagaaaaaaaaaatgagtttgagggaagacaatgaagagggaagggatctgaagaagccatttcttcacacgggaagttggtatcgtatgagtgggagacaatccagtgtgttcggttccacacaggccattcgtgattcctccatctctgtctttgcttgtgttctaatcgttgctttgggtccaattcagtttggtttcactgctggttacacctcacctacacaatctgctatcatcaatgatctaggcctctcagtctctgagttttctttgtttggttctttgtccaatgtgggtgccatggttggagcaattgctagtggtcagattgctgagtacctagggcgccaagggtctttgatgattgcatccattcctaatattattggttggctggctatctcatttgcaaaagatgcttcttttctttatatgggaagattgtcggaa

SEQ ID NO: 2728 - DNA, 282 bp, Glycine max
  Clone ID: PAT_MRT3847_102469C.1
tttacgttccacgcgtccttattctgcccaccacaatgatgaactgctgcggggaattttgactatgatttgcgggattctaggccattctcactaaaatggaatccttccacagacctccatgcatacaatgagattagcagaccctaagatgctgatgaccctaaagaaggaggcgaagagcgccatggaatgcactaagcaacgaaggaccaactctgaataatatggaaagacgcaagaggtgattgtagaaatggttacagaccctaccgtctaaga

SEQ ID NO: 2729 - DNA, 523 bp, Glycine max
  unsure (1)..(523): unsure at all n locations
  Clone ID: PAT_MRT3847_10246C.1
atagatagaatttgatcaaaattacttttaaatgtgagcgtgtgagatacacacacactataagaaaatgttgatggtaagaagtttcatttgacggtttctttaggtgtgagtgaaaaaggatgatgacttgtaaactgtctgttcagatcgacatcaaaagtttaactgagccaggtaactccaggtatccgttaaatcagatcattaactagctctttctgtcaagactgatgccgctcctcctcctcttcattatcaccatcatcactatcatcctctttttacctgctctttctgctttctctcttttctctttacctctctattttttccttctcttgttttttccttattttaaaccatatccattttaaaaaagtttttgatcaacaagatgaaggtaaaacttgaaagtaaaaagatgactgaatatatacatacatatanatatgaatagagtagatggtaaattatagtttacaatgggtattccagaatcgctccaaatcatctttatccc

SEQ ID NO: 2730 - DNA, 239 bp, Glycine max
  Clone ID: PAT_MRT3847_102470C.1
tttttctcttgttttgtttcttatttcggtatgcggaagcgaacctacaaataaaaattcctacgctgaaaataatgtttaccgttacaaaccaaaagggatcatgctccctactattttgctaaaaaaaaaaaaaaaacgctctgcccccacggaagatgtgtcccaaacgaaacctattgttgaatccgggccacccatgcccgaaccccgaataggataccttgcgttcaaccccg

SEQ ID NO: 2731 - DNA, 339 bp, Glycine max
  Clone ID: PAT_MRT3847_102471C.1
accacgcttacgaaagacaccgttttattttgttaaaaatattcaataaaccgtggtagggctcttaacttgcgggttgcgtgaagaattgaaaattttcgaaccctgttctttcttatcttttaaaaaatgtgactgttatagtgagcttaacaaccttcggaactatatcgtctaaaaaaaccaaaaaaaaaagctttgaaaatggctcaagaatcactcttagaaacctccgatatatcgcccacttcgtctactgtacaatcgcaaccagatccatatctttcaatgaacgtttcttttaggcggctcaacgcacaagctccagaatttgtgccc

SEQ ID NO: 2732 - DNA, 437 bp, Glycine max
  Clone ID: PAT_MRT3847_102472C.1
aggaaacatgcttattcttttcatgaaaagatatgcgaagagaggaactttaaaatttgtacgattgtaacctacctacacattcaacaaaagacacctcattatgtcatacgctttacatttcaacgactcttttacctatgtgaacgcactaatctatgagaaggagaaccgtttgttaatggtcgacgccagcagatagttccatctattatttaggacccaacgaaactagcttctgacagaaacctgccaatgttcaactgcctcatttggctacatgagggacaacctatggagcatgcgcgtgaacaccttccccacactcaaggagttctaagacatacacacagccctctttacctgtggaaggtcatcccctggaaccacagtacgtggactggttgttataccccagctgatcctaatgggggata

SEQ ID NO: 2733 - DNA, 469 bp, Glycine max
  Clone ID: PAT_MRT3847_102473C.1
tcgttcatcaggcccaagagaaagattggtcggagggaaatttttgctttgatattaaatctcgctctagattggaaaacgttccctctacaaaagcacaatttgctagtggcaaaacctgcaaatatgatataattggtgctggatcacactctccagaagattttcctgaaaaggaagatcaagacaaacccaaaaatgattgatgccagattgagacaaagaatagatcctcaatacaatgaggttcaagctcagatggaaacaaactctgcctaaattgactcttgatgatgctgaaactcctaaaggtgccatgtgggatcttaaaatgcctcaatctaaaattgcactccccaaaaacacagatggtggaaccatcctgcgtagtgatttattggcaaattctttgacagagggcaactatagagcaagcgttgatttgcagcgcactcatacgtttaaagga

SEQ ID NO: 2734 - DNA, 756 bp, Glycine max
  unsure (1)..(756): unsure at all n locations
  Clone ID: PAT_MRT3847_102474C.1
agaaatcagaaaaacaaatcgcttccacgcgtccgcggacgcgtgggcggacgcgtgggttcgtcttccctcgcacactggaagacctggaacacgaaggacgcgaagacgacgacaggctctacgtccagaaccctgtcaacatcgcttcccttgtctcctctcaactcgaagagttcgtcaaaggtgtgtcgtttgatctttcggacaaggaaatcctgtgcgttgaggagcaggatgtgttcgaccgcgtgtactccttggttcgcggcttcgcccttctctccccctcctccaaattaaacctcctcgaaactcttcgttccaacctcgccgtccttctccccaacttcgattccctctccagggcctcccatgaccaccacgttcccctcgcctctcaccgcaatgctttcaaaatatacaccttcttcctcctcaacatttttcttctcagcaacaacaacaacgcctccaagggtggtgngccccaagtgctaggaagaaacccgctgtcaattcatggaattgggaggcacagagagcttcggatcctcaatctcattgccaattctttggagataaaccttgaactgctttttggctcgccggacctggacgaaaactattntgtctttcattacaaaaaatgcattctttttatgtttgaggaatgcaactctcttaaaagatttctgatttggaagatgccctgtggccgtataattggagcctgctctaccaagtaccattaca

SEQ ID NO: 2735 - DNA, 311 bp, Glycine max
  Clone ID: PAT_MRT3847_102475C.1
caatgggaatcatatgatacaaccgtgggaggcatcggtttcactaatcttttgtttcgagtacatgatactggtatctacaatggtgtcaatttttgtacaaatatcgttactatgtcagttccacacttacggccggacattgcaaataaatgtcagtcttcacattttacctgcaacgattaggaacttgcatcacctgtctatgtctatgtgcgtccatcttgtagcttctgtaaagaatcgtattcccttgcatcatacacagaagcattatgaaaatttcatgaacgtcatggtccgtgctgcac

SEQ ID NO: 2736 - DNA, 642 bp, Glycine max
  Clone ID: PAT_MRT3847_102476C.1
gtcaaaacacagttgaaattcaatagtgaaattacaaactagtattactaaagccaacgtaataaacaacaaactaacattagaagcctcaaaatcaattgtcaagcatttacatccatctcctttagaaaaacaaaaaagctgcaatgcataaatcttttgaaaaatagccattaactataacactactggtcacatatgaaaatttcttataaattaaaaatgaagcttagcctgacatcctatcttgtgccccatggttttccaacagctaatgaccaaatccacccaaaagcttgatcaaacttgatagtatcaatcatttgaattttgaagaaagacgacatgcatactggggagagaaaactttctagggatcaggcagcagctgagcctgagtgtcactctttgtctcagatgaaccaaaaagtttacagattttactatgtgtacgtatatggtgaggagtcttgtacaatagatctttagcctcagagagtctaccttctcggaataaggattcaaaaacctgaacgtaaacgatatgtgatgggtaactttttacactcaatgccttcaggaatgcctcggcatcctccacagacccaaactttgaaatataaggcacaaagggtagatgga

SEQ ID NO: 2737 - DNA, 531 bp, Glycine max
  unsure (1)..(531): unsure at all n locations
  Clone ID: PAT_MRT3847_102477C.1
atgcgtctttgcttgcgtccacgcgcgcgggaggaaagatgacagacttaagacgcactgatgcactattccacatgtggggggtaaactggtggtcgcccaggagggaaaacacaaacagaggttcgatatcatgaaggggaaggctgggtgactaggatgggactaaccgataccacatggaagggcctgggtggaccaatagagtgctgagtaagggcaacgatattctgcgttgcgagtatgctagctatgagggattgatcaccaagcaagttatgagcatgatggcantaaatgactaacagtctttaagggaggtgatgaaaaactgccgcgggaaaggacacacctgctgctggcttgcagctcaaggatggcaattctgcagaaagatgcttggagaggtgaatgtggaatcccttctggatttccgctcacagggatatgcaatagcattgctaatgagatgctcatcagatatagctatgaaaaattactgcgccaggctaaagctccaagatgtgttac

SEQ ID NO: 2738 - DNA, 627 bp, Glycine max
  Clone ID: PAT_MRT3847_102478C.1
ggttttcctttttttttctttttttttttttttttttttttttttttttttttttttttttttttggggaaaaccaaggaaaattgccctaaaccgggggggggggcaccatttcaaaaaaaccggcccttggccctggcccccaaaacctaaatattccccctcctaaaaaatcccaacggcccaaagaaaattcaaacctccaaaacatttccccaaggcccgttggaaacctcccccccccctttgacaatctggggccccaaaaccggccaaaaaaccctttggaatcgggggaaacgaaaaattctcccctcccccgggcttccaagaaaaattccctttaatccccccctgcgcgaagccccgaaccaattaaccccttttaaattttaccggcccgttcccccagttgggaagaaaaatacttttccccccccggatgaaacgaaaaacccttcaaatgggggaaaaaaaaaaaagcgagacccccttttttccccctttgaaaggccttcccccacatattttcaccgcccggaggggcttcccccacaatatttttttgaagccctaaaacccacggggccccttggcaaaaaaaggggccaaccccgggggttcccc

SEQ ID NO: 2739 - DNA, 1309 bp, Glycine max
  Clone ID: PAT_MRT3847_102479C.1
ggctcgagatcaaatgttataattggaaagctggttctcttcagcaaaagcttaccatcaaaatatgaagattgggaggcaggtaccaaagcattgcttaacaaagagtctttgataggtggtggatcaattggtacagtctatcgaactgattttgcaggcggcatctcaattgcagtgaagaagcttgagactctgggaaggaccagaaaccaagaggaatttgagcacgaaattggtcgactagccaaccttcaacaccctcatttagttgcttttcaaggttactattggtcatcttcaatgcagttgattctatcagagtttgtcccaaatggacatctggatcgtaatctcgtggggtttggctttcctggaaccagtactagtagaggcaatagggaattatattggtctagaaggttccaaatagcagtgggaaccgcgagagcccttgcttatctccaccatgactgtagacctccaattcttcatctcaacattaaatcctctaacattctcctagatgacaattatgaagccaagttgtctgattatggtttaggaaagttacttcccattttggataattatggtctgaccaaattccacaatgctgtgggatatgttgcaccagagttagctcaaggcctgaggcagagtgagaagtgcgatgtttacagttttggagtcattcttttggagctggttacaggaaggaggcctgtggaaagtccaaccacaaatgaggtggtggttctgtgtgaatatgtaacaggtttgttggagactggctcagcttcagattgctttgacagaaatttacttggctttgctgagaacgaattgattcaggttatgagattggggctaatttgtacttcggaggatcctttaaggagaccaagcatggctgaggttgtccaggtccttgagtccattagaaatggattggagtcccattagacagtaagagcttttccatgcagtacagttcagaattgaagtgattgcttattttgttaaattcttaatggaatggacgtatgagattttgacattcaagcatacatggaaggagatttggatcgtgatcgactgtgtatacaagagggcatgggggaaggatgttacttaggcattcaaaatgtaaaaaagatgaaggataaaaattcttttgtattcatttttacattgccattattttttttccataaaatttgtaacatttgcaaataaaggcatttgtttattccattacttcacgtgttttcagggggaatacaaaagatgcctttgattcatttcc

SEQ ID NO: 2740 - DNA, 596 bp, Glycine max
  Clone ID: PAT_MRT3847_10247C.1
ggacacaaattcataaataatttttttctcttcctcttccaaacaaaatcctaacaatgtcactaaatttctgtgttgaagttttgctatcaataaaatcctattcttgaattcaattgcaccttgtcccgaacttcttgagagtttcttaacagctatttctcgtccatcgggaaaaataccctaaaagcataatcaacttagttagctacaaccctacaataaacaaatatacatatactcttatttgcaccttatcaccttataaacaactccgaatccaccttcacctattctcctttcatacgaaaacttgtttgtggcagcttcaattgtggccaagccaaattgtaacgcctccaaagtggcactttcttccccaaaattttcccttagaagagtcttatatctcttccttgatcgcttcaatatgaaatagcagacaccacataagagaaataccgacacaacaacagggacaacaatcaagattactcgcgatacagatttcttatttcctgcataaataactgacgttccgttgtattgtaaagaggaacaattcgtatctacatcgcaatgcgcagcagagccct

SEQ ID NO: 2741 - DNA, 304 bp, Glycine max
  Clone ID: PAT_MRT3847_102480C.1
atttactaccccttgtttcgagattgaaagttcaatcaacttttattcttttttattgtctcactctacaaaacataataaaatgaaggacgccctatagaaaccaagaacacaaaacgcgcggatgcaacataataatatatacaaaactggaacctaaataaaatccagtgggccgggcgttttaaaggcacaagctttaattaccctgccttagcaaaccattattcttctatagggacaccaaactctaatcaactggcccacgtattaaaaagccctgactggaaaacccttggtttta

SEQ ID NO: 2742 - DNA, 508 bp, Glycine max
  Clone ID: PAT_MRT3847_102481C.1
gctgctaggcccatatgggatgaagctgcctcagttaattccttcgagaataagactcatatcttgcagcagaacttttgattgctcaaaagcaaaggatcgccttggctatgcacccatcgtaacactacaggagggtctgcgaaggacaattgaatcatacacacacttgagggcggataatgaacctaaaactaaaagagaaggtccctcaaaagcttccaaatatcttggaagtggaagaggtgtgaataatcaactatatctgtctaacttctttgcttggtgatgaggatcaaccaaggaataaataaattgaagaagactaattttttattaaataaagtttgtaatatttagtgagacataataaaagtgactgttgcctcactaacttgaataattactgtcattcggatttcattatgattagcctcttggtatgacatatgacaattatatgtatctcagaaagttatgaatgaaatcagatttggaagaaaccaga

SEQ ID NO: 2743 - DNA, 246 bp, Glycine max
  Clone ID: PAT_MRT3847_102482C.1
acagctagctataaacatccttagtcctattaactatcaagatatgagtcaacatagtgtgatcaaaatttcggccgactcttcatatgttgccaagtgcctattgtatcctgcatgattacaatctcttgggagctcttcatagcacattggaagacctgacgatcagccacgacatgggtcgacgttgtcctccacagtgtgggcggaattggacaactacaaaggctttccgagaccattggc

SEQ ID NO: 2744 - DNA, 245 bp, Glycine max
  Clone ID: PAT_MRT3847_102483C.1
cttgaatcggtagcatttttatggttattccatcatacggatcacacaaatcattgaagtacgctctagttacattccttcctaattccgataccttccgatactctatctcggttacgcatattctcatacatgaacaggtctctctttcacacgtttcgattcctgattgtagcatcatcatcgaactaagcacacttacttaccttactaaactgttccctttggaatgcgtaattctctac

SEQ ID NO: 2745 - DNA, 207 bp, Glycine max
  unsure (1)..(207): unsure at all n locations
  Clone ID: PAT_MRT3847_102484C.1
acgtnngncnncggnattcggccacaannnnncncagctcncaactgaatcnannccnannaancncgnntnnccaacntcannnncnccangagngaanaggnnncaancnagnngcagcaacnnannnaanntggcacccnnaagnnganncgcngnacnngnccggggcattncacnngggcangnnnccaggnccganggnca

SEQ ID NO: 2746 - DNA, 349 bp, Glycine max
  Clone ID: PAT_MRT3847_102485C.1
tgaagctgtaacgcttgaagctgcactgctaggcgctattgcacctgggactgcgtatcactatgagtatgcaccacatcagactatgctaaatactggtttcaatcatcggccctaatatcgaccgactagaccatcactggcagctctacgcttgataagggaacagcatgctgatgaatatgttgcctaggaacaaccagaccgagaaaacgaatagcacgccattgatgaagctcaagctgctcgtgcagtaggtaagactgagagcgcaaggctctcgcaggaaacttcaggaagaaccacaatgcggaactcagttatcagccaaagaagtctgactaccacc

SEQ ID NO: 2747 - DNA, 331 bp, Glycine max
  Clone ID: PAT_MRT3847_102486C.1
ggctcgagggagagtgttagagtgtgttttggggtgcttagatctggagctgagaacattgtttgccagcttgatgatttctttgatgagattgtggaggggaggaagaagcttttggatttttgcagtcataggtaaaaaaaaaaaaatgatggtgaatagtttttagaagttcaacttaaactacaagaacagaatagacgaatgcgctcatttcttgtttgctcgattaattaaagaggggcatgtggttgaaaaaaatgaaaggtagaaaatggtttctgctttgttgatcggttttttttttgtgttcactttttaattgaagagc

SEQ ID NO: 2748 - DNA, 296 bp, Glycine max
  Clone ID: PAT_MRT3847_102487C.1
ggtctacgggagtgtgctatgctataggacttgagtcttcgtttatatggagtgaggaatcgcttgactgacgtctatagtgagatgggcacatgttagcgttgattcctgggaatagtcttagaaaaaaaaaaaaatttggtggccatccacttgtgagatgaccattcggagcattaatctatctcctgtacctagaggcatacaattattgcttttacgttgtaaaaaaatgatcttgttttggagtagatgctgattaggatctgtatgatttttcagcgagctacaattaa

SEQ ID NO: 2749 - DNA, 497 bp, Glycine max
  Clone ID: PAT_MRT3847_102488C.1
atcgatttggtttcttaaaatgagctatgcttggacccaaaatgttatctactctagctgttattgagatgtatgggatagagctggaggctcttcgaaaggagagtagatggaagtctctcaattccctgttctcgtggcactgaagctgatacactacatgcaaatggttgacagattgcatgatcaaactataccattagatcttgctcttgattatcaagggctatataaggctgatagaaaagatatcttctggacacatgttaaagggcgtcttaacattgacatcatatctaccccttatctatatagtggaacctgatgccagaattacctttggcactcttggatcataacgaagacgtcgagaatcttctgctacttaccaactgacagtatctttacacagacaaaatgatgcagtattcttttaatatatgccttaccaacgatatgggatggcgagatctatgtgacattgatatagtctcatc

SEQ ID NO: 2750 - DNA, 215 bp, Glycine max
  Clone ID: PAT_MRT3847_102489C.1
cctacgccccccaggaggcacgggcggacgcgggggctgttcaggaagaaaaaggcggaaacccccaggacacgagacaggggaccaccagacacagagccggggaacaacccacaaagccagagggcacacgacggccgaggagcagaagggccagcaccacgcgggagaacacaaagggctggctcttgaaccacacttcaatccttccaaag

SEQ ID NO: 2751 - DNA, 440 bp, Glycine max
  Clone ID: PAT_MRT3847_10248C.1
ctcacgcgtccgctttgatagagagagagggaggagggagagtgttgacgctccatcaagatgggtatttctagggattccatgcacaagatgcatgccattggacagatgatgaaggcatgtgtaaagaagagaaagtatgagctcgggcgtaaggtcgtaaaacaccaatttattaggctacataactatccgcagtgattcggtaagaggcggcaatgataaatggagggcatagtggatggataccggtatttactaatggggaagttaatcagttactctcaagactcgcattctagaagttgttgacaatgcctaaaacaattgaatttgtgggaactcataacctggtcaagaatgctaatgttcaggttgatgctggttctttaagcagtgggacccttaatactttggtgatgaaattggcaaaaatatat

SEQ ID NO: 2752 - DNA, 149 bp, Glycine max
  Clone ID: PAT_MRT3847_102490C.1
aattcggctcgagcttctacatcacatccatccttttggtccctcctgaacctgtttgcatccattcccatttgcgtggtgcacattcatagttcccacctctctaaaaaacctagcaaagcaacaacaacggcgtcatgcttgggaag

SEQ ID NO: 2753 - DNA, 848 bp, Glycine max
  Clone ID: PAT_MRT3847_102491C.1
ctcgagccgaatattccgcttgtgcaacctattaaacgacacatagatacaatactcaacatgtcctcacaccttgaaagtctttcatcacacccaaaactttctgaagaagaagaggctcctgtggtggtcaacatcccttgtgtgcgtgagcttcactcagttggggtctatttccaacccgtggaaggtggcaacatggccatcgatttcgacgaaaagaagggcatattttacctccctgtgctcaaattggatgtgaactcagaagtgataatgagaaaccttgtggctcatgaggccttgaccaaaccagattttctaatcttcacaaggtacactgaattgatgagaggcatcatagacactgtggaggatgtgaagcttctcaagaatgcagggatcatagattcaagtagctctctcagtgtggaagaaactgaggaacttttcaatggaatgagcaaatccattggaccaaccaagactgagaagttggatgagactattaagaaagtgaacaagtactaccatgataagaggaaggccaacctctacagaaccttaactgaatatgtgtacaattcatggaagctcttcacacttcttgccacctttgtgctcttggcgatgacagctcttcaaacgttttgctcggcttatgattgtcccagttattttagacccaaataaggttttcatatgatgaatattcttaatggtttcaagtgtataatgtttctgtaaaattatatatagcgttacctataccttcctagcatatgctattatattcatgcatgttattcaactgaaaccatctattatataagatttctattttctct

SEQ ID NO: 2754 - DNA, 481 bp, Glycine max
  Clone ID: PAT_MRT3847_102492C.1
tgtgcggcgctcgaggcggccgttgtccgacccgctattcctattaggattgtagctgaaagagactgtgaataccatggagggttcggggattatagagttaattggcattcaccgccactcattggagtcaccactatttacctcactgctgccttcgcggaccctgaggacagaggcctctcttgcgcacattgctaaaaccgaactggacaaacaagatgctgatgatgacgtaccatgacttgatctcacaagctcaccatctaaccttacaaatctggtagcgaaaaaatctgaaacccagctgtatcattgcatgcatctgagcgattctcagatagacttcgaatcgccgattatctattccaggagaaacaggattgtcgtgaccgcattgatgttattgctatccttgtatgcattgcgtgcttcttatcgttggacgaatctgttatgacttatgcccccaaggacccgg

SEQ ID NO: 2755 - DNA, 284 bp, Glycine max
  Clone ID: PAT_MRT3847_102493C.1
ccgcaactttattggaaggaaaatcactctctgtgcacgccacagacttcgtgaatcattttctttggcactcttaggttatttgctgcacactctactatcagaagtaggacttcgtgtcagattaaaactgtttctgtctctgtctcagacctctgctgaaaaacaggttcaagctggtggaaccttggattagtgctcccactctcctatctggtataggacttggtgggtagccttctctataactgtcctctgtatcactctatcctgatcactgactc

SEQ ID NO: 2756 - DNA, 323 bp, Glycine max
  unsure (1)..(323): unsure at all n locations
  Clone ID: PAT_MRT3847_102494C.1
gacaacttaaaaattatttataaaaatgggttgaaaattgataaaataaaattaaattggtttttttaatggctttaaacaaaatggtaaaattgaagatgtatacaaactctaactgaaaaatatcacacattataacagttatttgctaatcattttggcaaacttatgagggcctagaagtgaaaaactataggcagtaggtagtgataatagcttttttatttttactacatatgccttttttgngaagttattataataattggctacaatgtaatttaatatttgcatatataaaaagaatgatgcccacacaggcc

SEQ ID NO: 2757 - DNA, 147 bp, Glycine max
  unsure (1)..(147): unsure at all n locations
  Clone ID: PAT_MRT3847_102495C.1
gcaaaacaacgatagaagcacgtagtggaggaacaacataatggagggttcgtagtagtgctattaataaccgttgcttggaagtannaaggaagtggggatgttatnnnactcttgacttttntgggaatnnaggaggtggaggaa

SEQ ID NO: 2758 - DNA, 814 bp, Glycine max
  Clone ID: PAT_MRT3847_102496C.1
ttctcgagccttcggcgctagcccttgtttgtttccatttcttgcttctattatttacttgtttttctctagtattcatggtgctcgctggtaaacttagtactgaacttggggtgaaagcatccgctaccaaatggttcaacctcttaaccacgcaacttcaccatgttcagaacctttgtgaaagagtgcatgaaaccaagctgcatgatggtgatgactggcacggtgttggtaattcggttaaacactggacttatgtcatagacggcaaggtacacacatgtcaggagagtattgaagccattgatgaagagaacaaaacaatcaaattcatgctcttcggtggagatattagtcagcactacaagagctttaagctgatctttgaagtgactgataagaacgatggcggtgctgctgttaaatggactcttgaatatgagaagatcaaagagaatattgatcctccacatggctacatggactactttgacaaatccactaaagagatggatgcttatcttgtcaaggcatagctcctaaaattatcaagaaaataacaacaaaggagtaatggatttggctttgaggatatatatatatatatatatatatatatataagtgttttatctatatagttattgtgatgtttgaaatgtagaataaaattataatatgcgtgtttgcttctgtccatccttcgtttctgtcgaataaatgcaggttggtggattgaagtatatgtaaaattatgtgaaccggccggtttatgtattgcaaattaagctaaaaacttttatataaaaaaa

SEQ ID NO: 2759 - DNA, 204 bp, Glycine max
  Clone ID: PAT_MRT3847_102497C.1
gagaaacaaagttacaagtaaagtaaattaagaagatcattaatggcttctcttgcaaccttagctgctgttcaaccagctgcgctcaatggccttgctgggagttccctctctggaactaagctctctttcaagccctctcggcacactgttcaaaccaagaaacttcagagtggtggcgtgggtaacaagtatggtgacaag

SEQ ID NO: 2760 - DNA, 303 bp, Glycine max
  Clone ID: PAT_MRT3847_102498C.1
ctgtaaaattcgtgaaatttgctatgcttgtgttattaaaaaaattcgagcattcacttatttcatgttagaaaaggaggatgaggataactttgcataagggggaaagaatagggtttgggggtcaccatttatatcattcgctcaaacagatcaagccttgtaacccttggggtggatctgacaaagagtgacataaaaatgcctggaccaatgaaagatgcattcgcaatagatatgccgccctggtagcctatcgggattccaagaaaaaagcgaggttctgcgaatacgggttgcata

SEQ ID NO: 2761 - DNA, 814 bp, Glycine max
  unsure (1)..(814): unsure at all n locations
  Clone ID: PAT_MRT3847_102499C.1
cccgcgtccgaacatgcgtagtgctcccaccatttcatcacaaaaccctttagaaacccttcgtgcctttttctcttgtgccaagattctctcttcagcgcagcaacttcacgctcaggtcatcatcaacgggcttcacaagaaggttttctatggttccaacatcaccaatgtttatatccaatcgggttctcttcctctggccaaaaaggcttttgatcaaatttccgttaagaaccttcattcttggaacaccattatttcgggttactcaaaacgcagtctctacggtgatgttttgcagctttttcgacgattgcgaagtgaaggcaatgcagtggatggcttcaacttggtgttttccgttaaagcgagtcaaaggttgctgcttttgcataatgggaggttgcttcattgcttggccatcaaatctgggttggagggagacctgttcttcgcgcctgcgattttggatatgtatgctgagttgggttctctggacgatgcccgcaagctgtttgaacgatattcttacagaagctcggttatgtggggctttatgataaaggggtatttgaatttttctttagaatccaaagtttttgagctattctcgtgcatgactaattattttggtttcaaatgggatgctttcacaatggatggtctagttcgagcctgtgcaaaccttttggctgggagagaggggaaagcatctcatgggggtgtgtataaagaacaaatcttctgtgaatgtctngttgctgacatctgttatagatatgtatatgaaatgtggagttactcattatgc

SEQ ID NO: 2762 - DNA, 388 bp, Glycine max
  Clone ID: PAT_MRT3847_10249C.1
gaccgacgcattcgtacgctcggatgcgacaacacaacagaatgggataaacaagaatctaaacattgacatgggcagctaattctcatcagagataggttggacttctaaggtattgcgtcagagagttaacacacctgtaccaaacactcccgttgattctctcaattccaaagcttacttgcttcactgggtactcttcttgagtcagctcgcgcttgcaaccctaacacgaacatttcgactgacgaggatcaagtgttcgatggaaaactaactgcgagggcttgtgctgatgcagcttgcatcaaatacatcagaactgtattccatgagattacgaacttcgaccttgctcttgctctgcttctcattcctactactgagc

SEQ ID NO: 2763 - DNA, 773 bp, Glycine max
  unsure (1)..(773): unsure at all n locations
  Clone ID: PAT_MRT3847_1024C.1
tacggctgcgagaagacgacagaaggggaaaggtgttaggttataaaaaaaaaaaatcttagccacagacgcagaggaggagatggagacgatgatgatgatgagctgcgtttcgatttcgagttcagtgacaagaggcgctattagcgtgggttcctcttcatctttgtgtttcggcacacccaagttgttcaattcagcaagggtagcggtgaatggtcggcgaagaaacaaaggtttgagttgcaacgccatgttcggtctgggggtgcccgaactggtcgttattgccggcgtggccgccctggtttttgggcccaagaaattgcctgaagtcggccgtagcatcggcaagactgtaaagagcttccaacaggctgcaaaggagtttgagtcggagcttaagaaggaacctgattccacccaaggggactcatccgagaaacctattgttacagtcactgagcagcagcaggaggacaatgaggtgtctacttctaaggagactgtatgatattttcgccatgaaataaactattctgttagtttagtatttttggctgtctgagatttcgttatttaaatcaagaccaagctttcaaataaaataaaaaattaattgctactgctggtactagtgaagaaattgatcatttttcttcactttccatcgctcaaatttgttttcactttatttttaactagtattaaactcactttgctcgttgnnnnnnnnnnnnnnnnnnnnnnnnnnnnnnnnnnnnnnnnnnnnn

SEQ ID NO: 2764 - DNA, 237 bp, Glycine max
  Clone ID: PAT_MRT3847_102500C.1
ttttcgatatattagaccttgatgaggctcgaagcaaaggatgacttgactaagcttaattgaaaccacacagcagtgccaggacaccaagctcaacgggccgaaggaggattggacatactctctgtggagggagcaagaaaaaagggagcctttaacataggagaaaagaatggaggtgactataacccaaggcctaccaagaggtttttcgagcaaaactacctccgaaaggaa

SEQ ID NO: 2765 - DNA, 127 bp, Glycine max
  Clone ID: PAT_MRT3847_102501C.1
cgaagcggtgaagactgaactgcaagccatacatgggcagatgaggaccgtacatatgccccagagtagcacatctgcggacaccaactcgggaaagtgggccactactgccgaagccatctcactg

SEQ ID NO: 2766 - DNA, 404 bp, Glycine max
  Clone ID: PAT_MRT3847_102502C.1
ggggaaaaagggggtccctttttaaaaaaaaaggggaggggggggaaaacaggccccttttccccaaggttttttaaagcccttaagggggggcaccgggccaaccttggaaaaaaaaaaaaaaaggccgggggggggcccccccaaaaccgggggggaaaaaaatccccatcccgggaaaggaaaaaacattggaggggggggggaaacaaaggggcaaaattgggcaaaaaaaatttttaggacccctattttaggcccccccggggaaaaaacactagccccaaaagaaaaattccatggggaaaattttccagggtccaactttgcattaaaaaggaaaggggccttgcataatggaaagacaagaatttcctgggccggggcacccaaaaagggggggg

SEQ ID NO: 2767 - DNA, 138 bp, Glycine max
  Clone ID: PAT_MRT3847_102503C.1
attcggctcaagtcgaatccctcttcatcttcttctatctgtgccgagcatcatggcctcacaagcagtataattcttggctatgtctgtgattccgacgatgattttcgccattctcacagcaaagaaccctctcta

SEQ ID NO: 2768 - DNA, 324 bp, Glycine max
  Clone ID: PAT_MRT3847_102504C.1
ttaaaaaaaaaaaatcaacgacgtgtcaatcataagtggcgatcttaaccataatgaaatcaaacaaaaaaataaattccctcatcactaccaaatccaatctcatagacagacacacacttcccataatacatatcaaattccataaccatattttcacgtgacgggatgaaaataacacaacattacacataaccttacatcttaccacaaacacatacaccctgcaaatcactactattggtttaaacctcatcttcctgatgttcttcctaatcttcatactcatagaccttatcatcatcaggtgcatctatgtattaa

SEQ ID NO: 2769 - DNA, 358 bp, Glycine max
  Clone ID: PAT_MRT3847_102505C.1
aaacttgcacgttggcctgcgtagcgcaacccgaccggaacccgtgccgacgagctcactacttcgtcggccgccctctttcttttttttttgataaaattacttgtctttactcgtgacgtaatcatcacttgggtgcggagagacaaacaaccctacgttttgtggcgtgaatacaaacaatttcttctactgaaaccctcgctgctctttgatctatgttccgattcaaccttcgaatcagatttctctggtgccacagaccctcatagcctcctaaactggtgcccctccattattcagctgcctcacactgcattcgttagcgggaaaagatcttaatccccttgtaagaaaa

SEQ ID NO: 2770 - DNA, 291 bp, Glycine max
  Clone ID: PAT_MRT3847_102506C.1
ggtgttattcttgattttgtttatagcaataaaaacatgattatttttttttcgcttggaaagggctaaacacgctgatataaattaaaactcattggcgtgtgggaaaccccttgccacgcctgctatagttaagtagcaaatgagggacatattttcactgatccttctcaaactatatctttatggtccgaattgggatgctttcatgtacagagcgcggaaccaatgggaccggaacactttttttattttgagcagccaagtcctttaacaaatatggtcttccca

SEQ ID NO: 2771 - DNA, 292 bp, Glycine max
  Clone ID: PAT_MRT3847_102507C.1
gcatcttccaagtctcattaaaccctagatgtcatcggtcaaacgcaaaatctgctcatgacttccccatcgaagctgttcttagatcttatgggggaatgcacctggacgtgtcggtggaaccgataatcatcggaccatactctttctgcgttcggatgctgacgagcctcgccatccaatagacacaatctcatcttaagaaaacccccatgagcaggatgactaaggctttaccggcacaatcatcctcgagatgtctatatttaataagatgcttcataataacatc

SEQ ID NO: 2772 - DNA, 505 bp, Glycine max
  unsure (1)..(505): unsure at all n locations
  Clone ID: PAT_MRT3847_102508C.1
cttcgatcagttggagattgtctgagtctacgaggtactctgcaaccaaactactattactacttggtttggtttccctaagttagattcaccatcaggttctataggcattattatactataatgtttttactctaattgatttaccttcattcatttcttatgttgtataaaatgattatcatcactagaggctgctatttcgatttctgaatcttgcctgctattatattgaattgatccctagtgtattgttcccatttctttcatatgatccggttcctgtccctgtttcttgttctgtccttggttccttgtcaattattgttggcttctttgaaacaatctgaacttcttcaggtacatgtcttgtaatttcttggtcgagttcaacatgaactctcttgtgcaaaactttagtggtcctatcacggaattttcaaatcagaaccaagtagagaaggggtttgactntgagtttgatgattcatcttcttccttttct

SEQ ID NO: 2773 - DNA, 283 bp, Glycine max
  Clone ID: PAT_MRT3847_102509C.1
attttcttgtatttatcattttattgttacttagaaacttatgattctgattgatatgtaattccctaataatcagtattggttacatcataaggcatacccatgcaaccctgtgatcatctatgaatgttatgaaccactttaagcctgtgacattgttaacgtgagaaggcacatgatagatgggcgaagggtgtatgttagctgtcagttagttaggatagcaaggttaactaactgttagttagttaagaagctataaataatcaattagagggaagtt

SEQ ID NO: 2774 - DNA, 149 bp, Glycine max
  Clone ID: PAT_MRT3847_10250C.1
tgcttttgctttggttggaagaccaaaacgggaagaaagattacagcgataagatactgctagatctcactcactttgctgaccaggggcagcctttgttcatctgaccggaacgaaacgacctgcccgttgcccccttcatgtttgcc

SEQ ID NO: 2775 - DNA, 310 bp, Glycine max
  Clone ID: PAT_MRT3847_102510C.1
aggctggtagaaaaagaccgaagggggggaacatttgttgttggttaattcatccgcagatggcagtggaaaatatcaaggtcgacgagtattccaacgttgcccctccatcactatcatcacaatcactatgcctaccatacactttgtgttatacttggttccacacgttctcctacagtgacgggatagtcttccattcactaaaggcacagcaagtacagtcttcctgcatctagacatctgacaatcgatgatctagatggacacgcactcacagactcgaacattaacgacctctcgctggcaa

SEQ ID NO: 2776 - DNA, 374 bp, Glycine max
  Clone ID: PAT_MRT3847_102511C.1
cataaaagaaacttagattcttctactactttacaattggatgattcttatgagtcccaacaacggcattccctgaggcgctggattgatgactctcccaaaccacagtctgattataatcataaccatcgctcgtcgtcaatctatatggcctgaacttcgacaacatgcagtcagacaggactaagttatcaatgttcataccaatatcttcctcatatcacttaatgttatttgcaacttgcttggcctcgaatgaataactcatgtcgtcgcacctaaggatatcgtgggagttctaccccattcaaaatgggattatggaatgggaagtgcctgcaatgaagcaaacactaggcaagtccaattggttt

SEQ ID NO: 2777 - DNA, 243 bp, Glycine max
  Clone ID: PAT_MRT3847_102512C.1
cccacgcgtgcgcgtactcatatatttgtcttcatcgctgacacgtgaacacacgcgtgtggctacacataagcggactgttggcctaacaacttatactactcattttttgcccccttaaaaaacttcttattgaaatctttaaaagcgattacttcaaacttttttttattttattcaaacaatttttcttaaagtttcattatttcccttaactataattgtctataatattaggttact

SEQ ID NO: 2778 - DNA, 261 bp, Glycine max
  Clone ID: PAT_MRT3847_102513C.1
cccacgctgttcggacgttctcagttcctgtgcagtcttgactggttgagctcggatcctttgaaatggtgcctgaagagcatcgtgttgtggcaatggccaggacaggatttgatagattcagtcctggacaggcgtaggtgtatccatagatttttggtcctgagttaagcctgggggattcataatctcaggctatagctattagttcatcgctaaatgtggctgatgatccggctatcacttcagactcatatgaat

SEQ ID NO: 2779 - DNA, 302 bp, Glycine max
  Clone ID: PAT_MRT3847_102514C.1
ggatgggaatcactttttattgagaccggttttttgaactataaacaacactacttgcttcgaaacactctatcctagacctatttatcggttgaatatacacttaaaaaatgttgcctgcaggaaaaccagattgcttcatgacaacatgaccacctgatgaaaatttatcatatctaagctcatttcatctttaaaattcgatattcttaaggcggatttaaactcagcatcgaacttgttccacaatgccactaattcttaccctgcataacacatataggcctaaacttgtatgccat

SEQ ID NO: 2780 - DNA, 379 bp, Glycine max
  Clone ID: PAT_MRT3847_102515C.1
aacaatactttatatcgcttggtgcttcttatttatttaagctacaattgcatcttaccattcactcactgataaacgctgaattcattcatagcagcaaacccatctccaacaacatgagttcccaaacacgcaacctcaactttgttctgtttcctctgatgtcccagggccacatgatccccatgatggacatagcaaaaattctggcacagaacggtgttactgtcacagtggtcacaacccaccaaaacgcatcacgcttcacatcaactttttctaattcccaaatccgattactcgaagttcaattcccataccaagaagcagggttgccagaagggtgtgagaatctcgacatgttaccttcacttggcac

SEQ ID NO: 2781 - DNA, 441 bp, Glycine max
  Clone ID: PAT_MRT3847_102516C.1
tccttcttttaatcccactttgtgccacctgatggttttaaattgtttttgtggttgccccccaattactgaaattgtggaacatgtggcgtaatgtggttgcaattgtagtcaggatatagttgcaaaaaactcccaacctgtaatactgctgctgcaattgcatttggaaactgctatttaaaaccatatactccctttgactagttcttgatcgctgcttgtttgattgtttcaactttcaattactatcaacctcatgccttttccctttgtgttaacaacttgctgctagactgagggatattgtggtattaagacgacagattgatgacctaccgtgccaatcaaaagtcatccagtacgaacgccggctctcagaactgtatgcacaaatccaggttcatgaattgttttgatgaaaaaaagtttatttttaag

SEQ ID NO: 2782 - DNA, 492 bp, Glycine max
  unsure (1)..(492): unsure at all n locations
  Clone ID: PAT_MRT3847_102517C.1
tnnnnnnnnnnnnnnnnnnnnnnnnnttttaccctatttccactcacttgatcatttttggagtgaaggagaagtacccgcccttatgaggagatcacatcttttgaacaggactagatccaaaccttttattagttttttagctattggaaactcatgaacacgttacacgcataaatttgagggcactttagctgattctctgataaataatgcctgtgacaaactcattccatatgttgttcattatgatagcaactacctaagtggaataaggtacctattttcttaaaagctcaggaatggcccatacctgttttagcatcccaagtattctccaagacaaaatccattggattttctttggtaccaaggacagaacgccttgggggaattattatcatcaataccttaggcctagggataatggacccaaatgaccctattcctcttgaaactctgactataagaccatcttcaatatatttgggg

SEQ ID NO: 2783 - DNA, 1818 bp, Glycine max
  Clone ID: PAT_MRT3847_102518C.1
aaattaaaaaagtttcattactaatacataaacttggtaaaattcttaaattgatataacacatgatcaaaacaagaattaagaaactcaaatggcattcaacattggagacagtttacaaaggaataggagtttaagaaagcttgaaaatcacttgagtaaatctcgaagcttctgacaaaatccatcaacacatgcggactccaaattgtggcttactaagaagttcctcaattttgcatgatttgtcctcacttctctgccaacttcattctcatcatccatcacaattttcacagctttgcacacactctcctttgtgaacaacccgtcttcttcacccttctccacttccaccccaaccttatttgtagccatagtccttgcattaagtatatgatcagcatctacctgcggcagcaacactatctgacacttatttactagtgcctcggttaatgaaccagcaccacaatgcgtaatgaagcagcctactgaagggtgttccaaaatcaatctgttgctgtatccatccactgtggacaattcctctcccttcaactctttctttgaacccttctggtagagcagcttcaattgtctcaaacccaattggaacttttagaacagccaaaaaaggaagccctgtgagttcaagacccaacaaaaattcttggaattgatcatgtggtaatttccattcactaccaagcacagaaaataactgaatcaggcttgaacctttcaagccatgaaccccattttccctctaaaacagtgttgggtggctcaggtatgataggtcctgaaagcagaacagacttcccaaactgttcttcaaggtaatcaacataaggcccttcaatttccctgcaacctttgaatccaattgcatcagataggcttaaaccgccgtaaagacggtcataaaagagaacaccactaccaaactcccaattcctcttagaagcaagaaacttagcttcatgtgcatgaagcttgatggatgagacagggtacccaagagggggttgcataagatcaacttcagttaagttaacactgttttgcatccttggtggggatgcattgtaagctactgttgctgggctaataatcatgtattgaaaagatttgattcccaagcggcgagtcaagtttggtagccaatatgtgaagtcaaagaaaacaatttgtggctttaactcaatgagaagaagctctatgtctttctcagtgcgatccatggctgtcataatgagtggacctaaagagaaagagacatcagaagtggtttctgcgccatggggaaggccttcaacatgaggaacattgatagggtaaaaggtgatgagatgtgggaacaggttgaattgctctaacttgtgttgcgttcttttggggatgaagaaggagattctgtgtcccctctttgctagtttgtttgagaggtgaagatatggggttaggtgtcccatggcaaaccatggaaacattgctatgtgcaaagaagatgcatccatgttcgtttgcctggacctgtttccaacgtctctaacctgaatcctcatattataagtaaaaatgtaataattaaaataacatgcatacttaaaatataaagcgttgagttgaaagctactttggatccttctacgaaatagtgagggcaagctaccaacgtggggcaattttgtttaaaatatataatttcatcctagaatttaaattagtatctcgaaatggatatgttgaatgttatcatttctaaaactttttttttccattcgtaaataaatatttttttattgaagttgt

SEQ ID NO: 2784 - DNA, 546 bp, Glycine max
  Clone ID: PAT_MRT3847_102519C.1
cagcgtacgccacgcgtcgtgttcctcgatatggatgaagtctgtgagacttctgtagactcattatgctgctgatcaatttagagcaaagcaacaatagatgacattcggcagagttttaccaatttgtgcagtgaatatgaacagtcaggaaattcattcaagaatccatctgctctcttctactgtgcaaccagtaattcttgcatgagttcggtatacagcaatggtgatgattttaagaccttctcccgtatcacattatctgatgctcgaaggggacttgatcaatatatacaggagacgtcatcaggccaatcctttaagtctgacttagacatgtaccttgaggaaccggtctatcgccaaaaggaagggcatttagataattctgacatcctgtgatggtggaagtcctttgcagcaaagtatcctgtcctttctcaaatggctcgggatattgtagctgtccctgtatctatcatcccattggacagtgatgctcggacattaaatgagtatctcagtaccatggacccttcaaca

SEQ ID NO: 2785 - DNA, 443 bp, Glycine max
  Clone ID: PAT_MRT3847_10251C.1
aaaggaaaaggcaccaaattcaatttatgtggacacttaagcggaaaacgcttgaggacgacagaccaatatgaaaaatataggaaaatcggggggaacttggaatcctctttttgcaccttttactttcgagaattataagaatgttacacgcgggtccgatcacatcttctatctctcggatcagcacaaccttgaggaacagaaatattcacttgccaagtttgctttggctccaagtcaagattgggagaaagttcccctgccaatagcatcctcgtttgcattttcaagtgcagacaagttcaagttctcgccagcccattggactctatggacattctctagttggtggacaaggatgttaccatacgtcaagagcttctccatagtcatcgggggctgctcaaaggacggaggtccatctttcgagttcacaagct

SEQ ID NO: 2786 - DNA, 299 bp, Glycine max
  Clone ID: PAT_MRT3847_102520C.1
ggtataaaaactagaatgaaaaaaaatagaagcggcccgtgtaaataaaaaaaaaaaaaataatgcgggcgctctataggatacaaacttacatacgcgcgcatgcgacaccatatatcttttatatagtgacataaaatcaaatcactgggcgccgttttacaaaacatcgactgtgaaaaaactgtcgttacacaaattaatatcgtttcagaacatacccctttttccagatgtcgtaatatagaaaagacccgcaccaatatcccttttcaaaagatgtgcagactgaatgtcga

SEQ ID NO: 2787 - DNA, 550 bp, Glycine max
  Clone ID: PAT_MRT3847_102521C.1
cggttgcttggggtgattttgttcaaggaaaagatcgggccatggttaaaggtaatgggggatgtgctgctgttggcttgacatcaagttacactccaactccattggtggaatctggacagcaaaaagacagagggttaattgtggagtactttggcaggatgtcttacgttgctcataacgttaatcagacccaagagaaagataccttggagggaaatttctactttgatattaactctcgctctagaatggaaaaagtctcctctacaaaagcacagattcgtttgtggaaaaccttcaaatatgatacaattggtgctggctcacattcttcagaagattttctctggaaggaagatcaagaaataccgaaaaagattgatgccatattgagacacagaatagatcctcaatataatgaggttcaggctcagatggaaacaaatttgtttaaattgtctctagatgatgttgaaactcctaaaggttacatgttggatcttaaaatttctcatttaaaactgcactccccaaaacacagttggag

SEQ ID NO: 2788 - DNA, 2986 bp, Glycine max
  Clone ID: PAT_MRT3847_102522C.1
cccacgcgtccgcccacgcgtccgtacggctgcgagaagacgacagaagggaagcctgatagcacgcagagactaacgtcgtctcctgcgcccttcgtcaatcgcggccgacaagcccgttgacacgcagagatttacgtcatcttctgcgctcacaagatctgtcatactgacttttgagtcgcgctgacgggcggaaatatccgagtggttatccgtataaacattcttttgctatctgtaagacagaacgcttgatagcatgcagagactgacatcgtcttctgcaccttttgttcccccggggacaacaagttatttgcatgtggagatgttatggtcacccgcgactctcgtcaaccgagaggaacgaaattagtgtcttatctttacttcccttttatctccaataaaagacaagtaaagaggggtaactgtcataccctaatttcgtccggggacctttgcttgatgacatgcaacttttctttggtccttgtgatgtgcttggcatccatcattgggcaatttgtgaaattccaggacatgccggaaaaccaaaaaatattgatgcacaatccgtaagtttccgtgacacaccggaaatcaaatggaagcatcgttgcataattaagtgaggttccgtaacattccgtaagtcaaaagggggatgattatgtaatccgcaaggttccgtaacattacggaaagaaaacaagtagcgttacgagattcgtaagtttccgtaactttacgaaaaaagaatcaccaaaaaaggtaagggggtgaacttatcaagataggggtgtaaatagaaattcaaatctaggcccttctagaacattttggaagttgggttgcttaaggaggaagcaactgggcggcaagctcctccacgtttttgaaaaatggttttcggggcttccgcggcttccgtaatacttccgtaaaatttccgaaaaccttgggtaagcatattccacttaacattggtaaaagggaaaagaaaaaagatgaaaatcaaattcgaaaacagttccgtaaggcttccgtaacttttccgtaaaatacgaaaaggggggtgaacttagtaattcgggtgcgcttagaaatctacttaattaagtctttgggcggcaagcaccttcttttttttctataaataggggaggggggagctgtttcaaaatgttcaagacccctttggctatgcatttcggctattttgggcaaaaaaacgttttcgtgaagaaaaatcaagtcgaagtacttccgtaacgcttccgtaagcgattctgtggaaattcttcatcgttcttcgtcgttcttcaccgttcttcatccgttcttcgttcgttcttcgttcttcaacgggtaagttttcgaatccgagactttcaattcatttcttgttttgtgtactttcactttaatttcgtttactttcagttttcttttcttcagtttttaacgtgctttaaccatttatttaagccgttttctcgtctaataaatgataaaatgaatttcaaccgatcatttgtgttgtaatctcgtttaatcactgttaaaacgaaatctaaccgatcgttcacgctataacctcggttaaaccaaaaaaagtaaaataataataaaataatcaaaatatctcgaaaaataataataaaataatcaaaatatctttgaataaaataataaaaaaaatcaatcggacgtttttctttgaaagtttccttgaatgaattgattaataaccaaagtgaaactaagactaaaatcaactcacaaatcaagtttttttccgaaaaatcactaaaaaccgttttaaggtccaacgccttaaacgatcctctttgcttttatcggttaacatggaccgttcaaaagcataaaatcaacatgtgactttaccgcttttgcaagaactacgtaggtctgatttcctcatcgcaattgaggatacgtaggagcaaaagccccgcttttgtcgaccaccccaagagatcgttaatggtccaaatgccttaacgtttctctcctttcaaaaacaagagatcgttaatggtccaacgccttaacgtttctctcctttcaaaatcaaaagaccgtttaatggtccaacaccttaaatgaccttttgttcaaataaaaaacatattttgcaaaaagataaaaaacaacttaaccaaacactttgttccgaaagaactacgtaggtctgattttctcatcccaaattgaggaatacgtaggagcaaagggaaacacccttgtcgaccacaaaaagagaaaaaatataaaaagggtataaaggatataaggacataaaagggaacgtaaaaatcaaagtcatgtttgcacattcgattaagggttgtcgtcccttgtgacggacgtgtggggtgctaataccttccccgcgcgtaaatacaactcccgaacctttcacttaaaagttcgtagatcgcgtcttttccggtttttccgacgttttcctcaaataaacgttggtggcgactccgcgcgtattcctttcatggaacacgcatcccgcgagtcacgtgtcgccctcccgccgaagggtaggttgcggtcagacatcttcatgtttttggttgcaaattttttgtgcttaataacggtaaagataatctaggaaaatttgatgcaaaatctgatgaaggcatctttcttggatattcattgcaaagtaaagcatatagaatatataacaaaagaactatgagtattgaagaatccattcatgtttcttttgatgaatctaatgctattctatcaagaaagaatatactagatgatattgcagaatctttagaacaaattcatattcatggacaagattctaaaggaaaagggaaaggaagcaatgaagatcctcaagaagaagcaaaatcaaatgatgaagttccaaaagaatggaaagcctcaaaggatcatcccctcgatagcattaatggtgata

SEQ ID NO: 2789 - DNA, 409 bp, Glycine max
  Clone ID: PAT_MRT3847_102523C.1
cggctgcgagaagacgacagaaggggaaatcaaaaaagaggtaaaataataatataataataaaaaaaatgtcttttagtaaaatgaagcaaaaatcaatcggacgttttctctttgggatttttcattcttaatcgaattgactaataactaaagtgaaactaaggctaaaatcaactcgcctagtcaagctcgtccacaaaaaagtgagtaaaaatggtttgaaagtttatcatttcgatttcttaccaagttaaatggatcatttttaaaggcccaacaccttaaaaatgatcacaattcaagtaaaaagaatcgcttgattcactcttaagaaagaactacgtaggtctgatttcctctccataggagggtacgtaggagcaaaagccccgcttttgtcgacctc

SEQ ID NO: 2790 - DNA, 708 bp, Glycine max
  Clone ID: PAT_MRT3847_102524C.1
gaattacccggtcgacccacgcgtccgacggtcggaatttgttttaaccaaaattaacggatgatacaattcaaacgatcggtggaagtttattttatttttagattaagcgagaaatgacttaaataaatggcttaagcacgtcaaaagggggtataaaaagtaaataaaaaggagaataaaaatacatgaaacaaaatgtggaccaccacgggtacataaaatgaattgaaaagcttggtttgaggtacttactcattgaagactgaagaaaacgaagaacgaacgatgaatcttgaaaaacggtcgagaatcttcgcgtaattactcacggaaacgttacggaagcgcctcggcttggattttcttcacgaaaataattttcctcagcaaattcgagagagagagaagtgcctaaggggctgaacccttttcttcttcacttctccccctatttatagcaaaataggggagaagcttgtcgcccagctcacccaagcgagctcagctcgcccaggcgagcaaggttgcttcctctagaagcaacagccttctggaggaatcttctggagggcccaagtgggcctgattgctatttgcacccccctgtttactaaatgcaccccctttctatttttttagaattctttctccgtaacgttacgaaactttacgaatttcataacgatacttatttttcttgcgcac

SEQ ID NO: 2791 - DNA, 1015 bp, Glycine max
  Clone ID: PAT_MRT3847_102525C.1
gggtggcaagctcctcccatattttgctataaatagggggaggagtgaagaagaaaagggttcagcttcttaggcacttctctttctctctggaaattgctgaggaaaattatttccgtgaagaaaatccaagccgaggcgcttccgtaacgtttccgtaacgtttccgtgagtaattacgcgaagattctcgaccgttcttcaagattcatcgtgcgttcttcgttttcttcagtcttcaacgggtaagtacctcaaaccgagcttttcaattcattctatgtacccgtggtggtccacattttgtttcatgtatttttattttcgttttcatttactttttatacccccttttggcgtacttcagtcatctatttaagtcatttctcgcctaatcgaaaaataaaataattttccaccaatcatttgaattgtaacatccgttaatttctattaaaatgaaatcagaccgttcggtcatgtcgtaaccacgttggaaaccaaaaagaggtaaaataataatataataataaaaaatatcttttagtaaaataaatcaaaaaaatcaatcggacattttttctttgggatttctctttcttaaatcgaatcgactaataaccaaagtgaaactaaggctaaaatcaattcataaaccaaaattttgtcatcgcctaaaaaagccattttcaaaggtccaacgccttgaaatggtcttttccgcttttattggttaagtgtagatttctaaaaagcctaaaatcaatatgtaactttgttacctctttcaaaaataaagaaatcattaatggtacaatgccttaatgttttctcacttttcaaaagaatcgaaagattgtctaacggtccaacgccttaaatgacttttcattcaataaaaactaaaaaataacttaaccaaaacgctttgttcaaaaaagaactacctaggtgtgattttctcatcacaattgaggaatacataagagcaaagggaaatgcccttgtcgcccac

SEQ ID NO: 2792 - DNA, 882 bp, Glycine max
  Clone ID: PAT_MRT3847_102526C.1
agtgaccttgctcgcctgggcgagctgggcggcaagcttctcccctattttgctataaataggggaagaagtgaagaagaaaagggttcagccccttaggcacttctgtctctttcgaatttgctgaggaaaattatttccgtgaagaaagtccaagccgaggcgcttccgtaacgtttccgtgagtaattacgcgaagattctcgaccgttcttcaagatccatcgttcgttcttcgttttcttcagtcttcaacgggtaagtacctcaaaccaagcttttcaattcattatatgtacccgtggtggtccacattgtgtttcatgtattttcattctcgttttcatttactttccgtacccccttttgacatgcttaagccatttatttaagtcatttctcgcttaatctaaaaataaaataaatttccaccgttcattttaattgtattattcgttaatttctgttaaaatgaattccgaccgttcggtcgtgccgtaaccacgttggaaataaaaaaaaaggtaaaataataatataataatcaaaaaataccttttagtaaaataaagcgaaaaaatcaatcagacgttttctctttgggatttctcattcttaattgaattgactaataactaaagtgaaactaaggctaaaatcaattcgcctagtcaagctcgtccacaaaaatagggttttgaaagtttatcatttcagtttcttaccaagtaaaatggatcatttttaaggtccaatgccttaaaatgatcccttttcaagtaaaaagaatcacttgattcgcgcataaggaagaactagtaggtctgatttcctctttgatggagggtacgtaggagcaagagccccgcttttgtcgacctc

SEQ ID NO: 2793 - DNA, 127 bp, Glycine max
  unsure (1)..(127): unsure at all n locations
  Clone ID: PAT_MRT3847_102527C.1
gtgcgcacgatcttatctacnaggaataaataaataattcctcagattgatccttcgaggcggcgtacgatcggtacctgcatctcttcatttccaggaccggagaaacagtgctgcgccaggtcca

SEQ ID NO: 2794 - DNA, 297 bp, Glycine max
  Clone ID: PAT_MRT3847_102528C.1
aaaacccccaaaataactttttttcaactaaaaaacaaggggggaaaaaaaattttacatatttattacaaaaaaaattattttaaaaaaaatgggcacaacctaagaaaccctaaaaacattttacaaagttccatttatatacccctcccccactttcattggaaaattcatgctttgacaaccaataaaatttttatcccaaaaggttcctatggtggtcccccaaaactcaaacatataaaattggttttgtggtttcctcccctggttaaaaaaaaattagaaaacaatttt

SEQ ID NO: 2795 - DNA, 1544 bp, Glycine max
  Clone ID: PAT_MRT3847_102529C.1
ccacgcgtccggccaaaaacacaaaaatgggggaggtgaacttatcaagataggggtgtaaatagcaatttgaatccaggcccttctggaacattttggaagttgggttgcttaaggaggaagcaactgggcggcaagctcctccatgtttttgaaaaatggtttccggggcttttgtggcttccgtaatgcttccgtaaaatttccgaaaaccttgggtaagcatatttcacttaaaattggtgaaagggaagagaaaaaaagatgaaattcaaatccaaaacacttccgtaaggcttccgtaacttttccataaagtacgaaaagggaggtgaacttagtaattggggtacgcttcgaaatcttcctcaagaagcctctgggcggcaagaacctccctttttccctataaataggggagggatgggggctgtttcaaaattttcatgacccctaagctatgcatttcggctattttgggcaaaaaacacgttttcgtgatgaaaaatcgagtcgaattgcttttgtaacgcttccgtaagcgattctgcggaaattcttcatcgttcttcaccgttcttcatccgttcttcgttcattcttcgttcttcaacgggtaagttttcgaatccgagactttcaattcatttcttgttttgtggactttcactttaatttcgtttactttcagttttcttttcttcccttttgacgtgcttaagccatttatttaagtcatttctcgcttaatctaaaaataaaataaatttcccccgatcgtttgaattgtatcatccgttaattttggttaaaatgaattccgaccgttcggtcgtgccgtaaccacgttggaaatcaaaaaagaggtaaaataataatataataatcaaaaaaatatcttttagtaaaataatgcgaaaaatcaatcggatgttttctctttgggatttctcattcttaattgaattgactaataactaaagtgaaactaaggctaaaatcaactcgcctagtcaagctcgtccataaaaaatagggttttgaaagtttatcatttcagtttcttaccaagtaaaatggatcatttttaaggtccaacgccttaaaatgaccacctttcaagtaaaaagaatcgcttgattcatgcctaagtaagaactacgtaggtctgatttcctctccaaaggaggatacgtaggagcaaaagccccgcttttgtcgaccaccccaagagatcgttaatggtccaaatgccttaacgtttctctcctttcaaaaacaagagatcgttaatggtccaatgccttaacgtttctctcctttcaaaatcaaaagaccgtttaatggtccaacaccttaaatgaccttttgttcaaataaaaaacatatttttgcaaaaaaagacaaaaaaccaaacttaaaccaaacacttttgttccgaaagaactacgtagggtctgattttcttcattcccaatttgagggaatacgttaggagcaaagggggaaaccacccttgtccgacccacaaaaaggagaaaaaa

SEQ ID NO: 2796 - DNA, 741 bp, Glycine max
  Clone ID: PAT_MRT3847_10252C.1
gtttcctatccttgtcagtttgtcagctttaactgaaaatcaactcattcaggtcctcacagaaccaaagaatgctcttgggaagcaatacaagaagatgttccaaatgaatggggtaaagctacattttacagaaaacgctctaagatcaattgccagaaaggcaatatctaaaaatactggtgctcggggattacgatcaatattagaaaatgtgttggtagatgccatgtatgagattcctgatattagaacaggcgatgatgttatagatgctgttgttgttgatgaagaggctgttggaggtgaggggcgtgggagaggggctaaaatcctttatggtaaggatgcattggatcgatatctttcggagcagaaaaatgattcagagaccatggaggcatcagccgcagataatgaagcagatacggaacttccttccattgttgccagcatgtaacttgttgcaaattatttattacagttgtctttgtacatatagttgatacatttggcttatgtggcttgggcttgaaatcaatgtaccatcaatcaatgtagtttccacggtaaactccgtggttgcttttgcacaaatcatagtgaggtaaactaaatgccacatacttcttataagtgtgcagtacctgattcgttatgtaaatgttgagtggcattatttaaagaaccaaaaatgtgtattgttaaatgattcgggttcattttattcctggttttgtt

SEQ ID NO: 2797 - DNA, 314 bp, Glycine max
  Clone ID: PAT_MRT3847_102530C.1
gaacagtggacgagaaacggccgcaatgaatagcagggctttattcacaacaccaggaggggcaaactgagctcaacaagggcgggcatgaagaaatgtacgaatcaaaaacaggaggaactcggaggcgctgaaaggatcaaaaacacaaccagcatcagacgtaagaccacgaacacgacgatattacctggacaatcgagagaacaacagcaacacttgagactgggcaacaccctaaacatgtaggaaggctaaagtgaacagcgaagactgcatcctctggggcgttaaagacacacgagtgtgaaatg

SEQ ID NO: 2798 - DNA, 1757 bp, Glycine max
  Clone ID: PAT_MRT3847_102531C.1
tcattaattgttttgtgtactttcactataatttcgtttacttccagttttcttttcttccgtttttaacgtgctttagtcatttacttaagtcattttctcgcctaatcaaaaaaataaaataaatttccaccgatcatttgaattgtaacatccattaatttctgttaaaatgaaattcgaccgttcggtcttgccgtaaccacgttggaaaccaaaaagaggtaaaataataatataataatcaaaaatatcttttagtaaaataaatcaaaaaaatcaatcggacgtttttctttgggatttctctttcttaaatcgaatcgactaataaccaaagtgaaactaaggctaaaatcaattcataaaccaaacttttgtcatcgcctaaaaaagccattttcaaaggtccaacgccttgaaatggtcttttccgcttttattggttaagtgtatatttctaaaaagcctaaaatcaatatgtaactttgttacctctttcaaaaataaagaaatcattaatggtccaatgccttaatgttttcccacttttcaaaagaatcgaaagattgtctaatggcccaacgccttaaatgacctttcattcaataaaaagatgtcttgcaaaaaaggataaaaaagaataacttaaccaaaacgctttgttcacaaaataactacgtaggtctgattttctcatcacaattgaggaatacgtaggagcaaagggaaacgcccttgtcgaccacaaaaagataaaaacataaaaggcataaaaagacgtaagaacgtaaaaagggaaaagaatataaattgaagtcatatttgcacatttgattaaaggctgccgtctcttgtgacggacgcgtagagtgctaataccttccccgtgcgtaaatacaactcctgaacctttcacttagagttcgtagatcacgttttttccggtttttcagacgtttttctcaaataaacgttggtggcgactccgcgcgtattcctttcgtggaacacgcatccggcgagtctcgcgtcgccctcccgccgaagggtaggttgcgacaccttgaaaccattccaagaagcctcttgtataaggtttttttgaagacatgttcaacgacatgtgtacttgtttcaaatgatgctttaattttcgtgtgttgtagcgtcatcatgttgttcatggcatcccaaacactgcatgagtctccaaagctattttgtaacactctttttaaagcccagtgagtagattcaaccctacatttcagatacacaaataacaataaacatatacaataataaagttccatcaattcatcaacgttaatagaaataattgaacaatttcatacctgtttgttgttgtgttacctaagtgcatcaccttattcgtcaacacggtaacaaatttttccttgtgtgggattatccatgtatccttgacatagtcaacaaacattgaccaaggtgaccaaaccatttcaaacttcttcagccactcatcaaactgctgctccgaaggacaatcaacaagagttccccaggcatccatgacatactcccaagcatttctttgaccaattaatgatttacatttggctttcacattcctttttatgtgaaagctacacaacaaatttgtacacttagggaatacagttttcactgcattcatcaatgtttggtctctgtcagtcacaataacttcagggagggcatcacgtcttgaaaatatacctcagaagcgttct

SEQ ID NO: 2799 - DNA, 2115 bp, Glycine max
  Clone ID: PAT_MRT3847_102532C.1
atgcaagacaaaattgattgcaataaaataaatacgataaggcacacagaattacagacttgatttatcttggttcggccacttctcgtgcccacgtccaatcatcaagcaacccacttaagattttccactatctctataaattctttataaactttgaacacaccttgggatccctcaccattgtgttcaagattctccaagagacaatcagtctcttgattactattgactttctaagatgaacaaaaagatttctttcctttagagtggatgatacaaattgaagatcttagaggaatttgatgcaatcctaccccccaagggcattgggtagaagactccaagaagattgggccaaagatgcaagagaaggccataaggttctcatgagccttagggtagattttaggtccatgggctaagtatgaacccacttatctttgtacatattagattaaggtttcattaattttgggtcttgtatttagggctccataatgtaggtagggtaccctagaaatataggatttttcagcccttgtattttagggcacctagactagtttttgtattaggggtagttttgtaatttcacatgcactaagtgaatatttgatgtgtgtggttggaaataaatttaattgaattgggagaagtccaatccaattaaattttagagggggaggtgagcatttgcttgctacaccccattgccacatcatatagtcacactttgtgcatgtccttcatgctttacatgcctcatgacacctaagcacacttagtggagaatcttggacttgatcttggattagtgggctgaaccatagctaaaattcactaatcataattagtgaaattttgactccaaaaatttgactccacaaattcaatttcaaattcaagtgaaatttgaatagaaattcaaatttccctccaattttgtgtgacacttaggctataaatagaggctatttgtgtgcatttttggcaactttgatcatttgaaaattaaacttcagatttcagagctcttttagagcacaaaatttcgtgctcctctcttcctctcccttcattcatctccttcttcctccaagctcttatccatggcctcctatggtggtgagcttcttctagactcatcttctccttgaagtggcgtctcctctctctctccctttctccattccgctaccattcatcttccaagaagcaaaggaatccattgatgaagaagatcctaggtgtcgcaatgtgcccttttgcgggcgagcgaggcgaggctcacgggtgcgctttccaaaggaggaagggtgcgcggagtcgccaccaacgtttatttgtggaaaacgtcggaaaaaccgaaggaaaccggtcaaaaatgaaaattctaagttcgggagttgtatttacgtttgaggaaggtattagcacctctcacgtttgtctcaaaggacaacaacctatttttttagaattgtggaaattgtattaccttaacttttatttctttttattttttgaggtcgacaaaagcggggctcttgctcctacgtaccctccatcaaaagaggaaatcagacctacgtagttcttcgttatgcgtgaatcaagcgattctttatacttgaagggtgatcattttaaggcgttggaccttaaaaatgatccattttacttagtaagaaactgaaatgataaactttcaaaaaaacctatttttgtggacgagcttgactaggcgagttgattttagccttagtttcactttagttattagtcaattcaattaagaatgagaaatcccaaagagaaaacgtccgattgattttttgctttattttactaaaagatatttttttgattattatattattattttacctctttttggtttaaccgtggttacaacgtgaacgatcggttaaattttgttttaacagtgattaaacgagattacaacacaaatgatcggttgaaattcattttatcatttattaggcgagaaaacggcttaaataaacggttaaagcattttaaaaacggaagaaaagaaaactgaaagtaaacgaaattaaagtgaaagtacacaaaacaagcggacgcgtg

SEQ ID NO: 2800 - DNA, 401 bp, Glycine max
  Clone ID: PAT_MRT3847_102533C.1
attaaacccaaaatgatataataataaatgagacatcaagagtctctttaatgcaagaaaacctatatgaagatgttaaaacaaatgcaacagggtgcgcctgtttatacataaaaaaacttaattttactaataatctctattacagaaaattgataatattcacaggaggtcctcgtacggagtcgcacacttacttgagcagtggcggaagactggggaatgggttgagtaaactcccctggggccggaaaaataacagacgaagctttacttagatagagctttgattggtatttttttttttcttagtgattggaaaggagggcgtctgggtatgttacaaaaggggaaggcagaggtagtacttcgaatggcgaaacgaagggctaaatctcgtc

SEQ ID NO: 2801 - DNA, 398 bp, Glycine max
  unsure (1)..(398): unsure at all n locations
  Clone ID: PAT_MRT3847_102534C.1
taaccacgttggaaatcaaaaaagaggtanaataataatataataatcaaaaaaatacctttttagtaaaataaagcgaaaaaatcaatcggacgtttctctttgggatttctctttcttaattgaattgactaataactaaagtgaaattaaggctaaaatcaacccgcaaagtcaagctcgtccacaaaaaatcattaaaaaaaaggatttgaaaagttcaatatctcagtttttcttaccaagtaaatggatcatttttaaggtccagcgccttaaaatgatcaccttccaagtaaaaagaatcgcttgattcacccttaaaaagaactacgtaggtctgatttcctcttcgagggagggtacataggagcaagagccctacttttgtcgacccc

SEQ ID NO: 2802 - DNA, 2189 bp, Glycine max
  Clone ID: PAT_MRT3847_102535C.1
cacgcgtccggatctcccacccttttaagaatctactatactttttattgcatgtgtaagaactcaactaccttagaaaaaaaggtcacaatggataaaaatgtactatatgaacaatccaatttgctaaggtcttgggagtgaagtttagggggagggataaagaaggaattgccatatgcatattttagttttgtcatgttttatgtgatgtattttgggagtcactttcaatttgtgtcgggggcatctaaaattcttggcctcattcttgataagcattaagggtttcagtttgtgttttgactttgttttagctttctttcacatcatccttcatggctttactcaggatgttcctataactgcagaaactggtcatgatgctgaagaacacgaaagcactagcagtgaggagcttgatgaattaccaatttccagtgacatgcctcacctttatcctcgtgacttaataacatgtagtgatgctgtgtctaaatggcaacttaaagggaaaaggaataatcggaatcttgtaaagaggtccgttggtgcttctgaaggaaaatgtattttggatggagcaggagcagatgttgaaggaaggaatggtcatttaaggcacaatagaaagggtccaagtttgcaccgctacaaatttgattttggtgatacttttgatgacgatggtcagatttttggactggaagatgaatactctctaacttctagatctatatcaaaaagtggaagtaaaattcatcgtggtgtagcttggaatgatttggcctggggtgaccatcttgcttcaaaaggatattgggatgttaaagcatattctccaatgcatggtgatcgttatgattttggtgggagggtgaggtcgatgctggttgatgtagatttgaaggttcaagcaagctataggaaagagcatgtacctttcatttctctgatgagtaaattagatgggagggcaatagtagggcacccaattcaggttgaggctctcaaggatggttcatctgatattctatttcctgcaactgatgacttcggtaatgatgggattgctattgagggaactagcgtgcttccaccagcatggaggactgcaaggagaactgcaaattttcgtgtgccacgcccccatgtgccatcatccaatggtgctgaagttgctgcagagcttccctcttcagatcaagaacaaaacttcgaatatagaagtttaaatgctggaagttccagtcaccaggttagccttcaaaagaagagtggccttaaaagtcatcggtcttcagctgacaaagagtcctcaaaaaaggtgccaaagaaatcgggcttgtcatctagccaaaaaactcgaactctgtcctcattatctactgaacataatcctgctaggagacctgcacatgttcgcgggcgtcgcccccctgttccatcgtctaatcctgttgtcgctgcgccggcccctcccgcttccataccagtccagttagtatttagtagattactagagaagattaataggcgtcaccagaaaagcgctcaaaatgcggctttgctgaaaagtcatcggtcgttcagctgacaggaaagtccttaaaaaaggtgccaaagaaattgggcttgtcatctagccaaaaaactcgaactctgtcctcattatctactgaacataatcttagtagaaagccattacatgatagcagtagttatcaaacagatagattgactaaaccagaaatctctaggcccactacagtagcttgcataccagtccagttagtatttagtagattactagagaagattaataggcctccattgaaaacagctagtaatgcggctttgctgtatactggtgtgtagagaaattcataggttacatgtacattgttatatgggaacaataatcttatagttgtagacaatatgttaggcatgccttgtttctgacatagggaagtcctattcaatttattgtcagcattttaaggattaatatgctgtatagttccctattcaccatgtatctagtctagataaataaaaggtacatgaaattatttagctgtcttgtaagtgtacatgtgccaacagatcttggtttcctgggaactgcaaactagctagttattggtttattagttctaatattgatgggaacttgaaagtccaaa

SEQ ID NO: 2803 - DNA, 329 bp, Glycine max
  Clone ID: PAT_MRT3847_102536C.1
cgcccaccggttttccacccacatgagaccaccataatcaatggccagatcaaattcattcgacaatctgccctggggggatcccacaaactggggaataaatatacccacctaaaaggagcggcttcctcactctgactgactaggccccatgcttcagtttaaaccatgcttgagtataatgaagaaccacagcaactcctgctggcttttttgatgaaacctcatcaagggactgatctggtaaatcaacaatcctacccatgccaagatgagttacataccaaaccagaccctcaattccaacgaaaacagaagtagagggagtg

SEQ ID NO: 2804 - DNA, 646 bp, Glycine max
  unsure (1)..(646): unsure at all n locations
  Clone ID: PAT_MRT3847_102537C.1
ccttacgagcctgttttacctgtgttcagattggtccgcaccagtttaaagtaagcaaccgagacagcattttcactgaaagattgaagttttgtgaagtgaatgacaagttgattctgaacaaagttctattgcttggctctgctagtcagacaattatcggcagncctatagtaccagatgcagctgttcatgctgttgttgaggagcatgcacttgatgcaaaggtaattatttttaagaaaaagagaagaaanaattnccgaagaaccaaaggacatcgtcaggagttgactaagttaaggataactgatattcaaggaattgagaaacctcaaaatgtattgcctgaaaaacctccaaaacctgctaagaaagaaaaggaaaaagttgcagttacagcttaaaaaggatgtacctacccccttgggtgttgatggttattgctatctttttgtctcagtgagttttgatagttggatggcatgtaggagcatggtggtattgctggtgatagtcaaaaccatccactcagtagtagggttttgtagaattgttacacaaattttcttttccctctgtaatgctataactagtgattcgacgtttgaaacgtagatccattgattcttaaattggtttcaag

SEQ ID NO: 2805 - DNA, 1829 bp, Glycine max
  Clone ID: PAT_MRT3847_102538C.1
cacaggcccatgtgttgtggaggaggagcatgtagcgagcgcgggtaccggtggttcccctgcgtcgtgttgtgtgagatcaaaccctagtttttagacactgcaacagtagcagcagcaaccatggcgagtaggaggtgcctgcgagcgttaactcaaacgagaccgtttctcttccgaaaagcatcctctcttcgctcactcgccgtgcctccatttcccaactccaacgcttcttcacccgttttcaccgtacgcgcctctgtctttgcgcaatggccgcacctccgttatttctcttccgacaaaaaagacgaccacagcgacgaagacgatgatggtgacgaggattacgatgatagaagaggattatgttgatgacgacgacgatgatgacgtccctgtgtcaagagggaaaaaagtgtacactgcggaggagaaggaagcggaagccgcggcaattgggtacagagtggtgggtcctcttcaaaaggacgaagatagcgtttttaagccttacgagcctgttttcgctgttgttcagattggttcgcaccagtttaaagtaagcaacagagacagcattttcactgaaagattgaagttttgcgaagtgaatgacaagttgattttgaacaaagtactattgcttggctctgctagtcagacaattattggcagacccatagtaccagatgcagctgttcacgctgttgttgaggagcatgcactagatgcaaaggtaattatttttaagaaaaagagaaggaagaattaccgaagaaccaaaggacatcgtcaggaattgactaagttaaggataactgatattcaaggaattgagaaacctcaaaatgtattgcctgaaaagcctccaaaacctgctaagaaagaaaaggaaaaagttgcagttactgcttaaaaaggatgtacctacccctttgggtgttgatggttattgctgtctttttgtctcagtgagttttgatagttggatggtatgtagtgagcatggtgatattgttgataagctcttcattttgcatctgcaaattctaggtaggtggaaatagtcaaccatccactcagtagtcaggttttgtagaattgttacacaaattttcttttccctctgtagtgctataattagtgattcaatgtttgaacgggtttcgaggtctcaagaaatttaataatgactcctgtaatttttgttagtaaaaaacatgatactatataatacattttaccaatttctgacaaaaaaaaatgcaaactttgactatgtttggttatcagttgaagaagtatttttggatgctacaagtacttttggagagtgaactcattttggtagtgtttggttacccaaaagtgtgtttgtaatgaaaattgtcttgatacctagttttgcaaaagactttgtgttacttttgcaaactcagtttgcaaacttaagtttaactcaacttaaccttgcaaacgttaatccaaacaggcattttgacattatcatcctgtgttaggaaaagcaaaggttctggagaaaaaggatcctgagatgaactgttgagagcagtctagagatgcaaatgagttgaatcaacttgaaagccaaaagctcaagtttggcctgcaaaaagaattatggctctcaggatttacttatacagtttgagcttggtttattagaagaaaataaaatatgtacctagcaacttgtttggctcaaaaatataataattgagtattttaacataaaaatatgtagtgataattttttaagaaaattatatacataaattatttacaagtttttaatgtcaaaa

SEQ ID NO: 2806 - DNA, 951 bp, Glycine max
  Clone ID: PAT_MRT3847_102539C.1
ccacgcgtccggccaagagtccgtgaggctgaggatgaagaacttgaaggtgtttggggaggttcccttgggactctcccttgactctaacgaggaaactatagggttttgcagcttcgacatcgaacgcaaccgcatcttcttcctctcttcccacaatctcatttacacttcccatctctcctctttccacgagaacgccgtttggagccctaacgcctcgctctcctcctccgatgctgttaccgtcgatctcgaacccggagacgccgttacctccttcgactacctcatggagaaagaagcgcttcttctcggaacctccaacggccttctcttgctccacaacgtcgacgacgcctccgacgcgacgcaagtcgttggcaagctcgacggcggcgtcaatgcagtttccctcagccctgacggagaactcgtcgccgtaaccaccggtttcgggcagcttttggtgatgactcacgattgggacgtgttgtacgaaacatcactccacgatgatgatgttcccgtaagtgaaggggagtttcttcccgtgtcttggcgaggagatgggaaatactttgctacgatgagtgatgcgtgtggttctggttcgttgcttaagaaaattaaggtttgggatcgagattcaggggatttgcttgcttcttcggagctgagaagttttgctggggcagttttggagtggatgcccagtggtgctaaaattgcagctgtttgtgatgggaaagatggaaatgaatctccctctgttgttttctttgagaggaatggattagagagaagcaggtttagtgtcgattcgaaagttaaacttctcaagtggaattgcagttctgatcttctcgcaggtgttggtgaatgtgaaaattatgatgctgtaaggatatggggttttagtgataaccactggtgcctgaagcatgaaat

SEQ ID NO: 2807 - DNA, 2164 bp, Glycine max
  Clone ID: PAT_MRT3847_10253C.1
gggtcactaccagcagacggaccttaggcagattcgtttcgcttttgacgcacacacgtatcactatcaaaatattcaaatcgccggaaaaaaaaacgaataacattttgaggaggttcggtagagtggcgtggcgttttactcacaacatcatcaaaattatcaaatccacctcttccggcaacctcaatttctgctccctaaatcatgcttgcgtttcgatcgaagccttgttgcagttacaaggaaacagcgtccctcgcacttgcacacttcaggcacttggtgttcaactacgcacgcgccgggagctctcggtgccctccacgcgccggcttcggggttcggagaggctacatcgtcgttgcctcgttgggggacccacccgaagtctggtccggcggcgggattgtcgttcgccccgggaattccaatttcgaagtcgccggcggcggtggcgccccgaactccggcgattcaaaagaggggtgctggggtggctccaatttggggaacagtttcccaacgccaaaggaaatttgcaaggggctcgacaaattcgttattggacaagagagggccaagaaggtgctttctgtagcggtttataatcactataagaggatatttaatgaaacctctttgcccaagtggcctgcaggagattcagataatagtgtgaaagttgatgctgctgatgatgatagagttgaacttgagaaaagcaacatccttctaatggggccaaccggatcagggaagacattacttgccaaaactttggctcgatttgtaaatgttccctttgttattgcagatgcaacttcactcactcaggcaggttatgttggagaggatgtggaatccatattatacaagctcctcatggttgcagattataatgttgcagctgcacagcaaggcattgtttacattgatgaagttgacaagattactaaaaaggctgagagccttaatatcagtagagatgtttctggtgaaggtgttcagcaggcattactaaagatgcttgaggggacggttgtcaatgttcctgagaagggagcccgaaagcatcctagaggtgacaatattcagattgacacaaagaatatacttttcatttgtggaggagcctttgttgacttagagaaaacaatctcagaaaggcgtcatgattcttctattggatttggggctcctatacgtgcaaacatgaggactggtaaagtcacagaagctgctgtggcatcatcattattggaaactgttgaaagtagtgatcttattgcatatggtttaatacctgaatttgttgggaggtttcctatccttgtcagtttgtcagctttaactgaaaatcaactaattcaggtcctctcagaaccaaagaatgctctagggaagcaatacaagaagatgttccaaatgaatggggtaaagctacattttacagaaaatgctctaagatcaattgccagaaaggcaatatctaaaaatactggtgctcggggattacgatcgatactagaaaatgtgttggtagatgccatgtatgagattcctgatattagaacagacgatgatgttatagatgctgttgtcgttgatgaagaggccgttggaggtgaggggcgtgggagaggggctaaaatcctgtatggtaagggtgcattggatcaatatctttcagagcagaaaaatgattcagagaccatggaggcatcagctgcagataatgaagccgatacagaacttccttccattgttgccagcatgtaacatgttgcaaatatatattatagttatctttgtacatatagttgatacatttgttgaataatatacaagggttagaatcagatggttccatgtggcttgggctgaaatcaatgtaccatcaatgtagtttccacggtaaactccgtggatttgtttgcacaaatcatagtgaggtaaactaaatgccacatacttataagtgtactgtacctgattcgttatgtaaattttgagtggaattattgaaggaaccgaaaatgtgtatcgtttatatgatccgggttcattcttgtttttgtcctgactaaggccattcaactgaacttttgagtagaacaacatccgattggttaaataaaacattataattgcaagctttatt

SEQ ID NO: 2808 - DNA, 262 bp, Glycine max
  Clone ID: PAT_MRT3847_102540C.1
aggaaagttaggctattctttattacaccttatttttctcaatcaaacaaatgatattagaaatccacgttatgaaagtacatatgaggattggtaatctcacctgaatgattgagaacaataatgggcattgaatgtacaatgtgcgtctattatttcaaacatcatacttgatgaccaaatgcactctatcaaataacataggtggatgagtcaaaagaataatgttctaatgccgctgtatacagaaacataagttcct

SEQ ID NO: 2809 - DNA, 358 bp, Glycine max
  Clone ID: PAT_MRT3847_102541C.1
tttgttttttttaagcatacttttaacgcttttcttaatcgcatgagtaacgcgggcatcagggccaacttgtgtacatgatcaggcctcactattaccatatacgatattaaacaatgacaattacaaagcccatcatcgacgacgtatactaacgaacacacactacaagacctttgcctagcaccacattcaataccaacaaactatttagactccacatctgaatgcagctcaactgttataactcagtatgtaacgtctgcaatgagtggctccgggcatcagcactttcggagttcagtacgtgcgagctcctcttatcacaggagccatcactcccggctcaagaaggatc

SEQ ID NO: 2810 - DNA, 418 bp, Glycine max
  Clone ID: PAT_MRT3847_102542C.1
cagagacataaaatattcttttatttcaacaaagcgaacactataaaacttattttatacaagatagacccaatctcaaatttttattctacttgtaaacatagcgtttattccttacttgagtgtaaaaatatttattaggtgattcatgaagcaacttataggtagacgaatcaatgaatatcacggaaagggcttcaccaatccattcgacccctacaaatataacattaaatcaatacaaatcatctcaaggtgttttgtcttcctctacgcatagtaaggagaccgcgatatgtattacaaccaacaacttattgtggatgcgttgtacacaaaaacagttcccacgtataaattaatggtttcgcgagtagttgaaggcaaaacatgataaataaatgataaatacctactt

SEQ ID NO: 2811 - DNA, 305 bp, Glycine max
  unsure (1)..(305): unsure at all n locations
  Clone ID: PAT_MRT3847_102543C.1
aacctcaccccatcctacntcttntntattaatcattaccttnttaccaaaacatcattaacaacccaantgaatttctctttaaaataatctcatctttctctctaaatcatctttcttataacacttccatcttcctataaatcctcatacttttttctaacacaccaaaaatcaaaaaaatacaaaaaattaataataaacattaaataatacatcacttaacaaaaaacttaaataaaactcaactaaacattcctaacatatattctcttaatataaaaaatattaattacttccttccc

SEQ ID NO: 2812 - DNA, 169 bp, Glycine max
  Clone ID: PAT_MRT3847_102544C.1
aaagacagcctacacttggtgagatgaccctggaggatttcttggtgaaggctggtgtgtctaccgaaccctttcctaatgaggatggtgctatggccatgtcaggggttgattcccaacataacacattacagcatgcccattggatgcaataccagctcacttcagt

SEQ ID NO: 2813 - DNA, 440 bp, Glycine max
  Clone ID: PAT_MRT3847_102545C.1
gcctgttcaaggaaggctgggggcccaggtggcctcaacaggaaaccaggctttttgagaaggctttggttgggttggccagggccactccggcccgggggttgaggggggcggccttgattcccggcaggacggtcggcgatgtgatcaaccagtttagggaactggaaaaagatgtgggggtaattgaataagggttaattcaatttccagggaccactgttgttgattccttaacatgggagggggtaaccaataaaggattggatggcctaaggcagtttaatggggtaactggcaaagggggtgcttcaactaaaccatttgaccaggaaaggaagaaaggtgtgccatggcctaaaggggagcccaggcaatttttgatgggtctgaagaagtttggtaaaggagactggagaaccatttttggcaattttggg

SEQ ID NO: 2814 - DNA, 203 bp, Glycine max
  Clone ID: PAT_MRT3847_102546C.1
ttccttacgggatggccgtccagcacgtgagatatctcaaggagcgcctatcttgtacaaacatttagctaggctgaatagattctaagtgtctaaaagggatgggagagctagacatacccgacataatccacaggcatacccatggcctacccagtactttctcagagttggcgtcaattgtacatgtcccaccaactaaa

SEQ ID NO: 2815 - DNA, 397 bp, Glycine max
  Clone ID: PAT_MRT3847_102547C.1
aacacacgtccgcacggacaatgaggaagactctctccccacggaactatgtaagcttggttaacgacccatcgagagagccaaactcatccaaagaatctcacttttggtgagtcctgcagcgtgattgtctgatatgtgccaataatgatctcaaactaagctgaagacaagcaacacgaagatacccacacggtcaaaagttatggcaagcatgaaaagctattctatatgatcataactatgatcatgatggaaagaataaacatttgaacagatccttaatacggcgaagaaaaagcacttttaacaagaagcttgtaggactgttttggagatggatacgctgcagatgatgattcaagtatcttgacattgtattatgagtgacatgtat

SEQ ID NO: 2816 - DNA, 239 bp, Glycine max
  Clone ID: PAT_MRT3847_102548C.1
aaaactctactcacgggctttaaaaaaaaaaattggggggccaaagccaacattgtcggttccaaagggggcccccccctaccataaaaacatcgtttaagccagcatgttttatttcccccttcccaaaccagtttaaaacagtctttggtgctggccataaaaaaactttagcggttaatcaagcatcggcttggcggcatttcaacacaaaataacggaccccttcacagcacaat

SEQ ID NO: 2817 - DNA, 246 bp, Glycine max
  Clone ID: PAT_MRT3847_102549C.1
tctatttgttcgaacacgtcagaggggacaggtgcaggggtcacatgtgtgctctctgctcgtcactccagaggaggacatcccatagagcgcgtcttaatgaactctcttctctgaagacgcacggccatgccatggtgcaggctaccaaaggctccttctaccaatgaacactggctatggagagcatacagtgcatgtaaatcgacctcgtcctaggcttgatgcaggaggacaccacatgct

SEQ ID NO: 2818 - DNA, 717 bp, Glycine max
  Clone ID: PAT_MRT3847_10254C.1
ccaaaatcaattgtatttgtttaatgcattgctattgcaatcgagtcttctagttagggttttttctgttcgctaaatctcacactactccataccaatgaatccgcttccttttcaatctcctcctccatggtttccaatattaccctccgaaccaccaaattcaacttccttttgggacaacagaaatgtctgcgatcgcctcagagaattgcaacacactctcaatctcgcaaaggcaatgcagaaggagctagagatgttgatgatgataaaagatggtaaagggtcttcggaagatttaaaacatgcttcaaacgaaccttgtctttctggttttgtaaaatgtttagaagacaaaagggttagtgtagaatcccaagaatcattggctgtggaagctgcaaattctttgacgtcaaagctaagagctcagctggagccattccggtatgtcgcggacgaggcgagtccgtggtaggagaaatcttctgtggctaggcttgcaaataaagtgaacaagtctaaacagaataaaatgtggaggaagaagaggaagcgcattgcagagatgattgcaaaggttgttctgcttggctctggtttggcttggtttgataggcttttttcttagctcttcatggtagctgctgtttgagagataattgtgcttggttgctttctttgctgagaaattctaagagcatgagcaatttg

SEQ ID NO: 2819 - DNA, 329 bp, Glycine max
  Clone ID: PAT_MRT3847_102550C.1
tcccactcgtcctccctcacgttcgatcactcttccccccaagcctacgaccacgcgtgcgggatactatatgcaaagccatggatgttaattcccatcctctgtgcacaattcttacccccacacgcaaacactcacttgttattccacaacacatccccaatacttctaaacattctccatcattatactttcccgccaacactatatccaattcttttcgtttatcttctccaactcttttgttcgctacgccaaaaaaccaattcatcatacctaacagatagaacaccaatgcaagcgatttggctctacattattctcattcc

SEQ ID NO: 2820 - DNA, 224 bp, Glycine max
  Clone ID: PAT_MRT3847_102551C.1
ctgtgaggaagaagatggaggacaaattggagagatttgtttggccatcggataaagggaacgatgaccctttgattaacccccttgtggaagaggctcaaggtatttaaggggttgcttgcgataaggatactgttactgatgcggagaaagacatactgaaggaataggggaactttatcacaaaatgttggagctacagtgactggagaggaaatgctgat

SEQ ID NO: 2821 - DNA, 418 bp, Glycine max
  Clone ID: PAT_MRT3847_102552C.1
gcacgcgtgcgtttgctctgaattcggctcgtggcatttctgaaaacccctttcgggttacgctgattgctttgtccttcatttgcggccttgatgtggatgaggacatggatgtggactttggtcgtccacacatctatgggtccttcgattcgaatacgaatcctctccttgatgcagctgcatcgcactgacttcaccctatccagccatcttcactcgctatgcttcccccggctggccatggcacgagccatccattctagggaatggcactcctatagaaagctgatagtaaactcagcgctggtggcttgatcgtgcacaagtacaaatatgccgaccacactattgcaggtgcgcgggcattgactctgccacgccaaatcatggtgcaaacctggagcgacacacctgg

SEQ ID NO: 2822 - DNA, 458 bp, Glycine max
  Clone ID: PAT_MRT3847_102553C.1
aacagcaattcaaatttgttcgccatttggaatttgaattctttttttttgcaacggggaaacaaccccatgttcagaccccatggttttattgatttttggaccaagcaatattgggggcccctgataaaaaaacggcattttggtttttgccccccccagaaaaaatggaggaatggggacctgccccccactggaattttttttaaccaggggaccttaaactgggccaccggggaaaaaaagccgcccacttttggtttcaaaggctgggcaattttggacaaccccttggggtcctacggggcctttggaaaccctagggggggcattttttgccttggggggaggggaaaaacagggggaaaaaataagggttgggattcttttttttccccggtgacaggggggaaaaggaaccctcttgttttccttctcttgggggggggggtgggggg

SEQ ID NO: 2823 - DNA, 338 bp, Glycine max
  Clone ID: PAT_MRT3847_102554C.1
cggaaaattctacccttgggaaaaaaatttttagggggcccccaataattaccatttccccctgggccccgggggccttggaaaccatttttaaagggcccaacccattttgaaacggggtaggggcttttcaaaggtaacaaccccaaccaatttttcccaaaccagggtttaaaaacttaaacccggggggcaaaatattttttttcgcccatcccaggaaagaggcctttaaatgggagagagggccaataaccccaaggcccccccccctttttacaattttttaggaacccccaataaaagggtggggggggcccccgggccttttccggggg

SEQ ID NO: 2824 - DNA, 438 bp, Glycine max
  Clone ID: PAT_MRT3847_102555C.1
gagtacggctgcgagaagacgacagaaggggggtggtggaggtgtaaaggaatagcctttttgttgccacctttacttgtatttaaacacttggtttctccgtctttcttggagacacacaacacactctctctcatgactccaaccaacttacccaccaactaatctttttaattccaaaccaaaccatgcctctttttttcacttcacaactttcatttcagtttgagttctccaatggcagttcctgcaccattctctctttcttctgatccctttgcttccaaatctgccacatcaacgatccttggtcctgccgtgctgaaaatagggaactttgagcaaactcatttcggattgttcacggcattaaggagaaatcaaggtttcactttaaaggcctcaatggggcctgcgggatttacagagaaacttaac

SEQ ID NO: 2825 - DNA, 164 bp, Glycine max
  Clone ID: PAT_MRT3847_102556C.1
ctagtagagggcggcgccctttttttttttttttttttttttaagtaaaaattccataggggggtatctccgggagattatctaggatcataaggaatgcacaccccttgggaagtgggagcaggatcttagatccgagcagggggagagaaaaccttaaactc

SEQ ID NO: 2826 - DNA, 590 bp, Glycine max
  Clone ID: PAT_MRT3847_102557C.1
ttttcggctcgagctctctctcttctgtatttgtcttgattccgatgcgaatgggtatcctattttatctggagacctgacatggtaaaacagtaacataactatggtcgtgttttaagctgatttatagactttgccctctggttccattgaattctgaaccatatttatgatgggcaaagggcggtggtaatttaagtcagatgaaaattcagaacatttttgtgggcaaagaggctgaagttatcactaatggctttgagggttatagcaatttcagtggtttctacagtattaagctttgtgggtctgcagttttgcacagacttgtctttggataaacttacatcagatgggctggtcggctggaatctaattcacttggacaatgccagccaagacattgagttgcctttgggtttgtacaccaccatagggctactggtgaattgcatgatcaatgtatttatccttctcaatctttgcctcaggctgtgtttttacggagttatatgcttctgaactcgtaactggtgaacgtctcattatttgtcatttacagggatgttctaccatgatgtgcaccaaca

SEQ ID NO: 2827 - DNA, 421 bp, Glycine max
  Clone ID: PAT_MRT3847_102558C.1
tcttgccctgggggggggggggggggggggggggggggggggcccaacaagtaggaggggtgtgccccattaggtagcgggataagttaccaaaagagaaaaaggaaaaaaaagcagtaacaaaaaaggggaaaaaaaaagaatgagtgaaaagggaaatacctatttcggttgacggttcaggggtgataggtataagcctatcacgagaggcaccgaaaacttttaaaacaagcgctgagagagaaatgtgacgaaaggccaatgcatttgaaacaagaggccgtagattatctctaaaagcataaaaggtaccctatgataaaattataatattaccaaataaataattacgctagaaaagtgtggtcgcctattggcagaacattgtacagacaaagtttacaactgccaattaatg

SEQ ID NO: 2828 - DNA, 1200 bp, Glycine max
  unsure (1)..(1200): unsure at all n locations
  Clone ID: PAT_MRT3847_102559C.1
caatgcgtccggcaaaaatgaagcgcttgaagagagcttcttttcattctactcttggtttaataacagatggagaagtatttgctggtaatgtgatatacagcttaaaatgaatcctatttagcgctctcctgcgtccacgtgtcactcccatattcctctctctgcttcacaggctcggtgcctcagctccaatggacaacaatgcccgcagcaaccccttctcctcgtacgctcacgcctctccgagcactggcagaggaaaggcttttgatatgagaaatgatagagagagaacaagagggcgtggaggtgggagtggctcaggaaaggacaaaattgattctcttggtagactcctgacacgaattttacggcatatggcatctgaattgaatttgaatatgcggagtgatggttatgtaaaagttaatgatttgctaaagctgaatctgaagacatttgctaatattccactgaaattgcacactattgatgatattagggaggctgttcgaaaagataataagcagcggtttagcctcttagaagagaatggggaactactaatacgtgcaaaccaaggccacacagtaaaggccgttgaaactgaaagcttgttgaaaccaatcctttcagccgaagaatttccagtttgtgtgcatggaacctacagaaagaacctggaatcaattctaggatctggtctgaagcgcatgaagagattgcatgttcatttttcttgtggtttaccaacagatggagaagtaattagtggtacgaggcaggatctcagcgtgctgctcttcccagccctttgtcccgctgcagccgatcggttggagcgtggcgtccccgacaacaaggtgatcttgacggaaggttttgatggtgttgttcctgccaagtattttgaaaagatagaatcatggcccagcagacagcccattcctttttaaagttctcttacaattttgcttttacttaggatcacagtacgttgaggtttactagatgattgtgtaaacctctcacaagaattactacttgattcctagtttttgtttttttataatgattaagtttactttgggtccattgaattaatatatactatgtttttcttttntgccagattgagttanntatatatgtaaagattttcttttgacggaatgaatatatatatatatatatata

SEQ ID NO: 2829 - DNA, 509 bp, Glycine max
  Clone ID: PAT_MRT3847_10255C.1
atcacaacaagacgaaaagcacgcctcgcaaccatcgcaccacttggaacactctcgcgacctttgcgctagtgatcaccgtctgttcctagccgaattgttccatccggccccggcgcatcgacgcgacgcgatattcaccgggcattggccttacatttcacaatcacaacacgctttggatctttgtcgcgtacctcagaaatcgttgtaacgacaagtgcgcattgaaaaagagcagtgcgcatatccggaagccatggcgcgaacacaagcaagttctgctgctcaaagagggcgaccaagcacaggcggcaaaggcaggcccagcgacgctggaaagagcagacctagcgagtctggcaaggaagtcacaaaagcgccgcgaaggagtagtggtggcaagacacctgcaagtcccggaactcgcaaaaagccgcgctacaagccaggcacggtggcattgcgcgaaattaggagataccagaagtcgacggatctcctactac

SEQ ID NO: 2830 - DNA, 419 bp, Glycine max
  Clone ID: PAT_MRT3847_102560C.1
attatcttatatttgcgttactttggggttttttttactatacacacctcaaatgcactttacctatacaagtttgggaactagactactgaatagtctggaagtggaatcgcaacaagcgttgcaacaaatcaaaatgcaaacgatgaaactgcaaaaagaatcatagcgcaaaatgcatatagagggatagaacctaaacctctacttaattgacctgcaagctctttagaatagaactggtataaggaattgataaacaaacctgggtaatccgcacacgcgatcacccaccacatttataaccttgggccaagacttgagcaccacctaactgaaaaaatgcttgacccttcctatctggaaggagaggctaacacattcaacaaccttaaaggtatactgcaaagcttataaac

SEQ ID NO: 2831 - DNA, 398 bp, Glycine max
  Clone ID: PAT_MRT3847_102561C.1
taaaagtttgggtttgacttgtttagctcatttaaaacttaattattttttaactttatcaatttagtatttaataaattattttaataataattctgtcaaaaaatatatattttaataatatcaatttagaatctatgtaattttaattttctctctaaatatacgagctattcaagagctgctaatgtcaaacttggatttgcttcatttaaataattgagcccaatctcaagcttgagtttgtttatttaattaaacaaacaagtttgatccagcatttaacgagtcaagctccagtagtttgcaaataggttggttcatttacacccatatgagttttttcctttgactaatttactcaaatatttctggttctaagttttcacattttttta

SEQ ID NO: 2832 - DNA, 329 bp, Glycine max
  Clone ID: PAT_MRT3847_102562C.1
gggacggtgtttggaaatgattcaccggaaaaccgagtaaactttgcggattgggcaaaagaaccctccctggatttccaggagccgcataaagaatatttccgggcctaggaaccacaaaaaaagcgggttgtttgcagggacaaagggccttaacacattccatttggttttaaaagaaggaaacttttccaccgttcccttgggttctggagaaggggaccctacctaaggggtggcccctcttccaagatatggggagaaaggccgccctgcccccccccctatattgctttgccatatagaaccaccaaagtcgattttttttc

SEQ ID NO: 2833 - DNA, 479 bp, Glycine max
  Clone ID: PAT_MRT3847_102563C.1
tcggaattcggctcgagactagatgatgcttggaaattcatccaggatatgcctgtcaaaccaggaattactgtcttaggtgcaatgctaggtgcttgcagaatccataaaaatgtagaattgggtgagaagactgcagacgaactatttgacttggacccagatgatggtggctatcatgtattgcttgccaacatgtatgcatctgcttcaatgtgggacaaagttgctcgggtgaggacggccatggagaagaaagggatccagaaaactccaggctgcagtttggttgagttgaggaatgaagttcatacattctactcaggaagtactaatcatcctcaatccaagagaatctatgcttatcttgagactcttggagatgagatgaaggctgctgggtatgtgcctgacaccaattcaattcatgatgtggaagaggatgtgaaggaacaattgctcagtagccatagtgagag

SEQ ID NO: 2834 - DNA, 886 bp, Glycine max
  Clone ID: PAT_MRT3847_102564C.1
cggattacccctcgaccacgcgtccgcttgcttcatagcaagtagcaaggagactagttctgtattcagattacattgcaaaaatggcatcattcaccatgacagcttctatctttggctgcccagctgtcaccaaacggtcggcagtggctgcgcagaggagattactcgtagtgagtgctgccaaagctgaaggggaaaaggtcagttatgacaacaatgatagcaatggaaggaggaacttgatgttcgctgtggctgctgctgctgttttctctgttgctgggatggcagtggcagatgagcctaaaccaggaacctcagaagccaagaaaaagtatgccccggtttgtgtcaccaatcctacagctaggatttgtcgcaattgaggatctcctgtttcattttacctctgatgatcggaaatgtacgttggggatgtagtaatgtttttgatttaatatgatcctcattgtactagatgttcataaaactatccactttgctttgtctatttggtgtctccagtttaatggttaaccaaggaattgatggcgcttaagtaacattattttcccttttgattttctttgttcgcttagtttaaagttgataaagagcttactattccctcttcttcgaggggaaagaaaaacaatttgcagtcaatgaagatgaaaggaaattgaaaggttttagaagttcaaagcatttgtaaaaccaaaatgaacatgctggtctgagtcgactctcagtcatccgaatctacgtacaagttatgtagttaaagattggttcaatgtaattaccacacaaaaaaatgcattttggattcaacacctatgtacctttatgtaattcaaccattacaccaaaatttgttctt

SEQ ID NO: 2835 - DNA, 230 bp, Glycine max
  unsure (1)..(230): unsure at all n locations
  Clone ID: PAT_MRT3847_102565C.1
cccacgcgtacgcccacgcgtccgctcactcacttnactcaccctctggttgtgctccgtctagccgtgtcgacgactcactcaccattattcgagctcacttataacagtgcccatgccctctcgaggaaaatatatttggagtggcaatttgcgattaagagggacttagagatactgaatttcgacggggcgtattcatcataggacggattcaatttgactttaga

SEQ ID NO: 2836 - DNA, 332 bp, Glycine max
  Clone ID: PAT_MRT3847_102566C.1
gcgatcagactttcgtttacaccttctctttagaacactctcttgcttagcctcaccacgggcttactgcagagtcacagggttaatacacttttcaacaaccattgcatacacaaggagaacactaagaaactcactattgtcaatgagctcggtggtcaatatgatgacacttatcatgatttcaacaagcatatactcaattattttacatacatagctgtcaggactgttcttcaacacttggatcagatgaacacaccttaatatacgtagctctataatttcgttttgacaaacgacccagctgatgggaaacattttataccatc

SEQ ID NO: 2837 - DNA, 682 bp, Glycine max
  Clone ID: PAT_MRT3847_102567C.1
accagccccaaatagcggccctaacgccgcgaggttgcataaccaacacgtgtcactttttgcgattttatccattgctaccatactaccaaaccctgcgtttgcaaccaaagaatgtgttttccctgccatcttcaacttcggtgactcaaactcagatactggtggcttggctgcttcccttatagcaccaacgccaccatatggagagacctattttcacagacctgcaggaagattctctgatggccgtctcgtcattgatttcatagcaaagagttttggtctcccttatctaagtgcgtatcttgattccctggggaccaacttctcacacggtgcaaactttgcaacatcagcatcaacaattagactcccaactagtattatacctcagggtggatttagtcccttctaccttgatattcagtacactcaattcagagatttcaagtctagaacacaattcattagacatcaaggtggcgtatttgcaagcttgatgcccaaagaagagtattttgataaagctctgtacacgtttgatatcggtcaaaatgatcttggtgctggcttttttggaaacttgactgtacaacaagtcaatgctactgtacctgatattgtcaatgctttctcaaaaaatattaaggacatatatgatttgggagcaagatcattt

SEQ ID NO: 2838 - DNA, 473 bp, Glycine max
  Clone ID: PAT_MRT3847_102568C.1
ctttgggctgatttatgtgcttgcatggtcgtgagaagatgatagaaggggagggcccggccaccagggcccctgtctattggggcgtagctgagtttttgaagaaaaagtgaaaacgttgctgtataagatacctagaactaagaagaagccggtgaagaagacgaggtagaataggttcacttttcatcggacttgtacgaggattgataatattactaggcataatgtgaagtgttgctatcggtgctgtattaagtccggacctcgaggcgtccgtcccgttctggcctcgcccacttaaccaaccagcgccccacccctccgagttaaaaataacgtcccggagaccccaacaccccgtaccccgccttaagatcacaccgcgcaaggaatccaccgcagcctagatcaacggcggcgccggctattcccccccaaaagcaccccggaaccttccgtgcccgggccaa

SEQ ID NO: 2839 - DNA, 1123 bp, Glycine max
  Clone ID: PAT_MRT3847_102569C.1
gccggtttcacccacgcttcaaggtgttgtgaccatcaacactacagaggactgaggagtacgcaagataagagctttactctatattttaatgttacaatgctattgccgccaacccatatggcattacattcgccgcggcttttatcactcacccgaagggccttttcttcttctccttcttcctttcaaggaggggtttctatggttcaaggagcttccagaggaattggcctcgaatttgttaaacagattttagaatacgatgataaagagcatgttattgctacctgccgtaatcccagtgcatcaactgggcttatccatctgaaagataaatttgcagaccgccttaaaattttgtcgttggacttgactgttgaaacttcaattgaggcatctgcattgtcaataaaagagacatatggccgtctaaaccttcttattaatgcatctggcattctttcaatacctgaagtaatgcatccagaaacaacattgaacaaagtggagaaatcatctttaatgcttgcgtatgaggttaatgcagtgggtcctatcttagttatcaagcatatgtggcctcttctaaaagtaggaggaggccatgggactggaagaagtgctgcagtggtggctagtttgagtgcaagggttgcttctattggggacaatcgtcttgggggttggcactcatatcgatcttcaaaggctgctcttaatcaattatcaaagactgcctccctggaatttgcaagaaggaaggatccagttgtatgcattttactgcatcctggtacagttgacacagatctctctaagccatttcaaagaaatgtccccccagacaagctcttcaccaaagagttctcagttcagaagctactaagcatcattaacaatgtgaagatccatgacaatggcaagttctttgcctgggatggacaagaaattccttggtaaccctgtcacaattcatgtaagaaatatatcaataataaatttacatggaagtgacagatttgtgtggcacattcagcatgtcctgttggtgattttgaatatttcattataaacttacatggaagaaatgagatcataaaataattaggacttataaaaa

SEQ ID NO: 2840 - DNA, 112 bp, Glycine max
  unsure (1)..(112): unsure at all n locations
  Clone ID: PAT_MRT3847_10256C.1
gcaggccancgcgcgtgagcttcgcnngccgtgcntgtaccaccggcgccgacncgcgtancttgctggagttggaatcttcaggccgcaagtagcttccggcaaggngttc

SEQ ID NO: 2841 - DNA, 298 bp, Glycine max
  Clone ID: PAT_MRT3847_102570C.1
atttttcaacactcgagggactatttactatggtttttaatacttgagagattatttgttcactttagggactatttaagaaagagattaatagtttaggaatgacattgatggtttattcaatatcccggatgctaacttttcattcaacgctaatataattggattgattatctgttagtttacatatgataataataatagttacataatgctcttctgttatgttattttgttgtgattactcattaggctaatggttgtcatccatatgttatttacttaaagatttctgtgt

SEQ ID NO: 2842 - DNA, 326 bp, Glycine max
  Clone ID: PAT_MRT3847_102571C.1
cccacgcgtccggatctaactcgtcacagacagatttccccacaatttcttcttaacgattgtaacctgattgcggggaaaaagattgccctttattgattttttttgtcaaataaaattgtgtataaaaccatctgtgatctgggttcttttgcgtattttagtttttaaagggaaattgaggattttggtactgattactgtggaacatggtggtttttcgatctgggttcttttaaaaatgggctctttcgcgcatttagtgactttttgcatggaaaattgacggtaccggtactgattactgtggatcatggtggttttag

SEQ ID NO: 2843 - DNA, 510 bp, Glycine max
  Clone ID: PAT_MRT3847_102572C.1
gcaagaatgaagcctttatcactttcttcttttactccaatttctatcaactaaagaaatttttaatgaaaaaggtgtgtgtgaaagatggattctattatggctggaataatggtttcaaaggataaagaccaatttttgtaaattttgctattactactataacttcttctaacaaaattgaaatttaaatatatgtaactgtgtgtgagaaggcttaggtgaggaaagggaaattaggaacaagagattttattttgaattgactctcaggataattactagaaataaaatcgaaataggaaagtgagacttattttaatagtttttaattatttttttatgttgtataatttcacaatgaaacatgataaaaaaaaattcaaaaaaactgaaactcagtcctcaaaattaaaactgaatttagtttttaataaatttaaaattaaaaacaaaaaaatcacccgaacggactctaaaaatttcgacaaccaacgaagataaacaacc

SEQ ID NO: 2844 - DNA, 256 bp, Glycine max
  Clone ID: PAT_MRT3847_102573C.1
tctatcccatggactctgcaccgcaaccttcataatgcgcacacctgagccttatgtgatggattcacttggaagatcatccaccatatgtcttggtgggacttatgaaccagctgcctacggagaactggtgtccatgggtgcgcttaccccataattgatcggacgattgatggctgggatcgtctgcgtccttgaaaccgggtttttcgcgccatcgtcacggtactccttagaattctatgacacagagggc

SEQ ID NO: 2845 - DNA, 199 bp, Glycine max
  Clone ID: PAT_MRT3847_102574C.1
tcaaacatgggacgggaaaacagaggccacatgttgttagtactattttggacctgtttgcctgttgggtacgggggggaacattgcgatctatatggtactccgggtcaccaggctggtttacaccctggttaacactaggtggtaaacggggagggtctaggaaaagttgtgcgatatggcctggtggtctgctatt

SEQ ID NO: 2846 - DNA, 589 bp, Glycine max
  Clone ID: PAT_MRT3847_102575C.1
gagaaacatggcttccttaagctccttagtgctgctcctttcatctctaattctatcccctcaaggtgtggcatactatgagggggcggcagtatacaatcctcccactgagaaaccaccattttataatcctccagttgatattcctcctgtttacaaaccttccatttataaccccccaatttataaacatacagtatagaagccaccagtttacaagcccccattttataaaccctccagtgtacaagcccccagttgaaaaaccaccattgtacaagcccccatttgataaaccaccagtgtacaagcccccaatttgaaaaacccccattttacaatcccccatttgaaaaacccccactttacaagcccccagttgaaaaaccaccagtgtacaagcccccaattgagaagcccccattttacaatgccctcagttgagaagccaccattttacaagcccccatttgagaagcccccattttacaagccaccagtttagaagccttcagtttcaagccatcttatagaaacctccatttacaaaccaccatttagaaacctcattttcatctcccattgagaa

SEQ ID NO: 2847 - DNA, 379 bp, Glycine max
  Clone ID: PAT_MRT3847_102576C.1
ggatagcatgctacagttttgttagacttgtattcgaccaaattcgagagggatcatctagagcaactcctgagcatattatcttacttaacccccttgtttttcatttgcctttacttgccaccctattgaacctatcaactctcgctctccattacaaattacatcttcaatgaaaatgacttcttcaagatgaacacatcactgaacctttctctgttctaggcgatcattccctttacgagtatgctaaaagaggtgcttgcattccactctatgccactaagcagactgcagaactgcgggacgaggattatactacacgtgatcatggaattgctgaggttattataatgcctgcctatgtctctaatgttga

SEQ ID NO: 2848 - DNA, 1545 bp, Glycine max
  Clone ID: PAT_MRT3847_102577C.1
tcccggcctctggaagcacttgatcaagactcaagagtgaacaaaaaaaaatgatgggtacccttaaggtgtccaacagtagtttatacatattttcgaagttcctagtaatttgtatggtgatgatgatatctttggttgattcaagttattccttgtgtgattttgaggcaatcttcaattttggtgattcgaattcagatacgggtgggtttcatacaagctttcctgcacagcctgctccctatggaatgacttacttcaaaaaaccagtggggcgtgcttctgatggaaggcttattgttgattttctcgctcagggtcttggattgccatatttgagcccatatctgcaatcaattggatcagactatactcatggggctaactttgcgtcttcagcctccactgtgattccgcccacaacttccttctctgtcagtgggctaagtccattttccctctctgttcaactcaggcaaatggagcaattcaaagccaaagttgatgaatttcatcaaacaggaacaaggatatcatctggaacgaaaatcccttctccagatatatttggaaaggccctttacacgttctatattgggcaaaatgacttcacttccaaaatagcagccactggtagtattgatggagtgaggggcagccttcctcacatcgtttcacaaatcaatgctgctatcaaggagctatatgcacaaggggggcgtgcatttatggtattcaatcttggtcctgtgggatgctatcctggatacttggtggagcttcctcatgctacttccgactatgatgagtttggatgcattgtttctcacaacaatgctgtaaatgattataacaaactgttgagggatacattgactcaaaccggagaaagtttagtagatgcttcccttatttatgcggacacacactctgctctcttggagctctttcaccaccccacattctatggactaaagtataataccagaacatgttgtgggtatggaggcggtgtctacaactttaaccctaaaattttgtgcggccatatgctagcaagtgcttgtgatgaaccccagaactatgtgagctgggatggcatccatttcacagaagcagcaaacaagattgttgcacatgccattctaaatggttctcttttttatcctcctttccctcttcataaacactgtgatctccaacctattggttgatccagtgcttgcagctaggggtctttcgtatttaccgattaagctattttgaaatgctcagctatcatattgttaaataatgttttggtttgtgggtgtccggtgtcactttcatgcttgtgtgtaatagtttgaacaaaaacatgttacttcttggtatcattactatttgatgaaaaagaaaaaaaaaatcaaatacaagttaagctttgataaatttctgacacagttgaactatcttcatagaaagattgttatatgttgtaatgttttttatttgagtattcacaaaaaattttgtcctatccaatgattgtcacatttatcc

SEQ ID NO: 2849 - DNA, 478 bp, Glycine max
  Clone ID: PAT_MRT3847_102578C.1
ccggaatccggctggagagctgctctacaccagctcatgctggactgttggcagaaggaccggaacagccggccccggtttgcggagattgtcaacaccctagataagatgatccggaacccggcaagtctcaagactgtggcaaccatcaccgccgtgccttcccagcccctgctcgaccgctccatcccagacttcacggcctttaccaccgtggatgactggctcagcgccatcaaaatggtccagtacagggacagcttcctcactgctggcttcacctccctccagctggtcacccagatgacatcagaagacctcctgagaataggcatcaccttggcaggccatcagaagaagatcctgaacagcattcattctatgagggtccagataagtcagtcaccaacggcaatggcatgagaactcttgttttttggggaaggagaggagggaaaaggaccagggtcaaggggga

SEQ ID NO: 2850 - DNA, 276 bp, Glycine max
  unsure (1)..(276): unsure at all n locations
  Clone ID: PAT_MRT3847_102579C.1
ttcantctctctttcagttttccttgaacctatggacggaagttggagtganggaaaaaggagcatgagttacaaggagnaggatgagtacgaagaagaggnanacgngganntgagtgagtatggagatgatggtaacaaaaanagcggnngtgagtaataaganagggtccaaagcnggaagctcagtnnccaccttcatgtcaagttnanggnngcaacgcnganctaagtgaagtaagccctaccatangcgtcacaagtttgtgagtacct

SEQ ID NO: 2851 - DNA, 213 bp, Glycine max
  Clone ID: PAT_MRT3847_10257C.1
aaagaggcagcttgcgaatggaacacattgcccattatgcttctctgactccacatggctcgttcgttcgtgaacatggacaccgtgtcacgtcactcacttatgaacatactggcttccacataatgatgagattattacagagctaacatgcgagcattaggtcatgtaaaagccaagagactttaaaacgacgcgaaactgacggaaata

SEQ ID NO: 2852 - DNA, 205 bp, Glycine max
  Clone ID: PAT_MRT3847_102580C.1
tggtgtcaaattcggtgatgccgtgtggttcaaggccggtgcacagatcttttgatatggaggccttgtctacttgtgcaaccgacacctgattcatgctctcagcatccttgctatctgggctgatcatgatgagctcatggggtttgctgaacgtttcagaattggtgtaggaccgcttggagaaagacttgtcctagtctac

SEQ ID NO: 2853 - DNA, 116 bp, Glycine max
  Clone ID: PAT_MRT3847_102581C.1
accaaactggacgatttatggcgggggggagatgccattatcattaacagaagggcggaaacaactgctgaagccttgtggtcctagccacaaacagactcgttagatatgaaagc

SEQ ID NO: 2854 - DNA, 245 bp, Glycine max
  Clone ID: PAT_MRT3847_102582C.1
tgaagttgaagtcttgcccttctctcttcaactccaaacacaagacatcatcatccatggctgcctccgtctccaatgtcggatctgtcaacagagctctcattgaacctgaatgggtctggacctagggtttcagctcccagtgcatccttctttcggagcagcttgcagaaggttattcgctcagggtccccaagacaaagatttcctctggaagcttcaagaatgatgctgtagaagagaag

SEQ ID NO: 2855 - DNA, 303 bp, Glycine max
  Clone ID: PAT_MRT3847_102583C.1
aaggaaataacatattgggtggatcatgtcactttttttagagattaacaattgtgcacttcatttgtccatcgaaaaaagaactgccttacaaaaaaaaacgctgggggtaagcccccccgcgccaggggagagctaaacaaaaaatgtctttggagagaacagcactcccctttgtttatttctaaaaaaaaaggaggcctaactaaggacgaggctggtatggctctcctcccaaagggcccttatatatcctattaaacggtttgccaaaccacccgttatatatatgtttgagcagca

SEQ ID NO: 2856 - DNA, 575 bp, Glycine max
  Clone ID: PAT_MRT3847_102584C.1
gtttgagaagaaaaaaggagagttccgggtgaaagttgtcaagcagatcttgtgggtgaatggaataaggtatgagctgcaggagatatatggtattagaaattcaacggagaatgaccaaggaaaatgtgttatttgcttgtcagagccccgagatacaattgtccttccctgccggcatatgtgtatgtgtagcggatgtgcaaaggatttgaggttccagacagatagatgctcaatttgcagacaaccagttgagaggctgttggagatataggtagggtctgaggagtgaggaagatacactgttaactcctcaagctttatgtacagcccaactgttatacttcaacatttctccgtgtcttcttttcatggtgtcaccttacttttctgtattttccaataatcagaaaaacaaaagaaaatgtaatttatataggacttgcgtttcaacatgaacgacaggctggcattgcacataatttgtacaagacaatgcctccaattagcttgtttgtctgtgcttataaatggcttccattctatatgattaattaaatacattttctctt

SEQ ID NO: 2857 - DNA, 361 bp, Glycine max
  Clone ID: PAT_MRT3847_102585C.1
gaactttgaccctaaggcctacgctttcctccacacgacccgagaggctcactgctcccttccccgcaccgtgcaccgcgccccgatgactgatcatctctcctctcatctccgatctccggacaacgtgcggcccgttccccatcccggggaccacggactacaaggctcgaggcgagacgacaacgtacgaggggcccaaggggaccatggctctcgcctatcgtgggtaatgcacattcaacatatagcccatcacaagggagaaggctcccccgtccaccgtgaaattcgcccttcacacgttgtaggctgccagctccaaatggacaatgaccaaggatccctgatccatgctcaa

SEQ ID NO: 2858 - DNA, 464 bp, Glycine max
  Clone ID: PAT_MRT3847_102586C.1
gggaataaaaattccaatagaggaaataaatgaagggattgttatcaggctgtagaataattttccctagtcaatagagtttttgtgctcaataatagatattgcaacagtttataaactttaaaaatttgcaccggcatcaacaaaataacagcaaaggcatgtatttgtcatgtatgcaaagacggggaaagagatcaaaatatataggtgcaaataaaggaaacaaaaataccaaaggatccttcaaatggttatcacataaccaattggccaaaaatataagcagcttacgtcccacaggttcatcaccgggcacatttccaatatactgcatcagtattaatggtcacagaattgctgaattcaagactacagaacattgttcaggcaattaactaacactaaagcagaagtattaaatatgacatcaagcataaaaattatatccagaaaaagaaaaa

SEQ ID NO: 2859 - DNA, 167 bp, Glycine max
  Clone ID: PAT_MRT3847_102587C.1
tttacgcgttcgatatgatccttccatctagcagcaccttaggatggcatagtcttaaaggtaatgtgctgggtcaaacgaagaatggcttatggtggatacctaggcacccagagtctatgaagggcgtagtaagttactattggctttgtgtagtttaaaataag

SEQ ID NO: 2860 - DNA, 369 bp, Glycine max
  Clone ID: PAT_MRT3847_102588C.1
tttcacaacttatagctaggtggctagcgggggcggtttggtgttcattatcggaggatatgcgaggggccaccttaccacgggactgagttaacgacagctaccagcgaagatcatggtccacgctggggccaacagggtttgctatcgcatacttccatgcggcttagagaaggtgctgactaaggggttggtataagacagactcgcgcaaaggaaaaccctttatggagggaggatgaacctagttgtaagatttaacaccatatttgcatgcaacaatggccctctgaacataagtccgaccatgtgtctcagtcaagagggaaagaagaatggactgcaagacacagagtgtaatggtatcta

SEQ ID NO: 2861 - DNA, 187 bp, Glycine max
  unsure (1)..(187): unsure at all n locations
  Clone ID: PAT_MRT3847_102589C.1
aatcgcttaatcnttaaatggaatagaatgactaccaaggttcttgnncttttctccccattccccccaaaaccttgacgcccctttgaggcatccaatcgctccctatataacgaggctctggctccaatcgcatcccacctgtgtcaaccccctcccgacgctgttgtaacccccaaaggttccc

SEQ ID NO: 2862 - DNA, 251 bp, Glycine max
  Clone ID: PAT_MRT3847_10258C.1
cttaggcaatattttagggaggggggttttttaaaaaaattaccttcccaaataaaaaacaaaattagccattagatcttataaaaaacctggaaaagggtagcaccaagggtaacaataatccaaatgccgaaaagacattcttctcacttgcaaaaaagaatgcagccgttataagaatatgaagtagatcattgggttcagccaaaagaactggttggttccaaacttaagcaaatgctggaataaaa

SEQ ID NO: 2863 - DNA, 2360 bp, Glycine max
  Clone ID: PAT_MRT3847_102590C.1
gttagtgtgtatttcccaagacgacatagaaaagtgttataatcgctctgtcctcgctgtctctgtctttgaccgaagccaaagaagaggaagaaaccttagcagctttcggcgctcttcttttatctctgattttttttttttttttctctttcccttccaattttttctcatatcatattcatctctgtgcctctatgacagactagtacttgttgttttttgtacccattattacccacacacccccaaatacaaattatattccaatccattattttattgttattgttactataattgggattattaccttaaactaaacaaaaataagttgcgattgtttttattgttgttgtgataataataattatttttttatatatatactggagtgatgtatcttcctagtttcgactctctatgcaatgaacaaagcaactgaagttgttgctttttagcttcaacaatttctcagtccaaccaaccgcatcagtcaaatctagcggcatatctcagccttcactctcacaacacttgcaaaaaaaaaaaaaaaaaaagatctactcttttcttgggacgcaggtcgtgtttgttcttgttttggctgctgacactatcatagtttttttattcccttaggtgaaaccctctaatgtgtgtacgcattagagaagggcattgaaacaaagtgtgatttctggtggagcttgactagtcatcttcttgctgtcttttgtaacagaaaatatgggcttactctgtagcagaaatcgccgttataatgatgctgatgctgaagaaaatgcacagactgcagagattgaaagaagaatagagttaagaaacgaaagggctgaaaagcatattcagaaacttctactacttggagctggagagtcagggaagtccacaatatttaagcagataaaacttttgtttcaaactggctttgacgaggcagaactaaaaagctacttaccagtcattcatgcaaatgtgtattagacaataaaattactgcatgatggatcaaaagaatttgcccagaatgatgttgattcttcaaagtgtcttacataaaatgaaaatgaggaaatcggggaacagttatgggaaattggaggcaggatgaattacccatgcctcagcaaggagcttgcacaggaaattgagaatctgtggaaggatcctgcaattcaggagacatatgcccgtggtagtgagcttcaaattccagattgtactgattatttcatggaaaatttgcaaaggctgtctgatgcaaattatgttccaacaaaggaggatgttttgtatgcaagagtgcgtaccactggtgttgtagagatccagttcagccctgttggggaaagtaagaaaagtggtgaagtctatagactctttgatgttggcggccagagaaatgagaggagaaaatggatccatttgtttgaaggagtttcagctgtaatattctgtgctgcaattagcgagtatgatcagacactttttgaggatgaaaacagaaacagaatgatggagaccaaggaacttttcgagtggatcctgaagcaaccatgttttgagaaaacgtccttcatgttattcttaaacaagtttgacatatttgagaagaagatcctgaaagtcccacttaatgtatgtgagtggttcaaagattaccaaccggtttcaacagggaaacaagagattgagcatgcatatgagtttgtgaagaaaaaatttgaggaatcatatttccagagcactgctcctgatcgcgtagatcgcgtctttaagatctaccggaccactgcccttgatcagaaggttgtgaagaagactttcaagcttgttgatgagactttgaggcggagaaatctcttggaagctggcttgttatgagcactgaaccatacatgttataaaatgggataacaatatttttacattgaagaggtgaccagattttgggtatactaggcgattcaggtatactaaatattaaaatcgatttgttgatttttatttctaagttaatcttgtggagagaagaaaggcctttcttggagttgatatcatgatctgtgatcatatttttatagattgaaagtcactaatcatatgatatatttcatactattagtgattatattttgcctctagtgttgttgtgttaatgtgcatacatgcatcatgcagattagatgcatgcacgcgtgtaaataatttggaaacgtgccatgtgtcatgtgctggctttgtcgagttctgaattcagaccttatattaaatttgcttttaatactcgtttcgaatattggtcggcattgatattaatcatattattcttttct

SEQ ID NO: 2864 - DNA, 395 bp, Glycine max
  Clone ID: PAT_MRT3847_102591C.1
ggaaaccaaaagaaatgcctttggtttataaaaaataaaaacaggtttaggaagaaaaaaaaagcgggtattttccaaccaaaaaacctcaaagaaacaaaaaatttcaaactaaaagccggacctgaatgcacgaccttttaacaaaccaccaaaacccaaaatcaaacaattggggggcccaaattcaggcccaatattggcaggggagttcaccccctcgggttgaaaaaccccaggggggacaaaccttttataagaaagggccccaaaaaaggccctttgagcctggaaaaaggtttcccgaaagtttgccccccgaaagggattaaaaaaaccaaaaaagggccaaatttcggggggacttattccaggcgaaaactgtaaacccaaaa

SEQ ID NO: 2865 - DNA, 707 bp, Glycine max
  unsure (1)..(707): unsure at all n locations
  Clone ID: PAT_MRT3847_102592C.1
ctcgagccgattcggctcgagagtcagcaactgaagttgctttttagcttcaacaatttctcagtccaaccaaccgcatcagtcaaatctagcggcatatctcagccttcactctcacaacacttgcaaaaaaaaaaaaaaaaaaaccttttttcttcgttttaggtgaagtcaagcccgctaatgtgtgtacacattagagaagggcattgaaacaaagtgtgatttctggtggagcttgactagtcatcttctatgctgtcttttgtaacagaaaatatgggcttactctgtagcagaaatcgccgttataatgatgctgatgctgaagaaaatgcacagactgcagagattgaaagaagaatagagttagaaacgaaggctgaaaagcatattcagaaacttctactacttggagctggagagtcagggaagtccacaatatttaagcagataaaacttttgtttcaaactggctttgacgaggcagaactaaaaagctacttaccagtcattcatgcaaatgtgtatcagacaataaaattactgcatgatggatcaaaggaatttgcccagaatgatgttgattcttcaaagtatgttatatccaatgaaaataagggaatcgnggaaaaagttatttggaattgggaggcaggcttggattaccccatatcctcagcaagggagcttgcacagggaaattg

SEQ ID NO: 2866 - DNA, 1797 bp, Glycine max
  Clone ID: PAT_MRT3847_102593C.1
cttctcttttcccacgcgtccgtacggcgacgacagaaggggaatctctttcatcataaacaaagattcttctctattctccaactcttttgcttcttcttccaaagtggcatcaaaaactagaagaaaatggggtgtggcaatttgttcttcacagtcctcataaccttctaaatggggtgtggcaatttattcttcacactcctcataaccttctcagtggcactcataacatacaacatcataatctccgccaatgcccctctcaagcaggacttccccggcccctcacgcccttccatcaaggtggatcctctcatcaagatgccactgcacagataatcatcatcctcggaggaatcaaaaaagaggttgttgttccacactgctgtcactgcctctgattctgtgtacaacacgtggcagtgcagggtgatgtactattggttcaagaagctaagggatggaggaggagatgaatctgggatgggggggttcactcggatcctgcactccgggaagccggaccagttcatggatgagatccccacttttgttgctcagcctttgcctgctggaatggatcagggttacatagtccttaacagaccatgggcatttgtgcagtggcttcaacaagcagatattaaagaagattacatattgatgtcagagccagaccatataattgtcaaacctatacccaacttagccagagatgggctaggagctgcgttccctttcttttacattgagcctaagaagtatgaaacagtgctaaggaagtactttcctaaggagaagggaccaatatccaatattgatccaattgggaattcacctgttattgttgggaaggaattcctcaagaaaattgctcccacttggatgaatgtttctctggcaatgaagaaggatcctgaaactgataaagcttttggatgggtgcttgaaatgtatgcttatgctgttgcatctgctcttcatggtgttcgtaacatattacacaaggacttcatgattcagcctccatgggacaaagaaattggcaagacatacataattcactacacttatggctgtgactatacaatgaagggtgagctgacctatggaaagattggagaatggagatttgataaaagatcttatgataaagttgctcccccaaagaatctgacattgccaccacctggtgttccagaaagtgtggtgactctcgtaaaaatggtgaatgaagctacagcaaatattccaaattggtggtcataggaactttaaaggtgttgcaaattacaatcgttggagaatgctttggacctatggccattttacacggaagagcattgtacacgttgcttatgtatttatgtaattcttcgtatatagttggacttgcgagtgagacaaacctgtggaattgtatcaccggtgcttcgtcaaaatgcttgcgttcagctgctgctccagtatttggttttcttaattaaaacttgcttccccttaattttcattaatcataaaggggtcaactaattgaagcttgcaaaaaacaattcaacttttcaagacatgaaaaattcaaacactttgtaaggtacatttccagggaagctcgttttacaaaaggctacaaaactttagcacctccttgtcgattgcgttgcagcaccctgcccccgaattcaatgggtaaagagattttcaagcatcatgaacactatccatgtgggtcgaacatgcaacaaaccataacttacaactgcaatcagttcatatagcgcctgcaattttttg

SEQ ID NO: 2867 - DNA, 475 bp, Glycine max
  Clone ID: PAT_MRT3847_102594C.1
ggctaaggtactgtgcgtttacgggcgccgaagaaatgacactgactctggtagcttgtgctgaagagaaagacaacatgctggtccttgatctttaccaaatggtatcgaccaacactcctactgactgaggagagagcgaaattcagagtggagacaaacatcgtgacgcacatggaaaagactgttacaatattctacgtaacgaggacaacgatggagatcgtagaagtgggagagtgaagaggggttattatcaaaaaaagggacaagcttaggttgcaagttcgaatcaacccatactccatggaatggactggtttggccaatagattactgaatgagggcaacgatattctgtgatgcgatgatgctagttatgaaggtttgatcaccaaggatgttatgagcaagatcgcagaagtgattaacagtctatgtggtggtgatgaaaaatctatgcgtgaaaggacac

SEQ ID NO: 2868 - DNA, 608 bp, Glycine max
  Clone ID: PAT_MRT3847_102595C.1
cacaggtgacagaacagaaggaagtaagactaaaagccgcctctattatatttactctccaatctctttctctttctctttctctttcattaataaacaaagattcttctctatttctccaactctttctgcttcttccaccaaagtggcatcagaaaaccaaaaatggggtgtggcaatttattcttcacaattctgataactttctcagtggcactcataacatacaatatcataatctcagccaatgcccctctcaagcaggacttcccggggccctcacgcccttccatcaaggtggatcctctcatcaagatgccactgcacagaaaatcatcatcctcggaggaatcgaagaagaggttgttgttccacactgctgtcactgcttctgactctgtctacaacacgtggcagtgcagggtgatgtactattggttcaagaaggtaagggatgaaggaggagatgaatctgggatgggggggttcactaggatcctgcactccgggaagccggaccagttcatggatgagatccccacttttgttgctcagcctttgcctgctggaatggatcaaggttacatagtccttaacagaccatgggc

SEQ ID NO: 2869 - DNA, 499 bp, Glycine max
  Clone ID: PAT_MRT3847_102596C.1
ttttttttttgaaaagatgaaaagaaggaaaacttatatttaatttaattaccactcacggagcagtacatatacatatctcttttattgcgtagagttgttactcaatgtatgatgttaaatatttagggtgagctgacctatggaaagattggagaatggagatttgataaaagatcttatgataaagttgctcccccaaagaatctgacattgccaccacctggtgttccagaaagtgtggtatgttttcacctccctcactagataatgtgattttgttgagttgcattcttgtttgtggcggttttctctaacatcaacttgtaaaccttttacaggtgactctcgtaaaaatggtgaatgaagctacagcaaatattccaaattggtggtcataggaactttaaaggtgttgcaaatcacaatcgttggagaatgctttggacctatggccattttacacggaagagcattgtacacgttgcttatgtattta

SEQ ID NO: 2870 - DNA, 968 bp, Glycine max
  unsure (1)..(968): unsure at all n locations
  Clone ID: PAT_MRT3847_102597C.1
cattttatgtttttatgtttttttaaatcattcctgtttatttatattgaacacggcccttttctgtagagaaaggggaaatcattatattgtcttgcttccgttgaatcttctgtgcgcaaatgcattcttctgccggaaaggttaccgtaattagatatgcctaaaagaattctattattcaaaaaaaaaaaaaaaaaaaaaaaaaaaaaaaaaaaaaaaaaaaaaaaaaaaaaaaaaaaggacacacccggtggtgaaccactgaaataaacagacacacaccaaaaattaactaccaaaacacaaccaccaaaaaacaccaacaaccccttaaanaaaaacccaataaaaancatacnaaaccannnnnaaaaacccaaaaacatatccccaaccacccacaccacccccataacccccacaccaacctcatatacccacttcacaaaccaccccccctccaacccctcccccctcaccactcactaaccaccaccccccaaacaccacccaccacaannnnnnnnnnnnnnnnnnnnnnnnnnnnnnnnnnnnnnnnnnnnnnnnnnnnnnnnnnnnnnnnnnnnnnnnnnnnnnnnnnnnnnnnnnnnnnnnnnnnnnnnnnnnnnnnnnnnnnnnnnnnnnnnnnnnnnnnnnnnnnnnnnnnnnnnnnnnnnnnnnnnnnnnnnnnnnnnnnnnnnnnnnnnnnnnnnnnnnnnnnnnnnnnnnnnnnnnnnnnnnnnnnnnnnnnnnnnnnnnnnnnnnnnnnnnnnnnnnnnnnnnnnnnnnnnnnnnnnnnnnnnnnnnnnnnnnnnnnnnnnnnnnnnnnnnnnnnnnnnnnnnnnnnnnnnnnnnnnnnnnnnnnnnnnnnnnnnnnnnnnnnnnnnnnnnnnnnnnnnnnnnnnnnnnnnnnnnnnnnnnnnnnnnnnnnnnnnnnnnnnnnnnnnnnnnnnnnnnnnnnnnnn

SEQ ID NO: 2871 - DNA, 254 bp, Glycine max
  Clone ID: PAT_MRT3847_102598C.1
gaagaaccgggccgaccgacgcggccgccgacccttcctcccactcgtccgcccacttgtccgaaaaaaaagtggctagaaaagtgctggcagcttatttggaagtggggctactcagattgttgaatggttccacttctatgtccaattatgaattctgatgtgtttcatgcatgcgatacactttaacgtcgtgctgtcttaggatgttatatgttttgtacatggatctacgctcgattgattttgaacct

SEQ ID NO: 2872 - DNA, 391 bp, Glycine max
  unsure (1)..(391): unsure at all n locations
  Clone ID: PAT_MRT3847_102599C.1
ggctcgagaaagaagttgcacctgagaaccctgcatattcaacctgtgatatggagtgcctcaattcacagctgtcctctacaagccaggctcatgctgcataagattcacctgacactggacggggcctcactctgaatggaaaagccagctatgggaatgctagctcccctggcaagagatcttcaatggaagatctttatgagacttgaattgatggtggtgatggtgcaatatgtggcctcagtgcagatttggatggccatggtggtgctcgtgctgtcgagtatgtcaagcctaacctatttagcaatntgatcagtcatactaccttcattgctgacgccaaatctgcaatcactgatgcatatgaccacaccgactctgaatg

SEQ ID NO: 2873 - DNA, 268 bp, Glycine max
  Clone ID: PAT_MRT3847_10259C.1
gcgtccacgcgtgcgtttttgatgactgtgattagagggcactgcagtttggaaactttatctgacaacgtatgtgaggaaaagcattataggggattataagcctcattccacgcagactgtccagccagtggttagtgattaaacaactgactgactcggcgcgatggaagagcgcgcaccgtctacattacaggcacgcacgttagttctatcaaccatacgaacaagctggctggcacctaattgatccgagatagatttaatg

SEQ ID NO: 2874 - DNA, 659 bp, Glycine max
  Clone ID: PAT_MRT3847_1025C.1
cttacttctatccttagtgttggttctgatctcccttttagtgttaatctccttattctagcaaggtaaggatacttgcaaaagggacttcgaatagttaatctccttagtaagagtcttaattgtatgcgtggtactggattatgataaattacctttcgtcttctaatgtattccttataataggagtatcgtttactgagttggtaactaccttcaagtgactttggagaacatggtgaggtccatgagggtatgtagagttgtcgggtcctatacaatacgcaagtccctaagcttcgagttcgatgagaatgaaagagcttgaaagtttagtctaaatcaagatgaccgagttgatggattagacataaagagtccaggtcataatgaatgtaaattgttcatgtcaagaataatgacgaaggtggtaagacaatttgatttcttgacttggtcaatgcaatgattagaagaaaaaaaaaaaaagcaatatctcgaatgttgacgtgggtaggcagtgatcgccggtgcacaagagatgtggtacaaataaggagtggttcctagcaggcttttagcaagagggatacatgaacaaatcaaatatgcacctgcataagagagatccagaggctgtgtaggtatgatgtaacatc

SEQ ID NO: 2875 - DNA, 2029 bp, Glycine max
  Clone ID: PAT_MRT3847_102600C.1
gaccttaatgctatttattttcataaaaaacatgaataagtttctatttaagggggaaaaatagatcatgctaatacattatcttcagatataaatggaattctcatctcattctataaacattacaatgtggtgactagaactcatattcgaagcttctttccaggtgttggttcatcatcataatggtggcctccctcaccattcgtgtccttttccatcttctttctggcaagtatcttattgatcttgtgcaaatcattattgagcttctggtccttgttttgctttcgggtcttccggccatcttgcatcttcacaccgaactggaatgcagcttttggcattgcttccttctgctcattgtaagttgcccattcctcttcagtttcaaagtcccatctatgaagacgaccctttgcccttccacccatatccattttggataagtcatcttcatcatcactgtccactatctcacggttatattcttgataccctgggtaacattcagagtaactctctgagatgaagttgggatctttttcacgagcatctctctccctcagctgttgaagtctctggtcatctcgcttaaacactgatcctaaaccccgatccttttcttcttgagacataaagcgtggatcttgtggaagatttaaatctgcttgctcatcataagcctgcatattttgctgaagatactgatctgggtaagcccagttgttcagcatactggtattcctgccactctccttggtagccagcatcaaaggcttgtgtttgcattacatcatatccatttgtttcttgccacccttgaggaaccattgaaggtgggacaggaccataagtaggttctgtgacatatgaaggtttttctttgttcctaggagactcttccatgtcctcagagaccggactttggctcaagtctttaccaggtacatcatagtgaaccccttcacctacaaaaatgtcatcatcttctgctctagcaacagctgggccttgtttctctcttgaatgaagaggatttttctttatgggaggtggaggaggcagaataatttctttttcagtttgattttttgccccaccttcaacctttgatggcttatcctctttgtcaaatccattaccaacagccaaaatcttcccttttgcatccttttccttttttttcttctttaggatcttcccagaagaaccaagacgaagatatgacattattttagcaattcgatctagaacagatccatcaacattaactgtaaccatttcctctggcaccggacagtcagctttactacggtgcaaggttgttggaatatcatgatggtatccaccctccatgttataaataaatgtcattcgaccagggaggaacatctcatttgtcttactaatggtctgaggcttgacaatccactgataaactgactttgcagttgctgtgcgaattgacacttgttggtcttccttagcagacctggatttcccctcaacatcatccccagcctctggcttcttatctatctcacttcttactttgttcagcaatgcataatccaaacctttgaccaaatgtgtatgttccacatcacctccaaggtacttgctcttctcaatagataacttgtgcgcatcagatgaccgaatatccacagtaccaggtggtgcaactgcatgaaatccaagctcagtttgttcataatcaggattctgatcctctctacgctctttagctcgatctctgtatttcggcacttccggttcttccggtttttcttccttgcggcgaattggtttctctttggggtttttcttgttggaagcggtcatgttgggaaagcaatcgaaaaattattgctcgtgaagactagaatgcgctattgatttgaggaacgttgaaagagaaagatgggatttttcaatgaggaacgttttctggttttagggttttttcagggaaacgattaggaacccccttctgtcgtcttctcgcagccgtcggacgcgtggg

SEQ ID NO: 2876 - DNA, 288 bp, Glycine max
  Clone ID: PAT_MRT3847_102601C.1
cggccgattcgggtcgaccacgcgtcggagagctggttggtggattggcgggtctctcctaccaatcaaatacgttggggtcggaaggactataccattatcaggcccagatggcgtctgatggtcgtccaggagtgcaactattattttgcaccttttttcgagtactacaaaccctcctttgctgtatattccttaatggacggcccaaaaccgtactagaattttacgaagagggagcttcataaaattccggccaccatcccagtccgggggaccaaaatttct

SEQ ID NO: 2877 - DNA, 849 bp, Glycine max
  Clone ID: PAT_MRT3847_102602C.1
aaataaagtaaaatagagttatcaattgtttcgcctaaattgtacagtgtggctcttgtctcttggtttgtgcttgtgtggttcgtgagcgtcgcgaatggcatctgggacgcagagtagtggaatgttaactagagagcaactttattatcttttcgatcgtttcatttttcttacttcccaacctgatgtgaaaaaaaggattgcagaggctgtgcaggataagcaggaagctgttgctgtgaccactgcaatacaggaagagatatttttggagatgggtgttgacccaagatttggtatctcatgccttggaaaagtcagtactgtctatgagaatgacctggatttggtgattcagttttataaattcctttcgaaagaagaggtggcctgtgatgaggcagagcttggagaagaagaatttacagaaaaaatgctcaatcaacaaaagttacaggaacagcaactagagatgctgaagtacatgcgcaagtttcacttggatgatcaatctgcgatccttgagaagttacaccagcagatggaaaacggaaattatgaaagtgagacatccattttgtcagctgagcagatcgatgagattgtcccaagaaaggtgtcccctttgtatacaccaaggtagaccaaaacccagccttatgatggacccttttgttaaaattaagagatattttggttcaagtgtagcttgcgtgacatttatttttgagttgaccagttccacaattcatgacacttatcatttacttcattttcctcttgactatttattttaaatacattttattcctatattggagctgcggtaaggctaactttttacgc

SEQ ID NO: 2878 - DNA, 317 bp, Glycine max
  Clone ID: PAT_MRT3847_102603C.1
tcttgaaggaatgagcttgcataggtggcacatggatgtaaagaccagataacccttcttaggcaacgatacggtctctagatgaggatactgaagctaatgcttctcaatgtagatcgctctaactagaaaggctgatcagagctgagggcagtttaatatgcccatagcggcctatcaatgcctcatattagcacgagtattaagcttgatatgaatctctctgagtctgtttccaaacctattaactgcctgtaatggaccggcatgacaagtacagtcgtcaccgccatctttatggccaaggcagaactcat

SEQ ID NO: 2879 - DNA, 261 bp, Glycine max
  unsure (1)..(261): unsure at all n locations
  Clone ID: PAT_MRT3847_102604C.1
atcaatngaagaagcagattgacaacttggancatgatgaaggctgatggtgctttggataaagcaaganagcacaagaagagacagctanaanatacacttaatcttgnccataaagaagaggagggaatatgaagacaaaatgcgggagangggtgngaccccagttatgttcagtcatttgnggcttcctcgaaggagaacaactgcagangaagaagaaagggttaagcacccaaagcctgaggnctctgtttatta

SEQ ID NO: 2880 - DNA, 801 bp, Glycine max
  Clone ID: PAT_MRT3847_102605C.1
tgaattcatcgatgcgattgtggaaggagaaaggctgattgtggatgtggattttagatctgagtttgagatagcgcgatcgacgggaacgtacaaggcgatgctgcaatcgctgccgttcatcttcgtcggaaactcggagaggctgacgcagatcttggcgattgtttccgatgcggcgaagcagagtctaaagaagaaagggatgcacgttccgccgtggaggaagcgcgattacatgcttgcgaagtggctctctccatctagcattagggagaaggagaacaagcaacccccgtcctcttccgtgcaagcagccgccgtgccggaaatggtgttttctgataacgcggcgtcaacgacgacggagagcgattgcggtgagttggagctgattttcggcggggaaatgtcgccggagactgagtgcggccaggtaaagtcggcgacgacgccggcggtgaagccgaagagtgttgagagagggactaaggttgtgaccggattagcctctcttctcaaggacaaaccatagaacaaaaaaaattgtttttttttttaattctggatttttaaaaaattaaaatataaggagaaaatatcggtgaggcttctctttttttttctttttttccccttataagaatttttgttttccctttctttggttcgcaaggggaaatttgtaagaagtacctttttctttcttttttttaattttgggttaccccaattgaaaaaaccgctaattgttttgtatggaaaaaaaaaagccgcaattgggaaatcttaaggtgagag

SEQ ID NO: 2881 - DNA, 117 bp, Glycine max
  Clone ID: PAT_MRT3847_102606C.1
ctcgagccgttttcaattatgaaattcagacgaaaagaatttacatggacggactatactgccatttcgtgtcttggtgactagagatcagtgaatcctacccatatggctcacatc

SEQ ID NO: 2882 - DNA, 252 bp, Glycine max
  Clone ID: PAT_MRT3847_102607C.1
gggggtaagggggtaacaactagtttattcatatcataataaaaaatacaaatataacattaaaattaaatgcaacaaaacacacgaaggaaaatctgaaatggtccgcagaagaagatgtaaatgaaaacggggaactaacataacatgtccaagttatgggaggcctttgtctgattcgggtgaaatacatacttaacgagggcggctttgacggacataaaggtaaggaaacccattcgtcaatttagg

SEQ ID NO: 2883 - DNA, 419 bp, Glycine max
  Clone ID: PAT_MRT3847_102608C.1
gccatcggacttgattatctctggatgaccataagttgtctctgtgtgccaatgaactcgcttgtctctggttggcaaaggggagattgcaatagtcttggtcgaaagacattgagtcttcaacaaagggagcagatgacgaagggaagactttaatagtctcggtcgaaagacattgaagttttcgacaaagggagcagatgaccatatttgtctttgcgtgccattggacttgattgtctctggatgacgaaggcgagactttaatagtctcagtcgaaagacattaagtctttgacaaagggagcagatgaccatatttgtctctgcatgccaacggacttgcttgtctttggatggcaaaggagactgtaatagcctcgaacaaaagacattgaagtctttgaaaagggggtaga

SEQ ID NO: 2884 - DNA, 281 bp, Glycine max
  Clone ID: PAT_MRT3847_102609C.1
tttccccctcaccgggaccggagctgagctgactctcacacccagcccctgtacagataaagcaccagctccaatggccccacagctgcaatgctaatgctagagctccagctgacgcgacagagatcagacactatcacctatatccagagcagacagcgcacactcttagcggagggaatatgggttgtttaacagattcacaaatgccacatgtaatcattcggtctaccagctgccacgtagaactagccaaaataaatgtcgtatctgtcagatga

SEQ ID NO: 2885 - DNA, 384 bp, Glycine max
  Clone ID: PAT_MRT3847_10260C.1
ccacgcgtccgcccgatctataaatcgttctctgactctgaaatctctctctctctctctctctctctctctctctctctctcactcttacaaagcaaagagtagagtttgttcattgaagaactgagggaggttcaggtccatgatactttgaaatctgtctgtagtaggaactaagaagaccatgggacgagcttgattattacttatagtttttttggttcttggttcttgctttgccacctatgatggggtgacgatgatgaggcactacggatcttgagaaggtgtggctggggatgatggggcgttgctttttgaccctgttactgcggagggctgtggtgggcggggtgcgggggacgtgtggggggggctttggtg

SEQ ID NO: 2886 - DNA, 451 bp, Glycine max
  unsure (1)..(451): unsure at all n locations
  Clone ID: PAT_MRT3847_102610C.1
gcagttctggttcctgtcaacgccacaagtaccgggctagaaagtgctggtctggacaacataacttcgagtgacattgataaactctcaatttcaaatgtccatagtacatctgaaaggtttctaaaccatcatgctgtgctgttacagttttgctgctgaatctttgtgttatttagtgcattagtttctaatccaatattgtagctcagttggcaacatgtgctgagtttgtggagaaggacctgggttcgattctcgcaaaatatactcttggggaagggtgaggtgtcttaagtgtgactaaaccccaaaccgagtgattacggttgttgttaataaaaaaaaaagtactgcttgcatttaaagatgtattgttgaccaaatatatatggtttaagtttaactatgttgaggctttaaaaaanaaaaaaattattattattaaata

SEQ ID NO: 2887 - DNA, 380 bp, Glycine max
  Clone ID: PAT_MRT3847_102611C.1
tgcaatccgtctattcacaaaaaataatatacacattcaatcccccgtcactcactgaccctctgccctcggtccctcactaagcttctggcctatctccctcactcactcactggctgtcgaaggtatctcccacgccgtgccgccatcctgtacagccatcggcatataatctttctctctgacaaagatctgaaaggagtgataaacaacacggatcatcatgaagtgggtttattggtacacaaggaaggctgccaaagtttgatccaagaagatcaccagattattagactcatacaactatcggtgcaacagcgtgaccaagaagaaggaggataataagacgatcatcaccaaggaagagcaaaagcaacgac

SEQ ID NO: 2888 - DNA, 402 bp, Glycine max
  Clone ID: PAT_MRT3847_102612C.1
tacgcccgttcgaagactacagaaaggaagcgcaaaggtgtaattaattgattgctactggggggggcaaactcaaagtgtgcccctccttttgctgacctgccctaccaaatccaaagaacgcatgcgattctgtttcatggcccaaagctacactctgctcctataagcctccactgtactgatctgggctagactgatcatgtctattgcgacacgcggtcgtggtgctaccattggaccctctcttcccaaccttcgcacttcgtgctaagctgactcatgcaatctccctatacgcttacaggcctatgctcaagggctgagacacaaagaccaaccttatagtacacctaacgcttgtgcgtcgaaaccgattgctttttctattgaagatcatga

SEQ ID NO: 2889 - DNA, 346 bp, Glycine max
  Clone ID: PAT_MRT3847_102613C.1
gcgtagtgttgcgtcgacgtcgtgcgctgatactctgactctcgactttgtgaccatacggtaccctagctacggattgcaaccatgttgaccaagcacggtggaaaagctaagcctttgaagaaacccaagtctgataagaaggattacgactagattgatagggctaacattcagaagaaaaaggatgaggagaaggcgctaaaggagttgatagccaaagagcaacagaagggaagctttggatgctctgggctcatgataagtggatagaactaacggctctatatcatgattgcctgcattcaatattgagccctgcaatacagttgctaccatgataact

SEQ ID NO: 2890 - DNA, 591 bp, Glycine max
  Clone ID: PAT_MRT3847_102614C.1
gaaggtagtatttcctaaatacaattagccatcacaacagagaaaaaaaaagagagagagaaatggagcttcaagaccatgatttcttggaggaattaatgtctctaagaagagaaacatgggataccaatccatgttcacaagaaaaccagcttttctctaatggctggagttttgattgttttgaggatcaaaactatcatcaagcttttcctccaaactctttctcttgccaacaagttcctcaaagttacaataacaaaggctacaactacaatgaaatttatagttccttactacatgaattctctgcaccccaagttatagattcatcatcctataacacccttgatacctctccttttctggctcaagaagattatccattgtccatgatggaagaagaagatccgggctttcttggggaagagcttcattgtttggaccttcaaaccacatgcaaaatggagccaagccattccactgaaatgcctattttcaacacaacttcatcatttgtggagagaaagaatagagcaaagaagcttcaggggcagcctttcaagaacctaatggcagagaggagaagaa

SEQ ID NO: 2891 - DNA, 472 bp, Glycine max
  Clone ID: PAT_MRT3847_102615C.1
gttatcataatacacaacttaactggttatatggtgcgaatgcaggggaatcagaggctctactacctatgtgcaaacttcacaatgcttaatgacaaaactactttattcttggaaagagcaaaaggtgacacaacatgccctttatacctagatcgtccttgcggtattgtgccgatggggagagaatctcacgcggaacaaagtttaacaccgcaaggggcgaacgatacttaggaagtcaaagagaatggcatgcactccgtctccgatttacgatccggaggcccaaaaagcgtttattgctgacataagaaacaaccctttgattctttatcctacacagtggccccactttcttctactaattgtgagaccaccaaatgttcgccgaattccgcaacgcacacaccacttacggaacctgtcccaacaagaatggcctagctaggctaagctgttggactatttt

SEQ ID NO: 2892 - DNA, 600 bp, Glycine max
  Clone ID: PAT_MRT3847_102616C.1
gtggacaaggagcaaagaatcatttggcaaagttttgatactccatctgatacacttctcccaggacaaagttacgttgctaatgaaacgcttcgggctgctaccgcaagcaagaatagcaaggccagttactatactcttcacatgaatgcttcaggtcatttggagctacattgggaaagtggtgttatctactggacaagtgaaaacccttctgcttcaaatctccgtgctttccttacagccagtggagcactagagcttcaagaccgaagcttgaaacctgtttggtctgcatttggagatgatcacaatgattctgtgaagtacagatatcttcggcttgatgtggatggcaatcttcggttgtattcgtgggttgaaagtttggaatcgtggagatcagtctggcaagctgttgagaatcagtgcaaggtctttgcaacttgtggtcaacttggtgtatgtgtgttcaacgcctcaagttctgctgaatgcaaatgcccgtttgatgtaacttggggtaacaaatgattggttccatatgaatgggagtgtgattctgggaccaatatgatagcatataggacgaatatttat

SEQ ID NO: 2893 - DNA, 464 bp, Glycine max
  Clone ID: PAT_MRT3847_102617C.1
atcaaaaatacccattttgattatattcttagacaaatagaaatgtacaaattgattggtatttaaagtcacaaaaataaacatagtaacaaatttgtaatgtaaaagaattttgaaagccaattgaattgaaatgcaatcaataattaaaatgacagaaaggtaaagtgcttgaaatgtaaaatgaaaattaaagtgctaagcaatatgaaaatggctagaaagtaaagaacagcaagtaaataaatttgagtttagagaagaaattgagattgaaagaagtatgaagtttgaaaaataaatatagaagatgaggattgcatgaaacggaaattgatcaaaaaaaagaaatgacaaaaattgtagattacatcgatgtatggatttcaacatacatttcatcctgataaccaatagtcattttccttgtgtgatgtgttgatgtaaagtgttatgtgcgatct

SEQ ID NO: 2894 - DNA, 1080 bp, Glycine max
  Clone ID: PAT_MRT3847_102618C.1
cgctgctgccggggcgtatagggctgccacggccacaaggtttaatggaatttccggggaggctttcaaatctcatcatccattgcaccaccatcactcatcatcaccacactatggggttggacttggaccctctcatgagacctctgcagggttgatgagatcaaggtttttgccaaagttgccagcaaagaggagcatgagagcaccgagaatgcggtggacaagcacactccacgctcgatttgtccatgctgtggagcttcttggtggccagctcgaggctacaccaaagtcagttcttgagctcatggatgtgaaggatctcacattagctcatgtcaaaagccatttgcagatgtatcgaactgttaagaccactgacaagcctgctgcttcttcaggcctttcagatggatcaggagaagatgacatgtctccaatgggaagcagtggtggaatgcgtcaattttcagaccaaagaagcctttctgatcgaccactgcaacaagatatggactactcttcaggcaacaacactctatggagtaactcttcaagcagtagagaaacatggcaacaaaataactctaatgacgtagatggtttcagacccccaatcttccagtcacaacaaatatcaggagggcatcaaattcaggagtgtgattcaacccaactcaagaacagtttgtcaggatcgaatttagagtgcaagaacccaagcttggagttcacattaggaagaccggactggaatggcaaagggcaagcctaattttcattggttccctttattgtctctagctagtttgcttaattagtttaattacaacccccggtaacatgtgacaaacttcgtaatctttcctgaaatagagaggtgttgtactatatataaaaatatatattcaggcagaaaaagtaaaagccctatatagttccgctaagtttatccttttttggaagttttatgacttcatgaacaattttgtttagcctttttcttgaatttaacattttaatcattggagacaggatgcacaatgaaaacaatgtggttgagaataagggttaccc

SEQ ID NO: 2895 - DNA, 419 bp, Glycine max
  unsure (1)..(419): unsure at all n locations
  Clone ID: PAT_MRT3847_102619C.1
cctagcccgagcctatagcccaagacataggggggattttttgatcgtttgtggggaagcctaatngcattacactggcaatatctgcagccaaccaagacatagcaactgccgatgctatccaactttcgagggaggtggatccctcacgagagaggacattaggagcgcggacaaagctggatttgatggacaaaggaactaatgcattggatgtccttcaaggaagaccctaccgcctgcaacatccccgggttagtgtaatttatctatcccaagcacttatcaataaacacgtcgatatgattgatgctagacacaaggagaacgagtactttgaaactcgtcctgactatgggcacttagccaattaaatgggttccgtataccttgcaaaacctgtctcacagcatctggag

SEQ ID NO: 2896 - DNA, 306 bp, Glycine max
  Clone ID: PAT_MRT3847_10261C.1
ctcacctacttattcgcttttcgctctatttcttaaattattaaccctattatatcactcttacatttttctttaaaataatctccatcctataccctcactatttcatcattttactctttatcatattactctaattcctccacttacttccatatattctactattatctattaccatattactattcaacctactacctcaatttcataattccaatataacccttcacatcttcatttactctcatcttactttctccaaaatattttaataactcctttttaatctctttatcattatta

SEQ ID NO: 2897 - DNA, 360 bp, Glycine max
  Clone ID: PAT_MRT3847_102620C.1
gtgcaaactaaagaacctgccctatcttttaaattccttgtgggacaggtaaaccattaacgtaggcaagtcttgttcattcattgacaattcaatggcctgaggtgaaccttatcttcttgtgtattcaccaaatgagtgaatgaacgggtcgtcgacatgttgttactcttactcaactaccttttctttctgttcaatttttctataacaaaaaccgaagccattgataaccttcagtatctgaatcacagctgttcaagcaacaaaaccttcactccaaacagcacctaccaatccaacctccaaaccctcctcacctccctatcttcccatgccaacactgcacaattcttcaac

SEQ ID NO: 2898 - DNA, 467 bp, Glycine max
  Clone ID: PAT_MRT3847_102621C.1
aacaaacatgtatgtatatcatgcatatcatagaaaaaaaggacagccttgaacttgacgccaccgttacaggttcggatcacttgcaacttcctccagggctaaaaaggaccactttccattaagggagtatcgtgtacacatcggcacatgagaccgactcgtatttcattctaggtattcaacacctttagagcctacttataaattataagatgttcattagagaaccaccttggtctacagtagaagctccacaccccttgatttgcaagagcaggacctgcatgtgcaggagcatccacatcggctgccagtctgaccttcttgtacacccgaagcagctctttcctacttgacactttacatggggccaattcaattgccaaacagtttgctgatccaaactgtggaatggttaaccaacaccaacacacatgaattgtgcacacacaactcctgagttt

SEQ ID NO: 2899 - DNA, 454 bp, Glycine max
  Clone ID: PAT_MRT3847_102622C.1
attagttaccgtttgacttgcatgccagagaaccaactattataaattacgcttaaattgaacttttatttagacaccacaatgaatcaattatttaaattgcatgtgctgaaatttagtttttatttagaataacgaggacagtaaggattgattaaattaatattctaatatcatcttataaaactgattgaaaaaactttaacactttggtgaaagcacataaatggttttatttataactttgtaagttttaagtgaagttttatcccttaaaaaaaaaagggaagtattataatttattatagtttttatagtaagaaaaaatatatatgaaaaaactaaatgagaaaattattttaacttttatctcaaattttacgttcccggaactttcattcccgttttttacggtgatagtgtatgtatatgcatgaagaaactcagagatgag

SEQ ID NO: 2900 - DNA, 379 bp, Glycine max
  Clone ID: PAT_MRT3847_102623C.1
ctcgattttttaggactgtgcgacaactaacatagatcaatctggcttcttacaccaattgtatgcctagaatcatcacgcgctctcacaataagagatgatcaattaggctctgcaacgtgacgaacaccattataaatcatgaagaggcacaggcatgtacacgaagacacaaggatgcatctcgagatgggtctggcagctctggcgaacttgaataccaagctaacaggatagacgacgagaagggtccatcctcggctgatcagaggaaacaggacatggcatacgcggaagatgctcctgcacgggaagaaggcctcgcatctatggcagtagctaactcgatcacccacaatactgtatattccacctctgg

SEQ ID NO: 2901 - DNA, 294 bp, Glycine max
  Clone ID: PAT_MRT3847_102624C.1
gccacgcgtacgaataaacaaatagctttaatttctctatgaaacccatgttcatcggtatgcaacgatccactagaacgaggtcacaatttctacatcttcacatttcgatagcacctgaaatccaaagttatcgacactttcgcgccacacgaaatattgagaaccaatcaaaatatctatcacttacgaaccattatatccaatacccgtgcttatagatgacttgaaaaatgatgacctccaactgctggtaaactcaattcgtatgccatcaacaattgcacatgctct

SEQ ID NO: 2902 - DNA, 529 bp, Glycine max
  unsure (1)..(529): unsure at all n locations
  Clone ID: PAT_MRT3847_102625C.1
aagaaaacgaagatgaaatacagcagcagagtgaagagaaaacaacgatagaaagtcacgaagaggagaacaaggcaacgggaccgtcaaagaaaggtagagacaagtatgtcaggacaaaagtacgactggctagcacgcttaacaagttctcgatcgtggatatggttggaatcttgatgcttgcatcccgtgtgctcaatctaggactactgccgagtgattttgcggactgggtggccacaggagtgatcccgtatcataacgcattagccacaacttgtgctgatgtgccagaagtacgggattccgtcaagttcatttctcgattcttccagtccgtaatgaaacgtcatagggcgagtactgttcagatcgcctactctgccaaccacctcatgtatcacatggggttgcgtctgcctcgactaaatgtgtcgctagctgtgcatcgcatttgcgccaccatgggttttcctggaaaggtctttcgcaactttcaagtggatctcggctttatgnaacgcac

SEQ ID NO: 2903 - DNA, 630 bp, Glycine max
  Clone ID: PAT_MRT3847_102626C.1
ggacggctgcgagaagacgacagaagggggtcctcctcctctgacgccgaacagagtctgcactcacacagagccagaacgcgcaagagagagaaaccaaaaaaacaaacgaagcaaaaaaaaaaagaagcgagcgaatagagacaaagcgtaagaacaacaacacaacaaccctaacgttacttctcatggaaagcgtggcgcattctcggcaacctccagacaagaaaatcaccgccggcaccggcggtttcccagccgaaactctatacgaccacgtctacggcggagcggcgaagttcaccgccggcggccaccaccactccctctcgccgtgcttcgaggactacggcgagattttcgccagcttccacgagccgcgcgcctccgccattccggtgctggatcttccggcgctcgacgccgccggcgaggtcttcttcgacttccgaaacgccgcgcgcgactactccgaaatcttccgtggcttcgacggcctcgacttttggctctcctatgaagacttgtttcgccacggtgtctccgaagaagaagatgatgatgatgaagaagaagaagactggtcaccggtgggaaactcactcattttctggagacttggagcttttt

SEQ ID NO: 2904 - DNA, 275 bp, Glycine max
  unsure (1)..(275): unsure at all n locations
  Clone ID: PAT_MRT3847_102627C.1
agtcgcangcacgcgtacgtaagctcggaattcggctcgagaacnaattcnantcanntcatatatcctncaacctcncatcatnanncattcagcannnaagancacanacngggcacantnatgcttagttagggtagcctcattaggttatgctgtttccacaatcatnacctatncnttctcacctnactggatcggaccaatgcccatgaccactngttaatgngggtngtgatgnntcaggnatatngggggagcccntgngtatgggn

SEQ ID NO: 2905 - DNA, 729 bp, Glycine max
  Clone ID: PAT_MRT3847_102628C.1
aaaattgtaacaaacgaagactccatagccaactgcttcagctacgtttgcaatttggcgatgacatcatccgttctgaaacgcctcgtctattccaattccatttggcaacgcttcttaaggtcaccaatcaacatccctctttctctctctgttactgaatcgaatttaaacttcacagggagggttcaagtttctcgactttgatgcacacgcttgcttctccagaaactcacaggtggttgtttccccttaatgaaatgacttcagtatttcaaggtgatatgcaaggggagcaaaaggttttagttacctccagctgcgatcactccattgtctgtggtggaagggtgttgttagggaatgactggcttaggaggaccaacacctccagagaataaggagaattagagaagaacagagtcagaggaatttccaactttttcatatctctgcttttgttatttacaggaagcatcaagcaggaagatttgaagatgagctggcaattccatttcctttgtcgctatcctcagacgaagtcatttcaatggaagaaaagaaggtaccgtttgactatgggtcccttggctctcagtggcaaatgaagacatcgtgctttgaaggctacactctgtgggcatgaaaaacctgtaaattgatctcagttgcccggccatggtccttgcaggaattgctgcatcttactcatgaagaaacataccaatt

SEQ ID NO: 2906 - DNA, 421 bp, Glycine max
  Clone ID: PAT_MRT3847_102629C.1
aatccggttcgggcaacattcagcttcttcagatccgatgttgttgttgaatcatattaagtggcctgctctggcccaacccaagcggtgaacgccgtgggacgaaagacatatgttgatgaactggagggctattgccatatactgagatgctaagttgtgagtaagaagcagaaatcattttgtgcctaccagtggtcgaggagcatgccttgcattggccagtgcccaaaccaataatgggttgaatgggtacaccctctctcttgacgtgtcggctcacactacaccacatacactgaggatgctgagttttaatgtctcatggacgtgatctgatggaatgctcaactactgttactattatttggctaatgaaatttggaaatcagaagccagtgtagctgggctagttcccgtg

SEQ ID NO: 2907 - DNA, 357 bp, Glycine max
  Clone ID: PAT_MRT3847_10262C.1
aaagaagcgatatgaacatgacggcatctgtgttgaaagccgacctgtgacttgatgctgagcgcatataactgcgtgcattcgtgcattgagacctcatagtcttgcaaagactgacgttgcactgtacgacggatccagcactgtatgctgagcacactctgatacacttgacgacacttcacgagtgcaatacagctaaatttgcatgccaccaaaaagcatatcgacgtgaaggggctgtattcatatgccaaacatcttgaagacaccaatatgactatgctttactgtttgttcgttgaactcgattagttgggcttgagattcttgagaatccgatatatgttccatgtc

SEQ ID NO: 2908 - DNA, 428 bp, Glycine max
  Clone ID: PAT_MRT3847_102630C.1
tcttcctcacaatcgaacgacaactcttactttaaatttctcctccagattaacatcattcggatggttaaaattccatactatctccatcttcacttatcaaatcttctacaatacaccaataaattatcttacattcttctatactgacactcataacataatccttaactcttcaacactctaatcctctattctcctctataatagatacatatatcaaaacttcacactatatatcacaatactcaaatttcacaccttacaaatatccaattcaatatgtatctcatgaaacatcgagttataccatctagaaatgtctaattcctcatgagaaccctataaaacaaacaatagataacttgtccaatgaaaataacacgaatcctattaagaaacatataacccatagacctatcatttac

SEQ ID NO: 2909 - DNA, 438 bp, Glycine max
  Clone ID: PAT_MRT3847_102631C.1
ttttttgaaggctcgagttttttttatatttggaaaaagagattaatacaaacttttgaattaccaccaatacactcgcatgctacactacagccaaaataagacttactttggtgtagaccttattctgaataaattcttgtaattacaaattaaactcaacaattctgaacataatttattgaaaaagttcaaattgatttagctgcaaggttaatacacaggaggtgggggtgagttatagaggtagggtggaggaggcgaatgtgatggtggtggtggagacttgtaaacatatggtggaggaggtgatggagatggtgggggaggatatttataaacatatggaggtggtggtgacttatagacatatggaggaggtggagaaggtgaaggaggtggcggtgacttgtaaatgtatgggggaggaggcgaggg

SEQ ID NO: 2910 - DNA, 251 bp, Glycine max
  Clone ID: PAT_MRT3847_102632C.1
accttttattgcccacttacagaagtggtattatttgggtgttttttctttctttaccccctcctcccccctccttcgggggggagaaaaacctttggcacaaactgggctaaaaaaacaaaccctactaacggggtaacttttcaggcgagcccccattattgttatttaggggtccgggaaaacaccagaggggggggctccccccaaatggggccgggaaaccacgaaaaaggggggggggggggccc

SEQ ID NO: 2911 - DNA, 411 bp, Glycine max
  Clone ID: PAT_MRT3847_102633C.1
ctctaaacaacttgataaaaatgattttcccttttatcttcgtggctacaacactggtagcatggcaataccatgcgggcgatatgtaccctctccgaatgaacactggctatactgcccgtactccgcacgtgaaatgcgcaagatgtacgcttgctgtggaatcacacaacatctatggctcatataccattcctaaacagtgcgttgaagcagcaaatgaatacatccatgatgcacaatatacatcatactttaaatcagttaaccaacaatcttacttttatgccacataccttaaagtttattccaaggtcacatgagtgatcaatatatattgcacccaactttctaatatttcatactacaaaaaacattcatattgcttggataaatttaactctacctttt

SEQ ID NO: 2912 - DNA, 121 bp, Glycine max
  Clone ID: PAT_MRT3847_102635C.1
gccccctacctaagctctttttccgctccaggggagctgaggttggactatgccccaaatgaatgccagccagatgattctaccttaggagaactcaatgaaggaaacctggattggctag

SEQ ID NO: 2913 - DNA, 202 bp, Glycine max
  Clone ID: PAT_MRT3847_102636C.1
caaaagtgctcagcgatacagtcatgatgatgatgaggatccacaaccatgctgagatctatgcatgtgcacacgctgaatgcctgatagatgcatctgggaccatatactgctgagttaatgctgctcacatcgtaagagctgtatgagcacacgctgacatacaggacagcgtgcctgtcttgacagcgacgacttttgt

SEQ ID NO: 2914 - DNA, 182 bp, Glycine max
  unsure (1)..(182): unsure at all n locations
  Clone ID: PAT_MRT3847_102637C.1
ccttactccaaatattggtttattatttatgaactaatgtagcggttctttttttggactcanttttggggggacggggatcgtataactctttatttaccttccaacctattccgagagttcccacactgttatctttagtcatatagacaattttcaaaccagttcaaatccacatttat

SEQ ID NO: 2915 - DNA, 507 bp, Glycine max
  Clone ID: PAT_MRT3847_102638C.1
cccacgcgtccggttggcttaggatgcatagcaggagtaggagttcaccccagctggcaccatgatcgagttcgaatccttgcttctaaatctgaagaactaacactaaaaaggtggtggtcgtggtcgttgtttccttctgcttctgcacacgagactcatctgtgtcgaattagggcgaggcgtccgcgttgtgtgcctgataatagagaagctggggctggaaaggaagcggaagaagaacaacaactagagttagaatggaagctcctcaccagaaggattggcgattccggaataatatcttcatgcttggtcggtctcctcaccggcgtcgctgtcgtgctcttcaattatgctgttcatgaaattcgtgatttgttctgggatgggattcccaatcgaggcgcctcatggctgagagaagcgcctattcagacaacatgggcacgtgtagtactagttccggcttttggaggcgttattgtgtctctgctaaacctcctt

SEQ ID NO: 2916 - DNA, 180 bp, Glycine max
  Clone ID: PAT_MRT3847_102639C.1
ttgtttttttttttttttttttggcatgctataatattccataaagcgtggcattgagggaaaaaaccccaccgttttggcacttgctagaaaaggtatcactctattaagaactgggggcgtaaatttatgccaaagggtttaaaaatgagtcttttgaattaaaatcccatttgttag

SEQ ID NO: 2917 - DNA, 697 bp, Glycine max
  unsure (1)..(697): unsure at all n locations
  Clone ID: PAT_MRT3847_10263C.1
tttctgtaaagatgtcaaatccaagatggaaaacaactcttgattgctgcaaatatatgtcatttgtgtctaattctttttggatgagaaggcttatttgccataacttcctttgaagaactagtaatatccttttgaggatcttcatcacttctttcaaaatcattttcttcgtcaaaactctcagttttgtctgtgtcttcctcttcaggagatttctcagaattctcttgctttgacagcttatctcgaagcactctcagttttgactttttagaatttaacacccccagaaactttgcatagatttcagattcaaattccagcctctcattggcaattctttcactctgggttaagcacttctcagcttccactttcatcttctcaaacaattcattttctgtgacaactttgtcctgtacatgcatataaacgaacatgccaaactatgatgttcacaactaaagaatagggaggagagttccatgtacctacactattcaatgatgatttgcatatatatactcagaatttgaatgagagattgttgccctaatcttgttcttaataaaagttgatattagaacctccatattgattcaagcagaaattgattgtcatatgcatangncttgttgaagcagaaattgagtgccttatgcaagcagtgtcacatgctcgctgccttatctct

SEQ ID NO: 2918 - DNA, 318 bp, Glycine max
  Clone ID: PAT_MRT3847_102640C.1
tttttgtatcttttttttttttctggggttggggctttttgttgtggggggtgctttctttgtttttagtgcaaaaacgttaaaaaccaaccttcaaagaacaaaacagttttaaaggaaaacggaaccaaaaaaaggacacaaagggcgcaggagacacaaaacaggagggaaaacaccagaccgggacacaaacctagggcggagacaaagaacaaacagacctgccggaaaaccggccagggcacaacgctcccatacgaaacaggaaaaaccaggctggaaagaggaaagccaacctggagacatgcaaaaccc

SEQ ID NO: 2919 - DNA, 424 bp, Glycine max
  unsure (1)..(424): unsure at all n locations
  Clone ID: PAT_MRT3847_102641C.1
atagtgacttagaaaagtaacagcaacgacggcaacagaagctgatcattgctgaattttgcagagctctttgtctcctctcttttctctctctctctctctctctctctctctgtcatctgcctctctacctcacttgtggcctcatcgcagacacaaaatacaaaagctttgaagctcagaggttaatataacaaacacactaacactacaaagtttgagtctttgacacaaaacaactgagatagctcagagaaaagaaaagggagaatgggagaaggaagaagaagagggacttcaaagctgagagaagcagcaaggaaggtggctgtcgcagcagcatatgcatgtggctcattctcaaggagaaaggctntgctggatccagtctccattgacacctcttgtagtctatctgccactg

SEQ ID NO: 2920 - DNA, 342 bp, Glycine max
  Clone ID: PAT_MRT3847_102642C.1
ctttttcagtttagccaacaaaatcacacgccctcagcgtctctgtttctctctctgccgctacttattcgtggggttcttcttccttgcatttttattttattatcttggtgtgaatattcactcaaacccatgaaaccattcatgtgcaccatgaacaacaacaacctcaaagattcagaaaacttccacaactcttcatggaccatagcaaaactaatgacttccttcttcctcttaatctccatctactacctcttctacttccttggattcatcacacattcatatgattgccctcaaaaaaaacactaccctttttccaccacaacttactttttc

SEQ ID NO: 2921 - DNA, 187 bp, Glycine max
  unsure (1)..(187): unsure at all n locations
  Clone ID: PAT_MRT3847_102643C.1
tcactgcataaatttgacagaaaactctgcaaacatagtcggtttatcacagacctcctttcaggcgatgagcctctctcgaactccttccggtacaaagaaannaaaaaacagggtgngaccggcagtttgannaacccccnaaccattggaccaaaaaaaaccccccctnggggggggggggggg

SEQ ID NO: 2922 - DNA, 467 bp, Glycine max
  Clone ID: PAT_MRT3847_102644C.1
ctcagtaggtcggtgctgagaaaaaggttacaacagtgaagccgacataaaaatacaacatttttttaagatctatcttaatttgtatctttagttacaagcattagaagttgagtattggttgcattaaatattttgaatttttttcatcataataatccaacctgagtaaacccagatttattcagtttagtatgtgttttgtttaatgttaaatagttgattcggattcaaactcataaaagaaaaaacattttagatctataattaatttttgatcaattttaactttaattttactttagagaagagttcagaattattttttttctaaaattgattataacttaaaacaatttcaagtaatttttaagttagacctaaaaaattttatattaaattttgttctaacttaatttaataataaaaatatacaaacatattgcaccactttaaaattaatcctg

SEQ ID NO: 2923 - DNA, 962 bp, Glycine max
  Clone ID: PAT_MRT3847_102645C.1
gtatgagtgcgcctgcgggcatcgatagattcctagttaggaatgtttctagggttctaccctttgactcaagatgggccattctattccaagagagaaagacgttgaatttgaccttgaaagtggtgggaactctagcgaagacgatgtagggaacgatctttatgttagtgatagagaatcaaagggtgcttttggtttggcgtggaatgggattctgaatgttgatggatcagataagggtaaaagtgggattgagtcatgtagcaattcagcaaaatctggtgattttggggttatggatgaaaataatttagaattgtttgtggacaagggttttgtccaacatcaattgtcccatgtaaatgttaatcatgcaaaacagaagactaagccctttatccccaaaaagcccccaaagcccccttcctcccagaggcccatcactggatgctgttgatcagaagtttgtgaaggaacttgaggagcttgccttgcggaagcgtgcgagggttaagaaaatgaaagcggtgagaaagatgaaagctagcaagtcatcgtcatcatcaacatatacaagtctttctgccatggtcatcactgttttcttcttccttgtcataatacttcacggaatcaaatctgcaaatagtgccgctgttgggttaatggcttcccctgaggcagcaattgcaggagatgagggtctgatttcgattcagtatcccatgaacttcaacagaaatgaaggagatgcacctggctctcactatacatttcggcaaagacttgtatatggaaattttgaaggttctttccctttcaatgtgagattaggctattcttttaattgtttggattatgtatgtttttttgtacagtcattaggaatcttagccatttgtcaagtttgcttgtacagtgacttgattggtaatgttaataaaaaaagagttttgctt

SEQ ID NO: 2924 - DNA, 262 bp, Glycine max
  Clone ID: PAT_MRT3847_102646C.1
atttcctatgccagtttggactgcatgcattcggtgtggcggtatgtgagctacagttctgccatcctgaggttgtcccaacgtcaaagaacttctggaatccactatgtgcatctctgcagaatctgctgaggtgcagcgtcgacatccgaatcaacctatctcctatctccggcaacggggcgggatcgcacgagtcgtccgtcagccttgtcatggagtcgagagaagaagaccgcgaggcacagtatccagccactca

SEQ ID NO: 2925 - DNA, 195 bp, Glycine max
  Clone ID: PAT_MRT3847_102647C.1
agccgttcctaccggctgcaaaaaaacaccaaaagggggatctttttttcaattaccaaaaacactaattcttcgatagggaatctaatatttgtttataaaaaccccgttgtttttcaaagggctcacaattttttaaacatcagttaatttttccaaggacgtgtcttaaaaatttggttttaaaacgtgaaa

SEQ ID NO: 2926 - DNA, 1662 bp, Glycine max
  Clone ID: PAT_MRT3847_102648C.1
gacgtcggacgcattaaaaccggaattcggtccaacaaaaacaaatcagccattgagaagatgccactgtattttctacattacctatagttgttttctttctttaaaataatatccctggtaaggggaactagtcaacaactggttaattggcctcaaatacatcagtttttctgcaactattgctggtggtgatgcatctctcgatgggagctttgtgatttaaaggttcgattagttgctgacaaagatacaaataagcccaggggttatgctttcattgagtatctgcatacaagagacatgaaagctgcttataaacaagctgatggtaagaaaattgatggtagaagggtgcttgtggatgttgaacgtgggaggactgttccaaattggagacctcgccgactaagtggtgggcttggtactactagagttggaggtgaagaagttaatcagcgacattctggggggagcaacaacagtctcgttctgaagaaccgagagtgcgagaggaccgacacgctgatagagacagggaaatatcacgtgaaagaggtagggacaaagacagagaacgggagcgatcacgtgaacattctcatgaaagggtcagggatcgtgatcatagggaggataggcaccacagagaccgggataggaacagggacagagaccgagacagggaaagagatagagatcgtgggcgtgatcgagatagaacacgggaccgtgatcgtgagcgagggagggaccgtgatcgggatcgagaatatgatcgacatcgtgagagggatagagattatgaagttggtgaccctgatcgaggacgctcacgtgatagggagtctgattatgatcgtgttgaatctaaacatggggaaaggaatcatgactatgaacctgaggatgatcgtggtaggcataaccagtatgagcatggacgtaggcatgcagaccctgatcatgaccctgagcattatgaccactacaatcatggagatgatcgtggtgaccattacaatcagtatcctgaccctgataggatggaagatgactaccatgcaggacgtgcaacatctgaatcacatgaaaaggagagaagtcatgatgtggaccgtgaatatcggcgctcagagagatcacattcccgggagtatgattattaggaattgggcatagtacttctcaactttaattggtaagatttcatcatttggtacatttacttttgaatcttgctcccccggtattggtagtttttgaatggattaaagcacggtgtgatcattacaaagaaaactgtagctgctgccatccatatggtccatatttgaaagcttgaatactgcatctttcgagacgtttgctgccttttgtcaacctggacttggacatctaatattggtattttatttggcatttgtgttgttttctgctgactttttatgaaattaaacataatgtttttctggttcattttttacgggaaacaattgtgcggggtccaagttttcgttggtctgttgatctctgtcttagcttgtgtttacaatacagagtttccagcattatttgtacgttttcttacaatttttcttacgttggacaccaattatgtgacaacttccagggttatttgaggtttgatattagatcgat

SEQ ID NO: 2927 - DNA, 411 bp, Glycine max
  unsure (1)..(411): unsure at all n locations
  Clone ID: PAT_MRT3847_102649C.1
gaggaacgttatttttggacatttacctttacatactaactagaacctccctcgcgcttttcttcgtttccaaacccgaaaggcccaaccacagagtctccattgcccctcgctctctctattggttcacgcgcggcaattggagattcacgcgccaccatggcctcaccaccgacactccctatctcctcccaatccagcgcctccggcggctccgcctcgcagtcccagcctccgatcgcaacgccggcgttccgcgccttcatctcccgcatctcctcgtccctccgtcacgcctttgcgcagcgccgcccgtgggcggagctcatcgaccggagctccatgtcncgacctgacaccctcgccgaagcatactctcggattcgcangaacttcggctacttccgcgtc

SEQ ID NO: 2928 - DNA, 161 bp, Glycine max
  Clone ID: PAT_MRT3847_10264C.1
gaagaggttcgcaaacaatttaagtaatgggaatgttctgacaatagctcaaattcactctgtgcaaactaaggtaatccaaagccaaggtttgccaatttaccaaacagcctaaaacccgtgaccagcctccaaaaaggccttgccgggttaacggttgc

SEQ ID NO: 2929 - DNA, 2928 bp, Glycine max
  Clone ID: PAT_MRT3847_102650C.1
cttgattgctgggctgttaatcaatcatgcatagttttttatcgtgttctgttcaaatatttagggatatatgcatcttcctaattaaatttatcatccgtcatggtgagtggttttgcaatggtaacaactgcatttagtggcaccaccaacttccatagaatggatttttaggtattggttccagtttccacttagttcctctgttgatttatgtggattaagagatcttctgagggcttgggttcctctaggaattatgttagcagtaggtatagtatctaagaatacatccctggtaagggtgtggtcttcttattctacaaatggtaaattattctaaaatttcaaccaatctgtactcaagttcaagtgcttccatctgccgttagctgaatatttagttgagcagagcaatgatgaacatcgtgccttttgtccttagttttcaaacaagaaaaggagactgacctcttgtgttcttttctgcactgggtaaaatacaactgggagtattgcattctcttcctcttctgtttaatttcttaactagcatattttttatgttaaattttattgttggctaaggctagagtatctgtatctatcaaaaacaaatcagcaattgagaagatgtcactgtattttctatattacctatagttgttttctttctttaaaataatatccctggtaaggggaactagtcaacaactggttaattggcctcaaatacatcagtttttctgcaactattgctggtggtgatgcatctctcgatgggagctttgtgatttaaaggctcgaggcaacgtaaactgcgcacccgggcggttgcggcaaccttcgatcttaatcccacggggcaacgttggatctgttgaacttcttcttttatatgcactctgtgatttcgctacaccctcactccgcttcgccaccctatgggggacaacaacagcaacaacgatgccttcatgcgcaaccaaaacgccgccgttcaggcccgcaccaaagcgcagaaccgttccaacgtccttcagctcaaactgattggacagagtcacccaaccggtctaacagcgaacctgttgaagctcttcgagcctaggcctccgttggagtacaagccgcctccggagaaacggaaatgtccaccgttatcagggatggctcaatttgtgagcaagtttgcccagcctggcgatccagaatatgctccacctgtcccagaaaccgagactcctgcacaaaaaagagccagaatacacaagctaaggctagagaaaggagctgcaaaggctgctgaggagcttgagaaatatgatccacataatgacccaaatgtgtcgggagatccatacaagacattgtttgtggctaaactcagttacgagaccactgagagcagaatcaaaagggagtttgagtcatatggtccaatcaaacgggttcgattagttgctgacaaagatacaaataagcccaggggttatgctttcattgagtatctgcatacaagagacatgaaagctgcttataaacaagctgatggtaggaaaattgatggtagaagggtgcttgtggatgttgagcgtgggaggactgttccaaattggagaccccgtcgcttaggtggtggacttggtaccactagagttggaggtgaagaagttaatcagcgacattctgggagggagcaacaacagtctcgttctgaagaaccgagagtgcggagaggacctgatagagacagggaatatcgggactcagagagagaacattcccgggagcaacattatcatgaaatgggcatagtacttctcaactttaattggtaagatttcatcatttggtacatttacttttgaatcttcctcccccggtattggtagtttttgaatggattaaagcacatcgtgatcattacaaagagaactgtaacagcgaccgtgcttgtgacagggatttagaaggtgaaatagtgcgtgtttcgagtcgtgtgcgggcttttgtcagcctggacgagggcgtccgtgatcgggattgggattatgatcgacatcgtgagagggatagagattatgaagttggtgaccctgatcgaggacgctcacgtgatagggagtctgattatgatcgtgttgaatctaaacatggggaaaggaatcatgactatgaacctgaggatgatcgtggtaggcataaccagtatgaacatggacgtaggcatgcagaccctgatcatgaccctgagcggtatgaccactacaatcatggagatgaccatggtgaccattacaatcagtatcgtgaccatgatgggatggaagatgactaccatgctggacgtgcaacatctgaatcgcatgaaaaggagagaagtcatgatgtggaccgtgaatatcaacgctcagagagatcacattcccgggagtatgattattaggacttgggcatagttcttctcaactttgttggtaagattttataatttggtatgtttacttttgaatcttgctcacctgccggtattggtagttgttgaatggattaaggcacagtgtgatcattaaaaagaaaactgtagctgctgctatccatatggcccatatttgaaagctgccttttgtcaacgtggacttggacatctaatattggtatttgtttggcatttgtgttgttttcttctgacattttatgaaattaaacatctaatattggtatttgattttggcaaaaaaaaataatgtttttctggttcattttttacgggaaacaattgtgcggggtccaagttttcgttggtctgttgatctctgtcttagcttgtgtttacaatacagagtttccagcattatttgtacgttttcttacaatttttcttacgttggacaccaattatgtgacaacttccagggttatttg

SEQ ID NO: 2930 - DNA, 277 bp, Glycine max
  Clone ID: PAT_MRT3847_102651C.1
gctgcgagaagacgacagaagggatgtcccttgtcttatctcactagatgagatcagctacatgcataaggacatattgtattttatcaaatataatataggtttaatatgtttcttagttcctgaaaatatggtacattttgattttagtcttcaacttttttttattaattttggttcttataaattttaaaagttttgaacatggtacttattactatttactaatgatgtggcatgcatctaaatatgctacctcacgtgtcatctcaaagta

SEQ ID NO: 2931 - DNA, 286 bp, Glycine max
  unsure (1)..(286): unsure at all n locations
  Clone ID: PAT_MRT3847_102652C.1
ctganntgngtnggnntcacagcngatatggcnaagctcangctaanatcatcggtgataacgcntcaaaatcangttatcagtgtgtcaccctgacttttcannncacaattntctgntgcttnatntctcactgtgatttcatactaggttttcggtcatcttagttgactccaagcnggtanatatctnntgcctccacgcatngctaccctcagatcttcanacacnagactacctcnatnantcgactnaagcntcattcancatcgngtcgtgttgngtt

SEQ ID NO: 2932 - DNA, 398 bp, Glycine max
  Clone ID: PAT_MRT3847_102653C.1
gccgaattccggtcgaccaccgccgagaaatcttaaagagaggaggagccttagtggtatgatgcggcttgttctgtctgctgcttgcttcctatacttacacgcacgctcactggaagggacaatgcagcttgctacaaatactgttgtgatgctcatgctggcctgactcatacgcatcgtgctccctgacatcatcaccagaagactgacgcgcttggtgatggcctactcggcttcgctctgttgacaaaccctgctcccaactccaactctccgatctcgtgtacttcgcgcattcattacatgagatgctcagagcacccatcaccgacaggccttcttctcatcattatgaatctccaaccgcccctttcaagctcctgctcggatacaat

SEQ ID NO: 2933 - DNA, 216 bp, Glycine max
  Clone ID: PAT_MRT3847_102654C.1
gggccggaaaaaaaccaggtggtgggaacttagaagaagggaatggctttctcaatggtcttcttcccaggtggtaccaacggcaaacgtgcccgtgcccggatgggtggttcattcaccggccttaaaatcatgggtgggtttcccaccagggagaccaaccatggccttaccttcattggtagcaaccggggaagaatacaatgccttccagtg

SEQ ID NO: 2934 - DNA, 425 bp, Glycine max
  unsure (1)..(425): unsure at all n locations
  Clone ID: PAT_MRT3847_102655C.1
gaattccaaaaagtaaaaagaaaaatattatgaggcgctactgaactggaaaaaaaattaataataacaatactaatattccatctaaatattgtgcccattttcaaaaatatatctcctgtgaagcaacaaaattaaatttttttattggaaaatgttctcactttctaatgtatgtttaacgtgacactaatcagcaatactcattacattattattcattttcattttctagaagaagccaaaaaaagggaaatttatttctgttcattttattttaatttattttcattgttctgatacccgtgatactggtgttgtctttatgtcagcttcaccattcggaaaaattcaatggagtgccatatgggctgtttttgggacccaaggtcagttgcattttcgnttctgtaatcttgtattat

SEQ ID NO: 2935 - DNA, 1895 bp, Glycine max
  Clone ID: PAT_MRT3847_102656C.1
atcatacccaacaacatcctccgacaccatgttgcacatggaaaaccccctcctgcagtcaacaaactcaattaccttcacattctttgggctgttgttatttctctttgttctttcatccatattcagaaaccgcggtgctgcaacaagaaaagcaccaccagaagcaagaggcgcgtggcctttaattggtcacatccacctcttaggtggctcaaaaccaccccatgtcacgttgggccacatggcggacaaatatggtcccgtcttcaccttgcgtctgggtgctcacaaaacgttggttgtgagcaattgggaaatggccaaacagtgctttaccgtcaacgacaaagcgtttgctagccgtcctaaatcagtgtcctttgaattgttgggatacaactattccatgattgggttcatcccttacggttcttattggcgtcacgtgcgcaaaattatcacgctggagcttctctctactcactgcatagacatgctcaagcacgtgatggtggccgaggttaaggcggcagtgaaagagacttacaagaacctaaagggttccgaaaaggcaacaactgaaatgaagaggtggttcggggacataacgttaaacgttatgttcagaacggtggtaggaaaacgttttgttggtgagaatgaagagaacgaacggatccgaaaggcgctgagagaattttttgacctgacgggggcgttcaatgtgtctgatgctcttccttatttgagatggttggatttggatggtgcagagaagaaaatgaaaaagacggcgaaagagttagatgggtttgttcaagtttggctggaagaacacaaaagtaaaaggaatagtgaagctgaacccaaaagtaaccaggacttgatggacgtgcttcttagccttgttgaggagggtcaagagtttgacggccaggatgctgacaccacaatcaaagctacttgcctgggcttaattttagctggctctgatacgacaacaacaacattgtcttgggctctctcattacttctcaataatcgtgaagtcctaaataaggcaatccacgaattagacacacaaattgggagtgaaaaaattgtagagatatcagacttaaaaaagctagaatatctccaatctatcatcaaggaaacattacgtttgtacccagctgcaccacttaatgtgccacacgagtccttagaagattgcaccgtgggtggatatcatgtaccaactggcacgcgtctgttgactaatatttcaaaacttcaacgagacccttcattataccctaatccattagaattttggccagagagattcttgacaacccacaaggatgtagacatcaaaggtcaacattttgaattaattccatttggtgcaggtagaagaatgtgccctggactttctttcggtcttcaagtaatgcaactaacgcttgctactctattgcatgggtttgacattgtaactagtgatggggaacatgtcgatatgcttgaacaaattggactaaccaacattaaggcctctccactccaagtcattcttacaccacgtctttctggtcatatttatgatgaaatttaaatactaaaaaaataagataacatgtcatgcatggataaattaggaatgcttggcttttatcgttttgaataaattacgaatgctaagattttattatttaaataaaataggaatataaaacctgggattaaggaaaagattagtcaaatcctgagtcatgggattccttttttatttttggattctaatttcttatgattaagggaattgtctccccctatgttttcctatgtaagttgtaccactctgttattatttgaatcaataaagcaaatatttatacattctaaaa

SEQ ID NO: 2936 - DNA, 415 bp, Glycine max
  Clone ID: PAT_MRT3847_102657C.1
acggctggagaaaacaacagatgggtacttctgtgagaagaccacagaggggtacgggtgggagaggacaacagagggggaacttttaagttattattattattatgaacactatagtgttaacaatgctgtcattttttctctatctgttagtttggcttcctagggttacctggggctggacggctgcacatgccacattttatggtggtgcatatgctttacggaccatggggggagcatgcggttacaggaacttgtatcaaatagggtatggaactcagtacagcttcattaagcgctgcactttttaacaatggacaaacttttggggcgtgtatccaacttgtttgatacaattccatatttttcatatgtggtgcttgctctataaccttaaccgacacaaactttt

SEQ ID NO: 2937 - DNA, 389 bp, Glycine max
  Clone ID: PAT_MRT3847_102658C.1
gccacgcggacgtccacacgttccaaagatgaaggattcatcgaaggaaacaaggatcccactatagaggggaactcggagattattctaacgaattctccggatatctacatcatgaccagatgctgaatggatcagtcccacatctacacacatcatgtgagaatgcgcagacacctgatctgattgggcgcaccaatctcacatctacgtgatcagagccaccactgctgatggacatcgaaaacgcaaattcgacaggggatccaaccgatcacgactggtgcagcgacacacaccgtgagctggcaacgatacataccatgtgcattgcgaatgacacagtgactcccgcattgctgttgcaatataaattaatgacgtgatgc

SEQ ID NO: 2938 - DNA, 328 bp, Glycine max
  Clone ID: PAT_MRT3847_102659C.1
caaggtgaaagcgtcccatacaaggatcacattcatggggtttgcacatttccttcacatctttgaaacccttggtcatgtaggggtttagctcattgttcactttctcctcttcccacataataacctggatgttgtggagccactcaacagtaatcactgttacagctgctcaatatgcgaatatgtctgggaggataaaacccactctttttttagaaatattataatctctgggagaggggcgtgagaagatgcttctcacaaatatagccgctgtttggagtgtatgtgtacgaccgaggaacaccccagaaccagatgcggg

SEQ ID NO: 2939 - DNA, 144 bp, Glycine max
  Clone ID: PAT_MRT3847_10265C.1
attcgacccacgccccacgcgtccggccacgcgtccctatcatactttcaaggcagaacgacaaacattttcaagtgtcggactgtgtagagaacaaaatctcttgatgccatttctgaaatacatcatctatttatatttaca

SEQ ID NO: 2940 - DNA, 309 bp, Glycine max
  unsure (1)..(309): unsure at all n locations
  Clone ID: PAT_MRT3847_102660C.1
tcgcttcactannccnnncggannncngnngcncnggatncatttaacagcccacggcgaccagaacggccagcncancggaananncggcannnnccggcccccgcccggccaagncgccggccgagaagnccacnnncncncagaccggnagncnanggagccaacacaccaaggaaaaaggggccnncggagacccnacccncgggaagacccgcacccccganactnacggcnccccggagacancgggncacccngcaacaaccacggagnngnnccccaccatcancaagcaacggaacccaa

SEQ ID NO: 2941 - DNA, 231 bp, Glycine max
  Clone ID: PAT_MRT3847_102661C.1
acagacccctgtttgtggggggggtttttttttgctgtcgggggcgagacggcagctgtttgaaccccatatgcgccgcatattggggagagcgtgctgcggtcgcctaagttggatattaagagaggaaaatttttttttgttgtactaagcagaggggggggggggggggttggttttcttggggcctattcatacccggcggggagggagagcttctcttgcgggggg

SEQ ID NO: 2942 - DNA, 297 bp, Glycine max
  Clone ID: PAT_MRT3847_102662C.1
atttaattttgccccgcccgataggacatatccgtcgacctacgcgacatctctatacgccacgtggaggaagtcgcaaattttccaccacgttggcgatactggtgtatgggttgaattctagcttcaggatttgtgaggggagagtacgagactctgaccatatccagtatcaatggacttggccgcgaacttgcgatacttagcattgatcggcgtggacattttgggcgcacgaaagtgctccgtgactacggcagcttgcggcacgcgtgctgagcagagcagctaccagga

SEQ ID NO: 2943 - DNA, 252 bp, Glycine max
  Clone ID: PAT_MRT3847_102663C.1
gacagtggatattttgaaactatataccaaaatatatcagcctatatgtatatgtttaaaagggggaaggagactgataagatacagaagcaaacctaataaataggccatgcctataaccgacacaatatgccacagatgatgctcataaaaaaccacgaaagtgctcaaaaggatctgcggatatctattacacaagggcgtccggttattactgttcgaaatgagcatggggattaaaccacattgacc

SEQ ID NO: 2944 - DNA, 358 bp, Glycine max
  Clone ID: PAT_MRT3847_102664C.1
ccttttcaaaccaaccaaaaatatttattattataattcacacattacaagccagggcccgggctcattcaatggcaccctacataccaacaaatttaaaacccccacctcttttacttcataaatttctaacataaaaaccttaatacatattaaccaaactattataaaaattacatattcccaaaaagataaggactcttatattttacacaacccaatacgataaagacatataacttcataattcaatcacccattcttatcttttgatctacaactctaaagaacaacttaactatcctctacatgtttattcaaaacatgcaatgattgctcatttttatctaaaacactc

SEQ ID NO: 2945 - DNA, 333 bp, Glycine max
  Clone ID: PAT_MRT3847_102665C.1
ttgtaagagaacaccagagggggtttacggatatgcgctctgttgggaataacgagggacatgttatgcccacttcgtttcccggcatcaaatattacacaaaatgaacaatattggcatcaccatttcctataccaatatctgatcccaggagatcaagtgaacttgagatagcacggttctaagtatcgatgaaacttgaatactttttttcaaagaaatgccgccctgaaactcattctaagtgaaaagctcacggtgtgacaactctactcagaagtattagactaattatatgaggaaaggtgaccttacaggactattcatgtttat

SEQ ID NO: 2946 - DNA, 340 bp, Glycine max
  Clone ID: PAT_MRT3847_102666C.1
cgacggcaacgaaagacgacagattttggtattacccccgtgccttctcaatggggacatgatctttgtgttcctgtctcttccatcatctactttctattcgccgcacccctaaaccattatctgaaaaagagagggtccttctattgtaatcaatctccttaccacctactcttgcgtccctgagtggcaacataaccgcttttaaaacattttcaacgaccaactgatcacaaccactccgccttctttcgtattaactaacacccaccttcttatcttttgattcttccaacaaataaaaaagtcatgaacaccatcaacaacatcttttattcca

SEQ ID NO: 2947 - DNA, 424 bp, Glycine max
  Clone ID: PAT_MRT3847_102667C.1
tgtttttctaaaaccttgtttgggagtttttgaataactaaaatcatgaggtaggctatccagattttatggataaaggaaatctttagctgaatgttatccatcattgaagcggcatttggcatggtagaaacggaaagaacgtgattgctttttttttttttttctgttttggagaaagtgttcatgtattgatcctctgactgtttgaattgacgttttgtttttttgtgtattgacagagaagatattaccagttgtcaaaaaccaacatttattgctatgtactcttctaatttgcaatgctgcggccatggagacacttcctatttttcttgatggtcttgttactgcttggggcgctatcctgatttcagtgacattaattcttttgtttggtgagattataccccaatcaatttgt

SEQ ID NO: 2948 - DNA, 246 bp, Glycine max
  unsure (1)..(246): unsure at all n locations
  Clone ID: PAT_MRT3847_102668C.1
gtttcttanaagggctctactntactgcttcacnttctgctctagaaaattcagtggtgatacatggcntccggctactgctctctgtagccaaaccagcccttcaggcaaatgggaaaggcttctctgaattctnctggcctgccgcagtnatcaggnnnccntagctttnntagaaaatncttcagaggatttncantcngnattgcctncnanactnngcnnnaagcancannggaggnaaca

SEQ ID NO: 2949 - DNA, 447 bp, Glycine max
  Clone ID: PAT_MRT3847_102669C.1
ggctcgagagaacaatggttcaaccagaccatggccaaggcctccaagtccgaagagccccgccacattcaatgggccgacagcattgctgaggaggaagacgacgacgacgagatcgactcggactctgagaacgaagacgactttgacatgatcccactgcctcgacgcatcgctcagataccagttcagatcagcgcaatggaggtcgacgacgacgaggatgaggacgaattctacgacgacatggaggacgactcggagctcgctcttactcaagtgtcatcgcatctacagtcaccagacgagctcacctacgaacaagagtccgatgacgagtcaccacctacatcgtcccaacaagcgtctatgaacttcttcgacaaggacgccatgcttacaacatccttctacgacgcataaccagcctcgcacgacattgaggac

SEQ ID NO: 2950 - DNA, 352 bp, Glycine max
  Clone ID: PAT_MRT3847_10266C.1
gctcgaggccattgttgatttggcagaattatttttttatcttgcgagctcagtgggggtcagtgtatcccaagcatggtgggggtggttctgttcattcccttctacatgaaattaaagaggcaactactaaacctgtcgcaggtggttttgtaatattaaaacctgatcatgttaaacatgtatcgggatggggagcttatggtgtgattgttggcagtgctatattgaatgtgcttggtgaggccaaatcttctcaatattgacttaatgaactggaagttttaaccctctctttaaaatcagctactttcttgaaaaatatgcttttttatatctttatacttataat

SEQ ID NO: 2951 - DNA, 183 bp, Glycine max
  Clone ID: PAT_MRT3847_102670C.1
gggcgccagagaataattttaacctccattgcgggttttacctaataaggtattgggactttgtttggcccccccatgataatgatcaaaacttactgcccgaggggaaaaaaaaactaccaaaatgggggaaccctactgggaataggatccaagatctgggagtaccaaattaaattcatt

SEQ ID NO: 2952 - DNA, 791 bp, Glycine max
  Clone ID: PAT_MRT3847_102671C.1
caaaaaattgagaagagatgggagtcactccaaagttgatgaggcaaaaaatcgtaatagctcatagaataaaagaggacttaaaatagaattatcctattggatcaattgatatgataaaagatacaatgaaactgtatagactctctatttatagagtttattagtgctaaccgttatttctaataacaactatttatatatttctaacagactaactagtcttgacaatatttgaccacttgagaaatgagaaaatagttctcatttgaaggtaaaatttttccagcaaagcagcatccggatacagtaacattaaattcatcttttttttttttcagggtctgtaaatggaggcaacagtgctgaactggcaaagcaagaagatattgatggatttctcgttggaggtgcttcattaaagggtcctgagtttgctaccattgtcaattcagtcacatccaagaaagttgcggcttgaacttgattacttattgtgattttggcaatatgagagcattaaggatataagacgggctagtcataaatgtggcaataatgtgggtgtataataacagattggtttttattatcaaaattactgccaatttctttgcaatcagtaggaattgcatcctctgagttttccaaagagacagtgtttttacagcaattagacatgcagagatggtagaaagcaataaataataattttctggcccgaaaaaaaaaaaaaaaaaaaaaaaaaagcgaccgctcgcaggatcgcagcttacgacgcgcgcagtgca

SEQ ID NO: 2953 - DNA, 475 bp, Glycine max
  Clone ID: PAT_MRT3847_102672C.1
ggggagagaaagtaaaaagaaaatatgaaaaatgattaacttctagaccagttttataaaaatcggttcggtccaaccggtaggactagtctaatgaaaatctgatgatctaattggattgtttatgtatgtgatccgggatgatctgaatgattttacaaacttggacttgaccaattttacagactttattattaattttaatacttcaattgttattttgaaatatgaattaactttttttaatcaaataatattagtctcatacttatatataatagataaatatataattgtaaattttttaatatatatcaaatcaaaccgagtcaattactagttcaccaattgaactattaacctactatctcgaccggatcaatgagaaccaattttcatgacattgttctagacccaaatttatttattttttggttccctttcactccaatttaaattttaaacctttcttttt

SEQ ID NO: 2954 - DNA, 352 bp, Glycine max
  Clone ID: PAT_MRT3847_102673C.1
ccagcacaaccaaaatcataaattaaggaaattctaacccatcgataattaaatttgaggggaattatgaggtagcacaaaagggctcaccattaaaatcaaaataacaaggcgaagttttaagtaacttaggacagaacttaaaaaaaaaaaactagggaaaatgagagtagataactgggtacattatgtcacttaacactaaacctcctttaagggatatgcaaagtataaaaatgtgggatcagcagcaccatccttgtggtatgcaaaaaccaagcaggcatcatcattcatgctctccccaacaaaaaactgggaatccctatttgtagagagcagggattaagtt

SEQ ID NO: 2955 - DNA, 659 bp, Glycine max
  unsure (1)..(659): unsure at all n locations
  Clone ID: PAT_MRT3847_102674C.1
cnctacatgagcgaaggcctgcccggcgaggtcacatcttcggcgacatggccgagctcgagcacgcgctgcacgcgaaggtcatccacctccacaccaagatcaagtaccggtggcagggcatggacgagaccggcaaggtctcgacgcgctggatcgagaccaccgcgggccgcgtcatgctcggcaacctgctgccgaagaacccgcggatttcgtacgagatcatcaacaagctgatgaccaagcgcgagatctcgggcgtgatcgaccaagtctatcgtcactgcggccaaaaggagacggtgatcttctgcgaccgcatcatggcgctcggcttctacaacgcgttcaaggccggcatctcgttcggcaaggacgacatggtcgtgccgcacggcaagtggaagatcgtcgacaccacccgtacgctggcgaaggacttcgagcagcagtacaacgacggcctgatcacccatggcgagaagtacaacaaggtcgtcgacgcctggtcgaaggccacggaagaaatcgccaaggcgatgatgaaggagatctccgccaccaagaagacggcgagcggagccgatgccgacatcaactcgatctacatgatggctcactccggggcccgcgggttcccggcccagatgcgccag

SEQ ID NO: 2956 - DNA, 885 bp, Glycine max
  Clone ID: PAT_MRT3847_102675C.1
ggcttgccttcaatcctcctccttccctccattccaatttctctctgtctcttcccaattcgctagctttctctctctctctcttcccaattcgcaagttttcactgcgcaatcacactgcatatacctattcttacagtcacgaactttatattggggtggttgcatcgacatcagtctcacaccagagagggcacaggatttggattaagagtgtaatttttgaggtgaaaatgggagttattcagaagtttttcgttggattactggtcatggaggcaatacaaattggaataatatatgcttttaacgttaaaacactgttcatgtggtcaatccctattgctattttatatgcttttgacagtggatttcttgctgtcatatctgtcaatgtggtgatagcattttacatatatttggcattgagagaacctacggcggataaacccgagcctgatcctaaatttcttgctgaggccaaagctagcatcaatcagtctacaggggatgctcaacaaccttcccaggctctcaagaaagaacagtagatgtgatgcaggactacaaaagggggaggaccttaacttgggaggaattgttactagatcaaggttaaagaagctacaagaggatattaatatgaagatgatttcacttgtggagaaggatgatggatgggacctaaagatcataaatttgaacctacttctagattaggattgcttaattttgtggactttaagtgttttcttttattaaagcctattatgttatgtgttgggcctttttagttatacggggcattttcattagtgttagtataataggcttttatgacacgagtaggaattttttgattaatgaaaatttatcttgttaatt

SEQ ID NO: 2957 - DNA, 774 bp, Glycine max
  Clone ID: PAT_MRT3847_102676C.1
cggctcgagctgaatgagaagtatgttgatgagtgggtaggaccaggtagtcctcatactatccccttgctatactcgtcattggaaagtatccacacgggcgaggtgagtaactctggtgaccacatggaatattgccttgaggcacatgcatcaagagctttggaggaagaaaaaaatataaagaatcaacaggaatactttgttccctggcatttaccttatcatcgtgctgaaatcagtggcgcttctgccgaagctcttgctgctggtctggcaacgaaagatgacaaaaaaggtgctgtggtgtataatcgatattatcatgtttttagtgaaggcgagcttgaaagtttgacaactgaaataaacaatgctataattgttgatcagttttttgataaatccaactggtgcattattctagagaagacagtatgaccaagaaagaagaaacctggttgatatgtgtaagggaacaaaactaggctgctgcctcctttaaacatccgtccagcttctcatccttgagggagtatagcaggccggattgtagtataacaacttttacaacatttatcttgcaagttcaactttgaattaaggattgtagtataacaacttttacaacatctaacttgcaattaaaaaatatacacaaatttggatgaattaaggatttcatcagacttttagtataaaatatttatcaaataatctcactcaaatctttgagattttgccaaagggggggggggggggggggcccccaaa

SEQ ID NO: 2958 - DNA, 597 bp, Glycine max
  Clone ID: PAT_MRT3847_102677C.1
gtgcttgacattttgatgcaaatatctgcttgatatgcggcttaaagatattttttttctgttttccttcagatgcctactttttgtctgttgcgttaatgatacattgataccagttggatttagttcttcaattatctagttatcttttgcatgtgtatcccgaatgttattgttcaatttccgattcttttcagtttcacccttgaagatgtgcagtccaaactcatttcttcctgtaatttcctttaaaaatttgggccaagtaaatgatattaaataataaaatcttataaaactcccgttgtctcaaagcagggtgtcaagaggctctgtcatctcggagcctggaactgatttcagctgaaatggttaccattttagtgcatggccttgtgtaggtcagttatctgtttatgtattgcccattattttttgcggcattttcttttccgcttctaattatattttcttttcattttgttgctctgctttttagccaaattacgcagcgcaactgttcaaattactttcatttcagtcctccattcttgctccttgctcctttagtttactcctttgagattactggaagaa

SEQ ID NO: 2959 - DNA, 426 bp, Glycine max
  Clone ID: PAT_MRT3847_102678C.1
ccggaatttccaggtgcggaccacgcctccgggagatcttaagcttgcagatgttagactggcacgatgattttctaatgaccaaaaggcacgtcttactaatcgagagattacgttatggtacatgatcacctgaggtggtgctaggaacaacaaggaatgggccagctgtggatatgtggacagtgagtgagcattttagctgagcttcttcatgggaagcctatgtttgctgaaaaagaggagccagaacatttaaatagtttatatgagctgggtggagcaccaaaagaaggcaattggcctggggtttgcatgatatcttattatagcatgctctaagccaacaagggccgatgaatgagacgtttgagggaagtttttatggatctttgatcatgatgctctggaattgttgtagaagat

SEQ ID NO: 2960 - DNA, 278 bp, Glycine max
  Clone ID: PAT_MRT3847_102679C.1
ggtggttttgtttttttttttttttgggggcacgtggcgtcctattttttcccttggctttgccatggaaattttcttcagcgctgcgttgtcttacgcttgtttccgctaaattctatggcctctgtttccggggcctacttcgggggggtgccttttttacttaggccgccggaatgaggactccccttggttccttgggcccgggttccgtggatgcccgtctttttggaaggccgccatcccccaagtgttttgtccccccctcgcttgttggg

SEQ ID NO: 2961 - DNA, 822 bp, Glycine max
  unsure (1)..(822): unsure at all n locations
  Clone ID: PAT_MRT3847_10267C.1
cgaattcgacctcggtacccggggatcctctagagtcgacctgcagattatgttccttttaaatatgggacttattatgagtaaatcaagcagtgtccaagcaatgtatgtattgacaatgtaaaggatttttacattgtcatcaaatcaaatcacaaattgtctgttaactttaacaataactacatcaaaagtaaagattactatgatttttaattggttgactttgacgctatagaaattaaacaccattgatacatcaaaaccatttcaaatatgggactcattgcaggtaatacacaatgaatgaacagtttaattgagttattatcatgagtaaatagtgtatgcactagtttttacattatcatcaaatcacaagttgtttgttaactttaacaataactacatgaaaagtcaaaattaccatgatttttaattggttgaccgtggtgctatagaaattaaacttcattgttatatctaaggccatgttgtttttgagttaattatggattgattatggcagggcctttcaacgtatataaggactatgctttctacccaggtaaggcactgtttaactgattttttatgtttgttcttgttgtcataaaaacccttgaatagtacatgagtagtcaacgaaatgcctttcaggccctcctgattgctanttggggttgaggagaaatcagctacagttattggtgctacttttcaggtatcatcaactaattatattctatatttacttggagtaatgattgaacccctgtttgttagatggggcttggggagaagaaaactcaagccctttgg

SEQ ID NO: 2962 - DNA, 287 bp, Glycine max
  Clone ID: PAT_MRT3847_102680C.1
gatggggttttactttccatggcgatggccaatgatggcctatgccttttggtctggaacttagtctgaacaatttcatttggtaactatatacaatgtttttattgctagctgttattggcttgttttcagtttgtggacaagttgcaatagtaatatatattacttgattttaggtttactatttcattgttctttgatcaactttaagttttaaccccttacaggtgtatttattattattattactacttacagtttatgttactgttgatttagtttttgac

SEQ ID NO: 2963 - DNA, 637 bp, Glycine max
  Clone ID: PAT_MRT3847_102681C.1
ctattgtagctaatccttcaagtcagctggtgtgggagcctctcatcaataaattcaagtccaaactagccaaatgggctcaaagagatatatccatggctgggaagatcactcttataaattctgtccttaatgcccttccaacttatcttctctccttttttagaattcctcagaaggtagccacaaagttgatctccctccaaaggaattttctgtggggtggagataatgaccacaaaaaaattccttgggtaaaatgggatgatatctgtttgcctaagaatgatggaggcttggggataaaggatatctccaaattcaacatagctctgatgggtagatggatatggggctttgcgtctgatcagcagcagccctgggtcagaattttaacttcaaaatatggtggttggtctgaattcctgaatggctctgacaaaaggggcttttcccattggtggaaagatattagaaagctgtatcaccaagaagactgtagtatttttaaagacaatttgtcttggaaggttggatgtggggaaagtatcaaattctggactgatacttggttagggggatcaatacaatctgcagcaggagtatcatcagttattccttataagcagacagcaaa

SEQ ID NO: 2964 - DNA, 292 bp, Glycine max
  Clone ID: PAT_MRT3847_102682C.1
gaactgggggacgtggaaaaaatgttcataaaaattgatgatgaacatattgtggcatggaactcaatgatctttgctcatgctcggttggacaccggacttatgttcccccattacactattacaagatcttgacggaacaacctattttcaaattcaaggggcctccttgggtgctgtgttaaaggcttgtgagaataaatcaaacttgcctgcaggtgggcaaattcattcacttgtggtgaaatcaagtgtgagtcatcatactttgggtggcatgcatgatgctaca

SEQ ID NO: 2965 - DNA, 492 bp, Glycine max
  Clone ID: PAT_MRT3847_102683C.1
aaaaacgaaagaaattaggtctcccctttcctttgggaaaatttaaagacaaaccgaccattggtggttttttaaattaaaattttttataaggttatttaaaacttgaacgggaacggggtttagtacaagtccggtccttggaaaaaagttttacttttttttacgggggggttaaaaaagaaaaaatgccccaaattccaaaaaaaggttctttttaagccatgcctccattggtggttgccctgttttttgggaaaaaagatgttccatggacaccaaaaacaaaaaacccgggcagctttgggccaaaggggaagttttttccttttttaggggaaggggtgggcaaaaatccttttttggggaggtttttttaaaatttttccactttcttgtccgaagggggccttgatgtcttattttttgtttggaaggtattagggatccccgaaaaacggggttggtggaaaaaccaaaaaatcgccggaa

SEQ ID NO: 2966 - DNA, 163 bp, Glycine max
  Clone ID: PAT_MRT3847_102684C.1
cgaagctcgaagacggccctagacgggcaaaccgcgccgataaaacaccgcgaagcaagcacaggaaggggggagtgaaacaaaagagccggaggcaccccccgcaggcaacggaaacagacacacggacaccgacccaagaacgacccacggaaccaccagc

SEQ ID NO: 2967 - DNA, 279 bp, Glycine max
  Clone ID: PAT_MRT3847_102685C.1
taacgagtctttttttgttttttttttctggattatacacctgccgaataataaaagtagtgatcagcacttgcaaggcatattctccaataaaaggggatactgaagatattacagagccctacacgggagacagaacaagagccggccgcaccccaaatgacatctccatctcttacacttgagtaagctaagaaaattaaaagttgcctctggagcctatagaggattgtatctattctccctcataaccatgcactagctctctttgaaaacgga

SEQ ID NO: 2968 - DNA, 411 bp, Glycine max
  Clone ID: PAT_MRT3847_102686C.1
ctggttcttattcttttggttttttagcacgggacgaactaacaacactattcctttattgggttttaaaaagcccccctggaaaaatggccccccacaaatacccttaaaagccttggggaaaagagggggggcaaagggaccaaaattttaatggatacttttccccaggggggggtatttcccataatgcccagggtttgctcttttttaaccccaaatttttttttattttctcccccccccaaaaacaaaaagcgggggggggtgccttcccccccacgaaaaaatttcttggttttttgggggacccccccaacctaaactaagggagtcccaacagtttcttcccgttccccaaactttggggggccatatttgatcttttttccgcccccgcagaataaaata

SEQ ID NO: 2969 - DNA, 191 bp, Glycine max
  Clone ID: PAT_MRT3847_102687C.1
caccatttcaaggcaattttatgaacacaagaggttaaattaactactccattaaatgattttgttaaattatgttataattatataaggggtgggaaaataatttaacaaaatcatttaatggtgacgtatattaatattataagaactaatattagtattactggtttaaattatagatttactggttc

SEQ ID NO: 2970 - DNA, 248 bp, Glycine max
  Clone ID: PAT_MRT3847_102688C.1
cttctttcaataactggttcctctctcctaccacctcctaatagtaattcctctccttttccaccttcggcttcctttttttatgaacttaaatttaagggctccttggccacctcccttgaccttctttttaagggggatggaaatttaatagaaggggtttggtttgccaaaagaagggtgggatccattctaatcctctctaatgcttccgggggtccttaataaggcaaatggcttcttgaatt

SEQ ID NO: 2971 - DNA, 447 bp, Glycine max
  Clone ID: PAT_MRT3847_102689C.1
ggacgcccttttttttagtttttattttgtggtcgacctcattttgcattttatagatcaatttttacccatgaaataaggcagcaaagccctgattcaaaacacgggttcttaaaaataaatgccctaagcaacataggaaattagacatagcaggggggcttcttagagagaaaaaaagactcgcgtgggtttggattatgaaccatagcaagacctagggaacagacccgtacaaaccaaactctacttcctgacgtggacggggagctgggtatcgggggaaatcccttaaaactcctatgcatggggggaggcgggcataccgcgattctgcttacatctcacaaccttgagcagcatacccgggtctttcctggcctaaccggggccaaaagcgccaattcgcaggcctggatctggcttggccggacagtgcgaagactg

SEQ ID NO: 2972 - DNA, 497 bp, Glycine max
  Clone ID: PAT_MRT3847_10268C.1
tttaattattctgacgttatcatgttaactagttgtgctcagatttggttgaagtgcgaggagctcgaatttatttttggttttttgaatatttctaattattaaattaattcttgtctaggccgcagatttatatgtctgatttcatttccttgtgaagggatattatcttaaagctggaatatggtatatttatgttattatgtttaatcttggttggcccttgatatgaaataaatcgtattgggaggagaatacttgtgtgcacccccatcctctgacgtagatgtgtcactcctttcggaccttggtcagaaaaaaaaatacttaccatattttgctgtgtaatgagtaatttggcttttgcttgaccatgttctcattcttactgaattgggttgctttgaattcttgtgtgtgacttcattattatgattttactatacattcaattgtgcttgatttagaaattattcgttgtgggtttggaggagttg

SEQ ID NO: 2973 - DNA, 450 bp, Glycine max
  Clone ID: PAT_MRT3847_102690C.1
gtggcggatgttaaaagttaataaaatacttgacacctttctttatgtcaatctaagcaattaattaatgacgtgagaggagcatcatagattcatcattcttgttacttgttcacgtccactatgtaacttcctttttattttcgtgggtcaaggattagagcaccactcatgggttttacatgctgcgacaagttgatgattatgattataatcctgctctctttctaccttttgtcatgactcctaacaaatcataatcatgaggcccaccaaagcagatacgtttggatttaattagacatatttagggtcatctttatttggtgacttcccaattatcgtatttatgagagattttttttttagaaaaatgtatacgtatggtcatatattattacttagtcggtttaaggatgtacttcaaaaaatgtttgttcaaatgaacaa

SEQ ID NO: 2974 - DNA, 495 bp, Glycine max
  unsure (1)..(495): unsure at all n locations
  Clone ID: PAT_MRT3847_102691C.1
agtttccgtcatcactgtatgacgtcctccttctttgggggggggggggggtaaataatggggaaatcacgcatggtaggctagcgcgtagctcgctagtaacggtaatggcgcgttaggagaacggggtcggagaattagagttaaaagtaaattaggataagaataaacattaatagtcttcctagagatggtacaatatacttaaaaacagtggacgggactattaaagataagattgattattgaggggtaggtgataatgcaagcgtantgtactgcggagtatgtacgtaggagaccgggcggtgtctccatgggcccgggtcatgtgggccatggtgcggtcgttcagggttgtggagtacaccanttgtttggtgcctgcacaaccagtccaaaacaccacacggaatcgtcgaaagtagcggtcgggatgcagcctaaacagcaaatttgacggtgacggtgggttgtcactcaaggttactggat

SEQ ID NO: 2975 - DNA, 259 bp, Glycine max
  Clone ID: PAT_MRT3847_102692C.1
tctatctctagaactagaatggctgaccatgatgctaaagaagaacaaaggcccctcaatcaatggagtctgagcaaagggggattcatggcttccatgttcatttttgtcttctcagcattggacaacatgggctttgtggcaaacatggtaagcatagtcctatacttttatggagtcgtgcactttgatctagccagttcagccaacacactcacgaacttcatgggctcaacctacttgctttcccttgttggtg

SEQ ID NO: 2976 - DNA, 411 bp, Glycine max
  Clone ID: PAT_MRT3847_102693C.1
aattaagaacactacagagtatttttaaaaaacacgaaaaatgtgtacatgttttaatatccagggctccaaaagactgagagaaggaagaagactactggtttgtaaattactgccacatcctataacgtaattgttcttgtacaaagggtaaaaacatgtttatcttcgtgcaattttacccgcatgctttttcttaatcagctgaattcaccttcatgataatctttagtccaacaggatcgaccctcaagaaatttgataatcgtaattgaaagaaggctcctatttttacatttgacatctaccaatttacgaaaacatgcgaactactgcacggtaccattttagcctgctaccttagttggccccaatatatgaatttttgagctcttgtgcttgctctatgtg

SEQ ID NO: 2977 - DNA, 463 bp, Glycine max
  Clone ID: PAT_MRT3847_102694C.1
tgcatacatcattatgtatatgtgaggtatcctaaaacttgttagtataatacacaatgtactcttaaaactgttttacatatgtctatagtttattaatttattcacgcatattagtaaggaaatatattttgtaattggtacgtgtgtttattaagctaattaatttacagttttgtaggtagattttatagttaatcaacaatattaaggtagaattttattcattttggctagctcttaatactctttatctcaagttaggtctttaagtaaacatacatgaccaaagtaataaccatgcataagtttagaatattaaaacaattgtttagaattgattatttttattgatggtcattatgatttagtatgtgtgatacacccttgtatatagtatatgtgactaagtgtgttttcttttcttatttaagccaaatgatgcttcagtgttcctaataca

SEQ ID NO: 2978 - DNA, 564 bp, Glycine max
  Clone ID: PAT_MRT3847_102695C.1
aaaacttcctgcgctttttttttttaaccagaaatctggggaggctcttgttcttgaagccccaaactttatccgaaatactatcgccattttcgtggatgaaccctttagaattgcccaacgacccagaaagacatttaagaacggccctctaaccctggaagaaaagtaagggcaattgttcaacaatggatccattgtcccaactcccctttaaattcttgacgcatatgtggagccactcacccctggcttccttaatataccagatcattcacccgcgtgagtgtggtaagaacccaggtcttcctgtggaagcgacccttgttaagttaatgggacacccatccatcctttgccctttttgaagcccccttttccacatgcttcattaatcccgatgacaacgggtctttcttgaccctcccattcaaatacaggaagaagaccggcctctcacagtttgaaaaaccgcaccgaacacaagcgcatgtcggctcgttctgttgaacgctttactgttgccacccagacagaccttggggaaaatcctctttgccgaca

SEQ ID NO: 2979 - DNA, 157 bp, Glycine max
  unsure (1)..(157): unsure at all n locations
  Clone ID: PAT_MRT3847_102696C.1
caaanacagaggcaannaagaagnacaaccaggngangcggancnggnngaaggacaagcgngcaaaannnngannagaaaaagngcggagaaggangnggaaggngaagggaacngcnacaaacaacagaaagcancannggnnagnggagcagaa

SEQ ID NO: 2980 - DNA, 305 bp, Glycine max
  unsure (1)..(305): unsure at all n locations
  Clone ID: PAT_MRT3847_102697C.1
aaaccctcacattctnattnaaattctcancaattgctaatgctataactttnaatatgtttatcatgaacgagattttttttttttttaggcctaaaatttaattttccttttcagtggcatccaagaaaaagttcaccttgcctgacagttattatgattatttgaccaaagcagtgtaattataggttacccctttttcccggcatatagatcatgatctacccaaaaccttcccttttcacccatttctttacactccttattgacattcttctttttacctttttcttctttccttttct

SEQ ID NO: 2981 - DNA, 297 bp, Glycine max
  Clone ID: PAT_MRT3847_102698C.1
gatttattttgaaaactattatgcgctcttttaagtgggtgcataacagattgctgctctgcggggtagtggaatgaatgaatctttgatactggtgtcaggcacttggtggactgagctgatcatgtcattggctttgtcaccatgcgtgccatacagttctaactttctacaggtagctgtgcgattgtgtcattcttagataaccaaatgtttcatgtggttaaacaatggtatatacatgataatagactatcaggctgactgaaaggacaagagagaatttgcagtgtcatg

SEQ ID NO: 2982 - DNA, 268 bp, Glycine max
  Clone ID: PAT_MRT3847_102699C.1
ctttccgcgatcaaaaccgagctagggttttaggtccgggggagagggtgaggagcggacggaggcgcgccatggacaaccccgagatgcagcggttccttcagcaagagcagcaaaaggcgatgatgaacgagatggttggcaagctaacgagcgtgtgctgggacaagtgcatcactagcgctcccgggagcaagttcagttccggggaatcaacctgcctgaccaactgcgcccagaggtttctcgacatgagcgtgatgattgc

SEQ ID NO: 2983 - DNA, 246 bp, Glycine max
  Clone ID: PAT_MRT3847_10269C.1
ccttttttataataacccctcggcgaacacaatagctgcggggacaaattttagggcaggacccggtaacccccaaaagccacactgcgccgaaaaggccgacagcggaaatgcaaaaaacgcgaaaacccctgacccgaaaaaaaaagccgaggggaaaaagggagaaaaagaggggggtggaacaaaaaagagggggggcgacgcacaagaccacgaaaaaccaaaggggggggacacacatag

SEQ ID NO: 2984 - DNA, 446 bp, Glycine max
  unsure (1)..(446): unsure at all n locations
  Clone ID: PAT_MRT3847_1026C.1
cacagtcatcgtctgttcaggatcatattcacgccccctctctctctctctctctctctctctctcttactttgtgtctttctatctctctcttcaattccaaaaccctacccccatccaattccaattcaccctcaatcatgggttctgaaggttccactgtcgtcggtcagtattcaacctcttcacttccatcttcatttcctaatatcttttttccttctctctatcaattactcttgtggttcgctaattataattatgagtttttggttgttctggatagagtctacaattactgttgtatatggataatgatgatacaaatgctttgtgtttgaagttgttactgtgttgcgtggaatttgtgctatattgttaagataaacccacaaattagtggtatgataaacaaacagcangagcaaaacaaacanaaaataaaa

SEQ ID NO: 2985 - DNA, 746 bp, Glycine max
  unsure (1)..(746): unsure at all n locations
  Clone ID: PAT_MRT3847_102700C.1
attgggttttgccttgaagatgaacatcgccttctcgtctacgaatttatgccacgtggaagcttggaaaaccatttgttcaggagaggctcatattttcaaccactttcttggagcttacgtttgaaggtagctcttgatgctgccaaagggccttgcactttctccacagtgcagaagcaaaagtgatatatagagattttaagacttcaaatatcttgctggattcagtatgtgaacctttaatcttttaatcttataatgaaagaaaaaagatctgatgaatgtagaaaccatttggattagcagatctgaaatgtgttgacttgatcacagaaatattaatgcaaaactttctgattttgggctggcaaaggatggaccaacaggtgacaaaagtcatgtctccaccagggtaatgggaacctacggatacgcagcacctgaatattctagccacaggtcatcttactgctaagagcgatgtctattagttttgggagttgtcctgctggaaatgttgtctggcaagatggctgttgacaagaatagaccatctggacaacacaatttggtggaatgggctaaaccttacctggncaacaagcgtaaatatttcgtgtgttggacacccggctcgaaggacaatattcaacagatgatgcctgtaagctagccacccttgccttgcggtgcctatcaatagaatccaagttcangccaacatgnatgaagtggttacaaca

SEQ ID NO: 2986 - DNA, 2785 bp, Glycine max
  Clone ID: PAT_MRT3847_102701C.1
atcgggcgttagattccgaaagaggttcgcccattcttttacccaatcacacaacatatctaattgggagtcagcttctctgcaactcttctctcaataaccaatataaaaagtaaaaacacgcacaaccttcttttctctctgttttttggagtcagcttcactgcacaggatttatgtgatcgcaacatgggagtttgtttgagcgcccaaattaaagctgaaagcccatataacactgggttcaattcaaagtatgtgagtacggatggaaatgatttcggcagcacaaacgataaggtttcagcaaactcaattcctcaaactcctcggagtgagggtgagatcttgcggtcatccaatttgaagagctttcccttgtcagaacttaagacggccactagaaatttccgtccagatagcgtgttaggagaaggtggttttggatcagtttttaaggggtggatcgatgagaattcattgactgctaccaaacctggcactggcattgttattgctgttaaaagacttaatcaagatggcatccagggtcacagggagtggttggctgaagtcaactatcttggacagctttctcatcctcatctagtgtagattgattgggttttgccatgaagatgaacattgccttctcgtctacgattttatgcaacgtggaagcttggaaaaccatttgttcaggagaggctcatattttcaaccactttcttggagcttacgtttgaaggtagctcttgatgctgccaaagggcttgcatttctccacagtgcagaagcaaaagtgatatatagagattttaagacttcaaatatcttgctggattcaaaatataatgcaaaactttctgattttgggctggcaaaggatggaccaacaggtgacaaaagtcatgtctccaccagggtaatgggaacctacggatacgcagcacctgaatatctagccacaggtcatcttactgctaagagcgatgtctatagttttggggttgtcctgctggaaatgttgtctggcaagagggctgttgacaagaatagaccatctggacaacacaatttggtggaatgggctaaaccttacctggcaaacaagcgtaagatatttcgtgtgttggacacccggctcgaaggacaatattcaacagatgatgcctgtaagctagccacccttgccttgcggtgcctatcaatagaatccaagttcaggccaaacatggatgaagtggttacaacattggagcagctgcaagttcctaatgtaaatggaggccatcaaaatgggtctcgtgttcgtagaagaagtgctgatgtgaatagaggctatcaaaatccttctgttaatggatctcgagttcgtagaagaagtgccgatgatattagccctatggagactcccacagcttatccccggccttctgcatcccctctctatacttgatattgcaaacttatcatcatgcatctgttgctggtgatctcatccaccaactcagtcacctcagtagctattagcctattgcactctagtattgtacatatcttatttcacataatgtattcagtattgctagtccaccaattaatattttcggagttctgttttaagtgtttgtaactactaaactagatgcgaaggcaggtacattatatttgtatgatagctctgattagctcatttttgttcttgttgtctatattagggtgctgtggttccctagtctattttgtaacacctagttgccttatgtgacttctacatcaaacataccaaatagtagtacattttaaaggcttgtgctgtattcaaaatataatgcaaaactttctgattttgggctggcaaaggacggaccaacaggagacaaaagtcatgtctccaccagggtaatgggaacatatggatacgcagcacctgaatatctagccacaggtcatcttactgccaagagcgatgtgtacagttttggagttgtcctgctggaaatgttgtctgggaagagggcagttgacaagaatagaccatctggacaacacaatttggtggaatgggctaaacctttcatggcaaacaagcgtaagatattccgcgtgttggacacccggctccaaggacaatattcaacagatgatgcctacaagctagccacccttgccttgcgctgcctatcaatagaatccaagttcaggccaaacatggatcaagtggttacgacattggagcagttgcagctttctaatgtaaatggagggcctcgtgttcgtagaagaagtgctgatgttaatagaggccatcaaaatccttcttctgttaatggatctcgagttcgtagaagaagtgccgatgatattagccgtttggagactcccaacgcttatccccgaccctctgcatcccctctttatacttgacattgcaaacacacacacccttcaaatttatcatcatgcaatctgtttcgggtgatcacatccacgatctcaggcacctgtgtagctattagcctattactctctagtactgtacatatcgtatttcacctaatatattcaatgttgctagtccaccaattaatatttcacatatcatattttgtgtaactactaaactagattgcatttgtattatagctctagttagctcatttttgttcttgtctatattagggtggtgtgatttcttagtctattttgtaacacccagttgccttatgtgacttttacatcaaacataccaaatagtagttcatttaaagacttgtgccct

SEQ ID NO: 2987 - DNA, 615 bp, Glycine max
  Clone ID: PAT_MRT3847_102702C.1
gcacgtgggttgttcatctgtttactaacatttcttcaattcttagctgttttttttttttgctcaatcatttttttaagatggccaaaagaaatgtcgctgctaattcttcttttgagaggagtaccttggcttctctggatcaaaagttggccatggccaagcgctgttcccatgagggtgtgatggcaggagccaaggctgcagttgttgctactattgcaactgccattccaactctggctagtgtaaggatgctaccttgggcaaaagccaatctcaatcacactgcgcaagctctcataatttccacagtggcaggagctgcatatttcatagtagctgacaagaccgttttggcaactgcaagaaagaactccttcaacccacccaccaatgcatgaattccaaatggataatttgaatgttgcattcggctgcactacattgggatatcttagcattatgacccaatattggaagttatcatatatgtaaatgtatttataataatatagtagaaggctttgggtttcaaaagtgagagaccacatatatataccaatctatcagttaattacatgaatgcaagttattcacctttctttctacaga

SEQ ID NO: 2988 - DNA, 332 bp, Glycine max
  Clone ID: PAT_MRT3847_102703C.1
gggcgagttaaagtccattatcgttgatgatacagcatacaaggggggtcttttaaagaatttaaaggggttattcttttattttttttggaccttagtctataggggaacccccatcttatggggaatgcatccctcaaaattgatggctgattgattattttcctaaacacatgggggggccttattgtccttggaccctatttgaaaccccttttgaaggaactttgctgcgatggatgctacaagcttaagtccttaggtaagctgatacttaaaaaatacaggcttgcaaacatgaaagccctccccaaaaaaacagccttaacaaa

SEQ ID NO: 2989 - DNA, 515 bp, Glycine max
  Clone ID: PAT_MRT3847_102704C.1
gtggttacacctatgcgaatcaactgtgtgggagcctgccaagtccatgtggagagtgagggatgagctgttatagtcttttcaagcatgccaaacattacggctacaattggaaattaccttttgtactcacgaccatagcagagtattctaagaactggaaaaggccttacagtaggctggcttagtgggtctattgcttttgatgttcctactccaaagggtccattgcggattcttggcgatgttctacatgtagggcatatcacaccgactttgactattgaaatcttcaagctggctttgcctaatcagtctaattaccctttatggagtgattttctctgttaatttgttaagcgtagtatgaaatcaagctgctataattgcaactctgggtacttacatgaaaccacgaatgtatgtatccatttaagacgtataagtataccacttgcacgaggtgtgtgctttttatatgaaaaaaccatcctcattttattacgagctggagc

SEQ ID NO: 2990 - DNA, 297 bp, Glycine max
  Clone ID: PAT_MRT3847_102705C.1
ctcatgcatcatgaatggaggaatgtccaacaccgaatctaagagagcctgtgccaaacttgcctgagaataagaagggcgccgtcttcattactatgaaacccgcctgaaaggggaaggtattaatagatcctaacaagccaaaggaggccttcaagggctttgtttgcttgcatggaggaattcaggaaggtgttcaacacggaacattattacttcaaaacagtgtctgctgagggcaaatctgttggagcaaaatgtaacacgattattgattgctgaaaagggaccttatgg

SEQ ID NO: 2991 - DNA, 569 bp, Glycine max
  unsure (1)..(569): unsure at all n locations
  Clone ID: PAT_MRT3847_102706C.1
ggagccgggacaataacagnggaggnaggcaaggagatgaggacatgttagacggnncttttagtctaagcctgggttgaataccccttcaacttgaaaatgcatataantatttttatattaaatccctagcgtgatgagaagaaacctaaagaggggggggggattttttttttttancccgnaaaaaacnngcnaaaggagaagaagagggggcaaacgacacccccccagccagaaggcannccagaaanaanncncgcgcggactaagattcaacgaccgaagaatttaaagcatccaatgatgaaattttcatggacaagaaccgaggacactgatattatagagtggtataatatttggcttgatgcactagataattttgggaggttgtatcaagggagagacacagctgagatcattgaggtcaaagctttacagttactaaaagggaaggatcaagatctgaagctccatctggaaaaagtattaaaatctggagactacagtggttttcaagcagaatgtctcacggacacatggataggaaaggacagatgggcatt

SEQ ID NO: 2992 - DNA, 109 bp, Glycine max
  unsure (1)..(109): unsure at all n locations
  Clone ID: PAT_MRT3847_102707C.1
tatgacgttcgtcatgcatcgtcgtacgtatatgcttagganntcctctagtatgcggtccgtctcgtcgattctatgacgtgacgtcgtgtggtcagatcccgggtat

SEQ ID NO: 2993 - DNA, 541 bp, Glycine max
  unsure (1)..(541): unsure at all n locations
  Clone ID: PAT_MRT3847_102708C.1
tcctctagagctgccgcccttgggttaggcttttttttttacgcaataccatccattttttttattgtcgacgaatttatcagatatgctctagatacatatcttgggggatatagccggagctttgttttcacatatcctcacccaacgataattgttgtactcttttttaaaaccggggggagagggagggaagagattattacatatgtgttaagagcagaggccgttgagatggtacataaccaaactgtaaaataaaaatatatagcatattatatattgatatatcatcaacatagcccaaaacaaagctgcatactattattataggcagcaatccaccagcgcgatgcttgatcttagcttagttgccaccagactcctcgcaacctgggggcttgtaggcgatgaagctaatcaactgcacctgcctgacgttggcgaagccgatgatacggacaaaggcatcagggtaggccttcttggcctcctcgagctccttgagcacctgggnggcatcggtgcaaccgaacatggg

SEQ ID NO: 2994 - DNA, 2519 bp, Glycine max
  unsure (1)..(2519): unsure at all n locations
  Clone ID: PAT_MRT3847_102709C.1
cccacgcgtccgtacggctgcgagaagaagctagaaggtgagagttgcatcgactgaaacccctaggaaaaaccccagtttctctctttcactagttccgttcaagttctaaccaagcactcacagtacttttgcttctctcgaagatgtctctacgagtgctgaaccctaacgccgaagtgctgaacaaatcggcggcacttcacatgaacatcaatgccgccaagggtttgcaagatgtcctcaaaaccaacctcggtcccaaaggaaccatcaaaatgctcgttggtggtgctggtgatatcaagcttaccaaagatggcaacactctcttgaaagagatgcaaatccaaaacccgacggcgattatgattgctagaacgctgtggcgcaggatgatgctattgatggctcactccttccccgattgaagaccctagaagaaaaccccacttgtctctcttgtcaccccctaggaataacgccagtttctctctttccactagtttccgttcgagttcgaaccaagcagtctctcaggttcttggcatccaaaatggcgcattcttctgttatagtcttcctctgcactctccttctcttcttttctccgtcaattcgtgcctccgacgatgacgtggcgctgcacgcgaagaagctcatcagagacctcaacttgttccccgacgctgacgtcaacatcgttcccgttgctaattgcaccctccaaccccgcaggatcgtcgagaagcgcctgaggttcccgaagctgctagcttcggattccgagccttcggttgaggatttgggtcaccacgctggctattaccccattcagcattcacatgccgcaaggatgttctactttttcttcgaatcacgcaataggaaggaggatcctgtcgtaatttggttgactgggggacctgggtgtagcagtgaattggctttgatttatgaaaatggcactttcaaaattgctgacaacttgttggaaggacataattagtatggttgggacaagttagcaacactggaatatcctcatgacacaatgcatttttattacaatcataaggagcagagctggaagtaaacagcaatgcaccttcaccattcaagcatgagccagccagcctaagatcaccaaggtagtctgaggattgtaagggcgagcacagaaaatgacatagggaagtttgggggaggctttggtccacttcaatgacggattgataccgatttcagttaactctgaatagtgatgtatgctcacggtttgtctactcaagtgctgaacagagagaagctatagttgcagctgaaagtcgtcaggttgaggaaaaagtcaaacagaatcattgaactgaagaataaggtttgttctggtaatgatagcaattttgttgtcatcaaccaaaaaggaattgatcccccatctctggacctgtttgcacgggaaggaataattgcccttcggagagcaggaagaggatacaaggaaagaattgttttagcctcggagggtgaagcggtaaactctgtagatgatttgactcctgtatggctgggttgggctggattgttatatgaacatgtccttggtgaagataaatatatatctgtggaaagtgttaagaatcctttttcctgaacaatcttgattaaaagtcattatgatcctactatagctcaagtttaagatgctgtacgtgatggtatgaggacccttgagtatacccttgaggatgaatttgtttttttaggtgctggggcatatgaatctgcggctaggcaattcatgatgaaggaagttcagaaaacagttcaagggcgtgcgcaacttgatgttgagttttttgttgatggatcattcttgtgaagccggagacattactgaaagctatggacttgacactctaagtatgcgggtcacatggttccaatggaccagcccaaggctgcatatagagatgctgaagaagtggattaatggaacccttctgaacctagggatgataaggaaaaattggttgctgagatgtgatctcttttattgcttatttaattagtctagcaaaagggaacataaatgagaaaagaaattgcagaagtgtgacctgtatgtagtttgtgtgatatgataccacccccacagcacaattctaaaatgacattgtactaagaacttccttcatggaagaaaacctacttctaaaggaattcccgtattttctgctttacatgctttattttgcttcacttaatctgctttaatgaaacattgcttctgggttttgttttttcccattttatttttattctctcgatgacactgtcatataagtgtgccatggttttaaaattggtatcctttagatatttgttagcatactcgtttgtaatatactgaattttggtctccttttgaaatttgtaagcataattattttgtagaaaattagttgaaagaatgctttacctttgccaaaaaaaaaaaaaaaaaaannccccncnna

SEQ ID NO: 2995 - DNA, 560 bp, Glycine max
  Clone ID: PAT_MRT3847_10270C.1
agatgctcgacgaggaattggcacgtgccggcacagtgccggatgtgtttgtggtgtgtaggattttcgagaagagtggttctgggccgaagaatggggcaaaatatggtgctcccttagatgagaaggagtgggatgttgaggatgagcaggaggaggaggaggagaatgagcagaaggacgtggctcccttgctggttcctcataacgcggtggctcctcctcctcccttgtcggtagttgctgataatgcggaggctcatcctcctttgacggcaactgttgataataaatatatggtggctcctcctccttcctttcaggctaattttgatgatgaggttttcaatgctggggcctatgttgaaaccaacgaccttgacatggagcttaattggaatgatataattgggagtgatacttttccatcactgaactatcatcatggggagtgtagtagccatgctgagtattccaaagtattcatcaaggatcaggagccatcagcaggcacttttggaatttctcggcctgaaatgagtggtctcttgatatgactg

SEQ ID NO: 2996 - DNA, 1067 bp, Glycine max
  Clone ID: PAT_MRT3847_102710C.1
cccacgcgtccgtacggctgcgagaagacgacagaaggggagagttgcgtcgactgaaacccctaggaaaaaccccagtttctctctttcactagttccgttcaagttctaaccaagcactcacagtacttttgcttctctcgaagatgtctctacgagtgctgaaccctaacgccgaagtgctgaacaaatcggcggcacttcacatgaacatcaatgccgccaagggtttgcaagatgtcctcaaaaccaacctcggtcccaaaggaaccatcaaaatgctcgttggtggtgctggtgatatcaagcttaccaaagatggcaacactctcttgaaagagatgcaaatccaaaacccgacggcgattatgattgctagaacggctgtggcgcaggatgatgctagtggtgatggcaccacttctactgtcatcttcattggcgagcttatgaaacaatcggagcgttacattgatgaaggtatgcatcctcgtgtgttggttgatggttttgatattgcaaagcgagcaactctgcaattccttgaaaagtttaagactcctgttgtgatgggtggtgagcctgataaagagattctcaagatggtagcaagaacaaccgtgaggactaagttgtacgaatcacttgcagatcaattgacagatataattgttgatgcggttttatgcattcggaaacctgaggaagaaattgatctgtttatggtggagatcatgcacatgcgacacaaatttgatattgacacacgcttggttgagggtattgtccttgatcatggttctaggcaccctgacatgaagcgacgtgcagaaaactgctatatcttgacatgtaatgtatctttggagtatgagaagagtgaagtaaactcaggctttttctactcaagtgcggaacagagagaagctatggttgcagctgaaagacgacaggttgatgaaaaagttaaaaaaatcattgaactgaagaataaggtttgttctggtaatgatagcaattttgttgtcctcaatcaaaaaggaattgattccccatctctggacctg

SEQ ID NO: 2997 - DNA, 765 bp, Glycine max
  Clone ID: PAT_MRT3847_102711C.1
caacaaagaagattcaccaaaagaaagaacaaaacaatagagtatagaaagaagaaaagaaaatgatgtccccatgcaatgtgatcctatccatttttttcttggtgtgtacaagaacaccactactgtccctagcccagaacacccctcaagactttcttgatgtgcacaatcaggctcgtgccgaggttggcgtgggtccactctcatggaaccacacccttcaagcctacgctcaaagttatgccaataagagaatcccagactgcaacctcgaacactccatgggacccttcggcgagaacatcgccgaagggtacgccgaaatgaagggttcagatgctgtcaaattctggctcactgagaagccttactatgaccaccactccaacgcttgtgtccatgatgagtgcctgcattatactcagattgtgtggcgtgattctgttcatcttgggtgtgctagagctaagtgtaacaatgattgggtgtttgttatttgcagctattccccaccggggaacattgaaggggaacgaccttattgattctctttcttattagtagtattaaagaaaaatgaactagtagtactgtctttgagttattattgttaatttggaaattaccatgtgtgatattcatatatattcatgagtatgagtgcatgatatttccaatataatttgtaaagaaatcaccatttgtggtcttatttgataaacggggtaaaactggttatggtattgctttccaaaataaaaa

SEQ ID NO: 2998 - DNA, 434 bp, Glycine max
  Clone ID: PAT_MRT3847_102712C.1
attccaactagttaaatatgattcaatgcttttcactgctttagaaatacttgaaacacacaacggaatcaaaaaaaccaaaacccgagtttatcataacaaccgctggctttatatagcaaacaaaaactacctttgacgctacttaacacatatctctctatcggacgcaatttatacagctgccttagcatcactggaaagctcggatttctttttggccaaactctgtgtggggcggtccctgggctacttaaacctgtgggcctcgagcttatgaccccctgctgtctaaaagaatgcccaggcaaacctcttgttcttaagaccactcttggccctgtttcttccaagcgtaagaggagcgcccattttttgtattttgggagggttgctcaacttttttccaggccttggaggaagagcaccccttt

SEQ ID NO: 2999 - DNA, 238 bp, Glycine max
  Clone ID: PAT_MRT3847_102713C.1
tataattaggatatcactccttgacatagctctcatcgtttcaccgatctaaatatcgtgacgtgggtttaaatagacgctataagaaacctttgaactaaatcattcatcgttattagatcatactttttaccgatgacatgcacactttaattctatacatatcattctatcgtacattcatatgcttctaccttactaaatccagctcttgcaacatgtgcactacagtttattt

SEQ ID NO: 3000 - DNA, 513 bp, Glycine max
  Clone ID: PAT_MRT3847_102714C.1
ccacgcgtccgggaatgcaaagccaagtgcttggataactgttcttgtatggcttctacgaattcggatatcagtggacaaggaagtggttgtgctactgtggtttggtgatctaattgatattagacagtttgcagctgtaggccaggtgtatatgttcaaattgatgcttcagaattaggtaggaacttggctttgcaactaattattattagtctttcttcaaataaatttcttagctaggatacattttcatatgtgaatattcatgttacctttgcaaatttgtgatcaaatgagggccacaagaagggagatcaaaagttataccgaagggtgatcaaatgagggccacgagaagggtttggagtcctagtggcaataacagtttctttggtcgtggctgcagttgctggaatactaataatacttggttggtgttaaagaaataaagaattcacatttttgttcccgttctcataaagaaaaatttctttgtatttctttattaat

SEQ ID NO: 3001 - DNA, 291 bp, Glycine max
  Clone ID: PAT_MRT3847_102715C.1
gcttcttgaagatgcagtggggaattttttcacggatgctgtcttttttgctcataatcaggtgatggaactctaccagttgcagttaaataacatatttacgccctgcttttacacatgggggggccattggtctcgcatcggggtgggcgcagtcactggtctttggttgtaaagcccttgttccttgggacactagaatgtgtgtaagctagagtcatgtgggtctaccaactggtctcgaggagcacaatgccctgtcatttgctacattagcccgagtggagcctt

SEQ ID NO: 3002 - DNA, 634 bp, Glycine max
  Clone ID: PAT_MRT3847_102716C.1
ttaatttccctttaatgtaatcaattttccttcttatgttacgcgaatctggttaagttactctgtaaaatgaataaataagatgtaccttaaacttaaaagtctcgttgcacatctggttgagtcttaatttagttataactttgattcaattatcagattggattatcagatttctttttatattaaaaaaatcagattattttttttatgataataatattgatatcaaaataattctgttgaaattggtgatcaatttttgtttgaagacggtaaaagtacaagatagatattttatgctcaataccatttattctatacccaagtagggcctgtccaaaagattggtaagctaaagtgagctttgaaatgaggttttttgggtgaaatttttttttctaaactaataaaattattcatattttatttaaaattaataacaattaatatgtaggagagagagtaaaacgaagaaaaaaaatatttgagacgttttgtgtacatgcaggataatcacaagatctcatgtataatagcggaatgttaccactgaactgcgtgacccttgatagtatgcttaatatatatatattagcagtaaagaaattattttttttggacctaaagtaag

SEQ ID NO: 3003 - DNA, 503 bp, Glycine max
  unsure (1)..(503): unsure at all n locations
  Clone ID: PAT_MRT3847_102717C.1
ttnnnnnnnnnnnnnnnnnnnnnnnnttttatgagtctatgcttgcaggttagaacctcaaaagaacttgatccatggaagacatttgtaagaggtggactgagtattttgacagcacacgatcaagggtcaatcacccacaatcgataaattgtgatttttgtggagaagagcatttcaatgacaactgtcatctctactccacgaaaaattcttgggggggacaagagttatacccttacaatcaatatgaagaaagtactcctaatcttgaaagtgtgttcacgaaattcacggcataccatcctagctctactgccaatcaaaactcaatgcaaaatcaggaaattcaggttggaaagagctactccatggaaaattatcaatgggagcaagagttacaaccctacaatcaatatgaagaagaaagaacttctaatctggataatttattgatgcaattcaaggaagtcaatgaatatactcaacaagcatttaaaagt

SEQ ID NO: 3004 - DNA, 939 bp, Glycine max
  Clone ID: PAT_MRT3847_102718C.1
gagtgataaaagtaatatatttattttaaatttaaatataccttatctcttacattagcggcacgagttaatgactcacacgctggcaagaaacaacacgatgtgcacattagagaagagaggacccctcttcgtcctaaccctaaccagcgaattcgacgaccagcaccgcctcaaccccaccctcctatcttccctcctcgctgcgctctccgaagtcaagtcccaagccaccgccggctccgccctcctcaccgccgcgcacggcagattcttctgcaacggcttcgacttccgctgggcccaggccgccggcgaccagccctccgcccgcctccgcctccgccgcatgtccgacgccctccgccccgtcctcgccgcgctcctctccctccccatccccaccgttgccgccgtctccggccacgccgccgctgccggagcaatcttcgccctcgcgcacgactacgtcctcatgcgcgccgaccgcggtgtgatctactttccggaggtggacctgggaatcactcttccagaatacttcgccgccgtcgccggggcgaagatcccggcggcggcgctgcgtgacgttgtgttggccggaaggaaggttagggcggagggggcggtggagatggggatcgtgcactcggcgcacgatagcgcggagggcaccgtggaggctgcgatgcgcctgggggaggagttagcacggagaaagtgggttggggacgcttatgcggaaatcagaaagagtttgtaccctgaagtgtgtgctgctttgggattaacacccaaaaccatcgtttctaagatctgattacttgtaatttgaattgcacaaacaacaatttaacagtatgagaaaacaaaaaataaaaaatctatgtacgaagaatgaatttgaaatgtgatcaataatacagtgtgtatggttca

SEQ ID NO: 3005 - DNA, 1199 bp, Glycine max
  Clone ID: PAT_MRT3847_102719C.1
tcacccgactcatgtctcttctcttcctttttccttttttcgcccttttctttttattcgctataatattataaactctgatctgatcgatcagtcgcgttgtataactattgtattgtatgtctccacggagaagttcgccggtggttgccgcccggaaaaataaggcgccgcacccctcgccgtctccccgtcgtaggaccaagagcaagtcgaggcctatcaagatcctgaagcgctgttcgtcggctcctctgctttcaagccatgataacgccgatgctgacgttgacggccattattcgaggaggagcggaggagggtcgtttttccgccccaaaaccttttcagatgcctttctgtcttccccttcccccttttcctctccacggattcacactaaacagctgtatcgtaagaggtacgagaaagaagctaatgtggtagttaatgtgaccgttgagggaagtcctgggccagtccgaaccatggttaaactggggtccagtgtggaggatactatctagcgtgtcgtcgaccttttcgcaggccttgccggctgccccctctcccttttcctctccacggattcacaccaaacagataataaaggggtacaagtacgacaaagaagcaaaggtggtagttaatgtgaccgttgagggaggtccagggccagtccaaacgatggttaaactggggtccagtgtggaggatactatcaagcgtgtggtcgataaatatacagaagaaggcaggagcccccagatcgatgctaatatggcttcttcattccaatggcttccctacttgttcgatctcctcaccgcctttggaacattgtgctttgctcacagtgaggacattcaaatgccccggcggctctgggctacttcaatcaatgcttggaaaagccaacgtctttgtggctgtgcccccgcatccccccctctacactcaactctactcataatatattatacacttctgaacatatctgacatttactttaggatttgcataattgtcagaagagctcaccgcctttggaagattttggtttgctctcagtgaggacattcaaaatcctaccccccgcccccagtcatttatggggccatccagcgctgtgttgtctgttgctgtcctccccttcccttcctcgtttcttactcgatctccatatatatttatgaaaa

SEQ ID NO: 3006 - DNA, 521 bp, Glycine max
  Clone ID: PAT_MRT3847_10271C.1
gttgaaatgcacaatttgctagtcagggtaccgggtatcctcccctattcattaccccaatggtgctgcatatgtttctcctcctcaaactgagacaaatcaagccatctttttgtctccacctctttttgtaatgtcttcctacatttcacttctagttcttcatttttttaagacctcgaactctcattcactaatcacggaccagaagcagccaaaatagcgctgatgtccaagtttacaacagcactaacttgtggttcatttgagattactaacttttgagggtgacttagacctaaacccaaattctaaaatgatgtccaagccatcttctttgataaatctcatatctgtcatgaatgaatgaatgcaaagcttgcaaaagaataaagttcaaggtcatgggaagcagatagtggaagaaagaaaatggtgaagaggaaaaaaatgaaagagagaaaatggcaaaaggaaaaaaaatgaatatttgtttggatattgctcaaatgagcaaatct

SEQ ID NO: 3007 - DNA, 565 bp, Glycine max
  unsure (1)..(565): unsure at all n locations
  Clone ID: PAT_MRT3847_102720C.1
ttnnttnnnttttaatttttttttttttcgcaatatctcacaagatgtgggtacttggcttcgtacagacgaatgtcgctcgcctttgctttgtttgccgttgtcttagctgctgtctccgatctgtgccatcgtcctcttcaactcctccatgacgccctcaaccactccaaccttttcaccttcatgtgcagaggacagactgtcctcccccacgttcaattgagctttgttgcctttcttcacccacttctcgagcccgcccagctcgctgaggcgccccagcaaacctctcagcttgtcctgcgtattgcaacccggaagctgctcgagcagctcgggctgttgattgggtccggccgccgagatgaacttggatatgaggaggggcggtgtaggaggatatgattcccgaggtgccgccgggctcattttctccctccatgtgcgataggtagaccttccaatagttacctagccagactgatggcttctgtgcaggagcatccatcggaacagctgtttgcccggtgcaggtggcanagtgcgttgtggatagtatgcc

SEQ ID NO: 3008 - DNA, 606 bp, Glycine max
  Clone ID: PAT_MRT3847_102721C.1
ctcttttttttttttttttttttttttactctaatttgataactattaccttcatacctttggatttcaaaagaaaaaactacccaacaaggttcagggtcatcgacttttaacagaagacaaccaaatatagcttcttacatgtatcagataaaaatacaagttgcaaaaagtgaattctcttcacaaaggttccagatgattatcagctatccacccatgtaaaagatgatcatgcagtctcacctaccaatttcgttgaaacagcattactacattgagtatctttagaagatcaaggatactttactgaaatccattgcagggggtttcctggctttcttttgattggaaatgctagagagaggaggtaataaagagtaactgaaatatattcacagcaccagttttcctcatgctgaaatgtctaaatttgtcaaaggccataataatcaggatcagaatcaaaatcatagtcagaaaagtcgctccctccagagaattcataatagtcataatcatcatcagacaagaaatctatgtcagaaatcgcagatgagtcttcatcaagtgatccataatcaacatcagcttcaaaggggcagt

SEQ ID NO: 3009 - DNA, 500 bp, Glycine max
  Clone ID: PAT_MRT3847_102722C.1
cagagaggttgaaccgcggagacaaagtttgatcaatagacaatatgtttcattcaagggaaggagaagaataaatttttttcatgaacagaagatgaggagatgaaaaaacgtgaaaaatggagtctgggtgagatacgttagttagggaattgtgatgggttaaaggaaagttaatagggatttacttttttgggataaataaaatactttaaatgacattaattgtgatattggttaatttttaaaaagatgatattgattgattaatttttagggaagagagagattctaaattattttattttgatcagttaaaatttgttaatagttagtaataaaaaaatcttaggggtcaaaaaatttttttttttggggccttaggctaatgcctaatttgtctaccattatacacggccctaacgttaggacttaataactgaattggctaatttttattgatggtttgttaagtgtctgactcatgaacaagcacggat

SEQ ID NO: 3010 - DNA, 445 bp, Glycine max
  unsure (1)..(445): unsure at all n locations
  Clone ID: PAT_MRT3847_102723C.1
tcccatcgatgtctcccacaaactaccacccaacccgcccttagcagcacgaattctgttaaccatgctcgactccataccctttgtgcactcttccattctgtccaccaagcttcctcctccttcggcactcatcgttgacatgttcggatttgcagcttttcccatggcacgtgacctcggcatgcttatctacgtttacttcgccaccagcgcctggttctctgcggattaccgtatacgttcccgccatggacaangaaaatgattgaaagccacggcggaaaaccacgagccgctcgtgattctcggttgcgaagcggttcggttcgaatgacacgctcgaaccgtttttatcgcctataggggagatgtaccagggttaccttacagcagcaaaggagatagtgaccgctgatggaattttgatgaacacgtggcaaga

SEQ ID NO: 3011 - DNA, 644 bp, Glycine max
  Clone ID: PAT_MRT3847_102724C.1
gcctcctaattgatctgtcatgccgtaaccacgtttaaaaccaaaaaggaggcaaaataataatataataataaaaaaatatcttttaataaaataataaaaaaatcaatcggacgtttttctttgggatttttctttctcgaattgactaataaccaaagtgaaactaaggctaaaattaattcataaatcaagcttttgtcatcacctagaaaccatttttaaggcccaacgccttgaaatggtctttttcgcttttattggttaaacgtggatttttaaaagcctaaaattaacacatagttttgtcacatctttcaaaaaaccaagagatcattaatggtccaatgccttaatgttttctctcctttcaaaaagaatcgaaagattgtttaatggtccaacgccttaaatgacctttcattcaatcaaaaatatatcttgcaaaaaaaggataaaaataatttaaccaacgttcagttctcaaagaactacgtaggtctgatttccttatcacaattgaggaatgcataggagcaagggaaacacccttgtcgccccccaaaaaaaaaaaaaaaaaaaaaggcgtaaaaagacataaaaacgtaaaaaagggaaaataaaacaaattgaagtcatgtttg

SEQ ID NO: 3012 - DNA, 825 bp, Glycine max
  Clone ID: PAT_MRT3847_102725C.1
cccacgcgtccgcaacaagttccctcaaaacaatgcatcagttcttctctgctgtcttcctcttcctcctccttccactttgcagcaacgctcaaacagcacgacaagcgaacaacacgggcttcacgtgcaacttcacacgcacgtgcacgtcctacgccttctaccgggccaccgcccccaacttcaccgacctggcctccatcggcgacctcttctcggtgagccgcctcatgatatcaaccccatccaacatctcctcttcttccctcaacacccctttactcccaaatacacccctcttcgtccccttaacctgctcctgcaaccccgtcaacgcctccttcggctccctctcctacgccaacatctcctacaccatcaaccccggcgacaccttcttcttagtctccaccatcaagttccagaacctcaccactttcccctccgttgaagtcgtcaaccccaccctcctcgccaccaacctctccatcggccaggacaccatcttccccatcttctgcaaatgcccccccaacagccaaggaacaaattacatgatctcctacgtcgtccaacccgaggataacatgtcgtcaatagcttcaactttcggtgctgaagaacagtccatcattgacgccaacggcggtgagacaactctacatgactatgacaccattttcgtgcccgtggcgcggctgccggctctgtcgcagcccgcggtggttcctcccgcgccgccgccagtaattgggagcaataatgatgataggacaaggactgttagagggttgggggttggattggggattgtggggtttg

SEQ ID NO: 3013 - DNA, 606 bp, Glycine max
  Clone ID: PAT_MRT3847_102726C.1
gtgtaaaccctgcttctccctcatctcattgagagtagaagacagcaagggctagttagtgatttggtcttccctctgaaccagatggagttgttatgcactgccaacgcgattctcccctcacgcagcctctctattcccacaccctattcgctacccctcaaaacctcccttccgttcccgcgcttcaacttccccaaaatcgagagattacgagggttgcagccctgtgtgagtgtgagtgaaggcagttccgctgaggctgaggtgttggaggagagccgaattcgtcgagtttgcgacaagctgattggggtgttcatggtggacaagcccaccccaacccattggagaaggttgttggctttcagcagagaatggagcaacctcagaccgcacttttttgcccgatgtctcgaaagagccgatgccgctgaagaggatcccgccatgaaggagaagctgcttcgccttgcgaggaagctcaaacagattgatgaggatgtgcaaagacacaatgatcttcttgaggtggtaagacgggatccttcaggaattagtgagattgtctccaagcgtcgtaaagattttacagaagaattcttt

SEQ ID NO: 3014 - DNA, 224 bp, Glycine max
  Clone ID: PAT_MRT3847_102727C.1
cccacgcgtacgttcacaatctttacaagcagcttgttagctctggacatgcattgggtgcaaaacgttgggttgcaaccttatatctacaattttaaatactcgctagtgccatgtcatcaaacattcccactgttaatgtttgcgtgataacaaaccaagacgggagaaatatcatgatgcatcttgctgaaaaaacggtgataagcctttgtgctagactg

SEQ ID NO: 3015 - DNA, 327 bp, Glycine max
  Clone ID: PAT_MRT3847_102728C.1
tctcacgacgaagaggacgcgtgggtggacgtgaggttaaataagaaacattattgtttgttgtgtttgttaatttttgcggatcatagtaatatgccttaatagtattataggttgtgttacttttgtggtaatcttataataaccttaggattcacggagaatcttcatttggttgtatgtccatttagtctaaggggaatgctacctatgaatatattttaaccttttgtcctaataaatgataataatttaatatttgatttcaatatataaatatcatatttcattttcgttctcaagtttacctagatgaacagggactaa

SEQ ID NO: 3016 - DNA, 336 bp, Glycine max
  unsure (1)..(336): unsure at all n locations
  Clone ID: PAT_MRT3847_102729C.1
gtaatgattttgtattgattattaaagctatattaatcatcaacataaatctataaccggggactcatatgttggacgcgtagatccagtaataacatttatctttgcaacgagctcattatggacaatatttcataccagatcatctaatcgatccgttctatacatctatctgcaactagtatattacctactgttggctaagtctaatgtacaaaacttccatacagctatgaactacattcatatcactctacaagcagatangtacatgcttatactttagtagaaatgtacggacttatctatgctatcgagatgaaaattgagttatat

SEQ ID NO: 3017 - DNA, 236 bp, Glycine max
  Clone ID: PAT_MRT3847_10272C.1
tagtaagcggccgccctacaggttgggggtgatgttttcatgcttaaggaagaatatgaataacttttctttcctaatcaccctgtatgttattttttttccttggcaagatattagcgaaaatgtttctttacttttgagattttcttatgggcttggagaaaccgcatatattataaaaacgggactggaaataacaaattctcttcagctcatcgtgagagacgggagacaga

SEQ ID NO: 3018 - DNA, 474 bp, Glycine max
  Clone ID: PAT_MRT3847_102730C.1
atggctctttcaccactcagcatgcttgtggtcattgccaccatcttcctcccatccgttgctgtggccaaggaattcgtagttggtgatggtcatggatggacaataggctttgattatgcagcttgggctgcagataagaccttccaagttggggatgtacttggtaagttcaattatgctgttggagaacacaatgtgttcaaagtgaatggaactgcattccagagctgcacgattcctccagcaagtgaagcattgtctactggaaatgaccgtattgtattggcaattcctggcagaaaatggtacatatgtggtgttgaagatcactgcagtgctggccaaaagcttgttatcacagttcaaccccaaacactgcctccaactctaccaccatcacctactcctgcaccttcgcctcgtcaacatcgtcctcattttggtcgatgggtgcctaatatttttcattaa

SEQ ID NO: 3019 - DNA, 447 bp, Glycine max
  Clone ID: PAT_MRT3847_102731C.1
cataagcctcaccaaggaacgtcctgttccaacatacttgccaaagggtttagactcctaagggctggacaaaaataccttctttgctctaacaattaagatagatgcttatgttcacattggaaggggaagaaccttttaagtctccatttgatttttcccggcgaaagggtcagagaaagccaggagcctctcccttttttgtgctgaagctccagggactctgaatttaaagcaaacccttatcttcagtaattgctgcctgaggagaagggattcacccaacagcggttgttttaggaaattggatctcgggaagttttgccgacgaggaaaaaaaaacccgtgttgaccgtggaaaaacgcctttgttatgtggaaaacaacgaatactggctatcttttctttttctcagcgctttgatttttttaaccctaggacgcttc

SEQ ID NO: 3020 - DNA, 613 bp, Glycine max
  Clone ID: PAT_MRT3847_102732C.1
cataacgttaaatagaagacctcgtggaagaatcgctccctgccatcttcagagtactggactgtttcaccaaatcaaatgatgtgaacgaacgtggtgggactgtaacattcatgtcctttccaacattctgaagtagactttggattggcaccaccttctttggctgtgagaaggagttctcatccattacatttgcagatgtaagcacagtctttgttgacccagataactgcaatgagtttggttctagtccgtcaagagagattttgaggttcacggcagtggtaccgaagttcacaacctttattcgtatgtaatttttcttatctacagaattttgaaatgtaattgctgatgcaacaagtgaattagatgatatgctcagcatgttctcaagtgaagctattctggccattcttgcatttggtgacatggaggatgccctggcaaatccattctttcttggaggaccgcgaccctttgcagcaaactcatttacttgcttcagcatggccaattcctctgcaagggcagctcgcacttggctttgtttctcatactcaaaacgaactttatgctcttttaccatgacttctaggtcatgatcaag

SEQ ID NO: 3021 - DNA, 1606 bp, Glycine max
  Clone ID: PAT_MRT3847_102733C.1
ggctttttgttgcactagggacagcgcaggcgttgcctatccaacaactcataacttttgagtttaagttcttgacaggtgcttccacctcttattgttggaccatgtgtctgctatgccactttacatacttatttcccactttacccttctcaactctgattctgttactgttactccacctcaatctaaattcaaacatacccattgcagataggttgaatgttgtgaacaaacaatgggttcatccaaggccttatgcagtgtttctctgcaccatttgttcatattggtttgccttgtcttccaatgctttgctaataaaaaacatgcttacctgacgtcaactcaaactgtgaatgcttctggtgcttctggaaagtcaataccagatacactttttggtatattttttgaggttattaaacatgctggcgctgggggattgtgggctgagcttgtgagcaacagatgatttgaagctggtggccctaacactccttcaaatattgacccttggtcaattattggaaatgaatcattgataaatattgaaactgatcgcacctcttgctttgaccgtaacaaggttgcactccgattggaggtgttatgtgacagcaaaggtgacaacatctgccccgctgatggtgttggtgtctataaccctggtttctggggcatgaatattgagcaagggaagaaatacaaagtggtcttctatggttcgtacaactgaatcacttaatctaacagtttcattaactgtgaatctagtggtaaggcgataccaggtcttcatctgtgaacacaggttctgcactgtgacttgacgccccgttcgcagccctagctgaagctgggttccttattggactggaaaagaacagtgatgttatccaaatggccagctatgctccactttttgttaatgccaatgataggaggtggaacccagatgcaattgtattcaactcctttcagctctatggaactcctagctattgggtgcaagtatttttctcagagtcgagtggagcaacacttctaagtacatcacttcaagcaccttcctcaaattcacttgttgcatcagcaattacatttcaaaattctgtagataagaaaaattacatacgaataaaggttgtgaacttcggtaccactgccgtgaacctcaaaatctctcttgacggactagaaccaaactcattgcagttatctgggtcaacaaagactgtgcttacatctgcaaatgtaatggatgagaactccttctcacagccaaagaaggtggtgccaatccaaagtctacttcagaatgttggaaaggacatgaatgttacagtcccaccacgttcgttcacatcatttgatttggtgaaacagtccagtactctgaagatggcagggagcgattcttccacgaggtcttctatttaacgttatgaaaaattataccaaaagcagaaaaagaaataaaggggaaggaatgggttatatgcaatagctgcaattaactatataataagtttgacaccttggtctactttgccatgtaattaaacaatgttgtgctgtaaataacatttatgtggtttaattt

SEQ ID NO: 3022 - DNA, 217 bp, Glycine max
  Clone ID: PAT_MRT3847_102734C.1
gtcatctccttcgctagctgcgagtgtgtttgattgagcgctcatgcttgcagtatctagcttcggtggcacctgacagactcggaagtgcgtccaagggccactactgctgctgaagatacaacatgtacccatccctgaggtacaccgattcatgcaacaacgagaccttgggcacgcgctcggcatccattaacgctcacatcaccagttctta

SEQ ID NO: 3023 - DNA, 1514 bp, Glycine max
  Clone ID: PAT_MRT3847_102735C.1
ggctcgaggtgcttatccagatatccaaattatttcaaattgtgatggttcttctcgacctttagatcatccagctgatatgtatgattatcatgtttatacaaatgcgaatgacatgttttctagagcttacggctgcgagaagacgacagaaaatggtccaaaggcttttgtaagtgagtatgctgtgactggaaaagatgctgggacaggaagcctcttggcagccctagctgaagctgggttccttattggactggaaaagaacagtgatgttatccaaatggccagctatgctccactttttgttaatgccaatgataggaggtggaacccagatgcaattgtattcaactcctttcagctctatggaactcctagctattgggtgcaattatttttctcagagtcgagtggagcaacacttctaagtacatcacttcaagcaccttcctcaaattcacttgttgcatcagcaattacatttcaaaattctgtagataagaaaaattacatacgaataaaggttgtgaacttcggtaccactgccgtgaacctcaaaatctctcttgatggactagaaccaaactcattgcagttatctgggtcaacaaagactgtgcttacatctgcaaatgtaatggatgagaactccttctcacagccaaagaaggtggtgccaatccaaagtctacttcagaatgttgagaaggacatgaatgtcacagtcccacctcgttcgttcacatcatttgatctgctgaaacaatccagtaatttgaagatggcagggagcgattcttccacgtggtcttctatttaacgttattaaaaatttgaccaaaagcagaaaaaataaataaagggaaaggaatgggatgtatgcaatagctgcaattaactatataataagtttgacaccttagttggtctactttgccatgtaattaaacaatgttgtgctgtaaataatatttgtatagtttaatttaattggtcccccaggcacgaagcagttattctgaaattaataagacctctgaaataattttacgaataacactccacaagccaattggccttaattgagtcatatcaagtcaaagaacttgtcggtctcttacggcaaagcgagatgaagagaaaagaagttgagaaggagctgacagtgagagagccagctgttggaaccacattggctacaccaccatctggagactccccacatccatctaaacaatatgtggaagacatgaaggggcccttatctccagtgtctaaacagcttaaatacacgccaggggttgccaatggtttggagagggaatcagcagcatttgtagatcagggtagaaggatggtacccatcggacagctgtcaatgaaaaaactaacaattgtaggacaagcttctggaaaggtatggaggtggaaaagaagtcatcatcagcggctactacaattcaagtggatgtggcagagaccatggagactctcagaatggataggacaca

SEQ ID NO: 3024 - DNA, 803 bp, Glycine max
  unsure (1)..(803): unsure at all n locations
  Clone ID: PAT_MRT3847_102736C.1
gtactgtactgatgatggacttggttattatgagttttcccccacttccagaggacttgggtgcttcaccaatatgggtatttaataatggtgtcagtcataatgatcaagttgatacatcggcggtcttacctcttgtgcaagaagcccttgatggaattgagttcgcgagaggtgatcccacttcaaaatggggttcccttagagctgctatgggacatcctgagccatttgacctcagatatgttgctgttgggaatgaagattgtggaaaaaagaattatcgaggaaactacctgaaattctatagtgcaataaaaagtgcttatccagatatccaaattatctcaaactgtgatggttcttctcgacctttagatcatccagctgatatgtatgattatcatgtttatacaaatgcgaatgacatgttttctagagctaacacatttgatcatacatcacgaaatggtccaaaggcttttgtaagtgagtatgccgtgactggaaaagatgctgggacaggaagcctcttggcagccctagctgaagctggcttcctaattggactggaaaagaacagtgatgttatccaaatggccagctatgctccactttttgttaatgccaatgataggaggtggaacccggatgcaattgtattcaactcctttcagctctatggaactcctagctattgggtgcaactatttttctcagagtcaagtggagcacacttctaagtacatcacttcaagcacctttctcaaatgcacttgntgcatcagcaattacatttcaaa

SEQ ID NO: 3025 - DNA, 3009 bp, Glycine max
  Clone ID: PAT_MRT3847_102737C.1
agcacacgccctattgtacaacaaatttacagggacgcttatgatggtaccacatacattgtgaagactgatgcaggttaaaggagcttacctatcacagaagctgaatatccaatgagtgaaactgcgggtgattctagggaaatggacgaagtagcaaaagagtgggagcacacacttctacagaatagtatggatagagagttacatgaattgaataaacgcttgcagcagaaagagtctgagatgaagctttttggaatatctgatgctgaagtactcaagcagcactttggaagaaagataatggaattagaggatgagaagagagttgtgcagcgagagagagattgtcttttggctgaagttgaaaatcttgctgccaattctgatggacatacacagaaattagaggatatccatgcccaaaaattgaaagcacttgaagcacagattctggatctaaagaagaaacaggagagtcaggtccagctcatgaagcaaaagcaaaaaagtgatgaagcagcaaagagattgcaagatgaaatacaatctataaaagcacaaaaggttcaactgcaacataggataaaacaagaggctgaacagtttcggcaatggaaggcttctagagagaaagagctgctgcaattaaagaaggaaggaaggagaaatgagtttgaaagacacaagctgcaagctttaaatcagcggcagaaaatggttcttcaaagaaaaactgaagaagctgcaatggccaccaagaggttaaaggagttgttagaagcacgtaaaacttccagccgagaaactttagttacaatgaatggaagtggaacaaatggacagagcaatgagaagtccttacaacggtggcttgatcatgagctggaagtcatggtaaaagagcatgaagttcgttttgagtatgagaagcagagccaagtgcgagctgcccttgcagaggagttggccatgctgaagcaagtaaatgagtttgctgcaaagggtcgcggtcctccaagaaagaatggatttgggcatcctacatgtcaccaaatgcaagaatggccagaatagcttcacttgagaacatgctgctggaaaagaacagtgatgttatccaaatggccagctatgctccactttttgttaatgccaatgataggaggtggaacccggatgcaattgtattcaactcctttcagctctatggaactcctagctattgggtgcaactatttttctcagagtcaagtggagcacacttctaagtacatcacttcaagcatattcatcaaattcacttgttgcatcagcaatgacatttcaaatttctgtagataagaaaaattacatacgaataaaggttgtgaacttcggtaccactgccgtgaacctcaaaatctctcttgatggactggaaccaaactcattgcagttatctgggtcaacaaagactgtgcttacatctgcaaatgtaatggatgagaactccttctcacagccaaagaaggtggtgccaatccaaagtctacttcagaatgttgagaaggacatgaatgtcacagtcccacctcgttcaggcagaagaaagagaacgagccttctctaatcgtggacgctggaatcagttgcgctctatgggagaagccaagaatttgcttcaatatatgtttaattctgttgcagatgctaggtgccaactctgggagaaggacatggagatcagggaaatgaaagatcaaatcaaagaacttgttggtctcttacggcaaagcgagatgaagagaaaggaagttgagaaggagctaaaagtaagagagcaagctgttggaaccacattggctacaccaccatctggagactccccaaatccatcgaaacaatatgctgaagacatgaaggggctcttatcaccagtgtctatgccagtgcctaaacagctaaaatacacgccaggggttgccaatggtttggtgagagaatcagcagcatttgtagatcagggtagaaggatggtacccatcggacagttgtcaatgaaaaaactagcaattgtaggacaagcttctggaaagttatggaggtggaaaagaagtcatcatcagtggttactacagttcaagtggaagtggcagaaaccatggagactttcagaatggatacgacacagtgatgagacaatcatgagaacaaaaccacgctcacaggctttgtcacgtatcaggtgatcttttttaggatcagcccagttcatgtggctcggtatctttcgacccacaagaattatcctagacacatggcattggaaataacagggcactaggagcagtgtaatataattggttgctgaagaaatgtatatacctgtcagtattgaataatgctgtccagatcttggaaattttgccataatttgtgcatatggagcatcttggaggtatgttgaaatgtgatgtttggacggagatacccaaataatgaaaaaaacaaagatgtcgcttgcttgaagtcagtcgtagattctggacagaaactatctttggaaaatagtctctgttcatactaacactacaaagaaacaatgggaagattcttttgtcaagtcttgggaagcttattttgtagtttattgcttattgcaagctcttacggtcctattgtgtttaagcaaattgattttgttgataggctatatgttgtagcatttgtcacataacagaaggaaattcttgtgtagttttttttttttttaaattctctagtgcttcttgtgtgtaaagaacattagctactatatattgaaagatattctaccatacagattgtataataacatcagcaactgtctcatgtcctcttaagcctgctaataagggcgactctaagtaaagatatttgtcaagtctgcctgctattttgatgatgctaaaaaatctttacagagaagaaaaagaatttaactttttgcctaaaaaaaaaaaaaaaaaaaaaacaaaaacccag

SEQ ID NO: 3026 - DNA, 1075 bp, Glycine max
  Clone ID: PAT_MRT3847_102738C.1
cagttcaactcgatgctaggaaaagtttagggagatgctgaaaattaaattatttctgaatgagaataaaaaaattgctgatttattataacttaaatgggtgcagtagcataaaacgaccccaggaaatatatcattttctgccatattttctcctatggttacttagttaatattaataaattcaatcaattatgaattcatatggtttccttcccaccgaattaagcaagaaaatattagaatattattatcacattcaaactgaacaaatgagtagttggtttaagttatacactttcgattcccttcaaggtctgaaagttcaagcctttataaaggatatttataatcttagttagaccaaaagaatatttggcaaacggacgccgttttgagatagtaatgtgatcgatagacatatttttgataaatttatcaatgaatggtgatttctctaacttgatttctatataacaaattcttgtgcctaaaatgaaaggttttatgcccatatgtcttatgcgaaatgatcgaatcacaatgtgattttctttcacataattgtttccgcacacatttcattgcagaaaaacgcgagtcctgatattatgtcggagggtgaccctcttgattgtctttttggttatgctcctccggtggaagagatccatcattcaaatttcccaaataaaccatcaggaatacataatcgggctcgtagaaaatctcaccgtaggcgtcggatgcataatcatgaggacctttcaaactctgagtctgcagcacctgtttgcctatcatttaacatttgcagacgttgatgttaggattatccaaattgtggttttcttaataacgtaggattatgtaaagtgtggtttttttaataacgttctgatcaacttccttcttgtcaaacaacatttcagaaaagaacagtgttattattatgataaaatcccctttatctgtcccactaattatggtgcatttcaaaaaaaaaaaaaaaaaaaaaaaaagcgtgattcatttcatacttcacgagtcagaaagtgtatctgatttaaagtct

SEQ ID NO: 3027 - DNA, 1397 bp, Glycine max
  Clone ID: PAT_MRT3847_102739C.1
tcgcgggccagcgagtgttgaaggttaaaacgttacgtttaaacctctctgcattgcattcgcatatgatccgttaacgttagcaacaacgatggatgattcgaagcagcagcagcaacgaaaaaaaaactaccgaaagagaagcgctccaacagacgaagatgaacttcctcaatctcaaagtaacaatgaatccgacgacgaacgagaaagaagaatggcattggaggaaattaagctcctccagaagcagcgggaaaggaaatcgggaattccagcaaaccctagtttgcaggtgcagagtggaaccggcggcggtttagctgctaaagccgccgaaaagaacgatggcgatggcggcgacaaggacgagctcgttcttcaagacaccttcgctcaagagaccgctgttatggatgaagaccccaatatggtgaattatatcgagcacgagttagcgaagaagaggggaaggaaaattgatgcagcggatcaagctgagaatgagctgaaacgtgctgaagatgaactatataagatccctgagcatcttaaagtaaaaaggcgaaattcagaagaaagctctactcagtggactactggtattgctgaggttcagcttccaatcgaatataaattaaaaaatattgaagaaacagaagccgccaaaaagcttctacaggaaaagaggcttatgggtcgaacaaaatcagatttcagcattccatcaagttacagtgctgattatttccagcgtggcagggattatgcggaaaaacttagaagagaacatccagagttgtacaaagatagaaatcaccaggatgatagttctggatccaagaaaaatgattccagcactgatgcagctggagcagtccagaggcaggctgcaaccgatgaattcatgttagagcgcttcaggaaacgagaacgtcaccgtgtaatgcgaagatgacatgaacgctatatttatggtgcactttacgacagtacatcaaagattggtggaagttgagcttctgttgattgggatgccactgatttgcaccggttccttattcaaactgtagcagaagatcattgggctacttgagcgttaatttctgttggttctattccttttaagaacaactgttaagaattatcaagaatatattattttaatcactgaccgaatgagaggccttatgtcaagaggcagcaaaagaattgtaatattcagcactcctttgattggtcatcaataagttgctgttagcctgtaagatatggtatgaacagttttggcaatggttagaagaatggtggtgatgccaccaggttccttgtaagaggatctgtatcagactgtatgcattttactgacattcaaaatatttaattttccgtttgac

SEQ ID NO: 3028 - DNA, 552 bp, Glycine max
  Clone ID: PAT_MRT3847_10273C.1
tttcccccccccccccctttttttttttttaacaacttcaccgatttttccattaaataatgctcccaagttttagtttattttaaaggcttaattatatttatagttactcaaatttaaaggggtcttttttatccctcaacttaaatttatatttttagttcttaaaatttataaaatattatatttagtctatgataattgatttttgatgattttcatgtgtaatttgaaataacttttaaatgtaagagactaaaataatatttcaagaatcgatagaataaaaaagacagacttatttagaagaattaaaaatatatttaaatttattttaaattataattatttattgcgaggtcttaatttttttatatgatttactttaaaaataaaaatcttaactacttttaattttttaaaacttcattatgtgaaataaaataacattactaaaatacgtaaatagtatattaaataaaagtttggtacttgaaaaatttatatttttattattaaaattagttaatatttcatatatattttaatttt

SEQ ID NO: 3029 - DNA, 118 bp, Glycine max
  Clone ID: PAT_MRT3847_102740C.1
ctttaaggggtattgcttgtgtaaccaatttgtctgcgtagccatgacagtgagttgaattgatgcaataaacgaatataaaatcgattaactgtgtgtagatattgctccctgaaca

SEQ ID NO: 3030 - DNA, 355 bp, Glycine max
  Clone ID: PAT_MRT3847_102741C.1
cgcgatcgcttatccaccgtctaatcttagggtactatatgggtggcctgatgtctcgtaccagcagtgctccgatgtcagtgctcttatttactcagaacatcgctcggcatccgattacgtgggatccgacgcaacaacggccgactcaagaggttatccatgctgttcattcagcgcttcatttcgctctcgatacctgcgtcgaccaccccgatgaacctttgagttttgatgtacaggattctgtgctggttattccgaatagaaaagaccttaagcaacgggagtcaccgaaatccgggtgggaggtgaacgccaagttattcatatatacagcaaggaaggagtcgag

SEQ ID NO: 3031 - DNA, 303 bp, Glycine max
  unsure (1)..(303): unsure at all n locations
  Clone ID: PAT_MRT3847_102742C.1
ggnctctgcctctgcaattcagcgggctcnnagtgctcngngantctcatntntnntctctnttctccaaaccttctntttggacccaaacaatcccaaaagcgcgttnaattaccattgcgactcaatagcatagccaatgcgnagaacaaagagagagcgangctaagaactcttcgagagctacngagtgcgnatgtccatggaggtgttcctcacatggagantcatgtgtctgacagagcttgatngagtgngnagtaaggatggtcaaagtacatgngagtgtgaanatgaagntcg

SEQ ID NO: 3032 - DNA, 435 bp, Glycine max
  Clone ID: PAT_MRT3847_102743C.1
cgatcaactggaggtgcctaccccagtgtctgaggatgatatcatacaacagtttgacattaatgccacgatgaggcacatacctcatagctgtcatatcgatgagacatcaccatattcacctccatcgccacacattgaacaatcacacttgctcattactaatcgagaggatggacaaacaaactgtgtctggagaaaggcttgacatggtcatgctcaacagcctacatgtaaacatgactgataacctattgtcgtgtcctcgggcagcagactctagtatcttatctgacgccttatatacgaggtatgtagatcattctcccaaaatgtactacggaacaatcctatgctatgatcatgtgagccaaccaagtcaacattgctatgactgaggacatcatggatgatcttgatgctgcaaccattgat

SEQ ID NO: 3033 - DNA, 718 bp, Glycine max
  Clone ID: PAT_MRT3847_102744C.1
gttcttcatcactgcttggaccgaaccaagacggagtatcgtgccgtacctgtctccgagaccaacgaaacgcagcacccattgcatctctctcttctttctttcgaagcaacgaagaaactaaattataatcatcgagttccctttcgacagaaccaaaaccctcacttccgatcgatcaattttctcccttttccgaccaatttcccctcttttccatcggattcaattcggaagaagaaaaggggaacccgcgaatcgatggatctcgggttcggtgtgaggagtggagggttgtggaggttgggcccgtgatgggattgaaatccgttggattgattgaaggaagcactttcgcggtggtggtgatgagaagaagaactgaaggggcaataatggaattcgaattggggaaagtgaatctttctcctctcacttgaatttggggatcgggctctttctctctgcgtttctttttcttaattttgtgtgtgggtcatggatggggtcgcacgtgcggtggagcaggctcagtcatcatcgggcttggcctcggggtggcgtccccgcggctccgtgttctctccttgtaagcctaagggcgaagaagaagcttctgctgctgctgggaagaagccgcagcaaccgttgcacgtggttgtgaggaaacctttggtggctagattgaccaaggaaatagttgaaacataccaatatg

SEQ ID NO: 3034 - DNA, 578 bp, Glycine max
  Clone ID: PAT_MRT3847_102745C.1
ctttcttgtcattgatatttgaagatatagattctcagttactgaaaagtatccaacattgacacaaatgtgatggtgtagattgaaaggtgtgaattttcgttatattaatagcgctatgaaacaagtatttttcttattagattttatgtgggccagagtaaagatgcattactatagcacaactttcttgataacacttctatttctttggccacttgataatctttcaagttagtgccaaaagcaagtatctcttaatagaatctacattctacattattttcttagaaagaatatagattcttagtgaaaagtggatgacacttgcacaaatctgatggtgtatattgaagagtgtgaattctcgttttactatagcatatattttcttgggaatacttttctttcttaagccacttggtaatctttcaagttggtgccagaatcaagtatctcaaaatagaatctacattttagaaagaatataattgtccccaaaaatatggaatctgaattttattgaagcttaacatgttttacattttaaacttcccgtaagtccaacagtaacattt

SEQ ID NO: 3035 - DNA, 1117 bp, Glycine max
  Clone ID: PAT_MRT3847_102746C.1
cccgcgccccccaagtcgcagggggttcggttcagcgccgtgtattcgtccccgctggatcgggcgcggtccacggcggtgtcggtgtgcaaggaagtcaatttttcagaggaacaaattcaatccacagatgctcttgcagagattagtcaagggaattgggaaggctgccttcgatcagaaatatatactcccgaaattcagggcttaattgacaggttccagccagattttactgcaccttctggtgaatcacttagacaagtagaattccggatgattcacttcttaaatggaactgtccttgcattacatgaaaaactattagatttatcatcacatcaaaatgacaaccaggcatttgcacagaacaactcccatgctcttctcactaactcacttcacgaccaagatggaccttctctccctccaaaccaatgggatttgctcaacaggcaccggcctccattctcaaggaaaaagtctggtaagagcagactacaatttgtgacaaccactggtgatgaaattgaagatgaaatttcttctggcaatgtaaaccacggaagttctctgcataattctggtttcagcagcttttcaccaactgtgtcttgtataggactatttactcattctctgccaattaagtgtctcctgactggccttcttggatgtagccctctgatgtcgcataagttttgcatagaagactcttcagtgactgtgttgcagcattctctgagaactggttggcagataaaaaggctgaatgatactgcacaccttaggcttctctagttagggaagctgtacttaagaatctgaatttttggcaatggtttggatataaatttagttggttgttgatattcacctattcacatgaaatgaggtctttcattgtaacctttatttatttctgcactgatctattccaaaagaggaatgatgcaggagttggattgttgtattaattctttctggtttgtagcattactgaagttgttgttatacatctacatgccatgtatttccatgtgcttaaaaagaaacaagtgtttcggaatgcgcggccgctcgcgatcgtgttcttatcctaaaaaaaaaaaaaaaa

SEQ ID NO: 3036 - DNA, 276 bp, Glycine max
  unsure (1)..(276): unsure at all n locations
  Clone ID: PAT_MRT3847_102747C.1
gtggcgctctggtcccacagctttgtccggacttggggtagctgtgggaaggcgatgactgangcactctctgcgcaagccgaggcagcgggcggactgaaggctttgattgagcaaaatggagatactggtagcgacaccaggggagagccgcacctagagctcctagagccagcgacggtagggaagcaggtcccggagagcggggagcaggcccagggaggcgaagagcagctcccggggaacgganagcaggccccaactccagtcgccgat

SEQ ID NO: 3037 - DNA, 268 bp, Glycine max
  Clone ID: PAT_MRT3847_102748C.1
catggttattgccgtcacatctctctaattccaacactaatgatgcgtatttagaccattgggttcaagtttttgttcactaataaagtcaattttcttgtctatttccacttgttcttcagcacactcacaaccacaacccaaccaacccacctgaactactgaacaacaacctcttcttcttctctctctctctttagcataatcattcatcaccacacaagagaaaaaacaaaaagaacaaagaacaaataaaccttttttttta

SEQ ID NO: 3038 - DNA, 613 bp, Glycine max
  Clone ID: PAT_MRT3847_102749C.1
gtaacatcacgagcttctaaattgatgcctttgaccggttctctttagaattgtcaacacaaacttaggcatagaaatgggtgcattcatgaggaaagatgagtgctacaagctgataaagcttttacatgatactagtgatgtctgagtgaatcaaataatatttgcgaagtccttaatggagtcaccatccagagtctcagagaagttggataatccactgaaaatcttttactttcctattttgtgacgtcctctgttgtgatatgggtcaaaataagaaatcttagagtcctatggctgcataaacacaataaatagaaagaacccgttttatattagtgaaattattattattttaactaacaataacatgctccgtgtgttgattggattgtcttatgccattacacagtcattttttgtcaaaataaaagtagtagacccaaaaatgtttcaactcatttacaatatgataagtcagttttattttgtgaataattttagcaaacaaaagggttttgggacactttaaaaaagtctcatgtgcattgtttgttatccacacatcatttcatctgttcttgtatgtttcatgtgtttgtcagcctca

SEQ ID NO: 3039 - DNA, 159 bp, Glycine max
  unsure (1)..(159): unsure at all n locations
  Clone ID: PAT_MRT3847_10274C.1
gcgagcgggtccaacgtcatngactgctgcaatacgactacaggtttctacatgttttatatcaatattcgaggtaatagtacaactacgtggtgatcattttttttatacatcataatcattgcttcccgtaagaagcttgtggactaacatttattt

SEQ ID NO: 3040 - DNA, 317 bp, Glycine max
  Clone ID: PAT_MRT3847_102750C.1
tgctccgccctctccttttttttttaagttaatgatttttcttgctatcaaaattcactttacaggtaaaacactgggcaccgtgataatctttacccaacaacctaaaccttccaaaccctttttacccaaactaaaatctatgaatggacatttctcatcactcaacaattctctcaatataattcaaagtcccaacataagataccctttgaatagcttgtccctatgtaaaagtatttattcccacacaaaatagcatgagttaaaaatataacgcctgcaaacatttctacctcaattaacattaaatactt

SEQ ID NO: 3041 - DNA, 357 bp, Glycine max
  Clone ID: PAT_MRT3847_102751C.1
ggacttaaaaaagcccactgcatattcatcaaagcattattaaagcccactggattctaacagcacacctccctaaaaaggggagattccaggttttgcccaacatacaccacacaccctaatttattttttatacaatcttttggggcccaagatgcacatgcctgggctaattaaacaacaacgtttggctgataggccgtgtccataaataaattggggacccataaaatggccttgcttccaaggaaatggcaaaccggggtagttccaggatcaactcccatgagttcatgaagcctgtgatgattcattccagaagtttctgaggggcgaacaacaagtggctgggttttg

SEQ ID NO: 3042 - DNA, 306 bp, Glycine max
  Clone ID: PAT_MRT3847_102752C.1
atcaacgacaggagaggcatgcaacaggcgtctcagcatctcacatacgattccatcctcggaaccttcaatgctgatgtcaagcctgttggcagcaatgtcatctccgtggatggaacagaaagcacagttgtttctgatcgcagccctgcgaaccttccatgggacgacttggggatagacttggtgattgaaggaacaggggtgtttgtatacagagaaggtgcagggaaacacattcaagcaggatctaataatgtgctcatcaatgctcctgttaccggagatatcctcacctacatcgtt

SEQ ID NO: 3043 - DNA, 249 bp, Glycine max
  Clone ID: PAT_MRT3847_102753C.1
aatacacaagagtctattcagccttccatcgttgtgcatgataccaaaaagtttattcagccttctaatcatgttgtgcataacatgaaagagtttattcatccttctaatgttgtgcatgatatgagtgatgaagaactattatggagagcttcaatgacccctaagatcagagaatacccctttgatcgagtcgccaaggtggccttcatgttcttggtaaggggtcctgtgcctttggctattttt

SEQ ID NO: 3044 - DNA, 739 bp, Glycine max
  Clone ID: PAT_MRT3847_102754C.1
taagaaggagaagcaaatggcttcctcaatgatctcttccccagctgttaccactgtcaaccgtgccggtgccggcatggttgctccattcactggcctcaagtccatggctggcttccccaccaggaagaccaacaatgacattacctccattgctagcaacggaggaagagtgcgatgcatgaaagcgtggacacaatcgaacaacaacaaaaaagaaaaaacaacaaaaacagaaaaaaaagaaaacaccacaagataggcgtacgagatagcgcaataagaagtaaaccagccaaagaaaaacaaaaagaaaaaaacaaaacatgccaaaaaacgacgaaaaaaaaaaaccacgaaagaaaaacaacacaagagaaatggaacgcgaacgagcacacgaaagaacaaaaagataacagaatacaaaacagatacgagaacagccgagaaaagcagagaaagaacacaaaaacccgaaaagagagcagacgagacaaacaaacgacaagcgaaagagcaaaactaaaagaatacgcaaagggacgacagaacacaaaccaaacaataaaaaacacagacaagacgaagaacaaaacgccacaaatgaccgccacagtaacaatagcccaaaacaaaaagaccgagaaaaacaaggaaagacgataacaatgaagcacacactaaaaaacgagcaaagactcacaccgcacatactaacacaaagctaacacacaca

SEQ ID NO: 3045 - DNA, 329 bp, Glycine max
  Clone ID: PAT_MRT3847_102755C.1
gttttcttctaattaaaacaaaaattataaaaaattttctcgtatcccctcctatatcacccacaaaatcctccactctccctctctagaggatggaggcttacttatccctccatacaacctcactatcctcttcacactctctccaaacttcacttcactacccgtccttttacatcctccttactacccaaattcctccctttctccacccctattacccttgcccacacccctcccctcttcatcaccccctactttccctaaccccccccccccacttcccctcaccttcctccatcttcttctcttctcacctcttctccctc

SEQ ID NO: 3046 - DNA, 502 bp, Glycine max
  Clone ID: PAT_MRT3847_102756C.1
gaaaagagtttttaatttgattgatgggaacaccaagccaaaatttgatacttatagatatctatctatctatatagatagaattatagatagatagatataatttaagaagaaaatataagaaaaataaaaaacaaggtggttcttattcaaaacgtcctgtgatcttcacccaattctgggcttcaatataattaccaggggttagggctatagcttgtttccaatattcagcggcttgattaaaccaagactccgcaacttccgagtctccctgctatagggcctgttctcgcacgtaatgacagatcacggccatattattaaaagcttggggtaagaatgggtttcgctcgagcgcccgaaaataatattccaaagctttagtatgttctccgttacttgtgtggataaggcctatgttagtaaagtatataacttcgatcatagggatcaatttccactagttctagatcgcgatctagaactagcggacgcgtgg

SEQ ID NO: 3047 - DNA, 268 bp, Glycine max
  Clone ID: PAT_MRT3847_102757C.1
atttggaaaaggagcaaggtgaaatatgaactgtacaaaaaatcgggtcttatcaaaatcgaccgtgttctttactcatcatttgtgttttctcacaattataggtttatcccacatactatttatgaggactgagatcccctatatgtctttattattattctttatcctattcctttcttaatgattatagcaaggccaaaatcaatttgttcttaattactcatttattttatcaatttgtatgataagtttatttattattatt

SEQ ID NO: 3048 - DNA, 218 bp, Glycine max
  Clone ID: PAT_MRT3847_102758C.1
tgggctcctgcgcgtgccggtcccgaatcggaggttcgggccaggcccacgggcttactttggtttttagtgctgctacaaggtgacatactattcttcccttatgtttttgctaactctgagaattagccagcggccctggctgcttatgagacgccccgtgtaattaacccaacagaatggatgcactttgttgcctggcttacagcagcaccccc

SEQ ID NO: 3049 - DNA, 284 bp, Glycine max
  unsure (1)..(284): unsure at all n locations
  Clone ID: PAT_MRT3847_102759C.1
acgtttcgttagatgggtctcagacttcttttcttggggagatattgtcgaggtaaagaacaatatcgttgacttgcgtcaacgccacccttgattacggatcatcgaacctcgattgggccgctaacaaggtcgattccaagtttgatgaatggnaggctacgttgaaaaagaagctccgctccaggaaatatcccagacaaagtggggaanaaaagcgcgggaccaaaggcccaaaatgatgtccccaaggatgcaatcaacangatgaagcaagccgacgt

SEQ ID NO: 3050 - DNA, 330 bp, Glycine max
  Clone ID: PAT_MRT3847_10275C.1
gtgggaaaacccaaattgtgttccccttctggtttgaacccaaaaccttgttttggccaattttttgtggaaaatagaggggggggacttgttaaccttttgggggccccatggatggcccccccccccccctggccccaggggtgtggggaatggattaattgttttaccaaaaaaaatctcttggggaggccgccacttcggctttgagttttgggccccaaaacccacggggggaggtgtgtttttttctggggcgcggtcccttttcccggaacacaagaaaccgttggtaattccccggggccgggtgcccccccgggctttttt

SEQ ID NO: 3051 - DNA, 907 bp, Glycine max
  Clone ID: PAT_MRT3847_102760C.1
ccacgcgtccgcccacgcgtccgcccacgcgtccgtacggcgacaaggaagggacataaccttctatgcttgaagacggtggattagaacctcaacaagagaaagagactcgtcagagaatatgatccttgcggtgctgtttgccaacgctgagggcaatatcctcatcgaacgttttcatggagttcctgcagaggagcgtctgcactggcgttcattcttagtcaaactaggagctgataatcttaagggtgtcaaaaacgaagagctcctagttgcttgccacaaatcggtttatattgtatacacagtgcttggcgatgtcagcatctatgtcgtgggcaaggatgagtatgacgaacttgccttgtccgaagtgatctttgtgataacctcagctgtgaaggatgtatgtgggaagcccccaagtgagcgccttttccttgacaagtatggaagaatttgtctgtgtctggatgaaattgtatggcagggatatttggaaaatacagaaaaggatagaatcaaaagactgataaggttaaagcctccaacagagttttgaatgaaaagtccagagccagtcatagttcaatgattagtctgagtcctgtgggtcatagtgtggcattttgtaaacggatatgggcaagcaaccgaagattgtgctggatgtatgcgctctgcaatgattgtattaaaatacttgcattaaaatcttcttaaattttagcacttgtattttgtagcattcccaaactctgcattatttcatttgcgtattttgcacctcttttatcccttactattgtttgctatggcaatcatgtttccattttatgttttccattttatggaatgagagattttcatgcttggttaaagaaatcgcatttcatttcagtgc

SEQ ID NO: 3052 - DNA, 266 bp, Glycine max
  unsure (1)..(266): unsure at all n locations
  Clone ID: PAT_MRT3847_102761C.1
cgggttcgtgggaccaaaagcaggggcgcncaaaccggggagaagaaaatgaggggcagacgccaagaccaagcgagtgaaaaaagacgaggcgcgaatgcacgaaccaaaaggacgagagacagcgaggggggcccccagacccagacgggagggacaggcgagcccggcggacaagagacaggtatgtaacgaacaacccagggcagaaagatggcgggcgcaagcaaggacaggcgacggaagggggacgcgaaaacggacga

SEQ ID NO: 3053 - DNA, 826 bp, Glycine max
  Clone ID: PAT_MRT3847_102762C.1
attgaattctggaatgcgtgtaatgtttcattggttcacaggactttctttttctttctattcaaaggggaaccatcagattctatttatatggaggtagagttgagagacttatcataccttacgcaaactttttcccaaggcaatcaaactgtggaagatggacgaaccctcacacctgagttaagcatgagatatcttagaaaagagaggcaaatgctgagcaagcaaatgcataagcgactgtctaaatatgatagacagaacctgtacttgaaatggggccttcgtttgagttcaaagcataggagtttgcagttggcccatcaattgtggagtgacacaaaagacatggaccacgttagagacagtgcatcaattgttgcaaagctggttggtttagtagagccagaacaggcatttaaggagatgtttggactcaactttaccccacaacccacgagtaggaaatcttttagttggacagccagtgtgaggcatattttgtgactttggattttactttttaggtagttagtttggtatggccatgtgaaaatgtagataattcttttctccccttatcttagaaacaaattgctttctgctgtatgcttctaactctgattgctattgattgtaaagaatgtgcaattctatggttaaaaaccactaaaaatagctaaaaaagaaagcaaagatggccgtaccgaaacgacctcacaaacagaatggcaaacggaacggccactgacgcgccatgaagcgcggcattagtcgcggcgactcatcgtataaaattaccggggcgcagatttgttcaaaa

SEQ ID NO: 3054 - DNA, 890 bp, Glycine max
  Clone ID: PAT_MRT3847_102763C.1
cttttcgatctctcccccacaaatccagggtttagacctagatccggccttcatgttttggaagctcgcatccctttctgcttcctcccccgtggagacaatattagacaaggagaatttcactttggaagagcttctggacgaagaggaagtgatccaagaatgcaaggccttaaacagtcgtcttatcaactttctgagagatcaagcccaggttgagcaattgttacgatacattattgaagaaccaccagaagatgctgaaaataaacgggccttcaagtttccattcattgcctgcgagatatttacatgtgaaattgatgtcattttgaagaccttggttgatgatgaagagctgatgaacttattattctcttttttggaacctaatcgctcacatagtaccttgttggctggctactttagcaaggttgttgtttgcctaatgattcgaaagacagtgccacttatgaaatatgttcaagcccatcagaatgtttttcgccaactggttgatttgataggaattacatccattatggaggttttggttcgattggtaggcgctgatgaccatatgtatcacaattttatagatgtgatgcaatggttggctgagagcaacctgcttgagatgattgtcgataaattaagtccatctagtcctcctgaagttcatgccaatgtagctgaaactttgtgtaccataactcgagttgcatcatctactctagctattaagctttcaagtccaagttttgttgcaaaaattttgggttatgcattggaagattcacaatcaatgtctagccttgtcaactctctttcagtgtgtatttctttgttggatcccaaaaaatcagccactgcctcccccctttttcatt

SEQ ID NO: 3055 - DNA, 669 bp, Glycine max
  Clone ID: PAT_MRT3847_102764C.1
aaggcaatcagactgtggaagatggacgaaccctcgcacctgagttaagcatgagatatcttagaaaagagaggcagatgctgagcaagcaaatgcataagagactgtctaaatatgataggcagaacctgtacttgagatggggccttcgtttgagttcaaagcataggagtttgcagttggcccatcaattgtggagtgacacaaaagacatggaccacgttagagacagtgcatcaattgttgcaaagctggttggtttagtagagccagaacaagcatttaaggagatgtttggactcaactttaccccacaacctacgagtaggaaatcttttagttggacagccagtgtgaggcacattttgtgactttggattttacattttaggtagttagtttggtatggccatgtcaaaatttcccggctctatatataatgtagataattatttttctccccttatcttagaaacaaattgctttctgttgtatgcttctaactctgattgctattgattgaaaagtggtttgtaaagaatgtgcaattctaaggttgcagatttgttcatctgccctaggttgggtccaggtagaacatcatgaatggttcaatacggattgttagctggaaaaaaaatgcaatatgattttttacgtgggtgattt

SEQ ID NO: 3056 - DNA, 546 bp, Glycine max
  Clone ID: PAT_MRT3847_102765C.1
caccgatccacactaacttttctaaggccaataattctgcattttttgtttgttttattgtagcatgagatttactattccacccctgtttaccaatgctcctaattttctaaggtttgtaaaatttctctcaatgctcctaattttctttacatgctctagactaactctttcagtgttttaaaaaaatacgctctaacactctttgtacattacattaatgattaaccccattaattattttaaaatattacactatatatctataactattataaaaggaataactatttggtatcatcttttcttctgaacatttttatctttaattattataaattagtgtaacattttattttaattctcaacaacaattatatcttttaaaataaattacaccaacaataaaagtgttcccttttattgcctgtgagttaaaatgttgtaatagtaaacccttttccattgtttttttttttctttccagattcctaacgggcaacatgctaagtggtaatgtacgtgagtcagtcttgatggatggaa

SEQ ID NO: 3057 - DNA, 469 bp, Glycine max
  Clone ID: PAT_MRT3847_102766C.1
ggaccattgatctagcagcacgtaaacaccatgtcattctggacacccttcgctgctgtcactgtctctattggcgacgctcgtgttttcactgctcctaagtgctctcctaccactcactctcctcatcgaaatttgattgcgaccagagcgtcgatcatcactggttccccactgttgagcagaagaaatcacggacggaacggtgcatgcaacgcagtgcctgtgtcaatagaacgtgagcacagcacccaggacgggaacagcttagatgacgtggctaggcactgttgccatggacgagcacgcagaaaccatcactggtaaaagtgctaccgagaaggtactcctagagaactttggactcacaagtccactgtctacagttagcccttgcagtgaccgcaatcgcgggagtcttgacggatgtcgacatcttccaggcaggctcaaagatctaatcacatat

SEQ ID NO: 3058 - DNA, 230 bp, Glycine max
  Clone ID: PAT_MRT3847_102767C.1
taacaagaaaactaaatgaaatatgccataaaaaggggataattaaaatggccaggccccatgatataagtggcccttacccaatacaatgggtattgggatcctctaataaaacttttcctataatcctaagcaatcaaggggttataataatttgtggacaccttaaataaccaccggaaaaacagggaattgttcattatctcaaaatggctaagggggatatctaa

SEQ ID NO: 3059 - DNA, 139 bp, Glycine max
  Clone ID: PAT_MRT3847_102768C.1
gaaggagtaaagcgtatgtgcaagcagaagccattgaaatggtgtatgcataatgaaagtaagctagtattaatagtaatatgatatactgaccaatccagtatttcagtgagcatgtcgatctgaaagtggaattgag

SEQ ID NO: 3060 - DNA, 322 bp, Glycine max
  Clone ID: PAT_MRT3847_102769C.1
tgtgacagagacacaactcaaggttcctataatacgatttggaatgattggaacgaactcttcgaagagctgtgactggtcacatgactccgaccttgatgtacttgccatacacgacaccggcggcgtgaaacaagcctatcaccttctcatatacgattccattctccgaaccttagatgctgatgtcaatcctgttgtcactaatgtcatctccttggatggataggtaatcatagttgtgtctgaccgcatccctgcctaccttccttggaatgacttcgcgatagacttgtttattgaaggaacctgcgtgatagta

SEQ ID NO: 3061 - DNA, 398 bp, Glycine max
  Clone ID: PAT_MRT3847_10276C.1
ggataatatacagaatatcacaatctctgctgctcatgtcattgctgacaaagtcggccacacagcctgctacgcaccccacctgacgggggagaaggcgccactggtatacaggctgatgaaggccatatggcgaacaccgagagcagaagtaacaatactaggtgcgctacagcttaatttggctttgatggaagctttaacaatcaactgactgactcgtatcataagcactgccatacgctgatctcgcttgaataattcctataagcctatatgcacataccctttgtcccggggacacccaacaccggtcgtgctgaagcgaagtgctattaactacactagtatactcctctcattctttacacggactgacaaaagcacaaggggggggc

SEQ ID NO: 3062 - DNA, 167 bp, Glycine max
  unsure (1)..(167): unsure at all n locations
  Clone ID: PAT_MRT3847_102770C.1
aacacacatcccattantgattccttcttataatcttttacactccacctctctcaataaactgtgcggctctttctcaaacccatttgcataatctatatcaaaacacacaatatctctcatactgatcaaaaaaaaaaaatacttcattctcctgattcaccata

SEQ ID NO: 3063 - DNA, 1483 bp, Glycine max
  Clone ID: PAT_MRT3847_102771C.1
ctttttttttttttttaatcaaattatttcatgttactctttaaaagtgatagcaaaaaacacaaatggaaaacgagtttgcaatttgcacaattttaagaagtaaatcatacactaggccaggctatagcctacagttgtcacactagtttccctcctctttgtatatggcatgcgcaagggtttactttatcagaacctgacatcatttttgttgaagtcacttcatcacagctggatctcttctactaaacaaggaagaaacctagtgagacaattgaagaatctgtctctctgaagaagcaagtatttaaaaagagcagaagaattcaggtagaaattgaaagattttgttgtttcaagccattctgaaatcaaaacacaaagaattagacgaaccaaaagcattaatgctcaagacattttcttgcaataaaataaaaggctaaataatgacaaagcttgaccaaccttggcaaattctaagctaagattaggagcaagtgagtggaagagaacacaacagggaaattgttgattaaaaaaaatacttggaagttcaaacaggttaaaaaacaatcactcctaagtgagacactgacagatataaaattcatttccaaaaaaaaataagacataattttcagtggcctctacagctgcttcaccttaatacctaaagcctttgtaagatatcaaaactatatataattgatctagtagtagttaaatgattcaatatccaaagtaaagcattattcaaactgtttcatttctcctagcacgtcacatgcataaccataattgattcaaaaactatctttttttgttaagtaaaacaatcatagagtaaactacaaaaatctagcgatgtaatagattctaatgtggttgacataattggtattttattacttattctctaagacactaataatattagtaacgacaacaacaataaaatcactccaaggcaagcttgtttagatgcactttcacaatcaaggatacaaaggaggatacattgataaatcgctgaagcttgataagttattaccaaaagccacagcaggtgtagtgtcttcccagttctgaccaagacaatgctaataaccttccttgtcgtaaaatttatctgacttgatatatttagagtccgaggagatatcatcctcacagataacaagggattctgaaggatcatatcgatctgaaaatgcattattggggaaagaatctgaaatatgactcctgtgagtgtccttttgccatccatccttgattctagatgagcggacgcgtgggtcgacgggaattccggacttatcctgcttctttttatttgagtagtaatcctgtttttcttcctacaacattcaattttttattaactctaatgttgccctcttttacttcttctttttcctttcttcccttttcaatttcttctttttacttcactgaggtcctccttcccttggct

SEQ ID NO: 3064 - DNA, 724 bp, Glycine max
  unsure (1)..(724): unsure at all n locations
  Clone ID: PAT_MRT3847_102772C.1
cccccttcacctccctcccttctttattatcccaaaccaattgtagcctttgcgctaaactgagattattccataaaattgtactgcattacaatttaatgccttattaatttaattatacaacccagtaatcaaattatttcatgatagtcttttaaagtgatggcaaaaacacaaaaggaaaacgagtttgcaatttgcacaatttaagtaaatcatatactaggccaggctatagttgtcacactcgtttccctcgtacccaccctcctttttgtatctggacatgcacaagggtttacttatcaaaacttgatatcatttttgttgaagtcacttcatcaccgctggatctcttctactaaacaaggaagaaacccacaagccacagcaggtgtagtgtcttcacagttctgaccaagacaatgctaataaatttccttgtcgtaaaatttatctgatcgacttgatatatttagagtccgaggagatatcatcctcacagatcccaagagattgtgaaggattatatcgatctgaaaatgcattatttgggaaagaatctgcaatatgactcctggggagtgtccttttgccacccatctctgattctagatgagttatcctgcttctttttatttgagtagtaatcctgtttttcttcctacacattcnatttttattaactctaatgtggccctctttacttcttcttttcctttct

SEQ ID NO: 3065 - DNA, 303 bp, Glycine max
  Clone ID: PAT_MRT3847_102773C.1
ccctgaaagaaatcaagctttttaaggagcaaaatccgatacagaacttttttcagtaaaaactagggataatatacatggaatatcagggaaaccaaaaattttaatggggttttaaaattttaagagcagcccaactgagcctacatcctcaatgacaaagtaaagcaaagtccaatgtttttataatacctttcataaccaccaccacctttgttcccaaagcttaaaaaactattttttgttccaaaaaaaaagaaactatttgtctatttgttctgaaaaacaaagctaaacccctga

SEQ ID NO: 3066 - DNA, 812 bp, Glycine max
  Clone ID: PAT_MRT3847_102774C.1
cgtccggataaattttacgacaaggaaggttattagcattgtcttggtcagaactgggaagacactacacctgctgtggcttttgggtaagttttgctagttacatttcctatttggaggttaaacatatataaatttaatgtgaagttctactgttaacgtggtttctttgcataactttgcagtaataacttatcaagcttcagcgatttatcaatgtatcctcctttgtatccttgattgtgaaagtgcatctaaacaagcttgccttggagtgattttattgttgttgtcgttactaatattattagtgtcttagagaataagtaataaaataccaattatgtcaaccacattagaatctattacatcgctagatttttgtagtttactctatgattgttttacttaacaaaaaaagatagtttttgaatcaattatggttatgcatgtgacgtgctaggagaaatgaaacagtttgaataatgctttactttggatattgaatcatttaactactactagatcaattatatatagttttgatatcttacaaaggctttaggtattaaggtgaagcagctgtagaggccactgaaaattatgtcttatttttttttggaaatgaattttatatctgtcagtgtctcacttaggagtgattgttttttaacctgtttgaacttccaagtattttttttaatcaacaatttccctgttgtgttctcttccactcacttgctcctaatcttagcttagatttgccaaggttggtcaagctttgtcattatttagccttttattttattgca

SEQ ID NO: 3067 - DNA, 525 bp, Glycine max
  Clone ID: PAT_MRT3847_102775C.1
aatggatatagactgcataacatagattgatagatacaatttgcaaacatgcctaaaaaaaatttatacatggagtcacggaggctgaacactgaaggtgaaactgtagaccaggaaaaagggcatggctttttgagttgtatttagaatctgaagcccagctctaggacattaaagaaatctctcagacaagggaatctgcaagataatacagttttctcatttccatcaatggatttccttttcacagaagcataaaactgcctgttgctgctttctttgtgatggttgaagacttgatggagagtggttcatgtcattaaaagtaacctcccccactcttatagttcctccatgtacactaatgaagtcatcatctaattcagactctataatgctaagttgctaactgtgtcaaaccaggcatcctcatggctttttccagcaaaataaaattgctcatcatctttatcaaaggcatcatttgcatcaatttgactatggctgtggtgttgtagcggggtg

SEQ ID NO: 3068 - DNA, 373 bp, Glycine max
  Clone ID: PAT_MRT3847_102776C.1
acgaccaaatcaaaatcgtaaaacatcatatgctcaaactgcccaagtccgtgccattcgtaagaaattcattcacattgcacaacgtgaatctaactgtgatctcaatgaattagtcaacaaatttattccagaaattattggcaaggaaattgaaaaagctacacaaggtatctacccactccaaaacgtctttatccgcaaggttaagactcttcgtgcaccaaaggtcgatgttggtaaattattggaatcccatggtggagctgatgccgtctcctctgatgttggtaaaccagttgaacgtgctgctgaacccgccaagactgacaagaagccagctaaaccagccaagaaggcataaaatcatttt

SEQ ID NO: 3069 - DNA, 433 bp, Glycine max
  unsure (1)..(433): unsure at all n locations
  Clone ID: PAT_MRT3847_102777C.1
gggtcgctttggtctcactccgccactcatctgctgggagggcaaacatacaaacaccaccaacaacaaccactcctcttatttttcaaccttgaatgcactcttnatttacactcgcgtagggatctccgctaaacaaaaccattaaaatgttgcgagagagaaacacaacgcgagaagaaaatcatacacattatttggnttagttttttatgggttaacacgaccatattcagtacgaaatagtggtgcaacgttatagggaggaggaggaattgactgcaaacaaagatatgccagacaggctgccagcgtgcgcatggctcaacaacgattacgtgcgggaagaggaattggtccactccgagaagagcgtggatcggaacaacccgagggtgagcgaatgaaaatccgaagatttgagggaatacaa

SEQ ID NO: 3070 - DNA, 520 bp, Glycine max
  Clone ID: PAT_MRT3847_102778C.1
ttttaccacaagtgacttttatttgtgacgctcccaggcgcagcccagacacagacacaacaggaagcaggaggtggccaagcagccactttggaagtcacagggcatctcccacccagctcaatccctgctacacactctgtctcagaaaacgctcaaagagtaggcccagcatgtggttcaggcatgaggggacctgcccttccctccccaggatgaagaacagggctgggccagccaaggtgcttcttccactgggtccaagagccagggtaccccaggctattccactcctgggctctttggggttggcccccggctgctcctccaagccacacagttaaggccagagtttcactttctaatgcagcccatctctgacagtctctgttccctaggcacggtggacacagcaagacacagcacacagactaattccccaggctttggtgggacaggaaggcaggacagccaacagggcctatggctaagttggcctaagtttaataactaagcagct

SEQ ID NO: 3071 - DNA, 1068 bp, Glycine max
  Clone ID: PAT_MRT3847_102779C.1
gtcgccgcgcgaggggagaagagcaggaagaggggagcatggcagagattcagattctaaacctcggaggcccgccaagcttaagtaggaggaaactgccatgccattcgaattcccaaaactggacttgtttgcagcacaagctcaagtgcaacggcagattcctttgccttttctccaacaacagaaaggaggaacaagctagaaaagcattagaaggtgcactaagtgggaagaaaaatgaatttgacaaatggaacaaggaaattaaaagaagagaagagctgggaggtggaggtgacactggtggaggtggttggtttgggtggggtaaacggtttggctggtctaatgatgataatttttggcaagaagcaaaacaagctattcttactatacttggtcttgttctagtatatctcctagttgcaaaaggcgatgtgctccttgctgtcatcttcaatccattgctatatgcacttcggggggtgagaaatggatttggtttcatttcatcaaaagtcttgaaaaatacttctaccagcaatcagccagattttggtggactttcacagaagaaagcttatcagcatacttctgccatggagaatgttgtaagaaaatggggtagtgactagtgagtaaatcttcctgtaaaggtttggcattacccctatgatgcagactgctatttatattatccctcttaatttgttcaatatcacctttgctccaagcaaatatttgtgcaggggatttttgttgtaactcaaagtttgtttatttccttgacatctgaacaatggttaatttttgtttcctcttttgttctcctgagaagttagttaagactacaaaatgctcctttacaagcctgcaattgataaggaaaatttgtttgtgaaactgggttttaactttcaactgtggttctctaatacttattttgtatattgtattagctaaccataggtctgctctcgttgatgctaggctgtttgtaaatcagtaccacttgtgcgcctctcattaatatatataatatatctacttttgccgttcaaaaaa

SEQ ID NO: 3072 - DNA, 699 bp, Glycine max
  unsure (1)..(699): unsure at all n locations
  Clone ID: PAT_MRT3847_10277C.1
tttgcattcttctgttattaaaatcctttccttcggattattatacacaaaaatttgtccagaataactaattaccatggtgctatcctgacccctcttcccccctccaaacagaaaaaatgcgtggtcgcaataaaaccaaaaaggcaggaagaaatcaaacaaaagcatcatggttttctagtaagccctcaggagactaattaaaactccataacatcaaaaccctttattgttagcccgtgtagctgtccgtgcatgatcactgctcatcttgttggcttagtccatgttgtctccgacgttacagtgttaccataataaatctgctttgtgctatcgtcccagtaagcctgccaattagttgggagaccctttgagtgttcactcggatcaggttgctgctggttatgctcaattgcatcctgcggtgtactaacagattcttttgctgcttgtgctctcctgcgtttgaccttctctcgccaatcaccacctagaggctgaaaattagcattatctttggcctctccacttgcaatttgcttggcatgccactcctctatttccctttgacgctttctttctaagacctcatacnacactatcagttcttcctcctcttcgagcaactcctctgtagctgccttccacttatctactaaacttgaaaccttcttattagattttaatgaggat

SEQ ID NO: 3073 - DNA, 503 bp, Glycine max
  Clone ID: PAT_MRT3847_102780C.1
gagcaaggctcaaagcatggcgccaccacctcctcttcctactctcctcctcaccacccttctctccctattctcctcttctacatcggccccacccacaaccacagcatgccgcgacacgtgcggctcaacgcaggtgaagtaccccttcggcaccggccacggttgcggctcccctctgttcagcccctacgtaacctgcggctccaacggcaccggcgaccaactgttcctgaaaagccacaccggctcctacccggtgagttcgatctcctacaccacctccaccatcaccctcagtccaccttccatgtccacctgcagctccatgcacccttcatccaccaacttcggcctagactggacctcccccttccaaatcgcctcctccaccttcctcctcctctcctgccaaccccccaccacttccctatcctcacccatctgtgacccttccttcgattacctctgcgcatcactctactcgtgtcccgccgtcgtcg

SEQ ID NO: 3074 - DNA, 611 bp, Glycine max
  unsure (1)..(611): unsure at all n locations
  Clone ID: PAT_MRT3847_102781C.1
ggctcgaggagaaagtaaaatttattacgaggggattagttggagttggaacttagaattgacacgatacgtatgtattgttgtaacggctgataatctatatattctagttgatcgatcatccaattccacgcacaggcatatcaattgtacgtgctgtagcgttcgttattgttggaaggtcgtcgactcatctccaccttcttcttcttcaaagaaaagttgacaaaatggagaatgcgagaaacggcgtcgttgctgcgaatcaatagccgtaagcaacgcaatattgatcgaattaatgatattctgtgtaaggtacgtaacgacagcaacatcaatgaagagaaagaagcatcacactgagaaatccagaataatcggactcctggttgtgagtttccttcgaagtcggatcctgcaccgcactctcatgatcgccatctacggctcccttcttctgctattcgccctattctctctgttcgctccgtccccggtaaatgaaatcaatcttcagacacagaacaatgaccaagtcagatcacggttcgaggttctcgccgttgangaagatgcggcgtgatttatggagtcatgcactcacgcct

SEQ ID NO: 3075 - DNA, 445 bp, Glycine max
  Clone ID: PAT_MRT3847_102782C.1
agaatggattcctgttaaacctaccccaaatgcatttattatcaatgtgggggatataggtcaggtatgttattagtacatgattttgttaacatcaactcttgaagtattaccctttctcctaaatggtccctaaagtcaaaaaaatacttaagtagtcaagtatttgaaatcattctaattagtcttccaaatgtaaaagaatccttttcaaattggttcttaaactttactcaaatatgtcaacttaaggactaaagtgatacatgttcaacgctttggagattacttaaaaatagtttattactttaggggacaacttagagaaaggattatactttgaagaccaaatttgtggtcaaatgtactaaatggattggttctttttcacaaaataatattctattaattagttcttaaaattagtccttcataagctgatgtg

SEQ ID NO: 3076 - DNA, 361 bp, Glycine max
  unsure (1)..(361): unsure at all n locations
  Clone ID: PAT_MRT3847_102783C.1
actctaatacnactctagactacgcgcttccgtatttcttgaagtcttttcatattcatatcaatctttttttttttaactcactaaacattgcccatgacaaaaatctaactgggatggggtataacccactcacaactttataacactcttatccaaaatgtccacattcatataattataccaatacccaaataccaatcctactattttctcatctcttctttcaattaatcctatatattaataatattttaaattcattacaactaatctattatatttctccataaatataaattactctcatatctcttaatatttattttcataacttttctttatttttctcttacaattt

SEQ ID NO: 3077 - DNA, 295 bp, Glycine max
  Clone ID: PAT_MRT3847_102784C.1
aaaaaaaaataatgtatagtaagacacacataaacaatatatgggcggtataaactaaatagtggcgtttcaaaaatctaaaataaaagaaaaaccattcctaaaaaacattaaaaaaaaaactaaaaaaaaaaggggcggccccccccttttacacctttcaccccggattttatttcgggcccgttccctgaggggtacccagttttccctttggggaggcattttaaagctcggcgaaacaaagggcataactgttccccggggaaaattgtttcccgtccaaatttccccc

SEQ ID NO: 3078 - DNA, 254 bp, Glycine max
  Clone ID: PAT_MRT3847_102785C.1
agcgttggacacctgcgagaagacgacagaaggggggacatttagacagccagcaccgttgtccccacaggagaaacgagagagagcataggatcgcacaggtggagagagcatggcgccggaggaatgcttgtcacccagtggaggagagcatgacgaaagacaaactggtgggcgggagaaagacgaagaaggaacaaaagaacagggagcataagcgaaggaggaacacagaagaacgcgccgtccaaggg

SEQ ID NO: 3079 - DNA, 416 bp, Glycine max
  Clone ID: PAT_MRT3847_102786C.1
ggaattcggcacgaggttcaatctttctctttcattttctcttctacgcaaatcctcttccccttccgccaccttcccttctccaccacgagcctccattccccctaaaccaccaaaactccacgcttcgcaaaacgatgtcgtgaatgacaacaatgacgaagccacgaacgagcttctctccttattggtgtggataatgcagaattattgttaaggaagcatacccagactccaacaagcccaccgtcgacgacatgcttatcgcaattgtcacttccagatctcgttcaaagcacccatgcgtctctcttcttaagcaaatttggcatatctatttgtttcaatttaatccatttggcatgggggttaggttttgtagcttttactcccattctgatttcagtatatcttca

SEQ ID NO: 3080 - DNA, 951 bp, Glycine max
  Clone ID: PAT_MRT3847_102787C.1
cccgcgtccgggtttagattcggctaggaaccggatattcagaattacttataggatcggttaaacacacgaacagagagaaccgattagactcggtgtgaagaacgacgtcgctttctcgtttgggggaaatctaaaatttccctaatctgaagcgcaggcagagaccttcccactcctcagagtgtcgccgcagcagcctccgtcgccggcagaaattgcaatcttctgctgccttattggctttctattgctacctcgatttttcagaaatgcagaaggcgaccaacaccaacaccaacgcagtggcactgcacaacacgcacgtgaaactcttagccttcgatctcctctctctaacccaatcccctttcccttcttcggacgccacgacgtcgtttttccgcagaggaatcccgatctcgcgcgtggaaaccgtgggcactatcacgctgcgcgacctcaagcatgatcgcttcctccgcttcgccgtcgacgacggcaccgcctgcgtcccctgcgtgctctggctcaacgacgccaactctccctccgtcgcccgccgccgccgccacgaactcgctgcgcgcttcgccgcgctcgtcaagctcggcgcggtggccagagtgagaggcaggctcagccgcttcaggggaacgctgcaggtgactgtccccgacgtcgcgatcgagagagaccccaacgcggagatcttccaccgcctcgattgcatcttgctggctcgcaactgttacaacatcttgcctccaccgtcttcttatacgccgccgcaaccgccactgccactgccaccgcccaagtagaagtgcaattccgtcgtggatggtgctttgttttgtatacgaaaaaacgttgtttatcgaactgtcataattgtacatagatattagtatttatcatgttaaaagaatgcagaactaatttattttt

SEQ ID NO: 3081 - DNA, 376 bp, Glycine max
  unsure (1)..(376): unsure at all n locations
  Clone ID: PAT_MRT3847_102788C.1
agcacaagagttacattatctataaatgtgagaagtaatcaaaataatatctttacaaaaaaaaggcaactttccaaggaacaagagaagcatttttgaaggcctccacaacaacagtccagtcactttcaaaccaaaatttactccaatttctatccacaacaaccaaggaagacacccttatggtctctaaagatagcaccactgccggaatgatccggggagccccttgaggatccatccgttttgcattttatggtatggcaagccggatgggaccaaatcacgcanacaaattgcaaagccttcgactattttgtactacttgttgtatgtcaaaaaaaaaatccatcacaacaaaaaaaagcggccgctc

SEQ ID NO: 3082 - DNA, 898 bp, Glycine max
  Clone ID: PAT_MRT3847_102789C.1
tacggctgcgagaagacgacagaggggaccttcatggtatgttactatgttaattattcttgactttcattcatttgtttttcttaccaaaccaaaccaaacagtgagcttgaatttggattcataatgatgattccatgtgttgatgtaaaacatgttttatttttttcgtattgattaggctctttcgaatgggagatacaagagttgcttgcatagggcagtggtgaatagccagacaacaagaaaatctcttgctttctttttgtgtccaagaagtgacaaggtggtaagtccaccatgtgaattagtggacaatttgagcccaaggctatacccagattttacacggcccatgctgctggagttcactcaaaagcattacagagctgacatgaaaacccttgaggcatttgccaactggctgcaacggaaaagtaactgaaatttcaagaagcacatcaagggcccttgatctacccaaaacaaaaaaaaaagcaaaaatgtgatacgtggaatattgtttgacaaaggcagataaaggtgacactgagtaggagtttcttcatgttttgagtagggctatggggctatggtacactagcattgagtgatgaatcaaacagggaacataaaatagttcaaaaggaatcaataaacaaaattcttcgggtgattctgtaatcttcattaatttgatgatatagaagaagagttcttcatgtaatgtgcatattgatatgataattgaagcaacttttctcacgggaaatgtaacctttaaagggaatgaacttgcagcctataacgacaataatagtcatcactagttgtcagatggaatcacatgacattttgtaatatattcttttaaatatatttttatttactaaaaaaa

SEQ ID NO: 3083 - DNA, 336 bp, Glycine max
  Clone ID: PAT_MRT3847_10278C.1
agcgaatctaatacaccttacatcgcaccccacttatgaacacagcgataatcgatgatgtcagctccatattggtgactgcactcattcgccagagaagtattgtttcgatatcttttttcacgacaaaacttcacttttcctgaaaatcactccactctcctttggctacgaaatccaaaacaggtaaaatctcggattgaaaaagcgaaagtctgttccaaacaacctgcactatctgcgcgatctagatgcactcagaatcgctatcggaaaatgatatggagctcgcggaggaagagatacacgccgccgaacattactatgaaaaacata

SEQ ID NO: 3084 - DNA, 583 bp, Glycine max
  unsure (1)..(583): unsure at all n locations
  Clone ID: PAT_MRT3847_102790C.1
ttntnngggataacatagtatgtgaaaactgtaatgactggcagatgttagttacactactttaagcgaaaacgatactacatcatgtgtgctcaagagaagagaatattttacccaaatggggtgagagatgggtcattgagaaagccaataatggggtgaatatggtattgttagtgtagtccgtgatcaaacagtttcggtccaacaaacgtggctaacctactgacaaatattgccacccttacaaggcctttgtcgcgtcctacaacctctactctacctccttgtgccttccttttctcttgttttcaaatattgagagagttcatatgcttctttcatttttttttaatgtggattgaagaataattttgtgtgcatgcatgtgtatatgtgtgttactatttccctgtgaggttttttgtagttttactatcattcaaatggggaagagtattttattggtgagaatattgttgttaaatgctatgatcttgatgcttctatgaggaggagctaacagtctatttaaaaaggtcccttcttgtagtttcccttctgtcgtcttctcgcagccgta

SEQ ID NO: 3085 - DNA, 267 bp, Glycine max
  unsure (1)..(267): unsure at all n locations
  Clone ID: PAT_MRT3847_102791C.1
ggnntngaggttgnacaagggtanctctgtctgcttctacaatttctctcgtnaccaatagaaanncaaaacnanaacatgggcagaaaattcttcgncggtggcaantgganattgaangggancaatgaggaggtaaagnagattgtnantactttgaatgaggctaaagtngctgnagangatgtngtagaagttgttgtgagaccnccttatgtgttccnnncatngnaanaagtttgctgcanctgnttnccatgtttcggc

SEQ ID NO: 3086 - DNA, 808 bp, Glycine max
  Clone ID: PAT_MRT3847_102792C.1
tcttaaagcaaattgaccagatacactttctctgacgtattcatctctacctcagatctgagctctcgtatattccccagccatggccaaaaaggtcaacataatgaggctcaaggttgatctggggtgccacaaatgctacaagaaggtaaagaagattctctgcaaattcccacaaaaatccgagaccaggtgtacgacgagaagaataacatcgtgaccatcgcggtggtttgctgtaaccctgagaagctcagggacaaaatttgctgcaaaggttacggtactatcaaaagcattgaaatttgttgaacctcccaagctcaaaccacgtctgaagcccaagccgccgccgccgccaccggtttcggttccgattgggttgtgctgtgttccatgctttgatgggtacggtgccctcccccctgttatgacgcttattatgatagttacggcggtgggagcaggccttgttacgtgaagaaaacacctctgcttgcacaattatgtgatcgatcacatcacattattaataccttcagtcatcgaatctatcacttgtgccggccatgcatgcaagttgtgtcaacggcgcgttcttccatcatcaccctcaacctcatcaattgaccgtgtctttaataatccaaggaataatagtctttgttttttgtgagtacaaattaattacaatgtttcgtacgtggaataatatgatgatatgatgccagaaagtagctaaagcataaatgttttactataatgcacgcaactaatactatataccgtgatatcttacacttttcac

SEQ ID NO: 3087 - DNA, 366 bp, Glycine max
  Clone ID: PAT_MRT3847_102793C.1
tctcatctgcttggcatctatctatggggcgatgtgatgtgcttaatatgatgggtcatgtgctaatcggctcgcttgtatcatacggggggaattaataacttgtgtctatgatcgttggaacatgggaaagtggtgcactttaatgaactaaactggctatgcatactggtggtgcaatagacaatggcaacagccccataactctatgtggcttgacaagagtgggctcgcgctatagatgacgattttgatgctgagaattgacggacagcttctttgacaggaaacgtcgatgtccataaacccggcgttattcatggttctggacatcagggccaactatatgtggagatagtcatgaaa

SEQ ID NO: 3088 - DNA, 130 bp, Glycine max
  unsure (1)..(130): unsure at all n locations
  Clone ID: PAT_MRT3847_102794C.1
ttgccactgggagaagaccacagaagggcatagcaatgcttatagaccagtttatggcacttcagagaatgggtattgtggaccactatgaaagaataccccatttctcccttgncctagttggagtagg

SEQ ID NO: 3089 - DNA, 568 bp, Glycine max
  Clone ID: PAT_MRT3847_102795C.1
gattgaagaaaatccaatctctaattacaggctaaaggcagcaaaaattaacaagattataaatcgtatccttttcaatcgtatcatttttaatatgtagaacaccagctttagacatcggtcaaatgtgattcaaaaacaattatgaagaaaatccaatctctaattacaggtgttaaaggcagcaaatattaactaaattataaatcgtatccttttcaattatcagtcagtaaaagcccttctctcaaacgacgttgctggaaagccgtgatcgtacagagtctaaatccgacactttattgatgcagtacatagtatctccagtagcaaccaatttcttgcagatccaatctggcaccaacttttctagagactcaatttgttcttcaactgctctaatctcaacaaaatccaaagtgttcacaagtatcttatgcaggagctcctctttggtgattggaattctttggacagattgaaatatagagtgtatcacattaaccagatccagcaatggtgaagattttttatgctgtgtatctaaatcagcttgcttgaggctctc

SEQ ID NO: 3090 - DNA, 455 bp, Glycine max
  Clone ID: PAT_MRT3847_102796C.1
gggcaaaaaaaattcatctttttactcactaggggtgacctggaaatccaattatccaaaatttgggagcatcaagatgtaaactccgacaattccagggtagttatttacaggttcctttaaagcacaatcccaacaaaggttttaaattttttttatgcattttcggggaaccagggcaagaaccttggtccattttggctttttatttgaacagaaaagctttgttgggcctttccataaaaaacaagactggggctgcaatctgctttgatgaaagccctgctttttttatttgaacttggggggatccatgctcaatgtttttatcaggaagcattattgctctccactttagaggcccatttaggatacctgataagctcaggaattgtgatacatgtgatccaaaaccaccgatagaacccttttccactgtgaggagtatttcatgc

SEQ ID NO: 3091 - DNA, 1992 bp, Glycine max
  Clone ID: PAT_MRT3847_102797C.1
ggctcgagctcgtgagtttagcagagtgcactcacctcacctagggttttgcatcagttttcaaccactatagcagaatggaacaaaatgcgtgcgaggaattgtcgaaaattgcttcggatttcaagtgcgagaagaaggttctcgaaacagttgatgaatcaatcgtatgccccactccacagaagaacgaggaacccttaatcgttaaattcagagagggacaaaccaaccttcctgaaaaatactctgcacttgtagatttgtttggtcacacaagctgttcactcaggttgctgcgtctgtgtaaaaagtctccaacttttcaaaatgtttgccgacaggttgaagttctttcgaagagggaattctcccatgcccatcttgcgcagatgaagtatatactccctaaaagtgtgtgtatagataaggtgcttgttcatgataagaaaagcttgtgtatggtgcctgatatgaagatcacgttgagatttgaggttgtgaaagattgctctggcgaatctgatgatctggctcttcgacgatattttaaatctaagctgattgatttctttgatatgcatcctgaggttgctgacattccagaggccccactgccagaaccctttggcaaaaaaacttgtagattgaattttgaagaatttactggccaatccccacatgtaaattcttcaacggaacttttgtcaatttccaatcaaactgaaatgttgccagagcaattgcaactgtatccatctttccgtagacacttttctaggaagaataataccgaccaggcagaaaaggctcaatgctttttacccacaaaaacttctccatcatctcatgcatctgattgtctggataatgaagaaagtgaaaaaacactgcagaaagaatgtgtaccattatttgatggggtggctaatcctattactgaaagagggcaccagaaggaatcattttctatgtctttgcagcctagctttattaatacaccagtacagatgatccgccctccatattctgttacgtgcagtaattctgaaagcccggatatgaaaaatatctcctgtgttgctgatagttttattgcagagacacctgcccagtcagcacctgcaagattattgcccatttccgatgttaagcttcaggacatgcctacccaaaagtcaacatcatctcataagccagcaaaaagagtgcttgacttttcactcatgggggacaatgatggcttgggcattggagtagacaagttagaatctagcagagctctgcatgaatttgatagcttccctgaatctagcagaggatgttatgaggattgcaattcttttgggtctgtttctgcacctcaggaggcagaagagagcctcaagcaagctgatttagatacacagcataaaaaatcttcaccattgctggatctggttaatgtgatacactctatatttcaatctgtccaaagaattccaatcaccaaagaggagctcctgcataagatacttgtgaacactttggattttgttgagattagagcagttgaagaacaaattgagtctctagaaaagttggtgccagattggatctgcaagaaattggttgctactggagatactatgtactgcatcaataaagtgtcggatttagactctgtacgatcacggctttccaccaacgtcgtttgagagaagggcgtttagttaatatttgctgcctttaatacctgtaattagagattggattttcttcataattgtttttgaatcacatttgaccgatgtctaaaactggtgttctacatattaaaaatgataaaattgaaaaggatacgatttataattttgttagtttttgctgcctttaatacctgtaattagagattggattttcttcataattgtttttgaatcacatttgacggatgtctaaagctggtgttctacatattaaatacagtagtttaacgcatcttcatacttc

SEQ ID NO: 3092 - DNA, 351 bp, Glycine max
  Clone ID: PAT_MRT3847_102798C.1
ccgcggtggcaagctggaaccatacaaataaactacactttcttccgggagccaagactggatgacactaaccaaagcgcgattgcaaaggcctggactatgagggccccagaggtgtgcatagagctgcaggagacgactttgaatgaaacagccaacattgagatgcttctcgagagatagaacctcggggatccgtgtcctattgatggtccaggggggatattgggtcatgcatacgctcccactgatgggaggtgacactttgtcgcctacaaatgtcggaggaggatgggcgatgaggccaaattgtcggatacacgagcagcggagctggaagtatgggcacat

SEQ ID NO: 3093 - DNA, 274 bp, Glycine max
  Clone ID: PAT_MRT3847_102799C.1
ctggagatgatttggttacacagattcctcgtaagggggggattaccacaactagaacagttttatgtttcccagcctaagaatttgaaaatggttatgtgcttaaccaccaacactgacttgcaatgattgagatacataattaacccgtccaacaaacccatgttgactaaagacaacacccatatggacccaagaaaaaactatcccatcactaaagcttcggacaaataatattgtgaaaaccaacccctcatttgaggcgttcaatctt

SEQ ID NO: 3094 - DNA, 277 bp, Glycine max
  Clone ID: PAT_MRT3847_10279C.1
atagaggaaggatgaaatagaggcattctgtgtgttctgcaaagcgagctatgatttgaaacatgtgtatgaagcctaggatcaaattctgtgtgacagtgattctactaaggtaataagtttgcaaaaattatgaaccttagacaaagagttgttggtgatcttaaacttcttactgatgggaaggtgtatgagggtaagcatattccctgttctaatattagtggcagggaaaatcatgttgttcaaatacccctaaaggcacaagagggaattc

SEQ ID NO: 3095 - DNA, 311 bp, Glycine max
  Clone ID: PAT_MRT3847_1027C.1
acagaaagggtaccttcacttgttgcgtacattgccttgcctttggaattattgattctcagtggagtaaaaatatgacacctttgaagcatccaaatcacaactaccgtcatgctcaaacttgatttcctattatctatgatgaatatatacgatacatgtatggaatacaatacgtatctatatgacgatatgattatttcaaaaatatatcaaattcgataatttagaaatattttaaacatcataccagttgcattctatctataattgcaaatcctttaagataccacaaaaaagattgaaacttt

SEQ ID NO: 3096 - DNA, 240 bp, Glycine max
  Clone ID: PAT_MRT3847_102800C.1
gagaggatgaaaaattaaacttccactggataatcagagtcccttaaaaagacccccaaactgggagctaaattaccccagataacgatgcttttttttgggcttttcgagtccttttaaaacatgggaccaaagacaaaacattcaatacagtcatcaaagatacggctcaatcctgctataatcgggatccaaggatcttctgtttttgcttcctttgcaacaacaataaaatattgc

SEQ ID NO: 3097 - DNA, 211 bp, Glycine max
  Clone ID: PAT_MRT3847_102801C.1
aattcggctcgagcgcttctcgaaaccttttttgtacgatgatttcaaggctcggtgcggtgacttcaaggaggaggcggatatcgagaatgcttatgactagtactattaaaacgatgagccattttttactaagccgtttgggttctctctctccaacaacattgctgcttgtaagcctctctcttttcgatcatcaactgttgcatca

SEQ ID NO: 3098 - DNA, 276 bp, Glycine max
  Clone ID: PAT_MRT3847_102802C.1
ttatttttatttcttttttttttttctttttttttttttttttttttttttccgggaatttaagggggaatttattgaagcctcaacccaaaattaaaattttaaattacccacttttgaacaaattgaggctaatacacatacatgggtgcctgaaatttgattttttccccccattcccactttgttttttatttgccactggggacaaagaacttggtatttttaaccaaagtcaatgtttgactttaagctcgaagagaagagtcttttaat

SEQ ID NO: 3099 - DNA, 729 bp, Glycine max
  Clone ID: PAT_MRT3847_102803C.1
gagaaaagtggcggtgaaaaatgaaagtgacttggaagaacaagaagaagaaacgttgtttacccacgttgtcacacttcactgaccttccctttgaggataatcatacaacaacactccaacaccgacgctgaagacggcgcgcatgttcccgacgcccacgcaacacaattggctaacgaatttcaagctcaaggagacgagcttgctctggtatcatgtttcctttttacacttacccatgtggtttgttttaggttctgctgtttgtttatttttggggaaggaaaaggtggactaaggaaaaattgaattatcaattgcatttcagctgtatggactatggacatagctgcagtagtggcattctcttacacgttgcttgtgttttctgtaattttagatgacatggacagatgatgaggcaatgctgaatttggtgaacttaatttctaataaggagtagcatgaatgaattcgtgataagggcataagttgttttattttgtggattcatctagaacactgtaattttaacagcttgctactttttttattttcctgtgattgatttgaaagttctttcttaattcttaaatattgcacacatacccctgtgatttgtttcagattaacttctgtcaatgtggatttaacttttatagtttagctctgatctgaggtatattcctaattgaaagtttggatttttcaaatctaataggcaat

SEQ ID NO: 3100 - DNA, 107 bp, Glycine max
  Clone ID: PAT_MRT3847_102804C.1
acccgatgatatcaagaaaggaaaggctggaatacccactatcccaagggccatctggctacataaatctggaaaacagcaaatgccaaggccggtggtgggacaaa

SEQ ID NO: 3101 - DNA, 191 bp, Glycine max
  unsure (1)..(191): unsure at all n locations
  Clone ID: PAT_MRT3847_102805C.1
ttcaacttcacccattcatacgtggtgttgttactgctgctctnttctcttttctncttctctttagttctctcttgccctttcgttctctngttcttcgtctnncgagctgttaagcatttctnccatnaacanantaccacaatgtgtggtatcttgntgttcttggntgtctgatgactctcgancna

SEQ ID NO: 3102 - DNA, 197 bp, Glycine max
  unsure (1)..(197): unsure at all n locations
  Clone ID: PAT_MRT3847_102806C.1
cccacgcgtccgtgtaagcaagctattacaattttattctgaactaataaccaacaagacgggaggatgtcttttcaatgaggagaggccaccaaacccnaaacccacccattatactacaccctttaatatcaatctttttccatccactcttacatatacaacaatctctttttacttaccataaataacaacca

SEQ ID NO: 3103 - DNA, 501 bp, Glycine max
  Clone ID: PAT_MRT3847_102807C.1
ctcgagccgtgaagagaaggtttcctcgaatcatggacttcgtggaggcaagtgctataagagagtgacatttacgatcttcccacccctctcactctctcatatcatattttctcgttgaaagttcctctctttcggatcaccacatgaccgtttccttctctgttattttcccaaataaaaaaaaaaaaacaaacaccccccctctctcttctttgcgttcttggcgtcttttcttgctgcgagagttacctctcatttttctattccatgtagtttttgcctttgtgggattctttgaccgacttctttctttcctcctagactctcttttttgttttccgagcccaagttagcctttttcttttgccattctcgttgtgtggaagatcctaccaagtgggggtgtgtgtttgtctttttctctgcgttgatgggttgttgatgtctctgggcattgcgaaagacatgggttttgatgagaaagtgaaagacaatgat

SEQ ID NO: 3104 - DNA, 453 bp, Glycine max
  unsure (1)..(453): unsure at all n locations
  Clone ID: PAT_MRT3847_102808C.1
aacaatcttaacgcgtgcaaagcttatagatacacatccatcggtccaacacctggggggtgtgatttgctatctgggaacgcaccatatccctagtcacggtatttgctctttcttactcgaaaattaaatcaagctttacttatattggtttttgttaaatactatatttttatgttttattattataattttttttttaatgttttgggtgggttctttttttaaatctatacttttttattttcttttcatatatttataatttttttttaaggcacctaaaataaattaaatggccgtctttttaaaaacttctggattggaaaaccccttgctttcccaaattaatatttttttgnggtttattttttttttttatttttatataatttaaaaagtttttattatttttttttttttaatattttttttttttttttatattttttt

SEQ ID NO: 3105 - DNA, 533 bp, Glycine max
  Clone ID: PAT_MRT3847_102809C.1
acaaacaaatacaataaattaagaagttcctatctctttagaatgcatgattcatgaattcccacttagtcattaccacgataaaaaaaatgccgaacagtagtatatgaacaaagaaataattaagatcacactcaatctcattagcagacacgtttcatcattattattattattgttaataatactaatattcatatcctctgacactgttagcttgcagacttttaatgtgctgaagagccaattataatttacacatgctatacagcaacaacacacttattcagtttttatggtggtgagctgggattgaagttggcatattcaagaagataaaaaaaatggaaacagaacaaaaaacataatagaaatccagaaacaatttattcataccaggaaaatgtcataaggaagtatctgccgaaagcccacataatttatgaaaatagaatgattgggtgtatagatacagtgtagaagttaatcgatattgcataaaataatacaagctcacagtatgtagaatctgt

SEQ ID NO: 3106 - DNA, 736 bp, Glycine max
  unsure (1)..(736): unsure at all n locations
  Clone ID: PAT_MRT3847_10280C.1
gctcacctttcccatgttatgctcccatctctgacaaacaaaaaacctaagggaaccaccatcacactggccaaggccaagaaggctgaggcccaggccgtggcggtcgagccccaaagttttcccaacctcaaggaggctttgaactccaagcccaagaagaagaagggaaccaccatcacgctttccgagttcaatcatggtggtttcagccagggccttatgtgtgacgagatgctcgcccttcccaccggtcccaaggagcattccaccgaagaaatgcagttcaaccccttggcggtggtttctcctcctatgaccgctctggtggtcgctcacgcgactgcagcaataacgaaggttcgtgggggcaaaggaggcagaagatcgtacggaggattcaacgaggagcgcaagggtccgaatcctagagtttcggtcctggtttttgcaatttcggagtggagcctgatcgatggacgagaggcggtccaccgcgtgaggttgaccagatgaagcgaatagccaaaatatgattttttatgaagatgggataagggacatacgggaaagtgttcaaggccctagagagtatcanatctcaagggtgttgctcactgccatagaatcttgtccttgaccagcataagggtattcttaagatcgaatctggttgaacagctacnagagtatcagatttgacccaagcatgactgggcctctatctcgttattct

SEQ ID NO: 3107 - DNA, 1577 bp, Glycine max
  unsure (1)..(1577): unsure at all n locations
  Clone ID: PAT_MRT3847_102810C.1
ctttgttgttcagttcttatggttttcttgtgaattgttaaagaccaattagcatggccagtattctgtgtccttctttaaccatagtcacgtcctatgcattcagcaatgaaccaaaacttgtctctaaattcactgcagtaacaggaaactcttactcaccactatggctttcttgcacacgccctggaaatccagctagaaaccattttcagctcaaatcctcaaatgggcttccgcaaaatgctgtttcttctaatgacggtttagctggaagttcattggccaaagaagatggcaagccccaaccacttgaaggaccatttccctttccagattcagaatataccggatccaaccttagtataactgttgttggagcttctggagaccttgctaaaaagaagatttttccagcactctttgctcttttttatgaagattggctacctgagaattttcttgtgttcggatttgctcggactaaaatgaccgatgaagaattaaggaacatgattagcaagacactaacatgcagaattgataagagggaaaattgcgaagataaaatggatcagttcttaaaaagatgcttttaccattctggtcaatacaattctgaggaccacttttcagaattggatagcaagctgagagagaaagagggtggaaaactgtcaaacagattgttttatttgtcaatacctccaaacatatttgtggatgtggtgagatgtgctagtcttaaagcttcttcaaaagatggatggacaagggttattgttgaaaagccatttggtcgtgactcagaatcatctagtgagctaacaaagagtttgaagcagtacctcactgaagaccaaatattcaggattgaccattacttgggtaaggagcttgtggagaatctatcagtgcttcgcttttcaaatcttgtttttgagcctctgtggtcccgaaattacattcgcaatgtgcagataatattttctgaagattttggaactgaaggaagagggggttattttgatcactatggaatcattcgtgatataatgcaaaatcatcttctgcaaatactagcattgtttgcaatggaaacacctgtaagcttggctgctgaggacatcagaaatgaaaaggtgaaggttctgagatcaatgagaccactggagcttgaaaatgttgttgttggtcaatataagggccacagcaagggtggtaaatcacatcctgcttatacagatgatccaactgttccaaagggtagtcttactccaacatttgcagcagcagctctttttattgacaatgccagatgggatggggttccttttctcatgaaagctggcaaggctctccatactaaacgtgcagaaatcagagtacaattcagacacgtcccaggtaacttatacaagaggaattttggaactgatctggacaaagctacaaatgagcttgtgctttcgtgtacaacctgatgaagctatatatttngaagatcaacaataaagttccctggtctttggaatgagattagacaagagtgaccctggatttgctttttcgagcaa

SEQ ID NO: 3108 - DNA, 281 bp, Glycine max
  unsure (1)..(281): unsure at all n locations
  Clone ID: PAT_MRT3847_102811C.1
gctttgatcntaaatcttcactgggngnttttncttgnaanacaaggtggctggcnaaggttatgatgaangaaaaagnacggganggttcgtcnaaaattgcatcngttggttggttgggttggcnatgnttggaccagcccaattatagtgctggcaaaaagcaaggagtaatttgnctgaccaaaaactgntgccgaaggaatatgccagtaggaaacatcacnggtnatgcngttggntccagggttaatgcatccgacatggactggccaagctag

SEQ ID NO: 3109 - DNA, 365 bp, Glycine max
  Clone ID: PAT_MRT3847_102812C.1
atcaaaccctacaagcgcagcatcatctttgcatgaaaccaccccctaaagcagacattaaaaacttgtatgaggagcactcatggatgacacccaaacctatgccgaacatgatcacctgcatcaaaccagctgttgagaacgccaccaaaggctaaggaatgatcatacctgtgatgccatcctccctttcagcctactgcgatacattggccaacacacatggcaggtaccatgtccaataccaccacagaagcacatgccggagaacctggatgaggagctcattgacgagcagcaccatctatgcctgataatttgaagacccctaggacccccgcaactaatatcttctcaagactatt

SEQ ID NO: 3110 - DNA, 485 bp, Glycine max
  Clone ID: PAT_MRT3847_102813C.1
gcgtgatacgcgacataccgtgaacatgcccatacgtgattactatatattttggtttttatgtgctttgttttttaagtttctttcggacacagaaccaagcaggtggcaactagcgagatgcatacgacgaaaagaaacaccagcgataatctcgctatcaatatcaaatcaaaagataaagatttccgtcgatgctaccataactaccgaaagaagagaaagcgtgcttgccaagacgctgggggtcccaccaaggaagaccaccacctgtggaccaaggccctcggtcgcatcacaccggttcatattcggtatagggcgggggggcgagatggacgatgctgtgaaaggggttaccggtttggtggccgggggacaaccctggggccgcttccattttctccaaggcgaccaacggccacggagggacttgggggcccacccctggccgcgacaggctgaacttgttgctggcggaggaa

SEQ ID NO: 3111 - DNA, 1112 bp, Glycine max
  Clone ID: PAT_MRT3847_102814C.1
ccacgcgtccggaaacatatgatatggtgtggttggtagttgactagttgcaagttagtgagttcagttattaagctcttttggcatgcttcttgttggacataggataaacttttagtgccacaataacaccctatctctctctctttctctgtctgcctctccctttgtttcaatttccccctgcttattctggaaccaatgtctgagaaaaccacagctgataaacttattgaaaatcttgtggacacatttgttgataagaaaaaatctgtatcattttttgaggatgacaagtcagactcagtgagctctcagttcaatagactgtttggacgccagaaacctgtgcaccatattttagggggtggaaaatctgcggatgtcttgttatggaggaacaagaagatctctgctagtgttttatccacagcaacagctgtatgggtgctttttgaatggcttaattataatttcctaactattttattctttgttgtggctcttggtatgcttggacagtttctttggacaaatgcatccggcttgtttagcaggaagccatctaaagttccccgttttgtcctcccagatgatatcttcgtgaatattgcaactgcagttggtgctgaggttaaccgtggtttgaggtttctccaagatgtttcatgtggaggaaacctaaaacaatttcttattgttatagtaagcttatgggctggtgctgtgattgggagttggtgcaattttttgactgtcatgtatattggttttgttgctgcacatacactcccagttctctatgaaaggtatgaggatcaagttgacaactttgtgtacaaggtctttgatcagttgcaaaatcactatcagaagctggacactggtttgctcagcaaaatccccaagggaaagctcaaaggaaagaagtatgaatagattcttcctttcgtaaatggtttgattttcaatatccctttctctaacttgtgatggaattgggaaaggctgaaggatgtgatgtaactagggaacaattctatgtaggggtctttagaatttgttgtgtctcttctgttgactgggatcaaggcttcattgatgactgttgc

SEQ ID NO: 3112 - DNA, 395 bp, Glycine max
  Clone ID: PAT_MRT3847_102815C.1
ttccaaatctacatgcacgcatgcacaacgttcgtaatttgggaatagcactacaacccacaacgtcttatcgtctctcagaattagcacatcgcaggttcgagatacagggactcgggtgtacattgacaacctacaaggccctttgacttttgatcaagagcaactccgtgaccccaagatgcgctaagccttactccccacaccatgtagaacaaatgctcacttctctagtcgacggatcagaagggcgggatcctgatggtaccaaaatacttctccgggcttgagaaaggcctgttgtatgggggggcattaaatggcggccagattataaaaggaatgcgtcgattagcaccagcgaagtgaaacccactacctataacaaaaagaaa

SEQ ID NO: 3113 - DNA, 1401 bp, Glycine max
  unsure (1)..(1401): unsure at all n locations
  Clone ID: PAT_MRT3847_102816C.1
ccacgcgtccgcccccattgtgctccatttgtcagcacaaggcccctgtgtttggcaatccaccaaggtggtttacattttctgaattgcaacttgccacaggtggtttttcacaagcaaacttcttggcagaaggtggttttggttctgtacaccgcggtgtcctgcctgatgggcaagtcattgctgtcaagcagtacaaattagccagtactcaaggagataaagagttttgctcagaagtagaggtcttaagctgtgcacaacatcgcaatgttgtgatgttaattgggttctgtgtggatgatggaagaagattgctagtttatgaatacatctgcaatggctctctggattctcatctctacagacgaaagcagaatgtactggaatggtctgctaggcaaaagattgcagttggagcagctcgtggcttgagataccttcatgaagaatgtagagtgggttgtattgtgcaccgtgacatgcggccaaacaatattcttctcactcatgatttcgaggctttagtaggagattttggactagcaaggtggcagccagatggagacatgggtgtggaaaccagggtgataggaacatttnggtatntggcgccagaatatgctcaaagtggtcaaattactgaaaaagctgacgtgtactcgtttgggatagtattactggagcttgtcacaggacggaaagcagtggatataaatcggcccaagggccagcaatgcctaagtgaatgggcacgcccattgcttgaaaaacaagctacttataaactaatagatccgagcttaaggaactgctatgttgatcaagaggtttatcgcatgctgaaatgttcctctttgtgcatcggacgggatcctcatttaaggccaagaatgtctcaggtgctcaggatgctggaaggtgacattctcatgtgattgcctatcacatttccatttcccaagaacattagtgtagaactagtttaaagcttcttgcagattcttctgaattttcatttgtaaaaagcttcaagtttttcctcctagatttttatatcagtgctgtacatgttgtcttcggttttgtggagaggagcgtgattcgaactcgtgttgattatttagttaattgtacagaaaaacattccagttatggttaaaccctttcttccctgtttaatgctaatttcgtgaaacgattttgaaggtgcttcagtccctcaatggaacaagattgcctcaactcaactaaccaaggcacggatcataacatgcatcccattgttgaaatgtacatatatggagctctgaaatgggttaaaagtgacgtgttagacacaacaacaacgaatagagtgtgatcgcgtcatttgaaatgttacaaaatatttaacga

SEQ ID NO: 3114 - DNA, 542 bp, Glycine max
  Clone ID: PAT_MRT3847_102817C.1
aattactgaaaaagctgacgtgtactcgtttgggatagtattactggagcttgtcacaggacggaaagcagtagatataaatcggcccaagggccagcaatgcctaagtgaatgggcacgcccattgcttgaaaaacaagccatttacaaactagtagatccgagcttaaggaactgctatgttgatcaagaggtttatcgcatgctgcaatgttcctctttgtgcatcggacgcgatcctcatttaaggccacgaatgtctcaggtgctcaggatgctggaaggtgacattctcatctgattgcctatcacatttccatttcccaagaacattagtgtagaactagttcaaagcttcttgcagattcttcatttgtaaaaagcttcgagtttttcctcctagatttttatatcaatgctgtaaatgttgtcttcggttttgtggagaggagaggtgcgcaattcgaactcgtgttaattgtacagaaaaacattccagttttggttaaaccctttcttcccaatttaatgctaatttcgtg

SEQ ID NO: 3115 - DNA, 1146 bp, Glycine max
  Clone ID: PAT_MRT3847_102818C.1
tttcgcttttgaggaaacaaagcaacacccgaacgaaccgcgcaaggtaacgaacgtagctgagcaaaagcaagcagtaacaatgccattgtcaacggtcgtttcccccttttgttcttcctcagccaccttcctatccacagttatcgcgcgctcttcactccctccaaaacgcaacgtgtccccttccccattttccactctctctcgcagaggcatcgctctgctttccttcctctccctctccctctccctctcagcaccagcctccgccattgaaattggaccgaagaattggcttaaagaccaaaaaaagaaggcctccaagtacctattggcccctatcgatgcctcccgtcaaatccttcgctctgcctatctcacgctcacggaaactgacgctgcttatacggatgaggatttggagaagattcagcagctctttatatctgctgccagggattgcgtcccacaggaccggaactcattcgtcactttccaagccaacaccggagtagaggtgtgcacgtttcggggtgaagaatgcagcttcgttgcttggaaataaggatcctgtaaagttgaaagccgaagctttgctagataatcttataagatctttcacctctgtcagtgggctggcaagcgaaaccaacattcaacttgcatcagataggaaaaagatagctgatgctgtatcagataccatatctgatcttgacaaatttgagcagggaatcagggattgccttgaaacctaactctaaaggatagcctagcctactttttgatgtggaaagttggccattaaatatcatgcaaggaatctattggtttaatcacaaattttctgttatcaccggtgtgctgtctgccgggaatatcaaacatgcttttgccctacttaaattacttcttattagttctctcaatctaaaatctgtgaggactctgtcaatatgtatctgatactctttttcaatgcattcaatcctatggatcatttcatagaggaaatgcacaggctcttgatagctttatccttttgatattacggggtgtgttcataatttgcacatactgaatatgtaataactaataaactttggtaatttcttaaacaaaggtaaatgctaggatgttctg

SEQ ID NO: 3116 - DNA, 679 bp, Glycine max
  unsure (1)..(679): unsure at all n locations
  Clone ID: PAT_MRT3847_102819C.1
gctggaancggctcgggataagtttatccagaagcaattccactagaagaaaataagaagaaaaaaaatgaaatgattttagctttcggagaagtccatttcatgtttttcttctcccagaaatgcttctagaaaagtttgtccaaacagcctaagaaaatttcatccttagaattgtgagttgtttgaatgatcctaataggtgataagcattgtagctatgctatgttttcttgcctgtgtttcgtgatggaaatgaaaggaacccgactcagatttgttgctttcatgcaatagtgaaacagcactgttgttggatgaagatcagacggtttaaatttcagatgcatttttttttttaagtttgattttggagataaaatatgattcgtctgattttcatctaatgggttacagttagctgattgcgggaatgtgttaaattcctgattgcagcgaatctgtgtttgaatcggaatgtgatgtctgttacagcaaatgcatgtcaatcggtaattttgattcttgatgttctgttactacagtatttaccgtacaaacatgatggctttgctagcttttctgtttcaaataaagtcaaggaaatggctatcttctctcccaaaaatgggggggggggtttatgagtggatggaagagagaggtagaaagaaaaagt

SEQ ID NO: 3117 - DNA, 299 bp, Glycine max
  Clone ID: PAT_MRT3847_10281C.1
aaaagagaaaaacacccgatatataaaacaccaagtgtgccaattacaatacatcgcgtttcacgagctcaacaaattccattggattggggaaaagtccaagagaaagggggaaacctgattatgattctttagggcacccggggggaaaccaagatgaaaaggggacctcagccaagggtggggtttatccttacaaaaatttgacccaaaggccaataacaccaatcaaagcccctataccaacccctggtaatagcgggggcatggaggggcaaccacccttgggggggttattt

SEQ ID NO: 3118 - DNA, 630 bp, Glycine max
  Clone ID: PAT_MRT3847_102820C.1
attattctcctgatcgattatacaaattagcaagggaagcaccaataattacaaccagagtatttatatgccctaagtgtgatataaaccttaggttaccacactatcgtcacaataaaatatttcacttgtgcagcgaaagagtaaacattctcagcactaacataagcatgcactaaatagacttcagccatccattatattccacctttgcactaggtagttgccatatatagatatactacacaacgagagaaagtggaatattctgtggcaaaatgctaatagaatcggtccatagaaatcaatctatcattttatttttacttgttccacagaaactaggaatatccataacaaatacatgattccatccaataggtaaaatctacaaaaaaaaaacaaaacttactgcatacatgatttaaatgtagttaccttatcataacattaaccatcaacagaaaagcagacaactcaattagttcgtgactacatataccacagagaggaagttagtgtctctattctagaagttcttatgtacgagtaacgattcagtacaattaaattgtaacatgtagcgtacataacaataaaggtgttggattcaatttcaaatattactta

SEQ ID NO: 3119 - DNA, 528 bp, Glycine max
  unsure (1)..(528): unsure at all n locations
  Clone ID: PAT_MRT3847_102821C.1
tgtatgaccggaaagtttcacaaggctgtcagtgttttaagatttgcagtaatgaataaatatccactggacactgtagcatacacagttggcatctgtgcacttcttagaggtagaagaactcaagaggcttgcacattgtatgaccagatgaagaacgatggtctgaaacctagtgttcatacctataatatgatgctgttcactttttgtaaagaaagggatctccagatgataaaacagatactgcaagagatgattgattcaaggatatatttgagtggcagaaatttctccaacttgtgtaaatatatgtgtagatcagatactcatctttctcttttaaaattgttggctgagataagagatttgaggttattatctgccaaggcattgcatttcttaaactttgacaggcatgctgatggtgtacaagcaaaacataaacatcaggcagaagataatacagagtggaacctaattttggatacatccagttnctgaagatctgtcagatngtagctgctt

SEQ ID NO: 3120 - DNA, 476 bp, Glycine max
  Clone ID: PAT_MRT3847_102822C.1
ggcacactcgcgttctcattcaaggaatgatagcttgatagtcagcatgaacatggataacgtcaagtgaagaggttggtgatgcagctgatccagctgctgacataccaggcgagcctatagatatgacgactgacttgcagcctgtgctgaaaaaagctctgacttatggtgggcttgcacgaggccttgaccaagggccaaacgtgattgcaaagcatgctgaacaactttctgtactagcataagactgagaccagcactactatgataaactgtataaggcactttgtgcagagcacaatgctaacctgattacaggtccgagtgcaaagacccttgcaaaatgggctggatagtgcactattgattgcaaaagaaaagctaagagagatactgggagctcctctgtgggtgccaaggtatgaaatgaggaaaaatgaaaatgtaagttgatagtgttttacaacgcatta

SEQ ID NO: 3121 - DNA, 362 bp, Glycine max
  Clone ID: PAT_MRT3847_102823C.1
agcaaaaaggaagaggaaaatactggcccttatttttagggaaagaggccctccattttttataaaccctcggccggcaattaaactggtcaaacgggtaagcttcttacaaaaaaaaaaattgaggcccaaaaaaatggtggccaaaaacctaccttgaaagaacaaccaaccatttcctttccccaaaatgaaaagaaactggtgggcaccctaacaaatttcctcccaaggtttaagccaatccatttttttttcacccatgcttgaacccaaaaaataaaatatcaatcttcaaatcaaaataaagggaacccaaatgctttgggaaaaataaactcggaatccctaacggtaaacat

SEQ ID NO: 3122 - DNA, 779 bp, Glycine max
  unsure (1)..(779): unsure at all n locations
  Clone ID: PAT_MRT3847_102824C.1
tatgtatgatattgtttagaatacttggtgtaaagattctttacaaatgtctttcaaacggaaagattatgtcaataagtttaatgtaacaactattacatgaaaactgggaccctaaataaaatattctacccattgaatttgtttaagtgttatgtatgtgatgcatttttttttacacatgtagatttttgatactggatcgcttgagggcttacatgcgtcatttcaagtgcgtaatgttcggctcgaggggaattgcaaaaggaatacgcagaataacagctgttacaactgatcgtgcttatgatgcaatgaaagtggcagatgaatttgatcagcaagtagacgatgcggctaagttagaaggaagtttgctagaagaggttggtctttgtgtttgtattcatctaaacttttatagcattaggcttatatgcttttttccattctattctagttagttggtcggtccaacaggttgaaatgtctggctctgttaacaactaaggactgaagatggataaaacaaaactaatatacagctggctgaaccagctgccatgttgggcctaggaatttcttattaaggataggtatcaaactaattgttgagcttaaaattccctgttttgaacctaatatgaaggcctaatggagcctattcaatatattgggaagtatgggaatacttgtgatcatgagcatganatcttaattgaattactaaattaatggaacagtcgctaaatacatttgttattcattgaaagttcctc

SEQ ID NO: 3123 - DNA, 305 bp, Glycine max
  Clone ID: PAT_MRT3847_102825C.1
tacgggaagacgacagaagggttactgactagatgtccttgtattcattatagtggcgtgtttggttcacttctgattccattggatgtcctaatgctttatgctttcttttttcaaccaatgaatatctcctttgaggtatatgataatatgaatagttgactcgagaagaagatttttttttgttctttttctgggagaattataaataagaaacactgttaaaaatattttccgtaaaagaaaaaaacacttgaggtggttattttgtgttgaaatatataagttaacaacaacttgaccat

SEQ ID NO: 3124 - DNA, 191 bp, Glycine max
  unsure (1)..(191): unsure at all n locations
  Clone ID: PAT_MRT3847_102826C.1
tctgctgctggtnntngtnctgaggaaaacaacgaaagcgtgcaaactgatngtggggttnntnaggcatccancnttngtgcagaggagcaagctgccnctgagcctgctacngagaaanagctgaaaaggcagacttttngggtaccnttnangatagttgagaagatnactggntttggnntgtctct

SEQ ID NO: 3125 - DNA, 120 bp, Glycine max
  Clone ID: PAT_MRT3847_102827C.1
cttccatctccccagccataacctatctcaagaaggccacattacgcccttccgtttttgcaaccctgcacactcctgcttctgcttactattaatctttcgttccgtatttcattcaag

SEQ ID NO: 3126 - DNA, 471 bp, Glycine max
  Clone ID: PAT_MRT3847_102828C.1
gaattcgcctcgaggtttttcttgtgaaacttcctagcacaaaatcagaaactcatttcaatcgacttctatttattggattcagagtactctcatttgatgtactgggtctatcggtcctatgttttgtgcttaatcaatcatctgggacttgtaatcttgctccaaagtctttacttttcaaagcgtattgggtttctcatgtggtttcatgttttttgtttttagcagcagctcaagtctaggtacctatttagaatggagaaccagcaggtgaagggtgttgctttggagaaattcacatggaaggttgaaggtttcaccaaattgaataccaagaaacagtcctccaaggctttcaaagttggcggttataaatggaagattgttttgtatcctaaggggaggaatgtggagtatttgtccttgtatatgaaggttgctgattctctaccaccatatggatggagc

SEQ ID NO: 3127 - DNA, 399 bp, Glycine max
  Clone ID: PAT_MRT3847_102829C.1
gttgaacgcagatgtttggaaaagatcatgtgccttacaattttggtggaagatgggcaattcaatgaaaggtacattgtatggttaaattttggaagctatgacgtaaacactattcactattatttggccagtatgaaccttaggactgcagcaagaggttattttcctggaagaataaacgggagataaagtagttaagaacagttagagccattaatttaaggagactctattggatagacgggcaaataagggtagaaaggaggtatacaggaagctgtatttgtgtgaactaagcaagtgctcaatcgtaaaaggtaaatccatggaggagagtttctctctttgttcttgtcaatttcagttaatctgttaaatcatctttttttttctttc

SEQ ID NO: 3128 - DNA, 467 bp, Glycine max
  Clone ID: PAT_MRT3847_10282C.1
tttcaatttcatcgaatcatattcagtctggttctgatatatacacattacgcgctcatatacatacgcttcctttcacctccttcctgagactaccgctccaactttgttagtataaatgattcatgtatgcatcttgcaagatcaaacgatggaaaccagagggtattcgattagacggcagagtcgtcgtgctcagccttgggaacagccttcttctcgaggatctcaccagcgcccatggtctcggcaaaggtggtatggggcttccacttggcagagctgcggggggtggtctcctccatcatggtgtcgacctgctccagagacagtcccttgggctgagggaccaggaagtaagagtatacaaaggcgcatgtgcagagacctccccagatgaagaagacggacgacttgaggttgcctcggttctcggcgaccatgtagggggtgatgacagcgatgat

SEQ ID NO: 3129 - DNA, 512 bp, Glycine max
  Clone ID: PAT_MRT3847_102830C.1
aagcccataaaggcgaaccccggggcaaaacccaaggcgaacacttgatactcgcgctcgctgtgacagcgaatcacttcgctgaccgaccagccgctgcgttcggccaacaagcccagctccggaccgacactcgggtcgtaccacaccggcaacacatggcattgaccgccagccccggtgctcggggtcaggtcggtcaaggcctcggcaatcagttcccgggcctgggacgggctcaacgccagcaggtcgtaatgcaccatcaaggtggtataggacggcaccaggtcgatcaggtgcccggcaaatccagcccgcaaacgctcaccggcggcaagcatccacggcatgttttcctcggcgatcacctcgaacagccgcaccatcagacagtcgatcccgaccacttcgatccgtggcttcatacggcaggctgccgatccagggcctcgcggatacgctgcaccgcagccaccgaactggcgttgtcgccgagcacgcacagggta

SEQ ID NO: 3130 - DNA, 210 bp, Glycine max
  unsure (1)..(210): unsure at all n locations
  Clone ID: PAT_MRT3847_102831C.1
gcagttttagtgacttagcaatcaattgctgaaatcataatggatgcaaganggtattgttcgaacagtcaaaaganatggagtttattttgtgtttgtaacatcacagtctttatcatgtctctatgtgcttactacataacttgtgtgacggatatcagttccaggtattcacaatgtagaaaaaatcgaataaaataattattgang

SEQ ID NO: 3131 - DNA, 112 bp, Glycine max
  Clone ID: PAT_MRT3847_102832C.1
gatctggcatcataaaaacaagtcgttgtgaactgggaagagggatatggctttctcaatgatcaccttcctagttgttaccaccgtcaactgtgccggtgccgtcatggtt

SEQ ID NO: 3132 - DNA, 930 bp, Glycine max
  Clone ID: PAT_MRT3847_102833C.1
tacggctgcgagaagacgacagaaggggatcacactcaacatccacacttttcacataaaggaaaaaagaaaaagaaataaagaattcgttccattattatggcctcccttgttccttatcttttccaatttccacccttctttctttctctctctccgtttcccctttagacctctctctcacttgaaactccacaaccccattttcctttcctatgaccctattccaaatcaccaattctaattccattcttcaggtgttcaattgaattcgtgatgaagagggatcaccgagatagctgcggcggcggcggcggagggagtgtgaagggtgagtgttcctcaatgccgtcgaacgggaaggcaaatatgtgggaggaacaacaacaacaacaacaggggatggacgagttgctggcggcgttggggtacaaggttcgtgcttccgacatggccgacgtggcacagaagctggagcagttggagatggtcatgggttgtgcccaggaagagggaatttcccacctcgcctccgacaccgtccactacgatcccacggatctttattcctgggtccaaaccatgttaaccgaactcaaccctgaacccaacaacaacaacaatagcctcctcggtccatcttctctcttaatcgacaacaacaccgcccctgttttcaacgacgattccgaatatgacctcagagccattcctggtattgcagcctaccctcctcctcctccacaagacaacaacaacaacaacaacaacctcgacgaaatcgaaacagctaacaacatcaacaagcgtctcaagccatctccagttgaatcagcagactccgcgtctgagcccacgcgcacggtgctgctcgttgaccatcaggaagcccggcgtgcgtctggtccacactctcctggcgtgcgcgga

SEQ ID NO: 3133 - DNA, 1037 bp, Glycine max
  unsure (1)..(1037): unsure at all n locations
  Clone ID: PAT_MRT3847_102834C.1
gtcagctcggaattcggctcgagttctaactctaacttacggcacttggtacttgacccctacgctgtctcaaaggtgggttttttttgtcgttatgttccaaattggagcaaaagggtggtgccggtaaaccacatgaatatccatattatcatgactctcatcacaccaccacaacacaactttattacagaattgtccacactctagactctatatttctataccggctgctgctggcacctaatctgatccctcctctataaataccgtcttttccttttcccttttccattatccaccaagaccaagatgaagaggcagagaggtgtgcatgtgaatgctgttaggcccatcatgaataataatcctcccaatgttgaagatgtagctgcagctgcaatggggaagaagaaagtgaagaaagagggtgagcagaaggtggggaatattatggtggaggaagaggagataaaggaaagtagtactagtagagacagcatggtgggtgggtatttgcagcaacatcaacaaggtggcatgctgatgggttggaattgggaggagaatatgaatatgccattggtgggaggtgtggtggatgagcaaatgtcatggggctccacttggttccctggttgggacatggacttgttggggggagatgctttcactgccttgtacaatgatgttctttgggatgatgatatctggaatctcaacaaccaaattccaattcccttagatacaacaaagaggtttcacttggagtagagttagttcttaagcctgaaatgtctttatgtttcctttagctaggaatggaattccagtgttttctcttcaatttatatagtatgttgaatgttgaattcactatttttttttttttaatgctaattcggctcatcaagattccataccatctaaaaaaaaaaaaaaaaaaaaaaatgtagcttattacatacgccaaatcttgtaacttggtaataatttcatgatagtcagaaacatgntggttaatgggaaatgaaaac

SEQ ID NO: 3134 - DNA, 334 bp, Glycine max
  Clone ID: PAT_MRT3847_102835C.1
tgatcttcaacgacacagagggaggaacatttgcatacatctgacttacgattcaggaactgcgtattggtgacatgtagggatggacatcgcaatagaccgtacaaatgattcaggtcgtctatcatgtgggtgaacttgatcgaaccatcaacttttacacaaagtggtaaggaattctgcattatgagcggtgagagttcacaaacgacatatatagcaacgcttaactgtggctctgccctagattaatcccatttagttgtagacttaacatataattatggagctacctctcaagacgttggctattgctattgcccattagctcatg

SEQ ID NO: 3135 - DNA, 110 bp, Glycine max
  Clone ID: PAT_MRT3847_102836C.1
ctccaatttcaacggctttcaatcccagggacctcttcttctttcattaacaatcctttccattccacaccaaggttccaccttttctggactattatggggttcgagtc

SEQ ID NO: 3136 - DNA, 464 bp, Glycine max
  Clone ID: PAT_MRT3847_102837C.1
actttttctcctactttgacctttttgtccctgcattctgctatcgtttggcgaaatctgatgctcccttgagctgaatcggacaatgaggggaccctccccgagctccgtggaaccgcgccaccgctcctcctcttccttcagtgaggatactggcaagagaaggtctcaaagaattaaagattttaaagatgttgagaaggcgttgcatattccattccaagacaggattataacttgcaggccgaattggaagttagttttggttattattgtattgggaaccttagttacaattttccatcctccagctgtttataatactgatcatctatcaaactctttatcacggccaacttttataaacaactggaaaggagggttcaatggcattgattcacgttatgcatcattattaaatattgagtgggaccaagtatctaatgttcttgaaaatttgaagg

SEQ ID NO: 3137 - DNA, 168 bp, Glycine max
  Clone ID: PAT_MRT3847_102838C.1
ctgacgcgttggtgtttgaaccagatggggccgtggagcaatcaaaactgcgagaaatgttaagaaaaggacggatagatggggcctgaaacctaaagctatagtcgaacgtagaaaggcttagacagtgcatagtttggatgtgaacacataccactcacacagatt

SEQ ID NO: 3138 - DNA, 755 bp, Glycine max
  unsure (1)..(755): unsure at all n locations
  Clone ID: PAT_MRT3847_102839C.1
ggtaacctgaaatggtattaaatatttctaccttataaatcctgattttcaatgagcaggagagttctgtttagttatttgttgttaaatgataaagatttgggatttttcttttaaaccttgtacggctggagagcttgttttgaaaacatgaagtttataatgaatgttgcttcagttaaaaaatgtgtgggtatacgtacattattgattgcataatcagaatcttgaagcaaaaattaagtgtgttactaatacactcaattctcatacgtctaatatttattatactgtacctgaatttgttgaaaacaatgcagaaatattctgatgcagtgcagtgagagaattgctttcttaacctgtagcatagaattatttggtgattgaaagtgttgtgattagggatttaccacctcagttttctggaaagacattctctatttaaaagtaataattacctgccacttagcaggaagaaaggtgagattacaacctgcaacctgaaaagcactcaaagttgttagtcttaacatgagcagtaaccttgccaaatatgtacatatatttatatattttaaaaataaacatttttaaaatgttcagagggcaacacctaccttgctcctctcagtgatccagagcagtgactcaggactttacagagcagtggaaacttanagattgaggactcaagcaactgaagagaattattccccagcaggaaaaatggctccctggtggattttactcat

SEQ ID NO: 3139 - DNA, 404 bp, Glycine max
  Clone ID: PAT_MRT3847_10283C.1
ggctcgagcatggacgtgggggagccgagagattactgacaaccaggaggtgctgtcgtgctatgcccatagcaactgtcggaccgtgccatcgtcccccatgagacggattacctccagactcctcccgttcgctcttactctccagacgacagcgtcaacattgccattgatacactacctgacctatgttctcgccctggagaataagagcaagcgccatctcaaacgcgatcgtgggttggaacaaatgtgatttctatacctgtgtcgctcgattgaccactctggggatgttagctcatgcacttattaagacgagtgtggtgtcagccatgatttggctgccttcaaggcacaaaaacctgctgatctagactggcattgtccttcctttaaatctg

SEQ ID NO: 3140 - DNA, 660 bp, Glycine max
  Clone ID: PAT_MRT3847_102840C.1
aatgactaaaaatagtccatgaattgaaggataaaaataaaccaactgttagacagcactaacagatttgaataaaatccctgtcactgcgatctgcaatttaaaaatctaaaccagaatgtgccactgctaaagtatttaactagtatatatgcctatgaagtatttaccatctgtttgacaccgatcccgttggataattgcaaacatggagcaaaatgcacccttgacataccattccaccggagctcgttactatacccatcccttaggtgcagttgcactcttatctccattaagagatcgtcttctattttttttcaagtccccacgagctgacaatagcttttgggctgaagcggaagctgcattagatttttggctacttgaaacttctttacgaggactaacggatcgagactttgagtggcgttcaaaaactcttcctgatgaactggatacttttgctggtgtaggattctgatcaagtttgggagcaaaatcttgtttcaggacaacatcagtaggaagttttggtgctttgacgacagaagaactatctgaatcagaagatgaggaggggctagtggtgctctccatatcataaaaaaagttatctatcataatatgtggcggctgaccgtcatttgtgccactggc

SEQ ID NO: 3141 - DNA, 453 bp, Glycine max
  unsure (1)..(453): unsure at all n locations
  Clone ID: PAT_MRT3847_102841C.1
nngtctcggcaannangacagnnacnnancnnngagganggacgagcgnganncgntnacagncaanggngtggnangttatgtgncgnnggcncnagtgtnncnngnngnannnannganantagtaacagngnnggaaanagtcnggagngcgngnaanacanngngganggacanttnangaggnananngnanngncagngcagcgtnaatcangcnncgtgngagnngtgngngnncnaancatgnnanngannagnnagnganaggagnttactnagnaganngacgnaggtnnngngagngagtagttgtnngngngaacctaagatanngagagtacagatgcgtcntantgtcgagngctnagngtanacgaggngtnacgtcgnnagagntagnnggnagagaagagnngngngngnganatnagcngtacgngaccgnatnn

SEQ ID NO: 3142 - DNA, 470 bp, Glycine max
  Clone ID: PAT_MRT3847_102842C.1
tcgagaatttttcatcgccttcacagccgctcgcacctacgcgtccgcgcccaagaagaaaaagatgcctcccaagaagcaagtccaggaggtgaagcttccgctcggcaggccaggaaacaacttgaagaccggtatcgttggcctagcaaacgtcggcaagtcgactctgttccaagccatcaccaagtgctctcttggtaaccccgccaacttcccatatgccaccatcgacccagaagagtcgcgcgtcattgtcccagatgaccgcttcgactggctggtagagcactacaagcccaagtcggtcgttcctgcccacttgaccatctacgatattgctggtctgacgcgcggtgcctccactggtgccggtctcggtaacgccttcttgtcgcacatccgcgccgtcgatgccatcttccaagtagtccgatgcttcgacgagcccgagatcatccacgttgagg

SEQ ID NO: 3143 - DNA, 552 bp, Glycine max
  Clone ID: PAT_MRT3847_102843C.1
tttttcgtttggtttttttttttttccagagcgttttttttttttttttggggttgggtttttttttttaaacaaaacaaatcagggcccattccatttttagtggcattgatcgatgagaatattttccctatattttgacccactggttattcattacccatgcaaaaaaaaaccccctttatatatatatatttatatacataaagggatttttccactctgaccaacagagctttaaagaaatccgaaacgaaaatacaatttttttaaacaagggggggggggttttcaaaccaaaaataaaggttcacctcgggggtgtaaaaaaacgggaattttcgaaggaaaatatcaatttttttggaataaccacccaaacaaaacctaaataatggggtcaaaaatttattataccctaacactgcacgcccagggggttttaattggaacacaaaaaaaacgggcccaaaatcccccacctggggggaacctgccccccaaggggttttgaaaaacaccaaccccaaccccccctgggggcgggtccaa

SEQ ID NO: 3144 - DNA, 2255 bp, Glycine max
  Clone ID: PAT_MRT3847_102844C.1
tacggcctgcaggtaccgctgccctaattcccggcccgacctacccacgcgcactttttctttttctatttttaattgtctctgattttctcgtagaacgcgtttcttgccactccgaaaaacaagaggaaaaaattggaagttttcaaggatgttagaacagttactgatatttacaagaggagggttaatcctctggacttgtaaggaacttgggaacgctctgaaaggttcacctatcgataccttgatccgttcctgtcttttggaggagcgatctggtgcggcagcatacaattatgatgcccctggtgcttcctacaccctcaagtggaccttccacaatgatcttggtcttgtttttgtggctgtttaccaacggatccttcacctcttatatgtggaggatctgcttgctatggtgaagcgcgagttttcgcaagtttatgatcccaaaacgactgcataccccgatttcgatgagacctttaggcagctgaagatggaggccctggctcgcaccgaggatttgaagcggtcgaattcaaatcctgttgccgggaatgcgaagaagcaggtgcaggggaatgataaatctggatttgagggagggaataagaagaagaagagtggtggtggtgcggatggcgacgatggcaagcggaagttggagaatggacactccaatggaaattttcttgttgctaaagatactaacctgagtagggatgtgaatggtagacataatggaagtcccaatgttggggcttttgatgtacataagcttcagaagcttaggaccaaaggtgggaagaagactgatactgttgttgccaaggcctccaaggcagagccaaacaaaaaagtcacgaagaaaaatagagtttgggatgaagctgcaactacagaaactaaactggactttaccgatcattccggtgaggatggggagaggaacatagattttgttgtggctgctgatcaaggtgaaagtatgatggataaagaagagattgttagcagtgaaagtgagcaggaagaggaggacgaggatgaggaggatgcagggaagaacagaaagcctgatgccaaaagcaagggttggttttcatccatgttccagagtattgcagggaaggcaaatttagagaagtcagacttagaaccagctttaaaagctctaaaggataggctcatgaccaagaatgtggctgaggagatagctgagaaactctgtgaatcagtggcagcaagtcttgaaggaaaaaagctggcttcatttacaaggatatcttcaacagtgcatgcggctatggaagaagctcttattcgaattttaactcctagacgctctattgatatactgagagatgtgcatgctgccaaggagcaaaggaaaccatatgttgttgtatttgttggtgttaatggtgttggaaaatctactaatctagctaaggttgcttactggcttttgcagcacaaggtcagtgttatgatggctgcttgtgacacatttcgatcaggggctgttgagcagctgcggacccatgctcgaagacttcagatccctatatttgagaagggctatgagaaagatcctgccgttgtggcaaaagaagcaattcaagaagcttcacgcaatggttcggatgtggttctcgttgatacagctggtcgtatgcaggataatgaaccacttatgagagcactgtcaaaactcatctaccttaacaatccagatctagtcttatttgttggagaagcactggttggtaatgacgctgttgatcagctttcaaagttcaatcagaaattagctgaccttgcaacatcacctaatccaagattgattgatgggatcttgctcacgaaatttgacaccatagatgataaggtgggagctgcactttcaatggtttacatatctggagctcctgtcatgtttgtgggctgtggacagtcttatactgacctcaagaagctcaatgtcaaatcaattgtgaagactctccttaaatgagggcacaaagtggtttattttcccttgcaatcctgtttacctgtcatgtttgtttctgttgaatgatgaacttgttaatcctcgttgatcccattacttggtgaggaaaaaaactatgtggctttgacttttgaggcaatttggtttgtttagtttaaggaacttgttattttttttaatcagcaaatgttagcttttagtttttgttagcaaggagattcgaacttacggc

SEQ ID NO: 3145 - DNA, 261 bp, Glycine max
  unsure (1)..(261): unsure at all n locations
  Clone ID: PAT_MRT3847_102845C.1
aaacatgacagnaactttctcttctgcttctcctacttcgtgcatttgatctcctcagtctccttcttctcctctgagtctcgttctttcgttttcgtttcttctcgcgggtttttgtgaagccaaagcgtgcaagatactcagaatccgagagaccgattttgtattatttgctgtgaattgcttcgtggggagtgtggaaataaaaggaggaaaaaaaattcattaatattcatattcattcgaattaattgcattaat

SEQ ID NO: 3146 - DNA, 311 bp, Glycine max
  Clone ID: PAT_MRT3847_102846C.1
ggggttaatttatctttttaacgaagatagatagaaaataaggtctggtcatgatacagaatgtgaaacgaataaactaaaataagaactaatcttcttaaaagtttagcctactgacatacacaatttatttatgagttaagccaaactcccaagggtgaagactcaaaggacctaacattttgtcggatgcctgcagatagagactcatatttcatgcattgctcaaccaaaatgacaccaatttagagccgacattttacgctgctatatctttaattcaccgaaaatagattaacattgggcgcatt

SEQ ID NO: 3147 - DNA, 595 bp, Glycine max
  Clone ID: PAT_MRT3847_102847C.1
tggcttggaacctttgggctgattgatgtgcttgtttatgtgcttgcatggtcgtgagaagatgatagaagggcatggtcgtgagaagatgataggggggcatggtcgtgaaaagatgatagaagggcatggtcgtgagaagatgatagaagggcatggtcgtgagaagatgatagaagggcatggtcgtgagaagatgatagaagggcatggtcgtgagaagatgatagaagggcatggtcgtgagaagatgatagaagggcatggtcgtgagaagatgatagaagggggaggaagaaaataataaaaaaaaaaaaaaaaaaaaaaaaaaaaaagaaaactcagaaaattaaaacaaaaaaagtgcgtacgtgatgctacagtctcctcacagcgtgattcaaacctaacctatcggttgctgccccataatgctaaactcgggaaaattgttgctgcatttaatccaactgttccgtaaaatttcgtttccctgttagtcggtgcaaccgtgatgtggtttttcccgactagtcggtgcaatagccgataggtttgacgggactgtttccttaaatagccgtgtaattcgaac

SEQ ID NO: 3148 - DNA, 399 bp, Glycine max
  Clone ID: PAT_MRT3847_102848C.1
acgcggcgtacggacatcgcactactaatcactagatcatgaacatttattagatttgcagcatcagcgctaagaacgctggctcagttacgatgtggagcagctcttatccgctgttaaatactacgatgcggattacacaatacctgcgtgagaaaaccactgcataatagcgcattgccgcatttatatatactaacatatattgctacatggaccggataaccgttctcaccaattgcaatctcagatggtggattacgacttatgcgagtttctgagatttggactcatcagacactacgtcatcgataggcatatttgtggcctaatcatgcacttgacggtacacattaatgcagatgctacgaggcttgtaggcagcagaagattgtctga

SEQ ID NO: 3149 - DNA, 161 bp, Glycine max
  Clone ID: PAT_MRT3847_102849C.1
gaattcccgggtcgacccactcgtccgcccactcgtccgtactgttagaaaacaccatttaggggatccactgctggctacaacatcgggtccggtcccacactattaaacataacttatattcaattctataacccaccattcttcttccatctctttac

SEQ ID NO: 3150 - DNA, 1049 bp, Glycine max
  Clone ID: PAT_MRT3847_10284C.1
ttcttttttttttatcagaataactttttctgttttattgatccatttatatttgtacgtgtttgataatcacataattttgaaaacatttttcaaaaagtttttgaacaatcacaaaagctaatgaaaataattattctttaaaacacaacaattacaaacacgcttattaaccacataaattcttagaactcaacacagaagccaaagagccagattccaccggaaaagttaaagagatcaggtccccaaacactatatccatgacccacatatatgcacccattgctaattgacatgcctccatagacactggctccagtttgataggaccataaaattttcccactcttggcatcgatggcaaatatggatccatttctatccgtggatccagcgaagacaacatcatttgcaacactaacagggccatgagcagtgctgttactggggttggctattgaccataaaactctaccattgctagcattcattgccacccacccaccagcagttgtagtgatgtttgaaggagcaagagtgaaatttctggcctcagaattggcaatgttggtgtaaacccttctttcatcagttgatgcaccccatgttgcacctcctgttacccctcctggcccagcttgcttagaccagacgaggttgccattattacgatctaaagcccatacaatgccacttttctggcctgcaacaacaatatctttcttggttcgatttacgtatgtggtcaacatcattggtgcctccgcaaaatcagcatctgggttgataccttgaggaggacaattaggagttgaaggatcgacacaatcaaagagccatataacaacgcctcctaactggcggtaccatttgattttcccagaatccaaatcaagggctaacattgaatcagagtggttttctggttcaacacacgcgtctggttgagtaggctcagttccattaatttgtctctctcgacactgacgtatgcgtaatggggcagaatagaggttcccagttgcaatatagacatggattctttt

SEQ ID NO: 3151 - DNA, 709 bp, Glycine max
  Clone ID: PAT_MRT3847_102850C.1
cttcaaagcaaattaaacacaccttccattttcttcttccagctactctctactcgatctttctccaattaattccataatccgagaagattctactttcatggctttcaccttctcgccttcaatcagaaactccatttcatggccaactatgcttgttcctgacatgcctgatatcaatatctcacttcgaaataaaggcatctacaaagggaaacgcaatattaatctgcgagacttgaccaaggcaaatgttgcaagtccatcattacctttgattgccccaccaacacccgaggaacgcccaggaatcacccatgactgccaccaccaccaccaccatgttgcatggactagtatcccgcaagagagatgggaaggagagttacaagttcaagggcaaataccattatggctggaaggaacgtacctaaggaatggtccgggcatgtggcacataggggactacaacttccggcacctcttcgacggttacgccaccctggtgaggctcggtttccggaacggccggttagtcgcggggcaccggcaaatcgagtcggaggcgtaccgggcggcgaagaagaacaagaagatatgttacagggagttctccgaggtgcctaaggctgcgaatttcctggcctacgtgggggagctggcgagcctgttcctcggcgcttccctgaccgacaacgcgaacacccgc

SEQ ID NO: 3152 - DNA, 1500 bp, Glycine max
  Clone ID: PAT_MRT3847_102851C.1
cggccgctaccgcggcgagcttagtactctttttttgggcactggacaacacaaaccttcggcccttttttggtctctggagttacactacagccacggagctctaggactgcttattaagtagtttattttagaggctaacatgagcttcgctgcaccatcacttggttctgctggtggtagatctgctagaagagcatttgagtttgggagaacctatgttgtcaggcctaaaggtaaacaccaagcaactatagtctggttgcatggcctcggggataatggctccagttggtcccagctattagagacccttcctcttccaaatattaaatggatatgtccgactgctcctactcagccaatatctatatttggtggctttccgtctactgcttggtttgatgttggagatatttcagaagatgctcctgatgatctagaaggtttggatgcttcagctgcacatgttgcgaatttgctgtctacagaacctgcagacattaagcttggtgttggagggttcagtatgggtgcagctactgccctgtactctgtgtcctgctttactgctggaaaatatgggaatggcaatccttatccagccaacccaagtgcagctgttggtttaagtggctggcttccgtgctcaaagaccttgagtaacaagttacaaggggtagatgaagctacaaggcgtgctcagtcctttcctgttttgctgtgtcatggaaaagttgacgatgttgttccttataagtttggtgagaaatcatcaaagtgcttaagttcaactggatttcaggatgtaacttttaaagcttataacgggcttggacactacaccattccagaagagatggatgaggtttgtgcttggctaacatcaaaattgggccttgaggggaacattgcttagttagcaagcaaaatgtgaaaaataattcttttcgtttttggtccattgtaattttatgttattgcagatttgcttagatttctgttgatgatatgcataatatatccgctacgcattttgtaaacactcgagtttgagggcatcttcatgacaaagtactgttattgaaacaaaacacggtggttcttaaagcatggtgatggaatatgctgctaatatattatgctggagagaattctaccatgctagttgggttttcattttgttaaatgatcttatttagtgttggatatagcttggagcgctgatctttcagtgggcttcccaagtggaactaattaccatggttgtacatggtttcattttgtataactttcattgttttttgaaactggattagactgactggtttgagtgtttgacaggtagactgtcgatcttctgaccagttcgttgacacacaaaaaaagcgaatcctttttagaatcagtaaaaaatatcagtcaagaactagtcaaaaactgagcctagttaaaaattggattgaactaatgttttttaaaaatgttttcagcgttatt

SEQ ID NO: 3153 - DNA, 464 bp, Glycine max
  unsure (1)..(464): unsure at all n locations
  Clone ID: PAT_MRT3847_102852C.1
gagaaatgttaatagtaatccacatatttctcaactgattgaaatcagaaaggttcaagacaatgcaagtgatccctgtgtggaagttgaagagtcggtgaatggtgacaacattgctttgtgcgggagtactgatgtggagcttggaggaggctggactcaatcccaaaacttcttgtggtggaacttctcaagaaatggtttgccctggtggtgagagggccttcattactcgtattattgaagatagtactcaactgaaggatcaatttcggtggttcacttcaatggtaggtaaaaaatcaaatctcaagtaccttacatcaaaactttgggaggttggagttgccgtantgaatacaactgaatttgtccaaagcaggacatgccggtgggggcttgcttggtctttcttgactcccctgcagaagacaccagtttctttgcccgacaagaaaaacacg

SEQ ID NO: 3154 - DNA, 359 bp, Glycine max
  unsure (1)..(359): unsure at all n locations
  Clone ID: PAT_MRT3847_102853C.1
cccttgctctntggaatnagatcnnttttctttnnctttctcctgtgttgcgtgggatccatcnngttcattgcttanntcccttttnntctcttgatgccccttttacccctgttcanntctcatttcacttcanccatgtaacanntagtttgtattagtacctacccgaagcggggccgccgtggaaggggtcccnttttttcatccctttcatgccgcctgcaccggggcccggtcttctcttganngttttccctcctctnctttnntgctttctttgtgtttcttcttttctcttttgcatgtgcctgtcttcagcgcgttcaaccatcgcaatacancccatcctttcacgc

SEQ ID NO: 3155 - DNA, 405 bp, Glycine max
  Clone ID: PAT_MRT3847_102854C.1
tatcccttttgataacttcttccaatgtcattcttggtctctctcccccttttcacaggactaataacagtacaaatacacaatgcaaaattacttgaaggtataccccagtcagtaaattttttttcatacagatacactatatgtattcagcgtgcatataaatagatcatattcttctctctttttccttatctattaacagtccaaatacacgaggccaaattacttgaaagactactccaaccagtacattttttttcataccaagccgcaaaatttgcacttggtcttctttctaaagataaagaaatgaagagaagaatctgatctatttatatgcacgctgaatacttttgggctctgcataaatccgaaaccttttgggctctggataaatggaaa

SEQ ID NO: 3156 - DNA, 568 bp, Glycine max
  Clone ID: PAT_MRT3847_102855C.1
ttgactcgtgggcggacgcgtgggcggacgcgtggggctgatttgcgtgaagaggttcttttgacttcttcggaagctgttctgtcagcactaccatccccgttgcttgcagaagctcaaatattgagggatcgagcaatgagtcattatcaagctcgcagccttttcgggagcagccacaggcttaacaatcgaagaaatggtcttggatttgaccagcgacctgtgatggatcggggtgttggagttacaatagggaggagatctgttcttacagatagcttgaaggtgaaggagattgaaggtgagccactacttgatggaaatgcattaaaagctttgatccggcttctacgactgtcacaggtagaccagcgacattaaattcccagaggctttttggttgtcactcgaacacagtttatggtcgatctcaattgttggatggtcttcctcctcttgtgttccgccgaattcttgagattctaacttatttggccacaaatcattctgctgttgcaaaaatgttgtttcactttgatcaatcagttattccagattcttcatc

SEQ ID NO: 3157 - DNA, 1815 bp, Glycine max
  Clone ID: PAT_MRT3847_102856C.1
gaaaaacacaagttgcaccaccaactaaccttgtacttgaaagtggagtaaaggctttgggggagaaaacaattgaaagggtttgatatgggtgggagcaagaagaggaagaggaagagaaacgaagagcaaaggggaggcacagtgtattcagaaagagaaaacccaccagactttgctcttttggcttctctctaccctgaatttcacccttttgttcaattcttacattctcactctcgccccaccatcgattggaccgacttcaatgccactcgccaactcacgcgcgtcttgctccatcatcgccacgctctcacctggtggattcctgatggaaacctctgtccaactgtgccaaacaggtgcaactacattcattggcttcaacatcttctctcatctgacatcattccaaacaccatttcaagtgatggcaagttcaggggatttgacattggaactggagccagttgcatttacccccttcttggtgcttctcttcatggatggagttttgtaggatcagatgtgactaatgttgcaattgagtgggcggagagaaatgttaatagtaatccacatatttctcaactgattgaaatcagaaaggttcaagacaatgcaagtgatccctgtgtggaagttgaagagtcggtgactggtgacagcattgctttgtgcgggagtactgatgtggaggtagctcctttgcctcttgatttgcatgcttgcgagaataggaattatcatgggcctcccatacttgttggtgtggtcaggggtgatgagaagtttgatttctgcatgtgcaatccgccattttttgaaagcttggaggaggctggactcaatcccaaaacttcttgtggtgggacttctcgggaaatggtttgccctggtggtgagagggccttcattactcgtattattgaagatagtactcaactgacggagcaatttcggtggttcacttcaatggtaggtaaaaaatcaaatctcaagtaccttacatcaaaactttgggaggttggagttgccgtagtgaagacaactgaatttgtccaaggcaggacatcccggtgggggcttgcttggtctttcttgactcccctgcagaagacaccagtttctttgcccgacaagaaaaacacgtccttcacgcttgagggcctgcaacgccaacatggtgccattaatttgttggaagctgtcaattcttacttctcttcacatggcctattctgtacattgaatacctcctctttcacagtggatgttgcagcatcaaaagatgattgtgattcaatcttgaggaatgaattacacatcatcaacaaatccatcaattgccaacctacacaaaagacatctaatgggtcgagtttgaatctctcttctgagagattatgctttcgtatatcggtttttcagcaaattcctgggacactgttggtgaaaggttcattacaagacaggaattgtgcagtatcaggagcattctcggtgattttccaaaaactagaggaagctttgcggaataatttttgtactaaatcagcgtaggggtttgattatttgatttattgtttgggacagtgactgtatatgatatgggatgttgagaagttcttcagtactaatctgtggactaatgatttatacaaagcaagtagtgatggtgctgttttggcgtgaaaaggaaatgaagggcaacatgcattgttgctctttgggaaattttgggtagattatgtgcattattttgttcaccaaaccaacaagaatcattcagttgatttgtaaattgtactt

SEQ ID NO: 3158 - DNA, 460 bp, Glycine max
  Clone ID: PAT_MRT3847_102857C.1
gaaagacacactggcttgcaccctgataaaccttgggaaataggaacccactcttggcgagtcaccaagtatctaaaggaggaacgctcacccattctgttgttttgagtggcttacaaataaggagttatcttttactccaccctatggcttgccgactactaccccttggccaatgccggatacgaatgaagaaccctcgggaatattgagcgtgtgactctgaccctctccccaagaagagggattttttctggaacttgtaaccctgaaacattcctactatgaaccgaacccaaagcaaaaccacttgatctggccttttctaaaaatgaaagggattttttctttgaaatatacatgggtttaattgaccaacagtgggacgccccctatagtggccaataaacgggtgggcttggctgcccaaaattttaaaagacgctcggatggggcttta

SEQ ID NO: 3159 - DNA, 281 bp, Glycine max
  unsure (1)..(281): unsure at all n locations
  Clone ID: PAT_MRT3847_102858C.1
cgaccgacccgtccnncacaacattcaaagacgacatttaaagacttataaacgcaaaaaaacaaaactggaaaacttgtaaaatttttcctttctataccatccaaacatactatctcacccattcaacatcttacctcttttatacattaacctaataacaataaacctgccgaaatttaacaacaacaaatctaataaaaccctcaacatacccaacttaatatccttacaacacattaacctatcaacaccagtcaaattaaccattaaacccaaac

SEQ ID NO: 3160 - DNA, 5878 bp, Glycine max
  Clone ID: PAT_MRT3847_102859C.1
tcgacccacgcgtccgggtaattctgcatcccgagattcagaaaccctgccatctgggaatcttgatgtggcccatttctacatgtttgatgcacctattcttccatatgatcatgtgccaagtagtctgtttggagaccgtttgggtggtgcagcacctccacctctaacagattattctgtgggtatgggctcattgcatctacctggaagaagagtgttaggtaatggtaggtggactgatgatggtcagccacaaggaagtgctcaagccgctgccattgcgcaagcagtagaggaacaattcctagctcaactgtgcagtgtagctcctgaaagcagtcctgttgaacgacagttacagaattctggagaacaagagaacaagtctgatgctcttgcctcacatgatgatccaatattgactggtggaactgaccctacgcgtccgcaattatgcatgcgcaatcgtttaggaatgttgcatttcatccaaaaaaaagatgtttcatatatcatgttacttcagttccacatgaaagggtcaaagaagcttaaaagtttgctggttgttaatctgcaacaagtgttaaaattggtggagattcactgcggaaattcgatggtgctatcactttcacaagggatgctgagaagcatcgccgactgtcaaaatgctttcattaggcagaatccaggtttgttggagaaatcactttccatgatgctcaaggcaccaaggctgatagactctcgataacaagagagcctatttccgctcaagaataaggcaacaacatgaccaacacttgtctgggccattgcgtataagtgtaaggcgggcttacattttggaggactcttataatcagctaaggatgcgtcctactcaggatctgaaggggcgattaaatatgcaatttcagggtgaagagggtattgatgctggtggtatctccagacaatggtatcagctgttgtaaaggcttatatttgagaaaggtatggttgtttattaggaagagcacataaattcaaatttgaagcaaaacactaattatgagtcagaaactggatgacggaacattaggttcacatgatgaaacaaagcatgagtatgttgatcttgttgctgaacatcttttgacaaatgccatccgtcctcaaattaattcctttctagaaggttttaatgaattggtaccacgagaacttgaatccatattcaatgacaaagagcttgagcttctcataagtggtcttcctgaaattgatttagaggactcaaagtcccaaaccaagtgatactcgttatacagtggcatcaaatgttgtttaatgtttatgggaggtagctaaagctttcaacaaggaagaaatggcaacaatactgtattttatgactggaacgtcaaaggttcctttggagggttttaaggccgtccaaggtatctctggtccacaaaggtttcaggttcacaaggcatatggagctcctgatcgacttccatcagctcatacttgcctcatcaactttgccatcctgagtaagcctctcagtgagtccttgaggcatgctggttttgggcaaccctttatgctagtgttcgccctgaataaaattgctagaatgttttttcccagattctgatgttggagaatctgccatgcctagtgtggcagctttctgacagccttcatactgtgtcaagcttttgcagtctggtccactctttatttagatgtactttctataacaataggtgcaattattgttgcatactatactaatacgattgatcctttcgatattgtggaacagcctttagatgttgtggcactcgtacaagcatcccaactagttctttctattcaatttctagcgtataaaccactttcattgttgtagaattttctaatatttttagttgctcttcctccagatactcaatcagtagttttggtccaacaaagagctcaaagggttgcccagcaggctgaaggacagccagttgacatggataatgcctctataattgctacttttcctgctgatttgcgtgaagaggttcttttgacttcttcggaagctgttctgtcagcactaccatccccgttgcttgcagaagctcaaatattgagggatcgagcaatgagtcattatcaagctcgcagccttttcgggagcagccacaggcttaacaatcgaagaaatggtcttggatttgaccggcgacctgtgatggatcggggtgttggagttacaattgggaggagatctgctcttacagatagcttgaaggtgaaggagattgaaggtgagccactacttgatggaaatgcattaaaagctttgatccggcttctacgactgtcacagccccttggaaaaggccttttgcagagactcttgttaaacttatgtgcacatagtgttacaagggccactcttatttatcttttgcttgacatgattaaatctgaagctgaaggctctgtaggtagaccagcgacattaaattcccagaggctttttggttgtcactcgaacacagtttatggtcgatctcaattgttggatggtcttcctcctcttgtgttccgccgaattcttgagattctaacttatttggccacaaatcattctgctgttgcaaaaatgttgtttcactttgatcaatcagttattccagattcttcatctccagttaaggtgcatatgaatgagaaagggaaagagaaggttattgaagggggaccatcacctaattcctctggagctcagacaggggatgttcccctagtgctctttttgaagctcttgaaccgacccctgtttctacgcagcaatgctcatcttgagcaggtcatgggtctgattcaagttgtagttgatactgcagcttcaaaattagaaagtcaatcacagtctgaaaaaggaatggcagatacccaaaatttgtcagccagtgaagccccaagtaatactgaaaaggatgctgctttggtggagtcggactctaatcaacaagataagcatgcagatgtaaatccatgcccttctgaagggaagaagaatgtagatatgtacaatatcttcttgcagttgccgcaatctgatttgcgaaatttgtgcagtcttcttggtcgggaagggctttcggataaaatgtatatgcttgctggtgaggtgctgaagaagttggctttcattgtttcctcccataggaagttctttactttagagctttcagaatcagctcatgcgttgacaggttcagccatcagtgagcttgtcacactacagaaaacaaatatgcttggtttgagtgctggttctaggctggtgcagccatcctacgagtgctgcaagctcttagttcactcacttcacttaatactttgggtgatatggatatggaaaatgatgtggatcagcatgatgatcaagcaactatttggaatttgaatactgcactcgaaccattgtggcaagaactgagtaattgtataagtgcagctgagatgcagcttggacagagctctttctcttctaacatgtcaaacataaatgttgcggagaatctgcaaggttcctctacttcaccacctcttcctcctgggacacagagactcttgcctttcattgaggctttttttgttttgtgtgaaaagctacaagcaaatgaatccttcatgcagcaagaccattgcaatgcaactgccagagaagtcaaggagtctgctggttgttcagcttcaacaagtgttaaaattggtggagacccacagcgaaaatatgacggtgctatcactttcacgaggtttactgagaagcatcgccgactgtcaaatgctttcattaggcagaatccaggattgttggagaaatcactttccatgatgctcaaggcaccaaggctgattgactttgataacaagagagcctatttccgctcaagaataaggcaacaacatgaccaacacttgtctgggccattgcgtataagtgtaagacgggcttacattttggaggactcttataatcagctaaggatgcgtcctactcaagatctaaaggggcgattaaatgtgcaatttcaaggtgaagagggtattgatgccggtggtctcaccagagaatggtatcagctgctgtcaagggtcatattcgataaaggtgctttacttttcacaacagtgggcaacaatgcaactttccaaccaaaccctaattcagtataccagactgaacatctctcatacttcaagtttgttggccgagtggtacgttctacaaacgtattctgtatgtggtctcgggataaaatagaacctccttccccccaatctccttcctttatattgctggattttagatatattaaagctacctatggcacgggtattacacttaaggtggggaaggctttgtttgatgggcaactgctggatgtttactttactcgatctttctataagcatatacttggtgttaaggttacataccatgatattgaagcggttgatcctgattactataagaatttgaaatggatgctggagaatgatgtgagtgatattcctgacctgacatttagcatggatgctgatgaggaaaagcacatactttacgagaagaatgaggtcactgattatgagcttaaacctggaggaaggaacataagggtcacagaagaaacaaagcatgagtatgttgatcttgttgctgaacatcttttgacaaacgccatccgtcctcaaattaattcctttctagaaggttttaatgaattggtaccacgagaacttatatccatatttaatgacaaagagcttgagcttctcataagtggtcttccagaaattgatttggatgacttgaaggccaacaccgagtataccggctatacagtggcatcaaatgttgttcaatggttctgggaggtggtcaaaactttcaacaaagaagacatggcaagattactgcaatttgtgactggaacgtcaaaggttcctttggagggttttaaggccttgcaaggcatctctggtccacaaaggtttcagattcacaaggcatatggagctcctgatcgacttccatcagctcatacttgcttcaatcaacttgaccttcctgagtatacctctaaggaacagcttcaagaacgtttgttacttgccatccatgaggctagtgaagggtttggttttggttgacctgtattttggtgcaatatttttttttgcactgcggttccaccatttgtgtctccaacttgtcatttggagaaggagttcgtgctgctattctgttgtgggcactattggtaagcatcccaatgagtcaatgaggcattctgatgttggtgatcaatttattctgatgttctcccagaaaaaaatggctagaatgttttttcccagattctgatgttggagaatctgccatgcctagtttgggagctttctgacagccttcatactgtgtcaagcttttgcagtctggtccaatcttaatttatatgtagtttctatggccaaacagccttttatagttctagaatttactaataagattgaggatgtacatattctggaatacataattgatgcttttgctcccgaaagaaattgttcgattcattaaaaaaaaaaaaaaacaaaaaaaaaaaaaaaaaaaaaaaaaaaaaaaaaaaaaaaaaaaaaaaaaaaaaaaataaaaaaaaaaaaaaaaatggggggggcctttttaaggtttaaaattttcgtaccgggtgtgggaacccttatttttttttttttgggcaccaaaaataaaattcatggcccgcgttttaaaaccttggaaaggggaaaaccccgggtctcccca

SEQ ID NO: 3161 - DNA, 215 bp, Glycine max
  Clone ID: PAT_MRT3847_10285C.1
cagttttggggttgttggcaaaaggaggttcgtccctggggttggtgcagatttgtcactacttccgaggcccagtgcttgagcggcttacagcatgctcctagctgcacctgtgaaaagggatccaacatctgttggcgtggaatgtcccaacgaaaacactctgaattgatctctccacatccaagagaacctgaaccacgccggtttactat

SEQ ID NO: 3162 - DNA, 6718 bp, Glycine max
  Clone ID: PAT_MRT3847_102860C.1
cctccaaaaattagatgtttcattgatcatgttacttcagttccacttgagaagatagaagaacctttaaagggttttgtttgggagtttgataagggggattttcatcactgggttgatctttttaaccatttcgattcattctttgagaagtatgtaaaaccaaggaaggatctgcagattgatgatgattttctggacttggatcctccattccccagagaatctgttcttcaaattcttcgtgtcatcagaataattttggataactgcacaaataagcatttctatagttcatatgagcagcatctttcagcattgcttgcttctactgatccagatgtggttaaggctagccttgaaactttggctacctttttgaagaaaacagttggaaagtactccataagagaaacttctttgaattcaaaattgtatgctcttgcccaaggatggggtggaaaggaagagggtcttggactgattgcatcagctgtgcctaatggttgtgaccctattgcctgtgaattgggttgtacccttcattttgaattttatgcagtaaatgagtcagaaagtgacgtcaaggtgactgaacccttggtccaaggcttgcaaattattcacttatgtgatgtcaacaaatgtgtggaaactgatcttgagcttttgcataagttagttacagaatataaggatagtcaggagcaagaaaatggtaatggaatcagagctcagcaaatcaatgatggtgctctttgtgaggaagagataaatgtagactctggtgctcaagatacagctgaagacctgcaagctaatgagcctatgttggttcaaccagtttcattgactatcatgccaaatggtcttgattgcacagtgattgaagaaaatgccactcatgatgagaatgtagaaatagctcaggcatttgtcaattcatctattaattctgatgctgctatacaatgtgaaagtggtgctgatgttcctactagcatccacaatgtgccagttgagtccatggaatgcaatggatcatcaaatgctgacgggcagcctcctaatgttgagttaggggactctggttttgaaactcttaatccaggtgattcccatgcatcatcaatttatgctagtgctgatgttgatatgggtggtactgatgctgaaggaaatcaatcagagcaaccaactgtatctgaagacaggagggatgagatgttatcaactcagaacactgaggttgctccagatgcaactcaggccgaccaagttagtgcaaataatgaagcttccggtgctaatactatcgaccctacctttttggaggctctgcctgaagatcttcgggcagaagttctggcatcccaacaagctcagtctgttcaacctccagcttatgcaccaccttctgcagaagatattgatcccgagtttttagctgctcttcctccagatattcaagcagaagttttggcccaacaaagagctcaaagggttgcccagcaggctgaaggacagccagttgacatggataatgcctctataattgctacttttcctgctgatttgcgtgaagaggttcttttgacttcttcggaagctgttctgtcagcactaccatccccgttgcttgcagaagctcaaatattgagggatcgagcaatgagtcattatcaagctcgcagccttttcgggagcagccacaggcttaacaatcgaagaaatggtcttggatttgaccagcgacctgtgatggatcggggtgttggagttacaatagggaggagatctgttcttacagatagcttgaaggtgaaggagattgaaggtgagccactacttgatggaaatgcattaaaagctttgatccggcttctacgactgtcacagccccttggaaaaggccttttgcagagactcttgttaaacttatgtgcacatagtgttacaagggccactcttatttatcttttgcttgacatgattaaatctgaagctgaaggctctgtaggtagaccagcgacattaaattcccagaggctttttggttgtcactcgaacacagtttatggtcgatctcaattgttggatggtcttcctcctcttgtgttccgccgaattcttgagattctaacttatttggccacaaatcattctgctgttgcaaaaatgttgtttcactttgatcaatcagttattccagattcttcatctccagttaaggtgcatatgaatgagaaagggaaagagaaggttattgaagggggaccatcacctaattcctctggagctcagacaggggatgttcccctagtgctctttttgaagctcttgaaccgacccctgtttctacgcagcaatgctcatcttgagcaggtcatgggtctgattcaagttgtagttgatactgcagcttcaaaattagaaagtcaatcacagtctgaaaaaggaatggcagatacccaaaatttgtcaaccagtgaagctccaagtaatactgaaaaggatgctgctttggtggagtcggactctaatcaacaagataagcatgcagatgtaaatccatgcccttctgaagggaagaagaatgtagatatgtacaatatcttcttgcagttgccgcaatctgatttgcgaaatttgtgcagtcttcttggtcgggaagggctttcggataaaatgtatatgcttgctggtgaggtggtgaagaagttggctttcattgttccctcccataggaagttctttactttagagctttcagaatcagctcatgcattgacaggttcagccatcagtgagcttgtcacactacagaaaacaaatatgcttggtttgagtgctggttctatggctggtgcagccattctacgagtgctgcaagctcttagttcactcacttcacttaatactttgggtgatatggatatggaaaatgatgtggatcagcatgatgatcaagcaactatttggaatttgaatactgcactcgaaccattgtggcaagaactgagtaattgtataagtgcagctgagatgcagcttggacagagctctttctcttctaacatgtcaaacataaatgttgcggagaatctgcaaggttcctctacttcaccacctcttcctcctgggacacagagactcttgcctttcattgaggctttttttgttttgtgtgaaaagctacaagcaaatgaatccttcatgcagcaagaccattgcaatgcaactgccagagaagtcaaggagtctgctggttgttcagcttcaacaagtgttaaaattggtggagacccacagcgaaaatatgacggtgctatcactttcacgaggtttactgagaagcatcgccgactgtcaaatgctttcattaggcagaatccaggattgttggagaaatcactttccatgatgctcaaggcaccaaggctgattgactttgataacaagagagcctatttccgctcaagaataaggcaacaacatgaccaacacttgtctgggccattgcgtataagtgtaagacgggcttacattttggaggactcttataatcagctaaggatgcgtcctactcaagatctaaaggggcgattaaatgtgcaatttcaaggtgaagagggtattgatgccggtggtctcaccagagaatggtatcagctgctgtcaagggtcatattcgataaaggtgctttacttttcacaacagtgggcaacaatgcaactttccaaccaaaccctaattcagtataccagactgaacatctctcatacttcaagtttgttggccgagtggtggggaaggctttgtttgatgggcaactgctggatgtttactttactcgatctttctataagcatatacttggtgttaaggttacataccatgatattgaagcggttgatcctgattactataagaatttgaaatggatgctggagcttggtgtacagtctcatcagtggggtgagagggatgaaagtgttggtagtgagagggacagagtgacttggaggcagcataatgatgtgagtgatattcctgacctgacatttagcatggatgctgatgaggaaaagcacatactttacgagaagaatgagacaaattcttatgaattctcctatccattgcttttgccatctcccaaaattctgaaacaggtcactgattatgagcttaaacctggaggaaggaacataagggtcacagaagaaacaaagcatgagtatgttgatcttgttgctgaacatcttttgacaaatgccatccgtcctcaaattaattcctttctagaaggttttaatgaattggtaccacgagaacttatatccatatttaatgacaaagagcttgagcttctcataagtggtcttccagaaattgatttggatgacttaaaggccaacaccgagtatactggttatacagtggcatcaaatgttgttcaatggttctgggaggtggtcaaagctttcaacaaggaagacatggcaagattactgcaatttgtgactggaacgtcaaaggttcctttggagggttttaaggccttgcaaggcatctctggtccacaaaggtttcaggttcacaaggcatatggagctcctgatcgacttccatcagctcatacttgcttcaatcaacttgaccttcctgagtatacctctaaggaacagcttcaagaacgtttgttacttgccatccatgaggctagtgaaggcggttccaccatttgtgtctccaacttgtcatttggaggtcagacatctctttcctccaagaagaggaagaggaagagaaacgaagagcaaaggggaggcacagtgtattcagaaagagaaaacccaccagactttgctcttttggcttctctctaccctgaatttcacccttttgttcaattcttacattctcactctcgccccaccatcgattggaccgacttcaatgccactcgccaactcacgcgcgtcttgctccatcatcgccacgctctcaactgccctatgggctatgaagacagtgacaccgacaccgacacacctatcaaacacaccaaattcaatccggacacaggcgtcggtgtcggtgtcggtgtcggacaccggacacgacaagggactagagtgtggattcctgatggaaacctctgtccaactgtgccaaacaggtgcaattacattcattggcttcaacaccttctctcatctgacatcattccaaacaccatttcaagtgatggcaagttcaggggatttgacattggaactggagccagttgcatttacccccttcttggtgcttctcttcatggatggagttttgttggatcagatgtgactaatgttgcaattgagtgggcggagagaaatgttaatagtaatccacatatttctcaactgattgaaatcagaaaggttcaagacaatgcaagtgatccctgtgtggaagttgaagagtcggtgaatggtgacaacattgctttgtgcgggagtactgatgtggaggtagctcctttgcctcttgatttgcatgcttgcgagaataggaattatcatgggcctcccatacttgttggtgtggtaagggatgatgagaagtttgatttctgcatgtgcaatccaccattttttgaaagcttggaggaggctggactcaatcccaaaacttcttgtggtggaacttctcaggaaatggtttgccctggtggtgagagggccttcattactcgtattattgaagatagtactcaactgaaggatcaatttcggtggttcacttcaatggtaggtaaaaaatcaaatctcaagtaccttacatcaaaactttgggaggttggagttgccgtagtgaagacaactgaatttgtccaaggcaggacatgccggtgggggcttgcttggtctttcttgactcccctgcagaagacaccagtttctttgcccgacaagaaaaacacgtccttcatgcttgagggtcttcaacgccaatatgcagccattaatgtgttggaagctgtcaattcttatttctcttcacatggcctatcctgtacattgaatacctcctctttcaccgtggatgttgcagcagcaaaagatgactgtgatttgatcttgaggaatggattacccattatcaataaatccatcgattgccaacctacaagagaggcatctagtggatcaagcttgaatctctcttccgagagattatgcttttgtatatcggtttttcagcaaatccctgggacactgttggtgaaagcactttgtctagaaatagatttggaggaatgcgttctttgtctgtgcttcagagatatccttattggccataaatgataagcatcccaatgagtcgatgaggcattctgatgttggtgatcaatttattctgatgttctcccagaaaaaaatggctagaatgttttttcccagattctgatgttggagaatctgccatgcctagtttgggagctttctgacagccttcatactgtgtcaagcttttgcagtctggtccaatcttaatttatatgtagtttctatggccaaacagccttttatagttctagaatttactaataagattgaggatgtacatattctggaatacataattgatgcttttgctcccgaaagaaattgttcgagtattagaaactcttttttaagtaaaatgagcatacttgatatctaa

SEQ ID NO: 3163 - DNA, 965 bp, Glycine max
  Clone ID: PAT_MRT3847_102861C.1
ttttcaaggctctctctattgtttaggttccaaagtcaatatacaatttctgatctctgcatctcaatccaatagatcaaatatgccttcaaacgatggtatagttatcgtggtcatgggtgtcagcggtgctggaaaaaccacaataggtcagatgctggaaaaagagttgaaatacaagtatcttgatgctgatgattttcacttagaatcaaacaaagaaaagatgcgaatgggaatccccctaaccgatgaagaccggatgccatggcttgaatcgctatgctacgccataaaagaatacttgaataacaaaaagggtctggttcttggttgttctgctttgaagaaggaatatagagaaattcttagatcaggtgatactagttataattgggggacttatgcaagtgctgtcaacttcattctcttggatgctcctgctgaagtgctaagtgttcgagtgaataagagagctgcagaaggaaaacattatatgcctgcatcgcttttgcaatctcagttagatttgcttaagattgatgagtctgagggagtacttagagttgatgctactttgagaccccaagacattgtaaacaccattctaaacatgaatcagtttcagggctgtttcaatgttgattttgttgagcctcattgataaattgggatcattatttcaggtttcaaatatagtttgtacaaataaatggaagaatgggattatgcatgaaagaaaggttgaagggaatggttcagagtatgataaccaatagtaaaaaaggagcaagctgtaaatatgaatttttaacattccctggattgattcatgccattctatttctttttcaccatatgatgtatatatagaaaattgcatgtctcaatagaccattgttttgtaactgaattttttcttattatcatttaattaaactttaatgatgtggcgattgaacaaa

SEQ ID NO: 3164 - DNA, 350 bp, Glycine max
  Clone ID: PAT_MRT3847_102862C.1
gctaagcatgcggctcgagtttacctcattggacggtacatactcactcttttttttcaaaactcagactaacacaaatacggtatactgctccaaggcagggtccgaacacctaccctaaaatgactactacttgcaaataattcccatttttttctgcgaaactcaaaactgttcattatgaagagttataatgcgataagcttgatacaaagctgtccaccttcaaacgaacactagcactagccggactccactcgagcccggaatgggatatgtacgtctttgtgccgatcattaattccggacatataccaggggacatgccaatcttccctctaaagggttcc

SEQ ID NO: 3165 - DNA, 386 bp, Glycine max
  Clone ID: PAT_MRT3847_102863C.1
taaaatactcaatgctatcaccaatcaaagcctacttctccatttttctactaccatatatctacaccagacaatttcttacttcgctgagggattggcatccaaacctcctttaaaccttaatatcccttattttaaaaactctcattcacaaccaaattaattaccaataatcatctcccttttttatactagctaactccctataaactcaattataaactcatatcatccctgtaatactattacactttcttcttactactccctacttataaaaatacccaattacagaaaaccatctccatcattttattaatccatatccatattatctaaccttttattcacatccttataccattcaaatgatctccaataccata

SEQ ID NO: 3166 - DNA, 606 bp, Glycine max
  Clone ID: PAT_MRT3847_102864C.1
cgacccacgcgtccgaagtgacgccaacaatccccattgcccaatcccgaagctgcggcttcctcattcttgcatcacatatcccaatcgcttctgattcgaattccatttcaatttcgattcgacgggtttttcatttgataattgaagagaaggtttgaattgagattgaggagtttatttgagggagagggaaatggctaacaatgcagcagcctgtgctgagagagcaactagtgacatgctgattggtccagactgggcaattaacatagagttgtgtgatataattaatatggaccctagggagcaccatgttttagggactggatcaaaatttattgttggagtcctcggggacttatgcatgctaagggaataccatactgacaacttgggcagtgctaatataactgatatatattttccccttaagatttttatggccggagaattgtatgttggcaagcaaaggatgcaataaagatacttaagaagcggttgagcaccagacttacgtgtgagggaaaaagaattgattttgattgatacatgggcagaagcttgtggaggaccaaggggaaaaaatccacaggaccttgcagc

SEQ ID NO: 3167 - DNA, 360 bp, Glycine max
  Clone ID: PAT_MRT3847_102865C.1
tttgggctgagttatgtgcttgcatggtcgtgagaagatgatagaagggcgacacacacacgaactcaatcaaccatcacacggggtcatctaattacacacgcgtacacacccccctatcagcatcagtgcctgcactcatacgaacatcacaacacaacacgtgaagcatcgaattaaccaacggcgagtcctgccggctctctgcttgcgccgcaacgacggactgggcatcagtcagcctcgtagccttatcgcgccgcaacgctcggccccgcccgaagcgtccacaagtacgaccaacccgtcgcgcctcgtagcagacgaacgaactcgacgcgtccaccaacccgtgagcat

SEQ ID NO: 3168 - DNA, 2066 bp, Glycine max
  Clone ID: PAT_MRT3847_102866C.1
gttgttcagttgacattcaatatctatttcaatttaccatataaacgaactcgtcatttaatcaagagtcaaacaagaatgtaagattccacacaagtattacactaaaatataatatcctgccaaataaagttttaagtagagttgcatctacatacattgtacaaggatggccattaaggataacaaatacgtaaataatattgcacagtttagctaatacaaagaaccagtccctagaggaaatctcggtcattcagtctatgaacgcatccttacattgcctatcaagttttattgagttgcaagttaatgaaccttagcttgttccaaagtccaaattctcccacctgaagggtcggaacatacatataacttcgggggagcttttaaacagaagggccacacagacacagacagcggctattgccaccattgagagcattgcaggtctgtataccaaagacctgcctactgcagttctgcaagaaattctcttgtcacaaagcttacagtgcccttggccacgtattacttcagcctttccaatctcaaaggtagtggataactcattttgcttctcgtttgtattgctctccgtcgtattgcttggaatctcaaccaccacatgagctgctccttgtctcttattaatttttttctgcactaagtgaatgtaagcataatggccacgtaaacgggcataatcctcaggtgtcgagcctgtgctgtcacgagcatttttccatgcttcaattcccaccatgcaaggatcattagtcaaagcatcaagtacatcctcagaaccatctttcccggctgctatatggagtggtgtcaaaccagcaggaccaacaacatcaggtctaaacaagaaggtctgattctcgccatcaaccagtgccttgtcttcaggtcctagtttatcagaaatattctcaggaacatatctcaaaagccactccactaaatgcttgctatttctccttacagctttgtgaaggagacccatctctgaaagcgcgagatacaaggaaggatgatctcctgtatttacagttccatcaaacagtaggttcaacagttttctcactgctgcacaccaatcatgatccatggaaaactcaataagccacttgaaccgtttcaatggaaagagatccacactagaaaccatccttaatttcaactggcttctgtgaagaagccaacccatttcatgaataaaatccatggcttgatttttggctttgatttttcctgccccttcaatatctggatcagtttcacttaattctagaagaggctcaagtgtacagatttctgagcaaacatcctcctccacaacaatgaaaggaaaaaagctgctactcaaaccctggtcctcaatctcaataaatcctcttccattcatcacagggacagagcatgaaaactggacacactgaagttcatcaggctctttggagctttgatccattgacatatgagcatcttcacagaccagatatttcccttctaaagcacacattaacctagtggcagggcgtatcaggttgacacccttaacagaaaattgagctctctttgatgctggtgcagcaattggactaacagtcaaaatcttgctataattattacttctgaaaggtaaggaggtatctatgacaacttgaccattaaaaatgaaggccatctgatgctgcaccctgatgtgaacccatccgtttctccaaaaagtatcatctgagacatccaacagcctattcaaactggaagtcagatcatagcaaagttcctcccacaacgcctcagcctgacgcagataaatggtcaaaacaatacaaccaggccgtatgtagctctccatatcagtaggactgtgagataaccagtcaagaatctgtgctctaagtacaagaggaaaatcatttggctctttaccgaagagcttaaaaacaattcgatctgtgcgactctgagcttctccactggaactggaaggagactgggcagatgcagaatcagaatttccacctcgagccgattcggctcgagctcgagcc

SEQ ID NO: 3169 - DNA, 283 bp, Glycine max
  Clone ID: PAT_MRT3847_102867C.1
tcgtaaaaccaacaggggaaaggcacgcaggggggcagagaaaaagcaaagccccgacacaacccccacgggcaagggcaccacgccgggagcaggagagccagacgccaagaacaaaggagaaggccacgacaaggaacacggcacggaaacacccggaccggcgacggacgaagccgaccacgaagcaacagacggagagccgggccacacgcagggacacaacacagaaggacacaacgacgcaagggagaacccccacgaaagaagaggcaacgcaaaa

SEQ ID NO: 3170 - DNA, 1429 bp, Glycine max
  Clone ID: PAT_MRT3847_102868C.1
gcgtccgctggagccccaaacgcagttgagaaatgaatttcgcgagaaaccggagagaagaaagaaggaaaacagagagagcgatttcccaacaatggaggagctattcgtagcagttctatcgatgcttctcgtagcagcgttgatcccactctacctatggaaacgccgtcaggattcgaaacctccccctccccaccgcgacgaagctcctcaggctccgcggagagaaacggtggcccgcgccaccgccactcgtcgcatgcgtcgccgacctaccgcgtctggagctagtacttcggcagatccacctgcgacgcaagaagaatctgctggtgagagtgacgatgaagctgctggtggagggtattatgaggctaaagcaccaaagaaaaaggaaactaaaaagcaagagagggaagcacggcgtcaggctgaggaagctgcacgagagtcaaggcaggcaaaacaagatcgttattcagaaatgcggaggttgaaggatgaggagcgtgaggcagaggagcgtaagttggaagaggaagccagagctcagaaggctaaggaggaggaggctgctgcattagagtttgagaagtggaaaggtgaattttcagttgatgatgaaggtacccttgaagaagtgcagggtaatactgaagacttgctaggcaattttgttgaatatataaagaagcacaaatgtgttcccttggaagatcttgctgcagaatttaaattgcgtacacaggaatgtatcaatcgcatcacatctctggaaagtatgggtcggctttcgggtgttatggatgatagagggaaatttatttacatctcccaagaagagatgaaagccgtcgctgattatattaagcggcaagggagggttagcatttcccacttagcaagtaaatcgaaccagttcattgatttggagcctaaagtccagtactctgaggacattaacattgcggaggagataactgtcaactgagtttgttttttgacttgggggtgcgaggaaaatcgtgttgtacataaaaaaaaaagaaattatctctgttttgcctagggtttggtacatgactttgaacagctttagtataacagcaatttcagatttttcctgccgaaagtacacaatatagaaagagaatgtatttcaagaggtagatttacgtaagatgaaattactccccatcacactattttttgaaattgtattacattttgttggctgtaacaagtttagcattacttgcagatccaaaaaaaaaaaaaaaaaaaaaaaaaaaaaaaaaaaaaaaaaaaaaaaaaaaggggggaaaaaaaaaaaaaaaaaaaaaaaaaaaaaaaaaaaataaaaaaaaaaaaaaaaaaaaaaaaaaaaaaaaataaaaagcttaattttttcctcacctttaatctt

SEQ ID NO: 3171 - DNA, 215 bp, Glycine max
  Clone ID: PAT_MRT3847_102869C.1
cattacaccaataataaacatcctttaaatccttctacacaaaattcaaacccatttcaactataaacttgtctttttttttcactactccattctaacagttatcattaaatcatattatcctattacattatcctatatgatcattatatcacactcaacattttacactcttccctcacttatatacactaccacctcatatatctcacata

SEQ ID NO: 3172 - DNA, 1501 bp, Glycine max
  Clone ID: PAT_MRT3847_10286C.1
ccacgcgtccgaaaaaacaaaaactccatggggtggggtcgtctcggaaggcatggctcagattccgttgacggcgcggtggccggtcctagcacctccgccaccgaaccacggcggttccctctcgcagctcagccggaaatgatgcgcgccgccgagaaggacgatcaatacgcctccttcgtttacgaagcctgtcgcgacgcatttcgccacctctttggtaccagagttgcggtggcttaccaaaacgagacgaaacttttagggcagatgctttactatgttctcactactggctcgggacagcaaaccctgggagaggagtactgcgacatcactcaggttgcaggaccttatggacttcctcctacccctgcgaggcgtgctcttttcgttgtatatcagactgctattccttatattgcagaacgaattagttctagaattgcttcgcgaggcattgtccttgctgactatgagtctgctgagggttttggtgaaaatgcccacaggagccatagtgctcagatttctggcaccagtccttcatcctcgtctggccaatctgttactactctgtcaaggttgaaggggaaaatgagtgcattttggttgcatttggttcagagatggcctacgatgctcccttttgtccgtgagttgttgcagttggttctccgtgctaacctcatgctattctactttgaaggtctctattatcatatatccaaacgtgcggcaggcattcgttatgtatttattggaaaagcatcaaatcaaaggcccagataccaaatactgggagtatttttgttgattcaactttgtataatagctgctgaagggctgcgtcgaagaaatttaacttcaattactggttcagttcatcaagcatccttcgcaacccacgatagatcagcaggacatggtttgcctgttttaaatgaagagggtaatttggcaactccagatattgacaaaagaagctgggtctctgaatcttcatcttctgagtatcatgcaaccagtggggttagcaaatgcacactttgcctgagtaatcgtcagcacccaactgctacttcatgtggccatgtattctgctggaactgtatcacggaatggtgcaacgaaaagccagagtgccctctttgtcgcacgcccataacacactcgagtctagtttgtgtatatcattcggacttctagagtctgctcctctttacgtacatatatagaagatagcattaaaggcagcattttcctcatcttggatcttacaaggactgtatgaacatttaagcaattcaattttgtattaggatttcaataatcaatctgattacactattaggtccgtgtttcatctcttttattatgcaataatgatttttttttttttttggaaaaagataaccattatagcacaacactggatggtgattctgcattaattatttctctccagtgggtggtgctaatgaggtttatgccagta

SEQ ID NO: 3173 - DNA, 255 bp, Glycine max
  Clone ID: PAT_MRT3847_102870C.1
agcacgcgtacgtctaagcactggccaacacattcaaggactgttgttcttcaagcctcatgttattatgagtccttgagttctaaggagacaggaacctacgtctggtggatgaatcatgaccgtgtgatcagagcgtgaggcacggccctctatgagttcctatctggagtactcttatatgcgactgtataggatcgttcttaggacactaacatgagcctagtgatggtcatactagaagtctgacacagc

SEQ ID NO: 3174 - DNA, 293 bp, Glycine max
  unsure (1)..(293): unsure at all n locations
  Clone ID: PAT_MRT3847_102871C.1
gtcctgtgaggatgcttttttctatacagcaactttctattgagccggtttacaataagctcggaaagatggagaaacagtccggccttaaaatcattctncaaaaaaaactaatgacccggaaaaagaattgtgggggagccttctaaaaaccaaacagcattggaatggtgcgacccttcaacaaggtggaaattcggctggtaaaagacagcaaaaccccccttgtattgactggtttgaaagaatccagcccaaccaccctggctaaaaagaacccccgggacactgac

SEQ ID NO: 3175 - DNA, 2196 bp, Glycine max
  Clone ID: PAT_MRT3847_102872C.1
ctttggaggaagaagagaagagtgtttttcttgacattgcttgttgcttcaaaggatgtgaattggaagaggttgaagatatacttcatgctcattatggagactgcatgaaatatcatattggggtgctgattgataaatccctcttaaagcttagtgtgcatggtacaatggtgacattgcatgacttgatagaggacatgggtagagaaattgtacgacaggagtcaccaaaagatccagggaagcgcagtagattatggttccatgaggatataattcaagttttagaagataacacaggaacaagtgaaattgaaatcatatgtctgaatttccccttacttgacaaagaagatatagtagaatggaacagaaaggccttcaagaagatgaaaaacctcaaaactctgattattaaaagtggtcatttttgcaaaggtcccaggtatcttccaaatagtctaagagtattggaatggtggagatatccttcacatgatttaccatctgattttcgttcaaagaaacttggcatatgcaagttaccccattgttgttttacatcacttgagttggttggctttttaacgaaatttatgagtatgagagttttgaatttggacaaatgcaaatgtttaacacagatacctgatgtatctggtctcccaaatttagaaaaactttcatttcaacactgtcaaaatttaactacaattcacagttcaattggatttctatataaacttaaaatattgagtgcttttggttgcaccaagcttgtgagttttccacccatcaagttacctctcttgaaaaactcaatctctcgcgttgtcatagtcttgagagttttccagaaatattaggaaagatggaaaacataagggaacttcagtgtgaatacacttccataaaagaattgccatcttcaattcataatcttacccgacttcaagaattacaactggctaactgtggagttgttcagttaccaagtagcattgtaatgatgccagaacttactgaacttattggttggaaatggaaagggtggcaatggctaaaacaggaagagggtgaagaaaaatttggatcatcaatagtatcttcaaaggtagaattgctttgggcctcagattgcaacctgtatgatgatttcttttcaataggtttcacgcggtttgctcatgtgaaagatttaaacctatcaaagaataatttcacaatgcttcctgaatgcatcaaagaatttcagtttttaaggaagcttaatgtgaatgactgcaagcatcttcaggaaattagaggcattccacctagcttaaaacatttcttagcaacaaactgtaaatccttgacttcctcaagtacaagcatgttcctgaatcaggaactgcatgagactggaaaaactcagttttatttgccaggagaaaggattccagagtggtttgatcaccaaagtaggggaccttcaatttctttctggtttcgcaataagttccccggcaaagttctttgtcttgttattggacctatggatgatgactctggaatgttaatatctaaggtgatcatcaatggcaataaatatttccgtggtagtggttatttcatgatgggaatggatcatacatatctttttgatcttcaaataatggaatttgaagataatttgtatgtacctttagaaaatgaatggaaccatgcggaggttacatatgagggtttggaagagacctcaacccctaaagaatgcggaatccatgtattcaaacaggaaagtagcatgaaggatattcgatttgctgatccttatggcaagagaaaattaggcaatgatcgcaacagtttggaatcacaaaaccaacaattgctaaaaaaacataggtttgtggacatggaagtttcatagacataatatgtgcaacaacaacaatgtattgtttatggtcacatcatttgagttgggcatgtagctattttcatttattcctgctacaacaatgcaatcattgtatgataatgtgagctttgattcaaattcaatggaatcaaagcagataaggggcaccattagtgtcataggtaaattatctggcgtgctctatcacactaactgattttaatttgccttattattttgatctacataaatggaacaaaagaaaagaagtatatatgtaggaattc

SEQ ID NO: 3176 - DNA, 192 bp, Glycine max
  Clone ID: PAT_MRT3847_102873C.1
catcattgatagttagaccaggattctattgaaagaaattacagacactcactcacgagtctattctcatatagatgggcgtgcgtcatataacccaaactagtaagtatagatcttatacagcatggttccctatctaagttaaaggaatagttgactctgcccgtgtgaacttgagtctatgacatctta

SEQ ID NO: 3177 - DNA, 252 bp, Glycine max
  unsure (1)..(252): unsure at all n locations
  Clone ID: PAT_MRT3847_102874C.1
ttaaattgtntattganngtggganctgattctgatgtctctgacgaggatggngtctngacaatacaagttgctgctgcaangggntatccanaagctgttgagatattgtnccccttgacgnccaaagtagatcgtattgcctacttggactgttgatgggatncttgagnatatgcaatccgnaactnganagcaanaggatgnatcgattaatncaaangacactantcagcnccaggacgcngnntt

SEQ ID NO: 3178 - DNA, 211 bp, Glycine max
  Clone ID: PAT_MRT3847_102875C.1
ccaatcttccaccgttcaattcgctgcctcacggcaaagggtccttgaatttagaccccttggttgcttctcagttttgcgaattccatagatcaaggtcagccccgtcaaaatccctcagagaacagcgtctcgggggaaaaggtcaccgaaggaaaattttgggaaactttgtgagttatctgtctcacgagttctcttcattggtcac

SEQ ID NO: 3179 - DNA, 251 bp, Glycine max
  Clone ID: PAT_MRT3847_102876C.1
cggggttgagaggactgtggttacttggactttgttgatgaaatgttactgcaggcagggaagggtcgatgaggccgagaggttgcttcggaggatgaaggaggatgagggggtggttgtggatgatcgcgtgtatggcgtgttggtcaatgggtattgtcaggtggggaggatggatgatgcggttaggattcgagatgagatggccagggtggggttgagggtgaatgtgtttgtatgtaatgcgttgg

SEQ ID NO: 3180 - DNA, 592 bp, Glycine max
  Clone ID: PAT_MRT3847_102877C.1
cccacgcgtccgatttacctcttgagagaaaatgggatgatacatgtcttcataaagttgtttcttgatctttatcattaacaaagtatatgtgaggttgtcttatgtttgtttagtaagatacaagtgtctaaatattctgcttggctagaccctttctaagtttatacttgcactaattttgaaattcacatttattgatgaagaaacattttttgtttgtttttcttttccagcctccaaatgagagagtacatcagattatttcaaggactgcaacatttgtcagcaaacatggaagccaatcagaaatcatcctgagggtgaaacaaggagacaatccaacttttggattcctaatgcctgatcatcatcttcatgcgtattttaggtttcttgttgatcaccaagaacttctgaaagttgacaaagatgatggaagctcaactgaggacatgaataggactctggggcttgatcaaacaggtggtgcattgtctttgcttggatccgtctatggatctggagaggatgaggatgctacaactgagaatacttgtgatgttgagaaaaaagaatgtgagggagctgt

SEQ ID NO: 3181 - DNA, 360 bp, Glycine max
  unsure (1)..(360): unsure at all n locations
  Clone ID: PAT_MRT3847_102878C.1
ggcggggaatgcaaaagtgaatgaaatgaaggcttctatggattatgtggttcttactgttactgctcctatgaaagaggttaacaatcatgatagtgaggccatataaatctcttcctaatcataaacaaatgttgctcgtctttcttgtttgaagtcgtgtgcttttctttgctctaatatcacgtgacctacagttacgattgtacaaacaaatcaaatacttgtataaacttttaactcttgtccttttctttgttctaatgtactgaattagatttgcgacaaaaacgtattctagtttatatctagttctgctctttacattntgtcgaattcccaatgttcttttctgcttac

SEQ ID NO: 3182 - DNA, 361 bp, Glycine max
  Clone ID: PAT_MRT3847_102879C.1
catatcggatattccctgtcttatctccaacaatatttacgaggaattttttaaggatttcaacccattaaacatctctgattacaactccatctttttcattgaacacccctccgtctctgctattcttcaccccgttgagcctaatattcttctcaaacctgagaagatgaaaggcactaaacatgagattattgaatatgctaacattgcaattgcttaagatcttaacatcttgaatgatatgatgattaacttttctgatgatataattaaaaacactgctgaaagactactatggaccgcgttggaaggacttgaatctggagcttccattgaaactgtagctctactcaccgtg

SEQ ID NO: 3183 - DNA, 324 bp, Glycine max
  Clone ID: PAT_MRT3847_10287C.1
tttgtccggtgtgactgacgacaaggcgcaggtggcgtcatgcaacttaacaagggtggcctacacgaacggatcctcaaatctacacaatgaaggtataatgcttacggcgagaggcctgctgaaccaaagcgcacttgatacttttagccagatcacaaagaatctgctcaaaaatgggtagaagctaccataaatggaggattggcacttgtcagctatgaactcgatgatgctggagcaagggcgcagagtgcttcaaaaaggctgacattagtagaatttcagattaagacatacttggaagtgaagggaactggaact

SEQ ID NO: 3184 - DNA, 568 bp, Glycine max
  Clone ID: PAT_MRT3847_102880C.1
gtaccatcaaatattccagcacctgcagaggcaaagctaacaccatccatgaaggatgcattgtttttgttggcctttgatgttataagggacaggaaaatcaacaccatagtgacgatgatttgccttagcaatggaaagagtcaagtaattgttgttgcccacatcaacaagtgagtctccaaacacataaacggcagaaaccatttcagcctttgaggaaccaaagctgaataagacgaagaaggcatggacaataaggaaagctcttttacccatcttggtgggtttgtttgagtgtactccaaattgtttttgatttagggtgtgtttggaggtagacaacagttagattgatatttaaagataccacaaagctggatgaaaggtacacgttacgtgtgaaaagataaatttgattgaatgctagtgagagatagtggagcaaagagtattttccagatactccatccacttattttattgtcaatatgatgtgtcatatgttaatgggacaaacattgtcaacgtcaaaagtaaaattcttaaacttgttgccttggttttt

SEQ ID NO: 3185 - DNA, 1452 bp, Glycine max
  Clone ID: PAT_MRT3847_102881C.1
aaacctccctaaatcaaaaaacaatttggagtacactcaaacaaacccaccaagatgggtaaaagagctttccttattgtccatgccttcttcgtcttattcagctttggttcctcaaaggctgaaatggtttctgccgtttatgtgtttggagactcacttgttgatgtgggcaacaacaattacttgactctttccattgctaaggcaaatcatcgtcactatggtgttgattttcctacacacaaaccaacagggagatttagcaacggcaagaatgctgcagattttgttgctgagaaattgggttttccaacttcaccaccttacctgtcccttataacatcaaaggccaacaaaaacaatgcatccttcatggatggtgttagctttgcctctgcaggtgctggaatatttgatggtacagacgaacgttatagacaatcaataccgttgagaaaacaaatggactactactcaattgtgcatgaggaaatgactcgagaagtaagaggagcagctggtctacagaagcatctctcaaaatcaatattcgttgtggtgattggcagcaatgatatatttggatactttgaatcatcggatcttcgtaagaaaagcaccccacaacagtatgtggattccatggctttctcactaaaagtgcaactacagcgattatacgatcatggtgctcgcaaatttgagattgcgggagttgggacacttggatgctgccctgatttcaggctgaagaacaaaacggaatgctttatagaagccaattacatggcggtaaaatataatgaaggccttcagtccatgttgaaggaatggcaatcggagaatggaggcataatctactcctattttgacacttttgctgccatcaacgaccttattcagactccagcttcctacggatttagtgaggtaaaaggtgcctgttgtggactgggtgagctgaatgctagagctccctgcctgccattgtcaaacctttgtcctaacagacaagatcacatcttctttgaccaattccaccctacggaggcagctgctcgtttatttgttaataaactttttgatggcccttcaacttacacctctcccattaatatgagacagctagtagctgcctagctgaagctgacgattgattttagcccttcatcaatgacatttttttttatctaactcaatatcaaacgccaagtgtggtgttgggacgaaaaaaatactactagatttgttaccccgtagagtaatctaagtaggcttcatgaaaagtaatcactggctagccaaatgtattattttacttgaagtagattatatacttagattaacatatgttgaacgaaagagaagtaaattaaattgtccccaataataaaataaaatagaagtttaatgtcgagtttataagaattttatttgtaattagttatg

SEQ ID NO: 3186 - DNA, 2061 bp, Glycine max
  Clone ID: PAT_MRT3847_102882C.1
aactgtaatgtcgtgcgtgctaccccaaaccaaacagataaataaacagatatcacgccccactggtgaaatagagaatggaagcgctaaaactgtgcaatctaacatggagcccgttgaagcacttctttcactctcacgcatttcgtcgaacacctcccgtgctcgttcttcgcgcgtgctcttcttccaccgccgccgccgacaccagggccgccggtcgcggacgccggagctcggagtcgtcgtccaccacttcgacttccgatagggacgccattcgagccattcgcttgaagaaggttgaagaattgagaagcaaggggcttgatccgtatgcttatgaatggaacaaaactcacggtgctaatcaactgcaagatatatacagagatctaggaaatggtgaggaaaaaaatagtgagaatgaccatgtatctgtcgcgggaagaattgttgctaggagggcatttggaaagcttgcctttctgactctaagagatgattcagggacgattcagctctattgtgataaggagagactcataggtgatcagtttgaacagttaaaggcccatgttgatattggtgatatattaggtgtaagaggaacaataaaacgaactgaaaaaggagaactttctgtgtctgttctatcttttgcaatccttacaaaatctctgcttccactgcctgacaaatatcatggactaactgatatagataaacgttatcgtcagaggtatgtagatatgatcgcaaatccagaggtagcggatgtattccgtagaagagcaaaggttgtatcagagatacggaggacaatggattctttaggttttgttgaagttgaaactccagttttgcagggagcagctgggggagcagaagccagaccatttattacataccataattctcttggaagagacttatatctgagaattgcaactgaattacatcttaagagaatgctggtgggtggttttgaaaaagtatacgagattggtcgaatatttagaaatgaaggaatttcaactcgacataatcctgaatttacaactatagagatgtacgaagcatactcggattatcaaagcatgatgaatttagcagaggagatcgttactcgatgtgctcttgcagttcatgggaagcttaccattgattatcagggagtcgagatatgtctggaaaagccctggaggagggagactatgcacaatcttgttaaagaaactgctgggattgatttcaatgaattggcaaatgatcttgaggttgcaaagcgagttactctggatacccttggaaagaatcttgataacaaggataaaggttccattgaagcatgccaatccgttggtcacctccttaatgaggtttttgagagttttgtagaaccaaagctcatccaacctacatttgttttagactatccaattgagatatctccactggccaaaccacacagaagatccacaggtttgactgagagatttgaactcttcatttgtggtcgtgagttgggcaatgcattctctgaattgactgatcctatagatcagagaggacgcttagaagatcaaattaggcagcatgaaaagaagagagcagctgtttcaacaaatgacgataaaaaggaaggaacggaagatgatgatgattcatatgaagtgactcttgatgatgactttctcacagctttggaatacggaatgcctccagcttctggaatgggacttggaattgataggctggtgatgcttttgacaaattctcccagcattcgagatgttattcccttcccagtactcaaggtccagcaatagtgataggtttggagatcactgtgccgtccatcatcactatttgctcttttctaaatgtcttaattatatttgagttcatttgtacaacatgtatcatgataaggttattttttattccctcctcaaattatctatttgggagttttgatttgtggaaaaatgtcactttagaatatcaataaaggattaattgtttttcagcaaaaaaaaatgatcccaaatattaaca

SEQ ID NO: 3187 - DNA, 302 bp, Glycine max
  unsure (1)..(302): unsure at all n locations
  Clone ID: PAT_MRT3847_102883C.1
tagatcangttttatttttatccaccaccccacacaacacccacctgaggaggctcttttttcagaagaccggccctccttttgatcacgtcaaacaaacgctagatcttcagctctcgtccctcttagcataaagaccataacaggccctattagaccaaaatccttacgcactcacaacgaccagaatatggaaatagacaatgctaaccaattcttggagcttgagcacagctcattcatgaattctatggcgacaccagcgaacgcccacctacccaatatccccccaaactcaactt

SEQ ID NO: 3188 - DNA, 412 bp, Glycine max
  Clone ID: PAT_MRT3847_102884C.1
agcgttcgcccacgcgttcggtcttaaaagccacgcgaaggagcaaaagcttaacctccatatttagctgtgtgcgtgaagaaaaccatgagacataacctaatatggcttactattttttcctcttttgtcctcgttcctctcgtgatcttgaattcattcaacacctttcccaaattaagctatagccaataaaacaaaatagtataataattttcattaatgatgagcagcggtagtggtagtggcagcagtagtggtagcccttgtggtgcttgcaagttcttgaggaggaagtgtattccgggttgtatatttgctccgtactttgattcagagcaaggtacaagccattttgcggcggtgcacaaagtttttggggccagcaatgtgtccaagcttctccttagca

SEQ ID NO: 3189 - DNA, 183 bp, Glycine max
  Clone ID: PAT_MRT3847_102885C.1
ctagagcctgcttgaatcgagccctataccatggacctgatcgaaccatacattaatcttacgctctagatgaagcatcccactgccagtggtgcttgtgcgcaaggtgaagatcatgcataggcaaagatgatgtagcatgtgctgtgtgggacatcgacgatacaaggtacatctgcaacg

SEQ ID NO: 3190 - DNA, 199 bp, Glycine max
  Clone ID: PAT_MRT3847_102886C.1
gcgatgcctttataattgactccaccatcactcccattctcaataataccctagtggcagaacccttagacaagaagataaattagttcctctttataaaagaaacaaaacacatactgatcccaggaccgattcgtatgctagaataaaaatcccccgccgtgcttccagacagataccagaaaccgcgccagcccct

SEQ ID NO: 3191 - DNA, 425 bp, Glycine max
  Clone ID: PAT_MRT3847_102887C.1
gagtatgtgtatccaggaagaagcgttccagagtgattggagtataaaacaacaaaggattatataattgttgatctctcttctactccacactcttctcatttgggcttcattttcagctttgttatatccggtcctatggtgaaggcaataattggttattagacttacattctatatcactgtgagtgatgatgaggatgaaagtaaaaaggatagcatcaacatctacatgtccaactcaattgtctgggctgcatcagatcatgtgtgtgtgatttatgaccaatgatgttctcactacctatacaatagatccaaaaaccagaaaaggtttaaaatcaaggttgaagcaatggcagcagcagtggcttgtcagagggacgtggggttaaaagggttgggagtcagcctaataaacacct

SEQ ID NO: 3192 - DNA, 260 bp, Glycine max
  Clone ID: PAT_MRT3847_102888C.1
tgctatctcatcttgaacattaagcatcatcatcatgcacgagtagagacggagcttgggtcgtattctctttgtgcatgaatcaactacctactgagatcctgtaagcaagccatcatatgtactgcttaaattagcgctatcaaatagctgatgtgatccatatacagatcatgggctgtctcttcaaatgcaccatgcttatgagctcgttctttcatcacaaaagctctggtatatcttacataattcgagttcac

SEQ ID NO: 3193 - DNA, 694 bp, Glycine max
  Clone ID: PAT_MRT3847_102889C.1
cacactgaaaactgtgacaaatttgaagccagcacttcctctgtaacggaatgtttgagagacccttgatgacagatttggaagctgggagagtcccataccagttgggttatcaggcccaaatagggatggcaatcagattcgggtatacccgcggataacccattacactcttttataattctactttccttatatattttaaataaattatatattaagattttaattgtattttaattcaaacagcatataaatataatggataacaaagaaattaaagttaaaaaattaagaattcaattatatttatagttaaatgtatatttttaagtttgttatttaattatttaactattaacctaaattgatttatattttcaaaaattataacaataaaatctttaatatatattatgtacgtatgtatatgttgagacaaaaaaattataaaaaaaaaagatgtacgggtacgggtataatttgacacccatccccgcttaaatagtttgggtaatacccatacctgtacctatacctgatcaaagcgagtattctccgtcaaagttgggacaggttcagggcggtgcccatgggtacagggttatttgtcatgcctaggcccaaagaagtaatcacaaagattgagatttgtggggagatgaaatgttccactagtatgaaatgtttgctg

SEQ ID NO: 3194 - DNA, 299 bp, Glycine max
  Clone ID: PAT_MRT3847_10288C.1
aaaaggggccccaaccatttatttaggaagggcccaaccaggaaaaagccaaaatacctggccctaccaaagtacaaacaccgctctgaagataccattaattgggaaaacaccctacccccaaaacataatcctttaagacggaaaccggtcggtcccggttaataaaaaaaatttaaaggggggccgccccttgaatctgataaaaaaaaaaaaccatcccttaaacgtgcggctgaacgatcataatgtactaggataaccaacagccctttccccccccggcactgttgtgccaa

SEQ ID NO: 3195 - DNA, 216 bp, Glycine max
  Clone ID: PAT_MRT3847_102890C.1
ggctcgaggttttaagtaagcataccaattccttttgcttacccagatgacaatcttacggcgcgagtctctgtcccgtataaaccttcttacactaacgtgtcttttacgagatatatcacatattcgacatggaacaacacattgtctctatctctctatagagatgcattctatttgtttgacaaacacaacgaaccaaacatcacttctttt

SEQ ID NO: 3196 - DNA, 254 bp, Glycine max
  Clone ID: PAT_MRT3847_102891C.1
ccagaaaatgtctggttgtggccctaaccgggtttgctgaagcccctgcatgagcggaaacttctgtctaggctgaaaaattaccccacacttgccctacactgattcaccccccaccgatccctgggacaggggaggggccccagttaaggctcaatctgagggggccaaaaggggtgtccccgctgaaacacaatggctacaaatgtggaccaaactgctcctgcaacccctgcacttcaaagtgaggtttt

SEQ ID NO: 3197 - DNA, 577 bp, Glycine max
  unsure (1)..(577): unsure at all n locations
  Clone ID: PAT_MRT3847_102892C.1
cacaaaaaacctgctagacataatttattaataggcatatgcatagtatatctaagcatgcaagcctggattaaaacattcaaagaacaatggataagacgtaattataagggaaggctaatctgcagaactcctgaaactcacagcgcaagtgcttggacttcataaaaaatataatcgcctcattgttgaatttcaggccaaagaccaatgtgatagagctcaaatagagcaggaacataataatgattctcacacaaaacaccctttgatatggcttctggaaaaaatgaatcatattttattaaacttgcatttccactttgccagtttttttgagtgaaaaacttggaactttggccttgtcaccaaaccatactgtctgcctttttgagaatgatggccccgattgatagtgacaaactgccactgacattgactgctgtctttgaataaaaaaaactcaagttgagtagaccttgaacagcttcacgccttttgtttgcgtccattgttaggctncaagaacaaagaaagctagagataagcttaagccacacctttacattacaaatat

SEQ ID NO: 3198 - DNA, 1221 bp, Glycine max
  Clone ID: PAT_MRT3847_102893C.1
ggaattcgagcagattacccggggatcctctagagtcgacctgcagcttgagctgaagctgaattctattttgaatgatcaagtaatacttctctcttgcctgaaatacttatgattctattctttgtgccatctattattgtcgatgatacattacaattacctttttttttctttctttttttcgattttcatttttggtaatttaacttgagatatttattttgaagtttataaatgaggcaaatatactcagcaagatgttggccctacatattgagaagttacgtttaattgtttatgctggtctgtcataacatgttattcataaatcatattaatgatggatatgattataagtcatgttattctatttttatatttaaatgatttaactatcttttgcaacttagtgatacttcttttttagattgtggtccttttacaattaaagacacagatggcctaccttgatgactgggctgtacttgaaagtgatcatattgattccttatctggggctgtagaagacttggaggcgagtactcttcgtcttcctctaactggaggggcaaaggcagatattgaacatttgaagcatgctatctattcagctgttgatggcatgcaagcaatgggatctgctatctgccctttgctgtcacaggtggagggcatgaataatttaatttctgaagttgctgttgtatcatctcgggaaaaagccatgcttgatgaatgcgaagcgctactgaattttgcgacagctatgcaggttgaggaatatagccttcggacgcatctcatgcagatcaagcaagcttttgtggtaaataagtaaccaatctcagaaattcaaacacgcatgactctgacttgcttctatgctaacggctcgagcttttgtggctagctgcagccaaattccgggaaactataatttctgagacgttacaaatgatttactatatttaaaagattcttgggaatgtacggctgaaacttcaaagaatcaacacccaagattctttacccattgtaaattttttgttataggcttcttttttcccccttcctcaaatatgttgcaattatttttccattatcttcttttttctttctagtcaatgccggtggcctaagtcttccacttgtaatttttgtatcaggcaaatgaaaagaaaatgcaaacgaaagcagcaaagtatttcttccacattt

SEQ ID NO: 3199 - DNA, 364 bp, Glycine max
  Clone ID: PAT_MRT3847_102894C.1
atagtagccaagccggaaccaacccacacaccagggaacggactggaccggccaacaccccgccgcgcaaggacaacgacacccagagccgcgaacatgccagccccgacgggccgacaaccaaccaagccacgagcaagacggcagaaaagacaaacagcccccgcggaggcgacgaaagaccgaagccagaaaggacacacccgccgcagcccagtcgaacaaggacggcaacccgcaagaaagacgacaggagagccgaaagcaaaaccccctctggaacaccgctcacagaaaccagcaaaagccactctaaacgagacagccccacagacacagccatgaaaaaacactgcgcccggcc

SEQ ID NO: 3200 - DNA, 332 bp, Glycine max
  Clone ID: PAT_MRT3847_102895C.1
tttattttataaattaacttttttctttatgggaagccacaaaccgccgaccaaaaactttattatggaattttaactcataataattctaaaaaaaggcaccacctatgaagggttgttggaaacaacgcttcctgggtccaaccaaaccaagacggctaaatggcagcaattgttacaaaaacaagaggttgccaacgataagcacatcgtactggtaaaactgtaacaactgtggtttgatcaagaggggaacaaaactcacactacctacctagattataggaagtagatgtttctgctcgtaataaggaagagagttcaaagcttcc

SEQ ID NO: 3201 - DNA, 269 bp, Glycine max
  Clone ID: PAT_MRT3847_102896C.1
tttttttttttttcatatcttttttttttttttttgtactcatatttttttgagggcactttttaacacactcccacctttttattgcgaggggaacagcgcgttcccgataaagtaaaaagtcctactgaatttgggccaccaacaccccccgaataaagacacataaattcaacttttttgtggaccattgtaggaccatattcatgcccaaaaaccatcttccctacttctgagtgtgcataatttaacttattatccgggggcct

SEQ ID NO: 3202 - DNA, 141 bp, Glycine max
  Clone ID: PAT_MRT3847_102897C.1
gttcaattgacggaaatcattctcctgaaatgcttttagatagatgtttagttacggacatgactgaatcgttgagaagtgttgtatgtgcttccatgggtttccggggtagtattgcttctgctgattcctcgtgcaagt

SEQ ID NO: 3203 - DNA, 271 bp, Glycine max
  Clone ID: PAT_MRT3847_102898C.1
tacggctgcgaggacgacagaagggaccccacttattttgctagattttctttatctttactgcattgtcaacttcacaatttgtgactttcttttttccagcttcatccacgggtttgattatgaactcatggaaacactctttggatattcaagtaacaatcaaagccatgaaaaaaataggtgtctttcaactacagccaagtccaactccaacacaccaactcaattattcattctggaccctcgaaaatcccaaaacattgcaact

SEQ ID NO: 3204 - DNA, 255 bp, Glycine max
  Clone ID: PAT_MRT3847_102899C.1
gagagagcgaaggggcaaacacaattttcttgatcttctttcttattttttgtagagagagagagagagaaaatgtaggggatcttcagcagttcagtggtgtcgccgccggaggagctggtggccgctggtagcagaacgtcgacgtcgaaaacgacggcagtggaagctgctgaaccgtctcgaggatagcatggcgtcggctgtgtcgctgcaagtgggggaacacgtgcagttggcgtacacacaccacaa

SEQ ID NO: 3205 - DNA, 335 bp, Glycine max
  unsure (1)..(335): unsure at all n locations
  Clone ID: PAT_MRT3847_10289C.1
cgtccagncaagaactaataangataagcataattcttccttttttttctcttccccagcttataccacttgcaatttttctcaaaaccggcgtggtagctccattcactgtcctcaattccatgactgacttccccaccataaagaccaacatttacattacctccattgctagcaactctttaagagttcaattcatgcacatgtttccaccatttttcacgaagaagttatatactttttcctaccttccagaccttttataatccacaattttttaaatcaactttatatacctctcttaaaaacataatttaatttttttgcttttttaa

SEQ ID NO: 3206 - DNA, 221 bp, Glycine max
  Clone ID: PAT_MRT3847_1028C.1
tgttgttcacctgcgagaagacgacagaagggggggccgtttgacaaaaggacctcctgataccccaagccgaatgggaagatgtcatgaccatcaaggctgacaaaacatggcgcgtcaaagcgaagggaaatagcgcagggacccctgtttgaatgatccactaacttcatagagtccattcgctgatgaacagacaatcacccgaacaaatgcctcaa

SEQ ID NO: 3207 - DNA, 1902 bp, Glycine max
  Clone ID: PAT_MRT3847_102900C.1
cctcgtgcccggtggtgccgcggattccgcctccgtcgctggccatgcgtgctgtgtgccgcgccattcgtgctctcccgacgctcgtgcccgtgttttggggcagtcggtcgcgccgtgtccccctcctgttatggaaataccctaagttgtgggtgggattcttgaagtgtgtgcagttgacaaaaccacagtcatttggcattttgcttcagctgcctccagcacaattggaaaatgcattaaatagaattgcagccttgaaggcaccattgattgcgcatgcaagccagccagatatacaatctaaacttccgagggctgtgctggttgttctgggacttgcttccgattctcaggtttcaagtcaagcacaaactagtcagacacaaactagtcagacacagactagtcaaacacagactactcagacacaaactagtcaaacacagactggtgagacaagcagctcagacaaggacacagcgacagaaaaatcaaaggaatcgtctacagccagctaaactgtaagcaaccatgatggagtggtgtaatttactaatcgactgagtcttaggtttgatgaatgagcctacctaaccgagactagctgcaatgatctctctccagacaaaggaatgaagagccaatattgatgaatttaacatattcagatagctaaatagttgggccatgtgctccgggtttttaaccccttttttgtacgaccgcaccatctgtaagtgtgtgcaatacatgcattagaagattcatgtatatatttagggaatctgcaagcagcacttgggcgcatattacagggatcatcacaatctggtccagtgcttactccggctgaagttttaattgcaattcatggaattgatcctgaaaaggatggaattcccttgaaaaaggtcacagacgcatgcaatgcttgctttgagcagtggcaaacttttactcaagaagttcttgctagagtattgaatcagttggttgagcagattcctcctcctttactgttcatgcgtacagtattacaagcaattggtgcttttccgacactggtggactttataatggggattctttctcgccttgtgatgaagcagatatggaaatacccaaagttatgggtgggattcttgaagtgtgtgcagttgacaaaaccacagtcatttggcattttgcttcagctgcctccagcacaattggaaaatacattaaatagaattgcagccttgaaggcaccattgattgcgcatgcaagccagccagatatacaatctaaacttccaagggctatgctggttgttctgggacttgcttccgattctcaggttttaagtcaagcacaaactactcagacacaaactagtcagacacagactagtcaaacacagactactcagacacaaactagtcagacacaaactagtcagacacagactggtgagacaagcaattcagacaaggacacagcgacagaaaaatctaaagaatcatctacagcgagctaaactgtaagcaaccatggagtggtgtgatttactaatcaactgtcagtctcaggttgaattagcctagacctaacctagactaactgcggtgggctctctccagacaaaggaatgaagagccaatattgctgaatttaacatattcagatagctaaatagttgggccatgtgctcttgaccccttctttgtaactttgcattaggcaacagcctggcgtgtaaatgtataggtggaataatgtatattggaatgaaatatgttcctattttggccccaaattttgtttttctgctagaacttactgtgttcctattaaaatgtgtatatatacatgtttattccccccagtggatatctttcttgcgttagttttgactc

SEQ ID NO: 3208 - DNA, 378 bp, Glycine max
  unsure (1)..(378): unsure at all n locations
  Clone ID: PAT_MRT3847_102901C.1
atcaccaacttgcatgaaaaaatatacacaaaactttaatagacataaaaaaatgctatatctaaatatccactgatgaacttcctaattgagaccaaccatggaaaaatttaaaatactataattgaaatgaatgatacaaacacttggatacataaccatcactacaattgngagcctaaccaggaggaaccaactcagaccattattgacatactaaaacgtggataatgaacagagatattcattatatgttttgcatactaattccaaaaaaacataaaagtcagggtatactaaaaaggtactcacaaaacaatcggaaaaaaaatctttaattgcataaaaactctaaatggatcaaacaaatataatttc

SEQ ID NO: 3209 - DNA, 143 bp, Glycine max
  Clone ID: PAT_MRT3847_102902C.1
aatgataaaccaagtatatttcagagggaaccccaaaattgttaacaacgatgtactacttgatactccctaagttgaaggggaaaaaaagaaaagtaaatctggacaacaaactagttgttgacccccttacgatcaaaaac

SEQ ID NO: 3210 - DNA, 487 bp, Glycine max
  Clone ID: PAT_MRT3847_102903C.1
caacgcctgctttagcacaatctttccgagtccttgaacgtatggcaaacctgaatacgtacgatgatattgctatggattatcaatattgggaagatgctggcgatgatttccgagatggtaaaggtgttttattaccactttggcggttcagcggcttagccaatgcgggcgcttcgaaaatgacgacgggtctttgctggagtcatcaatacgttgacttttttgccgttgggtatggatcttatgactttgttcgtcaaggtatcgctggtgcccccactggcttttcacaaccaaatgccaacggaggtagtagctcgagtggcgctggcggcgcaggtggttctggcgcaggccattcaagtggtagcgctggtgggaatggcgctggggccagtggtagtggtgggtctggtgctggttcaagttctggcggtaatggtgcaggccccaatgggcaagtgacaaaattagaggaaaaagc

SEQ ID NO: 3211 - DNA, 478 bp, Glycine max
  Clone ID: PAT_MRT3847_102904C.1
gcagcgaaaggaaaataaccataaaacccctttaaaaaacagtgcacctagcgctgcccattataactttactgatggcgcaaaaaaaatacttcataggacccgccttacttttttttcgtggaaaaaagaaaaccctgggcctagacaaaaggagggcaaagcattccatcactttaacctgcaaacaaagaaacgccattagcttccccaccacttggagtgagagcaaagacctagtgaaggctccggcacaccgagaacattccaagccctgatacagtccgctggataagaagccgggcaacagtggtaaaatacacacaagccgagccaatggggctaccctgcgcatcccggccattctcattgataacccccgagaacagacctgggaccacgcaggtgacgcataccccaggggaggaacacgggcctactgggcggcaaccccatagaggcgacgcaccagcccctg

SEQ ID NO: 3212 - DNA, 237 bp, Glycine max
  Clone ID: PAT_MRT3847_102905C.1
ccaccacttcctcttctcaccttcttctcctcctaacccctcctaacccctcttcgtctcttacaccaaatccggaaataggttggccagtgaggacaataaaatcttgcttgacaagtatggctgcgatgttgacgctgatgagtacttttctcagtcgtcttctaagtccaagaggagataggactcaaaggagcaaccaaggagacagaggagggaagcaagtgctggacccac

SEQ ID NO: 3213 - DNA, 1487 bp, Glycine max
  Clone ID: PAT_MRT3847_102906C.1
cgggagcttccatcaatctttctctttgttacatgccattcattcacaatttcaggatggctgctccggccatagtttctaaaactttgctcttatttcttattctccatgccattctcatgtctctggccacatcacagccaaacttcgtaaaacattactgttttgaccaaaatggtaactacactgctaatagtacgtttcaggccaacctcaataccttgttgtccaacctctcttccaacactgaaatcgactatggcttctacaatttctcaaatggccaaaacactgacaaagtcaacgttattgggatgtgtagaggagatcttaagccagaagcttgccgtagttgcctcaacaattcaagaatccttctcacacaacttttccaaaccagaaggaggcaattgggtggtatgatcagcgcatgttgcgctactctactctctcaatatttggaattgctgattcttctcctttgtatgatcagcgcatgttgcgctactctactctacaaccaaaatgaaacaaatgtggatcagtaaaatgaagttgtcggggaccttctcagaattctaggaaacagagctgctgccggtgattctcatcgtatgtatgctcaagcaaacaaaacaggtccaagctttcaaactgtatttgctcatgtgcaatgcacacctgatttgttagagttggaatgcaatcagtgcttgtttggaaacttaatatcatatatcccaaaatgcaggcagttctgattgtttccatgcgcacaacgggagcaaatatttcattgaaatcaactcggacagttgtgaatatcctttagtgacaagtcgtgctttgtgtttctggattggcccatcctcatttcatttgcttttgtagctctgctcatcaaaggcaagagcaactcatggaaaactgccatcgcaataattgtgccaattgtctccattctgatactcttcacctttatgtgcttctttttgagacgaaggaagccaacgaagtattttaaaagtgaatctgtagctgactatgaaattgaaccaactgagaccttacaattagacttccaaaccatcatagacgcaacaaataactttgcagatgtaaataagcttggagaaggtggatttggaccagtctacaaggcttcccaatggcgaagaagttgctatcaaacggttgtccaaggattctggccaaggagatatagaatttaaaaatgaactgctattagtagcaaagctgcaacaccgaaatttagcaagggtattgggcttttgtttggaaacaggagaaaggatactggtgtacgagtttcttcccaatagaagccttgactactttatatttgatccaatcaaacgtttaaatttggattgggaaaggcgttacaagattatacaaggtattgctagaggtcttctctttcttcccgttgcctcttgggggcgcattattcatcgcgatctcaa

SEQ ID NO: 3214 - DNA, 306 bp, Glycine max
  Clone ID: PAT_MRT3847_102907C.1
ctcgagcgggttcggctcggggcttatggtggagacggatgcatctatagacgaggaacggtgtggtaggcgacgacatgcttcggggagttgaaaatagacgtggatccggggattcccgaaataggtcaacctttcggactgcagctgaatccactggcaagcaagagacaatctgatgaactgagagatcttactatccagaagagagtatggcatgtgcacagtgtattcgttaggggcatatgatttgggtgcacgtcaatcgtggtctgtgcctttggccagaacgctaatttcaggtgt

SEQ ID NO: 3215 - DNA, 270 bp, Glycine max
  Clone ID: PAT_MRT3847_102908C.1
cgcaaaataacgatcacatgatctatcctcatttagacagctgctcatcactcgttgtcagagggtactacactgtatcaacacggcggagaggcaagataaagagcattcagggctcatatgcaggaggaccatatgactcaggcaagttcaggcatgattgaaaatctaagtgctggctagctgcaaaggtgtgagccactattatagacaggaggagcaaaccgtgataaaatcgaggccaactgtgtactatactcatagcgattg

SEQ ID NO: 3216 - DNA, 449 bp, Glycine max
  Clone ID: PAT_MRT3847_102909C.1
ggttattttttttttttttttttttttttttttttttttttttttttttttttttttggagcaaaattgaatttatataaaaaaaaggggattgaactttcaccctggaaccaggggatccttaaaataccagacaaatttaaaattccctagtttatacgagttaaggaaaaaaaggggggaggggtctaaatcttattggagggaatgactacagggcccaaatatttcccccaatttccctaaggtaaatatgcaacacaacagccaccctgaggggagcgattaggaaaattggatatgtatatatgggaatggggttgggcttgaaatcaaacattatcagggttgtcctgcttggagggggaggggggcccaagaggtaaagggaaaaaggggtttaaacccaccgcccccgggggtggacttggcatcccataaactggggg

SEQ ID NO: 3217 - DNA, 805 bp, Glycine max
  Clone ID: PAT_MRT3847_10290C.1
gcagacagaaaaaaaaaaagagagagaagatgacgcggggaaagcagaagatcgaagcgcagaagcgaaacgcagagaggaatcagaagggaaagggctctcagctcgaggccagagccgttggcctcaaagtcatctgccccatctgcaaggcccaacttgcaaatcaaaaccaacttgttgatcattatgcttccaaacatccgaaggagaaaccccctgcagagaccagttagttatatttagagcaaatggtacaaaaagtccacaaagaaaaaatttctcgcccactacacacagaaaaaaagagagagaagatgacgcggggaaagcagaagatcgaagcgcagaagcgaaacgcagagaggaatcagaagggaaagggctctcagctcgaggccagagccgttggcctcaaagtcatctgccccatctgcaaggcccaacttgcaaatcaaaaccaactggttgatcattatgcttccaaacatccgaaggagaaacctcctgcagagtcaagctagttatatttgagcaaatggtacaaaaagtccccaaaaaaaattgctctctaggtgtgccttcgtgcttttaatgtaattctccctgcttgcaggcaggttgcaacatgttttaagttaatcatgttaatgtgcattattgtgagatcctaaaggatcataaaaactgcgtctatcattataagaatatcatcatgttgctaacttgggggtggtcataaaggattttactttttaaaaaaaaaaaaaaaaaaaaaaaaaccgagactagttctctctctctc

SEQ ID NO: 3218 - DNA, 390 bp, Glycine max
  Clone ID: PAT_MRT3847_102910C.1
ttattggctgaacactcgtgctattttatataggacttccgcgtcagattcaaactaagcgctgacaacttgtctcaggaactgctgcttcacatttcacaggataaggcctgatgaaaggcttggattactgcttccactctcctagctgggatacgacttcgtcggaggactttactatttctggccttaaatgcactctcttctcttcactgaaccgcatagccgttcaaagtggtcttatatgaaaaacacttgcccgttggagcagatgttggctatgataatgtgttgtgggcacaacaggcttactgagaaaacatttttcactggcagagtatggggacatatttggtgcgaatatgatacaatagcaacgcaatttagaaa

SEQ ID NO: 3219 - DNA, 348 bp, Glycine max
  Clone ID: PAT_MRT3847_102911C.1
aagggaatatcacaaaaaaggctacaaaaaaacaacaggaaacaaagacctgaaccaaacccaagaagaaatggaccaccacaaacacaacgaagcgaaacaacagaaagaaggcaagaaaccccagggaaacgaaaaaccacgcgagcaaccgcaaggcgcgcagaagcaccaccgacagagccgcacaagacaacacgcaagaaaagggggcgagcgaaacgggaacgaaaaaaaaaaggtcgccaaaaaccgagaagacaagaagccagaaaagcaacatgcgcaacgaaaccgccaggggcaaaaaaaaaaagaagggagcccaagcagaagcgggaacacaga

SEQ ID NO: 3220 - DNA, 190 bp, Glycine max
  Clone ID: PAT_MRT3847_102912C.1
agagatattgtcaagacatgcttctgatgagatctacgtggggatgacggaccgtgacgactggactggtgacccaatggcaatggagacccttgcaaagttcggaaccttgctgaacgacattgaagcctacttcccctcgaggaacaaagattcccgccttagataccgttatggaccggtgaatatg

SEQ ID NO: 3221 - DNA, 559 bp, Glycine max
  Clone ID: PAT_MRT3847_102913C.1
tttattttgttttttgtgtttttttttaaaaaacacacactttgcacgtctttgcgacaattaaaagaggtgtgggatttttcaaattagccaaccttactcaacaagaagggacatgccaaagttcctttattgatttaaacaaacgaaccaccgaagaaaaacacattttcccaatcatgcctagggtcccgcatttatagaacatctggcaggagcctgcggaacagaaaaagctggcataagaatctcaccagcactttcaaaatcttgaaagatccccaagagaatatcaaaaacggaagactggttgggattggcaataaagaaactcaaatgccatgaaatttgatttgcccactcagaattccacattggaaaaccattattaagaccacatacctttattggaaaaatcaattcccaggaatggggctctgattttgcccacttacatgcataaaaacgctcagtactggtgctgggtgctaaaaacacttgtaccaatgtaggcccaatcactcgctttagactgactgcattcccagacatcacaatt

SEQ ID NO: 3222 - DNA, 535 bp, Glycine max
  Clone ID: PAT_MRT3847_102914C.1
tgatcctttttccatcactctcagaacttcttccatctttccaaattggcctaaccgtccatacaagttcagcatgctgttgagaacataagtgtctagtttcagaccagatttacacatttggttaagaatctcctcacatttattcacactgcccattttggaataggcagacagaagaaccatgtgggacttcattgttggtgttattcccactcttttcatatctttaaaaacagcttcagcatctgaatttcattcataaggttgtgaagggaaaaaaacatgtatcagaccagtaaagtagataaagaggcaaaaagcacactaaaaaatataaattgactgaaccaagaattatcttccttcgtcaatatttttatagtgtgacttgtgtaaagccaaagagtttataagacataacttgaaagaagttcgaggattaacatgaatcatggttatcacgtgtcaaaattttctgcatcctcacttcagtgtatcttttaagtgtacaaacccagatcaagattttgaa

SEQ ID NO: 3223 - DNA, 246 bp, Glycine max
  Clone ID: PAT_MRT3847_102915C.1
gtggctagtacagttaaccagctccacgctgccctataagattgctttgtacgtggccgctctatgggatgtcatcttacttccccgtcgatgcgatgtcacacctcatcggcagtcttatcaaaacttagttcatgggaagtccctttaaaattccattctagggacatcgctgtagatccccatttcaggcgccgtgctgcacatccccctgtcgccagctgtggtacttaccaacagttccgc

SEQ ID NO: 3224 - DNA, 382 bp, Glycine max
  unsure (1)..(382): unsure at all n locations
  Clone ID: PAT_MRT3847_102916C.1
atatattatatttatttattttaatttctttctttttggctattaacttacttttttttatcaacaaacgatttacttttaacaaaccacctnnnntaaaaaacttttttctctatgactcatatacaacaaaattttattttttttactcaaacagcacacaanacnggttgtattacacgcaacacatacttgcattattctactcccaaaagcacacacttacaaataaaaattgggtcagcccctgaagaaacttaggaagcttgaagtaccttgctattcaccactgttataaacaaattcaactcgaatgcactagtaaccctaatctcaatgaaaacaatttcaaaaagaacatcactctttttaaccacatgac

SEQ ID NO: 3225 - DNA, 727 bp, Glycine max
  Clone ID: PAT_MRT3847_102917C.1
caaacattgtcactttttgtgcctagcaagaaccatcacatgggagaccttaaggatctcaatagcctaagagggaacttggaaattttgcatctggagcgattgaagttgtctgcatctgacgaaaaagataagtatgtgagagataaaaagcaccttaattgtttgactttaagatgggatcacgaggaggaagaggaggaggaggaggagaaagacaaaggcaatgatgttgatcacaaagacggaaaatcactggaatgtcttgagccaaatccaaatctcaaagtgttgtgcgttttggggtattacggtaacatgttttcagattggctttcttcaatgcaatgccttgttaagtttagcttgaatgattgtcccaaatgcgtatttatcccaccacttgatcacctcccacaccttagggttcttgaactaagaaggttggactctcttgaattcattagtgctgatgctaaaggctcctcttcctctacattttttccatcattgaaggaacttacaatctctgattgccctaacctcaaaagctggtggaaaactccaaagtgggaagacgatagaccattctttaattgcatttctaaactgcatgttcaatgctgccctaatctgcattgcatgcctttgtatccttttcttgatgaagagtggtgcttgtggattccagcgtaaagtcaatgagggatacagtgcatgctaaaac

SEQ ID NO: 3226 - DNA, 217 bp, Glycine max
  Clone ID: PAT_MRT3847_102918C.1
cggctaagcaggagctgatctcgacccgctcactaattctgagctggatgaggaggatgcggtgcttgactgcaacaatgacattgatgaagctgactaggactgcgatcgcttactagtgctcactgactccaaggaactgatcgacaatgtgccttgattcctcagtacttttcacataactgatctgatgacactgtctaagctgtatgggcct

SEQ ID NO: 3227 - DNA, 218 bp, Glycine max
  unsure (1)..(218): unsure at all n locations
  Clone ID: PAT_MRT3847_102919C.1
gtagagggnattgcatgaaagannnaantgntactgtatattatggccagtgnttaaaaacggtatnanaagaaaagaanaaaaaaatgtggaaggtgaagttattgcnaggggtgtggttaancaaatgntacaatgaaaantttctcctgnacnnttttaatgagtntataatattntctggacantttgntnttnancanagatagnccacatca

SEQ ID NO: 3228 - DNA, 590 bp, Glycine max
  Clone ID: PAT_MRT3847_10291C.1
ggctcgagaagaactgataataatgtgtttgtatatgggcattttcactaaattttatagtgcagctctgctacttctgtaatcaaaagtttcctgcggcttaattgatatctcgctattttcagctggaataaaaaaggaacttgctgcagctaggaagatgatagctgataggcgtgatcaagagaaaaaagcatatcaagagaaaaaagcatatagcaagatgttccaataacactctggttaatccacatactcaccaggtgcgactttggaagtgcaaaagtcttggtgaaaggcgaaccaaatatatcatagatatgttctagatattatagagcacctgagcttatatttggagcaactgaatatactacagctaggtgtattggttgagcttatgcttggacaggtaggtgattgatgaggggagctcctttgattctgtggtttaatatatgtaaaaataaatttgtttttattgttatttttccaacccttgttccctggtgagaagtgagttgatcaacttgctgagaacatcaaagtaatctttatgattattttctttgttggtactggtatgtctg

SEQ ID NO: 3229 - DNA, 905 bp, Glycine max
  unsure (1)..(905): unsure at all n locations
  Clone ID: PAT_MRT3847_102920C.1
tacggctgcgagaagacgacagaagggaatatcatcaacatataatagcaatatcacaaactcaactttagaaggaaatttgaagtaaacacaattatcatagtgacttctatgaaactttatgtgagccataaattcatcaaatctcctattccattgcctgggggattgctttaaaccatacatggatttgtttaattttcaaacataatcctctttacctctgacttcaaatccctcaggttgtttcatcaatatcacctcatcaagctttccatacaaaaatgttgtcttcacatgcatttgttctaaaacaagatcaaattctgccaccatagccataagtattatgattgacatatgtttcactctaggagagaaaacttcattgaagtcaattccatccttttgagtgaatcctcgagcattacttctagctttaaatctatctanttcaactncttggatgccttctttcttcttgaagatccacttgcatctgccactctagaaccagggtttttttttaatcaattccaatgtatagttgtcatggagaaacttaatctcttcactcatggaacttagccatttttctttctccttactagctaagacaactttaagagtttttggatcttcctctaaaacttcactggcagctaccaaagcaaatgctattagattagcatatccatacctttcaggttgttcgattgcccttctggttctatctcgagctagtatattgccagcttcttcttgatgtttttctatagatttctcttcatcaagaggccaattaacaacttgcgttatagcatgctagacctcagtctccaccttaaaatttaatttttcagagccagtttccttactctgatcagtgctagactgaaccatgc

SEQ ID NO: 3230 - DNA, 379 bp, Glycine max
  Clone ID: PAT_MRT3847_102921C.1
cttcttctcgtccgacgacgtcgtgcgcaaacgggggggttccgataaccactgggggtacaaaaacacgatccttatcccaccaatcaccaaaactgtatcccaagaagtgcaattgtctacaattagtggatatctgcatcttggatctggagtcatagatctgacaatctaaagaatttctggcgctctagaagattatacagcgatcagactcaaaagccaaggaggacctgcatagtgctgtacgagattgtaatcctaaagaccctgctctgaaagcctaacatgcctaagcagcaaatgaaggagtacatagtccatctactctacatgaagatgctaggacactacgcatcgtacaggtacacccactgca

SEQ ID NO: 3231 - DNA, 402 bp, Glycine max
  Clone ID: PAT_MRT3847_102922C.1
gtctcaaaagaatatgttttagctacttgcacctgccaaaggactataagccaaaaatcttcaattttgtacaacataaaccttagtttggatgaatcaatgcttgccgcatcataaaatttaaggagaaacgggcctggaacagatgagatttcctgaaaaccaccgccccatgagactggatgacaacaccgaataacatgttcaggggagcggaagctatacgatggtttgaacaaccacagacctcagccttattatgtctcggctacacgtatcatcttgttatcctaaatcttcaacattcctcataaaaacccccaacttacttttgacctcctctattgcaaccttaacagcttgttgctgaggacaaattccacatttctgaaatttagactt

SEQ ID NO: 3232 - DNA, 344 bp, Glycine max
  Clone ID: PAT_MRT3847_102923C.1
gcaaatgtaaatggttatagttgatgaagaaaaaaaagaaaaattgtctctctgaaaaaaaaaaaaaaaaaaaaaaaaaaaaaaaaaaaaaaaaaaaaaaaaaaaaaaaaaaaaaaaaaaaaaaaaaaaaaaaaaaaaaaaaaaaaaaaaaaaaaaaaaaaaaaaaaaagggggcgccccccacctagggaccccgcccccccggaaataaattccggaccgggcccggaaggcgaacaaattttcctaaaagggagactaataaaacctgggcaaaaaaatggcaaaaccggttcccgggggaaaatggtattccgtcaaaaatcccacaaaaaatacaaccc

SEQ ID NO: 3233 - DNA, 352 bp, Glycine max
  Clone ID: PAT_MRT3847_102924C.1
cgacctaccatgctccctatacctgagctcggcctttggtttttgctttatctaacaagagtcatccttttataggaaacccgttaccatacaccattttttggcaggtgctaagagaatgttaaacctgacgctggagttccatcagccattacgatgcatggtcacaggcggtcggctagaactaaatgagcaacctccagttacagttgacattgtcttggtgaccaacctgcccaccctacatatcctggtgctcaggatcacaaaatgggtgctgcgctgatcattgaaacggtcgatccagagtgactgaccattcatgagaacgtctatctgagcacgatatacg

SEQ ID NO: 3234 - DNA, 655 bp, Glycine max
  Clone ID: PAT_MRT3847_102925C.1
aattcggctcgagatttgccataatttggatcacgaaagaagggtatctgcacttcagaatttggcaagtttgtttgctccctggcccaagatttttctttgtgatacttggtcatctctgtagcttacctggatattgaaggagatcatgacaaagcaaatctcaagtaaaaaatttgatcgagcaccaagttttcggcagctatttccgcccaaaaatattgaggaaagcaacggatgtgacacatgttctgctcagttcatcaaccatcaatgtgatacaccagaaagcagaatccatcaatgctatagttcaaaaccacttatgttagaacatgggactcctaccccagaaattccatatcttcttttccttccaattccatcgaacatgctgtatcaatatatcaaccagttgatcggccaagtacttctgcgatttcacctcttcaagttaatgatcacatggatattgaacacattaatccttctgaacccccctcaagtacatttctggccttcagagataaattaccaatgaatcttcacatgtatttacccttatatagagttgcattgagaggtgattgggagaaggccaatgagttcctaaatttgcatcctggtgcggagaatgccaggacttcaagagggt

SEQ ID NO: 3235 - DNA, 623 bp, Glycine max
  Clone ID: PAT_MRT3847_102926C.1
cgacctacgctatcctttaattttttttttttttgagcgcgctgactatacccggccgaggtgggaggactatgcacccatgattatgatggcccggtttttggtgaaacccccaaaaaaaaaagctgccttaaaaaaaaccaaaccacccccccccgaaaaagcccggaaacccctgggcccaaaaaaaaaagaacaggggggttccccccacccccccccactgaaacacgggtaaaaaaaacctttttggcccccgaagaaaaaaaaacctttttgaggaaaaaaacttggcaaaggaggggggaaacaaaaaacttatccaaaaaaaaacgtttcccaaaaaaaaaagccacatcgtccaaaaaaaaaccccacttttttgggacccaccccccccggaaaacccacccccaacaataaaatttttttattgggcagcctaggaaacctgggttccagaggaaccccttttttaaagggtttggagaacccccaacaaacaaagttgacgcttgtgcctaaaagcaaacctcccaggggggggactctcaggaaaagtttccacacccgggggctgggtgggaataatttaacaaaaaccggaacgcccgtttttaaaa

SEQ ID NO: 3236 - DNA, 153 bp, Glycine max
  Clone ID: PAT_MRT3847_102927C.1
gaaacttatgattttgaaacaatgtggaattgaattcctgattaatcactttctcccttaaattacagcctccccatcttctttttaaccagcctcggccgaaaaggtgtgcaacccactgctacattgctcgcaatatattgtgtcaccagc

SEQ ID NO: 3237 - DNA, 378 bp, Glycine max
  Clone ID: PAT_MRT3847_102928C.1
aagaatacgaccgaatggtactctactaccctcagttcttaacggtactagaggcattagtgaagcttttcaccgtggcagaccagtcattattgcatgcatctttctaagtattgcaattttcgcatctatcctatatgcactctgaagtgaacacagaaacgcaccgatccatgatctaactgactctccataaattacaatgacattagacacatattcgccagataacattgtcatgaatctcatatcaatgtttggtaacactataaacatgccaatgcctgctactacaaacttaaatggatacactattcacattctctgtatattttagagatatgcatgataatgccagtttgatgacatataatacat

SEQ ID NO: 3238 - DNA, 2124 bp, Glycine max
  Clone ID: PAT_MRT3847_102929C.1
gggaacgcgtccgttttttttttttttttttttttttttaaccaagcatcaaagaaaatttgtcctgaagcaaatagtaccaaccaaacttctgatatacaatgtgcatttcatatgataaccaataactgggcatggcaacctctttagtccaaacaagatcattagaatacatatagataatctaaaaggaaagtgattgtgcatccaggattcttttttttgcaagagcccatgttcctctttgtctgtgtcacatgcaatttctcataatcctaccccattctgtccttttctacaccaatcagtaaacttggtgcccatcaagctttattctaccaacggtcatttgataatcgtataatcatctctgcacctatcgctgtgtctcagagggtctgtgacacacagtactcacttccaagttaccaagcttttgcccatttattcccactgtttattgagaataactgcagaacatggcacagattttggctccctctacgcaatggcagatgagaatctccaaaatcctctcccaatgcaagtcccattacatcaaacatgtggagttctttattgtggaaacaaaataagaaagtttcacccacaagttctgctaaatttagagtgatggcaattaagtctgacaatagcatcatcaacaggctagagggtctacttaatttggatatcactccattcacggacaagataattgctgagtacatttggattggggggacaggaattgatgtgcgcagtaaatcaagaacaatatcaaagcctgttgaacatccctctgagctccctaaatggaactatgatggatctagcactggacaggcaccgggtgatgatagtgaagtaatcctatatcctcaagcaattttcaaagatcctttccgtggtggtaacaatattttggtcatttgcgattcttacaccccacaaggtgagcctatccctacaaacaagagacacagagctgctgaaattttcagtaacccaaaggtccaagcagaagttccatggtatggaatagaacaagagtacaccttacttcaaacaaatgtgaaatggccattaggttggcccgttggtggctatcctggtcctcagggtccttattattgcagcgctggggcagacaagtcatttggacgtgacatatctgatgctcattacaaggcttgcttatatgctggaattaacatcagtggtaccaatggggaggatttgaatgcctggggggagtaccaagttggtcctagtgtaggtattgaggctggtgatcatatctgggcttcagtggaaatacaccctcgagagaatgaccgagctagcttggtgttgtgccctctggctacacacatggatccatatgtgatgagagcatgacttgaagagactacaagtacaaagagcatgagggaagatggaggctttgaggtaataaagaaggcaattttgaatctatcgctacgccacaaggatcacatcagtgcatatggagaaggaaatgagagaaggttgacaggaaagcatgagacagcaagcattaacacattttcttggggagtggctaaccgtggttgctcaatccgtgtgggaagagacacagagaagaatggcaaaggttacttggaagacaggcgaccggcttcaaacatggatccatatgttgtgacatcattacttgcagagactacactattgtgggagccaactctggaggctgaagctcttgcagctcagaagttagcattgaaggtctaaacctattgaatgatggcattctggatgcaaaatcactttccttttagattatctataagtattattctaaagatcttgtttggactaaaaaggttgccatgcccagttattggttatcatatgaaatgccccttgtatatcaaaagtttggttggtactatttgcttcaggacaaattttctttgatgcttggttacattcagtgtcctctcggatttttttttcctagaaatatttgagctttcttttttagtcaagggaaataactgagcttatatagctcagaattgcgggcattccaaaaaaggggggggggggggggggggggggggggggggggggggt

SEQ ID NO: 3239 - DNA, 458 bp, Glycine max
  unsure (1)..(458): unsure at all n locations
  Clone ID: PAT_MRT3847_10292C.1
gttctagatcgcgagcgccgccctttttttttttttttttacttaagtgaatatgcataattacatagaaataataattcggtacatgtcatacacataacgaaaattaaatctgttcatagatataattaaaatcccaattttacatctttaactcaacaaaataaaacttaaaaaccaactacggaggagttgattacaaaatacaactctcccaaaataacgccaacgtcatcacgtcggctcagcgctcctcaccagaatcttactctttgcaccctgccactgtcattctactcccacgaacaaggttcgtgaaacattactgcaaccaaatttgctacaatcatatttgttacaaccagaattactaaaacaaatgaacaaaatatgattcattaatagtataaacatgacccaaaaaaaaaaaaaaaaaaaaaaaaaaaaaaaaaaagnag

SEQ ID NO: 3240 - DNA, 313 bp, Glycine max
  Clone ID: PAT_MRT3847_102930C.1
gtgtacgcgtcggaaccttttcccatagtgggtgtttgtataggtatcccgatccgctccgaggatagtgactcctacggtacgaggggagagataccgaagaaataacattaaaccgcccagagaagaataggcttcgacgtcgaattagggatgaacctccacgcaagttgtcacggactaaaagtgtccaccaaagatcactccgctcttcataccggaattaacttcgacaatgaaaatcctatccccgtcggacctatcgtcctattaactctcatacccagtcctgctaacatctgcgacactttcc

SEQ ID NO: 3241 - DNA, 881 bp, Glycine max
  Clone ID: PAT_MRT3847_102931C.1
gaaagaggtttggcatgttgctgatgttccaaagaatgataaattccagtatacatactttgcacataaaataaacagctttgacactgcccctaaaaaattgttggcatcagactctcgtttacgtccagatagatatgcacttgagatgggtgatctatccaaatcaggggcagaaaagagcagtttggaggacaagcaacgcactgaaaagaaaatccgagaagccaaagagcataaatttacaccgagaggtgagcctatccctacaaacaagagacacagagctgctgaaattttcagtaacccaaaggtccaagcagaagttccatggtatggaatagaacaagagtacaccttacttcaaacaaatgtgaaatggccattaggttggcccgttggtggctatcctggtcctcagggtccttattattgcagcgctggggcagacaagtcatttggacgtgacatatctgatgctcattacaaggcttgcttatatgctggaattaacatcagtggtaccaatggggaggttatgcctgggcagtgggagtaccaagttggtcctagtgtaggtattgaggctggtgatcatatctgggcttcaaggtacatcctcgagagaattaccgagcaagctggtgttgtgctctctcttgatccaaaaccaatagagggtgactggaatggagcaggatgccacaccaattacagtacaaagagcatgagggaagatggaggctttgaggtaataaagaaggcaatattgaatctatcgcttcgccacaaagatcacatcagtgcatatggagaaggaaatgagagaaggttgactggaaagcatgagacagcaagcatcaacacattttcttggggag

SEQ ID NO: 3242 - DNA, 516 bp, Glycine max
  Clone ID: PAT_MRT3847_102932C.1
gttcagtgaaggtttcccgtcatcactgtatgacgtcctccgtctttgggggggggggggggggggggggggggggggccctaaaagagaacccattaacagaagcggaggagaggtaggcaacattcgtacccgtaatagcggtaataagcctatataacgccgatgtttatagcccatagggaacgtaatcacgaaaatgacccaggggttttgggtatcaggcaggggtgacgagataaagggtgtaggtggcaaaaggccggatttcatagcccgctatttggggaggaactagcgggcgtttggggaagcgttaggagggcaccttaaggtaggtgagacggccgcaatgccgtaacgggtagtgcgtgaaattcgaagggggagcgttagaggcaggtggtggtggtagtactgccgcctatacaagggggtataggtaaaaaacgttagtacttgtgtaagcgtaggtcaaaacgcgggccaacgactttgggttatcccgtggagagt

SEQ ID NO: 3243 - DNA, 651 bp, Glycine max
  Clone ID: PAT_MRT3847_102933C.1
tacggctgcgagaagacgacagaaggggaggaaccaaagtgaataactcttattacgataaattgaaattggtactgatcattgctgtgctcaactgttcattgttaatttttagcgtccctatactaattaaacagcatgagtgtggatttgaacaaaactgcctccaacggtcatgataaaatggtaatatcacaagaacatcaggcaaagatcactaaggttagagggttgatagggccactatcagataaggaatctgtgtactgttctgatgcttccatctcaaggtatttaagggcacgaaattggaatgtcaagaaggcagctcaaatgttgaagcaaagcctaaaatggagaaaagaatacaaacctgaagagatctgggaagaggttgctgctgtagcagagaaagggagtatagaccaaattattctgacaagtatgggagaccagtgattgtaatgagaccttgtacaaggctctcgccaaatcaacaccattaagtatgctccttttccttagtttcaatcgggaaagatgcaaactctgtttgtatactgcatggagaatgccattataaatctgccaccacacgaggaacagttggcctggctgatagattttccgggtgtcaagatgtcagatgtg

SEQ ID NO: 3244 - DNA, 435 bp, Glycine max
  Clone ID: PAT_MRT3847_102934C.1
ggcgaaaaaaaacctcaactacttgagatttttttgggatcacaatagctaactaatttaaaaataactaacagaatctggggtactagggttatttcacagggaaacttttacaggtttaaaaaaaactttacaggggtcccttagttcaaaaaaaaattggttttttaatccaaaaaaaccttttaaacctcccttttatttggaaaaagttaaaaaaaacttttcttttggatggattttttgggccaaaaaaaaaaatttgggtacccccccccccctttgaaggttcccaaaggctcctttgttttaaacccccctttgaaagggattagagcccccttccccaaccccaaggggttcccccccaaaaaaaggttggtttccaaaaaacccccccaatggtttaaaccctttaaggaaggccttttttgc

SEQ ID NO: 3245 - DNA, 401 bp, Glycine max
  Clone ID: PAT_MRT3847_102935C.1
cccacgcgtccggtaagataatagacaggctggttataattgaatgtgaatgccctttgaacggtttaaggaaacaagaaaggattctagggagtcgctttgatggacatataggtgcattagggaactaagcttatggaaggaaacaagataagtgaagacatagaagatgctgggagtggggcagatcttaatagctttaggtatgactcaagcaaaggactggtaaaggtggaaaggggagatcatggagaggaagcaatatgcagaaatgtgatctgtagaattaactgtgggagcgcaccatgatgagatagattagttagaacatagagtgactggtggttatgatccaaacattacaggaacaaggtatgttatcaagtgagcagtggacgctt

SEQ ID NO: 3246 - DNA, 2779 bp, Glycine max
  Clone ID: PAT_MRT3847_102936C.1
gctcggaattcggcacgaggctcgagctgtaacaaaccaactcgaacctctcactctctctgtttctgcaatggcgaagaagaaggagaagaaggtgaacgtctccggaaaacctaagcactctctcgacgtaaaccgcagcaatgacgcgaagaaggagtcgcgctccgccgccactgtgcgccgcctcaagatgtataacaccagacccgtccgcgatcgcaagggaaaagtcttatcccacgagcttcagtccaaggagcttcccagcacaagaatccaacccgaccgtcgatggttcgggaacacgcgtgttgtgaatcagaaggagcttgagtttttccgagaagagttgcagagccgcatgtcgagtaattacaatgtgattctgaaggagaagaaactgccgctgtcgctgctcaacgatcaccagaagcaagctagggttcacctgcttgatagagagccttttcaagatgcgtttggaccgaagactaagaggaagcgccccagcctcatggcggctgactatgagtccttgctgaagaaagctgatgggtctcaagatgcttttgaacagaagtatggttccagtgtatctgcggaagctaatgatgaagatggatttagagatttagtgcgacatacaatgttcgaaaagggtcagagtaaacgcatatggggtgagctttacaaagtgatagattcttcagacgtggttgtccaggttttagatgcaagggatccacaaggaacaagatgctatcatttagagaagcatttgaaggaaaattgtaagcacaaacacatggtgcttttattgaacaagtgtgatctagttcctgcttgggcaacaaaaggatggctttctggcatgccatgcgaacattaacaagtctttcggaaaaggttcacttctatcagttctaagacaatttgctcgattgaaacgtgataagcaagcaatatctgttggatttgttggatacccaaatgttgggaagtcatcagtaatcaacacattgcgtactaagaatgtctgcaaggttgctccaattccaggggaaacgaaagtctggcagtatataaccctaacaaagaggatctttctgattgattgtccaggtgttgtctaccacaacaatgatactgaaacagatgttgtgttgaagggtgtggtgcgtgtaactaatttgaaagatgctgcagatcatataggtgaggttttgaaacgtgtgaagaaagagcatttggagagagcgtataaaataaaagagtgggatgatgaaaatgacttcttactgcagctttgcaaatcatctggcaaacttctgaagggtggtgagcctgacctgatgactgcggcaaagatgatacttcatgactggcagaggggccgaattcccttttttgtttcccctcctagggttgagtacttgtctgagtaacctaatgttaatggtgtttccctagatgattcagttgatggcaatgaggcttctgctgctatgaaggctatcgcagatgttctttcatcgcagcagcaaacaagtgtacctgttcaaaatgatttatatagtgagaatgagttgaagggggaagctgctgaccaatatccaaacactaatgcaaacgaagaaattaatggcccttgatagtaacacatctgaagaggatccaaccagcgtgtcataacttttggttgctgttatcagtcgggaaattgtatattttaagttggttttgtttccatcctctaaaaagctttgaagagaacaagctcattttccctcaagtcatttatgcacgagtttcatgctgggacttcatctgtctctaaaatatgctcttctcaaatgcatcatttttgctcttgggaatgttgtttttggtcactgtaaattttttttttctatttttattctctctattttcataatccaatacacagttaataatttttgtatgaatgttgatgttgatgttttattatttaatgtcattttttttatcgttcatgttaatgagaatttggaggatgattgataataacatcattatctttctgtctttctgagtcttttgcatgatcccttaagaataatagagggtatttgtccagtccagatttacataatggtagactcttcccctagaatgttaaccatctacccttaaagttattcttgatgttcacaaagggcagggtttaaactggttgctctgcatgcaaatgctttggtgctttcaggctgttgatttgcagatagattctgaagctgtttttttttatgttctgaagataatgttatggggtggagaataattctaagagattcggaggttggtcaattctggctagaggataaggatttctcatatatatcgagaaggaaatgcttgtgtggatgctttggccaatttgtcttatggcttgcagtcggggttttatgatgtatgagcaatctcctgctctcagtcagctgttgcttgctgacagtagaggagttgcttctccttgcactatttatgtcgtagtgttcttttgccccgtttaatacaaaaaaaaaaaggctttggtgtttttattctagtggtgcattgtgtagatcaattgataccatggcaagggcaattgcttccttcacccgtttacattccagattagccattctggaatgtaaaaatttatattccggattactttctggatttaggctgttcggatggaggttctcaaatttgaacgctataaactgagttaaaacattttttttta

SEQ ID NO: 3247 - DNA, 345 bp, Glycine max
  Clone ID: PAT_MRT3847_102937C.1
acaaatgttaggatcacattttttaacacacttttatgaatatatcatctctcattggatgaaaattattgaaaatcataaaatttattacatcccacatcttatttaattattttttctcctgattttgtatttttcaatacattttaatcttaagggagagtatgtgttcaagaataagttaaagagtgtgctgttagcactcctctctttagcatattctttgttatttatataatcaaaagattaaataaagcatcaagtaaaacatcatttgttattgattaaactttattaaaaattattaaattttgtaggtctcgcacatgttatctaatgaacttc

SEQ ID NO: 3248 - DNA, 953 bp, Glycine max
  unsure (1)..(953): unsure at all n locations
  Clone ID: PAT_MRT3847_102938C.1
gaactagtctcgagttttttttttttttttttaagtataataaaaataaccttctataaattttgtaaattagtactcttatcaatgtgatcaccaaatctatacaagtcatacagaagcaccaacagtgttgcattccacatttgtaacacatgcataagtacttgtaccaccaataaattgaccaaattcacaaattttggaacccaaatttgcctatacatacactatcccatatatcatacccaagttttgaaaagctcaactttgttgacttcttgttggtatgtgttggtgtaatggtgcacgaattgatgttagcattgaccaaatgttacaaaatatggacccgtttagcgcgggtttaatcgatttgaacatcattactcacaacagttatcgcgtcttcgatcgcttgagtgaaggtggcaattttgtatgtgaaaaatccgactagcattggaatcaactctagatgcattaatccatattcaggaactacaattccgttccaccgactgtagatcatgactaacgcaacagggactaataatcgtggctgcccgattgctcccttgataacccctcgggctccatctgccattccatcaatgctatttccaagcatccgcatatacaccaaagaaccaaccaatccaacaccataacttgctgcaatttctgggagtgtatgaaacataagctgacactngcccaacaccacctatgggccaaggtagaatctgcatcttggttttcaacttaaaatattggtnccctgganttaaccagccaacactttttgggtccccttttngaacgtttaagttccttaaacatnacatnatggcctccggttgcgggtttaatgctctantcccatttggcttggttcaacaactgtgggtgcgggcttcattttcttggganattgggggatcctggaaacctaa

SEQ ID NO: 3249 - DNA, 677 bp, Glycine max
  Clone ID: PAT_MRT3847_102939C.1
gctggaacttcgtgtttcattttgcgaacttcatttttctctctcgtatttcgctctggtgtgtctcattcctgtgcttttgaatcatattcttcgatctgttcttcaacatattttctgctttcaaccgttcgcgtcgtgactcagcttcgaattgttcagtataagttggaacttggaacatgtacgggagtaaagctagtcaacttgtgaaagaatttgcaagtggagaaaaaggtcagcttaccacatacaataatgacttgattcgagaagtagttgcagagtgtactcaacatcaccttgattttcagtccttgataaggaagatgcaggaagaaggtttggatatccaaacggcaaaaaatgcagatcactatggagcccttatccaccatcttgctgtagtccgaaataaacgttgcctaatggcctatatgtataatcgagcagaaattatacgaaacttgttatggaagatagggcatgtgcttcctcaagaaattaaagtgaagctttgtaatacggaggaagaacatttcaagaatcattctaaagcactgaaaaattatatgttgaaagtggaggttgattggactgtgcatttggtaccgtgaaatgatccatccatcaaactgggggtcattgatgaaattaaacaacgtattactcttact

SEQ ID NO: 3250 - DNA, 772 bp, Glycine max
  Clone ID: PAT_MRT3847_10293C.1
cccgcgtccgggaagatatatttttccatgtatttttcaaaactgaactgctgaagcatctccctagaagaagaaaattataagatctctttgtattagttgttgaatgtttatgcatttatattattattaaataaagagctctgtcatatttacatataagaacttactatataattagaaattctaagtttgaggaacttacattagacacactagaggccaagtttttacatttaatgccttgttttaagcctttaaggtatgttggtcatttagttgggatggcaaggatactattgttaaattgggtaatgggcacattcaatatcgacacttcctggaatttgtctgtgttgtggaatcgttgtatttctgaagatcttttgcattcttaaatatcttgtataatgtatcttcatactgttgcacattgtttttcaggcccaacttgcaaatcaaaaccagctggttgatcattatgcttccaaacatccgaaggagaaaccccctgcagagtccagttagttatatttgagcaaatggtacctaaagtccccaaaaaaaatttctctctaggtgtgccttcatgcttttaatgtaattcccagcttgcaggcaggttgcaacatgttttaatttaaccatgttaatgtgcatttttgtgagatcccaaaggatcataaaaactgcgtctatcattataagaatattatcatggtgatgaatatgtctgatgccaacccacccacggaatggttttttttttttc

SEQ ID NO: 3251 - DNA, 193 bp, Glycine max
  Clone ID: PAT_MRT3847_102940C.1
tattcggctcgagcgccgagacacaagaagagggagcgtgtgactgaggctgcgacagcgtgatggtgagcaacaccttccattacatactccaggctgcaggagtacaggaagatcaggaccatacatacgccgggagatagggcaccggcaaagctgtcaggaccacagtggcagatacttgctctaatga

SEQ ID NO: 3252 - DNA, 418 bp, Glycine max
  Clone ID: PAT_MRT3847_102941C.1
cccacgcgtccgcccacgcgtccgctttctctgtcccgatttcgctctggtgcgtctcgttcctgtgcttttgaatcatattcgtcgatctgttcttcaacatattctctgctttcaaccgttcgcgtcgtgactcagcttcgaaattgttcagtataagtataatctcttcagcgtaattccttgtcttgtgaaagttggaacttggaacttggaacatgtatgggagtaaagctagccaacttgtgaaagaatttgcaagtggagaaaaaggtcagcttaccacatacaataatgacttgattcgagaagtagttgcagagtgtactcaacatcaccttgattttcagtccttgataaggaagatgcaggaagaacgtttggatatccaaacggcaaaaaatgcagatcactacgg

SEQ ID NO: 3253 - DNA, 433 bp, Glycine max
  Clone ID: PAT_MRT3847_102942C.1
gttaaacttaaaccctttggttgtataagaaaaacttcatcatcatcataatgagcagtcactccaatattgagcaagaagcccctggtgagtctttattatatcattcaaaacgttcctattttggaacaataaaacatgcatggtttcctgtgttatattttcactttatccaaatcgatcggccatctttacatgctcaatattcagtaatgtctactttgtcttccttaaattaatgtcctagttagatttaacataaagcttaagctctagataatttattaatgagaaaaaaaaattatacactaacatgttttatagtaccattcaattacaatttatttgttataataaatttattaattgttataataattattttaaaaatcatacgaacaataatgtaagattaaatataacatgtaaaggt

SEQ ID NO: 3254 - DNA, 665 bp, Glycine max
  Clone ID: PAT_MRT3847_102943C.1
ctgcgagaagacgacagaaggggaccctataaaccaaattcgcaatcccgtgttatctacacttcccttcccattcctttcaatttggagaggaattcatttgaattagggtttctcttttcctttgtttcattatggacgctcagagggctttactcgacgaactcatgggtgcagcgcgcaacttgacggaggaagagagaaaggggtacaaggaagtgagttgggacgataaggaagtgtgtggattctacatggtgcgcttttgccctcacgatctcttcgtcaacacgcgcagtgatctcggaccttgcccgagaatacatgacccgaagttgaaagaaagtttcgagaaatctccaagacacgatgcatatgtaccgaaatttgaagctgaactttctcaattttgtgagaaattggtgatggacttggacagaagagtaagacgtgggcgagaacgtcttgctcaagaggtagagccagcaccaccaccaccgctgacagccgaaaaatctgagcagctatctgtgctggaggagaaaataaagaaccttctggaacaagttgaatctcttggtgaagcggtgaaagttgatgaagctgaagctcttatgagaaggccgagacacttaatgctgagaagacagccttaacgcaacctc

SEQ ID NO: 3255 - DNA, 260 bp, Glycine max
  Clone ID: PAT_MRT3847_102944C.1
aaaacatgatgaagggtcaatgcatgccccggttgaaaagcagctcctgcaagaacaaaacaccttctccaatgaccttattagagcgtttcagagaagcagtgctccgcttaatgatgttatctgcactttctaaagccacaaaccaccgtcgctccggcgacggagaacgccagaatcgacattttaatagccctcatgatcctcaccacagtgaagccgtagcagattgcattcgagtcattaagaaaaaggctgct

SEQ ID NO: 3256 - DNA, 206 bp, Glycine max
  Clone ID: PAT_MRT3847_102945C.1
aaatgcggcacgtatatggggggtttggggcattttttacattaattgcatttttttaaaattccatatttcgcaactttttttggttgtcatagaaaacaccaccatgaaaacattttttttttagtaaacctctctttgaaaacaaggatacggacattgtgtttttctactcaagaaaaccttattagggtctatccttaagg

SEQ ID NO: 3257 - DNA, 225 bp, Glycine max
  unsure (1)..(225): unsure at all n locations
  Clone ID: PAT_MRT3847_102946C.1
gctaccaaatttcaattgcaactgcaatttaaaggatcaggattgttactagttatacattaatgtcttccaacaagaggaggttcatgagagccctattcaaagcaaatggaggctgtgggtgtagcaaaccgttggggggggaggtacactaacctaccccaaaacccaaaatctccatttaccaaaacacaaaaactancancctcaattcatccaccactt

SEQ ID NO: 3258 - DNA, 606 bp, Glycine max
  Clone ID: PAT_MRT3847_102947C.1
ggttaaaaaaatccttatttattatgtacaaaacaaacaccgaaaaatgaaaagaaactacgaggaagcacatgcgtaacttaaaataacaaaaaaaaaaaaaaacaactgaagtccccagcaacgtcaaattcgtatacagaagctttagtaccattcatatttagggtcacagcaatgtcaagagctgttctcatcttcattttggatcttcatgctgtcaagatatgatctcccacggagttctcttgagaggtatcccctgtagtattcgggtacactaattgttttgaatactgctggtgttgttggagtaaggaggcttggtgctggacctaattttacttccatgccagggttgtaaaatgtagctatggaaagcctttccttttctaagttcactgttgctcgatgttcgacgcttcgataaattccatttgtcattatctccatcatatctccaaggttaacgatgaaagcattggggaggggtttaataggaatccatgatccatctattttaatttgaagacctccacttcattgagttggagaaggatagtgaggcttccaccatcagtatggggattgagtcccatcacaagc

SEQ ID NO: 3259 - DNA, 215 bp, Glycine max
  Clone ID: PAT_MRT3847_102948C.1
gcatagatggtttgagccaggtggctatcggggattatatatgcaattatactgattccagacagtttccacagaatccattttaattttttgtacactttggttcttaagttaagtgaaaagctacaaataaaactttatattgaaatagtaactgagtttatccactcagcattcttaaaaagattacaaaatgatagttggaaattctgata

SEQ ID NO: 3260 - DNA, 313 bp, Glycine max
  Clone ID: PAT_MRT3847_102949C.1
acgaggcttcctccttttcgacaagcaagaaaggaaaataccatatcttccctctctcatcagaagtttaaaacaaatcctattctgagctttcatcttaaatttggttttctctgtcatcttttttttttttcattcgttttaatttgatgttctctcattcgtttacatcaaaatctcatgaggaggaggtgttggtgatgctgttgacagaagatagagagcactgatgatgaaatgcatgaaagggaatggcatctcactcctttgtgctctctagtcttctgtcatcatccttctccctcccctctct

SEQ ID NO: 3261 - DNA, 504 bp, Glycine max
  Clone ID: PAT_MRT3847_10294C.1
ggctcgaggaaaaaaaaaaagagagagaagatgacgcggggaaagcagaagatcgaagcgcagaagcgaaacgcagagaggaatcagaagggaaagggctctcagctcgaggccagagccgttggcctcaaagtcatctgccccatctgcaaggcccaacttgcaaatcaaaaccaacttgttgatcattatgcttccaaacatccgaaggagaaaccccctgcagagaccagttagttatatttagagcaaatggtacaaaaagtccacaaagaaaaaatttctctctaggtgtgccttcatgcttttaatgtaattccctgcttgcaggcaggttgcaacatgttttaatttaaccatgttaatgtgcatttttgtgagatcacaaaggatcataaaaactgcgtctatcattataagaatattatcatgttgctgaatatgtctgatgccaagacagaaacggaatggattttaatttttaaattcatgttccattttgtt

SEQ ID NO: 3262 - DNA, 571 bp, Glycine max
  Clone ID: PAT_MRT3847_102950C.1
gttacggatacatgtatatatatcctctaaggctctaactgtgaaatgcttatttttcctaaataaataaccatattaagtatgtaatcatgtatgtccgtctaacaagtgtaccgaatacctacccctcgccggtacaataactattcaacagtaccatgcatgagcttttacataccatatcactatcccacaacacgggaaacaacacaagacaatttttccagacaccaaacaacacccttctacaacgactcaaccttaattacgatgttctcctcctcgttttcttcctcaacctgagagaatcaattttattttggaccataaattctttcacttcttcgcgagcaacttttttccaactcgacttggctgaagcaaagagccacgtggcgttcatctgtttgttaaccattcgtgctgcgtagtgtgggatcttgaatccctttctctgtgtagaagacccaaatcgattgctaatgaacattaagcaatccatcaaactctccttggcgagccccttcatgtcataagcctgtgatcttctccacaaactcttgctatgaag

SEQ ID NO: 3263 - DNA, 603 bp, Glycine max
  unsure (1)..(603): unsure at all n locations
  Clone ID: PAT_MRT3847_102951C.1
ggccggattccgggtcgccccgcgtccgttttcagattggaagacacactttttttttcctaacgctttctatggattgcgatgtgtggccttagcatttatattcagtttctcacgccagtcaagagtgtgcttttagttggtgaagagatgctgaccccataacgtcgttctgttttaaactgccgtcgtttggctcctacatcacaaaatgataaattaaagcgttttgtatcaaaatgcccaaacccaaagcccatccaatcctagtatttatttcaccgcagttttttaaactagtattttttttttatagtcaatttaaacaggttttttttaggtgtgtttcacaaaactagataagctactaaaaagtttgtaagttagaaattgagaatggaaaagttgagagttcataatctaattgattaaattgaaagtatctaataaaaattaacaaatgaattaactaataaatgtaaaataatatatttaattacttaattacatatatgtatataatattcaatttaaatatataaatttatttttcatgacttatcatcttaaaattatgataatanttttttcaaattagtaaat

SEQ ID NO: 3264 - DNA, 474 bp, Glycine max
  unsure (1)..(474): unsure at all n locations
  Clone ID: PAT_MRT3847_102952C.1
ccacgcgtccggtcttctttcanccttttacactcacccctctcggcttgctcccacccacacanctacttgctcactgcacccccttcctctctctctaacaacgcgtcgtccccttccctccgtgccacccctactctcaccccctttcctccaccccccttttattgtcctnctcagctccctctcttcgtctgggcgatcgttccgtgcgatccgagtctacagacgantagcgtcccccgagatcaccctcatgttcctcatccaccttttcgcccgccccaacacccacntcaaagtcggtgccccgggctccctcaaactctcaaacacctgcggcctctgcaatatcccctccgtcaccttcgcccttggctnctgaaccaggtatcccctagcacaggagtccaagtggggggggccgggggcgccgcagcnacgaaccccctttttccctcccccccctatcca

SEQ ID NO: 3265 - DNA, 442 bp, Glycine max
  Clone ID: PAT_MRT3847_102953C.1
caaatcgggtaccgcggagcatcatttttgactacgagcatggcttctgacgctggcgaggaaagcgactattatgaggttatccataactccctatcacataacaggaccgtagtcctacctccatgaccacgtccagcggtaataccacatccaatgctatggatcatcgacagagcaaaaactgctacgactgtctttatactattcctgccacccctgaaccacctgtgctgactaattgaagcaccataatggtacctatcgactccaaaccttttgctccttagctgagatactcactcataccttcgcagacaggatgcatactcttggctatgataccggctcctatgggactcgggatattagggtacaagtactagaagaggtgtgttggcaccccgtattgagcctaactatataacgtttggtcactgga

SEQ ID NO: 3266 - DNA, 679 bp, Glycine max
  Clone ID: PAT_MRT3847_102954C.1
tcaaaattaaattaatgaatattttcacctatttatatttttattgtagataataagaatatttgtaagttaacttatgtaccttaaggcagtggttgacttaaattatttttacttttgtttaaaaaaaagaaaaaattagattttttttgtcaacatagatttaaactaatttagagtttagtcaaaagtaagtaagatctaatgaaaaattatttattatcaagatcgaacttgaatattatctgaataataaaattttaatttcaacatattaaacatttatgtctaatcactttattataattggagtaaatatattttaaaaaaattaaatagcttaactgtattaaaaaggaaaggagaaaaaaaaactttaaataacaattaaacagttttaacaaatatattcattgcgtacttagtttgatttttattctaaagtaattgatgtaagataatggcatgaaaaaattattttaaaattaatttttaaactaaatttacaaataattcttttaaaaaatattttaaactttatcttgaaagtaatttaagaaaaattgagtcaatcataacataattttttatagctatattacccttttaattaaatagattttaaaaataaaacaaagacgagtgatgattgcgatgggagtcacatcaaattatattt

SEQ ID NO: 3267 - DNA, 457 bp, Glycine max
  Clone ID: PAT_MRT3847_102955C.1
gcgggcagcgcggcgccacccaggccattggctgcctgctcgggctgtgctccgtgccgctcaccatcgggcccttcgtcgcaggcctgctctacgatcacctgggctcgtaccagttgcccttcctgctggccggcgtgccgcccgtcgtctgctcagtgctcatgttcgccgtgcgctgcgtcccggacgacgccaaggacgaggcgtccgagaacggcctgatggtgaagagctgctcgccgctggagcccgtgggcgacaagctcaacggccaccaccacggcgcggccgcgaccatcagggccgcgggccaggccacaggagcagcggccgacaagttgttatcgaacctcgacagctgagggtgcgaagccgctttctgctttggtgctcttacaacaagatctacaaacttcatctccaatcttcatttatcataacatattttcaccgg

SEQ ID NO: 3268 - DNA, 305 bp, Glycine max
  Clone ID: PAT_MRT3847_102956C.1
cggcgttgctattattctgatgaaggctgctcctgcttcttctgatgggcgagactgagactactctggtggtgtttatggacaagccgagtgcatcttcaatccagggtgggtcaccggtggcgaccgtctctctgcctttgcctgcgagagggctaggcagggacacgtgtaagggctggaaaccctgggttgcataccgtccgcgaacggcgtctttgagctggggtccacccagtcaattttacagaacccggatctgatgatacaaggtgaaggttcttgttcaatttagcgacaacatc

SEQ ID NO: 3269 - DNA, 209 bp, Glycine max
  Clone ID: PAT_MRT3847_102957C.1
tttttgtttttatgataaaaaaatttcctgcacatatgctaaaaaacagaagcactcacaatagtgaaaatgccaccctctccctgacatgaaattcaaaaggccttgtgcgaccaccagttgccttgccctatataagcgcattcttggggaccggatattcatccactccagactgggaaagagtatacacccctcagataccattg

SEQ ID NO: 3270 - DNA, 195 bp, Glycine max
  Clone ID: PAT_MRT3847_102958C.1
tcctacgcgccactataattcttcttttatttgaaataattttctttatcattcacaatattgatgataccgttcattttttaaggctcaagagagattatcacctattattacaccattgttagcacatatgttaacacatagtataacaccattgttatcacaaatgtgaacacttattataacaactccatt

SEQ ID NO: 3271 - DNA, 338 bp, Glycine max
  Clone ID: PAT_MRT3847_102959C.1
gactacgacaagacccaaactttttctccaaagaattctttaatacttgaaagaacaccataccacatacctttttaaaaaaataatgtttaaaataaaaaacaatctcacatcttgaaatggtcttattctccgtataaggacacaaattatggagtgacccctcaccagaataaatccaacctattctttcatgtataccaagccatatttacattcaaccttacactttaaacactctattataactgccaacacatcatacacaacttgcaataccaaaaaaccaccaaaacattcttttttcacacttcctatcaaaattcaacaaaaacaat

SEQ ID NO: 3272 - DNA, 146 bp, Glycine max
  Clone ID: PAT_MRT3847_10295C.1
gctcgacgcatgaacgtaccctccaccttcaccaccaccacacccaacctcgtggtgtgtcccttccctgagccatgcttcttccgcaagtctacgcatctctacggcgcagcacgcgagatcaccttactatctctcgctctctc

SEQ ID NO: 3273 - DNA, 342 bp, Glycine max
  Clone ID: PAT_MRT3847_102960C.1
gaagcagggagaaagagataccgggattttgaagttacaacacccaatgggaccaacttgacataacaaccattgaccggtatctttcctatcacaatactttccattacatcaaggctaaaagcctaattatcattccaactgcacatgcttatatgtggggccctcatactttgactttctgccccgaaacacccatcttcatttgaacaaaaagaatgtattctgtcaacttagaccatcccatactaaaaggttcatgttcttgtaccaagaaaaatattgcagcccaatacttcaaccagttcaagtctaacctcaaatgaataaactgaaaaatgt

SEQ ID NO: 3274 - DNA, 327 bp, Glycine max
  Clone ID: PAT_MRT3847_102961C.1
gggatctccgtcaggttagaaacgccgttttgcgccaaaccggttttctcgattgatttaatataatttaatttaatttacctttttttttctctttctattttgaggtggggaagttaaattttgatagcttctctgcatcctgtgatagcttctctctatgtaacttcgctttcggatgatctttttgttctctttgatttatagaatctgtaaaacgatgtaagttgttggaccaaacttggataaagttctctattttttttttttcattttctctctccattttttgcattagattaatggttaacggttttgccttggatt

SEQ ID NO: 3275 - DNA, 456 bp, Glycine max
  Clone ID: PAT_MRT3847_102962C.1
ggttttttttttttttttttttttttttttttttttttttttttttttttttaaagggggaaaacccccccaccagcaaaaaaaaaaggctaaattgattggatgaggaaatcctttacaaaattaacaatttttgggggggctagctaactaattgactcagcaaaacttgttcaaattttttatgaaactaacaggggaatactttttcattttcatatggctatggacactatttatacatgttttttcacttttaagttcgaattatacccacgtttgttatggggcaaagcctcctttttttaaactcacttactaaacaatttaataagcaggggggaataatagttttttaacatcaacagggttaggaacattgtttactacccaaataggaacaattggttttgaatcccaccattccctcaatcggttattccctggtccacttcc

SEQ ID NO: 3276 - DNA, 215 bp, Glycine max
  Clone ID: PAT_MRT3847_102963C.1
tttttggacaaaaacactcatgccattgggctttactaaatcgtggatccctctacggatacagatggagcgatcacctgtaatgaacgagaaacaacctgtacttgctctgcaagtggattacaccacaggggcagtgtttgggtacactgatgtaaggaagggcacctgctgtaattgtatactaaccttctatgtgggggctggcttttctg

SEQ ID NO: 3277 - DNA, 508 bp, Glycine max
  Clone ID: PAT_MRT3847_102964C.1
ttcttttttttttcttttttttttttttttttttttttttttttttttttaaaaaaaaaatctctttgttcccttgtttccccaggaggattagaaccacttttttcacataaaacatgggttctccaaccccacccctaacccctgtaacgagggttccaacaatttttaaaaaaggaaaaaaaaggtcccgtcttgaaaaacaaaaccacggcccttgaatattttatggggcctaactaacggaaaagcccaacttgcccctggcaggggctaggtactgacgggcttgaacccggcctcccacctgaaggggaacaactctttctattttaaagggccttcatgaggcccaagcagtggccggggagggaaaacacgtcctgcgcctccttaattatggggaatgccccggggggaaacaagtctttgcaccttacctggagcaaaaccgcggggctaaacttgaagcgcccctctatcacgtggcgctgacccacttgatttt

SEQ ID NO: 3278 - DNA, 194 bp, Glycine max
  Clone ID: PAT_MRT3847_102965C.1
tttcgcatagtgccgctccttgcagcttaaaggctatggggtaaatttcatgcaaattaggacaatacaacagtgaacacgcctcactctgacaaaccaccattcaacaacaccttgcattctgaaacttcatcaacacaacacatgagaataaatcttccaacattcctaccaatataagcacagcgatgcct

SEQ ID NO: 3279 - DNA, 445 bp, Glycine max
  unsure (1)..(445): unsure at all n locations
  Clone ID: PAT_MRT3847_102966C.1
acgggnccggaatcccggggccgaccacacccgtccgttggtccaaaaggcatgggttaaatttagtcaggaataataatttttttaagggcagggattggtattaggctaaaacctaaccaggctttacttggaagggggccttggggggccattagtaaaggttattttcaaaggaaactggtcaaaggtccatatttttggattatgttattaaaaccataatgggccctttttggccagtttttcttttactggtttaaagtccaatggggtggttaatatcctggtggccattggttcaaggtttaaggaccctccttggttttgttaaaaggaggtaccataatggttggtttggttgcaattatgggatggttgaggcaccatttcttggctttaattcttggccagaattgttgtgggggtttggattttaggcaaa

SEQ ID NO: 3280 - DNA, 820 bp, Glycine max
  Clone ID: PAT_MRT3847_102967C.1
ggcgacccacgcgtccgacggctgcgagaagacgacagaaggatacggctgcgagaagacgacagaaggatacggctgcgagaagacgacagaaggggaaacttatttactttatctcttaattagtatcatgtttttacttcttcttcttcttcttcttgttttaatttcgaacatttaggtgagtgttccttgcaccagcttgttcaagactgtcactgtgagatgtggtcattgcaccaatcttctctcagtcaatatgcgtggactgcttctccctagtgccaatcagcttcaccttggccacagcttcttcactcctcaaaatcttctggaggagattcgtaatgcaccttcaacaaacatgatgatgaatcaactgccgaaccctaatgatttggtcatgagcaccatgagagggggacctgaagaaacccctaagcctccatcagctaatagacctccagagaagagacagcgagttccatctgcttacaaccgctatcggtgagaattttctctaattttcttaacctaatcactgttgaataagccgcaatatatttcatataatgcatttttcttctacttttttttcttctttgcataaaaacctaaaaaatcaaacctccacctgattttcatgtttgtttttcatttctttttctcgactatcctttttctacttcttgggggtggtgatcagagatccttctgataccaccaaagaaaagctagaggaaaagaaaagggaaactcttctgataccattcagtccatttcactcttcttttaagctgatagtggagtgtcacttaac

SEQ ID NO: 3281 - DNA, 242 bp, Glycine max
  Clone ID: PAT_MRT3847_102968C.1
ggcacacgtgagtttgttgatcgtgataactacagacatcgtgaggagactggaagcagtgtgatgcaactgagcgtcagtgtttgctaggatggcacatgcatgcctatgatatgtgccggctccgatatgaagactggatatggtgcccgtactccagacgtgtcatgcacacgttgtacgcttgctgtgggcacagacagcatctttagctttgacacgcactccagaatagtgcgttg

SEQ ID NO: 3282 - DNA, 1638 bp, Glycine max
  Clone ID: PAT_MRT3847_102969C.1
ccacgcgtccggtgtattcgatcctctaatacttaagtggcatatctcttccccctggtacggctgcgagaagacgacagaaggggctcttttccctttctttcattgtttgttttgtttgcactctcctctccccttaacagtaactcaacaatcaagaggatcagatccataggagaagttttatctgtccatcaccaaaaccgcgactactgatcagtcaatcccatcaatcaaatcaaatcatcagaaagaaaagaaaggaaagaaaagaagaaaaaaaaaagggaatcaacaaaaagaggaacaacagcaatatcaaacatgtcctcctcatccacttccttttcaccggaccaacaacacctctctccctccgaccagctctgctatgtccattgcaacttctgtgacactgtcctcgcggtgagtgttccttgcaccagcttgttcaagaatgtcactgtgagatgtggtcattgcaccaaccttctctcagtcaacatgcgtggactgcttcttcctagtgccaatcagcttcaccttggccacactttcttcactcctcaaaatcttatggaggagattcgtaatgcaccttcaacaaacatgatgatgaatcagctgccgaaccctaatgatttggtcatgagcaccatgagaggagggcctgaagaaacccctaagcctccatcagctaatagacctccagagaagagacagcgagttccgtctgcttacaaccgcttcatcaaggatgagatccaacgtatcaaagctgggaatcctgatataagccacagagaggcctttagtgcagctgcaaagaattgggcccattttccacacattcatttcggactcatgcctgataatcaacccgtgaagaaagctaatgttcgtcaggaagcagaggacgtgcttatgaaagatgggtttttcgcaccggctaatgtaggcgtctctccctactagaggtgtttttaatattgtagggctttgatgagtgttgttacccatgcatgtctctaatattaagtaattgtgtactaggactttgtcttatgcatattaatgttgtgcacttgtattagtacttgttagtgttaaaagttgttagtatatgtttaaaatcaatggtggaagggagttctgacgaagctagattagttcttctgaaaatgaagatggcttattttctcttgaactggtcccggaatgaatgaatgaatggtttcggaatgtagaaagctcaagttacaatatttaagctgaaaaaaaaaaaaaaaaaaaaaaaaaaaagcggccgctctagaggatcgctcgtgagaattttctctaattttcttaacctaatcactgttgaataagccgcaatatatttcatataaagcatttttcttctacttttttttcttctttgcataaaaacctaaaaaatcaaacctccccctgattttcatgtttgtttttcatttctttttctcgactatcctttttctacttcttgggggtggtgatcagagatccttctgatacccccaaagaaaagctagaggaaaagaaaaggggaactcttttgataccattcagtccatttcccttttctttttagctgatagtggagtgtcccttacc

SEQ ID NO: 3283 - DNA, 839 bp, Glycine max
  unsure (1)..(839): unsure at all n locations
  Clone ID: PAT_MRT3847_10296C.1
cttgcattgcctgcagaatctagcaagtaattatagatgcaagcaactaatgaattttgtcagtcccatattacagtaatctccacattccatgggcgaatagtgcacccatccttctaatgaacttttgacagaaaatgcggtttcttttggtgttatataacttgcattaatggatattgttgtaatataatatttagtttgttataaaaaaatcaatttaagctgtcttctgattcttctctctctcctttcctatgtgtggacatcacagtgtgagcttgacttaatccaaagttgtcaactttaagatcctacctaaaatgaaaatatacatgcgtgcacttgcaaacacacacacacacacacaataacatagataagaaaaaataatcttaaacattgttcatcactaacatttaatcaaaattcaatgaaaaatgcataagtcagttgaaacccacaaatgaagttaaaattatagcacataatataaaaagacacaattttatttatatatataaattttataaataaagtatacacaacataattttttgcatccaaaagaaaaacatctgttttctacaactcctaccatcaacaattagccacaaccagcaagcaaatagaaacgagttaaaaaggggagagattatttaacaaaatgtaggaaaaaaacagtgggtcacacccagtagtcagccacaaccaagtttgaatgagaacagtgttcaaccaccactgatacacanacaaattccaatcaccactctgncaccagcccacatgtcatcacccgttatcaacaagaacaaaccaaccacaggccaattaca

SEQ ID NO: 3284 - DNA, 727 bp, Glycine max
  Clone ID: PAT_MRT3847_102970C.1
cccacgcgtccgtacggctgcgaggaagacgacagaagggtacggctgcgagaagacgacagaaggggatgttttgtttgctctctcctctcccttaacagtaactcaacaatcaagaggatcagatccataggaagttttatctgtccatcaccaaaaccgcgactgatcagtcaatcccatcaatcaaatcaaatcaaatcatcagaaagaaaagaaaagaaaagaaaagaaaaaaggaaatcaacaaaaagaggaacaacatgtcctcctcatccacttccttttcaccggaccaacacctctctccctccgaccagctctgctatgtccattgcaacttctgtgacactgtcctcgcggtgagtgttccttgcaccagcttgttcaagactgtcactgtgagatgtggtcattgcaccaatcttctctcagtcaatatgcgtggactgcttctccctagtgccaatcagcttcaccttggccacagcttcttcactcctcaaaatcttctggaggagattcgtaatgcaccttcaacaaacatgatgatgaatcaactgccgaaccctaatgatttggtcatgagcaccatgagaggcggacctgaagaaacccctaagcctccatcagctaatagacctccagagaagagacagcgagttccatctgcttacaaccgcttcatcaaggatgagatccaacgtatcaaagctgggaatcctga

SEQ ID NO: 3285 - DNA, 602 bp, Glycine max
  unsure (1)..(602): unsure at all n locations
  Clone ID: PAT_MRT3847_102971C.1
ccacgcgtccggttcctgccgttctgctttggtttttcagttcaaatcttttttcccatttgagaaaaatatcaaattttcagtccattgaacattcctcatattgttccatgcactttgtgtgaaacttattgcttatcttgttcctattagcgcagtggcaccggttcttttgggggaagtagatcagcttcaaagattgcagcttttcattttgcttattttccatattttatgaggggaaattaagaaattggttgttaaatagagaaacaaagatttgtctccactgcatcattttcaccgtgatgctgtgaatccttgtcacttatgggggatattaggcttacccgggtagagcaaggtcaaacaaagattagaaatgttccaattgctgtcacccctgaaggattttggtgttgccctactcctgttgggtttcagaaaagcctcaaacctcaaaaccctttgaataaactcaaaccctcttcaccacctccaaagcctagttcccagaanaaggctgtttcggagagtcagagaaaaacagtgccttccccttcaagattggcggttccagatgctcaacaatgtaatgatga

SEQ ID NO: 3286 - DNA, 994 bp, Glycine max
  unsure (1)..(994): unsure at all n locations
  Clone ID: PAT_MRT3847_102972C.1
attcccgggtcgacccacgcgtccggtttgttttgtttgcactctcctctccccttaacagtaactcaacaatcaagaggatcagatccataggagaagttttatctgtccatcaccaaaaccgcgactactgatcagtcaatcccatcaatcaaatcaaatcatcagaaagaaaagaaaggaaagaaaagaagaaaaaaaaaagggaatcaacaaaaagaggaacaacagcaatatcaaacatgtcctcctcatccacttccttttcaccggaccaacaacacctctctccctccgaccagctctgctatgtccattgcaacttctgtgacactgtcctcgcggtgagtgttccttgcaccagcttgttcaagaatgtcactgtgagatgtggtcattgcaccaaccttctctcagtcaacatgcgtggactgcttcttccaagtgccaatcagcttcaccttggccacactttcttcactcctcaaaatcttatggaggagattcgtaatgcaccttcaacaaacataatgatgaatcagctgccgaaccctaatgatttggtcatgagcaccatgagaggagggcctgaagaaacccctaagcctccatcagctaatagacgtgagaattttctctaattttcttaacctaatcactgttgaataagtcacagtagctttcttatacctttgttttgctttgcataaaaacctaaagtttaaacctccacctgttttacatgtttgttttgcatttctttttctcgagtttcccttttctgcttctcgggggcggtgatcagagatccttgtgataccaccaaagaaaagctagagaaaaagagaaggaaaactcttctgataccattcagtccatttcacacttcttttaagctcatagtgttgtgtgtcatttaaccaataaagggagaaaagcaaacacannacaaataaaaaggttatatccctatcaaaactcacttatcaatctg

SEQ ID NO: 3287 - DNA, 2967 bp, Glycine max
  Clone ID: PAT_MRT3847_102973C.1
tgcttataattctcagacccaaatcatcaaaagcggggaactggtaaagtggaaagggggaaaacaaagcccataagccatcatcatccattccatttcatttcatttggtagctcccttttctcttttttcgggtctcgtggtgttctctatttcttcacaaattaaagagggtccaaactaaactcattattcctccctgcaactctgtgttcactggttcccttgatggtaaactcttcagctcctcttcaatcatttttaaagctctgagcttaaacaaaacattggatacgacatgggttttcagaggtttctcataatatgaccaatgtttggtaagttttctgcttttgccgtttactagttgttactagtgtccaaagagagacaagggtcattttctgtgtgctggctgatctgtagttcactttgatgaggtcagatatagaacttcttggttattatacttttttctattaaaaaattcttctgcttttctgcatatgttcctgccgttctgctttggtttttcagttcaaatcttttttcccatttgagaaaaatatcaaattttcagtccattgaacattcctcatattgttccatgcactttgtgtgaaactgcagtctgtccttgtttcaccattttatcatttgctaggaatgagccactgaatatttgatggattactagacatgggcaattttgccgcgtccttgtgtcgccactttttcctcgcatactaaggagcctccaaatagcagatttccttcgctccagctcctgttatctaatcgtgtccggagttcgtggaggcttcagctcctcttcaatcatttttaaagctctgagcttaaacaaaacattggatacgacatgggttttcagaggtttctcataatatgaccaatgtttgtggcaccggttcttttgggggaagtagatcagcttcaaagattgcagcttttcattttgcttattttccatattttatgaggggaaattaagaaattggttgttaaatagagaaacaaagatttgtctccactgcatcattttcaccgtgatgctattgctatatcttgttccatattagctgtgaatccttgtcacttatgggggatattaggcttacccgggtagagcaaggtcaaacaaagattagaaatgttccaattgctgtcacccctgaaggattttggtgttgccctactcctgttgggtttcagaaaagcctcaaacctcaaaaccctttgaataaactcaaaccctcttcaccacctccaaagcctagttcccagaaaaaggctgtttcggagagtcagagaaaaacagtgccttccccttcaagattggcggtttcagatgctcaacaatgtaatgatgatccagaaagacctccgactagcacttctgtgcctgcacagagagcacccaaaaaggtggctattgagtttggtgaacctggaacttttgacatgaagctgcttctccttggaaagcagggattttgtgtgaagttaagtgtgcacagggatgttctaatagagaagagtagcttctttgctgataaactttctgaacaatctagtttgtcatgtctccaagttgatgactgtgaggatgttgaaatatatgttgagactgttgggcttatgtactgcaaagaaatgaaacagcagctaatgaagcaaagtgtttctcgcattcttcgaatactcaaggtcgcagaattccttggcttcagctcatgtatccaatcatgtttggagtacttggaggcagtcccttggaatggaaaggaagaagaagaaaaggtgatcgcaaccgtcctacgactccaaggagaaggaatcggggtaaatccggtgctaaaacgagtttctcctgatatttctaatgccccaaaagataccctctcccacattgttgaacttgttctcaaaagcaatgaggagagaggtcgccgagagatgaaatccatagttctaaagctccttagagagaataacagtcttccaagttcttcaggctcagctgacctctgtaatgacatgattaataagtcatgcagaagatgcatggattctttattgtgtctgttcaaccaggtggcagagccaggctttagtgataacaaagaacctgtagtaaaacatatagctcttgaagctgataacttgtcatggttgcttgagattttagttgacaaacaagctgctgaagattttgcgctgatgtgggcaaaccagcaggaattggcagccctccatggaaagcttccgattgcatttcgttatcatgtcagttgcatttcaggaagactatatgttggcattggaagaggggaggttttgccatcaaagaacacgcgccagttgttgttgcagacatggctacagcctctaatcaatgactataactggttgcagcacgggtgcgggtcattcgataggaaacttgtggaggaaggaattggaaggacaattctcaccttgcctttggaggatcagcagagtattttgctttcatgggttggaagtttcttgaaaactggtgatggctgtcccaatcttcagagagcttttgaggtgtggtggcggaggactttcattaggccatatgtggaaggccaaactattaacgtcatgccagatacgtgatgatatgtttatgattcatgaatatatcttagaatggttttggaatttgaattttctcttttgaggtgactattctaagcaattataaatgttatgttgatttgccaatgtggcttacctccagctgctaactagtactgagtcctgtatatatggccgtttcatgtatacaatcactcgttgaattgtaactttcagtaattatacaaatactaaggatttagtttttctaatttgagttttattttattatacaagtacatacattcaattataattttaatagcaattttttcaatt

SEQ ID NO: 3288 - DNA, 222 bp, Glycine max
  unsure (1)..(222): unsure at all n locations
  Clone ID: PAT_MRT3847_102974C.1
atannaaggaaaggggtgtgtacttttttgttgaaaaaacaaaagggaaattgattttttaaagccggggggtatttaactaatcccataaaaacctttcgtcatttaaatggggggggggcaaatggcacctatcccatcattttatgttcaggtctgggagtatcctaaaaaccagggggcaaaaaggctttttaaacttaaaaaaggggctccaatttt

SEQ ID NO: 3289 - DNA, 617 bp, Glycine max
  Clone ID: PAT_MRT3847_102975C.1
gaagctgataactgtccatggttgcttgagattttagttgacaaaccaaagctgctgaagattttgcgctgatgtgggcaaaccagccaggaattggcagccctccatggaaagcttccgattgcatttcgttatcatgtcagttgcatttcaggaagactatatgttggcattggaagaggggaggttttgccatcaaagaacacgccgccagctgttgttgcagacatggctacagcctctaatcaatgactataactggttgcagcacgggtggaggtcatttgataggaaacttgtggaggaaggaattggaaggacaattctccccttgcctttggaggatcagcagagtattttgctttcatgggttggaagtttcttgaaaactggtgatggctgtcccaatcttcagagagcttttgaggtgtggtggcggaggactttcattaggccatatgtggaaggccaaagtaatgccatgccagatagttgaatgttgtcaaagccccatgtgatgatatgttcttgaatatatcttagaatggttttggaattagaatttctcttttgaggtgactattctaagcaattataaatgatatgttgatttgccc

SEQ ID NO: 3290 - DNA, 404 bp, Glycine max
  Clone ID: PAT_MRT3847_102976C.1
gtacgatatgattataattaatctttgaagctctatttttgtatttctctacttgtattattctattgtttactctctgttatgcaatgaatgactgacaaatgtctgaaaattccatagatgagatattgtgattcatgatattgtctagtagtaggaacgaggaaggtgaagtaaatacctatcctgatttgtattgcttctgaagacaaagaaggaagcaatagatgtttaggagattgagggcattttgtttcaaagattggcactttatgccttctgcttatcaggaggggtgttaaccatttgggatgctagagtaactacacagttgattttctcttcacgaatctatcactctgtatgttttgctggatagaagtcatagacattggtagctaatg

SEQ ID NO: 3291 - DNA, 1059 bp, Glycine max
  Clone ID: PAT_MRT3847_102977C.1
ccacgcgtccgcggctgcgagaagacgacagaaggatacggctgcgagaagacgacagaaggatacggctgcgagaagacgacagaaggggaaacttatttactttatctcttaattagtatcatgtttttacttcttcttcttcttcttcttgttttaatttcgaacatttaggtgagtgttccttgcaccagcttgttcaagactgtcactgtgagatgtggtcattgcaccaatcttctctcagtcaatatgcgtggactgcttctccctagtgccaatcagcttcaccttggccacagcttcttcactcctcaaaatcttctggaggagattcgtaatgcaccttcaacaaacatgatgatgaatcaactgccgaaccctaatgatttggtcatgagcaccatgagagggggacctgaagaaacccctaagcctccatcagctaatagacctccagagaagagacagcgagttccgtctgcttacaaccgcttcatcaaggatgagatccaacgtatcaaagctgggaatcctgatataagccacagagaggcctttagtgcagctgcaaagaattgggcccattttccacacattcatttcggactcatgcctgataatcaacccgtgaagaaagctaatgttcgtcaggaagcagaggacgtgcttatgaaagatgggtttttcgcaccggctaatgtaggcgtctctccctactagaggtgtttaagaattttagggctttgagtattgttacccatgcatgtctctcattaagtaattgtgtactaggagtttgtcttatgcatatgaatgttgtgcacttgtattagtacttgttggtgttaaaagttgttagtttatgtttacaatcaatggtggaagggaattctgacgaagctagattagttcttctgaaaatgaagatggtttattttctgttgaactggtcctggaatgtagaaagctcaagttacgatatttaatttgaagtttttctttattcctaaaaaaaaaaaaaaaaaaaaaaaaaaagcggccgctctacaggatcca

SEQ ID NO: 3292 - DNA, 358 bp, Glycine max
  Clone ID: PAT_MRT3847_102978C.1
attaggccatatgtggaaggccaaactattaacgtcatgccagatacgtgatgatatgtttatgattcatgaatatatcttagaatggttttggaatttgaattttctcttttgaggtgactattctaagcaattataaatgttatgttgatttgccaatgtggcttacctccagctgctaactagtactgagtcctgtatatatggccgtttcatgtatacaatcactcgttgaattgtaactttcagtaattatacaaatactaaggatttagtttttctaaaaaaaaaaaaaaaaaaaaaaaaaaaaaaaaaaattaaaaaaaaaataatttaaaattattaaaaaataaaatag

SEQ ID NO: 3293 - DNA, 309 bp, Glycine max
  Clone ID: PAT_MRT3847_102979C.1
gaagcttggattctatagttcggtttccaaacttttttttatatccccctccacaccaggaccaaaacggcatctttacatcaactatgcccttattcgaaccaaaatgcaatctacctaaatagcgttccctcgaaccggaacttaacctgtacttctatcacacctatgacaagtattataaataataccagcgaaacagcgtcaaaccaacaggggttctacaccaaacttaagcagatctgataaaagggcacaattcctcaataaaccaaaaggaggaggaaagatgcgtgacacatgagatat

SEQ ID NO: 3294 - DNA, 321 bp, Glycine max
  Clone ID: PAT_MRT3847_10297C.1
ggacaaggagggaatccccccagaccaggacaggctgattttcaccgggaagcagcttgaggaccgccgccccctttctgactacaacatccagaaggagtaaactctccactgggtgtctcttcttcgaggtggaatgcagatcatcttgaaaattcttacgggtaagactattacccgtcaggaggagagctctgacaccattgacaatgagaaggccaagattcatgacaaggaacgcatgccaccggaccagcataggctgatttttgctggcaagcaccctgaggatggaaggaccctcgctgtctacaacatcca

SEQ ID NO: 3295 - DNA, 578 bp, Glycine max
  Clone ID: PAT_MRT3847_102980C.1
gtccggaatctcccgggtacgacccacgcgtccgcacaaattaaagagggtccaaactaaactcattattcctccctgcaactctgtgttcactggttcccttgatggtaaactcttcagctcctcttcaatcatttttaaagctctgagcttaaacaaaacattggatacgacatgggttttcagaggtttctcataatatgaccaatgtttggtaagttttctgcttttgccgtttactagttgttactagtgtccaaagagagacaagggtcattttctgtgtgctggctgatctgtagttcactttgatgagtggcaccggttcttttgggggaagtagatcagcttcaaagattgcagcttttcattttgcttattttccatattttatgaggggaaattaagaaattgggttgttaaatagggaaacaaagatttgtctccactgcatcattttcactgtgatgctattgctatatcttgttccatattagctgtgaatccttgacacttatgggggatattaggcattcacgggtagagcaaggtcaaacaaagattaaaaatgttccaat

SEQ ID NO: 3296 - DNA, 739 bp, Glycine max
  Clone ID: PAT_MRT3847_102981C.1
aattcggctcgaggtttcagagtttcaatctagagtcaccagagataaacagcaacatgtgtattattaatcaggaagctatcaagcagttgcagtcccttatggaaaacttggatgagcaacagaagaacacattccagattatgcaccggggctatccaacagaaacattagtacggtttctcaaagcaagggatgggaatgttgtcaaagcacataaaatgttaattgattgtttacaatggagagtggaaaatgagattgataatgttttatcgaagcctataccccctgatttgtacagacgtttgcgagattctcaacttgtaggaatgtcgggtttctcaaaggagggcctacctgtcattgctgttggtgttgggctcagcacatttgatgaagtgtttgacaaatattatgtacagtcgcacatccaaatgaacgaatatcgggatcgagtgatgttgccaacagctacaaagaatcatggacgacacattgacacttgtgtgaaagtcttggatatgactggtttaaaactctcggcactgagccagttgaagcttttgacagctatatctacaatagatgacttgaactatccagaaagacagacgcatattacatcgttaatggtccatatgtattctcagcgtgttggaaggttgtaaagcctcttttgcaagaagaacaaggaggaaagtcacgtactgaaaggtggggcatggaggaattactg

SEQ ID NO: 3297 - DNA, 152 bp, Glycine max
  Clone ID: PAT_MRT3847_102982C.1
ggctgctggtggttccattcccacacaatagagtagacgagtgataaaaactcgtgaagcttctgatcggagctgctgatttcgccctctgtttatctttccctggattactcgttgagaattacgtccaaggtctgaacgatggattatgg

SEQ ID NO: 3298 - DNA, 753 bp, Glycine max
  Clone ID: PAT_MRT3847_102983C.1
cttctcttcttcctctttctcctatttgagcttaaaccccatgtatcactttgatgcatttatctgtgtgggggcttaatttgtttttgggtttccctctgatcttgtaggttggtttagggtttagggtataacttatcttgttactgggttggcgagaaggaatcgtttatgtccttttgttgtttttttgagaagtgaagctcgtgaccttttagaatttgtcattcggttatggctatcacgatgatgcgtttttattctattgatccttacaataactggtttcaattttttgtatcaggaaacaagcataatggccttctgtaataaggttggaaatgtcttgaggcagggtgctgctcgcagcacacaagcacctgtttcatccatgcttaattacattcgctgcatgtcttcaagcaagctttttattggaggcctttcatatggagttgacgatcagtctcttaaggatgcattttctggctttggagatgtggttgatggtaagttcagcttgctttcattgttgtcacatggtgtccaatttcagccacccgtcagcctcactttaccatatgttcttcagtttcctttgatgtcattataatattgccatgacattgtgtaaatccttcttctgccattgcgactcctttgtggtgcaacttctgtgaaaacagctgttgcagttgcaatgtgtgtcacggtttcaattggcttcacatttttgtgacagtgtgggctggt

SEQ ID NO: 3299 - DNA, 376 bp, Glycine max
  Clone ID: PAT_MRT3847_102984C.1
tcataaaaccccaggaagaaacggaaaagcggggggctttttgaaccagacgccgggcatgtccaagcgtgagaaagctcgctcaagtgggaacactaaacttaaccagtacaggagtattctgctgaacgcgcaaaaccatgggaataagcaacctctctctataatagagttactgccatgccaccaaaccaagaagaaaaccaagaatctgctttaagattggaagatgaggcttcgaatgatttcgtaaatcaaggaggaaagaggactgggctggttgtcgagctttgattcgcgggaggacgagaaactgaataccaatcctcagcatgaaaaccaccactgtgaacatgaacatgaacatgaacatgat

SEQ ID NO: 3300 - DNA, 575 bp, Glycine max
  Clone ID: PAT_MRT3847_102985C.1
gtgcttcatgtacaatcaaagtttttcaatactatcattaacatatattcgttcccctagtgaagttactcaacatgcgtttctgactgttgtgacgcgcctcgcaagccttgacgccgcatggtctgatgatcaccccatgttgacaatcaagccacccgtaatccattgtcttcagttaccaagatcggtaagcctttctagcagacggtgcgatatacgccatcagatgacggtctctgcgccttgtgcttgtgctctttccgcagtcccttattggcatgctgcttctcgatgctaggactggcaccaggttggaacgccgaaagatcaaccgcatccgtcttcatcagcatctccgtaacgccacatatgtcagtaactagcctgtcgatcattgtaagcgacagactcttcctgacgactactctaaggatttcggtcttttcctcgcctggtggcagcgggtagttggggatgatgtattgcttagcccgaagcagattgctgaccgctttttgcttgacatgggggaattccttgtggaacttgtttgtgagagtaaatgcaacgac

SEQ ID NO: 3301 - DNA, 384 bp, Glycine max
  unsure (1)..(384): unsure at all n locations
  Clone ID: PAT_MRT3847_102986C.1
gcgtccgcggacgcgtgggcggacgcgtgggctccaggcaactaaacaagcaataatttattttttgaatcaaaattttgatgtcgttctacccaatgccaaagcaaactacacccatgttcagatcctgagagaagattcaaagacaagagcaatgacaacggtgagaaaactgacggcgaaggacgaagagataatggaggaaggagaggttgggctaggtgccgaggcattgatggcatgcatgtgagtggcggagacgacgacaagaaggaccgttaacgatggtgctctgcgacggatcgaagcagtctggttcagccgccgacagtgtttggttttggtggggatggtgcctntggtggtggaagacgtgtgattagg

SEQ ID NO: 3302 - DNA, 374 bp, Glycine max
  unsure (1)..(374): unsure at all n locations
  Clone ID: PAT_MRT3847_102987C.1
gtaatattttttttgnctcgtaattgggggggtgggggggggcaaccttaaaggttgcactgtgcggttcttatgtgcatggctgtgatgagtgcaccaatgatggtgcacgccgtgtcatgcactgatgtttctgtgaacctaccaccgtgcctatcttacctgatgcactctggacatgtttcggggggggtggtgacccaaatgaggaacattccgtgttctgcccgtaccagcttggacagacgccccgcgtgcaatatgtcttcagcaagctgctcataactatggcataccacccgagctcgctcatgcgctccgcggccagtgcaatggcagtggcccttgggcgatcactcggtccaccaactgcg

SEQ ID NO: 3303 - DNA, 353 bp, Glycine max
  unsure (1)..(353): unsure at all n locations
  Clone ID: PAT_MRT3847_102988C.1
cttattgnaatttgtttgattggagatttttgcgacttatattgccttgccttttgtccnaacaggacaaagaaaaattttatgaagaccacgggcctttccaaaaactcccctttaaccttgggaaaaggggcgccccccgcggggtttccaaccttaaaaaccctttttgtaacaaaaccagggtgtgcccccaaccccaaaaaaaaggggggggggtctccttgtccaaaacttttggccccccccagaccgggtgtcctccccccccttttttaaccccccctttggaccccaaaatggggggttcctacaaatacaaccggttttttttttacaaaatttggcatttt

SEQ ID NO: 3304 - DNA, 180 bp, Glycine max
  unsure (1)..(180): unsure at all n locations
  Clone ID: PAT_MRT3847_102989C.1
gaaagaaaaccctagcttaccttttcaactttcaagatgcaaatctttgttaagacactcactggtaagacaataancttgtggtggagagttagatacatagataatgtaagtcaagatcatgcaggagggatcacagacagacgtctatttgtggagcactgagatgagtaatgtgat

SEQ ID NO: 3305 - DNA, 319 bp, Glycine max
  Clone ID: PAT_MRT3847_10298C.1
ttccaaaccgacagcgagggccggaagtttaactcctgttcgtctcagacggcacgccggtaagcgtgcgccgcatcaggcaatcgtcgccgtcgatccaggatccgttcaagtagcggccccttgtgtcgccctgcttgtcaccggggtgagcacgcatcctcccgctgaaactccaggtcaggcggttatgctctcgcgtgcatcctcattgaggagacccgattgcatccagaggcgaggccgagagtccggcaatgcgtgtgatccgcgggctcgcgcgcatcctgatcgcctgcttgttcgctggcctctcgcc

SEQ ID NO: 3306 - DNA, 314 bp, Glycine max
  Clone ID: PAT_MRT3847_102990C.1
accgaccgatgacccgcgcacagctactagcgagccgccttgttttgtggttgtttttggcactaggaagatggtgattacgacattgtcaaagagaagcccgaataaggagattcaacttgtgattcagagcccttgactgtctatagaatggatagtgtggtacattcaaaagctggataagacgggggcccgcctatatggccagcgtaggaggagaggccaactgaaaacgtacattgacgcctaacatacaactggccaactacagatacaacatacgctgcgggccgagaaggcctttgaatctactg

SEQ ID NO: 3307 - DNA, 655 bp, Glycine max
  unsure (1)..(655): unsure at all n locations
  Clone ID: PAT_MRT3847_102991C.1
cccacgcgtccgcgtgaatcgtgatttagtagtgatacgcacacactcgcacgtccacttccggattctcaattctctcttctccaaaaatctcataccataagtttctactacttacctttagtagctgcttttgcttacaaacacctacgctctctctctctctctctctctctcttcaggttgggaattagtgcctttggtggtcaccatgttccttcttagaaggcaaacccagaatcaccatgagaatgattcctcatatcaagatacaaaggtggctgaactcaagacagctcttgggcccctctctggtcgtcaattaaagtattgcacagatgcatgtctaaggagatatttagaagcaaggaactggaatgttgataagacggctgaaatgctacgacagaagggggagtggagggcaacttataggccagaggaaatccgttgggctgaaatagcacatgagggcgagacaggcaaagtctccagagctaactttcatgatcgacatgggagggctgngcttattatgagttctgtgatgcagggggcagcatcggctgaagataatatcaggcatttagtctatctgttggggggtgctaggcggaatctttctgaaggccaagaacaaacgtgatggttgata

SEQ ID NO: 3308 - DNA, 546 bp, Glycine max
  Clone ID: PAT_MRT3847_102992C.1
aaaaaaaatggctctgaaactaaattggcttagttttaacattagggccccttaagggggtttttttttataaaaaaaattggctcaaaaaaaacggaaaaaactaaaattcccctcaattcaaactaagacaaaaccgggattttcttttaaacaagggaaaagggctttttttttttgggggaaacaaaattggggggggccctgttttattgaaacaggccgccaaaggaagggggggtgccctaaacaatccaaagaacccgcgggattctctggggcaacagggccaaaaacaatcctgggtggggattccccctcccagaatcacagtacctggtgaaaaccgccccctttttgtcccccccgcttagttcctgtttgaatcaggcttccgggccaagaaaaagtacatgggggggaaaatttttttttttcctccttaaactagcccctttgcagccttttttaggaaattttgaccccttagactacccttgggggccgggccaacatactccaaaaccttgaccatttttttgggga

SEQ ID NO: 3309 - DNA, 251 bp, Glycine max
  Clone ID: PAT_MRT3847_102993C.1
gcaacgcttaacctctctcattccccatttcctcacctccttcaaccgctgctaaattctagggttccgaaatggacgctggcggaaagatcaagaagggcgccggaggtagaaagggcggcggcccaaagaagaagccggtttcaaggtccgtcaaagccggtctccaattccccgtcgggagaattggcccgtatttgaagaagggaaggtccctcagcgtgtcggtcccgggcccccgtatactgggc

SEQ ID NO: 3310 - DNA, 509 bp, Glycine max
  Clone ID: PAT_MRT3847_102994C.1
atcagatttacgagacaattttgttcctctttaaaaccaaccttcatttccggtttttggttttctctgtgtgactctgtttttcattattatcgcaggaaaagaaaagaaaaaaaaaaaccctaatctctggaatagcgttggattggagcgtttggagggcatcaaatcaatagagtgaagcagatcaagaggaagaggagggcacaaccaatgacaatggggcccaccgataaagaattggaagagcagcttctcgacgccggtaacaagctcctcctagatcctccctcctcagcggaggagctcctcccactcctcgaccaagtagagtgttgcctatcgagggttgagcagtcccctattgactctatgcaaaatgcactctctccatcattgaaagcattgattgcggacaaacttttaagccactcagatgatgatgtcaaagttgcagttgcctcttgcatcagtgaaataacacgaatcactgcacctgaagctcctta

SEQ ID NO: 3311 - DNA, 409 bp, Glycine max
  Clone ID: PAT_MRT3847_102995C.1
atgaaatttaggaaagcaccaagggaagattgtaagaggtgttccaattccaatatttccagcattcgaaacttgtggtttttagagtgttaattagtacgcccattctagcgttattaacactaaacaatacgtagaagggaaaatggtgttcctacacatgcatgcaatttttgacaactagaaaactgaagattcgctcatgttctttcttttgcggcttctgaaatggtggataagtggatttgaggcatcaaagtgcaagattcatcaaattaattttataagcttccttcttctctttctcttgtttccctttttctaaactgtgtagttaaatttttgttaaccttatgtaatttgaactcttatgtataattcaagttcatttcttttaaaaaaaaaaaaa

SEQ ID NO: 3312 - DNA, 278 bp, Glycine max
  Clone ID: PAT_MRT3847_102996C.1
gcggcctttcttttttttattttgaactatatcataagaggtagataaaagaaggaacaagattacagaaaatatagaacaaatagcaggggaataaagcttcgtcaaacagaaacacactttaatatgagacctcagataaaaaaacaactgaaacagataaattagttagacacaatcaaaaggacttactgcccaatttatataaataaaagagaagagcagtatggacaaaggcaaaaacacaacaaccactaagaaagtaacacaaacaaaca

SEQ ID NO: 3313 - DNA, 549 bp, Glycine max
  Clone ID: PAT_MRT3847_102997C.1
cccgaacgacaccgcagcaaactggcaaagcgagagagcatcgtccgcgcgacggcatctcggagcaccatggcgataaccacacagttatcggccctcggcctgctcgtcgccgtgctgatcgtcgtctcggccgccgcccatgctggacagagggtcgggcggacaaggcggggcctcacctgggccgactggtccgggagcgatcaggtgcccgtgcacgccaagcaggtgggcagcagcgacgaggagtactaccggaacggcatccacttcgagctgacaccgttaagaacccggacgagcccgagctcctcgacatttactcgtcagagctcgattttgagacggtcttcgacgcccgacgcccaaccaaggtggccgtgcacggctggctcagcgacggactcggcctgatacagctgaggaaggcgttcctcgccacctcagacgtcaactacatcgcggtcaactggaccgacatcgacaccatcgtgtacccgctggcgcgctaccacgtgtccagcatagcacagcgcgtcgccttcc

SEQ ID NO: 3314 - DNA, 335 bp, Glycine max
  unsure (1)..(335): unsure at all n locations
  Clone ID: PAT_MRT3847_102998C.1
ccacgcgtccgccccacttccctacttctctttctcttcttttcttcatcgcgacaccaccatcccgccacaccctctcttcttttcttcatcgcggcaccaccaccgcgccacaccctctcttcttttcttcatcgcggcaaccatggcggcaccaccatcgcgccacactccctcttcttttcttcatcgcgacaccaccatgggggcaccaccatcgggccatgcaccaccatcgggattcgattntaccacacagacacgctccagtggacagtttctttacgaaaccggttcttcaactgaagggaccccatgaactgggaaaccaaagc

SEQ ID NO: 3315 - DNA, 248 bp, Glycine max
  unsure (1)..(248): unsure at all n locations
  Clone ID: PAT_MRT3847_102999C.1
cggctcctcctttctcgaccccaagggccgcggcggctccaccggctacgacaacgccgtctcgctctcttgttggggcagaggtgacgaggaggagctccagaaagagaacatcaagaacgccgactgctccaccggcaacattacgttgagcgttaccaagagcgacctgtataccggcgaggttatctgcntgttttatagcttgtaacttttctacaccnaccttggtgccaatgctctccagg

SEQ ID NO: 3316 - DNA, 604 bp, Glycine max
  Clone ID: PAT_MRT3847_10299C.1
gctgaagtcttaatcaatataaacaaagaacaaattttatacttcaaggtcaatgtcaccttatggtacgacatcataacatgaattactagaatttaaactattatatcttccgatatatgttattatcttttttctttctcttctgcattgctgatattaaattccaagataattattatatcattttaaaaaccaaaatctggaatacccagaagaaggttggcatatctctgggatattgtattagcaattgtcgtttattatacaacgagttgaggaatattatcaaatagaaataatatatggaatttcacaaaccaccctccccggaaaaaaacaaagctttagaatgaataaacagtaacacccttaacattgatacgtgtaaaagaatcattttccaggaatatggttataaatttgaaacactatactataaagtatctataaccaaaaaaaaaggtcataaccgtcttttcagaaatacgcgtccaaaagcgaaaaaataaaagcaccttcaaccctttgattactacaaagtccagatcttaaagcagccaaaattctcaaaataatcgaaacatggcaatgaaaagggaac

SEQ ID NO: 3317 - DNA, 160 bp, Glycine max
  Clone ID: PAT_MRT3847_1029C.1
ggctgcctcatcttatgctatgcaatcaaaccttgcaaaccgtatgatccgcatttccagcaggtctagagggagctcatatggtgtacctgcttatgacatgagaaggaatgttggcctgatagttaagtccatggctgaggaatagcaacctagtcag

SEQ ID NO: 3318 - DNA, 413 bp, Glycine max
  Clone ID: PAT_MRT3847_102C.1
ttctttcgttcgtgcacgcttccggttgtgataaaccgcgtgcataggttgccgaaccttaaaagcggaaacataatcaatcgcatctggattccatgaatctctcaattgcttgctacttttgttgtgaacgattccttaagggaaagaagatcactctctgtgctgaccacacacttcgtgaatcatttgcttttacattcttagttgattcgctgaacactctactgttcgatataggacttccagtcacatataaacttgttctgattgtttcacacatctatgtttaagttcaagttcaagctggcgaaaccttggattagtgctcccactgtcctatctggcataggacttcagggagagactcatgtattgctgtaggttctgccactatgttcttctcactgatc

SEQ ID NO: 3319 - DNA, 796 bp, Glycine max
  unsure (1)..(796): unsure at all n locations
  Clone ID: PAT_MRT3847_103000C.1
tggtagcttagcagaggaagaagatgggttggttaccctnnnnagcagagacagcacgggtggtgacttcatagagacagaagatggagagggtngtctgggtaccatgctattcaatattcggataatgacatcaagtttggaagccatgaaagtttgggctgcagcgatggaagtttggctgcagcgagtttggccatagcggccttgaggcgatccacgcaggcaacggaaagttcggtgtccaccattgaagaatgacaagtcggaccaaatgataagggttgctccttgcgttcgagaccaaggataatcttccggggaaagaaggaaaacaaaagcaagcttgatgaattttctctaccttctggtggatccgtgtaatgatgataaaaagatttgactacactgcacatgttcccttcttgtcttcaacagaacaagaaaaaggcagccatcatcatttgcttttgaattctggttttacttatttttagatctttcttgtgtaatggttgtttttcagtttcagtgtcctatatatcattctgttgttacctgttttcaatcattggatctgaatttctcatgatgagtatcaagaagatctcatgtgtgtctgtctatatttataggatctgttttagggttttcatagccaaacatgttagacttttaactaaatagaatagtttgagcatatgcacctatattatagttcttctttccttgatatatgtatacatagacccaaaaaaatgaccaagcgaaatggaggttttttttctttaaaata

SEQ ID NO: 3320 - DNA, 140 bp, Glycine max
  Clone ID: PAT_MRT3847_103001C.1
attactcttgaggccgagtgcactcacgcaatagaccttataaacacagcaatccaataggggattggtatgtctgctcaccaccaaacggtgataataggaagattacacatttaaagaaggacatactcgttacatac

SEQ ID NO: 3321 - DNA, 300 bp, Glycine max
  Clone ID: PAT_MRT3847_103002C.1
aaaaaaaaaagaaacaaaacaaacctacttgaagataaaaaaaacacgggagctctctggctataggaggtacccaccttcaaagtaatcactgctcggtaccggcaggaaaaccaggtcttcctgtagggaagacaagacatagcttggcgcaaacaagcactaaggggattcactgggcagaagatgtttaccttgcacaaaaccacagaacgaccaaggcggaagcggaaacagcaacacctgtggcgcctaatgagggagctaactaccattacttggggagggcacactgcgttg

SEQ ID NO: 3322 - DNA, 402 bp, Glycine max
  Clone ID: PAT_MRT3847_103003C.1
gggtgagtaaaaatgcctaaatagcaggcatcaataatatatttttaggagtaaaatgcccttcttgtgaagcttctaaacatattacaactatatacacacaaggcattcatccagctcctgtgttaaccacccttcacacaaacctaaaatacataaaatcttagtagaatacatcttattcagacccttttaacttcaacatggcaatacaattctgaataacagttcacggaagtgtatgaatgagagatgagcgggagcttcaagccctatatatgtccagaacgcacctagctaccccattttaaacaatctgcagtccatccaaatatggactatagtattcactcaatacatccaaatttatattattggtattatataactatgaatcaaagg

SEQ ID NO: 3323 - DNA, 395 bp, Glycine max
  Clone ID: PAT_MRT3847_103004C.1
cccacgcgtccggccaatcgagctcacagtgttataggtaccgatgagttcatggccacagatctgtatgaagaggaatacaacgtgcttgatgacatctatgcatgtggcatgtgcttgctagagttggtaaccgttgagtacccgtatattgaatgcaccaatgctgctcaaatatacaagaaagtgacatctggaataaagccagcatcattggcaaaggtggctgatcttgaagttaaagcatttatcgaaaagtgtattgctgatgtgtcggaacgattgtctgcgaaagacctcttgatcgatcccttccttcagtcagattatgataatgatagtgtaggtcgatcttcaagatctcaaacccatcattcaggaaataattctcataa

SEQ ID NO: 3324 - DNA, 513 bp, Glycine max
  Clone ID: PAT_MRT3847_103005C.1
aatacattaaggtccccttaataactttgggatatgaaagtaattatgatgtttttgtcaaagctgagggtggtggcctgtctggtcaggctcaggcaatctctcttggcattgctcgtgccttgctgaaggtgagcgaagatcatagagtacctttgagacaggaaggacttcttacaagagattccagagtggttgagaggaagaaagttggtctcaagaaagctcgtaaagcccctcaatattccaagcgttgaggttgggatgttacatttgtaggtttttcgggttaggaaaagtaaagagaaattgaaaaatatccgaaggcgtatgtattcagaatcctgctccctgttttcccatctcttgtttccttgatctgtatggaattgggaattttaggtatgtaatatttgtctctcccttttacccccaaccaaaatcacatgttttactatattgcacgtttcttttcaagacctaaattttgtggtcttttactcttcatttctt

SEQ ID NO: 3325 - DNA, 1119 bp, Glycine max
  Clone ID: PAT_MRT3847_103006C.1
catccttacgtagtgtacactatccagtggagcttgaatttgccaaggcaccgaggcagtggaaggaagacaatggcggtttctctatcggcgctcacaacctccctctcttcactttccttctcttcccacatttcccagagaccaaacactctctccttcgccagaaccgaatccctctccgtctccgtctcgcgcttccccaaaaccccctcctccctcgtcgtttccgccaccgcactcgcggaaccggaaaccgaagacctcaagaactacgtcaagtcgaggctcccaggtggattcgccgcgcaaactatcataggcaccggtcgccgtaagagcgccatcgctcgcgtcgttcttcaggaaggaaccggcaaattcatcatcaattaccgtgacgctaaggaatatcttcaaggaaatccattgtggcttcaatacattaaggtccccttaataactttgggatatgaaagtaattatgatgtttttgtcaaagctgagggtggtggcctgtctggtcaggctcaggcaatctctcttggcattgctcgtgccttgctgaaggtgagcgaagatcatagagtacctttgagacaggaaggacttcttacaagagattccagagtggttgagaggaagaaagttggtctcaagaaagctcgtaaagcccctcaatattccaagcgttgaggttgggatgttacatgtatggtctgtcttttctttcctcctggtgtctctggaaatgagttacatttggaactattgattgttttcatttgtagttgtaggtttttcgggttaggaaaagtaaagagaaattgaaaaatatccgaaggcgtatgtattcagaatcctgctccctgttttcccatctcttgtttccttgatctgtatggaattgggaattttaggtatgtaatatttgtctctcccttttacccccaaccaaaatcacatgttttactatattgcaggtttcttttcaagacctaaattttgtggtcttttactcttcatttcttgtgccctgtaccttcatttggcatattgaaatatttgaaacaatgacatgtgaaatttcttactatctcctgtatggaattgggaatt

SEQ ID NO: 3326 - DNA, 2459 bp, Glycine max
  Clone ID: PAT_MRT3847_103007C.1
aggtgtggatgccttgctttgtgtgttgaaaaattaattaaaataagtacaattagttatttaaatcaaaattagaaaataaatacaaacacataaaaatacatgtagtggaagtattacgagcagggtttcgtcctatacacactctctctccgtcgaaatggccgcttcttcttcctcttccgacgagccttctcgctccgtcttcctcggcgtcgacgtcggcaccggcagcgctcgtgcaggtctatttgacgaggaaggaaagcttcttggttcatctagcagtctgaatacagatatggaaagacggtgcctgtgttgagcaatcctctacagatatatggcttgcagtttgtgcagctgtaaaagcagcttgctctaaagctaaagttgcaccaacagaagtaaagggtatgggatttgctgctacttgttctcttgttgctgtggattccgacagctcaccatgtttcgttttcttggagtggagattcaagaagaaatgtgattgtatggatggatcacagagcgatagaataagctgatcgtatttattcgtctaaatctactgtgttggagaaatgtattatggcccaaatactacaaatttgacgaatatcggttttaaatttgggtggtagtttacaagaatcttggtcaatggttttcaacgtggatggacttaagcgatttggttagtcatacagggcaatccggtgatgatactcgcagtctatgcaccacagtttgtaaatggacatatctgggtcatgcacacatgcagcatgtcaatgataaagagtctcgagacatggaagcttgtggatgggatgatgatttttgggaggaaattggtttgggtgatcttattgaaggacatcatgcgaagataggacgaagtgttgctttccctggccatcctttggggtctggccttactcctactgcagcaaaggaactgggtctggtaccaggaattcctgttgggacatcattaattgatgctcatgctggtggcgtgggggtaattgaaagtgtgccaccatcagaagctgaagaacatgacatggaagcaatttgcaaccgtatggtgttagtttgtggaacttctacatgccatatggctgtatcgcggagcaaattgttcatacctggggtttggggtccattttggtcagcaatggtaccagaatattggctaacggaaggtgggcagagtgctactggtgcattattggatcatataattgaaaaccatgctgcttctgcacgccttgcaaatcaagctgctacccaaaagatttcattgtttgagcttctgaacaagatgttggaaacaatgatagttgagctgaacctatcctttattgctgccttgactgaagatgtacatgttcttcctgacttccatgggaataggtcacccattgcagatccaaaagcaaaaggagtcatctatggtttgacacttgacacaagtgacaaacagttggctcttctttacctggctactgtgcagggcattgcatatggcacacgtcacattgtagagcattgcaatgctcatggtcacaaaataaacacactacttgcatgtggcggcctttcaaagaatcctatcttcatgcaggaacatgctgatattattggttgccctataattcttccaagggaaagtgaatctgtgctcttgggtgctgctattctgggtgccgttgctacaagaaaatatcatagccttagcgaggccatgaaagccctgaatgcagctggccaggtcattcatccatctaaggatccaaaggtaaaaaagtaccatgatgccaaatacaagatcttccgtggcctttatgaacagcagttctcatatcgttctacgatggcccaagccttgtcatagctttgcagaatgttttgactcaaactgtcaattgcagttaggtgctccttgcgaagattgtatattcatgcttcaagaattaaagtcattgggatggagaaagaaattatggcctgaatacgaatactgccattttgacgaagatcggttttcaatttgggtggcaggttagacattgaacatcagagatacaaggaaaaataatcaccaatactatggttaaaattcttatagaaattttatgtacaggctcactggcatcttattttctcccttgaacgccttgcgcacacttatcaaaataaaaaaaaaaaaataggcagctgctactgctagcatacatattgtacaaaaatatagagagcttgatacttggatagcatcattgttctaagttgtaccatatgacttccttggatttatttggacttcttggaaccctccttcgtaggaatcgtagccccataattcttagtcagacatgattttgggcttggatattacgaaatcatattggaatgaattaaattttataataattttgatcatggttatc

SEQ ID NO: 3327 - DNA, 293 bp, Glycine max
  Clone ID: PAT_MRT3847_103008C.1
ttgtttttgcgggggcaagctgactatcgaggggggcgggtactcgagtaccgtgggacgaacagagcggaaagctgtattaatggcttggcacgatatgcaggggtggaagcactgaggtacacaatgtgattacaggagactggactggctatgccctgaataagataaaatttaagggtcgggcttatgacgccgggtatggtttttgttgagagagcccgtatctcaatgggctggaaggaaagaataactttattcaacgaatggatcatgaggtgactgacagggct

SEQ ID NO: 3328 - DNA, 827 bp, Glycine max
  Clone ID: PAT_MRT3847_103009C.1
cccacgggctcgatcagtgatgatcgacgaatgctgataatcgatattagataggaaaagcaaaacaaagatataaataaatagagacaaagaagacgcgattgataacaagaagggtctgatacacactctctctccgtcgaaatggccgcttcttcttcctcttccgacgagccttctcgctctgtcttcctcggcgtcgacgtcggcaccggcagcgctcgtgcaggtctatttgacgaggaaggaaagcttcttggttcatctagcagcccaatacagatatggaaagatggtgcctgtgttgagcaatcctctacagatatatggcttgcagtttgtgcagctgtaaaagcagcttgttctaaagctaaagttgcatcaacagaagtaaagggtatgggatttgcagctacttgttctcttgttgcagtggattctgacagctcacctgtttcggtttcttggagtggtgattcaagaagaaatgtgattgtctggatggatcatagagctatagaacaagctgaaaggataaattcgtctaaatcacctatattggagtactgtggtgcagctgtttcacctgaaatggagccaccaaagcttctatgggtcaaagaaaatttgcaagaatcttggtcaatggttttcaggtggatggacttgagcgattggttgtcatacagggcaaccggtgatgatactcgtagtctatgcaccacagtttgtaaatggacatatctgggtcatgcacacatgcagcatgtcaatgataaagagtctcgagacctggaagcttgtggatgggatgatgatttttggga

SEQ ID NO: 3329 - DNA, 124 bp, Glycine max
  Clone ID: PAT_MRT3847_10300C.1
taactccctattctatgaaaaccgaatcaaccgacaccgcgaagtcgtgctgcgaaacatggaggaggttgaggggcaaactgaagaactgatcttcgatcacctacactccacacgattccag

SEQ ID NO: 3330 - DNA, 461 bp, Glycine max
  Clone ID: PAT_MRT3847_103010C.1
gagatcacagctaccaggaaaggaatggagaccaatttcacgaatctcagcaaaatggtacagagcaactattcccacaaatttcggaaactcacgacgatcaacttattgaccaaaatcaatcaaaatccgaagaagaacaacaaatatcacgccaacagtcatctcaattatcctcatcatcttcaccaatctcatcatcaagcaccgagcaaaataatactaatcaccattttgctccaagagcaaaacttttcgtaggccgtttacctgaaaactgctcctctaagcatcttgaagatttattttgcaaatacggaaccgtaactgaatgtgatgttgtcggtagatacgggtttgtgcatatgagcaagcctgaggaagctgaagagtgtgtcaaaaaactgaacagatattctttcatgggatccttattaactgtggagttctccacgagcaaa

SEQ ID NO: 3331 - DNA, 331 bp, Glycine max
  Clone ID: PAT_MRT3847_103011C.1
gggaaaacccaattaaacccccttttttgttttttttgggccccttcactaccccccctcaaggggtttatttttttgggggggtggggtccggggggccaaaaccaggtttccttgggggaaaggcctaattttcctttgccaaggtggttccccctaaaccacctttttggggggccctggggtaaaatccaccgggaaccctacccccccccccccccctggggattatagagggggggccccaagctttgaacttttgaattggggcctcagggggggaaaaatcccccggggggggggaccccggggggcaaaatccaccccccaa

SEQ ID NO: 3332 - DNA, 460 bp, Glycine max
  unsure (1)..(460): unsure at all n locations
  Clone ID: PAT_MRT3847_103012C.1
cggtgcgtgtgtcatttttngaatagaagccattgtcgtggtgtaagcaataaagcaactgcaattcgcatagccaaaggaaaaagcagaagaaattattagaaataaacttccacaaccacttcgctgttctgctctgcaatcatggactttatttctctgttcttcccttttttcctagtgaagcttgtcctcaaattaaagtatccaaattcccccatcatcacgcgtctcttccaagcaaccttccaccactaccacccttaatccattccattcctctttctctctctatttatttcatcccaaatccccaaatacaaatcatgaatctttcgtcgttttatcaccccccagaacccaaaacccacaatttcaattctgggcattcaaattagccactaaagtttcaattntgaattctgggtattcagtttccggccatgccacctcaaatgca

SEQ ID NO: 3333 - DNA, 1123 bp, Glycine max
  Clone ID: PAT_MRT3847_103013C.1
gcacgaggtcattcttcctccctttcataatgcatacataacacaacaaaccattctccattctctctcaaatcgaaaaaaactctgcaaattcaattcattccttcatcaaccaaaccccacaaagcacaccacacaaagaggaaaaaaaaaaaaagaaacccacaaaacttcacacacgatcataagaaaaattcaacgaggaatcgaaaagttcactgctttttttcttctttcttcttccttttctcttagtgtgtgatcattgtttcgtcgatggccacgggccccgaaagatcgaagccactgcacaacttctccttgccctgtttgaaatggggcacccaacggttacttcgctgcgtcaacgccgacctcgatcatcgccgatcctccagattccacgcgcctcagaacgacgccgttcgaatcaccaacaagcgtaaaatcgacgaggtggggggtctcagagaagaagaagctgctgctgccggtggtgctgctggtggcgcgaataatgcgatgatgccttggaatttgaggaccgagaagagctgcgtgcaaggcgccgccacagaacaacgaagaggagcgaaggcttttcgacacgaggtgttcttcgccgccggtgaaggagaagaagaaggtggtggtggtggcggggaataataataatgagaaagttaagttctctgtttctctctctaaggaggaggtggagcaggatttctgggccctgctcggagctaggccccccagaaggcccaagaagaggcccaggattgtgcagaggcagttgaatacactttttcctggtttatggctggctgagatcactgcagaatcctacaaagtggctgatgttcctgagtgaggggctgaaatgaatggcaaacactgattgtgactctgaatggatcccccatttatttttgcttgctgacttcctatgtgttgtgacataaataatggtaaattccaaatcatctatgtaaatcaaaggtttaattcaataatcatgaaattttggaattttgcaattagttgtacttgtctgaatgttgtagcttgcagattctatgaatcaacgttcttttgtgctttttttgaaaaaaaaaaccca

SEQ ID NO: 3334 - DNA, 383 bp, Glycine max
  Clone ID: PAT_MRT3847_103014C.1
gcaaaaaagctagctaattgtgctcattgcaacaagttactttcttcaccggtacctagcaaaccaaacaaggctatcaggggtaacttaacaaaccgaattgtctcccttacccaatatcctgacaacctggggccttacaactatgacaccggaactacttttaaccttgaactttactatttgcgctggccatttgatttcattgcccaaaggccgatcatgttagatcccaccatcctgaaatctctacacccttgggagaattggctcaagtgaggcttatctatatcactgtgatcaacgctgtacatagccatgaaatgctcctcatgctgatcgaccaggatcgtattatggtctaccatttgaaacccaacttt

SEQ ID NO: 3335 - DNA, 711 bp, Glycine max
  Clone ID: PAT_MRT3847_103015C.1
atccttatttgctgaacgtcaatattcctaacttgccatatggcgagatccgcggtattcgtgccgcacgtttgggaaagcggcacgaatccgagccggtgatccggacgcaagacccacgcggtagggaaattttctggatcggccctgccggcaaggcaaaggatgtcggggaaggtaccgatttccatgtagtggcaaagggctatgtctcgattacgccgttacagatcgacctcacccatgcctcgcagctcgagatactgaagaaaggcttgcaatgacggagcaagagaagcgctttcctttgccgctttcttttgtggtcgacaagtcgtccaaaggggcgtctgtatcgccccgcattgcaacgccacagacggcaacgcaaaacgcagcacgtcatgtaacgcgtgctccccaagccgcagatcccactacgcgcagtgtggctgctccggccgcaacgcctttcgcctcgcctttggtgtcagatgctgtccgtagtgcgatggtggcgcgcattgcaaaacagggcgtacgagatgctacggtgctggctgcgatggaagcagtgccacgccatatgtttgttgaacctggcttgtcggggcaagcatacgtggatgcatcactgccgatcggccatcaccagacaatttcgcaaccctacatcgtcgctcgcatgatcgaaatcttgcggggaagcgg

SEQ ID NO: 3336 - DNA, 374 bp, Glycine max
  Clone ID: PAT_MRT3847_103016C.1
attattatattgtgggcccacaagacacataaatatccttttttcggcggcccgttaaaagaaagataccaacccttctctgatgggagcccgctggtaacctaactgtttaactttgccagagccctttgggttggcagccccacttagggtataaagttccacatcccccttgcgaggctcgtttttgaaaattaagaccgatggaaatgtcaaagcccttggacctggcccaaatgtcaacactcatgggcagggttcccctcaagaggggtttactacaaaattccttgatccctacaagttaacccttaaaattaatgaggggaaaagtctgataaaatcgccacaaaccaggccccaaaaacaggggg

SEQ ID NO: 3337 - DNA, 160 bp, Glycine max
  Clone ID: PAT_MRT3847_103017C.1
tcaattgaaagaaatactgaagagtggcaagtagctaggtgtatgcaccgagtgggtgttcatatattattatttgaaggtaaatttaattatttgaaggtttaattgttgggatcagactattgacatctcaatgttattgcattttggtaaagtttca

SEQ ID NO: 3338 - DNA, 389 bp, Glycine max
  Clone ID: PAT_MRT3847_103018C.1
gcagaataactgctcacccttggacaaatataattcaaaacaaaaccttatgggtgttaaaggatcagaggaactttataattactttttccccaaagagtttgcaaataaaccaaacaaactttgttcgccaactgccctttatttcttttggaaaagataaaccccctaaaccaaattttttttttttttttaagcaacgccggattgcttgataaaatcctttaaatccctaagcaaaaaaattaccccccggccccatagcccttttgggtttaacgtttcacaaaaaaaaaaggcccccccccccccaaaggctttagggcccctaaaatttcaaaaaaaaatattttttttttgccttaaggacgggttggggccatcccccc

SEQ ID NO: 3339 - DNA, 1949 bp, Glycine max
  Clone ID: PAT_MRT3847_103019C.1
acgagctcctgcgcccgcctggggtgccagctggtgcgaaattcttgttctctgctcttgcttttgataggagtaaagtgaaggagctctcgctccaatttcagatggttgagttggggtggtggcttgaaggaaactgtagttgctccaacaatgcatcctgcacggaggtgaatcatggtggaggaaaactgggcttccggtgccgctgcgatgaaggtttcgtcggagacggattcaaggacggcgatggttgccggagagtttctgaatgcaaagcttcaacactatggtctggcggatgtaggaaagcagtcaaaattggtgtctttgttggagggatcatagttggagctatccttgtggctgctctgtctcttgtatgttactttaataggcgtcgttcctcttggctgagaaaacaagtaacagtaaagcgcctattacgcgaagctgcaggagactcaactgtccctctatatccctacaaagaaatagaaagagccacaagttttttctctgaaaaacataggctgggaactggagctttcggcacagtttatgctggacaccttcacaatgatgagtgtgttgctataaaaaagatcaagtatagagacaccaacagtgttgaccaagtcatgaatgagatcaggctcctttcttcggtgagtcacccgaatttagtgcgcctcttaggttgctgcatagaagggggagagcagatacttgtttatgagtacatgccaaatggaacactatctcaacatttgcaaagagagaggggtggagtacttccatggacaataagactcaccattgctactgaaaccgctaatgctatagcatatctccattccgcaaatgatcatccaatttatcatagagacataaaatccagcaacatactcttggattataattttcaatctaaagtggcagattttgggctttctaggcttgcattgacagaaacatctcatatctcaaccgccccacaagggactccgggttatgtcgatccccaataccaccagaactttcagctttctgataaaagtgatgtctacagttttggagtggttttggtagagataataactgccatgaaagtggttgattttgctcgacctcgaagtgagatcaatttagctgcacttgctgttgataggattaagaaaggtgccatagatgacatcatagatcccttccttgagccacatagggatgcttggacgctctattctattaacaaggtggctgagcttgcatttagatgccttgcttttcatagtgacatgaggcctaccatgattgaagtggctgaggagctagatcttatcaggcgcagtgggtgggcgaccatggaggaaaccatatgcatggcttcttcggttgggtccgtgtgttcatcgcctcgaaatggaagtgttaattcacttagaggtgttagttttgagagagctgcaggacttgggagtgagacattgattgttccccacaagactgatgtttttttgcaatcaattgaggaggtgaaggacagctctcctgtgtctgtgcatgatagttggttaagtggaactagctcaccttcaacaaatagcttgttaggacatgtagttcagtgacatatatacttattttgggtggaacacctattatttgaatggcaaaggtcattaatgttttccttttctcttttgtagttgtaggatataaccattttggtgtatgattggcaccaggattctgctttcgtttttctctctgaatcgtactaactcatccaaggcagttaattatgtttgaccaatcctaagtaattaataaacagaattcactattctttgttcatacagaaagtgatatatgaagagctaccatgtacaattgttgctggaaataaccaacgcctgagcctatagctatcttgtttgtatttgttt

SEQ ID NO: 3340 - DNA, 575 bp, Glycine max
  Clone ID: PAT_MRT3847_10301C.1
cttcattatccaataaaacccagattttcaaagcagaggaacaatttcctctggtatttgttcttcaccttgatacgtcgggagtgctcgtctgatgtgtaattttcagtctggttccccattctaaacatgttttgaaacatgcttgggttgcatccacaaaacgtcaccatcaattggaccagacctagtttgtatacttgatgagcatgacgatgaagatgtcattgatcctgcaaaataaaatataatacaataaaatgaatgataaaatttaaacctactctccaaattaaatcacatccaaacacaactttacataaataacaaattattttttaaaattttaataacaaaatatattatacaaataacctaattcatatatattctacaaataaattaaattacatacaaatataaatttaaatatataacataatttttatatttgtaacaaaattaaaacaatatatatatatatatacacacaaaattaataacttaaaatacttacgagtaaaataatttagcatacaaaattaattatttaaattacgttaaactattctaat

SEQ ID NO: 3341 - DNA, 353 bp, Glycine max
  Clone ID: PAT_MRT3847_103020C.1
gggatgtcttgcatctctgtgttgttgctgcctcataaatgagttctgctgttatccctcaatcttatgtatcagctgatgtgatcaaaattgctagaaggaggaaaaacaaaatgaataatatacatgttcatatatatgcattgttatgcttccagagggcttcagttagcattatgtttagttgaatattatttctacttttatccagaactataacttatgtttgttgcttgataacatgttttctttccatcttggtctttgatgtctctgtgcattaccatgaattaattttttatataatattattatacatattttttttatttaatttttattctctttatttt

SEQ ID NO: 3342 - DNA, 322 bp, Glycine max
  Clone ID: PAT_MRT3847_103021C.1
ggcttggaacctttgggctgatttatgtgcttgtttatgtgcttggtattatacctattcgagtcccccgcgaggaccttaaagtacggtccggtccgtagtacttatcgtcgtcgtcctttccggtacgctagaaacgtccggaaattttactaattctagcggcgttataaggttagtcttactcgttctcagtttcgttcttcctaagatcgcggtctcccctcttaaaaagaaggtcgtattcctaaaaaaagtcgtagtcgtcgtcttcgttaacgacgagtccgttaagcggcacggcttcgatagaaagactcct

SEQ ID NO: 3343 - DNA, 403 bp, Glycine max
  Clone ID: PAT_MRT3847_103022C.1
agcccacgcgtccgcccacgcgtccgcacacgcgtccgcccacgcgtccgcccacgcgatccgaagaaaccttatcttggtattttgattggttctgtggagagtttttttttctttggtgtggattttggtttgtgctgtttttggctgggaataacaatggccgatgatggaaacagaagcaattacttccagtccatcttggggttgcagaatgagtgcactgaattggagctaatgaatgcgtataagaaacatgcagagaaatggtacccagatcgttgttcagctagagggaattcagatttagtggaataagctactaaaaaatttcatgaaattccggaagcctattcaattttatctgaagccaacaaagcgttaatgtacgacatgggagtct

SEQ ID NO: 3344 - DNA, 1070 bp, Glycine max
  unsure (1)..(1070): unsure at all n locations
  Clone ID: PAT_MRT3847_103023C.1
agaaaatagaattgaattaaggacttggtaccattccatggtgggagttgagttgagtagagagaaagaagatggtggcgcgcaggtttcaggtgatccacgacgagtctgactttgatctccattacgacacagacgacggcttcgaagtttttcaattccagctctattccctctcttccgttccacctcatcaacaaaagattttcggagccgaacaagatactccagtggtcaatgactctgatctcgtcgccatttctgacaaactacgactagtctcggtcaacgactccgaacccgaaccaagcgctgccgatttgttgaaatccgatgaggaattggcccgactcttgcaggcagaggaggaagcgcttatgttgcagcagtatgtggcgagcgaaaatcctcgagaatttgatagtagagtacggccccacgttagtcaagtccgcatgtatgaggatgcaacgcggcaggaggctgctcggaagtccgttcctatggaagagctcgaggagaaagctttggtctctttggccaaggaggggaacttcaagccatcaaaaatagaacaagatcatgctttcctgctgcagctgcttttctggttcaaacgatccttcagatgggtgaattcaccatcttgtcatgattgtggcaacgaaactgtaggccagggcatggctcctccacttccttccgagactctttatggggcttctagggttgaactctatcgctgtactgtttgctcccaactaactcgcttccctcggtacaatgatccaatgaagcttgtggaaacaagagagggccgctgcggggaatgggccaattgctttacgttctattgtcgagcttttggctatgagtcacgtctgatcttggactttacagatcatgtttggacagagtgcttctctcaattcttgggaaggtataatttatctagaagttgttggcgatcataatctgcttaaactatgggctatatttttttgcggaatatgatattaaatgcataattgactntcatgctgntcttggttccagaatgggatggagca

SEQ ID NO: 3345 - DNA, 514 bp, Glycine max
  Clone ID: PAT_MRT3847_103024C.1
gttttattttttaatgtcaaagccgaaagagacgaacgggttatgccttaccaaaactctgttcacagtgatgatgctgagttcagtgtaggtcaagagatgaaacaactatctggtattttccctgctgttggatgtcagggtaatgatttctttaactgcgaggatggggttacaattgcaacaactcagaaagccaaatattatcaagatggtgtcgatggagctgccaataactttccaggaaacatgggaaatttgaatttaaaaccattagacaaatctttgtataatgcccagacatctattgccagtgggaagcagtataattgtgttatgagtgaaggagagggcaaagtaatcgaacatagaagtattgattctcatctttcaaaaggaagtattgagacatctaatactgaagacatcaatcaccctgcacttataagtcgatcagcagagcttgggaattcccttattacatcagaatcttctagagggggttatactcatt

SEQ ID NO: 3346 - DNA, 173 bp, Glycine max
  Clone ID: PAT_MRT3847_103025C.1
attaaaagggtttttctttttttttaaacaataagaccaatatacgggatggtttgctacatggatgccatacccaatttgaatgagaaaaatcgttttgctttctgggtccaggttgacataaatgactccgcattcagactcctgcgtaattgtagaaagggaacctaaaa

SEQ ID NO: 3347 - DNA, 553 bp, Glycine max
  Clone ID: PAT_MRT3847_103026C.1
ccaaatgaaatttctagtccaacagtcaatgtctttcaaaagacaaaacctgccaagcatatacagagaaactgtatagaagcataccgtgaatgacagagttgacaagctgaattctccccattatggacaaaatggagcccttccaagaggccaacttacacttaattttatcagcaacgcaatagaggtgccttctcgttggcttccctttgaagatagggactccaaaatagttgaaagggatatcactatggaagtactgaagcaaatcagagataacacgcagcctttgaccaggaatagatccaataaagattttagacttgtgcttgctaatcacttgaccaaaactatccttataaagctgaaaaaaatttatgagattatgcacatttctggaggtccccttgcaaaaaatcattatgtcatctgcgtgcatgacatgagaccgcgttaaagaccccattgggacggatcataggtagcaactttccttcagaaatcaacatagatagttccctgctcaagacatctttggcgatacaaagag

SEQ ID NO: 3348 - DNA, 137 bp, Glycine max
  Clone ID: PAT_MRT3847_103027C.1
cagctatgacgacacacgcacgcgaacgcaagcccggaaaccggcccgaggacacagcacatttttagaccaggataaacaaggcggagcccgggggagagcaagacggaagcagggaccccgagggaaacacgcaa

SEQ ID NO: 3349 - DNA, 502 bp, Glycine max
  Clone ID: PAT_MRT3847_103028C.1
gacttatattacaaggggagggtctgcagtatacgatcctagcttaggttcccttccatgccacatcatagctattctgtcatgtcacctcaattcaatggactgggcgttacttcacaacgactggaatgacaatgccctgacacaactcaattgaatcgcattgcatcccattctcgtttggtgaggtggtataaaagagaacaggaccgatcggattgcccttcagaagcgctgcctaaccggagagaggaacgcgacccgccctggagcattacactcagcgcgggtggtgggtaggctacgcgcagcgggtccgctagactgggccctaccgtacggcccgttcctttaactcacttcctttcctttctcgccccgcgcgtctgctcgcccagctatgctttaaaggctgggctcacggtagggattcaatgcattgctgtaccgcgcctcgaacccaatagactaggttaaggggacgggtaaagggccgtggccc

SEQ ID NO: 3350 - DNA, 163 bp, Glycine max
  Clone ID: PAT_MRT3847_103029C.1
tacacgctttctatcgatataactagaaacagtgttttgaaaatgaatgtccttgttttcggctaggctacaattatagtagcatggctatgccatacgtaccatatgttccctttcctaatgaacactgtctatagttcctctacttcatatgttaaattct

SEQ ID NO: 3351 - DNA, 855 bp, Glycine max
  unsure (1)..(855): unsure at all n locations
  Clone ID: PAT_MRT3847_10302C.1
cccacgcgtccgtacggcggaaataagaagaagcattttgtgactgaaaaaaggttttagatcgtaaaaactaatcactacgaaaacaagagatatcgaagatggctctgcccaaagctaaggagatcgtgtcgtccaattccgtcgtcgttttcagcaaaacctattgccctttctgcgtcgatgtgaagaagctcttcggtgacctcggtgccaattacaaggccatcgaactcgacactgaatccgatggaaaagagctccaagcagcattagttgagtggacggaccagcgaaccgtgcctaatgtgtttattggtggaaaccacattggtggctgtgactcaacaactgccctgcacactcaggggaagctggttcctctgctgatatctgctggagctgttgccaaatcaactgcttaaaggatctcccatttctaggttatgcagttaaataaaaataaaaacccaagtagttgggtcggttatataattcaggtcccagaaactaatgtgtgtattcctgtgtgattctctttaaactacaactctgtcaaacaagtctattgctgaatgaagttatttttgtttacaaaaaaaaaaaaaaaacaaaaaaataaaaattttttctgcgaattcttcggaaaatacaaaagaaagtgagaacttgacaaaactaaacaactagaatgcaccataggcaacccgtgataaatgccataagcatgacacactcccagaaagctactaatcatcaacagaattcaccacaatcaggtcgtggtaaacgacataggcgtggcgtgtcccaagaaggctcaaactcnctaacgaatctaccatgacctggtgc

SEQ ID NO: 3352 - DNA, 726 bp, Glycine max
  unsure (1)..(726): unsure at all n locations
  Clone ID: PAT_MRT3847_103030C.1
agctatgacctcgatcgacgctcggaattcggctcgagaaattagttcattctctttgcgcagttccctacctctcctttcaagatgcagatcttcgtcaagaccctcaccggaaagaccatcacccttgaggtggaaagctctgacaccatcgacaacgtcaaggccaagatccaggacaaggaaggaattcccccggatcagcaacgtctcatcttcgccggaaagcagctcgaggacggccgtaccctcgccgactacaacatccagaaggagtcaacccttcaccttgtccttcgtctccgtggtggcatgcagatcttcgtcaagactctcactggcaaaaccataaccctagaggtcgaaagctctgacaccattgacaacgtcaaggccaagatccacgacaaggagggaatccccccagaccagcaacgtctcatcttcgacggaaagcaacttgaggacgggcgcaccctcgccgactacaacatccagaatgaatcaacccttcacctcgtgctacgtctacgtggtggcatgcagatcttcgttaagaccctcaccggcaagactataaccnctgaagtcgagagcttcgacaacatcgaccaactcaaaggctagatccaggacaaaggaggtattcccccagaaccgcagaagctgatcttcgcccggaagcagctcgaggactgacgtacccttggctgactacacattcag

SEQ ID NO: 3353 - DNA, 1802 bp, Glycine max
  Clone ID: PAT_MRT3847_103031C.1
attttataaccgtaaattaggtctaattagagtttttttcataaagattttcggatccgtttacaacaagccttaattgttgattgtgtagtcgtagattagggtttttttcatgaactacttcagatccgttaaacaacagccttatttgttgatacttcagtcgtttttcaagaaattgttcagatccgttgataaaagccttattcgttgattctgtatggtatttaaagagatattgctcagatgcagatcttcgtcaagaccctcaccggaaagaccatcacccttgaggtggaaagctctgacaccatcgacaacgtcaaggccaagatccaggacaaggaaggaattcccccggatcagcaacgtctcatcttcgccggaaagcagctcgaggacggccgtaccctcgccgactacaacatccagaaggagtcaacccttcaccttgtccttcgtctccgtggtggcatgcagatcttcgtcaagactctcactggcaaaaccataaccctagaggtcgaaagctctgacaccattgacaacgtcaaggccaagatccaggacaaggagggaatccccccagaccagcaacgtctcatcttcgccggaaagcaacttgaggacgggcgcaccctcgccgactacaacatccagaaggaatcaacccttcacctcgtcctccgtctccgtggtggcatgcagatcttcgttaagaccctcaccggcaagactataaccctagaagtcgagagctccgacaccatcgacaacgtcaaggctaagatccaggacaaggagggtatccccccagaccagcagaggctgatcttcgccggcaagcagctcgaggacggacgtacccttgctgactacaacatccagaaggagtcaactctccacttggtgttgcgtcttcgtggtggtatgcagatcttcgtcaagacccttacgggtaagactattaccctcgaggtggagagctccgacaccattgacaatgtgaaggcgaagatccaggacaagggaagggaatcccaccggaccagcagaggcttatttttgctgggcaaacagctagaggatggaaggaccctcgctgactacaacatccagaaggagtcaactctgcacttggtgttgcgtcttcgtggggggttttaagctggagctgatttctgtgtgatgttcgatgttggattttcccaaacattttaagaagaaatgtgatgtgtaatgggtctgtaatgacctttgaaaataagtttggtttgtgttgaactctattgtcccattaatgttactactgtttgttatcaatttgtggagctgatatataattatcaactgtatgctggcatattgtgtttgaattttgttctcaatccagtgaattggcgtatattagtgggttttttattcttcatgcttatcacggaggaaaagcagggatgagttgtgtgaaggatggtgatcatcccacgaattattagattttggtattataggttaaagatatttattaggtagggagaactcttggattagattctaaagtgatattttgaaaacacaccaaaggatttttgaacaaacggagatcatgatccctagtttcaattagctgccccttaccaagaggtagccacttaaaaattatgctcgtgaagcatatttggtatcgtatataaattatgtaagcaatctgcttcagttggaacattaattggcttgcggaatgcacatttagatgatccacacaggtccacataaaaattcctaatcaattttagttatgc

SEQ ID NO: 3354 - DNA, 540 bp, Glycine max
  unsure (1)..(540): unsure at all n locations
  Clone ID: PAT_MRT3847_103032C.1
ccacgcgtccgcttttctctctctttttggtggggttcttttcagttttcacggccttcaaactctttctcttcgtgatagggggagatgtgtttctcgtgatcttcagctctggattctgagcttggttgcaaaaaggtcctttttttgggcttatgagagtgcggtcctttgcaggttttcagcagataagtagcttagcttccttgttgatatattcttgaaggtttttgatgctgtttttctgcacttgttgaacctttttcctttgttttgcatctgggtgttgttttggaactgtgtcactctgttggcatgtgagttttttatgtatgtggatttgagatattggtctaatggtctctctgaaatgatatttggtagagagatttctgttagaatgatggctatttttatttgaagatatagagtgtaatggatgagattgaataaactgttggatgattgagcatanatgggtttgcatgattttaatctgtagataaggtgaaaaggggtgaaagaaatttggttggagct

SEQ ID NO: 3355 - DNA, 2037 bp, Glycine max
  Clone ID: PAT_MRT3847_103033C.1
cccacgcgtcccgatatattccattctctctgtgtatttccctacctctcccttcaaggttagtcgatttcttctgtttttcttcttcgttctttccatgaattgtgtatgttctttgatcaatacgatgttgatttgattgtgttttgtttggtttcatcgatcttcaattttcataatcagattcagcttttattatctttacaacaacgtccttaatttgatgattctttaatcgtagatttgctctaattagagctttttcatgtcagatccctttacaacaagccttaattgttgattcattaatcgtagattagggcttttttcattgattacttcagatccgttaaacgtaaccatagatcagggctttttcatgaattacttcagatccgttaaacaacagccttattttttatacttctgtggtttttcaagaaattgttcagatccgttgacaaaaagccttattcgttgattctatatcgtttttcgagagatattgctcagatctgttagcaactgccttgtttgttgattctattgccgtggattagggttttttttcacgagattgcttcagatccgtacttaagattacgtaatggattttgattctgatttatctgtgattgttgactcgacagatgcagatcttcgtcaagaccctcaccggcaagaccatcacccttgaggtggaaagctctgacaccatcgacaacgtcaaggccaagatccaggacaaggaaggaatccccccggaccagcaacgtctcattttcgccggaaagcaacttgaggacggccgtacccttgctgactacaacattcagaaggagagtactcttcacctcgtcctccgtctccgtggtggcatgcagatcttcgttaagacactcaccggcaagaccataaccctagaggttgaaagctccgacaccatcgataacgtcaaggccaagatccaggacaaggagggtatccccccggaccagcaacgtctcatcttcgccggaaagcagctcgaggacggccgcaccctcgccgactacaacatccagaaggaatcaacccttcacctcgtcctccgtctccgtggtggcatgcagatcttcgttaagaccctcaccggcaagactattaccctagaagtcgaaagctccgacaccatcgacaacgtcaaggctaagattcaggacaaggagggaatccccccagaccagcagaggctgatcttcgccgggaagcagctcgaggacggacgcacccttgctgactacaacatccagaaggagtcaactctccacttggtgttgcgtcttcgtggtggtatgcagattttcgtgaagactcttacgggtaagactattaccctcgaggtggagagctctgacaccattgacaatgtgaaggccaagattcaggacaaggaaggcatcccaccggaccagcagaggctgatttttgctggcaagcagctcgaggatggaaggaccctcgctgactacaacatccagaaggaatcaacccttcaccttgtcctccgtctccgtggggggttttaagctcgttgtgtaatgttggatgtgttcccaaaacatttgaagaactttgatgtttaatgggtctgtaataatgtcccttgaaaataagttcggtttgtgttgaactcaattgtgtcccattaataatagtactctaatatcccacctacgtttgttatgaatgtgtgaaatatgaaatgattaattgtcatatcgtgttgttttaatttgttctgaattggctagaggggacttaatatggattttttattcgatttgtgtggtcttccatgcttgtcatgaaggaaaaacagggatgagttgtgtgaaggatggtgatcatccttcgaattcgatggtattataggttgaagtcggtcattgatagatgttatgtaaaggcaacaatgaaatttgaacaaactgagatcattgtggtgatcaattgaaatgggaaggttcttcatcaaaaaaaaaaaaaaaaaactcg

SEQ ID NO: 3356 - DNA, 371 bp, Glycine max
  Clone ID: PAT_MRT3847_103034C.1
cctgagcccgatctctctctagatgcaaccgtaggagagagaacctctgactgcgatagagtaagaccctaccgcaaacgctctgctatcattatcaccacagagtgtcacttgaccgacatcgcagaacgtatccacgatcctggctcgctgcttctgatacacttggactagcttgtggcaacaattacaatggcgacttcagagcgtcaagggcctcctccaactcctgcagctgatattgctggcaatgctcttgtggatcagttctgccacctcttgcacgaaagccctaggcttgctcatatgatttaccaagatgtcactaagccaggccaccctgagcagaacggcattatgggtcttacaac

SEQ ID NO: 3357 - DNA, 617 bp, Glycine max
  Clone ID: PAT_MRT3847_103035C.1
atcaacaaggacaaagaacttgcaaggctaattaaccacatcaaagtataagggatttgttagataaagcttgtgctcctaaccgaccttaacatcattctcatttttcatcatgacaaaactcaaaaagtcatcatcatcatacatgtttgttttaggaaaataggctttattattattattattatttattttaagtaggttgtagaaataggggaagatcatattcattcatgtattcagcattgggtagaatctaattatttgagctttggattctaccttttagagtaactcaaccaaagattattgtgtcttgggtgatgggagcacccaatgacatagttctttgtttatagtatttcagtagatggggttcaaaagatcattttatatcttttgaacttttcattggccagtcaaataggaagacaaaattgagcttggattgctcaataggctagcatgtattttattttttctattgtcatgattgatttttatttttttcaaagataggattagtccaaaagaaaaacataacgtctattgtttctctcattttttcatataatcttgtttttaccattcatctttcgctgtcacgttacattctt

SEQ ID NO: 3358 - DNA, 459 bp, Glycine max
  Clone ID: PAT_MRT3847_103036C.1
tctttttttgctccacaattgcatcagccttgtcaacccgccttgggagtcctgctaaagctgaaagcatattctgaaccggctctttggacaagtcctgctttactcttggtattatcttcattaaggactttcgactaggtttagcattctcaggatatctcttagacctatttacatgacttgcatgccttattaccagcctaccttgaattacagattggattaacatgattgcatggatctcctccagatgtctagaattaatcgttattgaagaccttcccatagcaccatgtctccttattgtgttgagttcaccaataagtgactgttatgatggcatttcattcttaagttcacagaatttaccacgagcttgatgaccacggtagcgtttttgaatctcaaggattccctgcaaaacctgcttgatcttattctccagtgcattaatct

SEQ ID NO: 3359 - DNA, 1334 bp, Glycine max
  Clone ID: PAT_MRT3847_103037C.1
cttgttcacccttccccttctccttacttctcactctctttccaaaacactccctttctctttccccttacccttcttctgtgtgtgatgatgtagatagagaataaaaagagaccagtgtgcagtgagaaagagacgaacacagtccgaggaacaaccacgtgtatgggaaggagttccagtccatgctggaaggactcgacgaagaagggtgcgtggaagaagcagggcaccactctgagaagaaacgacgactaaacgtagatcaggtgaaggccttggagaagaacttcgaagtagagaacaaactggaacctgaccgaaaggtgaagctcgcgcaagaactcggcttgcaaccaagacaagttgcggtttggttccaaaaccgccgtgccagatggaaaacaaagcaattggaaagagattacggcgtcctcaaagccaattacggatcacttaaacttaactttgacaccctccaacaagacaacgaagccttactcaaacagataaaggaattgaaatcgaggctggtgcaagaagagaacaacaacaacactgaaagcgatgtttcggtgaaggaagagatgatagccactctgcaggatagtaacccgctctgtgaatccgccattcctggatcggactcgaaggagttgagttacgagtgtttcaacaagagtgatgaggtgggagggggttctgtgttccctgtggatttcaaagatgggtcttctgatagcgactcaagtgcgatcttgaacgaggagaacaacaaccacagccccaacaacaacgcggcgatttcgtcgtgtggggttctgcaaagtcacgggcttttgtcgtcgccttcttcttcgtcgatgaacaactgtttccagttccagaaacagtaccagacgacgacgcagtacgtgaagatggaggagcacaattttctcagcgccgacgaggcctgcaatttcttctcggacgaacaagcaccaactctgcagtggtactgttcagaggaatggagttaagagggaagaagaagaagcttaattaattgagagcgagggagggaatagaaagaataaggcattttgcagggtgtatagtaatgggatggagagagaaacattgtaaaaatgaaatggtcaaggattgaagaagagagggaaattgaagagcttgagagagaggggatggggtcgaagcacgcatggcgtggggtcggagatgagaggttgatgacgataaaaaaaaaggggggtaataataatcatcaacatccgtgcggggaaaggggagtaatttatgaataataataatgattaggtcgtaatgaagtg

SEQ ID NO: 3360 - DNA, 2223 bp, Glycine max
  Clone ID: PAT_MRT3847_103038C.1
ccttggtttatttaaagacacaaactcttgttcacccctgggcgtccgcttgttcacccttcttccctttctcacttaccactctcccccttctttccaaaacactccctttccctttctattcacttcccctacccttccgtgatgatgtagatagagaataaaaagagaccagtgtgcagtgagaaagagattgctcacttcttgtgtgggtttgttttgttctttgtgttggaatttgttcatgggtgaagaaggagaagaggtgtcaagagagaaggaacaatacatgggagtttatggaaatgagtggttgtattgtggttgctctgcaaattggcgccgtttaagacaccagaattcctgttccatgccttttttcaagtgaaaaaaaaaaacaattacttgttatctctcagcttttcttcttgagatcttaatatacattgacttaaaaaaaaaaaaaaaagggatcaaatttaagttccttgatcttaataaagttccgtgcttttgtttgtactcatgaagagacttggcagttctgattctctgggtgctctcatgacgatttgtccaccaacaggttaattgaaaaaattgaaacttcggtttttaactttatttccattttatttcaaaattcagaaacagatccatgatgcgtgtttcatgtttgtgccttgtcttgtctcaactttttttcacaatcaaccatcccaattactcaaacccttcctttttttaatactcaaattccttattctgtcttttttttttatataagtattacattacaactcatcatgttgaattatgctttgtgttcgtttgtttcaagagacaacaacagttacacttagaccaaccatgattatgtcttgatttgaaaacagacgaacacagtccgaggaacaaccacgcgtatgggagggagtttcagtccatgctggaaggactcgacgaagaagggtgcgtggaataaccagggcaccactctgagaagatacgacgactaagcgtggatcaggtgaaggctttggagaagaacttcgaagtagagaacaaactcgaacctgaccgaaagttgaagctggcacaagaacttggcttgcaaccaagacaagttgcggtttggttccaaaaccgccgtgccagatggaagacaaagcaattggaaagagattacggcgtcctcaaagccaattatgaatcacttaaacttaactacgacaccctccaacaagacgacgaagccttactcaaagagataaaggaattgaaatcgaggctggtgcaagaagagaacaacaacaacactgaaagcgatgtttcggtgaaggaagagatgctaaccaccacgctctgtgaaaccgccattcctggatcggacacgaaggagttgagttacgagtgttttaacaagagtgatgaggtgggagggggttcttctgtgttccatgtggatttcaaagatggctcttctgatagtgactcaagcgcgatcttgaacgaggagaacaacaaccacagccccaacaataacgcggcgatttcgtcgtgtggggttctgcaaagtcacgggcttttgtcgtcgccttcttcttcgtcgatgaacaactgtttccagttccagaaacagtaccagacgacgacgcagtacgtgaagatggaggagcacaattttctcagcgccgacgaggcctgcaatttcttctcggacgaacaagcaccaactctgcagtggtactgttcagaggaatggagttaagagggaagaagaagaagcttaattaattgagagcgagggagggaatagaaagaataaggcattttgcagggtgtatagtaatgggatggagagagaaacattgtaaaaatgaaatggtcaaggattgaagaagagagggaaattgaagagcttgagagagaggggatggggttgaagcacgcatggcgtggggtcggagatgagaggttgatgacgataaaaaaaaaggggggtaataataatcatcaacatccgtgcggggaaaggggagtaatttatgaataataataatgattaggtcgtaatgaagtgaaatctatctagtgagtaatgctgtaaaaaatccacaattcacctctgcttccacctttctttctagctctcaccagttttatcggcttttgtatttctatatctagattaatttcttttataaaaaatctggaattaat

SEQ ID NO: 3361 - DNA, 1280 bp, Glycine max
  Clone ID: PAT_MRT3847_103039C.1
caaccttttgatcgaactcgaggaccatcaccgatccgttaattgttccccaccccgcttacaattagggtttccaaaaccctacactacacattgagcaaacgcagattcaaatcaattaatcactcactgactcaccaaattcatcaaatcaacactccgattcagctctcagcagcaccaccacgtcatggcggagcaccttgcatcgatcttcggcacggagaaggaccgcgtgaactgcccgttctacttcaagatcggcgcgtgccgccatggcgatcggtgctcgcgcctccacaaccgccccagcatctcgcccaccctcctcctctccaacatgtaccagcgccccgacatgatcacccccggcgtcgacccacagggccagaccctcgacccccgcaagatccagcagcacttcgaggacttctacgaggacatcttcaccgagctcgccaaattcggcgaaatcgaaagcctcaacgtctgcgacaacctcgccgatcacatgatcggcaacgtctatgttcagttccgcgaagaggaccaggccgccaaggcgcttcacgcgcttcgtgggagattctacaacgcacgcccaatcatcgctgatttctcccccgtcacggattttcgcgaggccacgtgtcggcagttcgaggagaatagctgcaaccgcggcgggtattgtaatttcatgcatgtgaagctcatcgggagagatctacggaggcgactcttcggccgcaaccaccgcggtggcagtgggacctaccaccgcgtcagccggagcaggagtcgcagccgcagcgcgagtccgagataccgccgggagagacgggagagtgattctcgtggagggcggcggagcagggagagggacggcagcggtggacggaggagacaacacgggagccctccggccagggaagggagcgaggagcgccgcgcgaggatcgagcagtggaatcgggagagggaggagaataaatgatttcacgatgattctatgttcatttgcttgcgatagaataaaccatcaatttcatcatcaaactattattattaccctgtgtccctccttagtagtccttagagtaatgaaattagggtttaaagaatagatggagtacttaatgggcaccactgtagtctaatggaaaagatggtctgatatgttggatgattacttggcatgatttaagactactgaaatagctttttttttttttttttttgctagtcgaagaaagaggcgatagtggaaagggatgatg

SEQ ID NO: 3362 - DNA, 301 bp, Glycine max
  Clone ID: PAT_MRT3847_10303C.1
ttttttttgatatttttgttttttatcaaacttcattttgttttaattgcggtggctttttttattcaatgtttctgacctcattgggggggggggccaaaaaccccgtctaaaaggcatttttgggctgattgacccgctaagggatggcctttctaaaaggcaacttttgtttgggccattcccttctcaagatctcccaacaagaaaattaactgtttaatttccccccccaacaaattctcctcccaggggcaaaacaaccatatattgtttgaacccaagggttattttccacagc

SEQ ID NO: 3363 - DNA, 502 bp, Glycine max
  Clone ID: PAT_MRT3847_103040C.1
aattcggctcgagggcagacgaggatgaaagagcccaggagagtcagattgatttcctaaattcagtaatagtggaccttcaaaggaagaatcaagacctcaagatgaaggtggagatgatgtcagaagcagccctgaatgggaacggggatgacctaaacaattatgacagtgatgatcaggagaaacagtccaagaagaaacctcgcctcttctgtgacatttgtgactgctttgatctccacgacacagaggattgtcctacccaggcacagatgtcagaggaccctccccattccacacaccatggcagtcgggatgaatgtacgatgagaaattcaacgttaataattctggattttcttatcacaaaaaagaaaatgaaggacctcaaagcacctgaacagtttatcgaccagtttgaatctatttatcttcatttgaatgtcttctagaatatgtaaaaagtcataaaatgtatcttccatgctacatgtacaat

SEQ ID NO: 3364 - DNA, 704 bp, Glycine max
  Clone ID: PAT_MRT3847_103041C.1
caactacaccacgacaccatttgattatgttattctgtaatctcaataacaagatttaaaagtttggctataaaatttgcgccttgtgggtgggtttggggtttcaatttcaaagggaagcagaagaagaagaatgatagttagaactccaccgccacccaagaggccacgcgccgatggcgatgacggacagctagtcatctacgaggatccgccggagtcatcccctccttcggagcaaatgctctgcacctatcaatgtcgccaaatggtcaaatccgattttattgatgccttaagcaaagctgaaaatcaagctcgtcattatcaatccaagtttgagacattggagcctcatttccgcaaagttgaatctgagaggaagaaatttcaggaccaattcttatacgcccaacaggaacttgcagctgcaaaaggccgcgagcaggcactccaagaccaactcttgaaggaggccactcagtctcaagaacgattaagaaaacaaattcaattaaacactcaactccaggttaagctccaaaatgagacagaccttcgccaaaaagctgactctcatgctgcttcaacagaggagaaagcagcatctttagaaggaaaactaggccatctctccgaaagtatagagagggaaaaaagcgacttcatgatgagcattcacaactgaaaagcgactcaaactt

SEQ ID NO: 3365 - DNA, 289 bp, Glycine max
  Clone ID: PAT_MRT3847_103042C.1
ctcacacgtaggctgacactttctcgcctcttgaatgtggaagagtaatcgagagacagacggttgctgtcagtatcctgaactctatatcaggagataaattgtattgatgatcctctctaaattcctcattgttttcaaggacaaagatatatacattttggacggcatcaacactgcgagacaattctccgatgccgtgctccaatctcaatgcctgtttcatagggaatcaaaggttgtaaatggcctcattatatacggcttggccgattaagctgttgatttg

SEQ ID NO: 3366 - DNA, 253 bp, Glycine max
  Clone ID: PAT_MRT3847_103043C.1
gtgccgcaaccgcgcctccgttgtgttactgttaccactccacgaacgtagcttttgataagtgggaatagtaatactccctttttgtttgtttcgccttcaattgtgaatcacaaacatagggatattgtatttgtggcaaaatgcgttaatttcgtcttcaattaaactaaacgcgagggtggattttttctgtgctcttggaactttttatttattttgtgcctctagacttaatattgtatatttattt

SEQ ID NO: 3367 - DNA, 246 bp, Glycine max
  unsure (1)..(246): unsure at all n locations
  Clone ID: PAT_MRT3847_103044C.1
tcaaggttgtcacccgctgttgaaaagggtagcaaccgcacacggtgacaatcctctttccctccactttcatctcttagcattcctcaaagcaagctttcngtntgtcctctgtcatcagcagtggctaccacccatggctgacacaacggtggtggaacaatttctcatncancaccatcatggtggtgcgctggaatgattatgcccataacngttttccnttccacggtgtgnaatctgctg

SEQ ID NO: 3368 - DNA, 255 bp, Glycine max
  Clone ID: PAT_MRT3847_103045C.1
ctggctttttttacattaccagaagacgtgaaaagacgggggcgttgttagtacactttggatattgcacgcgttcaatcttgccaatcaatacaagttatacatatcctagatatttgttctcatcacaaatatggtttcatatatgttaacagattctacttctgtactaagtatgtctcaggacatgtcctaataactgcgataagtttcacacatatcacttattaagataagccttataccgagatttta

SEQ ID NO: 3369 - DNA, 263 bp, Glycine max
  Clone ID: PAT_MRT3847_103046C.1
gccctcgccgtcctttttttatattgaaaagtggcaatctttcatataccttgaaacaacggggtatggccttccatagcctctcatatcagttcattaccagcccgatcactaagtcaacatcaagaacactatctctcaattacagtaatgccacagcatgatccggccagaatatatatgggggactaacaactgcaaggcggtcctgaggtggtatcgaagggaggaactacattgtgctctttacaacccatgacatt

SEQ ID NO: 3370 - DNA, 253 bp, Glycine max
  unsure (1)..(253): unsure at all n locations
  Clone ID: PAT_MRT3847_103047C.1
ctccgcccacgcgnccggaaaaaaggaaaaaccgcgaacacaggacgccgcaccacaaaaccggaaacaaaagcaaacgncaccagaacacaagaagccaccaacagcaccaaccacaaggggcacgaccgccaagggaaagaaaaacacacccagggcaggccacagacancgagaaacacccaccnaccacgcgcagnncaaaagccgaacactcgccgaccagacagaggacngcgcgacagaacaaaac

SEQ ID NO: 3371 - DNA, 1787 bp, Glycine max
  unsure (1)..(1787): unsure at all n locations
  Clone ID: PAT_MRT3847_103048C.1
ttcctcacgcgtccgcccacgcgtccgatttttgattagaggtggctaattgtctgaaatatgctcttattaagtgcaccacatcctgcttcagtgcttccttgggcctcatattttatgttttaatattgtagtaagaggtacaatatttggcgctttatatattattcttggaaagcgaatctggtttttccctaacatccttgccgaggaagcaacactgcgggagttgttcagattttggcctaagaaagatgaagaggaaaagcccaagtggacaacaagacttttctatgctggggtagctgtgctgttcatattattgctgaggcatcatgcacccgatgaagctgccagagcaaggcaagtcctaaatatagtggatggaatttatccatccattttcagcttaaattcctttctagttggatctataaacgtgtaccaattcgtcaccaaagatgttagaaagatagaagaaagagagagagagcgtagggtagcagagaaagagaaaatgaagaagtcttcgggaagcgcagctgacaagaagagggtgcgacggtcctccgccctagatcccacctccgacgcccctccaaggaaacaagctgtcaagaaagatgtgttccgggtgtttgctgagaaggttagagaccataaagaattggtttcaagatgggctgttctacaggagacgcgtgttgagtattttagagggaaggatttcgtgagcttcttaaaaagccatccggagctcaaagatgttctagaattagataggattttggaaacagaggagattgccaacattctacttgcaaaaaatcttttagtgcgctgtgatcgtgttgtaaaaactgttcgtcctgggaagaaaaagctgtctacctggcctgcacatttagaaattttccctgaacaagtattttctgaaaatgatgctttttttgcatggacgtttgtaaaacgccatccactctggcagacactcctctcattcttctggcctgtgttaacgttggctatttgcttatttcctgtgtaccctcatcgctgcaagctattgatactttactcatgtgctgggatccttttcctcattctctctctacttttgataagaggtacaatatttggtgctttatatattgtacttggaaagcgaatctggtttttccccaacatccttgccgaggaagcaactctgcgggagttgttcagattttggcctaagaaagatgaagaggaaaagccgaagtggacaacaaggattttctatgctggagtagctgtgctgttcatattattgctgaggcatcatgcacccgatgaagctgccagagcaaggtaccagaagagggtatctaacatcattgatgatgttcttgaatggtctccgactctagccttgtctgggatgatggataagcaacaaaatgtggctaatgccacagggtccgccgatgcgagcaaaaatggaccggaggatgcagctccagccgatggtgacgatgcaaaagatttcatggaacaggataataatactgaagaagtcataaacgatgtggatgatgataaacatcatgattaaaggttatcatatacctaaatgaaatatatttagtgactagatcacaattttccttttgagtgtaaaagtaccatgtatgaaataataacagtaaaaatggttcttcgccttcaaatagaaaaagagacaaagcgctgagtgttttctcaaggagaccacccccccggaccagttctcngcacangngcccccc

SEQ ID NO: 3372 - DNA, 349 bp, Glycine max
  Clone ID: PAT_MRT3847_103049C.1
attgggtgtaaagcatgtaaaactcccattaaataaaataacacgcaacaaaaaccatagaatccaaaacactgagaatataaaaaaccatttaaactaatacatgttaaagagattaaatcaagaaccaaaaataacaacaaattttaaaaacccttaaaaataaaaataccctaaaaaattaagcggtgagaactacgggttcaccggcctattttgatttttttttcagaaatttaggaaataaacttgggcttgactacaagaggctgtttttgaggaaaaaccctttataccaaaaacttaaattatccatctgggtgtacattaacaagggtgccttgccctt

SEQ ID NO: 3373 - DNA, 320 bp, Glycine max
  unsure (1)..(320): unsure at all n locations
  Clone ID: PAT_MRT3847_10304C.1
tgcacgcgtacgtaagctcggaattcggctcgaggaatttgtctagtaggttttctgacttcggtcggaaaacccctcccaacctgactggtttctaatatcagcaagtagttacagtcctacgccgagctgtggggctggggnctttcggcccactctagtttcctaggaagtacgcgtgtgctagattcacgctcgggaacttccgcctcctgcaatacagcttcctttctgcctccactagtccgcagccgtgggggaggcggctggctgcaggctcctccggatctcagtgttcacatattcaagcaccgagtggc

SEQ ID NO: 3374 - DNA, 892 bp, Glycine max
  Clone ID: PAT_MRT3847_103050C.1
ccacgcgttcggcacgtgcaatggagggttagtgagtgttgttgacttcacattgacgatcctttttttttcctgtctgtttgcttccaatttctcataccttcaatcttcaatcttggaagattggagaacagcattgattgagttttaccacacgatcgtagagcttctgatatttttcgaagaggaaaggcaaaagagttagcatttaggatgggaaaaacaattgagttgtatggattccctacatctgtgaatgtgtctgatgtaaagacatttgtagagcagtatactggtgaaggaactgtgttcgccattaaattaagacatggaaaaggtcgggttccaagagcatttgcaattattcaattcaccaccgcaaattctgctacatctatgatgtccagagctaacaacattttgagaacattgcggtatgggacctcctatttaaaagctcgggaaatggaaagagatattccaagggtgtttttgcatagtttggatgatgtgaaactgtcttttggctgtcagatctcaaagggaagctctgttatggaaaaagcaggatgtataatgggaggagaaagatgtttccacacaatacaaactgagcacatatgaatatttttatgtctaacaattactttgttgggcaggtttttacgaactaaatgggttattctttccatggtttctttgactaggacgtctttttgggaagaaaatgtaaacgtaaatcacattttgggtggaaggaagagtgagatatcagaatataaaaaaaaagagagagacggttgagagataaaagtggtagatgtgatagctgtcgtatgattatcaaaatccatcttcttcatgggctcgagtgtggttatgaattttatca

SEQ ID NO: 3375 - DNA, 1544 bp, Glycine max
  Clone ID: PAT_MRT3847_103051C.1
gtggtgacccagcggcaggcccagaccttctcgtggcggccactccccgacgagaagcgtggtttcacgctccccataaaagaaaaggacaagtcctgcatactaaactcctacttggattacattatggagaaagccagcgacattcggaggaagaatcaggatcggctcctctacaccaattccaggggtggctccctggactcgcggggccacccttgggaatctgtgcctttcaagcacccaagcacgtttgacacattggccatggaccctcacaagaagaagcagatcatggaggatcttcaggacttcgccaatgggcaatctttttaccataaaaccggtagggcttggaagagaggctaccttctctatggccctccaggtactggtaaatcaagcatgattgccgctatggccaattttctcggctatgatatttacgatttggagttgactgaggttcataacaactctgaactcaggaagcttctcatgaaaaccagctccaaatcgattattgttattgaagacattgactgctctatcaatctcaccaacagaaagaacaataacagctcgagttccgtttctgcttcgacaggttactatgattcggagatacgcggtggcggcggtggttgtgctgaggagggtggtaacaatattactctttctgggttgttgaattttactgatggattgtggtcttgttgtggaagtgagaggatttttgtgtttactaccaaccacattgagaagcttgaccctgctctgctgcggagtgggagaatggatatgcatatcttcatgagttactgttctttccccgcgctgaagattctgctgaagaattacttggggtgtgaagagtgtgagcttgaggagtcgattttgaagcggctggaggaggttgtcgacgtggcccggatgactccggcggatataagcgaggttttgatcaagaacagacgcaagagagagaaggcggtggaggagttgttggagactttgaagctgagagcggagatgaatgaaaaaaatggagttctgagggtgaataatggggttgaagaggaggaagagcaagagaagagggctttagacagtgagagtcctaagcaggagtcagagattgaggacaattgcaaggaggaggaggaagaagaagagaagatcaagtaatatatagtgacgaatgataataatgttgtttaagacatgtttgtttgttctgttccccggtccagtgaagaaagaacagggagaatagaatagaatgagaatggagaaatacatacagtgtaatatcctatgcaagtgtagttgtactcgatcatcatcaacaaatttttttacggggggatattttatgacttgtgagatacaggggaagaagatgctaggggcctctaattttaaaaacatgtcacatacttgtgtctcttttagttttgaataatggactcctttattgtttgatatgtagggaaagttatttgcatcgtgattatatatatagtttaagatttgttcccttt

SEQ ID NO: 3376 - DNA, 507 bp, Glycine max
  unsure (1)..(507): unsure at all n locations
  Clone ID: PAT_MRT3847_103052C.1
gaaaaaaaagaagccatagttaactactaactaaagtctaaagatagaaatataactccatcaacctcagcaagagggagagaaagaagaagaagaatgagcagttttcagtttcacttgagagttttgagtttgctgatttcagtttcatacttgctgacgtgtttggggaacaatgacatacctgtccagttgaatgatgatgttcttggcctaattgtgttcaaatcagaccttgatgacccttcttcttatcttgcttcatggaatgaagatgatgccaatccatgttcatggcagttcgtgcagtgcaatcctgagagtggaagagtttctgaggtctcattggatggcttaggactatctgggaagattggaagaggtcttgagaagttacagcatctaacggtattatccctttctcacaacagcttgagtggcagtattagtccatcacttactctntccaatagtcttgagaggctgaaccttagtcacaatgctttt

SEQ ID NO: 3377 - DNA, 159 bp, Glycine max
  unsure (1)..(159): unsure at all n locations
  Clone ID: PAT_MRT3847_103053C.1
caatggtgccgcaacccatnntgcatctaacccttttgttantaataatctctctgaccactcnatcctaggtcgatggncgncgataccganatttggcannatccntnnctggattatcgaggagcncancacttgcnaatccaaaagcctnacgac

SEQ ID NO: 3378 - DNA, 127 bp, Glycine max
  Clone ID: PAT_MRT3847_103054C.1
ccgctgtccgtgtgttttgacataagaagggctttcgcttctattcccctgcggttggctgctgacgaatctcttatctccgtccttacacagacaaatggagctggaccctactgcttcccaaaat

SEQ ID NO: 3379 - DNA, 375 bp, Glycine max
  Clone ID: PAT_MRT3847_103055C.1
aaccactatcatgagtgactaaaataataaatgaatgcaggacatcgattttcaaggaaaggccacatgcgacttccttcaacaccttgaacaaaatccaatcatttcacatctagagaaacaagaagccgggggggccctaaaaaatttttctaaattaaaaataaataacctcttttacaaaagcactgcttagaacaaaaatcgtacgtttcaaaaaccgaatttcttaaaccaaaaattattctcttcgatcaaggaacgtactcaatccgcttagccggtataaccatattggaagatcctcccacacactgggagcgccgaaaaaaatccatttaagaatacgctcttgaccatcaccaccccctgtta

SEQ ID NO: 3380 - DNA, 622 bp, Glycine max
  Clone ID: PAT_MRT3847_103056C.1
tttttttttttttttttttttttttttttttttttttttttttttttttttttttttttttttttttttttttttttttttttttttttttttttttttttttattttttataaatataaaaaaaaataaaaaattaattttaaattaaaaaaaaaaaataatttattataatttataaaaattaaaaaatattttattttttttttatatgattaaataattatttaaataaaaaaaaaaaaaaaaaaaaaaataaaaataatttaaaaaaaaaaaaaaaaaataaagaaaaaattttttaaaaaaaaaaggatatttatttaaggggtatttacatccttgaagaaaaattaaagtactttctaaaagaaaaacaaaaggttttatttaatgctggggtaaagactaaaaagaaggggaaaaaaaaaactttttgcaccttgaaaggccaacaaaaaaattgaaagggggaaaaaaaaaaaaattgctaaaggtttgctttcccacaaaaaaaaagggaaactacgctggttaatgacaaaaataaagggttgtttcctaaaatatggaaaataaaaaaatttaattgctgaataaaaaaaaaaggaaggggacatcctg

SEQ ID NO: 3381 - DNA, 303 bp, Glycine max
  Clone ID: PAT_MRT3847_103057C.1
gaacaacagcagatgggttggggcagaagagatatgaggacaagttggcaatttggctggggttgccgttgcagttgggcccggtgcgttggcagccttgttcaagttttttcaacatccctaatctgaaacccaatgccattggtgtgacatggtgcaaagcaatgatttcgaatccggcattgatccactacgcctgcatcactccattcggagactatccctggggagcatcatagcgagaaagatcccaacatggatgccttggcgggccaatgcgtggcccaaaacactccaaccact

SEQ ID NO: 3382 - DNA, 263 bp, Glycine max
  Clone ID: PAT_MRT3847_103058C.1
ggcgtgcgatgattttacatttatgcttgtaaacttaggcaaaaaatagagaacagggactactataatgatgttgacaagcctttatatcatgccaatgatgctgatgatggacatctgggtacaagggatgacattgccaaaggattgataaaagagcgatgaacacctttttagaggataactttagatacaaaaatactaaagaggggcggcccatctagcgtaaccaacattacctcagcctgcatgccaagtggtaa

SEQ ID NO: 3383 - DNA, 625 bp, Glycine max
  Clone ID: PAT_MRT3847_103059C.1
caccaggtgaaaagtgttttttgtggttcaaactttactgctgttgtatgtcttcataaatggataccaagtgttgatcattctgcttgtgttggatgtcgcaatttatttaatttcagaagaaaacgtcataattgttacaactgtggacttgtattttgcaaatcatgcaccagcaagaaatctataaaagcttcccttgctcccaattccaacaagcccgcatagagtctgtgatgattgttatcttaaacttaggaaagctgccattgaatcagtaccctcagtgcaaacacctagcttgagatgcgtaagtttgcaagacaatagaatcactaaaatacagggaacactactaaggcttgcatcttttggttctattattcaaacagaaagtagtcaatcaaagcttccagattcacaagatagccatcttttcccatctttaaatggaaaattgcagatgagggattttgctccttcagaatcatcacattctctctctatggattccaagacacacctttcagtttctgagcccgctgcaagaatatcttgtcaatcaatgtcaccagtttcatcaaagtcaagtccaagacaatcttatgaagatataaatgatgat

SEQ ID NO: 3384 - DNA, 288 bp, Glycine max
  unsure (1)..(288): unsure at all n locations
  Clone ID: PAT_MRT3847_10305C.1
tctcttaaattccaactgcttttaaagttaaaaangcttgcaaaccatttgttcacacgtgaaacatggaaagccgccaaaaactaaacattacaaccacatcacataattcataagcccttcctgttattcaacacacaaaggataatttctacaattttttaattaaatattaaaatacttaatatacttattctgtataaattacgctaatgaatccatcaaatgtaataatatttactataagttttcgtaatataatattccaaatttatctgtcttcatttt

SEQ ID NO: 3385 - DNA, 217 bp, Glycine max
  Clone ID: PAT_MRT3847_103060C.1
ggattccgcagcttcatgcgtaacgcgtgcctagcaaaatcagggacaacggcaccgccgtcgtgcaagaacacagcgagggtgctcggctactttagaacgagctatacccagacatacgtgaatcgccgtgtgtcgctcgatacagaaccacgatacacgatgttgaaactaataagaaaggactggcttaggttcattatagagctcatgtggg

SEQ ID NO: 3386 - DNA, 385 bp, Glycine max
  Clone ID: PAT_MRT3847_103061C.1
attcttaaaaaaggggtttatttttttggaagccagccttacaattggcaattttgggattctatttaacttttttggggccccggtgttttgaaaccaattaggaaaaattttttttttcaccgaataagccccttttttttgttcatcccaaaaccattttacgttagtattttgggccacctaaataacgcgccgttcaccggttacattaaaaaccagaaacgtttttttttccccacggcgggcgcaaaaaaccaaatttttttcttttctaaaaagggccctgttagccccccgggtacccgctttatggggtttctttttggtacacctggttcgggggggggtttttaatttctccccctcggaaaaaaaaggggga

SEQ ID NO: 3387 - DNA, 259 bp, Glycine max
  unsure (1)..(259): unsure at all n locations
  Clone ID: PAT_MRT3847_103062C.1
cgtgtcgtgtctcttctctatnatanaanacnctaacttctgaacctttcancggatcggcancgattcccnatcttcantnatnaaggaaagnaaatggtngaggtcgagcagaactgtctacgtgggatctacccgngatatccgtgaaagcggaagttgaagntgtttctnaagtcgncacataccccccatcgacnaaagttccccagacactgtannattgngngtgagantcagantgaggngaatnngncgc

SEQ ID NO: 3388 - DNA, 503 bp, Glycine max
  unsure (1)..(503): unsure at all n locations
  Clone ID: PAT_MRT3847_103063C.1
agctcggaattcggctcgagcaatatgcaaacaaatatagactcccggaaggcttaaaggagcaaatgttggcacacatgcaattgaaatttcagactgcagagttacagcaagaagtgttgcaagacctacctaaaacaataagatccagcattgctcggcatcttttccaaaacatagttgaaacaacatatttatttaaaggagtctctgatgattttatcacccagctggtaaagctttttcctttattttcttttatttttgtcttttaggtggcactgaataagactctaaacatctcaacagtgactaaaaatgacatcatgaattaaacaggtgtcagaaacgaaagcagaatactacccatctaaggttgacattatcttgcaaaatgagatgccaacatatttctacattntggtatctgggtcactggtaaacatctataccttattcaaatcctacccttatacaggcttaatctaactactgactattta

SEQ ID NO: 3389 - DNA, 407 bp, Glycine max
  unsure (1)..(407): unsure at all n locations
  Clone ID: PAT_MRT3847_103064C.1
acttgaagaaatggagctacacaagacttatgtagtacatgcgcgaccaactgacacgacataattgctgaatgactaaaatgtacaaaccacatgccaccatgaatcctaacagggagnatgataaccattaacctatcttgatagganntagcaccatcaaattctgtaatgaaatgcagaagtattgtcactataacaacccagcaaaggactcacctanaagccaaacataaccagatcagcattcatcnnatatgcatgaannaatacatttactcactctgatcattgtacgtatctaccatacatnnnnaaacgagcaccgcattattgaactacctctcacattcgcaatcagcnacgatcaagnncaagcacatagcgttactcctagntgaatttta

SEQ ID NO: 3390 - DNA, 944 bp, Glycine max
  Clone ID: PAT_MRT3847_103065C.1
attaatcattagtatgatgatattcttagcttgcgtcctttattggtgagaagtaaaggtgacaatggcagagaagtgcagtacattcagtggtatggagaggatggcttcagtgtgcctgttgttattatagttaattgtattttaaatgctatgctataatatgaatgattaatgaacaatatatatctcttgtgggtatgctttttatgttcgtatactttcatttatctattatatttgcaaattttttgtgtcgtagctatcatgtttatacataatttagaaaagaagcaaaccaaatatcagattccgttgcagcataagtcaaatagtaccatatggttgttagagtgtatatttctttcttcaaagcagcaatagtccatttgtttgtcatttttaatgtgtgtttttcggtgtttcagaagctagcggtagtaatagacaagcagtgcaggccaggagtggaggttgggcactcccttcttcggagcatagtcataccgtgggaacaatatctgaagctagagatgaagttggttcttctcgctcacaggagagggtacttaggacaaattcaagtggtaggaatgcataccgtccaggagtagggcgtcgccgacactaaggccctaatgtttctgaaatacccgactcccaattaaccatccacccacctctctgcgctcttcatgttagtaactgatagtgtgtttcttcttccttttccctatagctatatgatgattttggcggtggtttgcttctttgaaaagactgaacaatatttgtgtgtaaaacggttgaccgaactggatcgaaatgaaccgatccaaaaaaaaaatcaaactgttttggaaaaaattaaaccgaactatctttcaaaaaacagttctgttcgaatcaaatcatataattcgattcggtttgattttttgaag

SEQ ID NO: 3391 - DNA, 764 bp, Glycine max
  Clone ID: PAT_MRT3847_103066C.1
cactctatgtaaggagaaaatgaaccccactttctctcatgacttgatagtagaaattttattgagattgccaatcaaatctctcttgcgtttcaaatgtgtttgtaaatcatggctttccttcatttccgatcctcattttgtaaaatctcacttagttgctgcacccaccaatcaaactcttcttgattatgatttctccatctgccctaaccctagtggtatgcatatttggggaatcaagtttttctcctgcaaaaccaattcagagggaagaaagttgagggtaactttgggtatacattgacctgggccattttttaacggggcacttcattggttggctttgacatctaataaaaaacattttggtgcaattattgcttatgatttgagacaaagaagcttctcagagattcctttgccacatgatttaaccatggaagttaaaagtaaaatatttagtttaatgttgacggcaataaaaggatgtctatgtttgtgtcataacttcgttgataatgaaagggctgaggtatgaatgatgagagaatataaattacagtcatcttggacaaagttcttgattgaatatgcttctatatatgtaagaccataggtacttatacatgttgtttagtgtctttatctttttttttttttactcttaatgtcatgatgtttgcactatatttctctgaggttcttttatatagttttcagattcaacccctacttatttagttatttccctctattctccc

SEQ ID NO: 3392 - DNA, 271 bp, Glycine max
  Clone ID: PAT_MRT3847_103067C.1
gaacaaacaaaatattttctgcttggctgcttccaataaatggattaaattaattcatggcgggttcttcaaacattagggcttgaaaaccttgtatacaaaacttgggaacatgtcaaacaaaaccttgcatataggttggaatctgtaaaggaaatctttttgccaattggcaaaaaattatcaaggggacctaaattgctttttaaaaagagtaacatgggaggggtccatatacccaatggcatccttttgcaaccatttcgggaaa

SEQ ID NO: 3393 - DNA, 155 bp, Glycine max
  Clone ID: PAT_MRT3847_103068C.1
tcccgggtcgaccacgcgtccgaaaatcttatacccagacccagtttcctagaactctaattcaaggcaaaatgagagatatcttgcgcattcgagaaggcattgcggatgccataccggagcgaccttctgagaggtgatatgcgactagcact

SEQ ID NO: 3394 - DNA, 302 bp, Glycine max
  Clone ID: PAT_MRT3847_103069C.1
tcccaccggagaggcggacaaatatccatcacctccaccaccagggcacacctaccctccccatgttcccaccccagtttaccactctcctccaccaccaccatacgagaagccttaccaggaccagtctactcctcccccaggacactgtacaccttttttttcggggggggggaagcaccccctccaccttaccactactagggaggactttctttttatacccccgcacgggtgcgtacagaaagggtgaaaacgaaaaactgggagggggaagaagcatctgcaccttccccatcccc

SEQ ID NO: 3395 - DNA, 142 bp, Glycine max
  Clone ID: PAT_MRT3847_10306C.1
cactaagcgagcacagtctaaatgctgccattgttgatttgagccggacatagacctctgccgatgcgatctgcgaagctgcgagatactattgccacaattgcgcacttaacgacactacatagagagaggctctgaataa

SEQ ID NO: 3396 - DNA, 235 bp, Glycine max
  unsure (1)..(235): unsure at all n locations
  Clone ID: PAT_MRT3847_103070C.1
gtcttgctgcagtggtaactgtggttgcggaagctcctgcaagtgcagcaacagctgcggaagctgcaatatgtacccagacttaatctacactaantcaaccaccaccaataccttaatcataaaagtaacacctattaaagctcaatttaaagatactaaaataaatatacccgctaaaaacaataactacaaatataaaccaaactgctcctacaacccctacacttacaag

SEQ ID NO: 3397 - DNA, 250 bp, Glycine max
  Clone ID: PAT_MRT3847_103071C.1
tttttgaaaatactatttctatttaatcagagcccagaaccaactaaggggcaaattaccccattcacacatatcttgcgccgcaaaaagcgctaaaaaatagggtcaaaggatttaaactacgttttgggttgggaacaaacaaattatccgccctatgaggatgacggacacacattgtaaactggattttaagggaactcttggcgcggcatatatgtaacatgcaccgaaacatggctcgttgcta

SEQ ID NO: 3398 - DNA, 289 bp, Glycine max
  Clone ID: PAT_MRT3847_103072C.1
ggatcgaacgaaacaaaccgcctgcatgcacatcggcggcaaggcgccacggaagcagctggcgacaaaggcggctcgccagttggtttttttttttggcggcgtgaagaagccgcacagatacaggccggtatccctggccctgcgcgagatctgtatgtgtcacaacagcagggagcgacttctccacaagcttccgtgcctacgcttggtgcgcgagatcgcgcgggactgtatgaccgacctccggtgcaaaacctccgccgtgtccgcactcctggaggccgcg

SEQ ID NO: 3399 - DNA, 450 bp, Glycine max
  Clone ID: PAT_MRT3847_103073C.1
ggctcgagggagagaagggaatcgttatggtggtggtaggttttttggttcggaagagaatgaagccaactgcaggggaagaagagtgtcactcagcatggaagataatcgcaacagagtaccctaagccagaccctacagccaggggacatatttgcacctagctttgatgacgaagaggtcacaagcgatggtgaattcggcgatggacaggactggggcaggagggaaccagagataatacgccggcattatcgctcatgcaatatgcctggtctcaacacaactacactttcgacttcggttttaggaaaattggcttgtaacctcgttactgcacctgaagtagcccggttctgaagggggtgagaaagcaaatcctcgtcccaattcatggctcaaaaatcaaatatgaacgaggcgcagctgtggttttcaatgatagggcca

SEQ ID NO: 3400 - DNA, 1618 bp, Glycine max
  Clone ID: PAT_MRT3847_103074C.1
tatttttttttttttttttgttcatcaaaccaattactaattttttcattatgaaacatcttattcattcttaacgagttaagaattggcttcttccttctcattctctcacacacagaggctagtataaatataaatatgaacaaaaagaggacataaaactgttttactgattcaaaaggaaccaaacacataaacataaaggactactaggaccatctgtacaaaaccttagactgtattctctaaagctccaatccaacatcatgccatgagagaacaagatcttgaaggccaattctccaatcatcccaatgaagctcctcaaactccagcccaccatccaccactttgaccgccacaagcaacaagtcagccacaatctcaaacacctcaaccacaacacccaccttcccctttcccaacccaatagcaccgttcttccctatctcaatcctaaaccctaatttctctccaacttccttcaccttcgcttccactgtttccacttttttatccgaagtgaacctcttctccctccttctccccttctgcgacgtcgtttcgaacaaccctcgcaaatccaaccccgacgacatcgatattatgtcaaatgcgttcatccccgatttataaccaccgtcgcagcacttgttatacaaatcagactcccaaacactctctttcacttccaccattgaattattcttgaaccatttattgttatcgcaaactttttctaacgaaattcgtgttatagggtttgggtcgagcaattggtaaatgaggctccgtgcggatttcgagatccatgccgggaactggtagtcgcggcgggagatgcgccggcacatggcggggatgttggagtcgtcgaaggggaggtggccggcgaggaggttgtagaggatgacgccgcaggaccaggcgtcggcttttgagccgtcgtagccgacgcggcggaggatctctggcgcggtgaaggccggcgtgccgcaggcggtgtggaggagaccgtcgtggaggtgttccgggagggcggagaggccgaagtcggagaccttgaggttgccggcggcgtcgaggaggaggttctgtggcttgaggtctcggtgggcgacgccatggcggtggcagaagcggagagcggagacgagctgcgcgaagtagcggcgggcgaggggctccgggaggcggccgcggcgggtgagcttggagaagagctcgccgccaccggcgaagtcgacgatgaggtagatcttggtcttggtggcgaggacctcgtggattttgaggatgttggggtggtggtggaggcggcgcatggcgtcgatctcacgcacgatgcggggctccatggcggcgtccaccgtcttggacttgtcgatggccttcacggctaccgtggcgccgtcgaggagggagcgcgcctggtagaccttagcgaagttgccgcggccgaggaaacgcgtgagctggtacttggccaggatggtggtccgtggtgacggcgacggtgacggcggcggcgatgcttccattgttgtgggaaatggaaatgaatcgcaacaatgccagccaacggacacagagagttcccggcccgccgtcctcgagc

SEQ ID NO: 3401 - DNA, 346 bp, Glycine max
  Clone ID: PAT_MRT3847_103075C.1
cagcgtaaaaattaggcttcagattcctgtcttccagcggacggtattctgattccagggagtgaaaacgttccatgctctatactctcccaaacgcaaatcacggttgaagtttacatcaaatggaccgcggcgcggagatttctcatgaaagacttcgccgtccttgttgggagttcccttgacaacatttaatatggtaggagccccaaaagccttccgagattagtatgctataagtacagcctcgttctatcttctcttcaacacatactgaatttcttcttacactcaatatctctctctcttggtctgtaattctcacacaaaaccaataaaccatgac

SEQ ID NO: 3402 - DNA, 592 bp, Glycine max
  Clone ID: PAT_MRT3847_103076C.1
gggaccaagcgacagaccaaatcctttgtgccctaatttctcaaatcggaacctcacactccaccgtcccaaccccaacccctaattccgatcaacgctctccccagttggttagcggaaactcagttattctgttttattgacgaagtgataacaaatggatgattgggaggatgagcatattgcccctattgatctaacattgaaagatccagttaaaactaattgggacgatgaaaatgtggatgaaaatgatgtgaaggaatcctgggaggatgaagatgagcctgctccggcacctgcagccccttctgtaaaaacttctgtaaaggctccccaaaaatctttttataaagaccatgacaagaagggtcagaccgttgaacccattaaggaagaaccattagatcctgtggctgaaaaacttcgcccaccaagattaatcggagcagcagattattaggcccctaaagaattgttcagtgggggaaaaaaaaaagtcttgaatttctcacttctaggtctagtattggtgttggtgatgttatatgacgtatggttgaataaatgtcatttggtgtttgtacttccc

SEQ ID NO: 3403 - DNA, 446 bp, Glycine max
  Clone ID: PAT_MRT3847_103077C.1
cccacgcgtccggataactagaaacagtgctatgaaattgaaggtccttgaattcttcggggctacaattcaggtagcatggcaatgccatgcgtacgatatgttccctatacgaatgaacactggctatggtgcccgaactctggaggtgaaaggcgcaagttggaggcttgctgcggaagcacacaacatcatctggctttgagaccattcatgaagagtgcgtggaagcaacaaaggaatacattcatggcgaacaatatagatcagactgcatagcaggtaaccaacaagcttactttgatgccagagacctcgaagtagatgccaaggacacattggtgttcagcatagatggcagcccactctctaatattgcatactacaaaaaacatggatatagcgtggagaaatttaactcgaccttgaatgattaatgggtttac

SEQ ID NO: 3404 - DNA, 315 bp, Glycine max
  Clone ID: PAT_MRT3847_103078C.1
acgatctcggccatcaaggccaacatctcaatttgagaattgtaaatcatttcataataatgaggtcattgtgactgaacatgtatagagaatccgtaggaggacgaacattgatggtgatgatgtggaggaggatgctatagacaataatcactttgccatgaatacagcatattgagtgctttgactcatcctactgactgctgtattaatgtccagattagctattaattgatgattagagaactttcgaaaaaagatgagttgattatatgacagatgactataattgtcagaataaaatttcataagaga

SEQ ID NO: 3405 - DNA, 819 bp, Glycine max
  unsure (1)..(819): unsure at all n locations
  Clone ID: PAT_MRT3847_103079C.1
gttaggaatcatcttcgaagtgtgtaggtagaaaaaaaaaagggatgatttatcaagctcaattcataatttggcaagatggtgaagcatgtctgtctgtctgagactttgaacattatattaattttttatatattggatatggtttgcactactgtttctagtcagtgtctggatttttagcaggttttaggtcttgtttgaagtggttctgtcagttggggtttatctgtgcttttaagtttttgcagattttgagccttatttgaagaatggtgttccagttcgttttctctggtgtagagtatttgcacattcattgtcaactaagagaacacagaatcataatcagattctaaacaaacaaacaaatgcttctatactccatctcctcagtttacaaatttggttgctttccagatatagtgattaatcttcaactaattcacatttcctacaagctgcgcaaattatgagttcttcctatattgaattttggaaaactaacctcataatttagaaactagaaataagattttagaataatgtataaattacactagaacatgaatttcgtttctaagagggagacaaagaaagagtaccaattttcattatgaatgtgaattagtgaatagtatttgtaaagcaaataggactatattaaaacttattaaacctgggaaagcanatcagctgctacatgagaaggaattgcatgcttgtctngcatgaccaaaacttcagatggaccagccggcatgtcaattgaaatcatggcttcactgntctgcagaagattttagattcaagaaatga

SEQ ID NO: 3406 - DNA, 171 bp, Glycine max
  Clone ID: PAT_MRT3847_10307C.1
atcggcacgcgtgcgattcattgtctgtggggatcgtgctaccgcgaggcctagatgatagagtgagatagacgccagagcgttgcacgatgggaggatccgatcctatctttggatgccagaatgctgccaggtccgtattcaagcttgggaagtaacatggacttggcg

SEQ ID NO: 3407 - DNA, 195 bp, Glycine max
  Clone ID: PAT_MRT3847_103080C.1
aaacagagcagggactaattcttgtccagtgattcaccaaagttcctatactttgagggggccactatgtgcggaaagtctgtatcgctctcacaagacctattctaatgaatcactacttagctccggcctttatcgctggagattgcacactcttgggtaactcaacaacgcttttggcctaattcacggact

SEQ ID NO: 3408 - DNA, 1051 bp, Glycine max
  Clone ID: PAT_MRT3847_103081C.1
aagattcttgaaaaattaaaattccagtatgtctagtcttcccgttgcctcttccattgaaagtttaactgtcatgacatagatccagaaatttcttaaatgacttagacttcattacaaggctgttaaccatgactgccatcaaaatgtaacccaactaagatgaatccttataataaaccaaaacaagggaggaagctatctacaatcattttttaagcttgaccaaataggcgaagcttgtaaggtataaatgaatagcaggttatcattctaaatttagtgcaacagcagagagcaattctttggaacaatagatataaacatctgcagtgagctcgctttaataagtcaggctgagtcattcttcaaattgtcatttatgtacaattttccggatccacaaactgctggcggtttttctctgggcttataacagttatgctctttgtgacaaatttcatcgcagtcatacattcagggcctagtactttcatatctttctcacatataacttctgccacagttgataattcaggtgtagcatgatcaccattgcattcatgagacgagcctgaagcattgtccattgaaggacttgatgttggatggcaagaaaaatctatgccttcacaagaaaagtctagatcatttaacatttctgtgaaggagaagtccatccctaaggcatcaaagttaggaaaatcaatgtcaaatatgtccaattccttttcagactcagatgtagaaatctcattgggcaatggattgtccaaactcccaggcacatcggcagcatcaaagttcaacctgctcctaacatgatccctcttccgtcccgtcgctgaatttgtcttgacaggagaaatacaatgactcatctctatgtaagccatctgttttgcagggctgaccataactctcttggtggaaattacagtgcaatgactgggtgtaactgcacggttgcaagttgcaactgaagaaacctcagcaggggatatatgtgtatcactgtgagaagattttgttctaggaggtgtctttggaa

SEQ ID NO: 3409 - DNA, 252 bp, Glycine max
  unsure (1)..(252): unsure at all n locations
  Clone ID: PAT_MRT3847_103082C.1
agctctttaacattgagtcacttcctcaccaaatcncccttctctttctaaccccccccacactnncattcacctagtctctctctcaaaatcatataagacccccataacaaccattattatttttctttctaatcacttcttattctaccttctctccactttctatttaaacctccatttcaattttatacctnccactatcttttcctttttacaaaaaatcattccaatatatttcttctaaatatc

SEQ ID NO: 3410 - DNA, 674 bp, Glycine max
  Clone ID: PAT_MRT3847_103083C.1
gtttgctgcgttgttgatggaacttgcggcacaaacatcaagagggataaatcatgttacatctcatgttgaagaacaattgtctcccattagaaaatctgattccaaaaatgaaaacaagactgatgagattcagaagactgaacatactccaagaggatttccaaagtcatctactttagtgaagcttccgttttggcccatacttgaaggactctggcttatattgtcatcaacctaccttttgcatgtgtcattgttcatctggctgagtgcagttgtctcttcattcttctattttcagaaagtgagcgtgattgccactacagttaccagctctcttggaagaagaaaattgtttgcccagataaatagcttcattgctgtttttattcttgttggacaactgtccttgacgtacagggacgcattcttactgttgctggggtgactacagctatatgctcagcacctttcgttggcctcttaaatttagtcgctctagctgtttggccaaaatgggtggtggttgccatttgtgagacgctgagaaaggttattatgacttgcaaatattggttcctttaatagatttcagtaattaacaacatatctagaaatctgtattgtgaaagtagatttagaatatgtataggttcattgtatgatataat

SEQ ID NO: 3411 - DNA, 288 bp, Glycine max
  Clone ID: PAT_MRT3847_103084C.1
accgccggaacccggtcgcccacgcgtcgccacgtcgtcgtttacccttcaatcatgctcttaaaacccacattcttgcggcctccctcaaacccctttttgccgcactttgtcgtccgtccactccggctacatgtaggacccagttggcgcgaagcgcgggtcgcgacactggtccggggtccttgctgtctgcaagggacgggcggacatcagacggggccaactgtgttggacaaacagtttcgttgaaatggtcctgtgagcccttactgagctgtaagccag

SEQ ID NO: 3412 - DNA, 196 bp, Glycine max
  Clone ID: PAT_MRT3847_103085C.1
gaagaggttcgtggtgcacgtgaaggaagggcgttacttatagaacattgatttggataagaatacgtggaatgtgtttatcttcatccaccgcattgacaaaacacgtctcctctgtagccggtacttcatgtacggtacgtcaactttcgaaaccgctaacttctatgtgaaaggcactgcatacatagacaaa

SEQ ID NO: 3413 - DNA, 327 bp, Glycine max
  Clone ID: PAT_MRT3847_103086C.1
aaaaaacataacataatacaaaaattatacttaaaataaaaaaacatacaacaaacagtccgggataaaacaaatagacttcatgcatccaaaagtcactacggagttcaatcacaatccataaccttgctcatttgcggcgagcgcacacaactcgttcaggaaggccctacgtctatcctccacgatataggccttgtaactgtatggtctgcacctaattactgataccgatgtagacatgtaccttctattctgagcatcaatgtcaatatctaaagagaacttaaatctttcaccgaaacagatgataacactcagatgata

SEQ ID NO: 3414 - DNA, 213 bp, Glycine max
  unsure (1)..(213): unsure at all n locations
  Clone ID: PAT_MRT3847_103087C.1
ggtatactcaaatttgattgaaatcaatacctcagcagccactagggtcaagccttctgtcgtcagtcacgtgtttctccggtcctcgtcttcttctctcagaattcatgatactcaagnttcggtttcttgctgaactcaaactttggttttgaagaatattcgagcctgttaatttttctcataggcctaatcaattccattcactagctt

SEQ ID NO: 3415 - DNA, 495 bp, Glycine max
  unsure (1)..(495): unsure at all n locations
  Clone ID: PAT_MRT3847_103088C.1
ccacgcgtccgctcacnctgccgctagtgttgcagctacaggttctagtacatttactgtataaaggtaaaggaaaagggtaacgaaaaggttgacagttattgttgatgttagtcggtcatgaggactctaccacatggccatatgactgaccacctggtatacattgtcgaacgcgttgtcgagagagttattaagagatctgataagaagaccactaagacgaacaagagggcctgcaagcttgcctggctgcttgctgagcgtaaagcaggacgcacaataggaattgccttggataatgccttgaccaacaaggactccagcacagactatggcgcacctgtagacgcccatgtactcaggaacatgatcactaacacgttcactgctacatgcgctgctgacagcactgatctcactactgatggcactaaagctggatttgaagctgatggaccgactgatgaacatactctggaacaagccacgctt

SEQ ID NO: 3416 - DNA, 511 bp, Glycine max
  Clone ID: PAT_MRT3847_103089C.1
aacttcctcaagtagctatagcaagtaaaattaactgtccttagcattctcttgaagcatatactttgatgatgatgatgctagttgattaccaacaaggtgtggttgtttaagagctaattaaattgtggctagttatataggtttgaagtcaatccatctcgggatccattcacctttctctcggctttttcctctttctctctctcactctttgtggcatgttctcaataatatctgaaaagtttgaagaatagagaaattaaagctatatattagtaagcaggatccatgagctgaagagatcagatccattcattccctatctcgtattatccttttcagtgtttggtggtggaagaaaatatgtccaatttgacgtctgcatccagtgaaataggtgcttcttcaggaatcaggaatgacaacggttcttctctctatgctcaatattcctctacttcaataagtcaagaaccacaacctaaaaagaagcgaagtcttccaggtc

SEQ ID NO: 3417 - DNA, 281 bp, Glycine max
  Clone ID: PAT_MRT3847_10308C.1
cttacgcgtccgggaatggtttggttgggttgatgaggaggattcctttggggaagtgcttttaagcgcaccacttaatggtgtggagggtttggactatatggaaagaatacctctggtcacatctgaggggtttcctcatgtgctctgacgcacatatggtgaaagaggcaacaggggacttgtttctgtggatggtgcagagatgacattgattacgggcaccagtggtgtagcacgctacaacacgctgatggttgtacttgagaaaagtgttgcta

SEQ ID NO: 3418 - DNA, 261 bp, Glycine max
  Clone ID: PAT_MRT3847_103090C.1
ccccttcccaatctcaaacggcaaaggtgccacatacatttcctgcttctcacctgatatttttccaatttgtttaatcttcctttcttttctctacccattttcttcttcttcttctcccctccttttttccttcttctaccagcttctagaacaaggatgtgcccatttcctgcttacttgaatctcaaacacaaaactgaatctttgacaacaatttcaagattttcccaccaacccaccacagcaaagcacctggtc

SEQ ID NO: 3419 - DNA, 304 bp, Glycine max
  Clone ID: PAT_MRT3847_103091C.1
ataatgtctacaactgttggaggagagggtcagttctagtgctactcgtagatttgcttcctcagaactgtagatgatcatatttgcatacatatataattcttttaataattttttattaacgtatcgaagacctatcgtatccttaattttaagaaatttgccatatcgctgtatccgtgtcgtgtggtacccgtgtcgtatcccgtgtctaggcttcataacacagtgtaagattttgacataacttgttgttctgagaatcctacttttaagttagagatgccatttttggttctgagtt

SEQ ID NO: 3420 - DNA, 417 bp, Glycine max
  Clone ID: PAT_MRT3847_103092C.1
gcatcatctatctcacggaggcaactgctttgaacctttcctctctctctgactcttcattcacaaaccggaggagcctcgtttccaagcatccgtacaataccctccttctctcttcgaatattgccaacccgcatgctgcgtttctaatattcaacctgatcatgtctgccatgtaactctctgcattatgtctatcatgaggcatgcatgcgactgttcaagatgggactctagcatattaacggggtcctgcctattccatatacattgatgatcttctgacgtggaatgagttctaggtataagtggctcattcgcgcagtattagagccgcttacatatttatcaagtatcatgcttcccaacttaatactactctaatcactacttctaaccacaagattctacatccaa

SEQ ID NO: 3421 - DNA, 322 bp, Glycine max
  Clone ID: PAT_MRT3847_103093C.1
tccccgtctacccccaccctcccaaaaaatttttttatatccaaaaagtttaatttccttccttaaaattccaaatttttgccggtttaatccttcaattttcaaaaaaattttaaaaaaaacccttaaccccctcgacactgattatattaatttgctgcaaattcactcgccacatcgatatcttacatttttttgctagttttcctattattattcaaaatggagatccattgtgccatttatttatcaattgcaaactttccaagaacttatcaatgagacaaaggtacgctacatatgtgtttcaaattacacttca

SEQ ID NO: 3422 - DNA, 388 bp, Glycine max
  unsure (1)..(388): unsure at all n locations
  Clone ID: PAT_MRT3847_103094C.1
ctcctaccttgaagctcttatccatggcttcctatggtggtgagtttcttcttgactcatcttcttcttgaagtgatgtctcctctcaactcttcttcttctccattccactgcaattaaaattcaagaagcaaaggactccattgatgaagaagatccaaggcctacatgctccaatggagctacatcatgtggtatcaagagcatcttcatataggtgatgttcttttgcttcctcaatctttttgttcggtcaattcactttaattccttgttattcatcttattatccatgtatatcctccattgtcttggggtttggtgttgttagagtagattaaaaaaaaaccgggtacatcttagatgtacactngntcttgcatttcta

SEQ ID NO: 3423 - DNA, 458 bp, Glycine max
  Clone ID: PAT_MRT3847_103095C.1
aacaacagtggtatagtttaaaactctgaaaaatgattgcaccatacagaaacagacccccggctatttaaaccaaaagatatgctggaaccaacaaaggtagatgacaatgcctagtaacaacatctttaaaaccaaaactatcagatgcagggtccacccttgcctagtcacaaaattagaggattgcctgctgttcttgctaatacatgggcggacttttggagtgcagattgggggaagcgtgtctatttccataataccgcgagcaaagagttcataagcttccatgaaagcgtcgtagggcgactaaactaagcccacaaggggaagggtggatccactgttggaggtgaaaacaccatcaatactagcagaatactggcccttcttgggaaccctataggtcacaatcccggaacacttatgcgcgggaaccatactaagggttacggacc

SEQ ID NO: 3424 - DNA, 244 bp, Glycine max
  Clone ID: PAT_MRT3847_103096C.1
gctaataactactgatattagggcccgtgatatatatgttcaacaagttatggtagttatcaattatgacctttccaggaatcatgagctgtacattagtgtaataggtcgttggggtacgttttgacaaatgggtgttgatttaatgtgtgagaatagtgaagacatgaggattttgagagacattgaacattactactttactcatattgataatatgcgcaagattgtagttgatcttatt

SEQ ID NO: 3425 - DNA, 173 bp, Glycine max
  unsure (1)..(173): unsure at all n locations
  Clone ID: PAT_MRT3847_103097C.1
ccgccctgcaggntacccgnngtccggattcccgggtcgaccacgcgtccggctgaattaaaagtgttgatccgtgctaattgtcagatctgtcttgtatgaattcttattgcagggtcttgaacaagtttttgggtgaaggagtagtggttggggcctttgtatatcctttt

SEQ ID NO: 3426 - DNA, 239 bp, Glycine max
  Clone ID: PAT_MRT3847_103098C.1
ggtcgccggagatgggtgggtgcgcgacggactcgtgtggatgcgctctgaactcatcgtggtttggtaggtgcttgacgagattgtccgagttaggtgggggcgtttcggattcgtcggagttcgatagatgcgctacgaactcgttgtgatttagtgggtgtgcgacaatgtgaatgtgaaaaagaataaaaaggaaaaatgaaatgccgccgccaggattcgccttcggccgcggc

SEQ ID NO: 3427 - DNA, 1046 bp, Glycine max
  Clone ID: PAT_MRT3847_103099C.1
gttaaaataaaaataaaaagtcattaaactaagcttctaacttctaagtcacagcaaagcagtggcgtgaattcccaggggcaaacacaaaaaaaacaggtttgttattaagatttatcgaaaattgggaactgcatcagaattcagaacgaggagatgggatctgaagggccaagggccattactattcatgtaacaggatttaaaaagtttcaaggggttcctgaaaaccctacagaagccattgtgaataatctgaaggagtatgttgaaaggagaggccttcctgctggtgttactcttgggagttgcactgtgcttgatgtggctggggatggtgcacttccccagctatatcagaccatggaatctgctatctccaaaacagatagtgtgagcaatgcaaatgttgtatggcttcacttgggggtgaatagtggagctgtaaggtttgccattgagcatcaggcagcaaatgaggccactttccgctgtccagatgagttaggatggcaacctcagcaactaccaatagtccttgaggatggaggaatttctcaaaccagaaagacttctatgcacgttgatgcaatcttgaaatccttgaagaagggagcttatgacgtgatgatatcaggcaatgcaggacgctttgtgtgcaactatgtgtattaccactccctccgatttgcggaacagaagggtaacaagtctctatttgtccatgttcccctatttgcaagaattgatcaagaaacccagatgcggtttacagcctctcttttggatgccattgcttctgcatgttaatgcaatactgaatatgtttacaaggattgccatgtccacttgtatatcatctgtctcaaagagcaatgtaattataaagcaatctatgaatgaatgaactgcagagttcttttttcttttcttttggtaagatgagacttttaccattcatagcacgtctttaatgtataatgcgtccatacgtcttaaactctacaaaaatttcctggaaattgctgaaaatttggatcattgtt

SEQ ID NO: 3428 - DNA, 430 bp, Glycine max
  Clone ID: PAT_MRT3847_10309C.1
cggaattaaacgcctcgaccacgcgtccggtctattgcaccatgggagtggcaacctaagcctatctcttaacgccacccctctccggtctcatagctagcgaccgtgcctccgtgccatggaagcaaatactctagtctctccttctccagcccgaagccgctctagttctccagaacaatcatgagcagctgctcgtccactagaccacagatgctctcagagatgtcgaggctgcactggacgggttcaccccaccctaacttgacccacacaccccttccccgatcttcggcggcagtaccggcggtctcctgcgcaaggcacaggtggaggagttgtatgtcattccgtggggctcacccctacagcagatctttggactgcccactggcggcgccgctatcatgagggagggccctagccttct

SEQ ID NO: 3429 - DNA, 240 bp, Glycine max
  Clone ID: PAT_MRT3847_1030C.1
tcagcccacggggccgcacccgcctggatgtgtttcagccagttgacctgctatatgagagcaacccggcgctcgaggtgtagctggccggtatctatcccaacggacggccgggaagactgggaggaactgccgagatagcgcacgcatagcatgccccgacaatgagagcatcccgcacatcatgcaggacacaggggtgacttctcctcgtagactataatcaggggctggatgtag

SEQ ID NO: 3430 - DNA, 400 bp, Glycine max
  Clone ID: PAT_MRT3847_103100C.1
tgcagcagcttgattatggattggttcagtgccaggctttggttttggcaccaacaagggagctagcacagcagatcgagaaagttatgcgagctcttggtgattacttgggagttaaggtccatgcttgtgttggtgggacaagtgttcgtgaggatcagcgcattctccaagctggtgtccatactgttgttggcactcctgggcgagtgtttgacatgctgcggaggcagtctcttcgcccagattgcataaagatgtttgttttggatgaggctgatgaaatgctttcacgtggtttcaaggaagagtggaagctggagacattatgtgacctttatgagactctggctatcactcagagtgtcaattttgtgaataccaggccgcaaggtggact

SEQ ID NO: 3431 - DNA, 1597 bp, Glycine max
  Clone ID: PAT_MRT3847_103101C.1
agacaagaaagttaatgcaggcttgagcagcaacctgctaattaattgattaaacaaaatttatagaatccaatacaaatagcatcagatcacatgtctttgatctctaatgggtaaaatatatagagagaaaatgagcacaaataatacttgccaaatagaataagaacctgatgacttaacagagaacaaacattaactcatcagagtaaatcagcaacatttgatggcagctcctctacagtcacattgtagaacttctgaatatcagacagcatcctggaatcatctgtcgtgacaaagtttatagcaactccttttcttccaaatcgaccactacgtcctatgcggtggagatagttttcaggttgggttggcagatcatagtttatgaccagagacacttgctgcacatcgataccacgggccagaaggtccgtggtaatgagaactcgagaagagccggaccggaattcacgcatgataatatcacgtgtgttttggtccatgtcaccatgggtggcagagactgtgtggtcattgcttcgcatcttgtcagtgagccagtccaccttgcgcctggtattcacaaaaatgacactctgagtgatagccagagtctcataaaggtcacataatgtctccagcttccactcttccttgtcaacattgacataaaactgctttataccctccagggtcagttcatcacgctttaccaggattctcactggcttattcatgaacttccttgtaatttcaagggcttctggcggcattgtagcagagaacactccaacctgaattttggatggcagcagctggaagatgtcatagatctgatccttgaaaccacgtgaaagcatttcatcagcctcatccaaaacaaacatttttatgtgatctgggcgaagagattgtcttcgtagcatgtcaaacacacgtccaggagtgccaacaacagtatggacaccagcttggagaatgcgctgatcctcacgaacactggtcccaccaacacaagcatgaaccttgacaccaaggtaatcacctagagctcgcataaccttctcaatctgttgtgcaagctcccttgttggtgccaaaaccaaagcctgacactgtaccaatccatagtcaagctgttgcaaaatccccgaacagaatgttgctgtctttccagttccagactgagcctgctgaatcacatccagacccttgcagaaaggaacaattcccctttgctgtattgcagaaggcctctcaaaaccataagcatatatgcctctcagaagattttcttgaaggcccattgcatcaaaactatcatagacttcatcatatgaagtgaaaaattcttgtccatcggcggaaagcaattcattcatcttagagtcatattgccgagcatcaaactgcgatccttctggagccaaacctgccatcactggtgttagaggaatagagatagaagaagcaaagaggaatgaattagggtttcccaaactcctcggatctgcgccgtggagtcgaagggaagggaggcgtaagagaatcgtatcgtaggactgagtgagtttaggtttttgctcgagcc

SEQ ID NO: 3432 - DNA, 547 bp, Glycine max
  Clone ID: PAT_MRT3847_103102C.1
gctatatagaattggctcctacatatgagaaatgctgtgaagatatggctgcgatggttcatgacataccctttcttgtttagattgcgctgaatcaaagcatcacaattctaatgttgctagccttggcagctaccgttatcaactccacctgatactaacagtgatttatgtccttcaacatcaacacatgctccaattactaataaggcaagattcaagcttaatctttttagcctagattgacgtattaaatttggttttgcagttatctccttttaaaaacaagtgcgatgtcttgtttataggttcatttccctcatatataatgctaataatatgtgatgccttgatttatatccttgctaacaaattaaagagtataagataggtggtaataatcttctttactttaaattctattctattcttctcttttcttttctttttttgctattggcgcttgattctgagctaggacttgaaatttagattttatatttgattgcttgcgatacttctattatttttgataaattccgatttt

SEQ ID NO: 3433 - DNA, 468 bp, Glycine max
  Clone ID: PAT_MRT3847_103103C.1
aaaccttcataagtaaccaaataaaggtttgaacctaaagccagaaaaatatgtcaatttctgtagatactcaaaatctaagcaagtacatatataaaaaatacttgtttaatgtttagaattcaagtgattcattgtaaatttataacacctgcctttcaatgataaaaagtgatggtagctacgtttaactgaacttgcttgcaacatagttaaacatgtacactgacatatagtgtggcctattttacaggtctcttggacccgtggtcacccatgaggagcatgcgccagattttggacacgatggaccgaattttcgaagataccatgacattcccaggaagaaacgtgggagcaggggagatccgtgccccttgggacatcaaagatgaagaacatgaaatcagaatgaggtttgacatgccgggtcttgccaatgaagatgttaatgtatcagtggaagat

SEQ ID NO: 3434 - DNA, 2427 bp, Glycine max
  unsure (1)..(2427): unsure at all n locations
  Clone ID: PAT_MRT3847_103104C.1
acaaaattacaaacaaaaaggctttgagcaacatgctaattaagcaaataaacaaattttatagaatccattataaataaagtcaggtgtctcagaactctaatggtaaaatttgaaaatgaaaataaagagcacaaaataataattgtcaaaaagtaatagccctgatgacttaacaaagaatgaaaattaacccatcagagcagatcagccacatttgatggcaactcctctacagtcacattgtagaacttctgaatatcagacagcattcttgcatcatccaaagtcacaaagtttatggcaacaccttttcttccaaaacgcccacttcgtcctatgcgatgaagataattttcaggttgggtaggaagatcatagtttataaccaaagacacttgctgtacatctataccacgagccaagaggtcagtggtaattagaactcgagaagagccagagcgaaattcacgcatgatgatatcgcgagtgttttggtccatgtctccatgggtggctgagactgtatggtcattgcttcgcatcttgtcagtgagccagtccaccttgcgcctggtgttcacaaagatgacactctgagtgatagccaaagtctcataaaggtcgcataatgtctccagtttccaatcttccttatcaacattcacataaaactgcttgataccctcaagcgtcaattcatcacgctttaccaggattctcactggcttattcatgaacttccttgtaatctccagggcctcaggtggcattgtagcagagaacactccaacctgaatttgacctggcagtagctggaagatgtcatagatctggtccttgaaaccacgtgaaagcatttcatcagcctcatccaaaacaaacatttttatgtgatctgggcgaagagattgtcttcgtagcatgtcaaacacacgtccaggagtgccaacaacagtatggacaccagcttggagaatgcgctgatcctcacgaacactggtcccaccaacacaagcatgaaccttgacaccaaggtaatcacctagagctcgcataaccttctcaatctgttgtgcaagctcccttgttggtgccaaaaccaaagcctgacactgtaccaatccatagtcaagctgttgcaaaatccccgaacagaatgttgctgtctttccagttccagactgagcctgctgaatcacatccagacccttgcagaaaggaacaattcccctttgctgtattgcagaaggcctctcaaaaccataagcatatatgcctctgagaagattttcttgaaggcccattgcatcaaaactatcatagacttcatcatatgaagtgaaaaattcttgtccatcagcggaaagcaattcattcatcttagaatcatattgccgagcatcaaactgcgatccttctggagccaaacctgccatcactggtgttagggtaatagagatagaagcaaagaggaatgaattagggtttcccaaactcctcggatctgcgccgtggagtcgaagggaaggtacagtccatttttagtgatctctttaatttatttgttcatagattaatatggtcgtgtatgattgcttttctatttattgtggcatttttgtgttgtaccctgttgttgtgtttgcaataattattagtaataaagcagcaaattcaatttgtgttcaaaacggcaccaggaaaaatgtgagaaaagcgaagcgagtacgcaagtgataggaaggagtggagaaagagaaagatgaacatgggactgattcgaaagaaagcattccttaacacacactctgtctttctctttgggtactaatcctaaaccttgtagtcttattcctatgcggtgtggccaatcaacaaagcaacacaagaagatattactatgcagaggtcgtggaatggtagtgtttggcgtaagacatcgacatcgttatccttgacgcccaacacctgctacccacatacgatcccctctcccacgttgcccagtgagacttctctcgtctcagttcagctcaaaacgctgtccatcttatccctctcctcgttctcctctgcgccatcatcctctgctccccccccaacaaccactcttcataaatcaagatttgaattttatggatgaacgatttcagactatggtcaacgtttgattcatgaaacacagaggtcagcgtatatttttgtattatgttgacttttcctcaggaatccttggaaggaagctacagtgaagaaaaccagacctgataccacaagattttttttttgttatgtatcatgtgcttgcactggaatctagatagaaaatntatcgaattgtgtagtactatagattgctgtatgtttattcattcaaaaaccctcttcaattttgacgctattacacgactttgttgatttatc

SEQ ID NO: 3435 - DNA, 1717 bp, Glycine max
  Clone ID: PAT_MRT3847_103105C.1
aaaccgatcaaatttgattgaattgagttttaaatttaaccaaaatcagtctcaaccaccccacaaacacccctagtaaccgtagatacaagagttgatgaaggcattgttcaaatacaaaatacataaacacaaaattataaacaaaaaggcttgaacaacaattaagcaaataaacaaattttatagaatccattataaaaataaagtcaggtgtattggaactctaatgctaaaatttgaaaaagaaaaacaaagagcacaaaataataattggcaaaaagtaatagccctctgatgacttaacaaagaatgaaaattaacccatcagagcagatcagcaacatttgatggcaactcctctacagtcacattgtagaacttttgaatatcagacagcattcttgcatcatccaaagtcacaaagtttatggcaacaccttttcttccaaaacgcccacttcgtcctatgcgatgaagataattttcaggttgggttggcagatcatagtttataaccaaagacacctgctgtacatctataccacgagccaagaggtcagtggtaattagaactcgagaagagccagagcgaaattcccgcatgatgatgtcacgagtgttttggtccatgtctccatgggtggctgagactgtatggtcattgcttcgcatcttgtcagtgagccagtccaccttacgccttgtgttcacaaagatgacactctgggtgatagccaaagtctcataaaggtcacataatgtctctagtttccagtcttccttatcaacattcacataaaactgtttgataccctcaagggtcaattcatcacgctttaccaggattctcactggcttattcatgaacttcctcgtaatctccaaggcctcaggtggcattgtagcagagaacactccaacctgaatttgacccggcagaagctggaagatgtcatagatctggtccttgaaaccgcgagaaagcatttcatcagcctcatccaaaacaaacatctttatgtgatctggacgaagagactgtctccgtagcatgtcaaatacacgcccaggagtgccaacaacagtatggacaccagcttggagaatgcgctgatcctcacgaacactggtcccaccaacacaagcatgaaccttgacaccaaggtaatcacctagagctcgcataaccttctcaatctgctgtgcaagctcccttgttggtgccaaaaccaaagcctgacactgaaccaatccataatcaagctgctgcaaaattccagaacagaacgttgctgtctttccagttccagactgagcctgttgaatcacatccagacccttgcagaaaggaacaattcccctttgctggattgcagaaggcctctcaaaaccataagcatatatgcctcgcagaagattctcttgcaatcccatggcatcaaagctgtcatagacttcgtcatatgaggtgaagaattcttgcccatcagtggaaagcaattcactcatcttagcatcatattggcgaccatcaaattgtgttccttctggagccaaacctgccatcactgcaaaaagcaaaacttccgttaaaagagaccatacattcaagtactctggcaaaattgaaaaagataacaaaggaatcgttcagaaacaacacacaaataaccaaatcaataatgcatccactataagtttatacttcagcact

SEQ ID NO: 3436 - DNA, 390 bp, Glycine max
  Clone ID: PAT_MRT3847_103106C.1
ttttcacaggccgccacccctggaagccgcaccctaaagccgtcaacacttgctatcaagacttgatcacaagattcctacatttttgtgctacatttctgaaggcgaagacttacggtctataagctgactacatacgctggccacaaacttcttgaacaatcttattttatacgctgaacacattcgcataagactctggaattcgagatagaactaaacgtcatatgtaaacttctcaggtctctgttcaagttcaaggtcaagctggaaaaacatgctattaaagcttcgactctgcgatctgacactggaatatggggtaagactttgcgattagactcctatatttcactctcttcttctaactgatccgtattgccgatccaa

SEQ ID NO: 3437 - DNA, 1679 bp, Glycine max
  Clone ID: PAT_MRT3847_103107C.1
ttttgagaaaagaaagcaaatgcaggcttgagcagcaacctgctaattaattgattaaacaaaatttatagaatccaatacaaatagcatcagatcacatgtctttgatctctaataggtaaaatatatagagaaaaaataagaacaaataatacttgccaaatagaataagatcctgatgacttaacagagaacaaaaattaactcatcagagtaaatcagcaacatttgatggcagctcctctacagtcacattgtagaacttctgaatatcagacagcattctggcatcatccgtcgtgacaaagtttatagaaactccttttcttccaaaccgaccactacgccctatgcggtggagatagttttcaggttgggttggcagatcataatttatgaccagagacacctgctgcacatcaattccacgggcaagaaggtcagtggtaatgagaactcgggaagagccggaccggaattcacgcatgatgatatcacgggtattttggtccatgtcaccgtgggtggcagagactgtgtgatcattgcttcgcatcttgtcagtgagccagtccaccttgcgcctggtattcacaaaaatgacactctgggtgatagccagagtctcataaaggtcgcataatgtctccagcttccactcttccttgtcaacattgacataaaactgcttgataccctccagggtcagttcatcacgctttaccaggattctcactggcttattcatgaactttcttgtaatctcaagggcttctggtggcattgtagcagagaacactccaacctgaattttggatggcagcagctggaagatgtcatagatctgatccttgaaaccacgtgaaagcatttcatcagcctcatccaaaacaaacatctttatgcaatctgggcgaagagactgcctccgcagcatgtcaaacacacgcccaggagtgccaacaacagtatggacaccagcttggagaatgcgctgatcctcacgaacacttgtcccaccaacacaagcatggaccttaactcccaagtaatcaccaagagctcgcataactttctcgatctgctgtgctagctcccttgttggtgccaaaaccaaagcctggcactgaaccaatccataatcaagctgctgcaaaattccagaacaaaatgttgctgtctttcctgttccagactgagcctgttgaatcacatccagacctttgcagaaaggaacaattcccctttgctgtatagcagaaggcctctcaaaaccataagcatatatgcctcgcagaagattctcttgcaatcccatggcatcaaagctgtcatacacttcatcataagaggtgaagaattcttgcccatcagtggaaagcaattcactcatcttagcatcatattggcgaccatcaaattgtgttccttctggagccaaacctgccatcactggtgggagttttaagtagaataaggaaagagaaaaaagaaaaaagaaaagaaagggtaactcctcggatctgcaccgtggagttaaagggaggcgaatagagaggaagagggagtgttatattcgaaagggtaacaggaaaaaatgggaccaaaaacaattaataaaggtttccacgtttaccctttcagatgccttccccttctgtcgtcttctcgcagccgta

SEQ ID NO: 3438 - DNA, 726 bp, Glycine max
  Clone ID: PAT_MRT3847_103108C.1
ctaacctacctgttcctcttctgtattaacaactacaccgttcttactactggatatgtctacttaggggcacgtaccactgatgagctgatcgccaatgctgactacattggcactgctggaaagggtatacttgctgctgatgagtcaacagggacaaatggcatgcgtttgaccagcatcactgtcaagaacattgaatacaacaagcgagctcttaaggagctgattttcactgatcctggtgttcttaaatattttagtggtgtaattctctatgaggaaaccctgtaccatagcacaattgcaagccagccctttgtgaatgtcttgaacgaagctggtgagctaactggcatcaatgttgacaagggcacagtcgagcttgctgcgtactaatggagaaaccaccactcatggtctagatggccttgatcagcgttgtgccaagtactactaagctggtgcacgatgtgccaaatggacagcaaagctgcagattgttcccaactagccatctgaactgtctatgcatgaaaactcctatggcttgcttagatacactggcatatgccaggagaatagactgattaccattgttgagcctgagatcctcggtgagagacctcatgacattgacaagtgtagccgcgtcaccgagcagctccttacactatgctacaaggctatgaatgatcaccatgtccttattgagggtaccctatt

SEQ ID NO: 3439 - DNA, 286 bp, Glycine max
  Clone ID: PAT_MRT3847_103109C.1
cctctttccttgccttctgttggggggctctttgtaagactttcgcctctatgttcccacactaattaaaccaaatattatgcgattgtatatatacataacttttatttattgcatcttctacataatattctaaaaaaagtgtaattactaataggcttttttaggctgatagggtaagtttaattctaaaactactagatgtctcataacacttattcatcatgaaaactcatcatcgtaaatggaagaggcatgaagctctataaattctgagtggcgactt

SEQ ID NO: 3440 - DNA, 352 bp, Glycine max
  Clone ID: PAT_MRT3847_10310C.1
ggaaaaatgaaccgggtgaacctaggatcatgatcttcaaacaaaaaattgaattgtatcatttaagtcacccttaccacaaatcatcggcagatctacgttaatctaggtttttcttacttcatccccatacattaatggttttaaaatggcaaaaaacatccaccgcctatgtttatttaattacaacagcgattttaatataacttttttttgcctaccacgtatgtgatttttcaatctttgaagcacacgccacaacataggatttgaattttctcagcttgggcaaaaccttattttttgtgctggcgatcaaataactcatgccccatatttgtgaagtttcccc

SEQ ID NO: 3441 - DNA, 385 bp, Glycine max
  Clone ID: PAT_MRT3847_103110C.1
gtgttcgtaggcatggaaggggtaattgtgtatgctatgctcagagatcccaagggcgggttttcaaagtacaaagcatctgaggatttatcagtgaggtgggaagaggagcaggtaaaggtcttttaggggccaccttttcctgcacaaagatcattcaagacaacaaaatctaccaaatcggcacattttccaatctctgatggaatgatggaaagggccttgcatgggagcaaatttcttttgccaccaaaatttcaaaaccatctgactgacatgaaattagggataggtgattctgcatctagtctgtcacattttagtacattggaccgacctagtttgcaaaatgatcactttatacctcttccatcttggagttatg

SEQ ID NO: 3442 - DNA, 380 bp, Glycine max
  Clone ID: PAT_MRT3847_103111C.1
ttcgtgacgtgggactcatcttcacacaatatcactaccagaagaatcattggtctttgttttgtcttgggaattgtgtgtattgctttcctgtcgatttcaggatccgcaggatttgtttatagttgcacgaaggcaggaaattgtccagatggtaaagcttgttacactttgtgtcaattttttggctataaagattttggtgggttatgcattgaagataaaaatcagtgttgctgcgtaaaggatgatggccctggccatccttagctacatacaatatcagtgttttgttaccatggtcgtaacaaaagtttccatattaaaaatggaattataaataacccccccccccttaattaaaaaaaaaaaaaaaaaaa

SEQ ID NO: 3443 - DNA, 280 bp, Glycine max
  unsure (1)..(280): unsure at all n locations
  Clone ID: PAT_MRT3847_103112C.1
attttaataacactagagccaaggtaacttgtcctctaaaagatttagtgttgactttgccaaccantnagacactttcaaaccttgtccactagaaatgaganaagcatcaactttccaaccaataatanactntcaaactctgtcacttganacgaaaaatgcatcactctggaatggggattaggtgctcctaaatagagtatttcataataacactagtgattgggatcttgagatcttagagtagcantaatctctctcataaagttntttttnc

SEQ ID NO: 3444 - DNA, 375 bp, Glycine max
  Clone ID: PAT_MRT3847_103113C.1
aagaaaacgattatgaacttgaacctttatttgttcaccggggttggggttaaaaactgcccaaaggagacttgatcttaaaaaatgagaaagggaaaacaaaactcacatttaaagggggctcttttcttcactggtgggggctcttttcaaaaatagctattaactttagcgaacaatgcctttaattttgtcttccacttctgaaaacaaatggctgagcttttaaatattatcttttgaagtttcccaaaaaccacgttcattggtttccaagaatgtctgccccaattttcttaaggagtttggattaccgctcatgaacttggtcaacatttgcccatcttgaaagaaagatgggttgggttttttata

SEQ ID NO: 3445 - DNA, 161 bp, Glycine max
  unsure (1)..(161): unsure at all n locations
  Clone ID: PAT_MRT3847_103114C.1
ancttagccgaggtcacgaggagcactagctagtttcanaatttcnaaatggctaggggngtgaagaagnatctnaagaggntnaatgctcctaagnattggatgnttganaaactgggtggtgcatttgcgnnnaaaccctcatctggannananaantt

SEQ ID NO: 3446 - DNA, 159 bp, Glycine max
  Clone ID: PAT_MRT3847_103115C.1
agagagaaaagtaactgatataattgtgatctgaaaagttagttagagttagttacaacaaaggtatatatagacctctgaccctctgaactaacactaacagactctgacttcctaatactagtgaggtgctgttagcaaaagctaacggacgcgtgg

SEQ ID NO: 3447 - DNA, 579 bp, Glycine max
  Clone ID: PAT_MRT3847_103116C.1
atgcaaggggaactctaggggggtaaatgagtcgagcataaaccagttcttgaagattgggcttaacttgtaaaaaattgagtgctcaagctcgattcatttatttaaggttgagtttgggttatctagctcggttataacttaattacttttgcttttatgaaattatattcaaattattttttaactttatcaatataggatttaataattattttaatacttgagaatttatctacttactaatagaaaaatgggctaaacatgaaatatgtgaaattaaaaaaaaaataggctattaccctttcataatttaggaataaaaaaatcttaacttattgaaggatacaaaaaaacttaaaaattaatttaatattctttgttaagagccaaaaatgctttttttcaaggcaaaattaaaattaccaagaacttgacccaatgggggggggcgttttaaggggaattacatgggagccactataaattaaagtctggagataacaaatcccataaccttgtgtgaccgggggggggggggacccacaatcattggggggcaaaggtggggggggggag

SEQ ID NO: 3448 - DNA, 574 bp, Glycine max
  Clone ID: PAT_MRT3847_103117C.1
cataaattaacaaataatcatacattgaaaaacatggctttaattagcccaatgatctattttcaatcactagagtacaagcagagagtatgtttacgacgggtcctcattctctgcaaagttgatcatcttacaagggcaaattttagctcatgttggttaaaatacgaaatcgagtgaatgggtcacaatcacccgcaatagaaaacaatgttgataatttacaggcaagggggaatgtccaaatacagacaaacggcccccaacttgctgcagcatggtaaattcatgttacaaacagaaatttgggttaggagttaaacattccgcatcagtgaatcaatctgagcacatgaattaggcaaaggctgttgcactatttctggttcatcccaatcctgagattgaatatgtatatcctgtgtttgtataagtggttgaggttgctgatcttgagctaatgcataagcttgcggttgagacattctatagtaaggttctttcagatcaagtttacaggatgatgtttgaagaattcctccttgttcagcaccaggaccccacattttagctg

SEQ ID NO: 3449 - DNA, 366 bp, Glycine max
  Clone ID: PAT_MRT3847_103118C.1
atcaactttatattctttacttgtaagtcaactatattactaattaattgtccattctaccataacctttgatttgatgtttactagctcatacccccttttcccatttcatcatatatatttgcataaagtttatatctaagtctgaattaatttgttataaataatatgttccttccttaaagctctaattgattctctattctttcaatacaaaacaaaattaactagccttcattattattggcatatttttaatttggttgatctaattatactttcttcatgtcttgtgtcaggaagaaggaaaaatgtacatgtgcagttgttctattacagcatagcctagtcacattgggagggaaa

SEQ ID NO: 3450 - DNA, 251 bp, Glycine max
  Clone ID: PAT_MRT3847_103119C.1
cttcaggatggtggatacttgttatggcactgtatcctgagcttgctttatatcgcgggttatatgagttagcacaattttcctttgaagggagtagttcagagacaggtggtatgaagtggcagaatctgagtgaaagcaccaatggcatgaaagaggtcttaattatcatgtttgttgagtggataatgatgctttttgctgccttctacgttgaccaagtattgtcgtcaggaagtagaaaaggtccg

SEQ ID NO: 3451 - DNA, 1038 bp, Glycine max
  Clone ID: PAT_MRT3847_10311C.1
aggcaatgcagcatctctagtccgtacccataatatggccattgcgtattcaaggtatgattcattgactttctactaacagcatctttgcatttgcactcaactggcagtacaaatagaaaacaaaaaaaaggttttaatttgataacctaaaaaaatcagcttgctaaattctctcgtgtgagaaaaaacactgaactctaaaaatgactacggtaaacattatagcagtttacatggattcttctgggttgaaagtgttctctttgaagctcttactcaaccagatagcagtttcccttggggaaacctttgccggccccacctttccccgcaaggccccaggattaggatcatgaaaatgtctatcatctgcttcattgatcagtttgaaaatttgagttatcattattaagtgatgtgaaacagaaaagggtaaatgaaaaaatttgataagctaaaaaaatcagcttgctaatttctctcgtgtgagaaaaaacacagaactctaaaaatgactacggtaaacataatagcagtttacatggattcttctgggttgaaagtgttctctttgaagctcttactcaaccaaatagcagtttcccttggggaaacctttccaggcccaaatggtttcaacagaaccccaagttcatcataccttgcctgctgtagcaatcttgcactaaattcaagcaagccttctaaagcttcagctctttgttggaatgatgatgggtcaaattgtcgacggcgcaagtcaaaagaggtgtggcttgaagcacctgcagttgcattttgatctgaggaaccacttttatcctcatcaatctcctttaacatgctctgcttgattccctgccaagcatccatacaaccaggcttgttagaggctgtaccatatacctctaccgtgcatttgtctatcacagttgaatggttgctatgagatgggaagcctgaggaacctcgtgcagaggatgatgttttattgatagggaacaaagaatcttcatatgaagttaatgggaattc

SEQ ID NO: 3452 - DNA, 250 bp, Glycine max
  Clone ID: PAT_MRT3847_103120C.1
gaattcggatcgaacataagcgtactagtcagaacgtgcattcaaatatgggcaaaaagaagagtctctaaaatctcacgaggacaaagaattaccaaacgtaaagcgaacgttgccaatggggactccaaccgatgggtcctcagaactgcagattcagaacatcgtaaacctcaaggacgtcacttctcaaggagaccatccaacgccggcagcagatgcagtctgtccagtgcgggctccagcaata

SEQ ID NO: 3453 - DNA, 766 bp, Glycine max
  Clone ID: PAT_MRT3847_103121C.1
cctggagtcaccagtcctgggatattgggcagatggcaaggtggggtctgcccaatatccctggagtcaccagtcctggcgccttaattgaagactccaaagtagaagtgaacaacttaaacaacctgaacaatcatgacaggaagcatgcagttggggatgaggctcagtttgagatggacatctgactactgccatgtggaaggaggcctcgtggagcagcctgtgtgcacctgactggcccagtaggaacacagtgtacagagaagctcctgtccccctgtcccctctgggtgccaaataatgggagatgtgcactgtctgatcacatcttcccgtctcctgccctctgcccagttaaggttaggttgatgaataagcccttggattattctgtggagctgaccagtccacagaagaaagcagtccctgtagcttccctggtcatttcccaagaatcttcctgccctgttgagacttgccccaagtctagggcagtctccaagcagcacctctgcttgtaggggttgggggtgaaggaggtttagtgcccattgtgttcctgggctctccctgtccttccctacagcccactactggtggagcgctggatgtgggggacatttgtcctcagctctggagcacagtcctgtacctcctgcacctctgctgcattcctgggacatgtgacagcagcctccccttttctgggaggaggcttctgtcttgcttgggtgtgatagctatctccccccccccctttctt

SEQ ID NO: 3454 - DNA, 391 bp, Glycine max
  Clone ID: PAT_MRT3847_103122C.1
accgctcgtacgaaaacacgtaagggggggctaaacaaaactaatgactggagggactctatccgcggagagcatacacaatttaccactggactaactgccaacgttacgttgcaaagcctcgatctagggctggcttgggcaaactcaaacaatgcacgtccaaaatgccttttgaatctacatgagacatcatttaacgcaccgttatcaacgaccgagagacaggaacatcgagaggatttggattagtgagactggagataaagcactcattgaaagatgcgatcgaacgaacgaacggtcagaaacttgaccgatgacgcatttgtgtcacacaagctcatacccaaccgcatccgttgtatccctgctatcacggattgaggaa

SEQ ID NO: 3455 - DNA, 423 bp, Glycine max
  Clone ID: PAT_MRT3847_103123C.1
cctcaccctaattgtttttcagaccctcccgctcccccaatccgagcgctacaggacacgtggagtgcggaacctgaaacaagatgatatgcactttcgccaaatccattattcataccctccttccagctaatctccacccggccacagtcatactagatccatacttactcgatactttcagaaactaaagccgaatatgctacagaaccttccactaaactaatcaagatacgtgcttataatgcctatcgcgtctcttaaaaattatacagtagaactacatctgcggcatgtccgaaacccttctatactatcttgacgtcatcagtaacctccatttatcaaactgtttcgcatcctgtatattccatggtgcagagcctcttgacaatataatgttttgcccttcatatatgacat

SEQ ID NO: 3456 - DNA, 158 bp, Glycine max
  Clone ID: PAT_MRT3847_103124C.1
gtgttaggctacatggttggctcggggttgccatcaaatgtgaagaaggtcttccatccgataatttgctgtgctttatcagcagatctgacagcatttgcttttgggtatttttccaagtcaggacttgaacctgtgctaggatattaccttacaaa

SEQ ID NO: 3457 - DNA, 279 bp, Glycine max
  Clone ID: PAT_MRT3847_103125C.1
cgtttgtggattattatattttaattagattttaaattttagtaatgtttttgggaggctggaaattaaaggggttctttatagtgaaacgggaaagcactgataaaccaaaagagatacttgggggcggaaaaagggtttttaagaatttgggagggccaaaggcgccggctacacccaggtaggggccgggcttttgaagatggagggacttgagcccctcaataaggatcttgtaaccgggggggagaaaacccacccaccgtgatagggtttttt

SEQ ID NO: 3458 - DNA, 492 bp, Glycine max
  Clone ID: PAT_MRT3847_103126C.1
cagcgctgcaaaggcatgaccaacacaagaagatcaaacatgatgcatacgaaaccaggtggcctggcgaacacctatctatagctatcactagatcactcgctatagatagattcgaattcggaactactcataaccgtacgtgtcacaaaaacctgaaatctatcagactcatagagttttgactgctttgaaacatactcgtgcacactacactacatgatcgaacatcgatctgcacaaacacaaacgccaggtctgaactactcatctacctctctatcacctactgtcaaaacataccaagagttatcgctctttctttataaatgaacctgagcaacatgaacgacgctgagatcatgcagctgacagcgacaaagactactatgatgcatgatttcctatctacgaacatttccaccgagcacattgctaatttccttgctgagaacacgatgctgttcactgctatactgaacaatcaaattc

SEQ ID NO: 3459 - DNA, 390 bp, Glycine max
  Clone ID: PAT_MRT3847_103127C.1
ggccgcccttttttttttttttttttttttttttttttttttttttttttttttgggttttttttttttttttttttagaccaaccaattcctagagaaatcaaaacacaacaacacccaggcaggggccccaaagcccaagcccaaagatcaaaaaaaaagaccggcacaaaaaaaaaaaaaaagggggaccccgggggggaccaaaaaatccgggaccggaacccgaaggcggcccaaatttccttaatgggagccttataaaaaaaaaaaaaaagagggcccgggggggtccccgggaaaaatgggggcccccccacaaggccccaaaaaatcctcaccggaggcggaaagtgaaaccccgggggggcctaagggaggagccccccc

SEQ ID NO: 3460 - DNA, 377 bp, Glycine max
  Clone ID: PAT_MRT3847_103128C.1
taatgccgctcgagccttgaacacctagacagcgctgcatgaacatttttgacatcacgcgtggcaaggcgaaacagtgttaaggcactcttacactgacgtgtggagctacttccaagcctcagacattcccatgccaagagcgctaacaagttactccaaagcaaggaatcagggatccacagaatcaatgaacaacgcaatacacgaactaacaatcacatctcaatttaaaggtacacgaacctgaaagcgtccgagacagtttctttgagatatacactgagagctcttgcctagcagtacacatatcaactattatgaccaaggtgattactccagatagtactacttagataccactgcattgcctcttt

SEQ ID NO: 3461 - DNA, 389 bp, Glycine max
  Clone ID: PAT_MRT3847_103129C.1
ttttcaaaagaggttgcagttgcgagattaccgcttagaggtcctgcactgcactatgtcatctgagtcgaagcttttttgtatgctgaatatcagttcaagtgtaatttccaattttcataagctcaatgctttggttactgattaatatcggcagtttttgtaccagccaaaattttacatttcataattttggttgctgaggatttatggtgctctttccctgcaagttgtgaattcaagggttatgtcctgctgtctttctattggttctttcgcaaatgaaatatatatgtatattttcaagatatcattggcatgaaactgtgacttaatcagttgtgtgagtataatgtatgaactggttcgcgaatgcaccaatttcttgc

SEQ ID NO: 3462 - DNA, 290 bp, Glycine max
  Clone ID: PAT_MRT3847_10312C.1
cccccgggcggcaaccgagcaagtttcagggaatgcccctcattcaggaatctgaacctgcaattaacatacaaaacacctttcgccacaaaggacagtgtatccaaaggcataacacaaccgggtatgtcacaacagcgacccctggctaaaaaagaaataaaacggccaacggccaaagcgagaataaaccgtgcttacattcccaagcatgaagggctgggcattacctatttccaaaaggacactgggcattcccgctaccaagacaatgaggcaccgaagcctct

SEQ ID NO: 3463 - DNA, 465 bp, Glycine max
  Clone ID: PAT_MRT3847_103130C.1
ggacataaataactggatattttgaacaaccttgtactgttgtacaaatggatatcggagatgccaacatctgtaatagatggatgccaacaaagattcatttctaacaccatgcggcacgagtctgtgtgcttggatgtgcaatccattacccaattatcaacagactacaatcttctactactaattataaaatcttctacttattatctacagacacctagaaatgacataaaactgtaacagtttagagattaaaacattaaaacgatttatccacttctgcaccaggagatcgattctgcttatcatcaaatcttctacttatcatcaaatctgcttctgcaccaggagatcgattctgcttactgctcccctcactctcattacttctgcttttctctttgggatatgatggcaaggtcagatcaccaaatttcatatttaactctgtcaatgatatat

SEQ ID NO: 3464 - DNA, 280 bp, Glycine max
  unsure (1)..(280): unsure at all n locations
  Clone ID: PAT_MRT3847_103131C.1
cacaggcaacaatttctgncattcactggnaaanactgtaccgacatgcattcaagcttttgaacgtctttggccacagaagctggaaagacatnccttggtttatgacaacaagaaaccactatactaggcagatttttgaagttaagaattccttttggatctgtgctccacacttgcttcagttttgggaggttgtctacaagaatcaaccacaaatttgtgtctatcccagcagatgcatctatttggctgagaatcttggatttcaaaaatcact

SEQ ID NO: 3465 - DNA, 819 bp, Glycine max
  Clone ID: PAT_MRT3847_103132C.1
ccacgcgtccgcgatcatattacatcatacaacaatacatgcactcacaacacacacacattcatacatattactgaggtttttcttttgttttttagacactctcaatctcattttccccttcactcatcagatcgctctctcttacacacacaagggtctcattatacagggggatatgattgaagattttgatctgtttcttttaccctttcagtggtaaaacttatgaaatacggattgaattcttaactctggtaattggttactggggatccgaactatggggtctcaatgtggtggtgataatagtggaaaacattcacaactccagcctctggtgccgcaaaattcaatgtatagcctcacacttgatgaagttcagaatcatttaggtgacttagggaaacctctgagtagcatgaaccttgacgaacttctaaaaaatgtgtggaccgttgaggcaaaccagtccactggtgtggacattgagggtacagctcaaactagacaagctgcgctgcagcgtcaggctagtctttcattaactagtgctctaagcgggaagactgttgatgaggtttggagggatatacaacaaagcaaagataacaaggataagaagtctcaggagagacagtctacattgggagagatgactttggaggatttcttggtaaatgcaggggttgtagctgaagcatctactaggaagaatactggtgctacaattggcgttgattcaaatgtagtggcgccacagtttcctcagcatggtccttggatacagtatccacaaccacaatatcaacatccaca

SEQ ID NO: 3466 - DNA, 1827 bp, Glycine max
  Clone ID: PAT_MRT3847_103133C.1
atcaagtgaaacaatcgttgttggcgatgtgaagtatttctatttaattgagaatgggtacacataaaatgtactaaaattaagcaaattggaactacctagttactggggcattagatgcgagatctaggaactgcgttgtaatcaatgctgtggttactttctagttctacttgttgtgtttgctttacaaaaggggtgataacatattcttaatatctttcattactcgagccgatccatcataggcataccatacctactaaaactcagcgacagatcatatcatatcatgtgataagctagcttatatatacacacaaacaagagggtagaagggaaaactcttgcagaaaatagcttgaaaaaaatatatattctataaacaattatgctttttccatctggtattctgaaaaagcaagtttaatttatttgtggaaagagatataaagcaagtattaaacacatgggtaggggaaaggtggagctgaagaggattgagaacaagataaaccgtcaagtgacatttgcaaagaggaggaatggtttgctcaaaaaggcttatgaactctctgtcctctgtgatgctgaggttgccctcattatcttctccaaccgtggcaagctgtatgagttctgcagtggccatagcatggccaagacacttgaacggtatcacagatgcagttatggagccttggaagtccagcaccaacctgaaatagagacacagaggcgctaccaagagtacctgaagctaaaatccagagttgaggcactacagcaaacacaaagaaacctccttggggaagaattggagcacttagacgttaacgaccttgagcagcttgaacgtcagctggactcttccttgaagcaaatcaggtctaacaagacacagcagatgcttgatcaactctctgatttgcatagaaaggaagagatgctactggaaactaacaatatcctgagaaacaagttggaggaaatcaatgtagccctacaaccaacatgggaagctagggagcaaaatgctccctacaattgccaccctccccaaacagagggatattatgagacagcaacagcacattgcagcagtacattgagaattggctatgattcttcaggattaaatgaagcaggaggagctgcaggagcctcagcccaaaatgctagtgaattcatgcatggatggatgaactaaatttatttccaatttagtacttaaattcatgatcatcagaaaaatgatgcttttgtagagatcttggcctacaagaacaggctctaataataggtgtcatgcagcataaaatatacttatgctattcttaatattccaataagacatgttttgaagaattttataattagcatcttcccaaactcaatccatcctcattgatccaaatggggttgtttgatacttaatgacatgtgtatgctcctaaaaaaaaaaaaaaaaaaaaaaaaaaaaaaaaaaaaaaaaaaaaaaaaaaaaaagcaagaacaggctgtaaaaataggtgtaatgcagcataaaatatacttatgcgattcttactattccaataagacatgtttttcctgtttataacttgttggattgggtgattattaaatgaatggattgaattgtccttttggggagtattctaaataaaaaaaaaaaaaaaaaagaaaaaaaaaaaaaacgggggaaagtggtaagccggtcacagtctcccaaaaaatccaacccgaattaatagggttgaaccccgggggggccttaggggggggcaacctcccttaaatgggggggccctcaaggcccctttt

SEQ ID NO: 3467 - DNA, 1438 bp, Glycine max
  Clone ID: PAT_MRT3847_103134C.1
atcaagtgaaacaatctttgttggcgatgtgaagtatttctatttaattgagaatgggtacacataaaatgtactaaaattaagcaaattggaactacctagttactgtggcattagatgcgagatctaggaactgcgttgtaatcaatgctgtggttactttctagttctacttgttgtgtttgctttacaaaaggggtgataacatattctcaatatcttccattacgcatccatcataggcataccatacctactaaaactccgcgacagatcatatcatatcatatcatttcatgcgataagctagcttatatatacacacacaaataagagggcagaagggaaaaatttgcttgaaaaaatttctaatctattctattctatatacaattatgtcttttccatctggtattctgaaaaggctagtttaatttatttgtggaaagagatataaagcaagcaattaataaaaacatgggtaggggaaaggtggagctgaagaggattgagaacaagataaaccgtcaagtgacatttgcaaagaggaggaatggtttgctcaaaaaggcttatgaactctctgtcctctgtgatgctgaggttgcccttattatcttctccaaccgtggcaagctgtatgagttctgcagcggccatagcatggccaagacacttgaacggtatcacagatgcagttatggagccttggaagtccagcaccaacctgaaatagagacacagaggcgctaccaagagtacctgaagctaaaatccagagttgaggcactacagcaaacacaaagaaacctccttggggaagaattggagcacttagacgttaaggaccttgagcagcttgaacgtcagctggactcttccctgaagcaaatcaggtcaaacaagacacaacaaatgctcgatcaactcgctgatttgcatagaaaggaagagatgctactggagactaacaatatcctgaggaacaagttggaggaaatcaatgtagcccttcaaccaacatgggaaactagggagcaaaatgctccatacaattaccacccttcccaatcagagggatattatgagacagcacattgcaacagtacattgcgaattggctatgattcttcagggttaaatgaagcaggaggagctgcaggaacctcagcccaaaatgctagtgaattcatgaatggatggatgaactaaatttatttccaatttagtttaatttatgattatcagaaaaaaatgatgcttttgtagagatcttggcctacaagaacaggctgtaataataggtgtcatgcagcataaaatatacttatgctattcttaatattccaataagacatgtttttcatgtttataactagatggattgggtgattattaaatgaatggattgaatagtcactccaattagtattctaag

SEQ ID NO: 3468 - DNA, 107 bp, Glycine max
  Clone ID: PAT_MRT3847_103135C.1
tgaaagaaagctggaaaataacactacacaatttataattttgctgctatagcccgaccaaaagaagtttttgctgtatcacattgcttgcacactcgacagggaac

SEQ ID NO: 3469 - DNA, 397 bp, Glycine max
  unsure (1)..(397): unsure at all n locations
  Clone ID: PAT_MRT3847_103136C.1
ttgacaggagcaagttgaacctcgntacaaggatacctcattcacaaggaagaaaactgctgggtatgagctacacgaaacactaggaccaagctttctgatagggagccagcgcttaaaaacgggcagagaaagcatagcacgaagtcaaagacgctttttttttaggggggtgttcccgcaccccagtgcctcgtgaatagaacacagagcatctgtgggatgcgaggggggctaacattagccaatacaataatagcgggaacagggacagatcattgagcccatcggtgcaggctgcaccgcctcaggaagaaatccgaacggctctgtccacactatcaattctgaaggctgctcaatagatcacgcccccttgggttaaagaggacaaaca

SEQ ID NO: 3470 - DNA, 402 bp, Glycine max
  unsure (1)..(402): unsure at all n locations
  Clone ID: PAT_MRT3847_103137C.1
cacgccctgctgccagaaaacgacagaaggggaangnagtggcttctgaagcagaaaagcgcgcatcacaccnccgcggnacaagatccgccctctctgaacagaaaaaaaggcgcccggagaaaccgcgggcccatacgcagcctccaccccacacgaagacggaaccagcgcaaccgccgacaagaccagcaccccgttggaaaccgcaaagggccaagcagacacccaccggccaacccaactcgccaaaccagccgagaagaaaaacaccggcaaagcgacagccaacgcagcaggcgggggcgcacccaccgccgccgcagctgcccccgacgccgccccacgcggaggaggcgccgccacccgccaccccagccgcggaggagaaaaacaaagagg

SEQ ID NO: 3471 - DNA, 329 bp, Glycine max
  Clone ID: PAT_MRT3847_103138C.1
tcggttgtaaattcatgcttggcttgaaggttgcattaagttttttgcgagttcttacgcattcgtgaagctaatacagtggcttttacagttaatgatcatagagtagaactatatataaagttttattcatcagcatttgactgatgaagtgtgtatactggagaagattggcaaggttgggttatttcataagatgcttaataaagcaggaataagttataatagaagaaattttttcggcttgtggtttatagatctacaaaaattagggtatatcctttggaagtgtatgttaatcaagattgtgggattgcttttttagacct

SEQ ID NO: 3472 - DNA, 163 bp, Glycine max
  Clone ID: PAT_MRT3847_103139C.1
ggttgaaattagtgttcagaaccacaactctggcgctgaccctggcacactgccagaacgaccgaaggctactcatacgaatcctaatgatcgcacctgcgctggccttgcattccccgctcaaagactcatgtctcttccaccacccccacatgcatccccc

SEQ ID NO: 3473 - DNA, 162 bp, Glycine max
  Clone ID: PAT_MRT3847_10313C.1
ataaattataaataaaattcccttacctaggctacaaccttaatgtccaaaacattcactggtccttagttaaggacacaggaaaatgtcataccttaaaaggtcaccaccaccatgaccatatgagccagtggccaaattctagaaaactggtgtggaatt

SEQ ID NO: 3474 - DNA, 332 bp, Glycine max
  Clone ID: PAT_MRT3847_103140C.1
ccttatcctgcctactgaatatacttatatggaaacttccatgcataacagtgacaaccaccaccacctatgcaacacaacacacataacacgtaacaaagagaatgcaagcgctcaattctcacgtgcccctcgtagatcttcactcccaccattacgtgcgcacctaaaccctatcctacctgagaaactcccgcttcatatcatacctccggagacgctccccaagaaccggaatcctatgtacggggtagaccgagatttgccgcccctacgagcgcttctacgggtcctcagccgtcgacttctgagcccgggaggaccctcaaccc

SEQ ID NO: 3475 - DNA, 811 bp, Glycine max
  unsure (1)..(811): unsure at all n locations
  Clone ID: PAT_MRT3847_103141C.1
cgcgtacctcacgcgtccgcccacgcgtccgtacggttgcagaagactacagaaggggacaaccactcaaatctcaatacctcaattcttcgctttaacgaaaaaggacacattttcccttacaatggcacgaaccaaacaaactgcgcgcaagtccaccggaggcaaggcacctcggaagcagctcgccacaaaagccgccagaaagtcagctccggcgaccggcggagtgaagaagccgcatcggttccgccctggcacggtggcgctgagggagatccggaagtaccagaagagcacggagctcctgatccggaagctccccttccagcgcctggtgcgcgagatcgcgcaggatttcaagaccgatttacggtttcagagtagcgctgtttccgcgcttcaggaagcggcggaggcttacttggtagggttgtttgaggacactaatctctgtgccattcacgccaagcgcgtcaccatcatgccgaaggatattcagcttgcgcggagaattagaggcgagagggcttgaggattttttaatgatttgtcactgctaggatacgttaaaactggatctggtttatgtagtttgtggttttggtgtatttattcgaccgtaagggttgtggttgttagtatgaagatgtagagttaacattatctggctaattagttggttaatgtttactttgaatttgctgtttgtgtgaatgaattaaaagggttgattgcaatggattttggttatttttaaccctttttacattttggcttgcataatcatgaattcccatttgagttttna

SEQ ID NO: 3476 - DNA, 1086 bp, Glycine max
  Clone ID: PAT_MRT3847_103142C.1
cgacaacactctctcctacctgccgtacggctgcgagaagacgacagaaggggcaccacaaaccacataattcgacaacactctctcctaattgttcaacttctggagctacttccaccccactagctaccttcattgtattttcagtctccaaactccaaagggaaaatgagcagaccaggagattggaactgcaggacatgcaaccacctgaacttccagagaagagagtcgtgccagcgatgcggggagcctaggagtggtggcggcggcgactacggcggaggcttcggtggtggcagaggctcttcctcctttggcttcaccactggcccggatgttcgccccggtgactggtactgcaccgtcggaaactgtggagcccacaacttcgccagccgctccagctgcttcaagtgcggtgcccccaaggaggactcctccgccggaccattcgacgccgacatgcctcgaatgagaccatacggcttcggcggcggctcctccgcccgtcctggctggaagtccggcgactggatatgcaccaggtctggatgcaacgagcataacttcgccaatagaatggagtgttaccgatgcaatgcaccgagggactctagtagtgccaggtctccctattcatcgtagagttcctcatcaatccatgtggtttgctgtctaaggagagaatcgagaggccatccctatttcctagtgatagttaccttttcttttttgttctcttgcttccatatatgctactttcttcatcatctcatgcggatatttatttttgcttttttttttcttttcttccagctaggaagctttaggtgaattatgattttgaggttttgttggccctgagtgagtctggtatatgatgactcagcagctagctcatgtacttttttaagtatcaacaatttaatatcagtgttaatgtgtatgtttcgagagggggctagcttctaagcctcatcatgactatgatttggtgcaaagatgttctttatctaactctccgagatgtgttcagaaaaaaaaaaaaaaaaaaaaaaaaaaaaaagcggccgctctagagga

SEQ ID NO: 3477 - DNA, 645 bp, Glycine max
  unsure (1)..(645): unsure at all n locations
  Clone ID: PAT_MRT3847_103143C.1
ccacgcgtccgcgatgaatttggaaatttaactcgactagaaatacttgatctcacttggcaagtagtgttattgttgaaagagcaatcacacgtgacattccttatgatttgagacttattatcccttgaaatgttcctgttatcaaatcctctatccccgttgcaagaacgttgtgtaactttccaattcaggttctctaccttgtctgatattgcttgtagcaatttcacttcatcttgtggtaagagttgagcgttggctgaatgtcttgagtgtctcttcctccccaaggctgagccccgctcgttacgggtctctgtctcctttcctttcacgtatgcatcatagtaatagtaattacgaagagagacggaggagccgcagaggagtaaggaggagagcccagaatgagaatgagaagatggtggatctgccacaggaattgatacatgaaatccttttgcgcttgcccgtcaagtctcttattcgattcaaaactgtctgtaagtcatggctttctcacatctctgatccacactttactgcttcacattntanactaggggcagcacccactgagagnactttgntcttatcgnctattgctcgtgaattcctatccatagacttcaatgaatccct

SEQ ID NO: 3478 - DNA, 380 bp, Glycine max
  Clone ID: PAT_MRT3847_103144C.1
gggttgggggaaattcggggtgggccttaaataaaaacaaaccttttgtggaaaagaaccgccacctttacctttaaaccctaatccctgggaagattgtttttttcaataaacagccaacctagatttttttttggggggggcgggggggaccctgttttttttgttgccggccctttttttttacccttaagtttagctgaagttgcttcaccaccacctttacctagggttgtgggcttgattgcccctttggggttggggcccttcccaagtttgaacccagcccaagctggcccaattccttgccctgttgggtaaaggcctttttttgaaacaggggcgggtcccctcccatttttatgcaaaactgggccggg

SEQ ID NO: 3479 - DNA, 289 bp, Glycine max
  Clone ID: PAT_MRT3847_103145C.1
agcttaccgaactgcaacaaaattactttttaatcatcaaaacgaccacaaaaacataaagaggatttatcataagatgagaaacttgtgaggaaagggaaatctcacctatacagacaacgtaaattaaactaacacagacgtaatgatacatcatcggaaatattctatattaagcaatatataaatgtcttataatgaatactattgctctatttaaaccgcggatggacctatcgagtgaattaaccaaatcaaaatcactttggaccaacagtaaaagaaccct

SEQ ID NO: 3480 - DNA, 433 bp, Glycine max
  unsure (1)..(433): unsure at all n locations
  Clone ID: PAT_MRT3847_103146C.1
cccatgtctcaaactccgaatccaacgttgtctctcctacccttgtcgaatctactacgaacactctaggggtgctgaagaatatgaaggtgttcgtgtacgagcttcctccaaagtacaacaccgattggcttgcgaacgagaggtgtagcagtcatttattcgcttcggaagttgctattcacagggcactgttaacgagcgaggttcgcacgtttgacccatacgaagctgatttcttcttcgtcccagtttacgtgtcttgcaacttcagcgccgtcaacgacttcccggcgattggccacgcgcgaactcttatatcctccgccgtcaacctcgtctccaccgaatacccattctggaaccgcagcagaggatccgaccacgtcttcgtcgcttcgcacgacttcngcgcgtgctttcacaaccctgt

SEQ ID NO: 3481 - DNA, 422 bp, Glycine max
  Clone ID: PAT_MRT3847_103147C.1
ccaaaaaccggaaaggacaattaatttttaatttcccattttaaaaaagttactggcaaacccattggccattttaaaactattggtagaaggaaggcttcataccaggggtatttaagggaccaaagaaccccaatttaggtaaacccaaattggtggggcatgcttatttaatcctaataatacccaaagaaagctggaaagggagttacatggtcagtctttcttttcttaaacctttttttcttccaccttggtttctttgacttccttgacctttgccttcccttgcttgggcttcatgaagcaaaagcaagagcagcaggggccctggaacaagaacatcattattgccttgttagtggctaaatctcaaattcctggacaggaagggcaatgtgtgcagcttttggggcccctaa

SEQ ID NO: 3482 - DNA, 665 bp, Glycine max
  Clone ID: PAT_MRT3847_103148C.1
cccgcgtccggcggaccaccgtcgaggaggaaggtggcgcgacgtgggcacacgtggtgtgcgccctgttcgtgccggaagtgttctttcttgaccccgaagggagggaggggatcgacttctccaaggttccaaagaagaggtgggaggagaggtgctatctttgcggatcctgcgaagggtgtgctttggtgtgttctgagcccaagtgcgggttggggtttcatgtcacttgtgcgctgaaggaggaactttggattgagtacagggaagggaagaagggtggtaccatagttgccggcttctgcaaaaaccacacccaagtttgggaaaagcaacagcaatccgggaagtacaaaattgttgctgttgaagataaaaagtagcaaaagtcttggtttttttttttttttgaaactgttagttaattaaccatcctagggaaattcaaagttagttacttttgaagatcatttgaatcagttgtaattttactcttcatagctgatagcttttatgctttgttttagtgctctaaatcttcagatgaagactgttgccgacagtatgtgatcattgttacctaagaagattaacagttgaattgtgatcaaattgagttattataacaaaaaagaaaaaaattgaaaaaattaatgttgtac

SEQ ID NO: 3483 - DNA, 472 bp, Glycine max
  Clone ID: PAT_MRT3847_103149C.1
gattgactgcctttccaatgcaggatgctcaggttacaattgatgggtttatttcctctcaggaatgcgctcccaggacctattgtgttcttaaatccacaaaatccttgttgtgttaaataggtggttggggaaactgactttcccccagggcacttaccgaagtgttaaacgacagcctctttctatacgcggaggagctggtgcaaagaatgctcttctcatgaatatgccatacgctgtcctttcaatgtggagatattttgccggagatcacgttgttgaagtttgtaagacgagttctccctcacattaaatgtacagtctcactgttgatagcatttggaaatgtggctgatgacaccatcaattttgcggctttttcccacacggtggtgcactttggtgagattcatgacaaggcttgtttcgctttttcacaagaggaaattattacagcttggtcaactca

SEQ ID NO: 3484 - DNA, 361 bp, Glycine max
  Clone ID: PAT_MRT3847_10314C.1
ccttttctttttttttttttttttttttttttttttttttatttttttttttggggggggggggcaagagactaaccattttcccctgttttaaaccaaaacaaaaaagggtttcaagattttccccaattcagaaccaggatcacccacccttaaaagtccaatacaattttttcaatcggaccctgaatttaataaatccccaaaaaaatgatagaagccttcccgttctgccatctatgacatgtttggcttccaaacccctatctagaatggtgggatccctaaaaacgaccaaacccaacccccttggcttaccagagttttcttcccgcatggcggaagggccttaaaactttgt

SEQ ID NO: 3485 - DNA, 473 bp, Glycine max
  Clone ID: PAT_MRT3847_103150C.1
tttttttttttttttttttttttttttttttttttttttttttttccaaggtttcttgggttcttgggtttatccgggaaatccggaaccgggcccggggggggaccaaacttttaaaattggaagaggaataaaaggtgggagaaacaagggcaaaaggggtacccgggggaaaagggaaaaccgcacaaatcccccaaacccaagaacccgaaggctaaaagggaaaagccggggggcccaaagaacggaccaaaccccagtaaatgcggggggccccatggcccccttacaaaccggaaaaccggccggcccagtggacaaaaaaaacgccaaaaaaccgggaaagggggttaggcaaaagggcccccaggggggctttattttcaacaaggaaaaagggaaaaacagggaagccccttaccccccgggccctaaaaaaatagaagaaaggggccaccccggtttggccc

SEQ ID NO: 3486 - DNA, 1262 bp, Glycine max
  Clone ID: PAT_MRT3847_103151C.1
cctcgtgccggattcggcacgcgcctctcgtacgtgttctgtcctcctcggaccagccgcgcatggccactccgtaccggggtatgaggctcgccgcagggtttgctggtgcccgcagcccttgctgcgttgtcagcggcaccgttcccaagctcggtcctttggaaatggctggggccatagtctgggattggatgaggcatggggtcctcccggatccctttgttgtctgcatttttctctatgttttcgctgatgctggttgcctttttcaggccgtcactgcgctcggcgtgacgaagccagctggcgcgccagcgtagtcagttccctcttattcattgatcaagttgtatgcaaaaattgacaacctggaaaaagcacaagaagcatacaagttgcttcaattatcagaagaaggtcctaatgtatattcttcaaactgtatgattgatctttatgttaagcaatctatggttggccaagcaaaacagatatttgataccttaaagaaaaatggaggtgcaaatgaatttacatttgcaatgatgctatgcttgtataagaagattgaaaggtttgatgaagccattcaaattgcaaaacagataagaaaattgggacccttgacagagttaagttataacaatgtgcttgacctgtatgctattgctgggagacccaaggaagcaatagagacttttaaggaaatggtaagagcttccattcaagttaatgattgtagtcttagatcacttggaaatcttttgttgagatatggagtatcaaggctggctgttggcaaattagaagcattggtgaaaaaggatgcttccaacggtttgcaggcatggatgttagcactctcaagtgtgcttgaagtagatgattatgatcatgactagatatatcctctgcaatcaagcatgcaaagttcagttgactgtttaaatgacactgcgttaaagttgtgagaatagacaaacaacttttgaacgtgatctattctatgtaaaccttgcaaagttgcaatatgactatggactgaggtatgaggatcaccttgtactttttgccaaatacggagcaaagaaattctgaagccgagactttgaactgatgcagcgagacagaatccaagcataaatcttttaaatttggttggacctaagtgtaaattgaaagataaaagtgtacttcatgaaaccctatgttgtataaatttttctgtatttaatgtaaatataaatttcctttttcag

SEQ ID NO: 3487 - DNA, 212 bp, Glycine max
  Clone ID: PAT_MRT3847_103152C.1
tccttttaagataacgtggcgcccgcatacagattgggggacagctgcgacctgacgcgctgttcgcatgtgcgtattgtgaaggcggcatccgagtgtgacgcaagacgttcggaacattatagcccagttgttcaacagacagcttgtcgattgccatagtatgccgctgggaggtctggtgtggagtgcataagggaagcgcacagaca

SEQ ID NO: 3488 - DNA, 271 bp, Glycine max
  Clone ID: PAT_MRT3847_103153C.1
gccgggaatgccgggtcgacccacgcctccgagacacgtcttgggcccttgcactgtatcgaaatcggagtgaaggatgcctggcgagtgcaagagctggagatacagtaataacgctaccgcatgaggcatgttaatcatgctgccaggcgcacccagccggaagactaccggatgcgaagatctgagtgctgacggactcatggggttcccctgcgactgcaagatagacatagtccagacccgtttcatgcagatactcgccttcttg

SEQ ID NO: 3489 - DNA, 469 bp, Glycine max
  Clone ID: PAT_MRT3847_103154C.1
tgtaggagtgccgcctgcttggggggggggggggggggggggggggtggggggggggcgggggggggcaatgaggtggacctgggaaaagagcttggagacaagccccaagaaaaagggtatcttctacacgcatgatgagggataggcgggaccgtgaaaaggcttacaagtgaagaccggtatgagcacggagttgactgagggacatacgtaccgaccgtaaatgataaggccaggagtagagatactataaccagtggggtttaaaagaccaggcttaaggtattaattgttgccacgaatctcattagagcagtggtgtaagccgtttggagtaagggtccccaaaatgccagtagttggccgaaatgggtcactaaaatcgctattatgagccattagcgcagtaaaaactgctaagggtagcaacatgccagctgcaggccctcccgccaattattggagcg

SEQ ID NO: 3490 - DNA, 549 bp, Glycine max
  Clone ID: PAT_MRT3847_103155C.1
gcacgaggcagatcaattgtaatttttttataataaaaagattctaggaaaactttgagctttatttacaacggatatgaataaattatgctggaagctgtgtttttgaatttgcacaagattacacttctatttccactctggcattcagagccacctgtggatacaactgcttcctatagtaagattcaatgatcctgccaggtttctctgcactgacagtgtgcagtgagaagtatgatgggtcaaacagttatgttgcatgggtagatggtgctccacaagtagtgtcttgaagagttcagtttactcttttaaatgtttattggatcatcttgttcattttttaactggaaagtttgttttcttgattggtcaacacggttattacagctactggttcccccaactttgatatgctgtccccatattacctttttcctatgaaattactattagagatacctttattttatgtgaaaatattgtataataattgaaatttctttaggcaagattaggaagagacagcagaaagataagaaatcc

SEQ ID NO: 3491 - DNA, 356 bp, Glycine max
  Clone ID: PAT_MRT3847_103156C.1
ggccaaatttgggccggaacccccccaggaaatttgagagaacttcctaacgaggaaaaggatgtccttgaaaagtccactctgagatccaaagtctcgctcaggttcacgctgaagagaccgaatagccattcagaccaatcattaatgacttggatgaccaagctgaacaagagtatcttgaccccgaagagctcgctctattgaagatgaaggagctcggtttccccacggaggctgaagatgaagatcttggtgaacaaagagttttctatatggagaaagaaatgcctgaagagcaacactggaagaagcactacgatccctatgaataagatgtcttcaacatccctgat

SEQ ID NO: 3492 - DNA, 259 bp, Glycine max
  Clone ID: PAT_MRT3847_103157C.1
gcgagattcaaggaaagctgtttatcttcagcatggagtttttgattcatcaatgggttgggtatctaatggtgttgttggctctccagcttttgcagcctatgaccaagggtatgatgtgtttctggggaattttcgtggtttggtttctcgggaacatgtcaacaagaacatatcatcacgtcaatactggcggtattccatcaatgagcacgggactgaggatattcctgctatgatagatagaattcatgaagta

SEQ ID NO: 3493 - DNA, 799 bp, Glycine max
  unsure (1)..(799): unsure at all n locations
  Clone ID: PAT_MRT3847_103158C.1
tgccttttgtaactgccttggcacatcttgtgctagtgtcttctttaataataatttgacttgttaagaaaaaactagtaactaattccggtccttaagtttaagggtaatacttactatatatctatatgcttctctctccatttctaagtcatatacattaatttgagagtgaagaattaaatggagcaaaagcaaaagagctcgaaacattattagtatgtgattgtagtatagtagacacaacaaacttataagctctctcagttggatgggcagaatcccagaaaacgtatgaggaaggatttgggcacaagctgaaaaggctacatattcctgaaactccaaatggcgcagtcccacaacacccttctgagacatctacaaaccctgaaattattatgaagcaaactaacatatatattaacgattaacaagtgttaatataatttacacagttaagttaatattgtatagaaaatgaccttctggctgaggattatttatgagattaaagagaggagtatagacatcgatgaacctaatgtcataattgggaagggtggttctgatagaattaactgctgatgataattggccattgaatgtctgcgcaaatagattcgcaaagggtgcacaaatccttaatggtccccctgccacagttctacctccaggcaagcannnnngtggcaatgtacttnnnacccacactcgtcttnctccaagttcatatngactcttcnnnttnnnattatatatataattantnnnannnnnnaantgnnngtatatgtct

SEQ ID NO: 3494 - DNA, 1617 bp, Glycine max
  Clone ID: PAT_MRT3847_103159C.1
gggtgctaaattgagatacctgactgtctttgtgtgtgaaaaagcaagtgaggaagagagaaaaagaggaatcaagatagctcctttgaattttctatcagaatctgaggacccaaaatctagggttttctgttcttctctggggatctgaagacatgcagtccaagtctgaaactgcaaatcggctgaggtcagatcctcattcctttcaacctggcggtgtttattctgagccttggtggcgtggtattgggtacaatcctatggcccaaacaatggctggggcaaatgcgtccaattcgtcatctcttgaatgccctaatggtgattctgaatccaatgaagagggccagtctttgtccaatagcgggatgaatgaggaagatgatgatgccactaaggattcgtagcctgctgctcctaatgaaacaggaaattatgagcaagtacaaccaagggatgcaacatactgcatcatctgcacctttcatgcgtgaagaatgccttactcagactccacaactggaacttgttggctcactcaattgcatgtgctacaaatacttacaggatccgtattataggggcatgattttagatcattgggatacgctccttttataggaatgcctcatgccagaatggctttgccccttgagatggctcaagagcctgtttaaagaacttccgtatgtgaatgccaaacaataccaaggaattctgaggcgaagacaggctcgtgctaaagcagagcttgaaaggaagctcataaaatctagaaagccatatcttcatgaatccaggcatcagcatgctatgagaagggcaaggggtactggaggacgatttgcaaagaaaactgaaggtgagggctcaaaccacaggcaaggaaaaggataatggtactgattctgtcctatcatcacaatcaattagttcatctggttctgaacctttacattctgactctgccgaaacctggaattctcctaacatgcaacaagatgcaagaggatctcaagtgcatgacagatttgaagaacgcaactatgcaaatgttttgcagtcatcatctactttttgtttgcactcgggtgaaagagtggaggaaggggactgttcaggtcagcaacggggaagcatcttgtcagagcacacctcacagaggcgtcttgctattcagtaaaccacttgcatgtggttgatgctgaggttggtatatataattaagtgaactagtaggttgagtaccttggttatctatctgtaaacattggcaatttgcatgcatgtcaagcggcaaatcattcttggctgggtttcagctgttcatgatatggggagaagaatgattgattgggccatcatacttgtgttgttgaaagtcaaccagtccttcattatattctctttttcattttttctttttgtacaaagatagtagttagcaaagtcaagccaacgaatcagaagacttgatgaaacaaactcttgctctactgactcgctttcctatggcggctttattttatgtaactcaccggttattaatgttaaataagagacatcatatgagagatttgctgcatgattgtattcacatcccttcgacatttt

SEQ ID NO: 3495 - DNA, 506 bp, Glycine max
  Clone ID: PAT_MRT3847_10315C.1
acaaaatgtggaactatattgctcaagaagaaatacaaataacaggtgattgagatccctggccatatccgaaaactctacactctaccactttataaatagctaaggcttgtccacacaactaaggctctacactccatcctaccctactagacccaggaactaatcatcccaatctctaattttttttatatcaaaacccgaatctgggttttcttttcctttcctttcatttcctttatttccccaccccaaactaaagggtacgtgtaactgcgataccggtatatacactctgccaccacagtaccaccttccagctgcacatcagatcttatgctcaaactttgtgtatatgattacacatgtgccatcttttctccaaggagtattatttccaaggaaaaagttcagtagtatctgatctatcaaacaatctgagagacattcagaggcggtggttctgtttctgtccggcataaacaatcaggcaagggattagcata

SEQ ID NO: 3496 - DNA, 1191 bp, Glycine max
  unsure (1)..(1191): unsure at all n locations
  Clone ID: PAT_MRT3847_103160C.1
gttgtgttactattttttttttttaaatgtttgttttgatttttttataattttctctgttattattggtgtcgttgctattaattaatttctggtgctaaattgagataactgtgtgtgacaaagagagagagtaatcaagatagctcctttgaattttctatcagaatctgagggcccaaaatctagggttttctgttcttctctggggatctgaagacatgcagtccaagtctgaaactgcaaatcgactgagatcagatcctcattcctttcaacctggcagtgtttattctgagccttggtggcgtggtattgggtacaatcctgtggcccagacaatggctggggcaaatgcatccaattcatcgtctcttgaatgccctaatggtgattctgaatccaatgaagaaggtcagtctttgtccaatagcgggatgaatgaggaagatgatgatgccactaaggattcacagcctgctgctcctaatggaacaggaaattatccacgcgtccgggcaagaacagcaagggatgcagcatactgcatcatctgcaccctccatgcgtgaagaatgccttactcagacaccacagctggaacttgtcggtcattcaattgttagtctatgcctttgttgttatcacttttttaagacatatacatggtccaaatattgatgacttagttcaatagcataaattgttggtgattcatgcatatcattttgataaaaaaaaaaatctgttatagaatttatagttggcttgcctttggaatggattggactcttcatattcttttgatgtaggcatgtgctacaaatccttatcaggatccgtattatgggggcatgatggcagcttatggtcaccaacagttggtatgtgacattaatctggcttaattcaatattaaagattattgcatatataggtcatagtcataaactcataattactaatttgcatttttcacaaattagcctgataagaaatgtgggtagtacataatccagaagggatatgttcctgtcataatgataaatttgtttcattttggttggtctattggcttggtaaagcaatggtgatatttggataacagagaaaaataaccatgtgatatttttaccattagggatatggctcttntataggaatgcctcatgccagaatgcctttgcccct

SEQ ID NO: 3497 - DNA, 297 bp, Glycine max
  unsure (1)..(297): unsure at all n locations
  Clone ID: PAT_MRT3847_103161C.1
canagagtttcaagaagaggtagcctgtatcatgtattgcaatgctgcctttgagaagaaagaaggcttggttttcagcatattctgttgtggagagtaaaaagattcaagaagcaatcaaatatgtaactttcaatgtacaatttaatgaagaagattttgaagtgcaatgtgaatgtcatttgtttgagtttaaaggtattttatgcagacatatcctctctttgctcaagctcataaggnaaacagagtcagtgccatctaagtatgttttctcgcattggaggaaagatttga

SEQ ID NO: 3498 - DNA, 409 bp, Glycine max
  unsure (1)..(409): unsure at all n locations
  Clone ID: PAT_MRT3847_103162C.1
cggaattncccgggtcggacccacgcccgtccgtaccggctnnngcgagaagaaacgacagaaggtggactatgnnagaaatttccaattattagcttttccgttcataantttctgggcttaggatgtacgagattgtagcttgcttaccatacanctgtgctaatagtatttgctttggtgacagttcattaaggggacgcgtgtcgtttaatgggcgttactctgataacttgcacgggaggcgtgtaacaaatgaatgcgtatacgtaatacattgaagcgggcgtctaacatnggatcggtccaacaatggtaaccatcacatngggtctgaagaatcagcttgtgttttataggttataatctatatgatagtttgtgcgaaatatcttttagctttttttaa

SEQ ID NO: 3499 - DNA, 310 bp, Glycine max
  Clone ID: PAT_MRT3847_103163C.1
cgacacagctgactagtaatgcggccttcacgggataaagcgagggagaaacaaaagaagaagaaccttcaagccaagaaagaagccaaagagaaagagccaaaacctcaaaaaccgaagaaaaccccaaatgcacccactgacatgcggaagaaaacagccccccagagacccgctcagcagactttttgaagacgagggggagttgatgcctgaatacccccctgtcgaagaaattgacgaaaggggccctaggtgagaatgactctttccaagtcgacaggccctgacgaattacttcgaaagcaaa

SEQ ID NO: 3500 - DNA, 344 bp, Glycine max
  Clone ID: PAT_MRT3847_103164C.1
gagctagaatacatgcggatatatattaccggacggagcaacccgcaccccatgccatatatgttcaattccatcagattagtttcttgaattcatatctcatcaagactttgatgttatggaaactgacataggttattacagcggttacttatttacctacgcatatgctactttgttgagggtctctaagtcgctgcacatgttggcattctatggatcagtggcgaaacatcactcgttgatcttcgagggtctcatcatagcggagccttcatggtccacttcatggcactgatgaagcgagccaggctctgtggagcctgatacacatctgaagcatg

SEQ ID NO: 3501 - DNA, 954 bp, Glycine max
  Clone ID: PAT_MRT3847_103165C.1
tatttaaaaaagcaaagataacgtcatatcaactaaccacacgtggggaagaatcttccacttcaacattcaatgctattttcaaatactcttgtagcttcaaagaaacatcacacaaacgaaaacaatattaaagaaataattagcatcacgttgttcaaactatgtttctatagttacaacgaatacataaaaaaatatacaactccagaacccagtggtataaatacacaacgcattattcttcatagtgcttcaagaataaaaaaagataaccccaaaatcagaaaaaaccatcgtcttcatcaccattcaaaacatggccaccacaatatcttgtgatttctcttcaatggaatctattcaacactatcttcttgagcctgaacacgattccaacgctctcatgaacatttccaaccacgaagtttgctattctgcaacgtacaatgcattcccaagccctacgttcagcttggagggtgtcgtccatgatgcaaacgattccttagcatgcaaaagagaacaccctagggaggagcgtgaagttcacgcgccaccggtatggaagcattaccggggtgtgaggcgtaggacttggggcaagttcgcggcagagataagggatccaaagaagaatggtgcaaggatttggctaggcacttatgaaactgaagaagcagcgggtttagcttatgatagagctgctttcaaaatgcgtggcagcaaagctaagttaaattttcctcatctcattggctctcacgcgcctccgcagccagtgagagtgacaaaggctttgaagcgaaactcgccagagaagaggaaaaatttggctgacttgttaaacaggttggccaagaatagaagccaaatacttatacaggtgcttgaaatgggtttacatgcaaattatgtcaatgttgaacaatggtagagtaagttgaatgtgtt

SEQ ID NO: 3502 - DNA, 240 bp, Glycine max
  Clone ID: PAT_MRT3847_103166C.1
aattcggctcgagctcgagccgaatcggctcgagcggctcgagacggctgcgagaagtcgacagaagggtacggctgcgagaagacgacaaaagggtacggctgcgagaaaacgacagaaggggggcatgccttgtaatatgcctatacttgtttttacatattcagcgtcgtggtattgtgttgagttagtagtgcgttcgtggtaaacgagaatcgaatcattcttgtttttggatcc

SEQ ID NO: 3503 - DNA, 583 bp, Glycine max
  Clone ID: PAT_MRT3847_103167C.1
gggcggcaaagataatatattatatatatagaaagagcgccagaggggctgagatacagaaggggggggaccatgggaatggggccataatcagacaaaataggctgagaaggggccactctatagaaaccaaagaaaacaaaactaggagctaatattgaaacctctactgggacagaaaaggttgtgtaatattggtggaccagtgagtaaaatgtgtctggaaggctttctcataattcctaagccatgtgcaatttgggcttatgggagatgaagaaaaagaaacaaaaatttttaggaacactcaaaatttgggcttaggggctaactcaaccccacaaaaccagattctaaggcgaggattggccaattctaggcaatgtgggactaatccaccacccttgagcatacaattaaaacaggctccaaaaagaccacaactaaagcagggtagggatgaccggaattatggcaggtttgcagcacaatccaacagatatgaatttggctactggcttcttcaaagggctggtaaggacacatttttattggatacagggggctttttggcttccctcaa

SEQ ID NO: 3504 - DNA, 1362 bp, Glycine max
  unsure (1)..(1362): unsure at all n locations
  Clone ID: PAT_MRT3847_103168C.1
ctctcgagccgattcggctcgagggattgcatttcaggtaagagacgtcgattgtaagcaacaacagcatttgatcaaggaacaaaaaggaaatggccttgcattatggccaggcttgtctccagtggcaccagcaggccaggcttatctgcagtcttctgctactaaggctcctgattggctggaagctgcaatccgtgcctcgaaaatggattcaatggaaacttcaacttgttcttctagggggagtatctttattcctaaaagatcatggaagaagtgtgcagctcatgttcacatcagtcatataatcaagagtctagaggtgccaaaaacacaggttttcaaagaaactgagttttttgaatgtcatcaaatgagagaacatgaaggaccaaagcgtggagttcttttaaaagtacacagctcaaacgaaatgaaaaatggaatcacttctactgtgaggaatccacatgaaagtaagaatattattcttcggcagcaatgccattatcgaaacatatcacaggctgctccaacacctgtggtacagtatggccatcaaaagcagcaaaatttcaacttcttgtccttgtcagcaggaagtaatgggttaaagctcgaaaataattataataaaataggaagtatgttggaaccattatcaaaattgcaagtgccttatttacagtcactagcacctctgcatgggggcataccaattcctgctgttcagagacagtatgcctcaacttcttaccttgatcagctttctgttgcaggaccagaggttcggttgcagcaacctcattattttggtaacccgttatacggaactcattatggttcaacagtctcacataaacaacaagagcaccaaagcttctggggggtgcaacaagcagaacaaggtaggtctacagtaaatttcaatattttgaggactcaatatcctaattggcaaagtggaaggcatgactcttctgcattgagtccatgtgcccaagccatccttccttgttcccctgcatcacaagaaatatttggatccaagatcacttcaatctctgggcaacagaagcagctacttgcccccttccaagacaaatggactagaccttcgtcatctcccttcattatgtgaagaaattagagtcactgcatatgcgattgtaaagtgatgagcaacctgaaaacgattcagttattttatacttctacacatccagcttttagggtatgtttgttttcgaggaaagaaataatatacaagaggaagttttatactttaaaaaaaaaaaaaaaagggcggccgccgattaataccgtcgacctcgaggggnanncnatgccatcaatgca

SEQ ID NO: 3505 - DNA, 104 bp, Glycine max
  Clone ID: PAT_MRT3847_103169C.1
acctggggcaaggtccgcttaaaggtattccggaccttgtgattggaaacctaaggaagcttagattaacccttccaaggggattaccggtggattcccaagga

SEQ ID NO: 3506 - DNA, 903 bp, Glycine max
  Clone ID: PAT_MRT3847_10316C.1
gcattatgaaaattcctttactatccaactttggtgtttcaagtgcataatagtcataactatgaatagttacaagatagtgaatagccattactatgaatagttacaagatagtggggaaaaaaactgtacacttatgaggaacaaagatccttcatagaattttatccatgaaccttgcgaacttgtatgtggtgagtggattcctcacgccagattggttgtgctccactttgaacaagtgtgacatgttgtccctcgtgtaaatgactcttactcaatagtagcttgagggctctagagaaggtctcttctacatcatttgaaaattgcatgtatatggacataaccccatgataaagcgccaacctctgcttaattcttgcttcatttgtgaatgcaaagattgttgagtaaggcctataatggctcaaaagaattgccatggatcctgttctggtgaaaacaataataggagtattaagagtgttagacattgttgtcgcatggaaagcaaacatttctcccatatgactttcatgggaactcagttgactcggataagaaacaccactttgaacactggattcattcctaagagccaccgtgtgcataactttaacagctttcaatggaaattttccatgtgcagtttctcctgaaagcatgatagcatcagcaccttgtcttactgcaattgcgatgtctgaaacttctgcccttgttggtgtgggatgattaatcatgctttcaagcatatttgttgccacaataacaggcttttgcataatttgacatcttcgaatgatgtcttcctgcaataaaggaacttcctctattggaagttcagctccaagatccccacgagcgaccatggcctttgagctagttcagaccagttca

SEQ ID NO: 3507 - DNA, 1182 bp, Glycine max
  unsure (1)..(1182): unsure at all n locations
  Clone ID: PAT_MRT3847_103170C.1
tctcgagccgaatcggctcgagtacggctgcgagaagacgacagaaggggaggctacaaaattacacacaacggatagagagagtgcagcggagcagaaagaagcaaagggggaagaaaggtggtgtgtgttgtcgcaatggacatcactgccttcaaatccctcaacattccatttccaacctttccatcaaaattttctccttttcgtccattcagtttctttcacttcaaaccttttcgcactccttcctcacctcgcttcatctcccattgctctctcaatgggtcagcagagataacaagcaaggaaggtactttgcctcgtggcgttggagaggcagtgaatgaagcgtcaagttccaagattcttcaggttgtgctcgtgtcccctcagattccaggaaacactgggtgcattgctagaacttgcgcagcatcagctgttggattacacttagttgggccattaggatttcaggtggatgatactaaactaaagcgtgctgggttggattactggccatatgtggttgttaaaattcatgattcttgggaagattttcataattattttaggcaacaggagggtgaaaaacggttgctagcatttacaaagagaggaacaaaaattcattctgagttttcctacagaaaaggtgattatctaatattcggctctgaaactagtggcctgcctcctgaagccttgctagactgcaaaacagaaccatttggtggtggaactatcaagattccaatggttgagacttatgtcagatgtttgaatctatctgtaagtgttggcatagctttgtatgaagcttctagacaactaaactatgagtcacttcaggtaccttcagaaagctgtattgatactactgaggaatcatttattgctgaagacatttttgcttgatctcataaatattctagttacttgagatggaaaaccaatccaattcagtggggggtgttatattctttgttaactgagatggaaaatgtctgtttcagattcagaagtcaatcccaaatctgcacctaattcctcacacacaactcagttacatgtgacactcactagattttgtagtgactgtattatgtatcaatattattctgtaccaatcctcatgtaatattgcaatctaatagttgtgccatttattantgcccc

SEQ ID NO: 3508 - DNA, 368 bp, Glycine max
  Clone ID: PAT_MRT3847_103171C.1
agggggcctatgcggagaaaccctacactctttagtgcttcatctactacaacacaaaatggatacaagcgcatcatctactccatattgctctatactgttccttgcatcaactgtagctgcttaattctattaatcatatacaactgcgatcacaggaccttttaaggacactttcaacatcatgtggtctgagtaccatgacactacctataatgctaaacacatcttgtatcatccactaaacccagtcacagagtgtgtattacagacactacaaccctacatatccagatgtttcaatacgaaactgacgttagcactacgtgactctgcagtagatgtgacatcttatactctgctctcat

SEQ ID NO: 3509 - DNA, 321 bp, Glycine max
  Clone ID: PAT_MRT3847_103172C.1
ggcgggaacaaggatcataatttggccccttttcaaggggtgcttggcatattccaatcacaatcattaaaaaaaaaaattataaaaatttttgccctttccctcataaaacaatttgggggggaaaatatgcttgacaacattgccgtaaaatgtaaacccgcccccctttttttgggggggaagggattcaaaaacccccctttgaggaaaaagcctttcccttttttttttcggtataaaaaaaaaaaaagagggaaaccgcgggaaaaaccccggagcaattggggcaaaattttggggacccttgggccccacctt

SEQ ID NO: 3510 - DNA, 480 bp, Glycine max
  Clone ID: PAT_MRT3847_103173C.1
gtggggcctttcacatttttcttttttaaagtgtgggcgtttaatttaaaaggggtctcaaaaaaccccacgttcccggacccgcggggggaccccggaaaaacggaccggggcccgcggggggaccagattttcccataaagagaggcattaaagatcggggcaaaaatggggaaaaatgtgtcctgggggaaaaagtgatacgctcacaaattcacacaaaataccagccgcaagcataaagagggaaaaccggggggcgcaaagagggggcgaacccccattaattggggtgggctcactgcccccttttcacagggggaaaacgtggcgccccctgcattaaagaaaagggcaacccccggggggaggggggttgcgtatttggcgcccagggggggtttttttttaccagcgagaaggggaaaagatggttgtcccttacccgctgggcccgggaaagggggagaaagcggggcc

SEQ ID NO: 3511 - DNA, 387 bp, Glycine max
  Clone ID: PAT_MRT3847_103174C.1
gaggtggggggcttcgttttaggaagggcaggtttggtcggattaagattcaaaccgctgttttttggcagtttttcggatcctcttttccttttccttaagaaaaattaacccctttcaaggaaggaaggaaggggcgtccttttccaataccatgggcggatcacctaaccgttgaccagatttgggagttcagggaggccttcagtttgttcgttagggttggcgatggttgcataacaccaaaggggctgggacctgttttgcgttcgtggggtcagaatccaccagaggctgggctccaggccttgatcaatgaagtaattgctgttgggaatggccccatggccttccctgggtttttgaacctcatggttggaaggatga

SEQ ID NO: 3512 - DNA, 371 bp, Glycine max
  Clone ID: PAT_MRT3847_103175C.1
gtgcgactccaagtgctgtccaactgtgatcattctatgtggacactctgttgtacctgaaataccgtagtttgagcttttagccgatttacaggctttagaaaaggaaaacaattcactcccgggacacactactgaatatttaacaacagactttactcttccggcggtagcaatggttgctatatgacaatgagccttatcgggagatttaactcacactcggatcagtgtagatgatcatttggttgtcccacgttgaaacctaaagagttgtgctatacttatttagagcccgagctgtggtatgtcggcctacttttagctacaaaacatgaaataccattggtagagcctgtgacacatgatat

SEQ ID NO: 3513 - DNA, 573 bp, Glycine max
  Clone ID: PAT_MRT3847_103176C.1
aaatggaaaaaaacaaaaaaaaatattccccccccagggggggactaaaaaaaaaaaaaaggccctttccaaaaaaggtaaaaaaacaggggttgggggggccgaccttaaaaaaagaaaaaaaaagggggggggggaaaaaaattaaaaagggacacaaacccctggggcccggaaaattcccccaaagagcccccctttgccaaaaccgacgaacccgccttaaagggggccatctctgaaaaaaaaaaagggggggcccgggaaaacccccatggccttaaaaaacgggaggcagttttggttctcgcccccgtttttccgggggaacccccccgagcccattggcccggaaagcttaaccccggggggaaaaaccttaacccggggcccaaatgggggggaacccccttcgaccccaaagagctggggacccagggggggggcctttatgagcttgggcccgccccccacgggggggaggggccccccaccaaaagggggatccccggtgtatagcccaccccccaccagggtggggggaaaaaacccttcccccggggggtttttccc

SEQ ID NO: 3514 - DNA, 222 bp, Glycine max
  Clone ID: PAT_MRT3847_103177C.1
ccccatgcctcgtacataagctcgtttctcgcctccagcttaagtgggttctccttcttcttcttcacatctctctctcaatatttccatcctctctgcctttggtcacttgcaagacaatcatccagaccatcttaaggaaaactactccatatagtacaccggttacaatactttacctaacaagataaccaaaactggaggcgccaatgcactcttggc

SEQ ID NO: 3515 - DNA, 297 bp, Glycine max
  unsure (1)..(297): unsure at all n locations
  Clone ID: PAT_MRT3847_103178C.1
tagagagagagaaagaaaggaaggaatgaggctctatttctctcgagagtgagtgaaaaaaaaatatcaaaatagaagaagaaaaagaagatggtgatgatcacgctgatggtgatgatagaaaaagggtcagcaacaagaacagaagaaaagagannctttacagtaggggagattatatctggttcgagctaggttgctttctagagaatcataagtgtgttgatggcatacgacttatttgattcttgataattcacaccacaaggataattgacatgggatcaagctatttta

SEQ ID NO: 3516 - DNA, 521 bp, Glycine max
  Clone ID: PAT_MRT3847_103179C.1
ctcaatttatttttgccggccggcaccggacatcatggttcggtccaaaaccgcctaccagacagacgtctctgatcattccaccttcgcctatcgctatgatcgtacctaccttgccagggacaagatcgcggaggaatcgatcctggaagaggccgcgtaccagatcatacacgaccagctgatgctcgacgggaattccaggctgaacctggcggcgtttgagaccacgtggatggaacctgagcgtgacaaagtcatcgtggctgacattgacaaaaatgacgaccacatggatgaggaccctgtctccactgagctccagaaccgtagcgtaacatgatacctcaccttttcaatgcaccactataagagtgacacactgccataggtggtggcacggttggctcatcagaggccataatgtgggacggactggcattccataggtgatggcggaatagaaagacactcgatgggaagccttatgacattcccaacattgtcactggtgccaatga

SEQ ID NO: 3517 - DNA, 470 bp, Glycine max
  Clone ID: PAT_MRT3847_10317C.1
gatcttggggggcattactgatctttagtgatctgaacaataatttttctggttatagcatccaaggcttcttagtctttcctgacattcagaattggtgtcatgctgaaatctcgtagcaggagcaaggatatgaaatttggactgaattatttggtgcagacttaactcaaaaattcaactgtcccttgatccataaacagttgggcataaactttactgctttgcttgtgatgttttcactaagcattcctgtatccaagttgtaaagtctctgatggtcaacttgtttttaaacttggcaagctccaagtgaaattcacggggagctactaggatcgttactacatttatcaggttgtatttaattctgtatagtaagctagctaaatgattttcaacccaactgaagtttaatgttttaaagttgctggggcattataattaatttgaactttttatgggctttc

SEQ ID NO: 3518 - DNA, 512 bp, Glycine max
  unsure (1)..(512): unsure at all n locations
  Clone ID: PAT_MRT3847_103180C.1
ccacgcgtccgcccacgcgtccgaccaaaaccaaatccaagaacaagtggttcttcttgtgatatccatatcctactgatcatatgtacatttcatatctattttcaatccaagtatatgatttatcgtatgctcttccctcggcaaacaaccacttattccaaactgtttgagactcacaaacttgcaagaatgcaatatgcaaacgaagagtattttgtccacaatcctttgcccactttggctcgtggggatcgttttctttttcactcaggcagctagttaacgccaatacaaatatcataaactagatacaatgtcatgctacacttcagtttggagtacgacgatgtgtcacagatacttgaggcaaaacgccaaccatcattcctggcatagtttatcttcacttgccactgcatgcagaggtagaaagcaactgattntacaagtccactcacttgaaattacaaggttcagatttcatagccagaacagaatacaaagaccat

SEQ ID NO: 3519 - DNA, 359 bp, Glycine max
  Clone ID: PAT_MRT3847_103181C.1
ctgtatataacctaattgcacacatgaataccaatatcgttttcttcttgagctgcctctgtgcactggttctgatatctgatgagggaactgaccaattgaatgatgagacacaggaggaacctaagacacaatctgttgcctggggaaaaggtggaaacggggggcatgatggtagctgtggacacgtgcgacaatgagagcatggacgtggaggacacctgcgatgacatgtgggacgaggacatgatgttggacatggtgaaagatgcacacgactgtggcgtaaagtgtgtaaatgtgattgaagataaaactactaatatatgtactgtacacactcatatacttgacaacac

SEQ ID NO: 3520 - DNA, 1044 bp, Glycine max
  Clone ID: PAT_MRT3847_103182C.1
cctaatcaaaccaaaacaaaagaaaacgaaaatccccaatcctgcgttgtgttgcgacttgcgagccatgagaggggtcgtgaaagcgtttgcggggaatctgttgttccatggaagaaagactcagactcagtgcattcgctcctacagtctgatcccaatggtgatagagcactcttcccgaggtgagagggcatacgacatcttctcgcgccttctgaaggagcgcattatctgcatcaacggacccatctccgacgacactgcccacgtcgtcgttgcgcagctcctcttcctcgaatccgaaaatccttccaaacccatcaacatgtacctcaattcccccggtggcgccgtcaccgcagggcttgctatttatgatacgatgcagtatatccggtctccagtcaatacaatctgtatgggtcaagccgcatccatgggttctctccttttggctgcaggtgccaagggggagaggcggtctcttccaaatgcaacaatcatgattcaccagccttctggcggttatagtggccaggcaaaggatattgcaattcacaccaagcacatagttcgggtttgggattctttgaatgagttgtatgccaagcatacgggccagtcggttgaggttattcagacaaatatggacagggataactttatgactccaaaggaggccaaagagtttgggctcattgatgaggtcattgatcagagacctatggctttggtttctgatgctgttggtaacgaaggaaaagataaaggttccaattagaaccagatggagggtaagatttctttgaggaatccttgctgtatttaaatgctttgtctgtctctgtcaccttaggtataagttgcagctgatattattttatcaactgaacataattttgtcagttttggttgttagatttgaccattaaatttcagtcttgtgctcaattcggtttcattggcatatttttttgacatacagatttggaattttaagtacctttatcttgaaattgctaattatccacagtgatatca

SEQ ID NO: 3521 - DNA, 250 bp, Glycine max
  unsure (1)..(250): unsure at all n locations
  Clone ID: PAT_MRT3847_103183C.1
cttcatcttgttctatctgtgacgagcatcatggcctcaagagcagtgttattgttggctatgtgtgtgcttccggcgatggttgtggccattcgcccagcaaagaaccctttttgcgtgaagggtcgtgtctactgtgacccttgccgtgctggttttgagacctcagctaccaccgtcantgcntgntcntagagtantntgcaantcaagagcagggatatcaacgaggntgtgtatacgaagaagg

SEQ ID NO: 3522 - DNA, 181 bp, Glycine max
  Clone ID: PAT_MRT3847_103184C.1
gaaccaagtttgcttgcgtgtatattcatggtaggatcaaggttgaatctcagagaaaaacaaacatcgacaagcatgtctggaagaggaaagggaggcacgggtctcggaaagggaggagccgtacgacaccgtaaagatctgaggaatggcattcaggactttatcaagcctgctattc

SEQ ID NO: 3523 - DNA, 214 bp, Glycine max
  Clone ID: PAT_MRT3847_103185C.1
aaaataaaaaaatcaattgacccattccaggaaatggggatcaacaatacattcagcttcttgttggtgggaatgcataaatgtacaacttggtttcttttttataaaaagcaaaattaaaaccgggtagccagccacaacccattccttttacccggacaaaagatttacaaaactcaacttttaccacgataaggaattttcaagacaaatt

SEQ ID NO: 3524 - DNA, 2168 bp, Glycine max
  Clone ID: PAT_MRT3847_103186C.1
aagccccggccctgccgtaccgatccccactttccggctccacccacccgctcgtctgctgcaagacgacaatctaccacaaagtgtaatcatccaacttggaccaatcaatcattcattcattccaaggagggatctctctctctctctctttctctcctctcacacccccaaaagcttcttctgttctgtgcaggcaatttttctttggtttggttgcatcttttgatctgatcagcaaatttgagaattcagtttgggaaaggccattcctctttagtacaaaacagattgagggtgcctttgtgctgatggccactaatgaaaatcttccaccaaatgtaattaagcaacttgccaaggagttgaaaaatcttgatgaatcccctcctgagggcattaaggttgtggtaaatgatgatgatttttcgacaatattttctgacattgaaggcccagctggaactccttatgagaatggagttttccgaatgaagctgttgctgtctcatgatttcccgcattctccacctaaaggttttttcttgactaagattttccatccaaacattgcaaacaatggagagatttgtgtcaacacacttaaaaaggataggaatcctacccttgggttacggcatgttcttattgttgttaagtgtctattgattgaaccatttccgtgaatcagctctaaatgaacaggctgtgtcaattgtttgtgacattcccaaagtcagtgctaaatatgctagcttgcaaaatgctgcttgagaattatgaggagtatgctagacatgctaggctttacactggaatccatgcaaaaccaaagcccaaattcaagagcggagctatatccgaatcaacaactgctctgaatgttgatcagaccaacacctctgtgattagtggtgacatcaaaaccacaccggcgagtgctgcattgccagtgccagtgcttgcaaccaccacaacaagaggaaataatcaggaacaggcagcggctgttaatggttcttctgctgctacagtcatatctgctgcttctgcaccaccaaagaaggaaggtggacaagcaaaagctcaggcggacaagaagaagatagatgccagaaagaaaagtttgaaaagattgtaataaaaatcttcaatcattgaagttttttatttgtgttttagttttacattttgatagagaaagaggggagggagtggggatgtggtctcctgggttcaacatttgctttataaaacgagtgaggtattttctttgggagtaaatggatgaaattgaacttcttgttgtctttgaacttgtgctatgctctttgctaaaatattgaacttgtccataatacacccttaaaaaaagtccatacaaaaccaaagcccaaattcaagagcggagctaaacacctctgtgattagtgctgacatcaaaaccacaccggcgagtgctgcattgccagcagccaccgcaacaagaggaaataatcaggaacaggcagcagcggctgttaatggttctaatgctgccgctacagtcatttctgctgctgcttctgcaccccaaaagaaggaaggtggacaagcaaaagctcaggtggacaagaagaagatagatgccagaaagaaaagtttgaaaagattgtaataaaattgttcaattattgatgttttttttaattgtgtcttagttttacaatttgatagagaaagaggaaggagtggagatatggtctcctgggttcaacatttgttttatataatgaattagtaatttcttgttaggagtaaatggatgaaattgaacttgttgtctttggacttgtgttatactctttggtaaaatattgatcttttagggccataataaaaaaaaaagaaaaaaaaaaaaaaaaaaaaaaaaaaaaaaaaaaaaaaaaaaaaaaaaaaaaaaaaaaaaaaaaaaaaaaaaaaaaaaaaaaaaaaaaaataaaaaaaaaaaaaaaaaaaaaaaggggcacctaatttaaattaactaactctactttttacaacatttcaaaatgtaaaaaccttgatggtacccaaaaaaaacaattttgtggcacatttttaaaaaaccagtaaacgtaaaaaccaataagttcccaaaaaaaaaccttttaaaaaaaaacccaatt

SEQ ID NO: 3525 - DNA, 1410 bp, Glycine max
  unsure (1)..(1410): unsure at all n locations
  Clone ID: PAT_MRT3847_103187C.1
acggctgcaagaagacgacagaaggggaccaatcaatcattcattcactccaagggaggatctctctctctcactccttcttctctctcctctggcacccctaaagcttcttctgttctgtgcaggcagtttttctttggtttggttgcatcctttgatctgatcagcaaatttgagaattcagtttgggaagggccattcctctttagtgcaaaacagatcgcaggtgcctttgtgctgatggccactaatgaaaatcttccaccaaatgtaattaagcaacttgccaaggagttgaaaaatcttgatgaatctcctcccgagggcattaaagttgtggtaaatgatgatgatttttcgacaatatttgctgacattgaaggcccagctggaactccttatgagaatggagttttccgaatgaagctgttgctgtcccatgatttcccgcattctccacctaaaggttttttcttgactaagattttccatccaaacattgcaaccaatggagagatttgtgtcaacacacttaaaaaggattggaatcctagccttgggttacggcatgttcttattgttgttaggtgtctattgattgaaccattcccagaatcagctctaaatgaacaggctggcaaaatgctgcttgagaattatgaggagtatgctagacatgctaggctttacactggaatccatgcaaaaccaaagcccaaattcaagagcggagctatatccgaatcaacaactgctctgaatgttgatcagaccaacacctctgtgattagtggtgacatcaaaaccacaccggcgagtgctgcattgccagtgccagtgctgcagccaccgcaacaagaggaaataatcaggaacaggcagcagcggctgttaatggttctaatgctgccgctacagtcatttctgctgctgcttctgcaccccaaaagaaggaaggtggacaagcaaaagctcaggtggacaagaagaagatagatgccagaaagaaaagtttgaaaagattgtaataaaattgttcaattattgatgttttttttaattgtgtcttagttttacaatttgatagagaaagaggaaggagtggagatatggtctcctgggttcaacatttgttttatataatgaattagtaatttcttgttaggagtaaatggatgaaattgaacttgttgtctttggacttgtgctatactctttggtaaaatattgatcttttagggaaagaatgctctataagtagcggtagacttaagttaggttatttttggattcaactcatttatgaaaatgggattaaaaattttcttttgaattcctannaaaaaaaaaaaaaaaaaaaaaaaaanaaaaaaaaaaaaaaaaaaaaaaaaaaaaaaaaaaaaaaaaaaa

SEQ ID NO: 3526 - DNA, 298 bp, Glycine max
  Clone ID: PAT_MRT3847_103188C.1
aaaaaaaaaaaaatacaagttattaaatgatgttattaaataagactataaataaagctaaatgtacggaaattacattctaatgtgaaagcctaatgacatacatttctatcactggcttattcagacaataaccttataacgttgaatcttaatattgaccccaatacttttgtgtttctttctaaatgcttgcatataatatcaaatcatatatcttcttcttcttcatataatgcaaatttaaacaaaaattcaattttaccaagaattaccataaattctaaaacatatattt

SEQ ID NO: 3527 - DNA, 214 bp, Glycine max
  Clone ID: PAT_MRT3847_103189C.1
ctcgagcatccgaacactttcgatggcaggttccattgatgaatatgctgttggccaactggaggagtttaagctcaagaagcttgtgtttgcctgcatggaggtgatgacacttgtccagagtctgaatgtgacgagaaggcatgaggagatgaaagataacttagacgactgatgacgggtgagaaacgatgattggagagacagtcttttt

SEQ ID NO: 3528 - DNA, 307 bp, Glycine max
  Clone ID: PAT_MRT3847_10318C.1
agatgatagaccccgaaacaaggtacactgtgaatatccgaggcgactcgatagaacggtcctggggctcagtactaacgatctttaagattcccctcgcatctaccgtctcgtccacgtcgttcttatgatcaactctaacactactgacatccacacaactcacattgcacctattgaccctacttacgccaaccatacggtcgcaaccggactacccttacccaatcaatcttcactacgaccatccctccgaaaccccaataaccggtaaccgacgcgctcacaaagtcttattcgaccaaaa

SEQ ID NO: 3529 - DNA, 969 bp, Glycine max
  Clone ID: PAT_MRT3847_103190C.1
ggaatggtgggtgagcaaaaggcgattgccacaagggttccggcagcgcgtgaggaactatgagcggatgcgttgggctgccacgcgcggggttgatgaatgccggctgattaaaaatctccctgagggactaagaagggacatcaagtaccatctttgtttggatttggtgagacaggtgccactctttcagcatatggatgatttggtgctagagaacatctgtgaccgtgtgaagtctctggtattcacaaagggagaaacaatagctagagaaggagacccagttcagagaatgctatttgtagtaaggggtcaccttcaaagcagccaagtcctaagggatggtgtgaagagttgttgcatgttaggtccaggaaacttcagtggggacgagctcctttcgtggtgtttgaggagacctttcatagaacgccttccgccgtcttcatccacactcatcacgttggaaaccaccgaggcgttcggccttgaagcccaggacgtgaagtatgtgacacaacatttcaggtacacatttgttaaggaaaaggtgaagagaagtgcaaggtattactcaccagggtggagaacttgggctgctgtggccattcaattggcatggaggaggtacaagcataggttgactttgacttcattgtcctttataaggcccaggagacctttgtcacggtcttcttccatcggagaggacaagcttcgcctctacacagctttgttaacctccccaaagcctaatcaggatgattttgacttttgagaacatgatatatatggatgtggcacacaggtgtcgaattttattgttttgattgatcttattggtagaaaataaagaaaaaatgcatgcattattattgttgttgttgttattattattatttttattattattgcttaaacatattttcatatctagtaaatagatcagtttcagattactaaaaa

SEQ ID NO: 3530 - DNA, 454 bp, Glycine max
  Clone ID: PAT_MRT3847_103191C.1
aaaaaaaaaaactgttataaaaacccccgggggaggggcgagaaatattatcatccgcccattttttaacaaaaaaaaaagacgggactgaataaaaaaaaaaacaagggggtcagtagccccggggaaaaaccttgttgggaaaaaacatcagctactgggggggcccttttgaataatccgggatcccaaaaaaaaacaaatttgactaggcgggcggccccagggggggggttaaacagccctcctttattatcttaaggactaaaaaagggagattctcccctcagatgattggttcctcttgaccccccccggttgagacccaaccaaaaatacggacttccctccttgggcaaaccaatttttaaccaagggaaaaatactatgggccccggaaaactaataagaaaaaaaaaccgggaaggcaatatatatcaatcccacaaaaata

SEQ ID NO: 3531 - DNA, 418 bp, Glycine max
  Clone ID: PAT_MRT3847_103192C.1
ggagataaaggcgtccattttatttaaccccaaggggaaattggaatcttcccccaacatttggggaatcacattttacccaaaaaaacaccttgggaaacccatttttcattccggtaaagctcgaaatccgttttttacatttttttacagaaaaattttttgtccaacaaaaatataagggtttaaaaaaaaaattcccccccctttttttgcatgctccttacatgtttaaggatttatataaccccagggggggttaattccaataaaaatttttgcaacaggggaaaaacttgtttttgtttcacaatcgtttgaaaccaatcaaacgaagggggggaagattctaaaaaataggggaattcccttgcctttaaaatttttcaaagtttttttcacccttcccttttttttt

SEQ ID NO: 3532 - DNA, 1102 bp, Glycine max
  Clone ID: PAT_MRT3847_103193C.1
ccacgcgtccgcacatattcctcgctgtaccctcaatagggttgattttcttgcatgcaacaagaccctactttgggatttcataaaagttaattatttgtttcatgatcttcaggtcttaactccccctcattatccatggagcttctcattcgaataatatttcaaagggatataatataaaaaactatagccacctggaattctgtctctgacatggtcgatgatgacaagagaaataataatctacgacagctgctagtgatttgtctctgaaagaattaggagcttattttatttctagtgccatgaagagagcaagtgaatgggcttattctcatgagattccaagtgatgtcaccattcaagttggcgaagtttccttttcgttacataagtttccattagtttccaagagtggatacatagggaaactggtctcagaatcaagtgatgccttcattgaactctatgatgtccctggtggagcagaagcatttgaactggcaacaaagttctgctatggcataaactttgaaataagcatcgaaaacatcgctatgcttcgttgcgtggcagagtaccttgacatgacagaggattactcagttggaaatttggtgggaagggctgattcttacttgaatgaagtggcactcaagactatttcaggggctgtgtcaatcttacacatgtcggaacgcttccttccgattgcagagaaggcaaaactggtgagtagatgcatagatgctattgcattcatagcctccaaggagactcaattctgttcacctatgagaggtgacattattggtactgatggcatggcttctcaccaaaggccagtggttcattggtgggctgaggatctcacagttctcagaattgacatctttcaaagagttctgattgcaatgatggccagagggtttaaacagtttgctcttggccccatcattatgctctatgcacagaaatctctgcgaggtttggtaagactaaaaccccttaccccaaaggttttaacatacaaatagaccagggtttaaggattaatgactttgggccatggaaagaattccttctggtaatgcccttt

SEQ ID NO: 3533 - DNA, 657 bp, Glycine max
  Clone ID: PAT_MRT3847_103194C.1
aatcacattgaaattgagtgtaatcagtattatcacccattctatcatttgaaatgtgacgaattgaagtgaaaccatgaaaaataatatgcatggatgtaaaatttactttgatatgcaaaagtttagaataatgaccgcaccgcagatatgcattacaatttgctcccaggcaagcatgctttagctagctcataaatgttgaaggctgaggacccgggcagtaaattcctcattgtattccagcattcaatctcaaactattgaaagattataagtgttgcaaagctgaagcaatgctgcttgatttgcaggatcaacattttcactgatgaccttaggatacctcccaggggaaagtgcaaaaagtcgggacaatgatgccacaaaaaactccctgggatctcttatatctttaagtgggtctttttttttttttccagcattgtaaagaagaacaaaggtggtgctataacccgcattttctgttatatctggcatgtcaggttcctcctgaactctatccttttttggccgagaaaggagtgtgactatgctgtccaccatcttaccccaggacacagaagctggaggatccaaaagaactggtgactcacatacgaggtttggttgaagcaactgcagtcaatttgagct

SEQ ID NO: 3534 - DNA, 313 bp, Glycine max
  Clone ID: PAT_MRT3847_103195C.1
ccctgtctttacgctgctgctaacagtgaatctttaactcactatcataatttagggcggcttgactctattatcagtgacctgatatttggatctgactaatactcatccactggaaccgaaattgagttaacactttctattacccatctaaagaaagtcgcggacactctctacatcgttcaaaccaagtcttacggaggaagtgaatcaggagatcgtgactgctacaccactgtgattacgtgtgataccatcgccggagactcgtgaaaaggaagcgatgcgtaactattaaaggcctactgatgct

SEQ ID NO: 3535 - DNA, 653 bp, Glycine max
  Clone ID: PAT_MRT3847_103196C.1
agaaaaattaatatactcattcttaatcacattgaaattgagtgtaatcagtattatcacccattctatcatttgaaatgtgacgaattgaagtgaaaccatgaaaaataatatgcatggatgtaaaatttactttgatatgcaaaagttttagaataatgaccgcaccgcagatatgcattacaatttgctcccaggcaagcatgctgaaacagcaggaaaatgggaatgggaagcatgaaaaaaatttacagagatcccaacagaacaaattgcacttcaaaacacatgcttacagtattcaaaatggaactaacaggaaattcagttcagcattcatggccctgacaaaaatgataatagcagctaaaacctttgtttcaatgcaagaagtacctttagctagctcataaatgttgaaggctgaggacccgggcagtaaattcctcattgtattccagcattcaatctcaaactattgaaagattataagggttgcaaagctgaagcaatgctgcttgatttgcaggaacaacattttcactgatgacccttggatacctcccaggggaaagcgcaaaaaggcgggacaatgatgcaccaaaaaaatccctgggatctcttatattttttaggggggctttttttttttt

SEQ ID NO: 3536 - DNA, 2448 bp, Glycine max
  Clone ID: PAT_MRT3847_103197C.1
aacaaaaagggtgtttccaataaatttcaatcaattacgtaaagtgttgagttaaaatttactttaaaatgcaagtttacacaaatgactgcaccgaagatatggattacaatttgctcacaggcatgcatgctgaaacagcaggaaaataggaaaatgggaatgggaagaagcatgaaaaaatttacattaagatcccaacagaccaaatcgcatttcaagacacatgcttacagtgttcaaaatgggaccgataggaaattcagttcagcattcatggcactgacaaaaatggatgatgataatagccactaaaacctccttgtttcaatgcaagaagtacctttagctagctcataaatgttgaagaaggctgaggacccggacagtaattcctcattgtattccagcattcaatctcaaactattgaaagattgtaagtgttgcaaagctgaagcaatgctgcttgatttgcaggatcaacattttcactgatgaccttaggatacctcccaggcgaaagtgcagaaagtcgggacaatgatgccacaaaaaactccttgggatctcttatatctttaagtggatcttcttctttctttccagcattataaagaagaacaaaggtggtgctataacccgcattttctgttatatctggcatgtcaggttcctcctgaactctatcctcttctggccgagaaaggagtgtgactatgctgtccaccatcttaccccaggacacagaagctgcaggatccaaaagaactggagactcacagatgagtctggttgaggcaactgcagtcaatttgagttctatagctcctgtaatcagcttaagattaggaatccagaactgattcaaaatcacaacaaaaatatcaggctggacactgttcatagtatcaacaacatttgcagcaccatgcttaatcaggaagagagacataaatatcaagagagacttgatgagctttactgtccgccttttctggagctctctgaaaagtgcggcccaaatgtgagaaatatatggtttaatagcattatactcaagactttcaatgacagtgttaagcacataaaatccttgttcagatgtgcttgaagcttggattagtgtgtcaaatattccaagcactttggtcagcctatccccttgggtgatctcattcggtgccttttgaaggaaggcctggagcagacgcacaagtgcaggaacatttgaggctcttttccatgtttcaggtgacaatagaagctcaaatatctgcatgtagattggagggatgggtggcctgtttaactcaacaagctgagcaagcaactgaaacgtgtatggtaaaaactcagtcacatcattggtcaatattatttcaagcctaggaaaaaggcttgcttcataaaacagatacaagagatgggtccctctcacaagcccgcctaacaagaatggctactgactcaaagagatagtgattgaatgtgggattttttggatttctgcaaacttcagcaagaagagagcccaacccttcaacgcaaactcgtgcaacatcaatagagatatccgcaacagcaagaaccctcataatacatttcattacatattgattctcttcagactctgggagctctcgagccgaattgagattgttcatcagcacagggaaaattggattgatatctgctgaagtataacgtgctccacccccctcatccttcaccaacaggagtttttcaatacagcttgcagaataagaatgaacaacatttgactctgcagtaaggaaacgaaccaaatctggaaaaaatttcaatgccacaggcttcgatatttgcgtccggaacatagtaaaaaatttgagtgcaccggccttgagcataggatacccattcacatctgcactttgcagctcggggacaatcacagactcaaaaaagctctgaacatcaacgagttccgtggagacaacactagccccagccttcttggttgcaagagaaaccaccaagtaaatagcacaatccttgtccttccaatttgtcccagggttagcagcatacgaactcaacaaattctgtatctgcgcagaaacaatgcttttcacagcatccccatagtacatcgcaatacccttgagcaactcacaagcaatcctcctcctagtatcaagatcactcccttccatatccctcctaataaactctatctaattcaacacaaacaggacctcatcatcctccctcagactcacattcagtatcagcatacattggcaaaagagcggtatcaacccatcaatcgcaaacattgtatggtgcacggtagtacgaacggccgacaaaaaattaaacacgctaatcacaagccgagacagattggccgacgcagaaaccctcccaagcaatgtcatgacgtattgattctcttcagaattccg

SEQ ID NO: 3537 - DNA, 749 bp, Glycine max
  Clone ID: PAT_MRT3847_103198C.1
ccacgcgtccgtctctcttctttaaaacgttgctgttttcttgagagacttgtaaacacatcccaccgtgtgtatatgtgtgctctcttctctctctcttctctctctctctctctctctctctttctctctccaagtccgtctctcttctgtgattaagtttcagtcatgggtgggtagcatgcaacaatagtgcgttagtaaactgtttgcattccattttcttctatgcttctggttctggcattgcgttagttcctaggggagagaggaacccgttttgtgaacccttttgttttgtctttgttttttgtttttctcaccaccatgagttcttcacagcacttgaacaatgttggtgaagatagcagcagtagagacatgagtttcttccctccttcttctcgttatgtgggttcctcacaaacacagactcctcctttgtctctgagtcatggaaatggggtagagggttcaaattcaaaccctgagatgggtcttctgatttttgcgtccacagtgtttcagcagccccaggagtgcaggggaacaaagagagccattgatgaagaagaagaagaagaagaagaagacgaggaagaagaagaaggggttgatgagatagagaacacaagaacttgtgtttgaaacttgggtggtgatgaagcacaagctgctaagagctctgcttcagggaaaaccaagctttgtgcaagaggtcactggaggccagctgaagatgaaaactc

SEQ ID NO: 3538 - DNA, 421 bp, Glycine max
  Clone ID: PAT_MRT3847_103199C.1
cttggaacctttgggctgatttatgtgcttgatggtcgtgagaagattatagaaggggaagaaacgtaactataacggcccgcaacccggggacgaccgaacggagcgagaaaaagagaccagagagagagagagaggagatgaacgatatacgacagtcgaatacaaaggcgaggccatgcgcactctccgaagcagcgttacgttattttactaacaacaagactatctaactattaacgtactactgccgccggaaccctagtgtcgcgcccggaaaccggaatcggaggggtcctatgcgctacaactctaattccagacaatagaccaccgtatagtaaaaattccgcaaaaggagaaccagaactattctctccatgaacgcggaaagaaaagtcacggcgaaagaaatagatac

SEQ ID NO: 3539 - DNA, 226 bp, Glycine max
  Clone ID: PAT_MRT3847_10319C.1
acatactatgatgatttattatagtttgcactttgccatgcccgctataattgttgaaacatgcacgagaacacttaacagcactttatacaaacagaatttgttcattagcacttaactcctaacacgttaacattgcaatacccccaaattcctaaccttaaccataacatagggtagatgtaaggaatcattattccttctaattaaaattttatttgaaaac

SEQ ID NO: 3540 - DNA, 295 bp, Glycine max
  Clone ID: PAT_MRT3847_1031C.1
ttagtaaaagatactaaattacacgtaaatgtatagaagttaattaataatcttgtctctctctgtgtaacagcaagatgggaccaccaattaattcttttattccaagatacaagtggatcatgcctatgcttttacgttcaaacaatcgatgtgatgccaataaaagagctttgcattgatttgacacctctatatatattatgtaaataaatatatgtcttaatttgtttgacgtacatgatagacgtaacaacgaacaacagtaaagttcttatgcctgaaaccgaaagtg

SEQ ID NO: 3541 - DNA, 236 bp, Glycine max
  unsure (1)..(236): unsure at all n locations
  Clone ID: PAT_MRT3847_103200C.1
tttatttttttctttnaggcgaagcccacgagcaggtattgttccatgaatgatgatgtgtatagagcaaaggcaagccggagaagttaaacaaaatatattggcataccagcagcaatggggtggaaaaaaattccaataacagaacctgcctcacaagaattttcaaaaggtaagctaaatttggggtgctcaaaggattcaatttggaccattgctcatagacttcaagacca

SEQ ID NO: 3542 - DNA, 516 bp, Glycine max
  Clone ID: PAT_MRT3847_103201C.1
gtctcaactccctctttcaggtgctttttctctttccctatcactgatttttcaatttctttcagccctatcaacgaatacccataatgtttaaattcccaattttgtttcttttttcataatttcatcgattcaccttttcttctgcttctgggtctattcaattttcctccaatcagcaaaaggacgctttcactcgagcaaaattgaatgcaatttccgaaagactcacacttgaagactccaacagtgaaacgtggaccccactatctgttcttttcaagccccatcacaatgtgttgaccggaaactatgatataaatgttctaattgctgctttggaagagaagggaaagactgtggtgtggcatgatcgtagaaagggggcatcttccattgatgttgatgcacctgaggatgttttgatggggtttgtgatcaatgtggcagtgacaaggtttgctgggatttggagaagtaggcactggattgcattgaggaagaattattgggttt

SEQ ID NO: 3543 - DNA, 189 bp, Glycine max
  Clone ID: PAT_MRT3847_103202C.1
ttctacgcgtgatataatacttgagtgcagaggagtttagaacggcatagagttggagctcagaaaattatcacccatattcttctgcataagcactgaaaacactacggatggtgagaggattgctacttattggagtgaacactaggtcgacggtgaaaaaactatcaaaatcgatgttagaaacta

SEQ ID NO: 3544 - DNA, 373 bp, Glycine max
  Clone ID: PAT_MRT3847_103203C.1
agctcggaattcgaggcgagagcatatgtgctctaaggatgggaacatacggcatcacatttttttcaaatcattcaaccactgatgcggatgtgtttttctagcgctagtggcgcggtagctatttttttaaaaatttgaaatagccttcaaaaaaccggcatgatttatgtgacatgctgctgcatgtctattaccataagcttagatttagtttaaggacagaatcaatttctcacagagttacactcatgtatataccacacacactgtctaggagatgattttctgatgtgttgcctattgctcttatcaagcagagtttttttgggatgtcggatgatactgcgcgtgccaaccacttaatgctttc

SEQ ID NO: 3545 - DNA, 1106 bp, Glycine max
  unsure (1)..(1106): unsure at all n locations
  Clone ID: PAT_MRT3847_103204C.1
ccacgcgtccgccgtgacacttcttcactctgcacaaaagttaacaacccccaaaaccaacccctttttatgtatgtgtcttctacaataacaataacctctgctacactctatcaccctacactccctctcttgttccatcacttctccgagagagtaaaacagttaactttatagtttttggatatatcagccaaaaggggtgtgaaagaacacaatgcaacaaagttcagcttcagggtcattgatgaagcaactgagtgtgaaggaggcttggaaatcaacatcaagtaggtggagtgggaaggacaagtatagcagtgttgggggagggagcattgaggggtgtgaggcaagtttgagccaaatggaaggtttttctatgtatgggaatgaggacaataatggggtggtgatggggnaagaagagagtgatggtggtcggtgaggatcacactttctcattccaagcatgcaatgatgtgggcactcactcatgtagctaataaggctcatttgctcactttgcttcatgttgtacctactcataggggttctgaatcttcttgctctacctatcttgtcaatcatcttggttcactttgcaaagattgcaagccagaggtggaagtggaagcacttgttatccaaggaccaaaactggccacagtgatgagccaagtgaagaagctggaggtttctctcttggtattgggccaaaagaagccctctcctctacttagctgcctgtgtggaagcaacagtatcagcagctcagaggagtttgctgagcactgcatcaacaatgcagaatgcttgacagtaggagtaaggaagagaagccaaggtaacaatggctacctcatcagcacaaggtggcagaagaacttctggctactggcttaaaaatttcgagttcttaactttagttaccagctatagttaggatctcacaaacaaaaaaaggggtcaaatgggaaaattaacccaataataataatatgtacctcctgttctagttctaactacattgtcattgtactcatgatgtgactcggtggcatcaatttagttctatactatgattaatgaaacatgattgtccc

SEQ ID NO: 3546 - DNA, 370 bp, Glycine max
  Clone ID: PAT_MRT3847_103205C.1
gaagcatagttggaagaggagcctgaacagttagtgcgaagattacggaagggaaaggcttgtgcaaggcctgaagatgaggagactgaaaccaacatccctcgcttgggtttgcttggagagagactcaaccgtccactctcaatagagtcaccttctcgagaagttgatactcgttctccaccagttgtgatcccgccatctcgagaagctaatacccgatctccacctgttgtgattccacctcctcggccgaaacagaatggggaggttcctcatccagtggaaattccacccccacctgcaaagcacattgagagggagaggttttttcaggaaaacaaggatggttctaatttgtctggccaca

SEQ ID NO: 3547 - DNA, 139 bp, Glycine max
  Clone ID: PAT_MRT3847_103206C.1
gacccacgcgttcgaccacgcgttcggtgaaagagaatttttgtcgatgagatgagaaaaattaaggttcgttggatggagctcgatgtgttgctcccagcaaactatttcccagtgagagacagtcgattggtacggc

SEQ ID NO: 3548 - DNA, 267 bp, Glycine max
  unsure (1)..(267): unsure at all n locations
  Clone ID: PAT_MRT3847_103207C.1
tttacaatcaggagantctgtaatnaaaganagtagtccagagcatagtgaagatggtgggaaaatagttagagctggtgatgaaaacggagatgatcttttatctgtaagcanaattggcacaagcaactccagcatagtctctggtccgacgttgtgatgaaagtaatggngatgttgctacaccaacaaacatttatcctccatggngagaatngntnaatctggaaatccaaaggggttcccacngggcccggnttcaaattt

SEQ ID NO: 3549 - DNA, 571 bp, Glycine max
  Clone ID: PAT_MRT3847_103208C.1
aggcggcgcctcttctttttttttttttttttttttttttttttttttttttttttttttttttttttttttttttttttttttttaaaatggttgtacaaaagaaaagaaaaaaaccaaaaaggaattgagaacaaatttgaacaccgaaacaaaaacaaaaatgggggggccggctttaattctggaaaaaggcaacattggggggaagaaggggggaaaggccgaaaaaaggaaacaactagggggttagggggaacatgggttgttacacaaaaaggagaactacaaggcaaaaaaaaagaggaaccaatctaaaaaaaaaaaacgggggcaacatttttttggtctagttttgaaaacacacaccggaaaatttttaaaaacggccttttttggggttccaaccctttatggaaatccacccttatttttttcaggtccaccatttggggcccttaacaaatttttaacttttcaaaaatcttagggaatttctgaagggaaaaaaaaaggaacctggaggaagaaggttccccacgggcccttcttttctttcttttctttgctt

SEQ ID NO: 3550 - DNA, 346 bp, Glycine max
  Clone ID: PAT_MRT3847_103209C.1
gaaaacatccaacgggcaaagttgctattgacattgttgatttaaagatggctaagatttctttcacaataatttttgcttttgctcttatcttcacagttatttcaaggacaagtggagcaatgatgacagatgacaaatgttcaaaagtgttggatcctaataattgtgacctcactaagtgtcgggctaattgcattcaacaatatcatggaattggacattgcattggcagaaatccttacaaatgtatttgtatatacgattgttcttcctagaatgatatatcaattgttccaatttgaatacaaaagaataataaaataaggttaataaatataaaaat

SEQ ID NO: 3551 - DNA, 1363 bp, Glycine max
  Clone ID: PAT_MRT3847_10320C.1
gaacaagatcaaaattcaccccaacccaaagtgaacagaactgctttcccaaacatgaaaattcccaataccatactcaaactcttcctcttcatcctcttgaacccatcccagatagcaatagcactagcaagtatagaagcatgtttagacagcgtttgccaaactcacgagccagtaatccgattcccgttccgcatagagggagagcaagagaattcatgtggccacccagggttcagcgtttcttgcaaccacaacggccaaacactacttaacctatcttactgcggcgaagaactcagaatccaaagaataaactatgccgcgcagcaactatgggtgaacgaccccaacaactgcctccccaaacgcctcctctctcttaacctctccgcctctcccttcgacgctgtttaccgccaaaaattcaccttcttcaactgctccttcaacttggagtacctcgtccgtcgttaccgtccaataagttgtctcagcgattctcccaagtacctcgtttttgcgacgccttcttcgactgtgtttggacacttgtcgtctgtgtgtgacttggtggcgacggtgacggtgccggttcagtcgccgtttaatgatcgagtgacgtcgtcagaactcagcgacgatctgcgattctcgtgggactcgccgtcgtgcgggaggtgcgagtcgcacggtggacggtgcggattcaagagcaacgagacttttgagcttgattgttcccttgtcccttcaaaagggatttcccatggtgcacgttacgccatagtcatatgcataggggcaacagctttgttgtgctgcatgggagtattgaggtgcatccacagctggttaagaatcgggaaccaagatgggccttgggctaatgaaacggtgccagattttgaggctctagcgggctcacggcccacaacagtcacgggcctcgacaggcccacaattgaatcgtacccaaaaatagtgttaggtgagaacagaggcttaccaaagaagggtgacaagacctgctcaatatgcctatcagagtacatacccaaagagacagtgaaaaccataccagaatgtggacactgctttcatgcacaatgcatcgatgaatggcttccactgaacgcgtcgtgcccaatttgccgaacttctccacgaaagttaccacaaccacgtgctcgatcatcaccacaataatgctttaactttttatctctcatatttatatacgaatcactttaccacagaagatttttaagacaggcataatttgataactattacattctcctgcattgtaatgtgaaacatacatatcttacaactagtaatgtaaatatttctttgc

SEQ ID NO: 3552 - DNA, 306 bp, Glycine max
  Clone ID: PAT_MRT3847_103210C.1
cccacgcgtgcgtgcatttgttatgattaaatatcgcgtcatataatgtatctaagatatggataaagaaactacagtatgcggatacaataacagcatttctacattggagaataaaggcgaccccaccagatcatatcgcgttgcactatctgaactgcatattttttcttacaggcatgactaacatcggactccctacggcaaaatagcactgcattacatacaagaatacgtacctggagtagtgcacaacacctactacaatgcaagtgaccgtgactattacttgcatcacaaatgaca

SEQ ID NO: 3553 - DNA, 334 bp, Glycine max
  Clone ID: PAT_MRT3847_103211C.1
gggacccttgggcggacacggggggccacccgggagttccgacccggaaattgcgggcggaccccttttgcctataaagagtttcatataaaggagggcataataaagctcggagaatgcttgctgagtaaaagggtcctgggggaaaatttcaccccataaaaatacccgaaaaataagggccaaagcctggggggccaaaggagggggcgcccaaagaggaattgaattgacattaatggcggtgttccaatgggaaaatcttgaggggaaaacctttaaggaatcgtccataaaggggggagagaccgctcgggaaaaggcccccagggtg

SEQ ID NO: 3554 - DNA, 541 bp, Glycine max
  Clone ID: PAT_MRT3847_103212C.1
gaggccccacccattaatttccatggggggccgaaaacagaaaccaaaaatacgggggggggaaatctcaaaaagcaaaaacatttttttttggggtttaaggacaaacaaacaaagggggggggggggtacaaaagctttgcaaaattttcaaacttaaaaacccgggggcttggaggcgaaaaaactgaagccccggacttggggaacggtggcgaaacccaagaaaccgaagaaacccgggggggatgcaaacttaaccccttgaagccccttcaacacccgggaaggatcaggggaaccaaacaaaggggggttccacaagggccaaaaggggccatcggaaaatcccggggacccggggggctcacgggacaaaaaaccgggccccaactcgaattccaaggaagggaaccctcccttcctaaaaagggattttacttcctttgccaattgggcatcaaaaaaggctggccgggaggaaaaagattaaaacttttttttgccaacggggggccacacccggatggattggactctt

SEQ ID NO: 3555 - DNA, 525 bp, Glycine max
  Clone ID: PAT_MRT3847_103213C.1
ggctcgaggcttccaaaaccacattttcaggcttcttagtaattccaaaagcttgttgacgagaatggcttccggtgaaaaccagtttccccgccagaagcaagacacacagcctggcaaagagtatctcatgaatccaccaccccaatacaacagccccgattacaagccatcaaataaacttcatggaaaggtagctgtagtaactgggggtgactctggaattggacgagcagtgtgcaacttgttttcattagagggtgctactgttattttcacctacgttaaggggcaggaggagatagatgcaagggacacgcttgagattataagaaaggctaagactgaagatgccaaagatccaatggctgtagcggttgatcatttgggttatgaagagaattgcaagagagtggtggaccaggtggtcaacgcttatggcagcatccacattctggtcaacaatgcagccgtgcagtacgagagtgattcacttgaagagattgatgataaaagactcgagat

SEQ ID NO: 3556 - DNA, 461 bp, Glycine max
  Clone ID: PAT_MRT3847_103214C.1
atagattaacaaatgtgtcacatcattctgtccattgggaatgcactgccctatgttcttctaccccttctctttgggttttagctcaccatttagagctaaactcagatgtctttggttgaagggcagtgtcttacttctttggttgcaaggatggccgcctaacttaggatgaagctagtgattacacacctccgccggggccacttatgtcttctaatcaacgtgggcctaaaggcaatgtttatatatatgttagtgcaccgttcttcaggaaaatttcctatgaaccaaatggtgccacatttcctacatttccctcttctgagggactcctagacattcagttgggtgaggatgcgacaatgttttgaaattttcttcgggtcctaataaaggtttttcccccatcagccccttccaatgttgagggcctaacgtgccacattcacgtccctacg

SEQ ID NO: 3557 - DNA, 495 bp, Glycine max
  Clone ID: PAT_MRT3847_103215C.1
acggctgcgagaagacgacagaaggggacaatttttttttttgtttaaaaaaatgtcaatggacatgatggcaaccgaacgtgtttgttatgttcactgcaacttctgcaacaccactctagcggttagtgttccatgcagcagtttgctcaccatagttacggttagatgtggacattgtgccaatttgctgacagttaacatgggagcatcacttcaaacttttccttctcaagacactactcagcgattttctaccgttggtaagttacagagacagcatctcagtgttcaagaagcatgcagcaaggaactaggatcatcatcaaagtgcaaaacatttgagaccgtagaccatgatcagcaacctacgattcctcctattcgtccttctgagaagagacaacgtgttccttctgcttataaccggttcattaaggaggaaatacaaagaattaaggctagtaatccagatatcagccacagggaagcatt

SEQ ID NO: 3558 - DNA, 1161 bp, Glycine max
  unsure (1)..(1161): unsure at all n locations
  Clone ID: PAT_MRT3847_103216C.1
ccggccggaatccggtcgaccacgcgtccgacggctgcgagaagacgacagaaggggaatgaaacaaaatattactacttcccttacctttctctctctctcaaaacctcatttgtcgtcctcttcatcaacctctttcttctgcctcaccaaccaatttgttttctttttgcaatgctggtgcttggaagcatctctccattgaatgtgatagcttcaattctccaacatttgtataaatactttaacatcgacaagtgtgaagctctgatattaatttggtcatggcgatggtccagacagttatgttagtgttccatgcagcagtttgctcaccatagttacggttagatgtggacactgtgccaatttgctgacagttaacatgggagcatcacttcaaacttttccttctcaagacactactcagttacagagacagcatctaagtgttcaagaagcatgcagcaaggaactaggatcatcatcaaagtgcaaatcatttgagactgtagaccatgagcagcaacctaggattcctcccattcgtcctcctgagaagagacaacgtgttccttctgcttataaccggttcattaaggaagaaatacaaagaattaaggctagtaatccagatatcagccacagggaagcatttagcacagcagccaaaaactgggcacatttccctcacattcactttgggttaaagctagacggcaataagcaagcaaagttggaccagggtgatggtactcaaaagtctaacggattttactgattacatatatataaacggaagtttatcattatcaactggttttttctgtgcttgacctaaatcagtgaaaaatgaggttgatcaaatttcctaatcataccaactggatgggaagactctcctgaaaattgacctcagcatctcacccatctttaatatatattattattattatatgtatgcatgtgttgcgcgccctattctagatgttatgaaatgattgctattcttgtgattgcattaaattactatgttgaacttagtctcttaagtaattaaacattattgtaagtttccttctctttataataatgtgtctttctatttagtaacgaaaaaaaaaaaaaaaaaaaaaaaaaaaaaagcggccgcntagagga

SEQ ID NO: 3559 - DNA, 468 bp, Glycine max
  Clone ID: PAT_MRT3847_103217C.1
ttaccgtgctacacgtgagtactgccaccgtctttggggggggggggggggggggggggggggggggggggggggggggggggggggggggggggggaaataagccgaaaaatccctttggcaggccaacggggattaggggggccaccacaagggaagggaagataattttacccttttaaaaaccccgggttaaaattggcccctggcgaagtcggcttatatggaaggccgaaaaagaactccccccccttaaaaaaatttaataaaaaagggaaaatttgcgcaaaacccctcaatggcaggggaattggggttaaaagccccgtaccttgataaggagggtcaatgggcccccaaaaggaatgccgggccctgggaatgaaaaaactgcaggttagtagaaaaaggtgttttcgggaagaaatttagaaaggttataaaggggacaggcttaaaccgcggggg

SEQ ID NO: 3560 - DNA, 526 bp, Glycine max
  Clone ID: PAT_MRT3847_103218C.1
cgtttgtatcggattcagaagatattgatgaaaaatatggaagccactagtggtattgaagtaaaccaacgaggatggaacttaaaaaacgtgattagtttaactcaaaatggttgtcataatggcgcgcagcaaaatcctatgttgaactttgatcttgaaagtcctgctaaggaggacatggcagaagctgacagcgatggagttctggaggttacaaatgagactgagattgagctgacactaggcccttcaagttacaaacgtaaaaaagtggagacaccactaacttcagattcggcacataggttgtcttcttcttctactggatctagccttataaacaagacaagattgaagacccgtcatagcagttattcagctgcagaagaattaagtggaggcttaattggccttgtccatgtgcgacattcgaccgcagggtgccaaagtggaattagaaggagttatgaaattgaagaacgatcaagagatgagagaacgaaacagccaccttggttttttc

SEQ ID NO: 3561 - DNA, 348 bp, Glycine max
  Clone ID: PAT_MRT3847_103219C.1
tggggtagttcacactgtgcagatagacatcacgctcaaaccatcgttcgcaacactgctggatggcgactcaatggtggcaacatcggtccaggaatagtcagtcagctttgcttcgtggatgattctcaagctttcatgtttgcaccactacccatgtccgaggtatttccacaatcggctgaaaccttcaaagctcacgtgaactgcactgtaggcacagcaacaaatacaggacattgctcaagaatctgtgaggaatatgacacgtgctagcaagatcccttactctaggtcgattgttggtgcaaccttgtgagtaatcagaagaagagagctgaggagcca

SEQ ID NO: 3562 - DNA, 477 bp, Glycine max
  Clone ID: PAT_MRT3847_10321C.1
gtttgattgtgttgatgagcaggatacctttggggaaggttctgtaaacgcaggacttaatggagatgggggtatggactatatggaaagaattactgtcgacacatatgagggtgaatctaatgagctatcacgcaaaaatggacaaaaaggccataggagagttgttactggggaaggagaatagatgacaactgtatacccaaccattgttgaagaggcttacaacaaggctaatcctttgaactatatgaaacagggacactacagaggactgacacagaatcgtccaaggatcagaaactaactcgcatcgaaatttctgacacaccatagacgcgctgtttaactattcttcatacggagtataacattgacgtccggcagaggaatatacaatttgagaggatcattatgaagaaaagggacaagcttagttgttcaggagggatcaacccatactccatggaatggact

SEQ ID NO: 3563 - DNA, 460 bp, Glycine max
  Clone ID: PAT_MRT3847_103220C.1
aagatatacatcaaatccatggtgctgtgctgccttaagaaaactggacccgtcataaaggacatgctgaatgtgcgcaatctctatattattgagatggtgtattccaccaagcaatgatggctgtgcttcattatatgggaccatagtgtgacatctaatcttgctcaggagaaagagatcatcttaagagagccgccttacttacattatgagtggctgctattgagatacatggttataacatgcgggctaataggaattgcaccggaaatggcgacattgcacactctccaatgcataccataagtgtagctacattgatgcaccagtcacttagataccggcttgccgcaacagcacaaagttctatgacaaagctagaaagcttgtgacatgtatatggaggtatgcaagatgctgactggaagatgcatacccacttagctcaccatgaacc

SEQ ID NO: 3564 - DNA, 293 bp, Glycine max
  Clone ID: PAT_MRT3847_103221C.1
ggggggaaaaatgttttattttatttttcccaaattaaaaatttttggaatgcccaaaacccgaaatttttttttgacccccaaaaattggaatgggctggcccgggacccggggtacctgtcccactctcaccacgtccattgacaagctactcaaattctccattttgaacttcacctttgacttttccttaaccccatccttttttttaaacccttgtgttgtttttgggcccatggaatccttttcttggatcaaatctcccctttacaccaaaataaatagggggggg

SEQ ID NO: 3565 - DNA, 492 bp, Glycine max
  Clone ID: PAT_MRT3847_103222C.1
gtggggtttttttttttttttttgcttaggcttttttttttttttttttttttttttttttatctttccttggaggggaacaaaaaaaattaggcctcatttttgctctctcaaaaagggagggccaacaatggttctttttttaaactcctggtaaagggggacccaaaatcggggcttttttttttgggcaaaaaggataaaccccccaaatttagcaccccttgaaggaccaaaccttgggggtatagttggatataacgggggttttccttggggccgcctactttggagggaggttcctgcaaaacccctctttttgaaaaaaacaaattaaaacgtttggcgaaaaaacttaaaaagaacagggcaaccccccgtttaaaaaaaacagggggcctttttttttgtggaaaaaaggggggaacacccccaaaagggtttttggacccccgccaaacgggggggccccttttacccctgggccaaaaa

SEQ ID NO: 3566 - DNA, 508 bp, Glycine max
  Clone ID: PAT_MRT3847_103223C.1
gggaatgggccaatgtcctgggtggcccaagcaagcccgcgggtaaattccaagcctccaaacaagcgtactctttaaagtttgtttggcaagtttaaaaaaagcctccttaagtttgggacccctttgggagttctgggggttccggacatccgggtccccgcccctcccgggtggtggcaaccccgggtccggggcttccggtcccccctttcttggccgggccgaatgccgcctcctggtccctaaactggcccgggtccgtgccctccggtgcctgttacctttgaagaaattaagagtggttaaagcaagctaagctctgtaaaattagcatgggataacacacaggaattctgatcctaatgtgttggccttcgggaaccggagtaatgattaaaaggacagtcgggggcattcgtatttcatagtcagaggtgaaattcttggatttatgaaagaaaaacaactgcgaaagcatttgccaaggggatgttttcatttaatc

SEQ ID NO: 3567 - DNA, 2073 bp, Glycine max
  Clone ID: PAT_MRT3847_103224C.1
tttaataatagaaaccacacccacaaattccatggcttcacggctccaatgaagctccatcaccactagcgaacacttccattgtttttatctcacaggatcgatcgatatcaccagcatcaccatggcagaggtggcgccgccgaagaaggaaaacccgaaccttctcctggggcggttcgagctcgggaagctcctcgggcacggaaccttcgcgaaggtccaccacgcgcgcaacatcaaaaccggagaaggagtcgccatcaagatcatcaacaaggagaaaatcctaaaggggggtttggtctcccacataaagcgcgagatctccattctccggcgcgtgcgccaccccaacatcgtgcaactcttcgaagtgatggccaccaagaccaagatctacttcgtcatggagtacgtgcgtggcggcgaactcttcaacaaggtcgcaaagggaagattaaaagaagaagttgcgagaaattactttcagcagttagtttccgcggtggagttttgccacgcgcgcggcgtgttccacagggacctgaagcccgagaacctgttgctggacgaggatgggaaccttaaagtctccgactttggtctcagtgccgtgtcggatcagataaggcaggacgggctgttccacacgttttgtgggacacctgcgtatgttgctcctgaggtcttgtcgcggaaaggctacgatggtgcaaaggttgatatttggtcttgtggggttgttttgtttgttctgatggccggctatttgcccttccatgaccgtaacgttatggctatgtataagaagatttacaagggtgagtttcggtgtcccaggtggttttcttctgaacttacaagacttttctctaggcttctcgatactaaccctcagacaaggatttctattcctgaaatcatggagaatcgctggttcaagaagggtttcaagcagattaagttttatgtggaggatgatagagtttgtagttttgacgagaaactgttacttcatcatgatgatgatttggcaacatcggattctgaggttgagattaggaggaagaatagtaatggttcgttgccgaggcctgcgagtttgaatgcgtttgacatcatatcgttttctcagggctttgatctatcagggttgtttgaggaaaagggtgatgaggcgaggtttgtgtcatctgctccggtgtcgaagattatatcaaaattggaggaggttgctcagttggttagtttcagtgtgaggaagaaagattgcagggtgagcttggaggggtgtagagaaggtgtgaaggggcctttgactattgctgctgaggtttttgagttgacaccttccttggtggtggtggaggtcaagaaaaagggaggggataaggccgagtatgagaagttttgtaactctgagttgagacccgcgttggagaatttagggatggaggaatctgcttcttcttcttcttcttgtcatcaatctacacacactcaatctgaattccaacaacatcgaacactttctgactctgcccttaacagacattcagataatgaatgtttgttcgaacgagagttaggtctagcagatgagactagtatctcacaacatggtgaatcaaagttcgaatgtcaacaggaaaatatggccatgtttactatctgaccatgtcttgagcactatgattgtttccaaagaatgaaaacaaaaaagataatgaatgcttgcattaattaaggtagcaggagaatgacagaagatgatagcatactatttctctcttgttgttttaggctgtgtgtaagttaaattttactttctttttccctcgagaattttccggcatttttaggtttgctccttgactggagcattagattctactgtatttgtatgtccaaatgttgtgtttctgtaaggctaatttaatttaaatatagtgaatgaagtgtacatgtcaacagttcacatgtcttggtaaattgctctgtaactgtatttatttccattctttattgcaagtaatgagaaaataataatgcaactttcttgtgattccc

SEQ ID NO: 3568 - DNA, 526 bp, Glycine max
  Clone ID: PAT_MRT3847_103225C.1
acgaggaaaaaagtgcatctgcacattccaaatcccactctggaaaaacctcaagtagtgttgacaatttagaaaagactggtcggttaaaagataaaaatggcatccgtgaactgccagatcttaacttgtctgtgggaaaatctgctatacaagcaccaaaatctgaaaatgtgctcaagaaagatggttctactgctaggcctaaaattacaacacttgagaaagctattcgagagttggagaagatagttgcagaatcaaggccaccaactatggaaaacaggagcctgataccacacctcagggtgtcaaacggagattgcctagagaaataaagctgaaacttgctaaagttgctagattagcgcaggcaagccaagggaaagtatcaaaggagttacttaaccgtcttatgagtattcttggacatctgattcagctcagaacactaaagagaaacttaaaaattatgatcagtatgggtttgtctgcgaagcaggagaaagatgttaggtttcaacag

SEQ ID NO: 3569 - DNA, 1975 bp, Glycine max
  Clone ID: PAT_MRT3847_103226C.1
caatgaagctccatcaccactagcgaacacttccattgtttttatctcacaggatcgatttatccccaccaccaccaccatggcagaggtggcggcgccgaagaaggaaaacccgaatcttctccttgggcggttcgagctcggaaagctcctcgggcacggaaccttcgcgaaggtccaccacgcgcgcaacatcaaaaccggagaaggagtcgccatcaagatcatcaacaaggagaaaatcctaaagggtggtttggtctcccacatcaagcgcgagatctccatcctccgccgcgtgcgccaccccaacatcgtgcaactcttcgaagtcatggccacaaagaccaagatctacttcgtcatggaattcgtccgtggcggcgaactcttcaacaaggtcgcaaagggaaggttaaaagaagaagtcgccagaaagtacttccaacagttggtttccgcggtggagttttgccacgcgcgcggcgtgttccacagggatttaaagcccgagaatttgttgctggacgaggatgggaaccttaaagtctccgactttggactcagtgccgtgtcggaccagataaggcatgacgggctgttccacacgttttgcggaacacccgcgtatgttgctcctgaggttttggcgcggaaagggtacgatggtgcaaaggttgatatttggtcttgtggggttgttttgtttgttttgatggcgggttatttgcccttccatgaccgtaacgttatggctatgtataagaagatttacaagggtgagtttcggtgtcccaggtggttttcttctgaacttacaagacttttctctaggcttctcgatactaaccctcagacaaggatttctattcccgaaatcatggagaatcgctggttcaagaagggtttcaagcagattaagttttatgtggaggatgatagagtttgtagttttgatgagaaacagctgcagcatcatgatggcgatgattatttggcaacatcggattctgaggttgagattagaaggaagaatagtaattgcaatagtactagtaatggtaattcgttgccgaggcctgcgagtttgaatgcgtttgacataatatcgttttctcaaggctttgatctatcagggttgtttgaggagaagggtgatgaggcgaggtttgtgtcttctgctccggtgtcgaagattatatcgaaattggaggaggttgctcagttggttagcttcactgtgaggaagaaagattgcagggtgagcttggaggggtgtagagaaggtgtgaaagggcctttgactattgctgctgagatttttgagttgacaccttccttggtggtggtggaggtgaagaaaaaaggaggggataaggcagagtatgagaagttttgtaactctgagctgaaacccgcgttggagaatttggggatggaggattctgcttcttcttcttcttcttgtcatcaatctacacacactcaatctgaattccaacaacaacatcgaacattttctgactctgcccttaacagacattcagataataatgaatgcttatatgatcaagagttgggtctagcagaagagactagtatcccacaacttggtgaaccaaagttcgaatttcaacaggaaaatgtgcccatgtttactatttgactgtgtctacaacactattgttttcaaagaatgaaacatgtggaaaaccaaaaaaagataatgaatgtttgcattaattaaggtaccaggagaatgacagaagatgacaacatactatttctctcttgttatttttaggctgtgtgtaagttaaattttactttctttttccctcaagaattttccggcatttttaggtttgctccttgactggagcattagatgctactgtatttctttgtccaaatgttgtattattgtaaggctaatttaattttaaatatagtgaatgaagaagtttatatgtgt

SEQ ID NO: 3570 - DNA, 166 bp, Glycine max
  Clone ID: PAT_MRT3847_103227C.1
cccctaaatactctctcaccattcaatccttccttcttccttatgttaacaggtacatgatttaccaacaaggttcctttacaattggcactgttcttcgtttagccaattatttctcttataacaacaaggttgcacctgtgcttgttgtctgctctgagatcaa

SEQ ID NO: 3571 - DNA, 753 bp, Glycine max
  unsure (1)..(753): unsure at all n locations
  Clone ID: PAT_MRT3847_103228C.1
agaataagcaaacttttgataaatatgccaaccattataacatagcattaaaattttaaaaccactgtaatgtatacaggtaccccactaaaaaagtacaaagatagagattatagtcatcatttctcaagcatcaaacactttcttcactacacgcagatcccgtgacttttcatactcacaacaagattattacactgcaatcaaagcattccagtccaggtcgatgcaaaaacttgtacagaagccaatgaaatatgcacgataacaagacataaagcaaagattagagaccctgatcaatgagataatcgccaagcctttcaactaccatgttgcattgacctggagtcattggttcatcataaatgccaatgatcaaggccgcaccggtcttcttcacagtaacaccaccaggaccccaagacaaccccggtatttaattgttgagacttgagaagatgcatacaataattactctgcacaaaggtgtcgtctatgtatatttgcatttgctacgcaatccacaaacacatggatgatggatggattccaaaatgtgcaaaggtttagataaatcatatgcaatatacaggtgcataattaaattactgcagtatacctgcaatctccancccaagttcatgttgcccttgacatcaaccccaaaaaaagggctgtaatttttttcaattgattgtagcacagacaatgctttatttgcgtgattctaaaactaataataatttggaa

SEQ ID NO: 3572 - DNA, 919 bp, Glycine max
  Clone ID: PAT_MRT3847_103229C.1
aattattattagttttagaatcacgcaataaagcattgtctgtgctacatcaattgaaaaaaattacagccctttttttggggttgatgtcaagggcaacatgaacttggggtggagattgcaggtatactgcagtaatttaattatgcacctgtatattgcatatgatttatctaaacctttgcacattttggaatccatccatcatccatgtgtttgtggattgcgtagcaaatgcaaatatacatagacgacaccctttgtgcagagtaattattgtatgcattcttctcaagtctcaacaattaaataccggggttgtcttgggtaaattgttaccttcaattttaatcttaattaataattcctttcaaattctttgattcaatggtaaagctgaacatataacagttgtgtttcttgcacagtatctaagtgcatattttgaccattatggttgtaatatcagtctttatctttattatccagggtcctggtggtgttactgtgaagaagaccggtgcggccttgatcattggcatttatgatgaaccaatgactccaggtcaatgcaacatggtagttgaaaggcttggcgattatctcattgatcagggtctctaatctttgctttatgtcttgttatcgtgcatatttcattggcttctgtacaagtttttgcatcgacctggactggaatgctttgattgcagtgtaataatcttgttgtgagtatgaaaagtcacgggatctgcgtgtagtgaagaaagtgtttgatgcttgagaaatgatgactataatctctatctttgtacttttttagtggggtacctgtatacattacagtggttttaaaattttaatgctatgttataatggttggcatatttatcaaaagtttgcttattctatctggcag

SEQ ID NO: 3573 - DNA, 466 bp, Glycine max
  Clone ID: PAT_MRT3847_10322C.1
ttcgtccttttttttttttttttttttttttttttttttttttttttttttttttgtttttgggaaaaaaaaaaaaaaaactttgcttgcccttgccattaaacttagtggtaaatcccccccaagaccctttaattttatctatttatttttcacccaacatccgaacttttccccaaaaaaatagaaaaagctttttttaaactggtccattggcccccccattttttaccgcccagcttttttttttgctttccccaaaaaaatagggtgtcttgaaccatccggggatttgaaccccccaagaaaatcgggaagagttggattgccggctaaaatgccctccagttttttgaacctttttttggggaatgattttttgaagagacctttaaagggcccaaggggcccaatgggtcaaagtcttcaaaagagaacgggcccctgggaccgaagtccttggggc

SEQ ID NO: 3574 - DNA, 380 bp, Glycine max
  unsure (1)..(380): unsure at all n locations
  Clone ID: PAT_MRT3847_103230C.1
aaaaaaaccgccccgccaacacttctccttttccacatataacaacacattctacaacaaaacgacttactacaaaaaatcgtctaatctttaaaaaaccgtcctcatccccaanttcttnccatacaaaccttaatcctaattccaactcatttttcaaataatcaattattaccctttcattcccatttacaccaaataccccatcttttttttccctccttccactttataccccacaaaacccttcctcccacctttcatccactacccctttctcaaatccaactttgattcacttaaccttatccaaaacccacatcantntnttatccaccaattccccactttaccacaaccttatttaaataacttcttac

SEQ ID NO: 3575 - DNA, 431 bp, Glycine max
  Clone ID: PAT_MRT3847_103231C.1
cattactccagtatgctgctacagcatcctttctcagtaaattgtacagtgattaccttgatcatctcaaaatgtctggtgcaagttgcaagactgatgcattctcggtggaaatgcttcacgattttgctacttctcaggttagctacatcttggggcaaaaccctatgaaaatgagttatttggtgggctatggtgacaggtttcctctccaggttcatcacagaagtgcatcaatcccttggaataaccaaccctaccgttgtgaagatggtaagaaatggctaaactctaaagatccaaatccacaggttcttttgggagccatggtgggaggaccagacactaatgacaatttcgtggatcataggaccaaccaaaagttcactgagccaaacataacaagcaatgctggcttaattgcaacactt

SEQ ID NO: 3576 - DNA, 433 bp, Glycine max
  Clone ID: PAT_MRT3847_103234C.1
gacagaaggggatgtcatgttttctttcactctctctccaattagggttttcctgattcccaatgccttctaattctctctgcctattcgcaaccgttcctactccttcgatcactcttcgaatttggtttctcgttcactctcgctcttcgattcggagaaaatcgggcgctattgcttgacactggtttcgtgccatgccgcctagtcgtagaaagggcggaaagaaaagcgccggcggtgccgccgcctgccggcagtttaagctcggcgatctcgtgctcgctaaggttaaggggttccctgcttgcctgcgacggtgagtgagccgcagaagtggggttactctgctgatcggaagaaagtatttgtttgcttctttggagccgccccacaaatagctttctgcaatcctgccgatgttgaaagtatt

SEQ ID NO: 3577 - DNA, 955 bp, Glycine max
  Clone ID: PAT_MRT3847_103236C.1
cctcgagccgattcctcaagggcgtgtttgtgtgttgcgtttgagttggcgattccgaaatggaggacgacggttccaactcgatccgccgcatgtcaagccgaacgcgaaaagttgcgtccaaaatggccgccgcgcttgccagcgctgacaaccgcactcaggcggcacttgcacgcttggatgcattggagaatgacaatgcgggttttgaaatcgcagatgccaataatgatgacgatgacgcttctctagacgaggaggatcaattttatatgcagaaaaagcagtctaaaggcaccaaaaggaaaactaggcaggcaaaagcacttgaagctagaagggccccaagaacattccttgagctcttacatgaggctaacttagaatcattgcctcctcatgtgccctcctattggaaagccgcagttggacccccaagctcaacctcccgtcgccacttctgtaccgtttgtggtttttctgctaattacacttgtgtgagatgtggtatgcggttttgttcccatagatgtcaaaatgtacacaatgatacccgttgcttgaaatttgtagcctgattgatatatatagcccataaaaatgtgcacaagtattggatacatactgctgtaatttgttatatatcagtgttcactagcactgtgtaaaagcaagttctttgctcaacttttcctcttttgttgcccttcagactagtgttttcagttagtcagttacaattctgaaaactgcataatctgacccctattggatcctgttaatctagttaaccttgttaaagatgtcccccatagttattagaatcttatagttgacgatttcaattctatgattcaatataatttggttacctatcgataatctcaaatgactttgtatcttgcaatacatgaatgaatatgtgcaattttgtaaaaatggtccaaggtcc

SEQ ID NO: 3578 - DNA, 604 bp, Glycine max
  unsure (1)..(604): unsure at all n locations
  Clone ID: PAT_MRT3847_103237C.1
acgagatgatgggcaccaaatgctccataataaggcacaccaaacagtgtttcacttatcattcatatccttggagccaccacaggtagcatgttggtaaaagtgatcttccatggaagcaccgttataattcctagtttagagtgtcacttacaccagatctgatttacactcaggcacaaaaacataatatgaattaatgactcatccacttgagcaatgaaggggtaggtgtaatcctccacatgtatatctcttttacgtaaattatctcatggctaatttgttcagtgctaccctccataacaagaatttagtctttggaggtaaatccaacttccataaccgagtaaactgagattgctgaaagtcgacctgcagcatgagaagaacatgataagctaaacttatagaaattttttttgatgattctgccaaccaaatgcatttatctgcttgtgatagttgactctaatgacctggtctatattaaagaaattaaatatttcataacctataacttttatactttaaaaaatatcatttatttattcaaacaagatatttagtaatatatnnnagcaatgaataacacataaaagca

SEQ ID NO: 3579 - DNA, 655 bp, Glycine max
  Clone ID: PAT_MRT3847_103238C.1
tctcgagccgattcggctcgagggaatctcttactcaaattagcttagtttggttaatgggtttctcttatttgtttgtgaaacttgcatttgaatttgtatgccattagatgttatttcaattttaggttataaataatccgatcctctttcaccagagggtgttcaaatttcgagctaaagttccgatctttttttttttttttgctaaaatcatgtgtctaatcatcaagtgtcggaattgcaatgtacatggtgatgtagagatggaagtgatgattttttccccaggtgatcgacgctgaacaaactgtgcgatttttctcttttgagaaaccaagccaaataaatctgatccatctcttcatgtaacatcagttcctctaccgcacaagtatttgatttcgattatacaataagcattcaactggttttggttttttttggttgagtttttttttaaatttttttaattgttatataattaagttggtttgttattttttatataaatctcaatttttatttttgaaaaattatatgttcagaccggttttgaggagaataactatatgattacatcatatcaaaattttgtctatctctctttaaaattaaaatatataataaactgacctttatttatttttttgaa

SEQ ID NO: 3580 - DNA, 235 bp, Glycine max
  Clone ID: PAT_MRT3847_103239C.1
tcgagatatgttcagatagtcactgagatttcaaaggagattaacattgatgaagtctaccatattgtatcttcatagattgggagccttaaatctgtgggtgactgaaatgctgtttgggttccttcgagtcgccctctcaatcttgaggagacaatgttagagggtgagacacaagtcaaccgctggacgaggtgagggtcctggaaacctggctgtggtgggtggatcaatg

SEQ ID NO: 3581 - DNA, 345 bp, Glycine max
  Clone ID: PAT_MRT3847_10323C.1
cttagctaacaaaaatatagcacttttatttcacaagcttatctgcggacatagtcgaattctgcgattaacacatcttaagtgatctttatttctttttatatcattgaccacaatattgttaattattgctttattcacttataaagcaaagtttttctggcatagatttaattaaggaggagcatagaagtttaagcttggcacctatcaaaagaggaggcaataaattaattagtcttaccacccagaatccttaacggatgattaatataactttaaaacctttttccttacctgaagcaaaattaaaaggaaactgattaattaattacggcaaaaatt

SEQ ID NO: 3582 - DNA, 235 bp, Glycine max
  unsure (1)..(235): unsure at all n locations
  Clone ID: PAT_MRT3847_103240C.1
cccacgcgttcgnctacgcgaacacccacgcatgcgttcggcttccttaatactacaatggggcgcgtaacattatcgcttccttgcataatagctccatccacagactccaaactgaatacacaataccacacaggcattcacataaaaaagtactttgtaaaccgtcatcactaacttagaagcaaggcacactatccttccatactaaccacataaaaatctgacaacatat

SEQ ID NO: 3583 - DNA, 382 bp, Glycine max
  Clone ID: PAT_MRT3847_103241C.1
cgccaacgcgcgacgattacatcaaccaaaatctcacgccatcacccgcatcagacgaaagggcgtgccccatatgctacgaaaactggaacgcagatacagagcaaattatccggacccattgcaaccacactttccaccgcgaatgcttcatcgcatggcttggcaaggaaaacgtcaacagcgcgaactcgtgccccagttgtcgcgcaatctgctaccccaaagttgagcaccaaaaagagacaaggttgacgctggatatgtcgtttttgtaccggaccatgcgctcggagtacattacgcgaatttcgttggcgcgtcagtcgagggcaaagaaacacaccaaccagcgacgatatgatgatgaggatggcttttg

SEQ ID NO: 3584 - DNA, 388 bp, Glycine max
  Clone ID: PAT_MRT3847_103242C.1
gaggatagtgagactgcatatgcaattccatatagttaggatgtgattaatttaactgattcatatttcagataaaaaatttctcgtccacctgaataatagctgggtcattgttgacttgtggagtaggctggacaggtggagaagatttaacctgtaaatcctgcaaaagaaattaagacagatgtctcagatgatctgattcttgtataatatgggcataaatcattcaacatttcgacacagatgatctaaacaaagtttttattgagctattaaattaactcgcaaaaagcatatacgaaaatctggatcatcctcctaatgttccatctcccactttgtattccaagattctaaaaccaagttgtaccaaaaaagtttcttt

SEQ ID NO: 3585 - DNA, 370 bp, Glycine max
  Clone ID: PAT_MRT3847_103243C.1
gtgacatcagagaacacaaatgttcatggtgtcgaacttatacaaaccgctactattactaacgagctagctgctgttggttgcaagaaaggttgattagtccgcacaattgcaccctcaaatatataccttgatatgaacgatatatagtgccaaatttgtacatgtgaaggaaactggctacacctatactatgccaatggacattttgaaataggctatatgcatagcacatctttgaacacaagatctgtgaagacaaggtggtggccgtaatacagataatgatatgggtgaagataatcgctgcaatgagacgccaccacaatgggggacacattatcaccatcatctgccatcagcactttca

SEQ ID NO: 3586 - DNA, 376 bp, Glycine max
  Clone ID: PAT_MRT3847_103244C.1
acgcccacgcgtccgtatattcaagttggatttgggagacccaacaagcagccatcctcattcaaactaagatctcatatgatggctttggggatcacgtacctattcctctgcctccaattacgatgtgttcctcagcttcagaggtgaagacacactttatgcttttactggccatttctacatagtttttcatgacaggggaatccacactgttattgatgatgaggaagctttaaagaggggagcgaataacccgagcccttatgggggcattcaagaatccagagttgccatcacttgtgctttcttaaaactatggcttctctctggttttggttaaaagaacttggcacccatcttttcttgtcaccag

SEQ ID NO: 3587 - DNA, 637 bp, Glycine max
  Clone ID: PAT_MRT3847_103245C.1
attggcataagtgaacattattatatataaaaaaaagaagctcggggagccgagctcgttacacaactagtgcaactcacccacccaaatcctctactaatttttccttaacccctccattttctcactccctcttcttatggcgtgttactctcccttaccgccctctgaatcccgaatcctctcatacactgcctctgtgccactttcatgattctgttagaatttcatcactcccataactaaattctgcctcatacaccaacacgctactgctgttggcattagcataaaataactactgaattctagttagttagccaactgacagctctacataaagtgtaacacactaccaatgaatggaatgattcatttttttgtgccaaatctctcaatagttgggcctaactttgactcttttgctatagacatttgtaacaggcctatgacacaggaatccataatacatctcataatggaccaaatcacaaaagtaaagactaccatatggttaatggaacaaataacttcattccaacttgaaactaatcagccacccctgaggttcctaagtatgtactaacagcagaaatcacaggacattatattgcaatttgataactgtattttttat

SEQ ID NO: 3588 - DNA, 308 bp, Glycine max
  Clone ID: PAT_MRT3847_103246C.1
tttttgaagccaaaattaattatgaagattgccatttatgaatgtataaggagcactgaccaaaacatatattgaggacatggatatgaactagaacgttcgctgagggaagcatgatacacatagactggatgtatgaatataaaacaatgaaagtagctattatataaacggtggtaaatataaccattaaccctgaagaatgttcctacatataaaaggattccaagctaatgtctgcctctacaatcatgatcagtgagtgcgcacctacatgagcactggaatgctgtagcacgattaaaggc

SEQ ID NO: 3589 - DNA, 1588 bp, Glycine max
  Clone ID: PAT_MRT3847_103247C.1
tatgatccactgattccactcagtgaattatgaagtgatctgaaatcacccgcgaagccgttaggataaggcagagagagaaaaacaaacaaacaaagcggcttccaatggccactctgcaattcaccttcaccgactcaaccacattgttcaggccttctctaccttccacgcgaaccttctctcgaaaccgaagcctcattgtcaaagcctcttcttcttcttctgacgacttctccaaaagcaggcgacgcttcatcgccgaaaccgccgcactctcggtctcgctccctcagttagcggcgcgtgccgaagacgcgctttcggagtgggagagagtatacctccctatcgaccccggcgtcgtgcttctcgacatcgcttttgtccccgacgatcccaaccacggttttcttctcgggacgaggcaaaccattctggagacgaaagatggaggaaacacttgggctccgcgttcgattccttctgctgaagacgaagatttcaactatcgcttcaattccatcagcttcaaagggaaggaagggtggattgtcggaaaacctgcgattctgttgtacacttccgatgccggagacagttgggagaggatacctctcagtgctgaacttccaggggatatggtgtacataaaggcaaccggtgagaagagtgcggagatggtgaccgacgaaggtgccatatatgttactgcaaacagaggttacaactggagggctgctgtgcaggaaactgtctcagctactcttaacagaacagtttctagtggtattagtggtgcaagctactacactggaactttcaatactgtcaatcgctctccagatggaaggtatgttgcagtctcaagtcggggcaacttctacttaacctgggagcctggtcagccattctggcagccacataatagagcagttgccagaagaatccagaacatgggatggagagctgatggtggtctgtggcttcttgttcgtggaggtggtctttatctcagcaagggcacagggttaactgaagaatttgaggaggttcctgttcaaagccggggttttggcattcttgatgttggatatcgttcaacggatgaggcatgggcagcaggaggaagtggtattcttttgagaactactaatggtggcaagtcatggatccgtgacaaagctgctgacaacattgctgcaaatttatactcagtgaagttcattgatgagaagaagggatttgtattggggaatgatggagtcttgcttcgctaccttggatagagttgtaatgcaacatggtctgttgcctcaaatgcaattttgtagcagattacatatccatgcttaacattcattactatggagagagctatgggatcaaatcgactccttgctgttgtgctaaaaaaatgtgaggaagtatataaacaaacttcactattgtaaagagagctatattatgtcaatgtaaaattgtaattgccacgttactattatattaaaattcaattttatgctgcatgtgttgtactgcaaaagcgcttattcaatataagagttatcacacgagagtttatcac

SEQ ID NO: 3590 - DNA, 424 bp, Glycine max
  Clone ID: PAT_MRT3847_103248C.1
gagggcccattcaatgtttcacaaataaaataatttccaaataaaaaaagggtttggacaaaacatgtcacacaaataaaaacaaccaattccctcgggagttcaatgtaacttcacttggctttagggaaccattaacaacatcaaacaagctttaacattacgtataaaaatttccccaaccaactttaatcttccttggccatctaagttgttttctctgggacatttaaaccaggggaagctataagcctttccactggaactttaaacacatgacggggtactccaatatcaaacatgaatctgccaacacagtaaaagctaaccccaaccattgccaaaccactaaaactgggggtcataaaacgaagcggggtaaaaactaaagtcctagccccagcttataaagatgctccttgcc

SEQ ID NO: 3591 - DNA, 379 bp, Glycine max
  Clone ID: PAT_MRT3847_103249C.1
attcggctcgtggccttaggccgaattaataggttcacctaaggacatggacaaagaggagggtgttctaggtcacagtgtggttagtacgcatcatgatggcaaataaacttttcttgaccagacacattgagagattacaaggaaacttataaagacactacactatacataacacacaattctacattagggattccgccataattacacaaacttgtcaagaagataattccactggttcgaacctgagagacagtgtaccatagcatcgacagtgcatagagcctaaagctccagacgcattgtgaactaaactaagaaggaggattgtggcaacaaaatcaaggacacgatatgtactgcaaagcaagagaac

SEQ ID NO: 3592 - DNA, 260 bp, Glycine max
  Clone ID: PAT_MRT3847_10324C.1
cttttcttaatttctctctattagtctgcatgctctgcaaactgagcatggctcctctcgcattttccttcttcttcatccttatcacattcttttcttcatcatctggtaatatcattctttcagtttctacatacacaaaacttatatctagtttcatatatattttttggtgtatttttctctaatcaaaattagaatttctccttcataatctatctttagacctttattaagtcagtttgtttaaattatttgtc

SEQ ID NO: 3593 - DNA, 175 bp, Glycine max
  Clone ID: PAT_MRT3847_103250C.1
ggattactagcgtatttggccatacataacgaacggggatgctgacattttaacattagtcactacctaaacatattacgtcttttacccatatgatatgaggacatgggtggtgaacgagttttgaaacactcatgtaccctcatagctggatgataacccattttatgtgttt

SEQ ID NO: 3594 - DNA, 1094 bp, Glycine max
  unsure (1)..(1094): unsure at all n locations
  Clone ID: PAT_MRT3847_103251C.1
gtattctatagctaaaatttattttagaataatatatttaaatcattacattgggaacttcacagcttgcagtttttttctagactgcagatgatgtcgattcatttatccattttcccacttgaaatatattgattttttattttttatatttcaattaaatggaatacttggcatttggccaaatattgagcattaattactaaaagactgcccttataaaaataaagggtcttaaggctgtgcagagttaatcttgatcatttaatcttatatcgatgatcaacatttgctattctcacatctgacactttcccaatgcacttccaatgtgtttagttattgtttcctttattcccttctctcatggaaaactaatttttatccgtttaaccattgttcttctgtaggtatattaaactatatacgtcctctttacctggacatgttcattgacttattggtgttcaaataacttccttgtcttatgttaaactttctcctgatgcatatagactttgcaagagacagcaagatttgaagttgataaaatgatgcttacagatgcaccacttttatttcctcctgggcagttggccttggctgctttacgcaactcaaatgcattccacagagtcattgactttgataggttagaaaatacaaaagtccttctgagaaggaattgaagcatatcaaccgaaaactgaagtcttgttggggtcatcactctcatgacgagggcaagaagcgggagaagaaatcaaagcacaagtccaaaaagagctcaaatgaagctcaaaatatgccatctattgcctagctcatttcatatggatggcaatttttttttgtttctatttggatacaaaaaatgactcggtcagtggccaaaggaaaaggaatcttttgaaaactccttccgctggcttactagtgagtctgattttgttgcttcacttatgtcttctttgttcccaaatgaacttattgcctgaaaatgcttcgattaaaaattccatgctcgtgccgttcctattttgcttggaaaaaaaaaaaaaaaaaaaaannnnnngnnnggggcggccgccgaa

SEQ ID NO: 3595 - DNA, 1571 bp, Glycine max
  Clone ID: PAT_MRT3847_103252C.1
gtattctatagctaaaatttattttagaataatatatttaaatcattacattgggaacttcacagcttgcagtttttttctagactgcagatgatgtcgattcatttatccattttcccacttgaaatatattgattttttattttttatatttcaattaaatggaatacttggcatttggccaaatattgagcattaattactaaaagactgcccttataaaaataaagggtcttaaggctgtgcagagttaatcttgatcatttaatcttatatcgatgatcaacatttgctattctcacatctgacactttcccaatgcacttccaatgtgtttagttattgtttcctttattcccttctctcatggaaaactaatttttatccgtttaaccattgttcttctgtaggtatattaaactatatacgtcctctttacctgagcatgttcattgactgtgtgtcactcttattttttttctctaaattaattcatgtccactcataacttatatttttcccctggcagttctagttctgtactttaatcaattctaatttcaaatgcagcatcttcgattttgccagttatttttcaagaatttatttactggtatgctcatgaattccacagtgctggcgatttccagcgttaaatgccatagactctgcatgaaaaagagaaaaatgtagttggtaaaatgaggcttatggttgcaccacttttatttcctcctgggcggttctcattaattgctctaagctactcaagtgctcgccacagagtcattgactgtaatcaccatatcgctcagttgaaggttttataaatgatatggaggaattctttaatgctggtgataaccagcttgaaatgctcaagactttgcaagagacagcaagatttgaagttgataaaatgatgcttacagatgcaccacttttatttcctcctgggcagttggccttggctgctttacgcaactcaaatgcattccacagagtcattgactttgatagttatcttaggggtattttttcccgtgagaattccatgcatacaatgtccgagctttctgaatcactggatgcaattgattcttgggttagaaaatacaaaagtccttctgagaaggaattgaagcatatcaaccgaaaactgaagtcttgttggggtcatcactctcatgacgagggcaagaagcgggagaagaaatcaaagcacaagtccaaaaagagctcaaatgaagctcaaaatatgccatctattgcctagctcatttcatatggatggcaatttttttttgtttctatttggatacaaaaaatgactcggtcagtggccaaaggaaaaggaatcttttgaaaactccttccgctggcttactagtgagtctgattttgttgcttcacttatgtcttctttgttcccaaatgaacttattgcctgaaaatgcttcgattaaaaattccatgctcgtggtgtttttattttgcttatattgcccttgccacatttcacttctacaaatatttctgtttaaactacaaatcatttccccccaaaaaaa

SEQ ID NO: 3596 - DNA, 312 bp, Glycine max
  Clone ID: PAT_MRT3847_103253C.1
gcctttcgttcgcacagtcatacacacacgtgtcggcgctcttttacaccccaataccgtgcaaactctgcatggtcttgctaatatccgattaggcgaccacccaatttgtcaatcatgcaagcgcaagtctagcaggtgtcgttgtacaataccgatcatgacgcccctacgacttgtctttcctcgacagacgactgcccttcatggttccgagagtgcacatcgcgaatgaggcactcctccgtgccagacctatcttggacgacagaaacgagccgccatgggaactgcaaatcctggttccgactt

SEQ ID NO: 3597 - DNA, 420 bp, Glycine max
  Clone ID: PAT_MRT3847_103254C.1
gccatactttttgttcttttgaaaccatcaaatgatgaaataacccaaaccttgtaggattttatctattacttgggagtatattaggttgattagtttcttcttatttaacctgcttactttttgtgtgtgaacagatgcttaatgaaagtatagagcaatgtctatttccctacaaacttcaggtaatgcatgaataacatctgcaatttgtcaataactattttatccttcctcaagtttcaataccagctgttattggctcctgctggattaaatcctattgtaaatgtatagaaacaccgatggatgagtgttattttctttctcttttccctgctgggtcttggatgaagaaagttattgggagtgtattcccagttctctttttctgtattatcttccaagaaatatatttgg

SEQ ID NO: 3598 - DNA, 455 bp, Glycine max
  Clone ID: PAT_MRT3847_103255C.1
gggcccaaatttcaaaccccccccttttttaaaaaaaaatcccaatcaattttttaaaatcgggggcccttttggttcatcggggcggggggaatatgctaaaatggccaattctctcggatcaatttgggggggagggctaattatttaaaaaccaaaccctccctgggttggggtttggctcatttcaagcctcctccaacaacatagggctccccctccgggttaagggggacataaaacaagcattttacttttaccccatttggtttaaaatctttttaataaagggggtgtaataggataattcatctttagaaaacaaacttattgttcaggggggcgaaaatcttcttcctttatagggggcccttcaattggagagggttgggcccttgaactaagggaatcagcagggggggaaccacccccttgggaaagccttgggctggggg

SEQ ID NO: 3599 - DNA, 351 bp, Glycine max
  Clone ID: PAT_MRT3847_103256C.1
agaaggaaattcaggcaaagggttaattgaattgaattgatttcaccctggctctaaaatatggacattgaaagagaagccacctcctagaggtaatacttagagcttgtgccaaattaaattcgtatttacaagcaaactggggcatatccaaattgaaacaaatttttcttcctatattcccaaaacttttttaaatataggggggttgtgagcttaatatccacattttaagaaaccattatccaagtaaaaaccaacagtagcgggaaagaaccaataccggatccaagcttcagtcggttgccactagggtttgctatcccatcttcaaactaaggtgtgaaccag

SEQ ID NO: 3600 - DNA, 416 bp, Glycine max
  Clone ID: PAT_MRT3847_103257C.1
gttgcttctaatccagctaagatgcttgcaaaaaatttcttggctggcaatatcgttggcactttctgctgagcttagtatctggtaacgggctcataaacaacctgccagcattgctctgcatgtaaatagcccaggttaaatccagtcctagtctccaagactttccccatacatcgcttttgatcagactttttagatagttcataccacagtacctcactcattaaatctcttaattcaaaaaaaaaaaaaaaactggaaggaacagtttcacaaagttgctgttggggttcaatcttctttatgatcatgacataggcatgcacagatgctggtgaatggcagttttagagtgagcaaaagatttccatcgtctaagttagttttgatcaagtactagtataagataatgg

SEQ ID NO: 3601 - DNA, 431 bp, Glycine max
  unsure (1)..(431): unsure at all n locations
  Clone ID: PAT_MRT3847_103258C.1
gaactacacagtaaactctagttatagggcgttgtgtagattgaagagggggagccattttgatgagatgagaagtttcatgattatggagggcaaaaataccaacaaaagtggcacaatttgcttggagattacttaaaaacaggctgactgctaaagataatttgaagaatacctatgccctttttgcagacaaatggagatgactagttcacatctctttctctcgtgctcaaagatccaaaagttgtgggtagagtactatgcatcatggctcgtctaaatgctgnttttcaaaatgatgcagtgactcaagaaagagagatgagagaaatgcatgcgtgtttaaggaagtcattgatacaacaagaattatgctcacatatatcttggacatggtttagaagcctggaggcagattttagcaacag

SEQ ID NO: 3602 - DNA, 457 bp, Glycine max
  unsure (1)..(457): unsure at all n locations
  Clone ID: PAT_MRT3847_103259C.1
gtacgctgcggatccggtgcgnattcccggggggacccacgctcgcgaggctgttaatgttaatacacttcatgcagctggggcgggttattcctttatgggggcgctattgtgcaagagtggggaggagcagtccattcttaaagaggagccaagggtaagagaggtgctcaagtgtccaaatgcgtgtggggcgattacaactacccaaaggggggcgattccttcccttgcgaggagaggggatacacttaaactgagcaaaggcgcataggatcttttcagcaaaatgcgatcatgagttcggtttcttcctctaatgtgttaattttcctgtgggatttggttggtatcaatttaggagggggtgcctcttgagtgtctttggggttgagtgtgattttttctcctatgcgctggtatcaggggttaccaaaataacgctttctttcaaatt

SEQ ID NO: 3603 - DNA, 552 bp, Glycine max
  unsure (1)..(552): unsure at all n locations
  Clone ID: PAT_MRT3847_10325C.1
aggtcgatttcagactgatatttctggagttgctggtcaatagccgcgcttccgtcgacatccttgtcgttcaacactcggagctgtactggagaaatgtcatctgcgaagcattgcaccgtccttccatctatttgcctcaaccgcattctgaaggcgtcatgatacagctgcaattcggcgactgctgtgctcagagtagtcacgtccagctcaggggtccgtaggtagaaggtgtgattccaatggcttgggtgctgtagcgattttgataagaaccaagtttggatcggtagcagaggcgcatcaccgagtactgtttgctgctctgcttggaattgaggaacattgtgtggaacgagtttcaccataacgttgtcatgaataccacgaatggtaagggtggtcgaaaatatctcgaacagtgacctttcgccgatctggtggtggattgggctgcgagatcanagcagaatactgtctcccgctaacctaacagatcatcatcaatccgatcgctctgtnctagtgctgatgccataattacacagt

SEQ ID NO: 3604 - DNA, 1124 bp, Glycine max
  Clone ID: PAT_MRT3847_103260C.1
aagaagaactttgctagtttcatgctctcctattagctccctcagaaaatctctcaagcaatttaattcttagttctatttatcttatctgagcaaaaccattttctcgcttcataagatcagaagagataactatggcaaagtcatctgagctggccattgaagagctgaagaagcttctcagagacaaggaggaatttgatgccgtggcggctgcaaaagttgaggagcttatagctgagttgcagggatgtggcccgcgtccatatgagcctgctgtgcaaagaatcgtagacggatttactcacttcaagatcaacaatttcgacaagaactcggatctgtacagccaacttgctaatggccaaagccccaagtatctggtgttttcttgttctgactctcgagtgagtgccactactatcctcaacttccaacctggagaagctttcatggtacgcaacattgctaacatggtccctccatttaatcagctaaggtacagtggagttggtgcagccattgagtatgctatcacggctcttaaggtgccaaacatcctggtcattggacatagtcgctgtggtggaatccaaaggcttatgagtcatccagaggatggttcttctccctttgacttcatagatgattgggtgaaaattggtttgcctgccaaactcaaggtcctgaaagaatacgaaggctatgatttcaaagaacaatgcaaattctgtgaaaaggagtcagtgaataactcactagtgaacctgaagacatatccatatgttgaaaagggaataaggaacaagaacatagccctgttggggggttactatgattttgtgataggagaattcaagctttggaagtatgagtctcacatcactgaacccatttccattcctctctgtacccattagtaatggacgactcaaacaaactttgctaccactcactaccagtttatcaaagttcttactaaaaagttgtgatgtacatgtgtgtgcttttatatccctaaataaatagcatctacttttgagattccaaaataatgtattttaagaattatcattactaaaaaaaaaaaaaaaaaaaaaaaaaactcgagactagttctctcc

SEQ ID NO: 3605 - DNA, 574 bp, Glycine max
  Clone ID: PAT_MRT3847_103261C.1
tgggtgaaaattggtttgcctgccaaactcaaggtcctgaaagaatacgaaggctatgattcaaagaacaatgcaaattctgtgaaaaggagtcagtgaataactccctagtgaacctgaagacatatccatatgttgaaaagggaataaggaacaagaacatagccctgttggggggttactatgattttgtgataggagaattcaagctttggaagtatgagtctcacatcactgaacccatttccattcctctctgtacccattagtaatggacaactcaaacttggcaccactcactaccagcttatcaagttcttactaaaaagttgtgatgtgtgtgcttttatatcctaaataaatagcatctacttttgagattccaaaaataatgtattttaagaattatcattactagatctcagtgcatttctgtacgtgcttaagtcaaatgccaggtcatttgtatttgagtcaaacaaacgatgatgagaattctagttttagatagatatgttatagtctagcagaacacccataatatatgacttctattttatgttaagtatatttt

SEQ ID NO: 3606 - DNA, 528 bp, Glycine max
  Clone ID: PAT_MRT3847_103262C.1
gttttatgctctcctattagctccctcagaaaatctctcaagcaatttaattcttagttctatttatcttatctgagcaaaaccattttctcgcttcataagatcagaagagataactatggcaaagtcatctgagctggccattgaagagctgaagaagcttctcagagacaaggaggaatttgatgccgtggcggctgcaaaagttgaggagcttatagctgagttgcagggatgtggcccgcgtccatatgagcctgctgtgcaaagaatcgtagacggatttactcacttcaagatcaacaatttcgagtatactttaacttacatattaactcttcattattatgcttctctattaataatttctctctgtgattctgacattttttattacgatatactttgcaatttaattagattcatgcatgcttctttttcttatatctggcagcaagaacctcgatctgtacagccaacttgctaatggccaaagccccaagtatctggtgtttactggtctgactc

SEQ ID NO: 3607 - DNA, 348 bp, Glycine max
  Clone ID: PAT_MRT3847_103263C.1
tgaaactgaggtgtatgccatttatactgacggttctgatgatgagctgccggattcagaacttaatggtactaatgacactgacgaatgtgattccgcgtatgatacagattaagagtcatttatggttgttttgtctgctttaattgcttgcgaatagtttcaagggattgccgcatctgagacagggtttagcaaagttttgcatagtggctcagatgctggacctaaagctgtcaatatctaagctcccaatgtataaccacttgcttgtatttctgatacatccgaaagttgtgaatgggcactctactttcacttgctgtgattactagcatatcactacta

SEQ ID NO: 3608 - DNA, 405 bp, Glycine max
  Clone ID: PAT_MRT3847_103264C.1
caagagcgctattacgacagattgcccagtacagacaagacttggagaggtgaatgctacacaagatggcgcaccgagctctggaatggtgccaccgtgtgatgaatctttcctgtactcacgttgccaaaagcatagagatatcaagtatggcaaacgatctcttgcagtaagtactagacgtagagacaaatgatctcttatgacaccacgattgtcgagagggatgaacgtctgccatatgacggcaacgtcaacatcgcattcaacagaaactcccttacataatcacaagagctagtaagatataatattgaattccacgtggagctgcctctgaaatgacaaccactcgcgacatgtaaaaagagatcggactcgggaagtatgagatatctacatata

SEQ ID NO: 3609 - DNA, 343 bp, Glycine max
  Clone ID: PAT_MRT3847_103265C.1
aattccgggtcgagcacgcgtgcgacctgactctctctattacagtcttggatgcgcacgctctgtcatgaaccgtataacgagaccaggcatacctgaccactttcacaaatacctaaaacccggtgcgctcggccgcatacgggactctagcatcagcgccagatctcaccgccttaactagcctcctccgccaccagatctctatccagagctctgcctattcgtagccgctgcctgactccaaccaggctgaggccaccggcaccgccgacgataccggctacccgttcttactcgctaggatctacggcccgcgctgaccgcagcgggagaagctcat

SEQ ID NO: 3610 - DNA, 227 bp, Glycine max
  unsure (1)..(227): unsure at all n locations
  Clone ID: PAT_MRT3847_103266C.1
cttcncgttgaccaaggagnacattttgaagtngctggncnancacgancagcatattnggtggtgtacngntantttggaagcatanngcaacttgcantgatactctccttagcngnactagngagggggcttnatgnttcggggcaacanttcatgatgggttgtgaggagaagcgacanngacganaggggtggnttccagaagggttntcaccnangaaccg

SEQ ID NO: 3611 - DNA, 244 bp, Glycine max
  Clone ID: PAT_MRT3847_103267C.1
cgaaatccatgaatatggacaagtcttagggcgtgacgttctactaagtatgctccactctcctatgcgctttgtgcctctgggcaaaaactagactctgtatagacctctacactttgatgggtgcgctgttggccttcaggatgcaacaagcgatcatggaacaagagcggcacagacaattgcaaaagtggggactgaacaaaggctctgaaccttccaaagagccatctggatgaaaggc

SEQ ID NO: 3612 - DNA, 249 bp, Glycine max
  Clone ID: PAT_MRT3847_103268C.1
gtcttcctccgtcacctcgtggccacgtcggtcaaatttggtcgctctgctacacgctctatggcaacgtttgatcgtacgaaacctcatgtcaatgtaggtacgattggccatgtggatcatggtaaaacacgctcacagccgcgattaccaaggttctctcggagacaggtggggctgaattcacgagctatgcagatattgataaagctcctgaggaacgtgcgcgtggtattacaatttcgacgg

SEQ ID NO: 3613 - DNA, 169 bp, Glycine max
  Clone ID: PAT_MRT3847_103269C.1
ggctcgagacggctccaaaaacacctatattttttggcgcgcgaccctacgtgccctgaggaggtgtaaagcaaagtcaccctcttgaccgcaacgaccatgggcatagcggtgaaaagttttagcgacccgctacacggagtggtccacatccatgatatggacggaa

SEQ ID NO: 3614 - DNA, 293 bp, Glycine max
  unsure (1)..(293): unsure at all n locations
  Clone ID: PAT_MRT3847_10326C.1
canatattttanttatggccatatatttntcnnnggacaatggtaattacatttttaaaaattatataattganttaactattttagcaactactagacccaagttttgcattagtcatcagttaacaaatgttctaaaatataatttctnctaaaattaatgtcttcattattcacaacattgtctttactaaaagcactaaattgaaaattganataaaatttggcatagggggagtgaatcaattannattaaggtaaatagtcatttttacttttaaagtgtaaggngt

SEQ ID NO: 3615 - DNA, 561 bp, Glycine max
  Clone ID: PAT_MRT3847_103270C.1
aggtggccttatcctttccttgacttgtcatccccatacgcccccttatggtacgttcataaattcaatgcataaccaccactcaaatagtatccgaaaaattaaaaagtaactttaccactgattgacataagcttatcctttcatatgtgagcatattgtttcttatatggggacgctgaaaacgaaactagaactttttgccatgaaattttggtcatggacttcaactttgacaaacttaaaaataaacttgcaagcgaggagcggtttatcgtgtaacattgcatgtgcgtcttataggtctctgcaggcggacgagtgataatgaagttgattgaggggaggaaaaatattagcaacacaccctctaatacactattattaactagaatttgttggaaatcacaaaattatgtgggtctcacttatttaataaacttcacttatagttttgtaattttcaataaattgtaatcaatgataaaagtgttaaaatgagtgtattgctaatactcctctctagataaattaaaatgcgcaaattcagataatgacata

SEQ ID NO: 3616 - DNA, 444 bp, Glycine max
  unsure (1)..(444): unsure at all n locations
  Clone ID: PAT_MRT3847_103271C.1
acgagcctaaagtcttcgtgagagggaccaaggacctctccatcaacgcctccaagactagatacgttgcctctccattgcaattcatgtggtagagacgatctcaacgggcgcgttccatgtcctgagggagcttgcactgctgttggaagcgccacttagggccaaatttagggtgcagcgggggcttgccgtcaacaaggaaaaaggaggtgtcctcgtcatcggatgcgaggaatgagtcattgtgcgtgaagtggaagatggtgttggcggngttcttggagcaggttgggttgtagaagttgcgattcttgggtactgtgactggagtggttccctttaacatatttgtaacactgcttcttctgtgaggcatcaatggcgaaaaaagctntgtccttctctctgccttccagtgacctcaccaacaaccacttttct

SEQ ID NO: 3617 - DNA, 400 bp, Glycine max
  Clone ID: PAT_MRT3847_103272C.1
agagacatttctatttacctcacagttactgaactagggacaccctgacaagctctgcgaccaattctgcgatgctgcactccacgcttgcctggagcaggacccacacagaaaagttgcctgagaaacatgcaccaaaaccaacttggtcatggttttcggagaaattacgatcaacgccaacgttgactacgagaagatagtgcgtgacacctgcagcaacatcgactgtgtctcaaatgatgtgcgactggatgcctgctactgcaagggcctagacaacattgaccagctgagccctgatattgctcagggtgtacactggcaccttaccaaaatacctgtatatatagtttgctatgaccagcgtcatcatgtatgttatgccactgatgaaacc

SEQ ID NO: 3618 - DNA, 304 bp, Glycine max
  Clone ID: PAT_MRT3847_103273C.1
acatctctctatatatagcacacgtattaatttttttacccttcttccaaaggaaatggcagcataaattcataacctggactgcatcatcacattcacattttaataccttctctttctcccagtctctcacacacaacatttgaagaataaaatgtttcacatttattctctctctaaattcctttcatctacattctactcatctcaaattgcttgccacattattcttttattcttctaccataccataaatgtggtacacatatgacatttttcattttctcatctctaaactttttta

SEQ ID NO: 3619 - DNA, 232 bp, Glycine max
  Clone ID: PAT_MRT3847_103274C.1
atttgagaaatataaggttctctgacaagaatgaagaggagagacattgggtctcagaaacaacaagaggttgttctgaggttgaaggattgggcctgtccaagaaaaagacacgtagccatgagcctgggatttttgttgtcactgctgcactgggcctcttgacaaacttcgaagatatctacagattatgggctcttctttctaggttcctggatgctgactttgtgga

SEQ ID NO: 3620 - DNA, 286 bp, Glycine max
  unsure (1)..(286): unsure at all n locations
  Clone ID: PAT_MRT3847_103275C.1
cacaattctcttcactccaaattccacacnncatannagaggcnncaacctcactagtaaccccttaaggccttctttcttcaaccnnctaaaacaccactctcctttgcataacttccaaaatgtccctcttctacacttccaatttanctcactgaaccataaaaaaagcctctccttaaccttctcttcagagtcttctcctcacttcattaacctatttccagttaagcctaaganacctcaccaccccattaagttcaccgcagaaaggttcaaacttttt

SEQ ID NO: 3621 - DNA, 214 bp, Glycine max
  unsure (1)..(214): unsure at all n locations
  Clone ID: PAT_MRT3847_103276C.1
aaattgtttagaatttacnccaacatttgatctctaaggaaaattggcatttaagaacttatttttgaaccgtcttggataataaaacttgaagtacagaacttaagtaggcaagatcagacagatttataacagttctgaaaatgaagtatcacactgcttttatgaaccaacccatttaaatccttccttctcttgaagtgcagcctcgtgc

SEQ ID NO: 3622 - DNA, 312 bp, Glycine max
  Clone ID: PAT_MRT3847_103277C.1
aaaacaaaaaagggattgatttttgaattaccacaggggttacaaaaaaaattccccaaacttcaagcttaaaaggcatgacgggggaaacaaccccttagggaacccatcggacgggctttactaaaaaataaacccttgggaggagttctggaaacatgatgagggtggggggctaaagctgaacttctaatttccggagcttttttctgagccaatctcagcttggtcataatcttatccatagaggaggctcgctttttttccaacttcatctccagtttttgttttgcggcctcagtttttgccttt

SEQ ID NO: 3623 - DNA, 455 bp, Glycine max
  Clone ID: PAT_MRT3847_103278C.1
tacggctgcgagaagacgacagaagggctctattctttaactactacatttttataatcataatttgtagtgactttttcttatcctcaagtaaaataatacgatgaagtagacggaataatacataaataaaacaaaatccgcaaagtttttgagttttaaaaataaatttgggaataaatatcaataaattataattaaataaacaaatttaaataaagataaaagaagcaactttatgtaaagatgtttgtgccgtcgtatgttagtatataatttaattttaatatacttattagtctaagttttattatcaattaattaaaaaatttcctgaatataatttcaatatattattacaaaaataatattatgaattgccgttgttaactcttaaataacaattcaaagtagatctctaattaatttcaaagctttacttaaggatttttttt

SEQ ID NO: 3624 - DNA, 309 bp, Glycine max
  unsure (1)..(309): unsure at all n locations
  Clone ID: PAT_MRT3847_103279C.1
actcataattctactcgagctagaagccatcaacttgcaaccccttcatcaggtcaacatttcaaacctttctaatagaagccttnannttggcgtagctcctccttccctggtggttggtgttttctacaacataatcttctttcaaatatggctttatacttacactattctcctactacttattgcggggctccaacctcacctacatctcctccatcatgtcctacaaccttcttacaactccctactacatattcaactacatcaatgacaccgttcccatcaaaaacatcatcatctcctacc

SEQ ID NO: 3625 - DNA, 334 bp, Glycine max
  Clone ID: PAT_MRT3847_10327C.1
tttgtttttttttttttttttttttttttttttttttccagtaatagcatttaatattataagcggagattcatagttcagattagccgaactttatacagaagggaccaattaccaaacattaaaaaataaaatgagggaagcaaccatgagcttaacacacccatgacaggggcaaaacacttgaacttgctgaaaggcaagacatgaccactttattctaaggaggttggggtaacacataacgccagagggcacgaaaaccatgacagacataatacataagtgtttagctacacattaataggagatcattatgcctaattaagggcta

SEQ ID NO: 3626 - DNA, 545 bp, Glycine max
  Clone ID: PAT_MRT3847_103280C.1
cttggtttttccaattttcagaaacaacttgccaagctcttcaatttctgccacagtaaaatggagaatggtgttccaaggaatgcttcagttagttggatgcatggagatgggagagaaggatagagggattgggtcaacaagcgtgtgagcattatttgttgtacttttgctccttaaatgcgctgctgtcgcgtgtgcgcgagtggggtccggtgagttggggaaattaataccataccactggcttgctaattgatccacaattggcaatatttggcagcaataatacatatagacgtgcttccaacatccaagcaagttgccaattggcactgtccttatccgagactttcagcactcactcagtatccggcgtgagactcaaccctacctcgtcaacacaccaaaattatcggttaaattattcacttgaattttaaaaattgtttctattttaagatttagtttttatattaaaaaatttgtaagttttataggatattttgaaattgaaaatagagaaattttgtttgagatgtaaa

SEQ ID NO: 3627 - DNA, 161 bp, Glycine max
  Clone ID: PAT_MRT3847_103281C.1
acgtgtccgcacacgcgtgcacacgtttgagagaagacaacgagaaggtgctactagtgtgtgagtgctatatgctagaacatcgtcatgtgattatgaaggtgtgcgtttgctttgtggctgcactctcaccggaaacatggttcctccattgttaactg

SEQ ID NO: 3628 - DNA, 149 bp, Glycine max
  Clone ID: PAT_MRT3847_103282C.1
ttgaagcaagacacagtcagttctgaaaatttgattcttatatctatttttattatttcgataagccttacttcaggaaattgtgtagataggaataggaagaagccttctgttctggtgcctggagcatgccaccgagcttggagttg

SEQ ID NO: 3629 - DNA, 870 bp, Glycine max
  Clone ID: PAT_MRT3847_103283C.1
gatcggctcatgctccttcttttcttcttatgacatccaagtgcatgattagaaatcaggtgaaaaatcttttttgagacaaaagtacttttataaaagtatcagaacttttatttttgtttttattcgttggattgcattggaatgcgtatcataataatttcaagtgtaaattaaacgtatatttatttgattactagggttacatattattatacacatatttatgtctatatgttttataaagtttggttataaaattgcattgtaaggttatatattatggacaagctaagccagtataaacgtgtgttcaaccaatttgatgagaatggagacagcaagatatcgccgtcagagctccggcaatgcgtggaggccattggcggggagttgtcagagaaggacgcggaggtggcagtgacattgctcgacagggacggcgatggactggtggggtttgaagattttgtgaggtttttggaggaagggaaagaggaagagaaagaggatgacttgaaggaggcttttaagaggtatgagatggatgggagtggttgcatcacacccaggagtcttaagaggatgcttagtaggttaggtgaatctagaagcttagatgagtgtaaagttatgattgctagatttgatcttgatggagatggggtgctcactttcgatgaatttaaggtcatgatgttgtaataatgtgtgtattgatttgttaatttcccctgttctttaattttactagtgattgattatttatttattaattaactttttagctcttgttgtttaagaggaaataaaatgaaaagagtgggagaaataaatttaaattttgaattgaagagataattctcataa

SEQ ID NO: 3630 - DNA, 2497 bp, Glycine max
  Clone ID: PAT_MRT3847_103284C.1
ctacccttgtcacaaacataattatgagtctctcataactcgtccagacaaatcaacacaaagtatctgttcttcctctttttctttttatctctcttataaaagagggctagatagaatacaacatttcatttctcatcgatggctttctcttgtaaaattgagtgattcatagaatacagcatttcatttctcatcatcaatggctttctcttgtaaacttgacagcttcattctctctgcctataaaccccaaaactccattctcccactttcaatccaaccttcctccttccttccatctccttcttctttgaagcctcagaagcttcccttcagaattcgctatggttctaccatcagagccacgtcatcatcctcaaccccttccgcaaccattgccgaacctgatggcattaagattaaatcgattctaaacaagccctattgatggacacaggtactggatcatgttgaattcctcaatcacgtgaacaagttgaattatgtatcaaggtttgcactatgattaggggatacgctaattggaaggctgcagaaatactaaaccaaattgctgttggatttagtaactgaaggatgttcattgaataggaaggtatttgttcaatgtaagctatttctcttgtaataagaagtggaaaggaaaatggtggatttattatgagtgcaagctataatcctagcggacctgaatatgattggggtattaagtttaattacagcagcggacaacctgcaccagaatccatcactgacaagatttatggaaataccctgtcgatctctgtgataaagatagctgacattcttgatgttgacatatcaaaagttggggttacaaagtttggaagcttcagtgtggaagtaatagacccagtctctgactatctggagctattggagacagtattcgattttcagctaatcaaaggtcttctttcacgtccagattttaggtttatatttgatgccatgcatgcagttactggtgcttatgctaaacccatcttcgttgataaactcggtgctagtctggattcaatttcaaatggaatccctttggaagattttggacatggccatcctgatcctaatctaacatatgcgaaggatcttgtcaacattctgtatgctgaaaatggacctgattttggagctgccagtgatggggatggtgatagaaatatgattttaggaagaagtttctttgtaactccttcagactctgtagcagttattgcagccaatgcaagagaagcgattccatacttcaagaacggtgttaagggtcttgctcgatcaatgccaacaagcggtgctctggaccgtgttgctaaaaaattgaacctccctttctttgaggtccccactggttggaaattttttgggaatcttatggatgctgggaatttgtccgtttgcggggaagagagttttggaacaggttctgatcacattcgtgagaaagatggcatctgggctgtcttagcttggctttctattattgcacatcgcaacaaagacaagaatcccggggagaaattgatctccgtatctgacgttgtgatggagcactgggcaacttatggaaggaatttcttctctagatatgactacgaggaatgtgaatctgaaggtgccaataagatgatagaatacctacgagatattttgtctaagagcaagcctggtgatcagtatggaagttatgttctccagtttgcagatgattttacatacaccgatcctgtagatggaagtgtggtatcaaaacaaggtgttcggtttgtttttacagacggttcaaggattatatatcgtttatcaggaactggttctgcaggggctacggttagagtgtacattgaacagtttgaaccagatgtctctaaacatgatgttgatgctcaaattgccttaaaaccattaatagatttggcaatatccgtgtcaaagctcaaagacttcacagggagggagaagcctacagtcatcacataatggacaattccacaaccacttgatcaagttgttatatgttccaaggtgtgctctaagttgagtgcatacgcaggttgtttattgcatgcctatccatatctgagctcgctcgagttcggtcacttttggttgttcaagaattttggagcgataggtcccctgtaaaatatgctacttatatatttatgtgcaaagtatgaagcaccgacgtgcaacaaaataataataaaaaagaatagtttgctgctctaaggagctaggcctttcaaagttttgtccaattttttctaagtttagaaactggagttacttctcatcaagcagaataccaatttcacgtatgttccaaaacttctttctctgttatgattagtagtcctctttgattcctgatgtctctaggatgccaaaagtatgaatgttattgtcaagaatctattttttagcacttgagatgaaagcagagacaagg

SEQ ID NO: 3631 - DNA, 135 bp, Glycine max
  Clone ID: PAT_MRT3847_103285C.1
aatacttattattacaatttcgactccttggaaagataatgatattcttctctttcatgtaggacaatccgggggacctattatcttggaggggtgggtacttaccagcgactaacactgaataaatcctacatg

SEQ ID NO: 3632 - DNA, 687 bp, Glycine max
  Clone ID: PAT_MRT3847_103286C.1
ggctcgagagaatacagcatttcatttctcatcatcaatggctttctcttgtaaacttgacagcttcattctctctgcctataaaccccaaaactccattctcccactttcaatccaaccttcctccttccttccatctccttcttctttgaagcctcagaagcttcccttcagaattcgctatggttctaccatcagagccacgtcatcatcctcaaccccttccgcaaccattgccgaacctgaaggcattaagattaaatcgattccaaccaagcccattgatggacaaaagactggaaccagtgggcttcgaaagaaggtgaaagtgtttatgcaagacaattaccttgcaaattggatccaggctctgtttaattcattgccaccggaggactacaagaatggtttgttggtgttgggaggtgatggtcgatactttaatcaggaagctgcacagataataatcaaaattgctgctggaaatggtgttggaaaaattctggttggaaaggaaggtattttgtcaacaccagccgtttctgctgttataagaaagagaaaggcaaatggtggatttattatgagtgcaagccataatcctggcggacctgaatatgattggggtattaagtttaattacagcagtggacaacctgcaccagaatccatcactgacaagattta

SEQ ID NO: 3633 - DNA, 1454 bp, Glycine max
  Clone ID: PAT_MRT3847_103287C.1
tcttgctcgatcaatgccaacaagtggtgctttggaccgtgttgctgaaaaattggacctccctttctttgaggcatgctttatttttcttacaatttctttcttcttaaattattaatataaatgaaataggcttcacatatttttagacagttctgaaataacaaaagatggacccgggattcaggtccccactggttggaaattttttgggaatcttatggatgctgggaatttgtcggtttgcggggaagaaagttttggaacaggttctgaccacattggcggcgaagatcgcatttggggatacacttcacgtttttttaaactttaattaattttttcaattatattttctaagctagccactttgatgtatcttgaaattattagaattctcaaagacgttaaaatttgagatcagcaacgtcagcattctgcccatattattgccaaggagagaacttaaataaatctccttagacgtttgtaatgttgttgccatataaaacatgtattacattttatgcctccactgggacaacctcaataaggaagatcacataaaaagtaacacacgttatatttttattgagaagcagcaccacaagcattgaagaaacttatcttagttctgtgttgtttaattgtctgtttgatttgagtggtttccaattacagggctgtcttagcttggctttctattattgcacatcgcaacaaagacaagaatcccggggagaaattgatctccgtatctgacgttgtgatggagcactgggcaacttatggaaggaatttcttctctagatatgactacgaggaatgtgaatctgaaggtgccaataagatgatagaatacctacgagatattttgtctaagagcaagcctggtgatcagtatggaagttatgttctccagtttgcagatgattttacatacaccgatcctgtagatggaagtgtggtatcaaaacaaggtgttcggtttgtttttacagacggttcaaggattatatatcgtttatcaggaactggttctgcaggggctacggttagagtgtacattgaacagtttgaaccagatgtctctaaacatgatgttgatgctcaaattgccttaaaaccattaatagatttggcaatatccgtgtcaaagctcaaagacttcacagggagggagaagcctacagtcatcacataatggacaattccacaaccacttgatcaagttgttatatgttccaaggtgtgctctaagttgagtgcatacgcaggttgtttattgcatgcctatccatatctgagctcgctcgagttcggtcacttttggttgttcaagaattttggagcgataggtcccctgtaaaatatgctacttatatatttatgtgcaaagtatgaagcaccgacgtgcaacaaaataataataaaaaagaatagtttgctgctct

SEQ ID NO: 3634 - DNA, 105 bp, Glycine max
  unsure (1)..(105): unsure at all n locations
  Clone ID: PAT_MRT3847_103288C.1
ctagagcggaagaaaatcccatatatcccacaccatgtcacttgctagctggctgatatcggatggcgactcngatgactccatggtatagatgttcttccaagc

SEQ ID NO: 3635 - DNA, 215 bp, Glycine max
  Clone ID: PAT_MRT3847_103289C.1
cggtgcaatcatataataatttcatgctgcaatctgattcagaggcatctaacaagggatcaaaatttatttagaagatggagtcatcccctcgtcttagggaacagagtgatgaaccacataggccactcgttctacacaacacattataagaaccttaacaaaacacatgctcaacaagtgagccccatggtgacaataatatatgatacccc

SEQ ID NO: 3636 - DNA, 227 bp, Glycine max
  Clone ID: PAT_MRT3847_10328C.1
cagccactttcccaacccaaaaccttttttaaccctttctttctccatgggaaaccatcaagtatgagggggccaccacatcctcaccaaactcttcccttatcgccgccacttattccacttcttcaacgccgtcctccagcctacggtgcctgagccccttacctacctagacggttttccccaccccgatccctaacacgacgagacgattcctttccatcccc

SEQ ID NO: 3637 - DNA, 197 bp, Glycine max
  unsure (1)..(197): unsure at all n locations
  Clone ID: PAT_MRT3847_103290C.1
gtacangcctgctaggtacacgagtccnnggaattacccgaggtcgaacccaacgcgtcnttaanaattttttttcccaaaaaaaaaaaaaaaaaaaaggggtcttggtgatntgatgggtgggaaacaagaaaggatcaaaaataaccaccgcaatgtatcaagaaaaaagttctctttccgttccctaaatggaa

SEQ ID NO: 3638 - DNA, 303 bp, Glycine max
  Clone ID: PAT_MRT3847_103291C.1
ggctcgagtcgaattttaattttcaccacagattaagcgcagcctcaaacaaaccaaatggaggggcagggttacaagtataaccacgccattgagatcagtggtgaccttcctgatggtgatacgtacatttgtgcgcatgcaccgtgtagaattgctgatgctgaatccatttctaaggactctgaataaagaacaactgatatgcgaaagcttataatgtccatggtgctttttcttatgaagctgatcactgcagagcgtggagaatttaaagataagagtgatgctatatttgctgat

SEQ ID NO: 3639 - DNA, 257 bp, Glycine max
  Clone ID: PAT_MRT3847_103292C.1
ggtccggaattcctgggtcgacccacgcgtccgcttccgcgtccgaataaaattaagaaattttgatggtaaccatgtcgtgcagatgaaattagtaaaattatgcgtgaacgcattgagcagtgtggtacggagagaaaaattggggatacgggggccgtacttgaaggaggggacggtgttgctcgggtttgtggggtggatgaagggggtggggggggagttaggggaatgggagagggggctatgggggttgg

SEQ ID NO: 3640 - DNA, 318 bp, Glycine max
  Clone ID: PAT_MRT3847_103293C.1
accacgcagcaagaaaaatgaatatcgaacaggatgagcatggactcatcacatagaatcaggcggggacatgtctttgtacgggctgacactcactaacgaccgcgcacacgaagctgccatggccatgctgctaacactgcccacgcccaaactccgaagggaccagatcgactgtcatcgatgactaattcttcaacacgcgctattgattgtaccactagcggtgcaccaactgacatatatatactgaaaaaatgagcatcatgagaggactacacacaaagtctttactgccgcggagagagaccgatatga

SEQ ID NO: 3641 - DNA, 253 bp, Glycine max
  Clone ID: PAT_MRT3847_103294C.1
gaagacagcaagataatgatcatggttcattgaaaaacaacccataaatgtaaaagttaaatcaaatctgaatggcatcacttactagctggtagacatgatttttggacattggatataccctttagaagatgacccattccagggaagtgcaaatattctggctgctcagttagtattagtcagtttggactaaagagtgttgggcattcaattctgggaaccagagattcttaaagtcctacattttggg

SEQ ID NO: 3642 - DNA, 272 bp, Glycine max
  Clone ID: PAT_MRT3847_103295C.1
ctcaattgaaactatgaaatcaacacacgccatgtgtgacgctctgaaaggcgttacataggccatcttgcaaatgaattggcaggtgtacatgccataattgcaaaaaagcatgcaagtctttgagagacagaatgagaagatggaatggacatacgagatgatgggcgatgccgtagatgatgcttagctaggagatgtagatgaagaggaaactgtagacctttgttaccaagtccttgatgtgattctcattgacatttaccaagatc

SEQ ID NO: 3643 - DNA, 208 bp, Glycine max
  Clone ID: PAT_MRT3847_103296C.1
catgtacaccgacgaactcgtcaatatgtttattgcccgcgctagtccatggttccagagaggcctaaccatacagccgatggccttgccccacaaactcagaaaggcgaacacggaacctctctcttctgagaatccatatccagcacgcacgcacctgactaccacgattattgctcctgatatgattggcagcattattggagta

SEQ ID NO: 3644 - DNA, 545 bp, Glycine max
  Clone ID: PAT_MRT3847_103297C.1
ggatatcaggggagatattattcaatgagttagttgtttgggatgggggaagaaaaagagattttggaaaaaagtaacagaaaagttgaagaggggtcatgttgggacagacagaaaaacaggataagagcgtttttgtgaagggggaacgaggtctcaaaaaggttcactgctagggctatagttttatttaaacttaaaaaacactacagccgttaaaaatgggtattctttttcctttgcttttggcttggtcttcgggttattatttctgctcacttttgttgctgcgctgcttgatcctgcctctgtcctttattgcaatgcaaattgcgggtagtactttgcttgtagctaccgggcccagtacaaaatccttcaggaatcaggagtcttatctgtatgcattgttggggttgagcaagctttgaatagtttagttacttggattttcgagggcctcaggttcagatgccttaacttcagaaggattgatctggtgtgcatcttgatttataagctgtgtttggaattcttttggattt

SEQ ID NO: 3645 - DNA, 565 bp, Glycine max
  Clone ID: PAT_MRT3847_103298C.1
ggcaaacaaatatcatctttattattactttttgataatatgataaaagtcaacaaacttatacatgatagtttgtgattgagtgaaaacataaacaaatatttaacacttctagtgcataatgcttcttccttcatcacataatgactaatgtttaagattttttttacacaaaccaataaaacaagtattccaagagaattaatatttattagaaaataattttattaaaatatccttgttctccctcttaattttaataaatatattattaagtcttcaagacaatattatttattaagggtaaaattggaatagatgttttaatatctcattaaaaaatgagaacatcggtcaatttggattttttttaagactaaaactgtagtcattttgggacggagagagtattatatattcattactaattctttcttgctttatattttacagaatggagaaaattgccaactttgcttttctggggaaaaccatagtgtagcttgttctagtgtacaaaacataatccggtctcaaaatctgaatcaatcccagaaagaagcag

SEQ ID NO: 3646 - DNA, 909 bp, Glycine max
  Clone ID: PAT_MRT3847_103299C.1
caaatagataacatgcttgattgtaatggcatctctactcctatggtttcaagctacaaactcagtaaatttgggtcagaattactgcctaatgctcatcaatatcgcgatattgttgcttcatgccagtatggcaccttaacaagaccaaacatagcctataatgttaataaggtgtctgagttcatgtcctctcctctgcaatcttactagctgaccgttaagaggattctgaggtacctcagtggaactgtcactcagggcctgctattgcaaccagctcacatggatgctaaaatttctttacgagcctacaatgattcggattggggtagtgatcctgctgagatgcgttccacttcaggatcttgtatcttttctggttcgaaccttatagcctggagctcaaagaaacaaaccttggtggctcggtctgtgcagaagcagagtattaaggtttagccaattccacctctgatcttgtgtgggttcaatccttattgcatgagctcaatgttcagatttagcaacctactttgttgtatatcaatctgagtgcagtcatgattgcatataatcctattcttcattcccgaactaagcatcttgatctagacattcactttgttcatgagaaggttgcaaccaagtctcttgttgttcagcatatgccttccaatatgcagttggctgatgccttaacaaagcctctccctacttcaaaatttcttgacttaaggcccaaactcaaggttgtactatccttgagtttgagggggggggggggggataatagagtatgtgctagccttgttattgttagtgttagtcaaagctgacatggcattataatcacagttgtagcccacatggcaaagttagttactctcacactgtgtataaatacca

SEQ ID NO: 3647 - DNA, 267 bp, Glycine max
  Clone ID: PAT_MRT3847_10329C.1
ccaaataaaaaacctgggccggcttatttattttttgggattaaaatttcactttcaacaaaaaggcttttttgtaaatcattacaaatatattcaaaatctaattcatttagttggtctaactaattctactcctattgacactacaatggaaattaatttgaaattgcaacaaatataaggtgagcttttacaattccaaactttctattgaaagctggttgaaatatttattttcttaaccattattaaaccagacatttaatt

SEQ ID NO: 3648 - DNA, 269 bp, Glycine max
  unsure (1)..(269): unsure at all n locations
  Clone ID: PAT_MRT3847_1032C.1
tanttgcccaccngaaaccaacgaggaagcaaggaggattggaagcancggacgaaacaagggccacaaganaaaggggaacccggcgaaaacgcgaaagaacgggacgganaccaacagcagcaccagagaaaagggcggcaacggaaccggcacaaacagcaaaggaggagacgccgacaccganacagcangggagncccacaacaccaaccagcncaanagagccaccaaggcngacggacacgggaaaggaaaagccggaaagg

SEQ ID NO: 3649 - DNA, 215 bp, Glycine max
  Clone ID: PAT_MRT3847_103300C.1
ccacgcgtccgcaataactcatgcaagcccaatagttattgaatgttttggagtctatggtggtggtccagatattatgtcctttactatttttttttccttttactattggctgtagagtgaaacaatcatcttagtccatccatatgttgcattaccttgtcccaaacacatggatggactaagatgatgcaacatattttagccgttccttg

SEQ ID NO: 3650 - DNA, 362 bp, Glycine max
  Clone ID: PAT_MRT3847_103301C.1
ttcttgcgtacgctttatgttgcgcctatgcgtgggggaaggctcaaaaggatggctccattttccaatagcattgagcggatcgaaccagacatgatgccaaggtttgatcctttgagtaccactactgatggtgattttggtcatggcaatgatgtcccaatgattaaagttaaggccacacgtgctggtacaggctcgacatcaagtgacactacaactccattgatggaatctgggttgcagaaagacagagggtcaaccgatggatattttggaaggaggaattacgttgctcataactaaaatcatccccaatagaaagatttgttgtaggcatattgtttcactgctattaaatc

SEQ ID NO: 3651 - DNA, 1120 bp, Glycine max
  Clone ID: PAT_MRT3847_103302C.1
gccccggtatcgtcactgactctggccgatctgcgtgctcggtacgggccctggcagggaggctgttcctttggttttccgccgtccgagcccagctaaactggcttgcgttcctggctccgtcgtgctacaatacctttcttgcccccatacccctttgctcgatacccgagctgcccccgcaccactctgcacgcccgtcgaacctatcatgctcttctttagactcccccactggcaaggatcgtttgtcatggccgcccgaaatggacgggagccgcttccatggaggtttgggagctagttagtcggccgcacatgatagttggaatccaggaaggagaagaagcacgattttcattcttgaagggtggatacgttgaagattttgaaaatcaagcttgtatttcatcagaaaatgttgaagaagaaagagaaactctagctttagtaaatgcaacagaaaaggcactgcagttgcggaataactctaacgttctaatgaaagggagtgcgagatcaggagcggaatttttggcaaatcgatcttatcagggtctgaacatgtccagtgagaacacctccccagaaccatatctcattggacggaggggaagggcatctgggtacgaggatgagaagaacaaacaatgaatttttgaggcataaatgtggtttttgctttagattgtagtatgaaaatgagagttagtaagaaggtcagagattgacaagggaaagaagagtaatactccttggtgagctgctcgttcattttggctggtgacttttgtctggtacgagtttcttaataacccgcagttgtaaggatttcgaatgcttttggcaagcaagcttgctgcatggcatgatggaacttgcagttatcctttcacctttgttattcacggaaatgtatgtcttcctaggtttttctatctgttcaggaatcatatacaaataccattattactagcattaatcatatattctctttcgttatttttctcttttgtagtacttctcattatgctaggtggaggagagcgaggacttgaattatttattataattttgccactcattattcattcataatattatccttccactgttaaaa

SEQ ID NO: 3652 - DNA, 444 bp, Glycine max
  Clone ID: PAT_MRT3847_103303C.1
agcatacacaagctcttccattcattgtatttttttctttgcctttcaactcaaaacaatgggcttccgcttacctggtattagaaggtcatcttttgctgtaaccaaagcagcttccaaggctgtggaggtccccaaaggctaccttgcagtctatgttggggagaaaatgaagcggtttgtgattcctatttcatacttgaatcaacctttatttcaacaattactgagccaagctgaggaagaattcggatatgatcatccaatgggtggtctcacaattccttgcagcgaagatgctttcctagacctcacttctcgtttgaatggactataaatcatattgaaggagattgacatagattagttgaggcaaattgcacagaagacaattctatttatttatttatccttcttttgtaagtggaaagtgccatctaagtg

SEQ ID NO: 3653 - DNA, 200 bp, Glycine max
  Clone ID: PAT_MRT3847_103304C.1
tacggctgctagaagaccactgaaggggacacctctacggtccttcttctctctctagaatccgggttctctctctaaatttttcggggccattttctctctctttcttatctcggaatatctttctgagccttcaaacgaactttggaattctccagaaccttctcgtctttccgtcttggatcgcgatttctcaacaa

SEQ ID NO: 3654 - DNA, 345 bp, Glycine max
  Clone ID: PAT_MRT3847_103305C.1
gaaaaaaaaaaaaaaatttttttttcaaaaatagggggaaaaaaaaaaaattttccccccccctttttgccctccaagaaatttttttttttccctgaaccactcaaagataaaaaaaattttttaaaaaaaaaataaaaacccccccctggaaaaaattgatacaataaaacacccttggggccccctattatttgaaaattcctccacccccttttggcacattttaaaaaaggggttacttaaggggggggcactttttgtaatgggggtctccaaaccgggggggtgaaaaacaagctttttaacaagaggtttgtaaaaaaagggggttctttctttggg

SEQ ID NO: 3655 - DNA, 295 bp, Glycine max
  Clone ID: PAT_MRT3847_103306C.1
cggggaaacagagagtgatttcagtgagtgatcggtgttcacctgatcccagcataaccgtcagcgttgatcgaagaccatggcgatgatgaagatcgccgtcgggaaagcctgaacacgggacgcaagccttaggcgttaaatgtcgccttggctgagtctacctcatccctcatccgtctgttcgtcggctaaagatcaggtctcacctgatcgtcactttttccaaggcgtactgccagtcctgctggggagaactaggtgtctactgcgcattgaatcacgttccacatgt

SEQ ID NO: 3656 - DNA, 381 bp, Glycine max
  Clone ID: PAT_MRT3847_103307C.1
gcgtaggctttgcatccacccaataacaacggcagaagcttatgtccaggatttgcttaaaaaaaaagggctggaagagctagtggcatgtgaacaagatatggtggacaaggatctgagactggatgccgaacagcaactgctcgaataagaaaactttcccactattagtgaatgcagcgagcacagttcgggacatgctaaaacgactcaacgacactcaaaatggaatgcgggaccctcatgcacgtgtgaaacgtgaagcacacactggtgaaacactgaatgaaacctcccactaacatagcgaaacaaggaaacgacgcgatggcgcaaaaagctcagttcataggctcgagctcttgatcaaagtgccccaaa

SEQ ID NO: 3657 - DNA, 352 bp, Glycine max
  Clone ID: PAT_MRT3847_103308C.1
gaagcccccaaaaccctttaactatttttttttttttaaaaaaaagggggataaatggatgtttaaaaacattgacatagggggatttatacacggagatatacacttaccatggaaattttataaatgaaccacaaaagaaaaaaaaaaatttaacttctttgtaaatgaacaccttttataaagggtttatttaaacatacatttgatgaagaaaaagaaaaagggtattttaatatagggttacttcttttaacaatattagttaaattcagcttaattttccctggggagacgcatcgccctcaaacaaaaaaaaacaatgggggggggaaaaaacctttgttttttt

SEQ ID NO: 3658 - DNA, 402 bp, Glycine max
  Clone ID: PAT_MRT3847_103309C.1
ttttgaacgtcacttactgagattgaaaatggctttttccctatgtaatacatttggggtaagcaaaatgttgatgaaatataaatatctattcgtccaacatatgggtgtaagtgggaccttcctatcataatgaaccaattatcaaaaacgaaaaaggtatacattttagtatgtggtttatactagaaacatattcttaatagcatatgttatttgtcagtttattttgtctttttatcctgttttctaatccttttaatttttgtgagaagtacagatgttgttgttgcacctccctttgtgtacatcgatcaggtgaaaaactcaattacagataggattgaaatttctgcccagaattcttgggtgggaaaaagtggggctttcacgggagaaatc

SEQ ID NO: 3659 - DNA, 644 bp, Glycine max
  unsure (1)..(644): unsure at all n locations
  Clone ID: PAT_MRT3847_10330C.1
cacgcgtccgtttttcgatagaggaattgaaggaagccacaaaaaactttgacttgtcaacttatattggtcaaggctccatagggaaggtaccattcaaccactcaaaatgttgtttgaaactttggattttttttttcttttttcttattttaagggaggatatattactgaggtgggtgctacttttctaccaagttatcttaaggaaacaaaattgaatagattttagttttcaaatattaattgtaagtaaattattcttcagaatgaagggtttctttttgtcattgttaaatactaagttaactgaaaataagtacatagagtgcagaattaggaaactggctgtaaacctgaaaatgccaaaagtacttgagtttctggaatgttgcaatttctgaaatccttgtcaagatttcactaatcatatgcacataaagaaagtaanttgttttggggcctttactctttttttatggataaatgttaattgttaaatattangttntgttagcaaagggattttcctccttaataaaagtcaagtgatttaaaatgtatatatgtagaataggaaatctttgtcaacttatttttatgctcactgcnatgcctttttaagtcgtctgtatatacagctg

SEQ ID NO: 3660 - DNA, 344 bp, Glycine max
  Clone ID: PAT_MRT3847_103310C.1
ctctgtcttagtgaatacgggcaacgcgcggagcgaggcgggtcgcgacatggcgcgctcttccgcttgctaactcactgactcactgagctctgacagaacaatactgcgagctgtatcaaatgactcacctgctgacatcctgttttgcactcacacaacggaggacacagggtatatcatttctgcaactggccctaagactgtcccaaacccaaaaaaggccatcccgatgactatttttcataagattcgcgctccttactaacatgacaacaatggactctcaaaataaaggcctctaaaccctactggactgtcacaataccatacgaacacccctg

SEQ ID NO: 3661 - DNA, 232 bp, Glycine max
  Clone ID: PAT_MRT3847_103311C.1
ccagcagcaaccaaaatgataaattaatgaatttttttccacacagaaacaaaagttggaggggaattatgattcggcaaaaattgtgtcaccattaaaatcaaatttacacgtcgtagttttaggggctttaagacaaaacttaaaaaaaaaaaactaggtaaaaggagagttaataacttggcacattattggacttaacacttaaccttctttatggctttgcatagcg

SEQ ID NO: 3662 - DNA, 419 bp, Glycine max
  unsure (1)..(419): unsure at all n locations
  Clone ID: PAT_MRT3847_103312C.1
ggaagagaattttagaatgaggaacctatacaggaaagcagctactttacgttgctatgcagggagcagatgctattctgcatcggctgtgatatggagcttgttagggtgcttgcttttgtttcatctatattccaatattcatcacaaacacaaggaaggtagagaagtgccattgcatgtgactaatcatcctcagtcacgtgaactccaacaagtggaaggggagatcatccgactccaaccaaaggggaagaggtcccctcgggcagcaaaatgcagacataagcaggtcacaggaaatggtagttattactactaccctgngagaatttggttggatactgatgganatcctattcaagctcatggacggngcattctatatgatgaaagatcaagaacatactattggtatg

SEQ ID NO: 3663 - DNA, 1457 bp, Glycine max
  Clone ID: PAT_MRT3847_103313C.1
catatatcaaaggatgattctatccaaagcgtccttgtgggtctactatttcatttggctgggttctattcagttatcttcgaatgctgaccccagccccagagtgtgcttcttcgttcacaacacttcactcattaacttttcattctccgatacgccactcgcttcatatgcaagcacagcctgaatcctctatagatcgaaactgttaagtttcgacaaacttgacacaaggacaccatcaacatcttgaagagctcgctgtgttgttcgttccttttggccccttcaacgaaattgtactaatctaagatttgcgattttttgttcaaattaaaatgtccatggaagctcaacagattctttccagattctgtccaaaaccatcttcagtgccatctattccaattgtgaaacaacaattctctccaaagttccctcgtttaccttcttcatcgttgtatccttctagtcaatctcagaatctcaatgttcctagtggagctttccatcctatcagcattgtgcacaaagaagtgtgttctagttcttgcaagaggatatggtgcagcagcagcagcagcagcactgcagaaccaaaggagggccatgaggtgagggctcaggtcaccgtgcgccacgcgtccgccacgcgtccggtttctggtggaggatccaacttcagagcaattcatgaggcctccaaaaggggatcacttcatggagatgttcttgtgttggtcacaaataaaagtgattgtggaggtgcggagtatgcaagaaataatggtatcccagttatactgtaccatatatcaaaggatgaatctaatccaagtgaccttgttgatacactaaggaaatttgaggttgattttattcttttagctggatacctcaaacttataccagtggaattgatccgagcttacaaaagatctatattcaacattcatccatcacttcttccagcttttggaggcaagggattctatggcatgaaagtgcacaaagcagtaattgcttctggagcaaggttttcaggtcctaccattcattttgttgatgaacactatgatacagggcgtatccttgcacagcgtgttgtccctgtgcaagccaatgatactgtagaagagctggctgcaagggttctcaaagaggagcaccaattatatgtggaggtggtggaggctttatgcgaagaacgtgtggtttggaggcaagatggtgttcctctcatccaaagcaaagaaaaccccaatgagtttcgctgataatcatttatatggggattttggttggagattttgcatatgaaattttcgcattcaccccaaatacagttaatgaattgtaattattaggtaatttctggtgcactcatgatgtcacatatccaagaatgttataaccaggaagtcacaaacttttctcttaaaaaaaaaaaaaaaaaa

SEQ ID NO: 3664 - DNA, 829 bp, Glycine max
  Clone ID: PAT_MRT3847_103314C.1
atcgacaacacttgtccttttctcaaattctttcaataggtggtgaacacgtgaaagctggattctttcaaggcatcttcgaatgctgaccccagccccagagtgtgcttcttcgttcacaacacttcactcattaacttttcattctccgatacgccactcgcttcatatgcaagcacagcctgaatcctctatagatcgaaatttttaagtttcgacaaacttgacacaaggacaccatcaacatcttgaagagctcgctgtgttgttcgttccttttggccccttcaacgaaattgtactaatctaagatttgcgattttttgttcaaattaaaatgtccatggaagctcaacagattctttccagattctgtccaaaaccatcttcagtgccatctattccaattgtgaaacaacaattctctccaaagttccctcgtttaccttcttcatcgttgtatccttctagtcaatctcagaatctcaatgttcctagtggagctttccatcctatcagcattgtgcacaaagaagtgtgttctagttcttgcaagaggatatggtgcagcagcagcagcagcagcactgcagaaccaaaggagggccatgaggtgagggctcaggtcaccgtgcgaaggaaaaagctagcagttttcgtttctggtggaggatccaacttcagagcaattcatgaggcctccaaaaggggatcacttcatggagatgttcttgtgttggtcacaaataaaagtgattgtggaagtgcggagtatgcaagaaataatggtattcccagttatactgtaccatatatcaaaagatgaatc

SEQ ID NO: 3665 - DNA, 776 bp, Glycine max
  Clone ID: PAT_MRT3847_103315C.1
caacattcatccatcactacttccagcttttggaggcaagggattctatggcatgaaagtgcgcaaagcattaattgcttgtggagcaaggtttacttctattgaaatatctgaagcatgttttttcagtgaaacattgatgtagttggttcttgattaataatcactagttttatttttatatgatggttagggtttaaggtcctaccatacattttgttgatgaacactatgatacagggcgtatatcttgcacaacgtgttgacactgtgcttgccaatgatactgaaaaagagctggctgcaagggttctcaaagaggagcaccaattatatgtggaggtggtggaggctttatgcgaagaacgcgtggtttggaggcaaaatggtgttcctctcatccaaagcaaagaaaaccccaatgagtttcgctgataatcattgatatggggattttggttggaggttttgcttatgaaatcttcgcacttaccccaaatacagttaatgaattgtaattattaggtaggtaatttctggtgcactcatgttgtcccaaatccaaaaatgtaataactaggaagtcacaaactttttcctgatctgttctgctcaaactgttaatgtgctctcggtggattttaaaatcgtgtcactggtcatatttttggagtctttcattccgcttacaagattccatttacgtatcatgattgttctccaaaataaagaaattatctactgcactatttggataagaattttgatgtgctgtt

SEQ ID NO: 3666 - DNA, 251 bp, Glycine max
  unsure (1)..(251): unsure at all n locations
  Clone ID: PAT_MRT3847_103316C.1
ttcatctgcacttgtagtgaaaaagactttttcttatttggtgatggaatacgntccagactcgatgcatggaccctcgaacatgttgcaggggttatataagttcaaacctttaactaactgaactacgattgtacgacgatcaggtttgcggacattcgtacacaaactctcctacatcataccaaccgggtactaacatttaaaagctgctcctgacgatcctgaaacaggttcacgacttactcatc

SEQ ID NO: 3667 - DNA, 420 bp, Glycine max
  Clone ID: PAT_MRT3847_103317C.1
ccccttcggggaataaacaatgccagaattgttgatcagttttttgataaatccaactggtgtattattcttgagaagacagtgtgaccaagaaaaccttgagggagtatagcaggccagagtgtagtataacaacttttacaacatttatcttgcaagttaactttgtttggcatctaatttactatcgattaaaaaaatgggcagctgcagaagttggacagaatgattatctggccatttcatcatccagaccaggctgcattcttctagaaatcctgatgtattgtttttttggggttcttttttaattttttgcgaagcccaattttggttgtaacaatagggcacgaaggatgccactgttctgcagtgttggtattatagcttggcacactgtctgccctacaatgctgaata

SEQ ID NO: 3668 - DNA, 1113 bp, Glycine max
  Clone ID: PAT_MRT3847_103318C.1
cgcaggtgctcctcctccccccccccctccatctcgagccgaatcggctcgagcactccatcaccacaaccccaattccttcttttctctctctctctgccctaattcccattttcccaactgcaattgcatgctcaaatattcctattccaattccaatcctattcctttcgattcctcttcccccagtttggaaattttgttgctggaagaattgcttaagggcatataactggctttattcaaatgggctcagagagtgcggctccaatggttgagacaacaaaaaacaggttcatcatctggattgagttcttgtaaactttatttgcttcggttcttcttctgataatgtgaaggcttggatagtgtcgtgaaactttcaggaggctgaaaggctgaatcagtcggatcgacatctgcaagatctattatgtcactctgttgtcggaattgatctaaatgagaacaatggaaaggcttctaaggctgtgtgaaactgccaggttgctacaagacttgctcagtcagatcgagtccctcaagaaagagaatgtcactctgttgtctgaatctaattatatgaccatggagaaaaatgagctgaaggaggagaattgtagcctagaaacccaaattgagaaatttcaaggtcagatacaggcaagactggctcaatgtaaacctgacctgaatgtacctccccatttggaacttgagccactggagcagacaaattttcctggacagaatctccaattgcataccatagaacctaacttgcagcaaggatctgcgattttggttgtcccctgtaatcctgatcttccaccttcttttccagctcctaatgttaccggggtcatgccgaaatctacatctgttgtcagtaaaccacatgccaggtatcccacacccgcagattcatggccatcacaactgcttggaaagcaaccaacttcaagttgatttgtattttctagagttttagtttcagtattggtttaacatgccaactagctttcccgatagcaaagcctctttggagctttcatgtataaattatatttattcaatgatctaagagagtctcactctcttctgtttcgcctt

SEQ ID NO: 3669 - DNA, 299 bp, Glycine max
  Clone ID: PAT_MRT3847_103319C.1
ataagaaacatctgaaaatacattatgctctttagctatttaaccttgactaatatttcggttgtggctacaatggactacgggtacatttacaggctttatagttgaagcaaagacctggttaggcaagttgaccaagcgggtgttcatcaacaacaaaacatggtaaaaagttataggattcacatccttcagttgaagggaaaggcattttttttctggatcagacacacttgcattgaatctgtagacaagaccaaaatttttcaaaccatgaatgacttgctctcgttgtcctt

SEQ ID NO: 3670 - DNA, 239 bp, Glycine max
  unsure (1)..(239): unsure at all n locations
  Clone ID: PAT_MRT3847_10331C.1
gggcaagcgacgacaaagcnncacaaaaggggcaccaaaaagcaagncacgggccggcggnnaacaacggcgggacggggaaaacccgggcggnacccaacnaaaacgccgggcagcacaaaccccnngcgccagcgggcgnaaaagcgaaaaggcccgcaccgancgcccnncccaacagnggcgcaaccngaagggcgaacgggacgcgcccngnagcggcgcaaaaagcgcggcgg

SEQ ID NO: 3671 - DNA, 516 bp, Glycine max
  Clone ID: PAT_MRT3847_103320C.1
ctaaaacaaatttaatccaattatttttttcccaacttttttttttgggcttttaagtttgattttgtagtatgcacggcatccgtaatttcaggcgtgagacaaagttaccaagtatcgttctaacaaaaatgtcgccatctttggttccaataaagataatttacagaaaacaagaggcccaaaatacttacagccaacacataaaatttggtcctgctgcaacccttttctctgcgagtttccttcctctattgtttttctaacccaagcaaatacatgcttgcattgttgtggaaagatgatggggctcaaatgcgtgcgtccttgcttcactcgtgccaatgtgagttgtggtctcaaccgaagcaggtgcctcgacgctggagcttgaaggcgttgccgctccttggggtttgggcgtcggtgtcgttctcgttgtggtgggctttggcgtggggagtgttggggttcctgccgtggcgggcttggtggtgtggggtctgggtctgggtc

SEQ ID NO: 3672 - DNA, 207 bp, Glycine max
  Clone ID: PAT_MRT3847_103321C.1
gctaaaccttaaaccctacttttgcaatcagtgagtgtagcgatgagtagtcgttgatgggtcggcgaacgactaacagctcgattcctctatggtcatccggtcatgtttgctctgattttccattttacccgtggcggtatcaggaaggcttcttgtgggatcaatctgagtgaggctatgatttgctggattcaactcatcact

SEQ ID NO: 3673 - DNA, 402 bp, Glycine max
  Clone ID: PAT_MRT3847_103322C.1
gaaaaccattttttaagatatcccattggcatgacaggactaagtttatttagcaggacccaacccatccggttttattatcagttaattaacccaaccacccttaggagggttgttggtttggaggttttctgcagtggatgaatcctgcccataaaaaagatctcgatccctaaaatattaaaacaaaggggcatttttaacaccctttcatttcagttgggattttatattgggttgaatccgttttgggacaaaaccaaaactggtggaaaaaaccgtatttgtaattatcgattccctcggcggtttttggattatggaagggggccattcttttgtgaaaaatcacttgttctaaattgggcacatttggttggaaccctccgccggacccgtggg

SEQ ID NO: 3674 - DNA, 289 bp, Glycine max
  Clone ID: PAT_MRT3847_103323C.1
tcatgtagttcaaataaccctaatggcacaggggaattctgtctctagtgcaatgcttccagaatgcaatggtgagtagaaatagcaagcctcaagctactgcaatgcatgtgggagctatagaaattatcattgatagtttcgcaagtcctgactgcaacatagttggtgcaatgcttttggttgatacttatcataccaatcctgacaatgcagttcgtagtatttttgtcgcgcctttcagatgcggaatgcctattcgggtggttacactttcgaataccattgt

SEQ ID NO: 3675 - DNA, 357 bp, Glycine max
  Clone ID: PAT_MRT3847_103324C.1
gaaagtagtacatgcgcaaagcaagtatttgcaaaacacaactttctcagctttggaatttcagaataatgtttgagatccatattctatgcattcttggagacattgataatttcctttttctatcagggtgttggcaatacactcaaaagacattatgaaacttatctcttagaatatgaattatctcatgatgacgtagatggagagtgctgcttgatgtgtcacaggtctctgtctctcttctctggtctttatatctattataatgcgggggtggtcaagttttgtcttattgactattatttacctttcatgttgggggcaacagtagcgcagcaggtgactgggtgaact

SEQ ID NO: 3676 - DNA, 940 bp, Glycine max
  unsure (1)..(940): unsure at all n locations
  Clone ID: PAT_MRT3847_103325C.1
gcttttcatcanaacagaagccgcttgtgcactcaaaaggagcatattgggaagtgctaatcgtatcacatgcagtagaggcattcctgcgaagctttggaggattgctggaattttcaatttcactactctgtcgatgtagtgtacctctagttctgcctgttgaaggaaggactgacaaggaaccaaacagaccagacactctctccaaagtcacctcagatatggacctttgaaaacatggttcttttctgggacatccatatttcctctgcatctccaacaagaagtcagtaatgtctagcaacagtaactttgatttgaagtaatgtgctaaagctcgggcaagattttgctgataaggttctgcaggtccagaaagcaaaatagctctacttgctggatgaaggttcctcaagtgcttggaaaagtcttgttttaaataaacatatccagtgcttgttaacacaaatcggattctttcacttaagtaataaggaaatttatcaaatgtgacttcgctgttcttcccatcaatgactctgttgttgagctccaacacaatttgctccccagaaatctcatcagactcacaactcccgacaacccatttgaacagcttgtcctgtgctcaatccaagtcccacacccagcccaaccccaacactcaatgctgaaaacaacacgtgtttctgctccatcacacaaaagcttgctcctttggcacgctgttgatctatttacgtcaaagggtatcagaattattattgaagttcatagaaatcaggtgaataagagaaatgggatatttatgcacattgcacaaggtgtcccaagacaacgtttgtgtgaagaattatgtctccgtgtccgtgttacttgtcccatagctctctctatatatagacggtgttagtcgtacttcaatatatgcttgctg

SEQ ID NO: 3677 - DNA, 479 bp, Glycine max
  Clone ID: PAT_MRT3847_103326C.1
cccttacctcagctttcggctcgaggtcagattgacactttcttaaactttcaagagcttgctttcccttttctctttctgtttgttgacattcatggctcattcctttatctctgccgggattttgtgttcaaggttagtgaaccttttctatttggaatcaaagtcttcaactttggctatttggagaccaaaagcaatgctgcctttgttcttctcagtggctttctctgctgttcctttgatcctctatattccaccactcagaagcttaaacctctttgtagagaccattgaagacatggcaagagagtcaagaatccacaccaacaggatttatcctcgtctgcgtgtggcttagtcaagggtcatgaattgtatactgtgtaacagaacaaggtagattcattgaagaatgctcttgagccggatcttaatgtaaatatttttattttctcttcttttttttccaatctttt

SEQ ID NO: 3678 - DNA, 347 bp, Glycine max
  Clone ID: PAT_MRT3847_103327C.1
ggaacccttaaaacacccttttttaggtttggaaaaaattttacatcaactggtcagaaagaatccccaactaagggttttagcctttcatggcaaaaaagtttctttgacaataaaaaaaaggaattaagagaaattgctttcttacaaaggagggggggtgttttctccacctttaggaaccttacaatcactcaaaaactttttaatttccctaaaagttgaaaaccggggttttggctctaatttttggctttttgaaataaacccttaagggtttatgagttttttcaaaaagcttttttaaattttgggcaaattaggcttaaaaagggcttaaaaaccta

SEQ ID NO: 3679 - DNA, 360 bp, Glycine max
  Clone ID: PAT_MRT3847_103328C.1
ggggggggtaaatgcataaaatgcttttttttatttttgctaaaatttaggtcatacttggcgcaacaaaaagagagggcttaaaaaaaaggatgtggatgcaggggaatcattgtgtgcgttggggccgaatactcgaaaaaacaaaatttgcaattttttttgtagggagaggatcttgggtccgtctaaacctaataaaaagaaaggaggggtaaaaaagaaaataatggttgggggccgaaacagtgcattaatgaacacggggggaacttgatatggtgggggggcgcactcattgtaatagaaaaccttcatctcgctaaaataaatccgatgagggatcggaataataggtcc

SEQ ID NO: 3680 - DNA, 479 bp, Glycine max
  Clone ID: PAT_MRT3847_103329C.1
gataggacatattctccattttataacatttttttttatttttttacccaccccttaaaaaattctcattacaaatataaccctggaccttgttaattcaaaggtaataaaaacctttacagagcgcaacatgttcttattttccctggcaaaaacaaacctaaatttttccaatcttgaatgttacaaacccccaataactagtgaaatttattgagaaaataataccttttttaatctttgtacacgcacaccatgggtataaaccccataattttttttgggcaaaaattttccacttcatttccccccggtgtttaaacgctgcaaactccatggaaaaggatattgggggcttttgcaaatattgttttggggcacagggaaaatttttattaaacagcgaatctttgggtttatttatctccccccctttggttataccaagggttctttacaaccccccttattttgggcct

SEQ ID NO: 3681 - DNA, 740 bp, Glycine max
  Clone ID: PAT_MRT3847_10332C.1
caagtttgaccctctctgagttaccttacgttccgttccctttcctccatgatgcttccaaacacgcgctaaaattcatcatcaattccatccccaaaacccttctcatacacacctaaatgataaatccaccctttcatctcaattccatttcactcccataccacgcgttttaatttctcatttcctttttcttcttattaatttaatttcctcctttttttgggggggtaaaagaaagaaaacatttccattttttctcagatctgcgaaacctcgtagcccccgaacatgggaaactgctgcgccacgccgtccacggacgaaacggcgaacaagaagggcaaaaagggaaaaaaggaaaaccccttcgcgatcgattacggttttaacgccgccgccgccgccaacgggtcgaagctcaccgttctgaagtccccgacgggccgcgagatcgaggcccgctacgagctgggccgcgagctgggtcgcggtgagttcgggataacctacctctgtacggacaaggagacgggggaggagctggcctgcaagtcgatctcgaagaagaagcttcggacggcgatagacatcgacgacgtgaggagggaggtggagatcatgcgccacttgccgcagcatccgaacatcgtgaccttgaaggatacctacgaggacgacaatgccgtgcatctcgtcatggagctctgcgagggtggggagctcttcgaccgcatcgt

SEQ ID NO: 3682 - DNA, 381 bp, Glycine max
  Clone ID: PAT_MRT3847_103330C.1
aaaccacgaggggggattttttcattttcgaaaaggcccaagcccccccaattcacctacggggttttttaaaccaagcattgggtaaaaaaaaaaaaaaacaatggggatcccctttaatttaagttttcccccccccccccaaacaaattaattttaaagggccaaaaagcaaggccccaaaccttaaaaattggggaaaaaaaacccacccctgaaatcccctaaataaaaacaatttttaaaaaaaggcaagagggtggccaccccattttcctttggggagggattttttgggcagggccggaaaaaaaaatttttgggccaaaaaaaaaggccgagttcccatttccctgattttaataaaaagttaggttcttt

SEQ ID NO: 3683 - DNA, 430 bp, Glycine max
  Clone ID: PAT_MRT3847_103331C.1
aattcgcgggcgcaggaattttttttatttcattttatctctacgccaagaaaaattactttttgatctgtagctaaaaaaaattttgatcgtggctggaagatattctcgtagaagtatcaatagtcaagggagagaagatagaagctagaaagttgtgtttatgaccgttgcatcgtagcaattgtgtttcgaaagttgagaaaactttaaccgttaaaattttctatatcggttcctcaatttactgttcgcatgtttttggatttggaccaccatttgatgcagatcatagcaaaactacaaatatagcttgtgcattttttccgtgtaacgtaattttatggaaaaacgtggttcaacctgtgtcgaacaaactatcatctggcaaccaaatatactaaaactttcttgcttaatcatattctca

SEQ ID NO: 3684 - DNA, 744 bp, Glycine max
  Clone ID: PAT_MRT3847_103332C.1
tcttttcccggggatcctctacagtcgacctgcagaccactttgcaaatcctccattgcaacgctcacttgagtcctatgcaaaaaacaaaacaaaaataggttttgtttatcatttcaatgtctattaggataaatataatttttttgaaaaaatcgtctgcataaatatatgaaaactcacaataaattgaatttatatagttgaataactgcttataggtcgaataaataattggtttaattgctgtaaaaaaaattggtctaatggttcatttagtttctatacttaaaaatattatcttttaatctctatacatatcatttttattcttattctttgtttgtaaaatctgaagaggactaaaatatgtgtgtaggcaaggacggatgtacatgtaagtctttcctattttttttagttttaatttattttaactgtataatattttttttatttaagtgttatttatattttttataaaatgatcagttattttttatagtctcattataaagataatttcaacatttgtagacaaatattctatttctctttttataatttttattgtagaaatattatattttttctcttttaaaacaaaatatttgggtttcatttttttaatatatttttctttttataattcattgctccttaaaggatatatacatggtacaagaaacgttgcataaaaccaaaagctataataattaataccggtcatagaaggaaccacct

SEQ ID NO: 3685 - DNA, 211 bp, Glycine max
  Clone ID: PAT_MRT3847_103333C.1
ttaattgataagctacgttccgggtagcaacttataagtaattggactttgctggtacaccccatgataatgatcaagaattactgccaaattgaatgaaaaaaaaaactaacaaaattgtgtgaacctaatgagagtaggatgcaagatctgggagtatctaaataaatctattttcactctgcagacttgaagactgagtatattgact

SEQ ID NO: 3686 - DNA, 323 bp, Glycine max
  Clone ID: PAT_MRT3847_103334C.1
cccgggatacgacgcagtctacactaagttcggcggaacgacccttttttttatttattttttattttttttattatatccggaaaaacatttcttttaaatggaaaagaagtaagcattaagtgacaagtaaaaaaagttctgaataaaagagggcttttgtaaaaaataaatggaaacactaaaaaatgtatgtagattcacaaacaaaaagaaaaaataataaaaaaaagattctaaaagtggtattgacattttaataattaagacattgaatccttggaaaaaattatggattgggaaagaattgaaaaacgaaaagg

SEQ ID NO: 3687 - DNA, 419 bp, Glycine max
  Clone ID: PAT_MRT3847_103335C.1
aggaggctcgagctagtaggctcactcacttacacatcttttactacttccattacgaacgcatattagatggcttcctgaacacgtggccagccctacattcaccaaacccggaacccttccaaggcgagcctacacgacattcctcgccggaaacggtgtctacgtgaaatgtgacgacggacttgccaaagggccagctgaaggctaaaaccgggttcccagggttggtggcggaccgaaaagacatgcccaagaaccagcggatgcaacgctatagtcttggcacagtggtacgagtgaacaatgcatttgaagattcaacatatcaaatggagtggggaatgtctaccagcagtatgaagcactgcgagatgaggttatggatgttggaggccatcacgcagttgaatatcttg

SEQ ID NO: 3688 - DNA, 308 bp, Glycine max
  Clone ID: PAT_MRT3847_103336C.1
ggttaatctttttttttttttttatacagggaaatgggaatataaataaataataagctaagggtagccactaaaatacacaaggatgcaaaaaaaaaaaaaaaaaagagcatcaacataactgggaaatcattgcaaaacagggctttagtgcttagaaggggtatcgacatcattggatagttgcataaaaagaagatgacggttactgggtgttctccaagaataaaaaaaagatcctcatcaggtccaaaggctttgcgagctctttctaaagactatgaaaaaaacctcttatgttttttaaa

SEQ ID NO: 3689 - DNA, 260 bp, Glycine max
  unsure (1)..(260): unsure at all n locations
  Clone ID: PAT_MRT3847_103337C.1
aganaggaaagaattgatcgttgaaaatncagggangaaaganancgggagagtccattaaggaaacagctacaaacattggtgcttctgccaaggctggcatggagcnagaccaaggccactntncaagnnanggcanaaagaatgacagcagncatccggtgcaaaaggagttggcaacccnnaanttagatgccaagatgaaccaggcggnnctngacaagcaggcggcgcntcagntaacacggnggccaaacagt

SEQ ID NO: 3690 - DNA, 233 bp, Glycine max
  Clone ID: PAT_MRT3847_103338C.1
ctcaaactcccaatataacattcatcaatcatgatttctttactatccttagcatcatgtcttttctacattaacttctccttcaacaccattacttcatcatcattccctctttaaatatccaccaatattcaccttttacaccatcactttcactcattaaactttctctttctatactaatcaacctatacctatctatcttaactcctcttactctttactttaccata

SEQ ID NO: 3691 - DNA, 1871 bp, Glycine max
  unsure (1)..(1871): unsure at all n locations
  Clone ID: PAT_MRT3847_103339C.1
acaactcacatgcctacttagtttatttttttgtgtgtgtttatgaagagagagaagaagtgaagataagcacaaggagtgtcatctagtcagctactaccaaattttcagagtggactattcttcctttattatattcttaattaccgtgccttatccgaccctctcataccaaacccaacccaacccaaccaactatatttcaaccagccgcggcgactaaacaacgaccacaccctcaaaaccatttccaactaccaactactctctctatcactctcccatggcttcctcttccctctttctctcactctctctcaccctttgccttgtttcctctctctgctatgctcacaaatcttccttaaccctacctgtgacaaaagacgattcaacccaccaatacctaacaaccctctcttatggcacccctgttgagtctgcaaaattcgtgcttgatctcggaggctcaatcctctgggctgactgtgcatccagaaccaccccatcttccacccttgccccaatcttccaccgttcaattcgctgcctcacggcaaagggtcctgaaattgagacacatagatggctctcgagtctcgcaaatcccatagatcaagatcagccgtgtcaaattcctgcagagaacagcatctcggggaaaagggtcaccgaaggagagcttgtggaagacttagtgattaatcgctctcacgagcttctcttcacttgctcacccactcttctcttgaacggtttagctaccggtgccaaaggcatggtaggtcttgatcgatctcgcacttctttttcgtctcaggtttttcactcacttggaactcagagaaaaatcactctttgtctctcttcctcttctgggattgttcaatttgggaatgtggcgcatgaatcccaacccgggtctgaaattttcagatctcttacttttacaccccttgtcgcgaaccaagaccaaacacagacacacccttccatcaacgttaactccgtcaaaatcaacggcaaaaaggtttctttcgacacccccttgggtgggggtgctcagctgagcacggtggtgccttacaccactctccaaacctcgatctatgcaaacttcgaaagcgcttatttgaaagccgcttcgtctatgagcatgaaaagggtcgatccagtttccccctttgggctctgcttcgaatccaacggcgttggaagctcccaagtggggcccaacgtgccggtcattgatctggtcctgcagagcgagatggtgaagtggagcatacacggaagaaactccatggtgcaggtgaacgacgatgttatgtgcttagggtttgttgatggaggtgagaatccgaggaaccctattgtgattggagggtatcaattggaggatgtgttggtgcagattgattttgatacttccatggtgggattcagtccttcgcttctgacgaagcatgctacttgctctcatttcaaaccctagttttcggtgaatcgtgatgattatagtttattattatccataccacatagtttttctttagattaagaagagttttgaggagtttaacacgttctgtaataacccttttattttttttttctttcttttttgctctcctgcggtattatctgtataaactgcttaagtggcctatgttaaatggcgatggcatttttgatggcatttttatttgaaattgaaatacttctccagtaaggaaaatttggttgagttattaatgtttacttttgagtatttcccattttgatgaaaaaattttggttgagctatgacttatgagctacttgacccattagatgnnaaaaaacaaaaaaaaaaaaaaaaaaaaaaaaaa

SEQ ID NO: 3692 - DNA, 671 bp, Glycine max
  Clone ID: PAT_MRT3847_10333C.1
ggaattcggcacgaggtcatgatagcattcatcttccgcaatcatccaaccaggaaacatcaagagaaaagacacgagaggagttgctagctgaagaaagggattacaaacgtcgaagaatgtcctatcgtggcaagagaacaaatcaatcacctttgcaggtaatgaggtacatgatagaggatttcatggaccaaatcaagcaggctggggattttgagagccatgtgaaaatgtctgaaaagagtgggttgtttccatctaaacctcctgaccgtgacattcctatggaagctaataattcaagaaagatttgtaataactctcctacagttacaatcagtaacctacgttgtagtgagcaacaatcagactctaactgttgtgatcaaagcaaaagtctggaggatgcattttctagagattacaaacaacggaaacatgagcatcataggagccattattgccgagaagatcaacagaatgctgaccaaggaaaatatcatagagaccgtcattctataagccctgaaaggtactcaagttatagtcgatcgcgtgagcatagtagtcatcataacaaacaggattactacccaaatagaaagaagcacaactcatctagaatcaaggatggatggcaaaaggacactcacaggagtcatatttca

SEQ ID NO: 3693 - DNA, 677 bp, Glycine max
  Clone ID: PAT_MRT3847_103340C.1
caaacctcgatctatgaaacttcgaaagcgcttatttgaaaaccgcttcgtctatggacatgaaaagggtcgatccagtttccccctttgggctttgcttcgaatccaatggcgttggaagctcccaagtggggcccaacgtgccgatcattgatctggtgctgcagagcgagatggtgaagtggagcatatacggaagaaactctatggtgcaggtgagcgacgatgttatgtgcttagggtttgttgatggaggtgagaatcccagaaattcaattgtgattggagggtttcaattggaggatgtgttggtgcagattgattttgatacttccatggtgggatttagtccttcccttctcacgaagcaagctagttgctctgatttccaaccatagtttcaaaccatagttttctggtgaatggtgataatagctttttgttatctataccacataatttttcttagattaagatgagtttcgaagagttttaaagggttctgcaatatccttttctttttttttctcctaccatatgtgtatataattacttaagtggcttatctatggtgatgatatttttgtttgaaatttataagatgaaaaaattttggttgagttatgacttatgagctacttgacccatttgatggaagcatatgattgactgaacaa

SEQ ID NO: 3694 - DNA, 219 bp, Glycine max
  unsure (1)..(219): unsure at all n locations
  Clone ID: PAT_MRT3847_103341C.1
ctgtttntntcttnntttctanaaggaanaacttgnnttccttctaatgcgaacctctcttcttctccgctcccagaattgtcttcaaggcagccncgatgtnttgtnnctcagtccatcttccatcanatcacaaagannggtaacccaaaccctagcccnnagncntagcagantcgctggnggaagtngacgangnngaccgctctggnatggtgg

SEQ ID NO: 3695 - DNA, 646 bp, Glycine max
  unsure (1)..(646): unsure at all n locations
  Clone ID: PAT_MRT3847_103342C.1
acgcgctgcgagaaagaccacagaagggggagcataagtgagatccaaacgaagatgtaacatcattctatcatttcttaagtacgtcgatagagatagggtaacatgactgcttttcatatagctgtatgactgtactaaggctatgaaagccactgtatctgaaggagtgcgtgaagcatacttgcttaataactacaccaagatagtagaacatggattgaaaacaactatctttagatacttctggcttatctaacactcaggtacgcttggagcatggtaaaaatacctgttaatgtaccaatattaatctctctcacagtggaagctgcacactttgactgatccattacagagcaaaaccatacttgacatagtgcacacctgttcattacaagaagacttgatctatacaacgatctctatcatgcacttcttgaaggttgagcctgatgaaatactaactcagtgtatcgtgagacactcatatattatctatatgagcacatctcgacacacaatcagtcttgctcttaacaccgattaataaattatgctctctggattcaactgatcaatattcattcagcttgttactagcaatggaaaatagtaagctgctattggctccataanagtaact

SEQ ID NO: 3696 - DNA, 506 bp, Glycine max
  Clone ID: PAT_MRT3847_103343C.1
aactacccgtaccaaaattaggtttctgaaagtgggtatataatttgactaatttttgtagagtaatctttttttttttatttttgagagatttttttaaaagaaataattaagtttcccaaaagtaataatgaaatctgaatttaaattacatataataaatttgttttgtgactttcattttcagccccacgttactagctattttgttatatacgagaagtaatataaaactttaagccttcatatatatataatttacttcacttcctttttttcttcttctttacttcacttcctttttagataataaaatgtgaaaaattctcattccaaaacacatctctctacatttttattttccccatcaagtaaagtgtagaaatcatataggaatttttgtgtctaaatatagtttttcttttctttctggcatctttggcacaaaatgttcgtacgtgtttgattcatggaccactcagatacttctatcattggatagccta

SEQ ID NO: 3697 - DNA, 417 bp, Glycine max
  Clone ID: PAT_MRT3847_103344C.1
cccacgcgttcgaccacgcctccgtgcgggtgttatacgtctgcatactgcggggaagaggagagacggtgtgagcagccgttttttctgttggcatatgaaggcggggaagacagaagaagaaggagcatggtgacgcaccaccttatctccactggcgtgtagtccatactgctcaaactctgacgccaaaccttcatacactacagggataacaggtggtcctttcatcagtcttcaggccacaccagggttagacctctctcacaaggccgggttcatcttagaccagatcgaccatcttatgcagacacagccgcagacatttgttcctcaccctcctccactttacaaagactattttgcccattacccccatctgcacttttggaccacccactttcgtttccattttgc

SEQ ID NO: 3698 - DNA, 261 bp, Glycine max
  Clone ID: PAT_MRT3847_103345C.1
cttaacaaaaccccaagacggggtatcgaacccaaactcattactaattaagaataggatcggaaaccgtcccaagttactcactaacaccacaacattttgtcataagacaaatagttactgaacctaaatattgacaaagagaaatttaattcctgttatttgaggttccgaatccaattaaatgcgaacaaccagaacaatacagaaaccaacgttttttcagtaaccattctaaaaaatcccacatggttatgtccc

SEQ ID NO: 3699 - DNA, 530 bp, Glycine max
  Clone ID: PAT_MRT3847_103346C.1
ggacgggttcaaattttaaattatagcccccatgaaaggtatttaatgggaaaaataggccacaagttattggagtttaaatcccagtaacacccccccaaatataatagttgacttgcccaaagcacatgaaatactatttgaaacagacctacttccacataaaaaaataaaaccacaatggccttaagcaacagtttcaacaacagtatttgagggtttgttttcaggctcagttgaataaacaattgcagtttttgaaggtttgttttcaggctcagttgaggcaacagttgcagtttttgaaggtttgttttttgaggcaacaggggcactttttaaaggcttgtttttaaatgggggggcttcatccacccaaaaggcagtttttttcccaaatttgaaaacggtttgaaaaacttaattgggctccacatttcctttcacgggcaccttttgctccttaagatcaaggtcaaaggactcaacacctataaatatgaacaccgtttttttgatattaacagggc

SEQ ID NO: 3700 - DNA, 316 bp, Glycine max
  Clone ID: PAT_MRT3847_103347C.1
aaaaatatcatctacggataagagccccgaactatatacgaccttttgtgctaaaaaaggctttctcggatggagcactcttactcatgaacatggatgatgaaaagctgccttcccctatgaattttgatgttgtcaaacaatactatgcatgttactgggggcagtttgaacgttcactgtttggctgccccaaagactcattacgatctttatgttttaagctttaattgtaaacaataattccaatgttaataaatatcgattgatgttttgtatctctccttctcatgtgtgtcttttgcattttttttat

SEQ ID NO: 3701 - DNA, 648 bp, Glycine max
  Clone ID: PAT_MRT3847_103348C.1
aggtgctggtgcatttgaagttgctgctagacaatatctgatgaacgaagttaagaaaacagttcaagggcgtgcgcaacttggtgttgaggcttttgctgatgcgcttcttgtggtgcctaagacacttgctgaaaactccacgcgtccgactcaagatgtgattattgcccttacgggagagcatgacaaaggaaatattgtggggttgagcctgaacacaggagaacctatagaccctgcaatggagggtatttttgacaactactctgtgaagcgccaaatcataaactcagggcctgttatcgtgtctcagttactggtggtggatgaagtaattcgtgctggacgtaacatgcggaagccaacttaggtgttctttcttgaagtttctcttttgaatagggtgtgcaatgaactttctctatttcaaggtgccagcagcattcgttgggattgttatgactcgcttcttttaatctgctctaatggaacattttttctgggttttgttttttcccattttaattttattctctctcaatgactgtcatataagtgttctatgactgaattttgggctccttttgaaatttgtaagcataatttattttgtagaaaattagttgaaagaatgctttaccttgg

SEQ ID NO: 3702 - DNA, 1646 bp, Glycine max
  Clone ID: PAT_MRT3847_103349C.1
gacttgaagagaattttctttccatgatcagggtgctggtgcatttgaagttgctgctagacaatatctgatgaatgaagttaagaaaacagttcaagggcgtgcacaacttggtgttgaggcttttgctgatgcacttcttgtggtgcctaagacacttgctgaaaactctgggcttgacactcaagatgtgattattgcccttacgggagagcatgacaaagggaatattgtggggttgagcctgaacacaggagaacctatagaccctgcaatggagggtatttttgacaactactctgtgaagcgccaaattataaactcagggccagttatagtatctcagttactggtggtggacgaagtaattcgtgctggacgtaacatgcggaagccaacttaagtgttctttcttactcgaagtttctcttttgaatagggtgtgccagcagcattcgttgggattgttatgattcgcttcttttaatctgctctaatgaaacattgcttctgggttttgttttttcctgcaaatgcactccatcatgtttttattaccccaccacagcaaggctaaaaaatcatgtcaagtacggatttacatgcaaaaagtattattgataacaaaatactgagtgaatcagatggtctcaaggaaatgagcaaagctagagtacttgggctcccaccctacttcctggcgtgttctggagttgttcaatctcttgcctagaggatcatcggttcctgtaaatttctcaaactttttactaaatttcccacttttgtaaactagatccatcacttcttgcctggataagggatgattatcacatcccaagaaaattctcccacgaaattgtttctttaaaattgcgacagagagtgaagctgcatcctcatagtgtataagattcagaatgtgatcaggacgagattcgactatccccttctctaaccaataagcatgtgcacctttatctactttataaagtccagacagtcttaaaacagaaccaccaaactccagcactattttttcagcttttagaaggacatcagtcctgggactcctccctgttggcaccactggactatcctcgtgacacaatccattatcattacaatcataaggagcagagcttgatgtaaacagcaaagcaccttcaccattccagcatgatgcagccagcctaagatcaccaaggtagtctgaggattggtaagggggagcacagaaaatgacatagggaaatttgagggaggctttggtccacttcaaagacggattgataccgatttcagttaactctcggtgatgattagtggttgctgtttgtccaaaaacttgacaaccagaatattcctggcgccaattgtgagccactaaacgaccaagaatcccaggaccaacgattaagaggtcgtgttgtccaattgcaagagaaggagaagggtcgaattcttcactggagacgtgcaaatgggtagccatgaaagatgaagaggtagtgtttaagagggtgagacgtgcagggaagagaagagaattggagaaatggtgaaagagtgttgcatggacagggcttctgattcccagttccatcaatgctcgcgcgggtccttccctctaaggcgaaacgctc

SEQ ID NO: 3703 - DNA, 280 bp, Glycine max
  Clone ID: PAT_MRT3847_10334C.1
gagtatcaacgctgctccacatgctaacagttagccacatttagctcttgagagggagagcagctatttaggaacattaattgatgatctaataactaaggacctgcgttagccttaccgtatgttaaccacccgctatagagcatcgggtacttctgagatctgacactgcttgatagccgtcttcacacttttatgtcgagaaattgggttgatcaatgataggctctggaaactgtaccaggataagcaagctctgatttctgatgaaaataagcga

SEQ ID NO: 3704 - DNA, 750 bp, Glycine max
  Clone ID: PAT_MRT3847_103350C.1
taccggtcttcacacccgggtcgacccactatcctataacatcgaactcctagtttcctgcaaaactaaaattggtctcagtcacatatgtgctttaccaattctttctcccattccttttgaaccaagagtggtctcagtcacatatgtgctttaccaattctttctcccattcctttaacttcaattcggtgtgcccacttcttgtttcatctagtttgggttaaagtgtggtgtcggtttgcttatatgatgtgctggtagttcattggtgaaaatctcataggtatttaacctctcaaaattccaacacatcgatctcttcccatccaccaaaccaattttccaattcaagatgacacaacaaccggacttcagttggatggttcccattgaagtgatgctgggtgccctctaccacggacaagtccaagcctgcagcatctcaagcgtcacggacgagcttcgaagcccgaacgaggcggctttcaagccaaaggaggtctccataggacccttgcacagaggaaccacgaggcacgtgcagctaatggaagagacaaaatggcattacatgcgcgaatttctcgacagaagaggcacgcaggagcagaacagaagatcggagcggaggctcagagagtgtggcaccgatatcctcaagctggataagataatcatggcatgctatggaggtaacatcagatcagaaccgcaagagttggcttaaataatgattgtagatggttg

SEQ ID NO: 3705 - DNA, 501 bp, Glycine max
  Clone ID: PAT_MRT3847_103351C.1
atgagggctaatgttcccacctgaagtctctccaaccttgcaacaacaatcatgggccatgcctccggttcactccttcaactccaacccggttcactacatcaacaacaacaacacaaacccggttcatcatcatcatgagcaagcaccatttcttgtccctcctcccacaacaccttcaccctatgcaagcttcttcagcagcagaagggttgtcccttctcttcagtttgcatacgagggtccctcttctcatcttgatcaccaccaccatctgaggatcatttctgacacccttggacccatggttcaacccggttcagcagcaccctttggactccaagccgagctgggaaagatgactgctcaagacatcatggaggctaaggctcttgctgcttcaaagagccacagtgaagctgaaagaagacgtagagagagaatcacaaccattttgccaagcttcgcagtttgtttctaacaccaccaaaacagacaaag

SEQ ID NO: 3706 - DNA, 468 bp, Glycine max
  Clone ID: PAT_MRT3847_103352C.1
aattcggctcgagggtcatctcataaggactgaaatgttaaccagtttcaccatcagaaacagcattatggcgaatttgataatgggaagattacaatcgagttggatgaggctgatacttcaccttttgattatgatactcgtcatgcaaatccttgatgcccactattcattttattcttcacaacacgcgcatgatgctgtacatatttaacacatgagggacgaattggctgcttacgcattcacacagcattcaaggatttctgcctataatagcactactagcttagaaagtgcgtaggaaggctacatgcccttgtttaggccatgcagtgagaaaacaatccacaataacactcgcgtgtatgcaaccactggtgagggttcaagcactggttcggtctacgcatgttttcatagcattcgaaacatacgcgttactacttaagcatcagctaaaccttg

SEQ ID NO: 3707 - DNA, 254 bp, Glycine max
  Clone ID: PAT_MRT3847_103353C.1
attccgacgctacgacctacgcgtatctcacacgcgtcctcatatgcaataatgttcgagatcatccacactatttcatagagcatcgatgtcctagaacactagattgaggatcacaaacgagtacactttgattagcaaacattttaactcgactgattactctcttaacttcacaaaggtcttcacaaacttaaacaccaccattgacagcacatttagttacttgtgtatatgatcattgactagatcca

SEQ ID NO: 3708 - DNA, 351 bp, Glycine max
  Clone ID: PAT_MRT3847_103354C.1
attcggctcgaggcgtctcccctacctgcaggagaatgtgctggcttcttctccgcgactatctgtggaggcgaagtctggagatccgaaaccagagcaacggatccagttacacggatctctgctgagcccaactctcaagccgccgccttcatcgcctctcaactgacgaacctttttggaaccgtataatgtcgtctgactatccccaatgccaatctcacactaatgcttgttcttctacctcttcatctaaatctctatacagacaaaggtaccaattcatccgattatccattcccaaatgaaagtttatcgcgtgaccaacttgcgcagactagaaccatttat

SEQ ID NO: 3709 - DNA, 303 bp, Glycine max
  Clone ID: PAT_MRT3847_103355C.1
aaagtggtgggactttttccaacattacacaatattttattttggaataggattacatattattttgttattaactaatttcaggttattccaaatttttaatggagagttttattttataggtatggtaaagattggttaatttttatatcataaagggttgttaattttttttattttattgaatattttttaagttttttcctatcttttttttagtgttgggtggatttatttattataactagggtttcttgaatggtttttgctttgattatatctttatattttttttttttttta

SEQ ID NO: 3710 - DNA, 483 bp, Glycine max
  Clone ID: PAT_MRT3847_103356C.1
cactacttaagatcttgcgactaaatttcaaaaatagttagaaagtgtatcattatgccaaggtcgtctagttaagtgtctaggtttagtatatcatgtaaatatattaattgagaaaattgtattttggtatttattggattcatgaaatggatattgagtccacggtgtagagctgaaacacagttttcagcgtatgcgtcttattataatgttttttttgtcttgatatccttgttacgttgtgtatttatgattttgagttgtctatttttttttaacattgtcagaggggctttgatcaacaatggttgtcattaacattctctaaggctatatttcttggaaatggtcttgttgctattttgtctgggctgtttggaaatgtacttgttgatacattggctcttggacttgtggccccctttgatgctgcttcatgttttcttgctattggtgtggccattgctttgggtagatttc

SEQ ID NO: 3711 - DNA, 880 bp, Glycine max
  Clone ID: PAT_MRT3847_103357C.1
ggaattcggcacgagggacgattttcctttcaactatgccttcttcgacggtgtggacaatccggtaaacgataacggtactccatacaccaatgtctttgatgcaaattttgataccttggttgctgctctcaaatcagttgggtttggggacctgcctattttggtgggagaagtaggatggcctactgaaggggacaagaatgccaacgcaggcaatgctttgagattctataatggccttctgccaaggcttgcagcaaatagaggcaccccaggccgccctggatacattgaagtttatctatttggactcatcgacgaggatgccaagagcattgcgccaggaaacttcgaacgccattggggaatattcagatacgatggacaacctaagtttccaatggacctttctggtcagaaccaaaacaaatttctcataggtgcacagaacgtgaaatatcttgctcctaggtggtgcatgtttaatcctgatgccaaggatctcagcaaacttccagataacattaactatgcttgcacctttggagattgcaccgcgcttggatatggttcttcgtgcaacaatttggatgcaaatgggaatgcctcttacgcgttcaatatgtacttccaagtgcaaaatcagaaccccatggcatgcaattttcaaggtttggccaagcttacaacggataatatctcaacacccacttgcaattttatcgttcagatagttaattcttcagcctcttctttgatgatgccctcactagttgctatcttgtttgttagtttattcttgattctgttttcttaggatttctttgtacatacattagagatgttattttttatttatggtttcattatttcttgg

SEQ ID NO: 3712 - DNA, 509 bp, Glycine max
  Clone ID: PAT_MRT3847_103358C.1
ggattcaagccaacattacttcccattatggatctacgatcaatttaaagaagagaaagatgttgatatggaagatgtttcggaagaggataaaattttaacaaaaaggatgtttatagttgcactttggtgtattcagttgaaaccgggagatcgaccttcaatgaatgaagtagtggagatgcttgaagggaaaattgaaagtcttgaaatgcctccaagaccctctttttacccacatgaaatgtcagaacctaatgccataatcagctctgaccaaacaacatggagtgattccagtagcatggatacctaccacggtgaacctataaatattggatgtgcgtaatctacgtatcttattttaagtttagtggtgatcaacaaattatataccctagttagactcgtaatatgcatatatacttgcggcagaactattagattagtgccaaattatttacatggtgtattaatacttgttaatgttgaaagggtttgaaattgca

SEQ ID NO: 3713 - DNA, 245 bp, Glycine max
  Clone ID: PAT_MRT3847_103359C.1
gcaaaaatgagaatgttaagatgaatgtctggttacacaacagagtacaagatacaaaatcattttatatggggagatatttgcattgcattggtttgaggaaaagatgacagttgcctaagctatgtttggcacatgttaaaacgttttcaagtagttcttaattaatatggcattagactggtgtccaacattatgtctgacatagcatgttacaggatttgttacaaaatgactcttacgct

SEQ ID NO: 3714 - DNA, 738 bp, Glycine max
  Clone ID: PAT_MRT3847_10335C.1
gatatatatgatgcctgttttcagccagaagggagatcttcgtctctgccgtgcatttaactggccttggcggtggaggcgtccgaaggtcgtcatgaaaaagccccttgttgattcttttgtcatcaatcatggtgggaggtattggctttttgggtcagatcatagtggttttggcacccagaaaaatgggcagttggagatttggtatagcaattcacctcttggtccttggaatcctcacaagaagaatcccatttataacattgataggagcttgggagctcgcaatggaggcaggccatttaaatatgaaggaaatctttatcgtatgggtcaggactgtggtgatacatatgggagaaagttgcgtgtttttaagatagaaactctcactattgatgaatacaaagaagttgaagtacccttaggctttgttgaatcaaacaagggtcgaaatgcttggaatggggctcgataccatcacttagatgtgcagcacctgccatctggtgggtgggttggtgtcatggatggggatcatgttccttctggagattcagtccggcgattcacggttggttgtgcttctgttgcggtcgctgctatactcattgtactattgggtgtgctacttggatttgggaactgtattgtccctctgaattggttcattcataactctgggaagagaaattttactgtcttgtcttgggaaaggccaaatgtgttctgttc

SEQ ID NO: 3715 - DNA, 572 bp, Glycine max
  Clone ID: PAT_MRT3847_103360C.1
aagtgacaaaatttaacatttactataatttgataaatattaccttcatagctttgggtttcaaaagaaaaaccactacacaacaaagttcaggtcatcgactttcaacagaagacaaccaaatagcctcttacatgtatcagataaatacaagttgcaaaaagtgaatgcgcttcacaaaggttccagatgtagaagaagatcatgcagtctccacctaccaatttcgttaaaacagcattactacattgagtatctttagaaggtcaaggatactttactggaatgcattgcagtgtgtttcctggctttcttttgattggaaatgctagagagaggaaaggtaaccaagagtaactgaaatatattcacagcaccagttttcctcgtgctgaaatgtctaaaatttgtcaaaagtggtcgtaataatcaggatgatcatcatcatattcagaaaagtcactcccacctgagaattcataatagtcataatcatcatcagacaagaaatctatgtcagaaatcccagatgggtaatcttcatcaagagatccataatcaatttcagcttc

SEQ ID NO: 3716 - DNA, 236 bp, Glycine max
  unsure (1)..(236): unsure at all n locations
  Clone ID: PAT_MRT3847_103361C.1
gcgttgtgttgcgtagtgtcgtgcgctgtcctctgtccctcggtnntgttttcagaccaaaccctagctccgcatcgcctgcctgtcgaccaagcaaggtggaaaagctaagcctttgaagaaacccacttctgataagacggattacgacgaggtctgacatggctaacattcagaagtaaatagttgaggagaaggcgctaaaggagttgaaagctcaggcgcaacagaaggga

SEQ ID NO: 3717 - DNA, 152 bp, Glycine max
  Clone ID: PAT_MRT3847_103362C.1
cgccagttatatgaaatccttattcctatttcctattccctatccaagtaagaacattgagcttctttcatctgtttcaatccagtattcttgtcaacgaaggagccagcagtttcgtaaaccacaaggccacagtgttattttctaaaaat

SEQ ID NO: 3718 - DNA, 616 bp, Glycine max
  Clone ID: PAT_MRT3847_103363C.1
aattaaaattatgtggtcttatttttctatctatggtgcaaaaaggttttatttaccatagggtattgtactttgactgtaatcagtctgcaagaaataacatctctagatcttaatggaagccagatagggcccactttattactagatctatgggtggagaacattgatccatttggtatgatacatgtgagcagttccggacttgatattgctacattgcatttcgacctgcttttgaataaccgttcttagcatatgtccttggatatagaaataatacttccgatctttaacaggataaaacttggcttgtgaacccacagccattagattttgcaacaaacacaggttgaggtcaaacaactcgaagccgcatggggggggaggaggaaatattttgtttgcgcggagctgattgcaacataatttgtactcatcctcgactagtctctgccctttatgctgcagctcgaatatctgctgattgaggggatagtcttgcggaagcagctggataccaaatccgtcttgaatctaaacgttctgcataaacacgccttcttttctgcacactggtgtattactcaggcagcaggcatattaaattcctctc

SEQ ID NO: 3719 - DNA, 441 bp, Glycine max
  Clone ID: PAT_MRT3847_103364C.1
actataatgttcatgccaaggcctattatctaggttatgtgcaaaaagataacgtggtttttacaagtgtgctcatgatgagaatgaagactaaaacttaaatattccaattggggcaacaaagtcctcatctatgttctcctacagaaactaataccacgaaatctcataaaaacaggcatgaagcgatcatttaatcttctttcaacatatgtgaagaagcaacgtcttgaagaagcctataggcacttaacaaggcaggctcttgaggaaaagtggcattccttgatgacgaagaagagaggattcctatagaggacaatgcatcggtgtggacttgccgatgctgctggtgatgatatggggacatgtagttttcatggaatccagacataattaccgaaccaaagttgttggagcgacccataactgggcttggat

SEQ ID NO: 3720 - DNA, 399 bp, Glycine max
  Clone ID: PAT_MRT3847_103365C.1
ttagtgttgtgcctcaggcatgtcgttcactactgggggtgattgaccagctagaggaacaaacgcaagacatgaccacacccggtgtcttaaacgactatcctatggatctctgcctgacggacataaagaatgggatatatggaactgttgagtttaagatgtatacattcaaagtgacgtcttgttccagggcgtattcttatgattggacagagggccccttttttcatccaggggaaaatgcaaggccgcgtgatccaaggcagcatcattacgggtggctcccttgtcccgagtttaggaaggcatcttgcctgacgggcgatgcctgtgagcatgcgcatggcattattgagtgcttggcttaccctgaccagcaccggcctctgtttttca

SEQ ID NO: 3721 - DNA, 2018 bp, Glycine max
  unsure (1)..(2018): unsure at all n locations
  Clone ID: PAT_MRT3847_103366C.1
gacacgcgtccgtgggttttcccttatgtgcagcattatcaggctttatatataaggagtttctgatagaacctcttactagactcattagtacctaaggattctcaaatactcaactcattagcccttatcttgcccttattcctcttcatgattctgatcctaaaactagggagaaaactcaagagaactgaattgtctctaaacataccccgaggaccatggaaactgcctattataggaaatttacaccagcttgttacatcgacaccacaccgaaaattaagagacctggccaaaatatacggacccatgatgcatctccaacttggggagatcttcacaatcgttgtttcctcagcagagtatgctgaggagatactgaaaacccatgatgtcaactttgcatcaaggcccaagtttctagtttcagaaataacgacctatgaacacacaagtattgcttttgcaccttatggagaatattggagacaggtacgaaaaatatgcgccatggagcttctctccccaaaacgtgtcaactcattccggtcaattagagaagaagagttcaccaatcttgtcaaaatggttggttcacatgaagggtcccccatcaacctcactgaagcagtgcactcatcagtgtgcaatataatttcgagagctgcgtttggcatgaagtgcaaagacaaagaagaattcatatcaatcataaaagaaggtgtaaaagttgcagcaggttttaacataggagatttatttccttctgctaaatggcttcaacatgttactggtttgaggtctaagcttgagaagctgtttggacaaattgatcggatactaggagacatcatcaatgaacacaaagaggcaaagtcaaaagccaaagaaggcaacggcaaagcagaggaagatctgttagctgttctccttaaatacgaggagggtaatgctagtaaccagggatttagcttaactattaacaatatcaaggcagttacctcggacatctttgctggtggaattgatgcagtagcaactgccataaattgggcaatggcagagatgataagagatccaagagtgatgaagaaagcacaaattgaggtgagagagatattcaacatgaaaggaagggttgacgaaagttgcatggatgaactaaaatatttgaaatcagttgtcaaagagaccctaaggttacacccaccagctcctcttatacttccaagagaatgtgcacaggcatgtgagattaatgggttccatataccagtcaaaaccaaggtatttatcaatgtctgggcaattgcaagagatccaaattactggagtgaaccagagaggttttatccagagagattcattgatagctctattgacttcaaagggtgtaattttgagtacattccatttggtgctggaagaagaatctgcccaggaagcacctttggtttagcaagtgttgagctgatacttgcatttttgttgtatcactttgattggaagcttccaaatggaatgaaaaatgaggactttgacatgactgaggaatttggagtgactgttgcaagaaaagatgatatatatttgatacctgtcacttataatcctttcctgggaaatggtgcagacagtagggaagtgagtagtgcaagcaaagaaggctgagtaggattcagtgccacgctcaagaagaagtccctaacgtttatgccacatctttgttgaaaaatgcctcagtgcttcagttgttttataatgaataatttgtcattagaccaagttcttaagagatgttattgtgatgtttattgttatgttgcgtttttaagagcattaaattgtggagtttcttttacatttgtcagttatgctttatctctatataaaaagcatcttgtatttaatgggtgtgcttgtatttataaattgcaattttatgtttttttttttgttaatttntgcgatgtagcgtatatatccgttgaacagtgtgaattggtcttaagatg

SEQ ID NO: 3722 - DNA, 264 bp, Glycine max
  unsure (1)..(264): unsure at all n locations
  Clone ID: PAT_MRT3847_103367C.1
ctagaacgcttgcggccgttcgcgatctagacggacgcangggccaccccggcgagcgcggcaacatacaaaaaagcccgaacccctcccccagaagcccacacaggccggcacactcggcccaaagacaggaaacggaggaacagagaaacgaaagaccccaggcaagaaccgacgcaagacggggcgagaccagaccgggggagcccgaaccccaccccgagacgacagacaaagcgagggcaccccacacagggcgcaaca

SEQ ID NO: 3723 - DNA, 239 bp, Glycine max
  Clone ID: PAT_MRT3847_103368C.1
cccagccgctgcccctgacatagaggctgtaaatgcattgggtattattcagctccatatgaatcatagccaaaattgcaactagactgggcgtacttatcttagtaaattgcactaggataaagccctaatccccaaaacttagctattctgacagtagctcatgtattctaggacgttatttggaacgaacattcacgtgttgcttttgcagaataaaaaacaaagtggaaaaagac

SEQ ID NO: 3724 - DNA, 149 bp, Glycine max
  Clone ID: PAT_MRT3847_103369C.1
agtagattggctggaatctattgtcaattcatacgcaacaaatgttacggggccaatttgtgggggtttgactctcattcttttttactctacttaaccccccccccctcggataggaagcacgaggtatatgataatttaacgtacaa

SEQ ID NO: 3725 - DNA, 399 bp, Glycine max
  Clone ID: PAT_MRT3847_10336C.1
gaagaaaagatcgataaataaataatgatgatagtaataatattaataatggtagtctgagtctgagagagtgaagctatcgaaatgaaaccctaaaggacatgatctccgagaaggcactatgaacatgatttcccaccactcactaatgagaataataaataataaaaacaaaatgttcagtgtctctaaagaaagtctcgtgctcaatatttatactactaaataacaataatcataaaataaaaccctaacccatacacaactaccggatctacatcatcaaggcgaccgcagcggccaaggcgacggcggtgacagattcggaggcggagactctgcagaggtgggcgtggctgctggggctgacggcgggggagtcggcgggtccgtcgctga

SEQ ID NO: 3726 - DNA, 475 bp, Glycine max
  Clone ID: PAT_MRT3847_103370C.1
atccggctcgagcaggcgccaaggcagcattgtctgacttcccattcattgcttattgagatgctaaaaaaacaaaatgattgaggaaacacttaaaatacaagaccccctccccccttttttttttttgaagggaagcccataatagttctaatttttccccaacatcaagacgcctgttcccccaaaaaaaacaaaaaacctaaaaaagattttttttttcccctccaaaatggaatccccaccaaagggggaaagcctcctaattttcgggaaaaaggggggggttcgcctttatttccccgctcccaaagggttcagaacttaaattttcccccacattgatggattgaaaggggtgccccactccctttgcttgggggggaaaactccaaccccggggaaaaaatcttttaccggaaatgggggcccgggtaggaaccatacaccccccttggaggccccaaaccccggg

SEQ ID NO: 3727 - DNA, 400 bp, Glycine max
  unsure (1)..(400): unsure at all n locations
  Clone ID: PAT_MRT3847_103371C.1
tctccctcgcgtccgcaaaagaaaganaaganggagggaaatttttttagtggaaatctaaatttcgctcccgattggaaaaaggtcgctctacaaaagctcaatttatttgtggaaaaacccccaaatatgatataaatggagctggttcacattattcagaagatttttctgcaaaggaagatctagaaaaacccataaagagtgatgcccgactgagacaaagaatagaccctcaatacaatgagggtcacgctcagatggaaacaaaattgtttaaaaatggtctcggtgagggtggaacgcctaaaggaaccatgttggatcttaaaaattttaaatctaaaaatgcgctttccaaaaacacagatggaggaaccaccctgggtggtgagctatt

SEQ ID NO: 3728 - DNA, 1441 bp, Glycine max
  Clone ID: PAT_MRT3847_103372C.1
tacagtacactagcctctgcgcacaaccctccactctccaaggagattacaatccattctttctttctcccttcttccattctctttctcattcagtgtgagagagactgcacacaaatttctattattccgagaacgacaatggatccggcggcgataatgaacggcgccgccaacacgacgtcgtatcacctgtcagagatctggcagttcccgcctcccaacccgccagatgagctgggactcagaaggccccacttcacccacggcttcgcggactttgccccggctccgacccgagacgccgccccggctcccgaatcgccccgcattgcccatcagaagcgccgcgacgcctcgggcgaggaggaggaatccgctaagggcgcctccaccaccaatgccgtgaatgaggggggtcgtgtgtggtgatgggaaacgggtcaagacgagtgagagtgggaaaggtgaaggagaaaccagttcaggaaagcttgcggagcaaagtggtaagccaccttcggagcctgcaaagcaagactacattcatgtccgagccagaaggggtcaagctactgatagccacagtcttgcagaaagagctagacgcgaaaagatcagtgagaggatgaaaattcttcaggatatagtcccgggttgtaataaggttattgggaaagcattggtccttgatgagataattaattatatccaatcgcttcagcggcaagtagagtttttgtcaatgaagcttgaagcagtaaattcaagactggcccccagaattgaagtgtttcctcctaaagattttgatcagcaaacatttgatacaactggcatgccgtttgcttcccaagctacaagagagtatagccgaggttcatcgccagaatggttacatatgcaggttggaggtggttatgaaagagcaacgtagtctttgaaatcccatcacctgataataaatgcatataggatcattaatctctccatcagagctcccataaatcatatactcaaggtgttgttgtttagtcctatagacacctcattccctgttttctacaagaggcatggagctgtggtttgtttccacaggatcactagttagtactcaagcaactccatttgttagtgtgttggaaaatgaattcatttacccaatatgtagtttagtatgctgatactcttcattcataacctttaaaatgatagttattattcttgtaaaagaatgctgcttgtcctgaatacataaaggcttacatattgtgtaatagtatcaacattgttgtttgtctgtgaagctgtgttgaataaattaagcccatgtgattttgttaaaaaaaaaaaaaaaaataaagcctaaaatgttgtgtaatagtgtcaacattgttgttggtatgtgaagctatgttgaataaatttcccccatgtgatt

SEQ ID NO: 3729 - DNA, 387 bp, Glycine max
  Clone ID: PAT_MRT3847_103373C.1
aaaccccacccaacaaaatttttaatttaaaatttgcaagatttgaagtttttattcatccaaaacttacaaagtctaaaccaacaaaaagagattggtcacaccttctttagcagactaaagattttgccggagcttttaaagactccacgtcctttgaattccaggatatgctactcaatttttgaatttttttggcgcctgggtaaactggggtgctttggcaactggggcactgggggcactaaaagtattgtgaataggaccttgggctaagcgctccttcctacgagcaagtttccttttcctgatagccttgttctttgcccgtttggccttaaactgagtaaacaaaggtttttatcttgcctttttaaccttggactt

SEQ ID NO: 3730 - DNA, 495 bp, Glycine max
  Clone ID: PAT_MRT3847_103374C.1
attcggctcgagacagtacactagcctctgcgcacaaccctccactctccaaggagattacaatccattctttctttctcccttcttccattctctttctcattcagagactgcacacaaatttctattattccgagaacgacaaatggatccggcggcgataatgaacggcgctgccaacacgacgtcgtttcacctgtcagagatctggcagttcccgcctcccaactcgccagatgcactggggctcaggaggccccacttcgcccacggcagctttgcggactttgccccgggtccgacccgagacgctgacccggccagcattgcccacaagaagccccgccacgctgccggggaggaggaggaatccgctaagggcgcctccaccaccaatgccgtggatgagggtggtggtggtgatggaaaccggattaaggcgagtgagagtggggaaggtggaagaaaaaacaggtcaggaaagcctgcggagca

SEQ ID NO: 3731 - DNA, 440 bp, Glycine max
  Clone ID: PAT_MRT3847_103375C.1
gggggggggggggggcaattgtttttttaaggggaaaaacattggcttgttttccccaaccaatccaaaatttgggatttttcatttaaataaagagcttggttaaaaaaaactagccgctcccccaagggttaattaccgtttttgacagggatcataaattccagggccaaatttcttggccccgtagtatattattttgggcattttttgccttaaacagggttaaactttttatgggtctttcaacatttgaaacccccacaagcaataccccccagaatttttattaaaaaaggggttcctcctcccaccaacaattttatttggagattttgggaccccatttttcttttaagctgtctgccctttctttggaaactttcccccttgaaatgaaatttttcccctttttgcccccaaaagtaaaaatttttttt

SEQ ID NO: 3732 - DNA, 246 bp, Glycine max
  Clone ID: PAT_MRT3847_103376C.1
aatagaccatatatcacaaataaatccccaaataaacgagcacatttataaaatctgaaaaacacatactagcttcaaatcgttaaaacatcccaatagctaatcacttttttcaagagatatcaacgaatatacccaatgctcacctattcatcaatcttcaaatagatcccaactttcagcaaaatgggatcaaaccaattgttacaaatcatcaacacattttttttacctattctttcttca

SEQ ID NO: 3733 - DNA, 226 bp, Glycine max
  Clone ID: PAT_MRT3847_103377C.1
ctcctttctattctctcagggagtgcgctgctagctatgccgaccctaaatgatgagctctttgctttaaccatacgccagttcatgacctagcggttcctccagatgaacagtgagatctaccgctgcttaggctacaaacaaactatgtttctattggcacatataatgaagaacggtaccggttcatataataggtatcatggcaaagaagattccagtgggg

SEQ ID NO: 3734 - DNA, 170 bp, Glycine max
  Clone ID: PAT_MRT3847_103378C.1
ggaacctttgcattctactcattcaggatccatcaagtccgtttaggaatcagagacagagatacttctagatggcccctaaattcaaaacagcacggatgtcagctggaggaaaagctcccatgaagcagcttgcaaccatggttgcacgtaattctgctccaacagtt

SEQ ID NO: 3735 - DNA, 358 bp, Glycine max
  unsure (1)..(358): unsure at all n locations
  Clone ID: PAT_MRT3847_103379C.1
ccagggtgcagctatacagaaaatctggttaaaaaataaacagctaattgtggtcagcattacttggtgtaactcttcaagatcatccaaatgaattgatgtgagcttctgtaataacttcatgtcccagaataaactggtataatctaccggaagaaacgtatcctgccaagcctcaaatacagatttttcacacaacattacaggtgtaaatgaacaacaagcagctgaattttcagcaaaagctgaaaggtctttggatcctgtattcaactgcaacttgtgcttttcatgttcaaaccttcttgatagtatctgtcgaacaaatttaagattaacaatcanatgacgaatgtgc

SEQ ID NO: 3736 - DNA, 453 bp, Glycine max
  Clone ID: PAT_MRT3847_10337C.1
cactgagcagggtctagctatctcgatcgaactgtccaaggtcctgtcacacaaagggaacgcaccactgacacaagcagcagcaacgtgctgagcgcgctagccgccggcgactatggtggtggtgcctccaccgccccgtttagcctgcacctgcgcatacgtattttaatacacggcacgttcgcgtggttactaagtatggttccgctgaaattggttaacgtggcggctatgaagtgcaactagtaaaaattacgtggagggccatgattgtaaaaatgtgcgtggcaagtacgagcggaatgtgttgaacttcaaaaattcgctggtggcgcccaggtttgggttaatggcggaaggaaggaacgttggtggagaaggaaacgcgccgcagagagagagagagagacagaaatacgcgaagggagatatatgagcagttgataacta

SEQ ID NO: 3737 - DNA, 261 bp, Glycine max
  Clone ID: PAT_MRT3847_103380C.1
tacggctgcgagaagacgacagaaggggagaagagaagaggggttagaccgttagaggttagattgtgatacataattgtctacatctatgtgtattttatatagcatacatcctaacaagtgagatcactagtttattatgactttgaaggatgagatgtgtgaatccacaatttgatcttatgtgaatggttacgattatagacttgatttgcatgtgtgtgtgcattggaatttatgatttagttagttattaaaaat

SEQ ID NO: 3738 - DNA, 517 bp, Glycine max
  Clone ID: PAT_MRT3847_103381C.1
cattcaacaaagcctgtggaaggccaattaggccatgcccaaagttcaccaccactagaggatgccatcgttcaacaaagcctgtggacctgcactggatattcagactaagcatttcaccccttatggcttggttccaccactctaaggggctggttggcagtatatcctctgcaacttatcccgtgtgaagctgttgccaccggtagggtatgtgttcaccacattttgctgttgtctggcttgtttttgctctattcaattttattcctacacaggttgctgagttgttggggtcatttggataggtttacctgtgattcccactatttggcaaggtttattttatttgtaacaagctgagagcttaatagccttagctagatgggagtgttagaatattaacattattacattatttgtcattttataatgactcttatttgtgtatttttgcattttataactaccggttggtaaatgataaattgttatttaatcataagtttttttttct

SEQ ID NO: 3739 - DNA, 476 bp, Glycine max
  Clone ID: PAT_MRT3847_103382C.1
ccgctcaggcggcgggcgggacatccaacacgattggcagggagattttgtgccgcgtgctgggcggcatctttggcggaggcagcaagcgccgttgacaccgacggcatggcgcccggcgtcatcgaccggcgcctctcccaccccctgcggcttgcctctcttgcaaaagcgcatcacatggcgcctgtgacggtttgacgacaccctgcaagtcgtcacaaatcagtcacatggctgccgtgaaatcgccatacacaacaacaaaaagaaggaggtacgatgacacggatcaaaaacgttctgctgcgctggggcgacaaggtcatgctgctggccattggggtgtgggtggcagccatcctcggcatctttgccggcgcttggcgcctgcgctggccctgagtcctgtacttcattgctaccgtgatcttcacctagatggtgaatgagtggcccgatgccgggcgccacct

SEQ ID NO: 3740 - DNA, 407 bp, Glycine max
  Clone ID: PAT_MRT3847_103383C.1
tacaatacaactgcaagacaattttactaaggggcagggctaataagcaaaattggtttaacttaaaatacagcataacaccaattttggaacaaaacattaactgtcaagccatctttccagcagcacctttgttttttttagcacaattatcaaattagctcccatcaaatcaaacccctcacatcttcttttgatagatacccttgatcatctcttgccaggacataacaaacttcccaattaaacttactggcaccccaaccaaagaagtcatatgcaacccttgttcctttaaacatgtgccacagcttcttcaatgttaatttatcaagcacctcacgtgcatacttgctgaacatgaattccaaatgtgctagcatgaaccctccctctttgtcataaga

SEQ ID NO: 3741 - DNA, 338 bp, Glycine max
  unsure (1)..(338): unsure at all n locations
  Clone ID: PAT_MRT3847_103384C.1
gccancagtgatacgaccgtggggtcggtgttccctttggtcgtccacggggtccatcccgaccaggcggtggcattactcaccacttgacagttcacccaacctttatgacagctgaccctcttgaggactctccacactttctcctgagcaaactaacacaatcgagcctaacgcagatacacctgacaactcacttgctcctccctctgccaccggaaccttctgacccctctcagacgcctcgacctctcacgcccgaccgtgttctcgcctctcacacgctgcgacactcccgacggagttatacccgcagctgtctaagctaatctttgctc

SEQ ID NO: 3742 - DNA, 242 bp, Glycine max
  Clone ID: PAT_MRT3847_103385C.1
cttttcgtcctgctctgagacattgtattaaatgagagggaatattttccttgagaagaatgagcctgcatacaaataaatgggagcccctatagactccccacctccagggccattgtaacttatacggatccatgacctcccactaccagaccaatgcatctaactcaccgtgccatggctcatgttacggcctcctcccttaacgatttacccttccctaccatgctttttacaccctt

SEQ ID NO: 3743 - DNA, 306 bp, Glycine max
  Clone ID: PAT_MRT3847_103386C.1
attgaaaattatttttttaatttttggaatccatgaaaaaccaaacgccaaagaacaaggcacaactggctgaacaaaacctaggggactaacgaaacatttagcaatcccacaaccacaagcaccaaagcacccaacccgctaaccaaaacaggcgggaggaaaaaccgggccaaaaaaccccaaaacagaaaaaaaaaaaaaaacggaaaccggggaaaagcccaacgggaaacgaccaaaaaagcaagcaacccacggggaacatagcaaaaaacttcaccggcacaggggcccgaaccaggc

SEQ ID NO: 3744 - DNA, 290 bp, Glycine max
  Clone ID: PAT_MRT3847_103387C.1
gacaatccaacgggaaaacgcgtcatcataaatgccgcccatcaacttctcatacccttttattcattccattcgtttctacggtattcttttctttgccgagaaattcagatactgcatttcgatccacattgaccacgtcggtatccaggttggaaatgcctgctgggaactctattgccttaaacacggcaatcaccccgatggacatatgccgagtgacaacatcgttagcggatgatatgacgccttcatcaaatttgtcagcgagaccggcgccggaaagcacg

SEQ ID NO: 3745 - DNA, 424 bp, Glycine max
  Clone ID: PAT_MRT3847_103388C.1
gccgggggggtttttttttttttttttttttttttttttttttttttttttttttttttttttttttttttttttttttaacagggggggccttcctaacctaaaattttaattttaattcaagcaggtttttgggaacccttttttttttttggggggggggtttgggaacccttgaatcaaactaccggccggaaacccaccaacaaattttttaagggtcttttaaaccctataatttttttttttgggtcccttgtttaatgggcaggggggtttttacaaaatttccttttgggaaaaccccaaccagtttacccttaaaatttacaacggggaggggggaaaatttggtttttaaaaacaaccttcaaaaatcctcaaaattggggggctcaccaacaaccttagggggaaggggcat

SEQ ID NO: 3746 - DNA, 381 bp, Glycine max
  Clone ID: PAT_MRT3847_103389C.1
ggctcgaggtagtgaccctctctctcattctatcgatcctgcatcttcgccgtctcgacttcttttctggcggtgctgaaagagctcacgcatggcgactcaacttcttcatcgagtaagtcattatgcctatgactactcacactgacacctcactctctattacgatctgcttgccatgtcagagtgtccttagttatcggacatgatcgtgatgccacaaacaccgtccgagctaaaggagaccgaagatttgccggagtcaacgatactaacgaggcttcagctcgtatcgtctaatggcgtatcaactaagtccaaatgctatacacgtacctgctatggcggcgacgctgagcatgatagttcccatgtcgaacg

SEQ ID NO: 3747 - DNA, 216 bp, Glycine max
  Clone ID: PAT_MRT3847_10338C.1
aaaaaaaatgagagagatgcctaagccctctgaacacaacatgaaactatgtctagttgtggaaacagatttgttcacggcacatacgatggataaatttctaagtcaagcaatgtgcttataaaaggtggcacatcgcctactctcagggcatgatagctcctttgatacgcatgcaaattttgttggggctcacgatgcgtggtttatttaaac

SEQ ID NO: 3748 - DNA, 356 bp, Glycine max
  Clone ID: PAT_MRT3847_103390C.1
tgtttacctgtcatgtttgtttctgttgaatgatgaacttgttaatcctcgttgatcccattacttggtaaacaggattgccattccccatacgctccattcatcaccctttctttcattctgttgcgaattggaactcacactttcagcgtgctagtccattatctcgccttctgttcccctcgcagctttatttgcggcgaaagccggaactaagagttcgcaatgctgtttattagctggcgcacacaaagcgaggtttcctaggctcgtcggtcaagttagccacgttcgctaacagcgccgtacgcgtcactgcggtgctctccacgcgacttgcatcggtgacaagatcc

SEQ ID NO: 3749 - DNA, 459 bp, Glycine max
  Clone ID: PAT_MRT3847_103391C.1
agttctagcaagcagaatggggttgtatagccatatgtatgctaaggttgttgccttcagcaaggtcccacttccaaattacagatatgatcgggatgatcggcggcctcagagggaggtgagcttgtctatcaccatgtatacccaagttaatgtttattttgaggaatatcttggccaaaaatccaggatgaacaaaagcttttcagatttgtcatctgcaagatcaagcagtaatggcagtattggtactgatgaagggctttttgagctacctgagccattagcatccagtaatgcttatatggagaaaattctacggcagaggagcttacaaatgcgcgatcagcagcaagcttggcaggaatctcctgaaagaagaaaaatgctagaatttcgcagaagtctccctgcttataaaagaaagaagcaatattatcagtcatatcaaggaaatca

SEQ ID NO: 3750 - DNA, 337 bp, Glycine max
  Clone ID: PAT_MRT3847_103392C.1
ttttgatctttgcagaatcatgttcctatgagcattagagcatatgatcaactttcataccaaatcttcacgggaaatttttggccacggaaaattacttttacacatcaaaggttctcttttgtatgcttaatatatgctcatcttactgtaatctagtataattgctcatttttgttattgtcttaaagagatgcattggagaatggaactaatagtaatgagctgtcattctattatttcttagatagctgacatgcagcatattcagttctatttctcctattttgattatcgatatatcattatcacaccgattcttgattctgttattttt

SEQ ID NO: 3751 - DNA, 434 bp, Glycine max
  unsure (1)..(434): unsure at all n locations
  Clone ID: PAT_MRT3847_103393C.1
gaaaaccccgggggggaggaccggaaaacccggaacgacccacgcccccgaaataaaaaccgccccaaaccccaccaggaagggggggcacaaaagaacccngacgcaagagccacccggccaacccgaaaaagaggaggcgggaaagcagacgcagaggaacaaggacccncccccaccagaagggcccaccccagacaccccgagcacccggaaaagggaagagccaaaaaagcggacccgccagagaacggaaccacggccgacgaggaggccgccccaccagagacgggaaacagggagcagcgagtgcgagaacaacaccctggacaaagccaagagctcctacagaaattcagggaaaagaacacgaccccgcagcccacaatggccaagaagagacaggcccccccacagccaacccgactgggaac

SEQ ID NO: 3752 - DNA, 508 bp, Glycine max
  unsure (1)..(508): unsure at all n locations
  Clone ID: PAT_MRT3847_103394C.1
gcctatcgccgaaactggagaatacctccctagaatggcacttacgatcctaaaactgggtgcgctacgaatacccctgaccaatgtacggaatgtactatttcccatcacacccatatcgactgacccttggacggtgcaaggcagaacactccaaccgagttgacatgcatcttcttggatcccgaccctctgtacataaacccgaacccatgtgtcttccttgagcacccttactctgagacagagctcatgatccacgcccgtaatccagcctaatcctcctgcgaccttgtggacctctgctgggactacccancggctctgggaagaccaataataatacgtgggggccgcctgacttctctacgacctcaagaacccctagctgtgggtgcccttaaacttcttccggcaggaagattttgaacgctaacagtttggcccctaccaactatggggcaaatggaccattggggaaatgggaacccaccggaggcgaacccca

SEQ ID NO: 3753 - DNA, 540 bp, Glycine max
  Clone ID: PAT_MRT3847_103395C.1
gcaccctcttctcaaggaaggacagttttattacacacagggcattctgcgatgccttagctgaagagagttcgagactcacctcagttgcttcaacgagcctaaattttatgagtgaagatacaactatgatgaacacacaagctagtttgtcgtcaagtggattaatcaatggccagggaatgcaaagtgtttccattttggtccacatgggcttcgtttaatgagcatgggcacagaccaacaaagaccaaacttgtcactatggttgaaccaaggaaatcaccacattaacaacccacttgatgtggcatcatcaagttcttctggtttgcctgaggtattgcacatggcacaacctaataataatgccttaattggttcttctacaatgttctccaattttggaataacgcctgcttcttccaattcatctaatccaaacttatctctaatggggaaaaagggagaaggtggagcttcagatttggcatcaatgtattctgagagtcaaaacaagaattcaaactcagctactcc

SEQ ID NO: 3754 - DNA, 549 bp, Glycine max
  Clone ID: PAT_MRT3847_103396C.1
ggatcaaacaaggaagttcggaagaaggtatatatctgtccagagaaaacctgtgtccaccacgacgcggcaagggctctcggtgatctcaccggaataaagaagcattacagcagaaaacacggtgagaagaagtggaagtgtgaaaagtgctccaaaaaatacgcagttcaatctgattggaaggctcacaccaaaacctgtggcaccagagagtataagtgcgactgtggcaacctcttctccaggaaggacagttttattactcacagggccttctgcgatgccttagctgacgagagttcgagactcacctcagttgcttcaacaagcctaaattttaagagcgaagatgcaactatgatcaacacacaagctagtttgtcgacacgtggattaatcactgaccatggaatgcaaaatgtttcacaatttggtccacatgggtttcgtttaatgaacatgggcacagaccagcaaagaccaaacttgtcactatggttgaaccaaggagatcaccacattaacaatccacttgatgtggcatta

SEQ ID NO: 3755 - DNA, 451 bp, Glycine max
  Clone ID: PAT_MRT3847_103397C.1
tttttcttaaataaaccaaaaacccttgtgctattctcattctctggaattattatggcacataagagattcatcattgaggtcgagagagcgaatgaggccactgatggaaggccttccagaggacctgtctatcgtagcctattcgccaaggatggattccctgctcccattcaaggtctagaatgttgctgggacctttttcgattgtctgttgagaaatatccatcaaatccaatgcttggtcgacaggaaattgaggatgggaagccaggcaagtacaagtggctaacatacaaagaagtatatgaccaggtgatgaacgatgggaattctatccgcagctgtggttatggaaaaggtgtaaaaagtggtatttatggcgccaattctgcagaatggattatgagcatgctggtgcctgggctatagattgtattatatgcccttc

SEQ ID NO: 3756 - DNA, 629 bp, Glycine max
  unsure (1)..(629): unsure at all n locations
  Clone ID: PAT_MRT3847_103398C.1
aattcggctcgaggtaaattcaactcggaagtttgagtatagataggtgctttgcttggagtgagtgcgagtcaatggctcgaggtttctttcgttagccttggaacaaacaaacataccagtcaaaaatcaaaatctcagagttgtttgaacgagaaattgaaatgtctcagaccaagaaattgacgccgaatctggatcagcagagcacgaaggtgctgaatctcaccgtgctccagcgaatcgatccgtacatcgacgagattctcttcactgccgcgcatgtctccttctacgacttcaacatcgaaagcaaccagtggagtcgcaaggatgttgaaggatctctcttcgttgtcaagaggaattcacaaccacggtttcagtttatcgtaatgaatcgccggaatacagataatctagttgagaatctattggattttgagtatgaacttaaaaagccgtacctgttatatcgaaatgcagctcaagaagttaacggtatatggttttacaatccagatgaatgtgaagaagttgcaaatctctttaacaggatacttaatgcgtacccaaagacaccttcaactacaataccgnctgttaacataagtgagtctgaggaactt

SEQ ID NO: 3757 - DNA, 597 bp, Glycine max
  Clone ID: PAT_MRT3847_103399C.1
ccacgcgtccgcccacgtcttccgtacggctgctgggagacgacgaagggggagtatagataggttctttgcttggagtgagtgcgagtcaatttttggtctcttgcgttagtcttggaagaaacaaacacaccagtcaaaaatcaaaatctcgagttcttggagggtttgagcgagctagttagtgtgagaaaataattgaaatgtctcagacgaagaaattgacgccgaatctggatcagcagagcacgaaggtgctgaatctcacggtgctccagcgaatcgatccgttcatcgaagagattctcttcaccgccgcgcatgtctccttctacgacttcaacatcgaaagcaaccagtggagtcgcaaggatgttgaaggatctctcttcgttgtcaagaggaattcacaaccacggtttcagttcatcgtcatgaatcgacggaatacagataacctagtggagaatctattggattttgagtatgaacttaaaaggccgtacctgttgtatcggaatgctgctcaagagttaacggaatatggttttctatccagatgaatgtgaagaaattgcaaatctcttttacaggata

SEQ ID NO: 3758 - DNA, 1156 bp, Glycine max
  Clone ID: PAT_MRT3847_10339C.1
tcggtacgctaccactcgcccttcactcttcacttctcattctctctcttaatatcttcctttctctttctctttctagtttttctctttcactctcttctctttcgtttttctctgcctttgaatttgccagcgacgaagcatcgagaacctcggaagagtaaaacgagtcaaacgtaatcggcagtagcatgtcgcccaacaacgtggaatctgggacaacggatgatacagaggtagtaggacaacaacaacgtcatagtccaatacatgatattgccttgcagatacagacacaggctccggtggaaacccatgggctataccaaacaaatgatgttcatacgcgtccgatgggcatggccgtgatagacgcgatcctcccaccacaaaatccttctagcttaatgagcttcaaggaagctgtagtgtcaaatgcaaggagaattccccttaagaccctagttactttgctccttgtttgtgttggtatcatggatcatcttgcaaaagagttgagcattcaattccttttggaattaataaactcccatgctgcaacacaagcaccgcttagcctaggcgaggcatttcaagggtttcgtactgtgattgcatatgagatggcaatcatgctggtctttctgctggctttgttgcttagttgtccacaaccattatgtgggatggttatggtgacaatctcctttcttggactattcgtccacattccagatctggtgggcaaggcaccagggattgctgtgactagcggtttcttcaggatgcctctcatttgctttacaaccatagtggcttttgttcttacgctggtttttgttttccttgcggtgttctttgcttatcttacctatggatgcgcacgtggtgcggggatatcaacagggggagaacttgaggttgccatgcaagattcgctggggaatgtggaaaaggggggggtgaactgatagctttatgtaacgatttgttaggctctttttttttttcatcggggggtgcttgtttgtttgcgtacgtgatgttttgtttagtccatataaacattaaatttttatataattatgtttatataaaaatttaattataaaaataaaaaaattactagtaattagtcaaaaaaaaaaaaaaaaaa

SEQ ID NO: 3759 - DNA, 1468 bp, Glycine max
  Clone ID: PAT_MRT3847_1033C.1
ctttaaaattgtttacacatttggtgctatagttttttattgtttttcggatctcagttcgttgtatttgagttcgttggcttgattccttagagccaatgcggttctcttttttcatctgggtctaaagaaccactggtgaccaaaattgtgaaaaggggttccttgattttcaccaattcatggcatttcagcactacatttcccgggatttgaaaaccatcccaaatgctgtgactgaggcagaaaaccccaatggttgttttgattgtaacatctgcttagactttgcacatgagccagtggtgacactttgtggtcacctctactgctggccatgcatctacaagtggctccatgtccaaagtgattctcttccacctgatgagcatccacaatgccccgttctcgttgaaacttctcacagagccaaagctgttctctttttttcatctgggtctaaagaaccactggtgaccaaaattgtgaaaaggggttccttgattttcatcaattcatggcatttcagcactacatttcccgggatttgaaaaccatcccaaatgctgcgactgagacagaaaactccaatggttgttttgattgcaacatctgcctagactttgcacatgagccggtggtgaccctatgtggccacctctactgctggccatgcatctacaagtggctccatgtccaaagtgattctcttgcacctgatgagcatccacaatgccccgtttgcaaggcagatatatccaatagcacaatggtcccactctatggccgtggccatgccgctaccacagctgaaggcaaaacagcttcttgtgatgtttttataccaccaagaccatctgcttcatgtgctcaagcccttttggcaacatcatctcaaaggggtcagcaccttccatatcgtaatccttatcagggtcactacttcagctctcatccataccaagaagaggatgatgccacttcacaaatgctgcaatcttggatcccatcaccaccctgtgactggggatgtttgggggagatggtttatgcccaggggtgtttggcaacccagaaaatttgtatgcataccccaattcttatcagctgatgggaagtgccacccctagattgagaaggcaagagatgcaggcacacaaatctttgaacagaatttctatttttctcttttgctgcttccttctttgtcttgttgtcttctaagtgagcacttgagattattttctctcattctctgttgtatactttgtaaagaagcatggatgcaacctttaaaaacttgatagatcattgagtaaaattatcacaggctaaagagcttgtgagtctatacacctgcatctacacttctattcgttttattacaccttttttttggtgtgtgtgtatatataagaataagacactaataagatttaaactttgaatctataaactaaaaagaaaa

SEQ ID NO: 3760 - DNA, 435 bp, Glycine max
  Clone ID: PAT_MRT3847_103400C.1
aaagaaaatttctcggcttcatcccgggtttagttttggggggggcccaaaaaaccttggcaaaacaaaaatcccgatttagatttgccccaaaggggtttttaaattttaaacccaacctggaaattaatttttggaagagaaaccgggtttttaaaataacaaaaaggctttttgggccagatcaagccccaactacttgggggggttcctcagccaagggttcatgggggggggtgtccccctgggccccaacatttttagaggaatccccaggaccctccatcagttttccaagatcaaacttgggggctttaggggtcttaactttacgaaggaaccccttttggaggggatagacgctaaagggtgccttttcaatctcctttccaatcatttgggggatgaacttgccccccaattttttcaaaacac

SEQ ID NO: 3761 - DNA, 1943 bp, Glycine max
  Clone ID: PAT_MRT3847_103401C.1
gtcgatttgggtgggttcgaagtttgagtatagataggttctttgcttggagtgagtgcgagtcaatttttggtttcttgcgttagtcttggaagaaacaaacacaccagtcaaaaatcaaaatctcgagttcttggagggtttgagcgagctagttagtgtgagaaaataattgaaatgtctcagacgaagaaattgacgccgaatctggatcagcagagcacgaaggtgctgaatctcacggtgctccagcggatcgatccgttcatggacgagattctcttcaccgccgcacatgtctccttctacgacttcaacatcgaaagcaaccagtgggttcgtacttttctttctttctcttcgcttcttcccactttcttctctcatcttctgttttactcgttctagagtcgcaaggatgttgaaggatctctcttcgttgtcaagaggaattcacaaccacggtttcagttcatcgtcatgattcgacggaatacagataacctagttgagaatctattggattttgagtatgaacttaaaaagccgtaactgttgtatcgaaatgcaactcaagaagttaacggaatatggttttacaatccagatgaatgtgaagaagttgcaaatctctttaacaggatacttaatgcatacccaaagactgctccaactacagtactgcctgttaacataagtgagtctgaggaacttcagccagtgtcaattataccggaaagccctctagagtcgtcttcagctactgcttctgcaattgatgctgttgaagatcctgcaattacaaacttcttcagtacattgaaggttactggaaattatgcttccaatatggaaaattttagacagcattctgcaactgtcacttctgctcctagtggtttattctctactgcacctgctgtgcaaattccatctgcctctcattcaacttcatcgatatcaggcttccctcttgactctcttgaaacagccaagagtggcaatcaaatcattaatcttgttaagccttccacgttttttgcatcgacgtcttcatcttcactgttagttccacctatttcttcatctgtgcaacctagtgcagctgttcaacattccctgaatctgccacgccaatatggcactccagtacttcaacccttccctccccctaaccctcctctttctcttacccctatttcaagctccactccaaatagacctgtattcagcagggataatgtccgtgatgcacttttatcattggttcaggaggatcaattcattgacatgatgttccaggcattactgaaggtgagtcattcatgagtaatcaaacactgaaggttggatggaaactgcatataaagttagttctgtatattgtagttacacaccgtcacatctaacaggaggtgtaacctagtatagacatccgtccgtctttagctttagccacaactttgcacgatacatctgtaatggccaattccacaatatactaacaaatcatatggtgcattaatacactatgatcttcaccactgactttatgtgtgtatacgtgaactagttataagagaaaacaatggcaaaaagaatgatcttaatcactatgttgatataacgattgctccacgtttacgcacaaaaaactaatggtgaagcttctgtgtattcttacactgcaactctgttgtgtattgtagaaatagccgtctgtatcttcacaatgataaaagtgtttcgatgtcagtgtcgccttattaccctttgttgtctgtactttgtggttttaaatacaatcatggttctgtcgattgagtctttgcattaagttggacaagtcctctctatcgaccaatgaagatgcatgtataatcccatgcttagtatgcattttaatataaataaataaaaatttacctttctctttagagctt

SEQ ID NO: 3762 - DNA, 427 bp, Glycine max
  Clone ID: PAT_MRT3847_103402C.1
gagcatggtctagctatctcgatcgaactgtccaaggtcctgtcacagcaaaataaccggataaggcgggtgggaccacttagattattatgccgcatatgctgaacgcacccgacgttaaaccccgaacaaacagctgctaatactatgtggtaagggcgctagggattaccataataacccaaacgtacgcacccgtgcctcggaggtttatatggagctcatgatgcattgaattgaatccccaaaccgccagcaagtaggactgaggggcgtaagaggccttattagttgcaacccaaccggatgaggacagtggtacacgtacgcttagcggacgacacgggaggcacaaccatgttttaaccaataaacacaacgtcttggtgcggagacggtattgtgcggtgccacagtaataagagtg

SEQ ID NO: 3763 - DNA, 373 bp, Glycine max
  Clone ID: PAT_MRT3847_103403C.1
cttatcactacaaaattttcaagggaacataaaacttttttaacaccaaattaatcccttgataaacatttaaagctcaaaaacttttggaaaaacccttgggaaaagccctatgaaaggggatggtttccattaaaaaaccccccgaaagatcttaatccaaaatgaactttgttgaccccttccctaaaggagacccatcctacaagactctaggcgacggcactcatcgaagaccctaaaaaagtccacgtccattgccctctaaggtcttcccaaaacccacatgcccgcgggaaacgatttcccctacaaaacccctaagagcgacaagggggacttaaaatgcacaattttttggggggatgtataa

SEQ ID NO: 3764 - DNA, 459 bp, Glycine max
  Clone ID: PAT_MRT3847_103404C.1
gctgtgaaaaagtgcatcaattagatcatttccatcgattgaagttaacaccattagcattatagatttcgacggttttcctttgcaattagtagtgtttttagccactgctacatttataattattatgtacaaactcatcccctctccttcgtcggacctggtcgatggtcgtgttccttcaacgccaccagaaaataacaaacgttcgcatctatgatgcaaaccaagatttgtatcatcatcatcctcgagattggttcctccagcgtcactgcctcctcattgtcagaatctgaatcaataacgaggttctgaccaccgcccccctacctcactcatcctccccatcgtcgagtcactctccaatgcccttgtcgcttacaacctccaacagtggcaatggcggtgtagaaattgcagcaccttctttggtggaggatctgtggtttcagatct

SEQ ID NO: 3765 - DNA, 375 bp, Glycine max
  Clone ID: PAT_MRT3847_103405C.1
aaaccaacaactgggataaatttccccattaaaacaagggaaagcccaaaaaacattttttaaaccaaatttttggggccactgaatggtgtccaaagggggtgcacacatcccgtaaaaacataaacttttttaccgaccgacccttttgtccaaaaaaaaaatacctgccaattttttgaaaggaaaaaaacacaggcttggacacttaacagtttttgcccgtttcacaattaaaacctactccctaacaaccctttttttgaataaaaaaaaaatttggataaaaaaaaaccattcggagccccccattattatttttaaaacccccccccccccccccacattaaggccgctccccacaaattttttttg

SEQ ID NO: 3766 - DNA, 504 bp, Glycine max
  unsure (1)..(504): unsure at all n locations
  Clone ID: PAT_MRT3847_103406C.1
gcacgaggacattcagagtggagttgctcacctcaaaaaagctctgcacatgttccctaactgtagtttgataaggaaccttcttggctacctcatggtatccagtaaggagttaaacaattgtcatgtggcaacaaggtgttgtaaacttgaccatcttgatctttccgatcaaaaaggtttcaaatcagcttctgatattcatggtgcaggagcagttgcttgctataccactggcaacagcattccaaagttcacctttccaacatgtacaaagcagtgttctaatcatcccggagctatcagacacctgcagaagtgctttcatcagaaaccatggaatcatgattcccgctacttgcttgttcttaactatcttcagagggcacgtgagcaaagatttcctcatcatctttgtcgcatactaaatcgtctaactcatgctgctctttcaaatgatntgtatagtaggacagaaatgttgtatcgatatagatacttcca

SEQ ID NO: 3767 - DNA, 463 bp, Glycine max
  Clone ID: PAT_MRT3847_103407C.1
ttggggggggggggggggggggggggggggggggggggggggggggggggggagaacaatacggcgacgaagggagggactcgactcgacctttaagtagagaccatgatagggatgagagtatcagtctcagaataaataataaaggcagatagcaaatccattcagcacggaatgaaccagcccatatatgccgtgaatgctaaagagatagagagggggttaacagagggcacgggctagcgaagccgcactgacgaataaccgggcacccctggtttccacacataagtcggcgacataaaccaccacctggtcacagcagtaaaaccacacttaaccccaagtggcttataaacagcccgagcatgtaaagttaaccctttaagagaccaactacaccagagccatggaccgagccttttggggacccgaggagatcataaagctacactacgcaaag

SEQ ID NO: 3768 - DNA, 812 bp, Glycine max
  Clone ID: PAT_MRT3847_103408C.1
ggaagcgtccgaggtcttcccccaatgtcaagcgtcatgaggcgacgcagattgcatttgatctcacgattccgcgccacaccgtgcgcacctgggttcgcgatgcgattcgtgaatttaagagagtcctattagtctcgtaagtaatttgatttggatagattcgcaaaagaacaaagatgaccaatctgcaaatacaaacagaggaaccccctctgagtcaaacaccgcttctaatttcaattcagcagcaactagagaacgagaatgagggaaatcatcatcataataataactataatgagaataagaaggaccaagacgttcaagttgacggagagattgtggaggagagcctggtgcggttggagcgctttcttacgctgttagggttcaaccaggactcgccgttgagcttggtggtttcgtggagcgtgttcgcggcggtgggagttgtgacgccgctggtcgcgctttccatgtgcgagtgtccggagtgcgacaggtacgagattcaaagcttcgagatggcgatcgtggcgtttcaggcgagcctagccgccgtctccttgctctgcctctcccacaaccttcgcaagtacggtctccgccggttcctcttcgttgaccgctactccggcaagttgcattgctttcaccgcgactacgtcgctcagatttcggtttctctgcgtatgctttttctgtgggtgttgccgtgtttcattctgaagacagttcgagaaatcattcgtttccaagtcataccaatatgatttttgattaattcaaagtacatttttttattgcct

SEQ ID NO: 3769 - DNA, 640 bp, Glycine max
  unsure (1)..(640): unsure at all n locations
  Clone ID: PAT_MRT3847_103409C.1
cacgcgtccggaaatagtaataataacaataacaataatgtgaataagaagaacgaagacgttcaagttgacgctgacggagagattgaggaggatcagagtaaagtggaggcgagcctggtgcggttggaccggtttcttacggtgttagggttcaaccaggactcgccgttgagcttcgtggtttcgtggagcgtcttcgcggcggtgggagtggtggcgccgctgctggcgctgtccatgtgcgactgtccggagtgcgacaggtacgagattcagagcttcgagatggcgatcgtcgcgtttcaggccagcctcgccgccgtctccttgctctgcctctcccacaacctccgcaagtacggtctccgacggttcctcttcgttgaccgctactccgggaagatgcattgctttcaccgcgactacgtcgctcggatttcgggatctatgcgcatgctttttctgtgggtgttgccgtgtttcattctgaagacagtgcgagaaatcattcgcattttctatgtacaacatgggtcctggtggctctcgcttgctattttatcagctntgattatttcttggacttatatgagtacaatctctctgtcagcctgcattttgtttcacttggtctgta

SEQ ID NO: 3770 - DNA, 439 bp, Glycine max
  Clone ID: PAT_MRT3847_10340C.1
ggggtccgcaggcactctactgttgccctccactctccacttctaattctctctcttaatatctcccttcctctttcgggttctagttggtctctttcactggcttctctttcgtttttctctgcctttgaatttgccagcgacgaagcatcgagaacctcggaagagtaaaacgagtcaaacgtaatcggcagtagcgtaaacaaatctaattttcccgtttatagttttcgcttgctttgcttttgatattgctatcctctgaataatgatccacgctcacacatgcaatattttttaatacttgtagatgtcgcccaacaacgtggaatctgggacaacggatgatacagaggtagtaggacaacaacaacgtcatagtccaatacatgatattgccttgcagatacagacacagggctccggtggaaacccatgg

SEQ ID NO: 3771 - DNA, 238 bp, Glycine max
  Clone ID: PAT_MRT3847_103410C.1
ctcacgcgtacgctcatccttcccataataaagtttgaataactgctgcataacatgggccagaataaaacatatcaatagcacgaacccacattagaactacaaaatctacaccccaatcacccaatattccaaccatcttgcatccacaaaaacagccagtctcatgtgcgataaccataacatcaatcgaccacgttaacagccatgttaccttttatttcgtcttcttcgactt

SEQ ID NO: 3772 - DNA, 380 bp, Glycine max
  Clone ID: PAT_MRT3847_103411C.1
ttatttttaaagtagtctaaggcccatttattgggaaccctttgcagggacacacatttattgatgggaacatttgaaaggcgtttggaggacattgactaatctgtgacattccaacaagagtgaatgataccttgccctcccttttccaaacaccgaaagaactgcccaattattcgcatgcagattaattaacaacactgcatctaactgctctttgctaatgctcgctgagtaaaatggctactagtgcagaagcatacctacgaacaaggcactggtggcggatccacgcgcatgaacatggacaggcctgatggcacgttacgatgggtgctacaagaacgcatgctcggagacctaactgcaacgcgaaacat

SEQ ID NO: 3773 - DNA, 201 bp, Glycine max
  Clone ID: PAT_MRT3847_103412C.1
gtttgcgtttaatttaccaatgagacactgtctccaactgctgctagtctcaccgaacccgaagatttcgttgtcctggcatacggcggatagtgtcctcattaggtagaaaaacccaacgggcgctatcgccattggctaggcaacccgtatctctcctgtaactaacgcgcccgtggcttgaccacacatgacagaaga

SEQ ID NO: 3774 - DNA, 1218 bp, Glycine max
  Clone ID: PAT_MRT3847_103413C.1
ggctcgagagagaaaccctacttagagcagccaaaccttacgcattccatttctctctattcgctctctttcaatcacaacaacatggccgaacgtggaggcggagaccgtgccggtttcggtcgcggctttggcggtcgtggacgcggcggcgacaggggacgagggcggcgcagggcaggagggcgccgcgacgaggaggagaagtgggtcccagtgacgaagctggggcgcctggtgaaggaggggaaaattcggagcctggagcagatctacctacactcgctcccaatcaaggagcaccaaatcattgacaccctcgtggggcccaccctgaaggacgaggtgatgaagatcatgcccgtccagaagcagacccgcgccggtcagcgaacccgcttcaaggccttcgtggtggtcggcgacaacaacggccacgtcggtctcggagtgaagtgcagcaaggaagtcgccaccgccatacgcggcgccatcattctcgcaaagctctctgttattcctgtgaggagaggctattggggtaacaagatcggaaagccccacaccgttccctgcaaggttaccggaaagtgtggctccgtcaccgtccgcatggtccccgcccctcgtgggtccggaatcgtcgccgctagggtccccaagaaggtcttgcagttcgctggaatcgatgacgtcttcacttcctccaggggttccaccaaaaccctcggaaatttcgtcaaggctacttttgactgtttgctgaaaacctacggttttctaacacctgaattctggaaggagactcggttctccaaatcaccattccaagagtacactgatctattggcaaagccaacagggaaggcccttatcctcgaggaggaaagggtggaggcttgagttagcagaagcagcagcagttttgatgttatcggatgattgtgcctcgtcttaagcatgctaggacccagtaattatatgttttgctaccttttgttatttcattttctattgaaggacatattatatatctccatgctttttgttttttctcaaatttagttgaatggatattatttactgaactttcaaacaggggtttattaaatttttcatgctgtcccaactaaatcataattcaaagaaaagaaaatgtgtttctgcattcccatgagagttgatttaatacaatatcttagttgtatttggttgtcc

SEQ ID NO: 3775 - DNA, 290 bp, Glycine max
  Clone ID: PAT_MRT3847_103414C.1
tttcttttttctatgtaggtggatctagcagccgtatagattctgttagcagggttgaaggtaattttaattttattttcctctggattgtgagaatttatggcatggtcccagagcatccaaacaaaacaaaactaagggggtctatctagcttagtatgtgtgagatattgtaaactttctgtcacgtgtctttgattcattacaaaaagagcttccaaacaaaacaaaaccaagctcttcgaacgaacaccttattacatgcttctagaccactatggttttgacta

SEQ ID NO: 3776 - DNA, 500 bp, Glycine max
  Clone ID: PAT_MRT3847_103415C.1
catcagctagtcgtgaagtgatgattccctgtattgaaaccactgatgggcctgagcttgatgatccattgaaagatactaaggatgaagttcttatgcaaaatcaggcagctaaggaagagtggcatggttttattgattatgatggaaccaaggagtccattgaagaggataaatttatttctgatgttcaagtttcagaacctgacccccatgagaatgctatgcataatgagcattctacttggatgtcatgttctacattgaagccaaatgtccccaggaaaaaaaggaagatatctgcctctaagaggttttgctgaatcctattggaatggctattcaacaagttgaaggaattgagaatttctccaacaagttgcagtatgcttctgtcgtaatttgttaattctggttatttgttttatacactctttcatagaggcattatatcaattgtacatgatgtgaatatggtagtatactctattcttttggga

SEQ ID NO: 3777 - DNA, 423 bp, Glycine max
  Clone ID: PAT_MRT3847_103416C.1
gggaaaccccccttttattggaattaaacctaaaaaaaggccttttgcctgaatcatttagctacttggacttgggcccatcttgggcctgaaaattgaacccatgacatggggcccttactaaaaaaactaccccggccccaagaaaaagcttcccccctccccaatttcatgaaagctgaataagccccccattgggataatggggggggatcagggtccgggcacaaaccatcaagcatttgggcttccttagtcatgggagggcccaaactcaccttattttgtttgccccaaaaagcaactttaaaagcagccccaacccttttattcttttaaaaaaaaattatttttggaacaagaaccctttttaggttcccttcttccatcattttgaacacataaaaaggaaaaagcgccttt

SEQ ID NO: 3778 - DNA, 312 bp, Glycine max
  unsure (1)..(312): unsure at all n locations
  Clone ID: PAT_MRT3847_103417C.1
gtccatnctgctcgagcatcanttctaacanacntatttttcatttagnttagctttnattttccagtnntaanattttccattanaaaangagtctctatgtcacgtncacaggggatcacgtttcacacaaatacgccgncngnggtctntaccaggactaacnagtataaggccancagtcannagcgancttagnaatccatcncgctccactcnaaaatctcaatatcgtattcgtttagnagacaaacannactngcgnttncantacggctctnanagnncgacaattgcttnaatacgttcgtc

SEQ ID NO: 3779 - DNA, 418 bp, Glycine max
  Clone ID: PAT_MRT3847_103418C.1
aaaaaaatttaaatttttaaaaaaaaaaaaaaaaaaaggacaaacaataaaaaaggaaaacaaaataacaaacacaaggggcgcccgctcataaagggggccgtcttatttacaggttccagcttagtgtacccttttttgtaacgtcatagattttcaataccgtggcctaaattcatataattggccttgtggtaaaaccctgttgattgggaaatccttgtcgttaccaagcttaatccttttgccgtttgtaccattttcgcaaactgccggactaatggaacttcccatcacggtgggcccttaaaaacggttgtggaacccgctttgcaaaggggcctcaccctctttgggtgcattatatacccccattgtgacggttacactcgtcagttccttatcacttgccacttcc

SEQ ID NO: 3780 - DNA, 655 bp, Glycine max
  Clone ID: PAT_MRT3847_103419C.1
attcaaagcatgtgcatacgaagaataaaatatttaaaactgaacattcaaataataaaatcattcaccattctaacacttgtctcaacatttattctttgatcatgttgagaaatttatatatgttctatcattcgttattatttgtctattgtagtcatgttttaattgattgttgttatcctaacctagcctcgtaattgcgaccattgagacactgaattgaatcacaattgtagttaaataagctcaaaacaaaaacacagatgaaactgtagaatccaccatcttctaaaaaccaaatcatcatttcttgagtaaatttgcttagagcatgcattcaagctcaacaacaacatccatgaaatccgatcactcatcaaacggagaaaaatccaaacttcaggactcacaaccccaccaacaacaatttcaaattatagcactagcaagccactactacaacataaaaaagaccgatgagttacttttttattggtgtaatttaagttacagttttgatggtggattggttatctagtcaaggaaaaacagtgccaaccattgagacattgaactgaatcatattgcagcaaaatcagcttaaagttaaaacattgtagaaaaaggttcaacatcttccgaaaaaacaaat

SEQ ID NO: 3781 - DNA, 1840 bp, Glycine max
  Clone ID: PAT_MRT3847_10341C.1
gcaaataaatcacatccattcccagaatgaaacgacttgcaaaaaacatacgaggggtacgttttgcacggttcaaaaggagattcaaaacgaaaatctggtaaaaattgcgagcatataaacataagaaatcaacttttgacatggacaattctgaaaacatgacagaggtcgcaaacaacaggtcctaaaccaccaaaatagaagcataatgatgatatcacttcacagtttgaataatggagaactatatcacacaggagtaaaaacaaaaaggaacgaacaatactggttcagggtaatgtaacgaagcatataccctttttactcgaaacaattacattgataataaaaccttcatttatgaatagtcctctccttcctcatcatcttccgctccttcagccccaacctcctcatagtccttctcaagagcagcaagatcctcacgagcttcagagaactctccttcttccataccctcaccaacataccagtgaacaaaggccctcttggcatacatcagatcaaatttgtggtcaatgcgagagaacacctcagcaactgcagtgttgttgctgatcatgcatacagcccgctgcaccttggcaaggtcaccaccaggaacaacagaaggaggctggtagttgataccacacttgaatccagttggacaccaatcaacaaactgaacagtcctcttagtcttgatggtggcaacagcagcattcacgtccttaggaacaacatcaccacggtacatcaagcagcaagccatgtacttgccatgcctgggatcacacttggccatcatgctcgcgggctcaaacacggcattcgtgatctctggcaccgacaactgctcgtggtaggccttggcggcagagataaccggagcataagaagaaagcatgaagtggatcctggggtatggcacaaggttggtctgaaactcagtgatatccacattgatagcgccatcaaacctcaaggaagtggttagcgacgaaatgatctgggaaatgagcctgttgaggttggtgtaggtgggcctctcgatgtcgagagatctcctacagatgtcgtagatggcttcgttgtccaagagaacagccacgtcggtgtgttccagaagggagtgggtggagaggacgctgttgtagggctccacgactgcggttgaaacctgaggggaagggtaaatggtgaaccctaatttggactttttgccgtaatcgacggagagacgctctaacaagagagatccgagaccggaaccggtgccaccgccgacagcgttgaagacgaggaagccctggagaccagtgcagttgtctgcgagctttcggacgcgatccaagcacagatctacgatctctttgccaacggtgtagtggcctctggcaaagttgttggcggcatcttccttgccggagatgagttgttcggggtggaagagttgacggtaagtgccacaacggacttcgtcgatgacggtgggctcgagatcgacgaagacggcgcgagggacgtgcttgccagatccggtttcgctgaagaaggtgttgaaggcgtcgtgggctacaccgaaggaggagtcacttggcatcatgccatcgggctggatgccatgttccaggcagtagagttcccagcaggagtttccgacctggatcccggcctgacctatgtgaatgctgatgatttctctcatttttggattccaagtgcctctctctctctctctctcactcttcactcttcactcttaagtcttaagtgtccccttccgcgtcttctcgcagccgtactcgagccgctcgagccgattcggctcgag

SEQ ID NO: 3782 - DNA, 368 bp, Glycine max
  Clone ID: PAT_MRT3847_103420C.1
tgtgttacaactgaatttggtgatcgacatagctagaatcagctttatgaaaatgaaggtccttgttatcttaccttctacaatcttggtataatgtcaatgccatgcttacaacttccttcactctcacaatgaacacttgctatacactccttactctccaggtgaaatgcgcagctcatactcttgctttccaactatactattaaatttggctttgaaaccattattgcacatttcgaaattaaaactaacctgtacatgcatggcaatcaatatatctcatactccaaagcttttcaataaccattttatttctatgccaaatacctcacattccaccccgacgtcacattaacattcagtat

SEQ ID NO: 3783 - DNA, 167 bp, Glycine max
  unsure (1)..(167): unsure at all n locations
  Clone ID: PAT_MRT3847_103421C.1
atctgtgacgagcatcatggcctcgagagcagtgctattgttggctatgtgtgtgttccggccatggttgtngcattcgccagaaagaaccttttcgtaagggcggctatggacctgcggtgtttgaactagaacactaatgcggntagtagtgccatnaganagta

SEQ ID NO: 3784 - DNA, 369 bp, Glycine max
  unsure (1)..(369): unsure at all n locations
  Clone ID: PAT_MRT3847_103422C.1
cccncccctttatacttttttttttgggcaaaacgataaaaattggagttttttgagaaccacacggtgtgcatccatccaaggttgtaggacaaaaggagcatgaacatccttaaaagtacatattgaaaacaacactagtgccggaaacaccatctcggaccaagagtgcaacaaatctattagcgcaccatgatgaagccaaattcctaggcaccgctacctaggcactagctgcgggaaattaggccatactttcggagcaaaacacgaggtttcccacacagtcagcaagtgcaccaaccatgaccggccctgtccaggtgagacatccgaaggttcaagtgccccataggtccgccggaccaa

SEQ ID NO: 3785 - DNA, 434 bp, Glycine max
  Clone ID: PAT_MRT3847_103423C.1
tgcgtatgaccaggaagctttgcagcttgcgaatgaccttatggtaaagagggataaagagaaacttgagctagaaaaggaggttgaaatatatacaaaaaaggttcatgaatatgaggttagagaaatggcgatgtcaagaagagaaagtcatatgagaagcagaactgctccctcttgtagcaatgctttagatagtgatgaactatctattgatttgagtcgagacttaaaagaaaaaaatggtaattatacccatcaagatttcagcaaccagaatgcttatgaagatgctgtcttatatttggaggagtcattggaaaactttgaggaagagaggtgattaattctaaaacaactgaatatgctggaagaaaaactttgttacatttgaatttttgaaaaaaaaatattttttgatgggtatttaaatc

SEQ ID NO: 3786 - DNA, 181 bp, Glycine max
  unsure (1)..(181): unsure at all n locations
  Clone ID: PAT_MRT3847_103424C.1
cacngcannatntcaatttcgtgtaggttaccttgagcaannaggaatatttcagactactcctcctttctctaaggatgcgagcatgncgaactcctggctgcaaagtctnaacnngcagcccgagtagactcaatacgtngggatccatctggnnagnctggaagggctttcnanggat

SEQ ID NO: 3787 - DNA, 1542 bp, Glycine max
  Clone ID: PAT_MRT3847_103425C.1
gattgggtaaatttgggttttcccgcgcgattttggcctcgacggcgaggagggcgtcggggctggtcagccgtacggctcgggagcgaatatgcgtggagggaaataggaagattcttgcgtaagcagcatcttcctctctcttattctattcccttattttccctttttgtttcttatttctcaaaattcaaagaacctgaaatcaaccacaaccttctcctatatataatacacacttctgcattgctattccttctcagcattctccttagcctcaggcttcattgttggctagcacttaacactttccaaccaatcagtaccagcaacttcttgctggtactcaagttgtcctgcatcttctgtgggggatgacatgactcaaaacagcatactgaatcacagtagagctcttgagggtgtccatggggtccaagtggcccctaactcgccatttgatttgacagaaactaatcaaagtggggactttcgtacttcaactggtggagcatcaactacagaagcaaatcagctgctgttgatgcaaagactatggcaacagagaccagcatgcttgagacccatccattgtggtattagttgtcacggtgatcagactcttgctgaaacagttgctaatgtgcttacttcaattccttttatagctcttggaatccatgcccccaggaagaatctcaattctaagttgtatgctaattcactaattggagttggagtggcctcaagcatttaccattcttcaagaggaaggttgaggaaatttttgagatgggttgactacacaatgatagccacaacaactatttgtttgtcaatggccctccgaaatgagaatccaaagttactgatggcagcatctgcaatatgtcttccagttaatccaatgatggtttcagttattcacactgggatgatggaggtagcatttgctagaagggcattgaaggatccagacttgagaatggctcacacagtgcataagacatcgtcgttacttggtggtatgctttttgtagctgatgatttatttcctaaaactccttaccttcatgctgcatggcatcttgctgctgctgttggtgtaggcacctgcaataagcttcttgagtaggtgtgcacactctattcgaaagctggaaactatgcattctgagtaagaatagcatcagcataatctgtcgacttaatttgtagaagcaatggttaagatcataaggtagtacattgtattttattggattcggttgaggatgtagatatgcaaattaggttccaaattattctacccctcttcaatttgtagttttatgttcattagttaaactcattggagaaagcgattcatgcagcaaaaatctggcacctattcttctccttagataaacatgcagttatatataaaacatcgtgcattataattctatctgaacatgtatgttgagatactatggagactcttgactttttagtttgaagtgtgatgggattttctgaagattggaaatatattatatcatg

SEQ ID NO: 3788 - DNA, 644 bp, Glycine max
  unsure (1)..(644): unsure at all n locations
  Clone ID: PAT_MRT3847_103426C.1
gccggagcctcctggacntatccgatcaggccatganccatccgcaaaantggctacntcgtcntnnanggtcatccctgcnagggtgttganttttctncttccanaactggtnngcncngccatgctaattgtcactattgtngggattgacattattcactgctcaagtaagctcnnaagatatgntnccntcttctcacanctgtgatgttccccatgttnaatcntngctgnttcccaattgattgacattgacgtaaganngntttcttaacttgcttactgaaatatgngaancacccagggangacctcnaagttacctactgaatgangattcagcgtacactgtattgcangatgngttntgttgaanggttagggaccttgttngtntctntnatgtctgcatngggtnaggancanatttgtgcncggaangatnttgggccanncaaattcctcaattgctggtntttgcngttttcatttatgcgtcagttatatattgtgtgtatggatcctgttaaaaccccngatttntnnanacctaantcanactatttcatccccgntnttggatgttaccaaactgtttaacatctctccgtttcaattgtctgatntnactggacaattcat

SEQ ID NO: 3789 - DNA, 522 bp, Glycine max
  Clone ID: PAT_MRT3847_103427C.1
ggctcgagaaattgcataaaatgtttttcttcagggtatgtattctaaagtagtttttctttcgttttttggttcattctaaagcattccatttattaacttttatttcgaaattgtgaaaaattaaataaattaatataagatttaaaataactaacataaatcatctgcatcagttgttctggagtcttggtttacatcaatgttttcatgtagatataaaatgcattacattcctgcatttcatgtagaagtactaatagttttagatctttttgagatatgttagccgtacattttatgacattctctctcattggcttacatttacttgaaaacattattttagattcacttcttatgagtctgtttcctaattgtatagttatcaataaattttaattgattacagagtgcgttaaatattttagagtggtgtgtgttactagcacttctcatattttggtaaacaagcacacttcttcttgatgctgctcttgcttatgatagggagtagggggc

SEQ ID NO: 3790 - DNA, 437 bp, Glycine max
  Clone ID: PAT_MRT3847_103428C.1
cccacgcgtccgaaagagtccttagggaaagagttacgggatatgcaatgttatgacccactttaagcaaacatggagcctttatttgttactaattaagtcttttcttcttaaaaggccaatcctcctgtttttggatggatttcagtcgtggcggctaacaatttatttattaataaatgctttaaaattaaaaataaagtcaaggaatgaactcaaacaagtcagtaatacagaagtatgtgggacttaaaatgtcgttttacgaaataaatgtacataacctagaaaatcaagaacgtgagtggtctagcaacatatgattgaatttattccactttattaatgattaaattttatggttatccgtgatattttcggttcagacttcagacatctagttataatattttaaaaacatatctgtctacactatc

SEQ ID NO: 3791 - DNA, 361 bp, Glycine max
  Clone ID: PAT_MRT3847_103429C.1
gcaatattatagtggacattgaatactttaaagaagccctttccaaagtagactctcagatgaaaaatcttcctgcaacagctcaggtagctgcacaacaaggagtctatcttgcagactgtttcaaccgcatggaggagtgtgagaagtatccagaaggccctctcaggttcaggggagttggacgccatcggttccgtcccttcaggtacaggcatttgggacaatttgctcctctaggaggagagcaaactgcagctcagcttccaggagattggatttcaattggtcagagcacccaatggctctggtattcggtgtatacaagcaaacaagtgagctggaggacaaggtttttggt

SEQ ID NO: 3792 - DNA, 262 bp, Glycine max
  unsure (1)..(262): unsure at all n locations
  Clone ID: PAT_MRT3847_10342C.1
ttgaaagaatggctgcnagagctgggtttaatgctccgaggttgantanagangagnattagatctactgagcnttncacntaattncggcattcagtctccttanttgaccatcccacctggtctcagtcctantacacttttagattctccagtgtnncttncaaattcactggcacagccnnntcnaacaaccggaaagttcctggtcatggntaatggcaanatgcggcactcagaattatcgtctgatgctccngaa

SEQ ID NO: 3793 - DNA, 462 bp, Glycine max
  Clone ID: PAT_MRT3847_103430C.1
gccacagcgtacggccactcctgcataagacactatggcacgtgcaggatcgcacattgttgcacttgcgctcgcgtagctcatcacatcaaaacttgcacattgtgacatacataggacgcttcctttctgtattccaaggacccctcccttatatacttgaaactggatacgtaggaagcgggcgaaactgaatcttatgagctcgcataactcttctattactttatggacccatatatccatcctatagggaaccctctcctactctggttaaccggtggccccggctgctctgctttctctgggcctgtctttgacaaaggttcactggcattcctaaacgaggaatactatgagagcctacctaggacgaccgtgaagccacaatcatggacagatgtgactgccattacatgtgtggatctgcctgaagcaactggctcctcttatcccaaaaca

SEQ ID NO: 3794 - DNA, 445 bp, Glycine max
  Clone ID: PAT_MRT3847_103431C.1
attccatggtgccttctacggccaccacagcatgtctgtccagagccagggggagcgccttcttgatgatggagagcccctatgaccgccacaagcctaacgacataccacaacgatcgggacgctctctgtgggctgaaaagtgtgactacgttggctgtgtgctttgcatgggctggaacaatgctgaatctcatgaccacagagagcgaaccgcgacttcagatgccgagatctatgcttgattgtggacatcgcaggacacaagagccttgtacttgcctactcgagcagggccggttctcgcgttacctgcgtggggatacacggggaaggtcacctggaccagacacatggttgctcacttgatgataagcaaatagatagtagctgtggtctcacctgagttgctcagcctatgacagaccacggcatggacacacac

SEQ ID NO: 3795 - DNA, 300 bp, Glycine max
  Clone ID: PAT_MRT3847_103432C.1
gagatagctcagagagaaaggaaaggttaactaaagaagcaatacgtcactggacacgcttgttgttcatatccacacgtcttctactcaagatgccgacgctctcgaacaggctttcaaaggatggggggcttgatgacaaggccattataccagtactgggtcacagtaatgttcatcagaggcaatgcatcagaaaagcttatcaggagatttactaataggatctcagcaagcacctttagtccgacatctctggtgactttgctaaatctatataccgatggatgttgcagcctg

SEQ ID NO: 3796 - DNA, 2307 bp, Glycine max
  Clone ID: PAT_MRT3847_103433C.1
atggccgctgtatctgaaattggaaacaagacattggtctctatgatgaccatagtcacacagataatggacgcatgtctcaagccactaggtcaatcctcccttgtatcccagattcttggtgggaggtgctgtttggcccctcaatgttggggaacaaaaacttctggggcaaacctatttcctgtgaagggtgctgtagtgcttgaaacagttgcatcgtttggcctctatactgaaaagctggccatcactgttggtatttctgtgttcgcatttacattggtaatccctactggactagcaattctgttgaggaaatatgctacaatggacagcagccttgcacaggcactgccctttatggctctctcacaaaccttaactgtattcattagcatagcagtgctcttgaaagatctcaaagtccttaacactgatatgggacgtttaaccatgtcagcagcaatgtttgctgatatagctggctttaccttgacagtgatcatttttgctgtactgcagaatcagagtggtagctttctgacactagcaggcctccttctgtccgtagttgcactctttcttgctgttatatttgtgatgaggccagcaatactttggacggtaaagtactcaggtggcggttcggttaatgaaagctgcgttgtttgcatctttctcttagttctcttatctgcatttatcagtgagttaattggacagcattttattatgggaccaataattttaggcctggctgttccagaagggccacccataggaacagctttgttgagtaaattggagacaatctgtatgggatttctttatccaatctacctcgctgttaatggattgcaaactgatatcttcaaaattgacttgcaatctctgtggattgtgggtctcatactgatggtggctttcgttgtaaagattggtgctgtcatgttgccaggatacttttacaatctacccatgaaacaatgttgtgtcattggcctccttctaaatggaaggggtatagccgagcttaccatgtacaatatgtggattggaagcaagttaatatcggaacaagagttcgctttgatggtggcctccattgtagtagtaaacgctatcctagcaccaatcgtaaaatacacatatgatccttcagaacaatatcagaccggaagaagatgcacaattcagcatactgggcgagatatggagctccgagtcatggtgtgcattcacaacaatgaaaacctcccaacaatcctgaacctcttagaagcatcctatgcaagcagagagagcaagattggggtcacagcattagtcctagtggagcttcaaggaagagccaggcctattcttgttgataaccaaaaccaactccatgatgagctgcgctcaatgtcttgcaacgcaagtcacattgagaatgcattgaggcaatatggacaacagaacgaaggatatgtatctgttcaatctttcacttcaatctccacctttgaaaccatgtatgatgatatttgtagaatttcattagagagtggatccaacattttgatcttgccattccacaagaggtgggaaattgatggcaccgttgagatttctcataggaccatccaaaccatgaacattaatgtcctccaaagggccccatgttcagtgggaattctagttgataggagcatcttgaatccttctccttcactcttgatggctagagcagcattctatgtcgtggtgttcttcattggcggtcaagatgacatggagacattagcctatgccactagaatggctaggcatgaatgtgtgtatgtaaccgtggtaaggttccttctatttggagaggagaattctaaagatagaaaacgtgacagcgatcttatagatgagtatagatactataatgccagaaatcgtaggtttgagattctggaagaattggtgaaagatgggatagagatgtcaacatgtataagaagattgatagattattttgatctagtgatggtgggaagggagcatccagagagtgttatttttcagggacatgatgaatggagtgagtgtcaagagctagggatcattggagacatgctagcatcaccagattttgtgaccaaggcatcgttgttggtggtgcaacaacagagaataagagggaggcttgttacacataatgtgaatgccactccagtgcctaatcaaagagatcagctcgtacatgatgttccaattcatgaaacctttagtccttcatgtactatttcagtggacaaatatgacaaaatgtag

SEQ ID NO: 3797 - DNA, 2358 bp, Glycine max
  Clone ID: PAT_MRT3847_103434C.1
atggccgctgtatctgaaattggaaacaagacattggtctctatgatgaccatagtcacacagataatggacgcatgtctcaagccactaggtcaatcctcccttgtatcccagattcttggtggagtgctgtttggcccctcaatgttggggaacaaaaacattctggggcaaaccttatttcctgtgaagggtgctgtagtgcttgaaacagttgcatcgtttggccttatgttcttcttcttcatatggtgtgttaaaatggatgttgccacattgatgaagactgaaaagctggccatcactgttggtatttctgtgttcgcatttacattggtaatccctactggactagcaattctgttgaggaaatatgctacaatggacagcagccttgcacaggcactgccctttatggctctctcacaaaccttaactgtattcattagcatagcagtgctcttgaaagatctcaaagtccttaacactgatatgggacgtttaaccatgtcagcagcaatgtttgctgatatagctggctttaccttgacagtgatcatttttgctgtactgcagaatcagagtggtagctttctgacactagcaggcctccttctgtccgtagttgcactctttcttgctgttatatttgtgatgaggccagcaatactttggacggtaaagtactcaggtggcggttcggttaatgaaagctgcgttgtttgcatctttctcttagttctcttatctgcatttatcagtgagttaattggacagcattttattatgggaccaataattttaggcctggctgttccagaagggccacccataggaacagctttgttgagtaaattggagacaatctgtatgggatttctttatccaatctacctcgctgttaatggattgcaaactgatatcttcaaaattgacttgcaatctctgtggattgtgggtctcatactgatggtggctttcgttgtaaagatttgtgctgtcatgttgccaggatacttttacaatctacccatgaaacaatgttgtgtcattggcctccttctaaatggaaggggtatagccgagcttaccatgtacaatatgtggattggaagcaagttaatatcggaacaagagttcgctttgatggtggcctccattgtagtagtaaacgctatcctagcaccaatcgtaaaatacacatatgatccttcagaacaatatcagaccggaagaagatgcacaattcagcatactgggcgagatatggagctccgagtcatggtgtgcattcacaacaatgaaaacctcccaacaatcctgaacctcttagaagcatcctatgcaagcagagagagcaagattggggtcacagcattagtcctagtggagcttcaaggaagagccaggcctattcttgttgataaccaaaaccaactccatgatgagctgcgctcaatgtcttgcaacgcaagtcacattgagaatgcattgaggcaatatggacaacagaacgaaggatatgtatctgttcaatctttcacttcaatctccacctttgaaaccatgtatgatgatatttgtagaatttcattagagagtggatccaacattttgatcttgccattccacaagaggtgggaaattgatggcaccgttgagatttctcataggaccatccaaaccatgaacattaatgtcctccaaagggccccatgttcggtgggaattctagttgataggagcatcttgaatccttctccttcactcttgatggctagagcagcattctatgtcgtggtgttcttcattggcggtcaagatgacatggagacattagcctatgccactagaatggctaggcatgaatgtgtgtatgtaaccgtggtaaggttccttctatttggagaggagaattctaaagatagaaaacgtgacagcgatcttatagatgagtatagatactataatgccagaaatcgtaggtttgagattctggaagaattggtgaaagatgggatagagatgtcaacatgtataagaagattgatagattattttgatctagtgatggtgggaagggagcatccagagagtgttatttttcagggacatgatgaatggagtgagtgtcaagagctagggatcattggagacatgctagcatcaccagattttgtgaccaaggcatcgttgttggtggtgcaacaacagagaataagagggaggcttgttacacataatgtgaatgccactccagtgcctaatcaaagagatcagctcctacatgatgttccaattcatgaaacctttagtccttcatgtactatttcagtggacaaatatgacaaaatgtag

SEQ ID NO: 3798 - DNA, 495 bp, Glycine max
  Clone ID: PAT_MRT3847_103435C.1
aaatgttaaacgcctcgagcagcggacgggaaaaaccaaggatgattgttaccttgtttccttgcgagcgcaattgtcagaattttttgacgttcacgatactatgggtgaaggaagtgtcagtgatagtggtatgtccagggtaaagcgacagcatttccaatgcaaagcagcagccaccagaagtagaagatagtgctttcctttacatttcaatgtatatagtcacacacgaatcgacgtgaaattttaaactgcgtccttatattttggtgaatttgctaaaatataagtgtatatatctaacgtgaggtaatgaaagtatatcgagacccccgtagaataatacccgcataggtatatcgaggcatcatgtgtagtgcttttagaagtagatgttgaaggatgatcataggttggccttgtgttttggataactcgtgatctatctgttttaattgcccttttttaataaaaaaaaaaatttttattttt

SEQ ID NO: 3799 - DNA, 415 bp, Glycine max
  Clone ID: PAT_MRT3847_103436C.1
ggtttgcatggtgttggagtacttggacttcattctagcacaagggtacctcttgagactgattcaaatgtgtcttccactgtcacttgccacaaatgtggagatcaattcaacaaatgggaagctgctgaagctcatcatctctccaagcatgctgttactgaacttgtggaaggagattcatcaaggaaaatagtggagataatatgcaggacgagctggttgaagtctgagaaacaatgtggtagaattgagagagttttgaaagtgcataacatgcaaaagactctggctaggtttgaggagtatacgggagttggtgaaaatcaaggctagtaaactccccaagaagcatgcaaggtgtcttgcagatggcaatgagcttttgaggttctatggaaaccactgtgcatgc

SEQ ID NO: 3800 - DNA, 537 bp, Glycine max
  Clone ID: PAT_MRT3847_103437C.1
cccaaccaaacaaggaaagatatattaaatatttgattcaaaaagtacaagcactaaggaatacgatatattttgcttgatttatttccgaatcatatttacttattcctctttggtttgaattattgattattttacatcaacacaagcaaaatcactctatcatcaaaccaagttacgggctagagtagcacacaactcccatagatttttcagtggcttttattattgaagggtctcccaggataatgtagattgtggaagtggcttggtcctgaaggtgggattatgccttttgctagggggaaattggaacttttacctgaatccattagcatcacagaagctccttttttgttattttcttgctccatagactgaaaatttggtcgagttgcacacacacagttatcgtttgctaataacatcagaaagaatatgagagcacagagaaaatgagttttggcacctaagatacccataatttcttgatgtttggtaaaaaagagttctttggttcaactgttccgcgcgcgt

SEQ ID NO: 3801 - DNA, 611 bp, Glycine max
  Clone ID: PAT_MRT3847_103438C.1
tatctctgtgggtgcggatctgtttctatgaattattttctttcaaagtacttcaatcggcgagactagaagcgaaagagcaagtttagataacaaagtgtgcatagtgcagagtaggagatgatgtcctcaccagctaatttgaacacggggggagaagagaagaaattagaaatagagaaagtggtagagagtcaggtagaggtagcagataccgagtcaaagagaattcagccatggaaagagcaaataacagtgagaggattggtggtgagcacggtgcttggaatcatatacagcataatagccatgaagctcaatctctcagctggaatcgttcctaactttaatgtctctgctgcccttcttgctttcttgtttgtccgaagctggaacaaagtgctccacaaggctggttttatctccaaacccttcacccgcccagaaaacaccatcatacagacttgtgttgtctcatgctatagcaattaaacacatggacgaatgagttgttaggagttgggactgagcgtaacaatccaagagttgttagagatcctggatatgcttggatgactgccttccttttgagatcctggatttgcttggat

SEQ ID NO: 3802 - DNA, 567 bp, Glycine max
  Clone ID: PAT_MRT3847_103439C.1
ggccgcccgttgtctttttttttttttttttttatttttttctaatctttgagatgatgcatttttccactcaacaccatgaccatggccaaacccagcgactcctcgtctattcatcttacctaaacctgcatccctctcaccccgatcttcacttcttccgccagatttaagcggagaagtcagaaacgtgagcgccaatgatcttcttcatttcctcctcaatctcctttgtcaagacaccgccagtgagcttctcgaggaaggccgaatgggtagatttcaattgctcggtgaatgacctttcccaagcgccaatcttgtcaacagggacattgtcgagcataccgttaacaccagcgtaaatcaaaggggccataacctcggttggcataaggttgtactggggctgcttgagcaacttggtcaacctagaacctcggttcaagaggtatcgaagtgaagcgttcaagtcggaaccgaattgagcgaaagcagctacttctcggtactgagccaagtagagcttgagcgaaccagcgacggatttcatgagtttggtttggg

SEQ ID NO: 3803 - DNA, 2254 bp, Glycine max
  Clone ID: PAT_MRT3847_10343C.1
tttcaatttttttttttgatttgaaatctgtcgtggtttattagaggaatttgaagtacttccatgattccgctcaatttgtgcattaagcctcaccccaatttcatcaaccttccactttaagttggcaagatttgcttttaccagagctaattcctcaagctttgctttgttttcaagagccacccgagaatttttttccttgtgcaacagtttctgcagtttagccacattttgctcaagagccagatgacgcttttccaaggcttttttttgtttgtccacatgagattgcagcttttcatttgccttcccctccttgtcaatttgggtttgtagttttgttctggcagcttcaagcctttcaattttatttttattttcaagaggaaaatcaatggatttccgagcggcccgcccttttttttttttttttttttttttttttttttttttttttttttttttttttttttttaaaacgggaaatccggtaaaatttgcgagataaacataagaaaatcaacttttgacatggacaattctgaatacatgactgaggatcgcaaacaacaggtcctaaaccaccaaatagaagcataatgttgatcacttcacagtttgaataatggagaactatatcacacagcaggagcaaaaacaaaaaagaacgaacaataatggttcagggtaatgtaacgaagcatatacccttttaactcggaaacaattacattgataacaaaaaaaagccttcgattatcaatagtcctctccttcctcatcatcttccgctccttcagctccaacctcctcatagtccttctcaagagcagcaaggtcctcacgagcctcagaaaactccccttcttccataccctcaccaacataccagtgaacaaaagccctcttggcatacatcagatcaaacttgtggtcaatgcgagagaacacctcagcaactgcggtgttgttgctgatcatgcatacagcacgctgaaccttagcaaggtcaccaccaggaacaacagaaggtggctggtagttgataccacacttgaatccagttggacaccaatcaacaaactgaacagtcctcttagtcttgatggtggcaacagcagcattgacatccttagggacaacatcaccacggtacatcaagcagcaagccatgtacttgccgtgccttggatcacacttggccatcatgctggcgggctcgaacacggcattggtgatctccggcaccgacaactgctcgtggtaggccttggcggcagagataaccggagcataggacgaaagcatgaagtggatcctagggtagggcacaaggttggtctggaactcagtgatatccacattgatggcaccatcgaacctcaaggaagtggtgagggacgaaatgatctgggaaatgagcctgttgaggttggtgtaggttggtctctcgatgtcgagggatctcctgcagatgtcgtagatggcttcgttgtccaagaggaccgccacgtcggtgtgttccaggagggagtgggtggagaggacgctgttgtagggttcaacgactgcggttgaaacctgtggggaagggtaaatggtgaaccctaatttggattttttgccgtaatcgacggagagacgctcgagtaagagagatccgagaccggaaccggtgccaccgccgacggcgttgaagacgaggaagccttgtaggccggtgcagttgtcggcgagcttgcggacgcgatccaagcacagatctacgatctctttgccaacggtgtagtggccgcgggcgaagttgttggcggcgtcttccttgccggagatgagttgttcggggtggaagagttgacggtaggtgccgcagcggacctcgtcgatgacggtgggttcgaggtcgacgaagacagcacgggggacgtgcttgccagatccggtttcgctgaagaaggtgttgaaggcgtcgtgggctacaccgaaggtggagtcagaaggcatcatgccgtcgggctggatgccatgttcgaggcagtagagttcccagcaggagtttccgacctggatcccggcctgacctatgtgaatgctgatgatttctctcatttttggattccaagtgcctctctctctctctctctctcactcttcactcttcactcttaagtcttaagtgtgagccagccttcaaaggggaatttgataaatgtttagaatccggcccctttgccgccagcccggacgcggg

SEQ ID NO: 3804 - DNA, 513 bp, Glycine max
  Clone ID: PAT_MRT3847_103440C.1
acgaggaacaatgagaacagagttgaagaagcgtccgatttgttctcaagatatacaagtactttttggtgaaattttggctatagaattttgcttatttggaaagatgatgatggagggcgtggtctgtaggatgttcgtggggacgtggaatgttggaggaaagtctccgaacgagggattgaacttgaggaattggttgatgttgccttcaccagctgatatctatgtcattgggttccaagaaattatacctctaaacgcagggaacgtgcttggaccagaggacagtggcccagcatcgacgtggctgaaccttattcatcaagccttgaactctaacacaagctccagtggagaaaattctcctacatcgtcttttcagtagaaggcaatgcaaatgaacaacactattattgtctagcagcaagcaaacaaatggtgggtatcttcctgtgtgtgtgggtacgtgcggatcttaccagcatgtagcaagttaaggtgtcttgtgtt

SEQ ID NO: 3805 - DNA, 489 bp, Glycine max
  Clone ID: PAT_MRT3847_103441C.1
accactaccaaaggccccaagagaagccaaatacctactagtcgtcattgactacttcaccaagtggataaaagcaagaccactgtgggaaattacagctaacgaggtggaaaatttcacctagaaacacctcatctgcagctacggcctcccatacgccattgttgtggacaacgacactcagttcgaagcttagacttctgaataattcttgacaaggataggcatcaagcacctagtcacctttgttgaacatcctcaaactaacggttgggtagagacaactaatagagtcatcttgagagccctccatagtagactcaacaagtctatgggtctatggaaagaggacctaaccatcttactctgggcgtaccactatgcaccctagacaacaaccaatgaaactccttaccaactcacatatgacataaatgccatgatccttgttgaagtcagggaatcatcgacaaggagactactattccc

SEQ ID NO: 3806 - DNA, 121 bp, Glycine max
  Clone ID: PAT_MRT3847_103442C.1
cggacacacttgatgtttcaaaacaaaacatcgtcctaaaagcggttgctttccggattggttaattaacacacctaaacccaatcatgctttgttcgtgaaatttaattccttccggcgg

SEQ ID NO: 3807 - DNA, 579 bp, Glycine max
  Clone ID: PAT_MRT3847_103443C.1
cattccaaaaccaaatttattactaattaagaataagattggaatccgttccaagttactcactaacaccacaacattttgtcataagacaaatagatacggaaactaaataattacaaagagaaatctaatacatgttacttgaggttccgaatccaatttaatgcgaacaacccgaacaatacagaaaccaacgatttttcagtaaccattctaaaaaattccacatggctatgtaccgggatgctttgttcagtcctgaagaaattgctgggatcaaccctggtctttatttgaaccaaccttctgaagttatcatcgaagtactgaactccataagcactcccttcaaagtagccatagtaaccgtggtgattgatgcccaattctaagtctttgtaacatatgaaagcttgtcttggattctgggacacaaagggtgtcatgtatttgtgaagttctcttaccaagtttatgtggtattttgctacctctttccctgcctcaaaccaatttgcttggtattggatcttccataggttccccggacggtgagggaaagcggtttctgttgatgga

SEQ ID NO: 3808 - DNA, 389 bp, Glycine max
  Clone ID: PAT_MRT3847_103444C.1
aagggaatagcctgtctatagtgtcacgcataataagtgccgctggcctgacatcaccttgcataggatagcaagacccttgcccatccctgttacctggcgcaacatcaattgccgtttctatgagcttgcctctaaagagagtaggagggaccagatcttacatccctatatcagcctgctcggacaggggaaagcaacggtgcaacgggcattgattatagcgacgggcctgcctttggctgtcagaacgtgaccatttaagatggcggggaccgaccaccacttcctttgattgctttacatggcgttactgactggcacactaacggatcccgctaatcctaggggggtgagctcccattacagttgtaatgggatgcttcact

SEQ ID NO: 3809 - DNA, 2324 bp, Glycine max
  Clone ID: PAT_MRT3847_103445C.1
ggccaccattagacacacactttagcccaatatcaactataaatacccttctacccctccctttgtagttcaatatttgtccatttcccatgtcagtgtgaacacgcacacccgtgagagcagaaagatagtcatggacacaagaacattgctcctgaaactactcatcactcttgtggctctttcaggatgctcttcttcggcttcagatcatttggttaatgtatccaagttggagaagttcgtggatgagcttcctcacatgcccaaaatccttggctatcatctttcagatggcgtcccaaaatctaagtccttgaagattggcatgttcaagaagaaatggaaattccacagggatctggctccagcaacagtgtacgcttttggaacaaccaaacacacagcaacagttcctggtccaacgatcgaggccatctatggcgttgacacccacgtgagatggcaaaatcacctccctccaaagcacatacttccctgggaccctacgatccccaccgcgatgaccaactccacacgtggcattcccacagtggtccacctccacggtgggatccacgcgccagagagcgacggaaacgccaacgcatggttcacatcgaaatacaacgaaaggggacccacatggactaagaaggcatatcactacccaaataatcaacaaccagggaacctatggtaccatgaccatgcgatatggattaccaaaaagacaactgtcgagatggcctacttggagcctaaagcgttcggcactctcatatcgaggacacgctatgcttaacccagcggtaactacattcgatcgaatgccggatcatctttcgatcgcagcttccgcatgtacatgttcgctcttcaagagttccaacgggaacaaccctaaaatacaccctcagtggcagccagagtacttcggcgacgccatcattgtcaacggcaaggcgtggccgcgcctcacggtgcgacgtcgtaagtatcgattccgcataatcaacgccagcaacgccaggttctttagattcttcttcaccaacggcttgagattcacccacgtggcatccgattcggcttacatcgagaagcccgtaacgaccaatgagacgctggtggggccatctgagatcacagacatcgttgttgacttttctcaatccaagagtaacttggctattctagccaacgatgcaaaatatccttaccctgctggtgaccctgttaacgaggctaacggcaaggttatcaagtttatcatcgtacctgatcaagaagttgacacgtcacgggtccctaaacggttgttagaataccctgttgttgatttatccagtgtggcgcacacacgctatgttgctatgtacgagtacgcgagcgacattgatgagccgacacacttgtacctaaatgcgaaaccgtatgaagcagcggctacggaaaccccgaaggtggggtccacagaggtgtggtatgtgatcaacttgacggaggataatcacccgcttcacattcatttgggtttgttcaaggtgttggatcagacggcgctggtgaaaccggatgatgagtttagagaatgtatgaagaaaatcaacgatgcggtcaagtgccacgtggacaagtacgctcgtggcaagaaaatagaggtgccggctcatgagaaagggtggaagaatgtgttcaagatgatacctgggcatgtgacgaagattgccgtgaggttttcttacattcacaccaatgcttcatatgtgtttgatgcaaccacagagcctggctacgtctatcattgccatgtattggaccatgaagacaatgctatgatgagacccttgaaaatcatcaagtgatgtttctcaacgaagccatagaatggaaacatgtgcagcaacttagttatactcaacgaaggaggatatgtggagataaataaataaatgttattataagctctgtcatttttcaaaacttcaaattcttgatgagatataaattaaagaaactaatctaatgaaattaaacatatatggattggggtgtgggttgatcagtcctataatatatatccgcatctattctagcttattaaattttcccatccctggcattgaacgtgatccattgcgtttacttttgtgcctgctggttgttgacccttgacaaagcccatggttgagggccccaaagctaagacattcataagctacaaatgctatatattttcagataaatttgatgtgattttggcttggtgacaagcagactggtgtatgatttgggcaatgtttgtaaaattaattttgaag

SEQ ID NO: 3810 - DNA, 284 bp, Glycine max
  unsure (1)..(284): unsure at all n locations
  Clone ID: PAT_MRT3847_103446C.1
gatgtgtgtgtgttgggnttatctcaatgtgaagagtgaggagtggtggagtcaatgatagttgttacctaattaattgatgaattgactggtcgacacattttgacctgttagacgtactatagtactatagttggccaagtagctttacttgcgagttgccacgttgttacttcccacccagcagagaccatttaatgtacttgttcagtacttgcatcagaaccaggctgaggcctgcaccatgggttgggtatgggcttgtgctacacaggcatactttg

SEQ ID NO: 3811 - DNA, 345 bp, Glycine max
  unsure (1)..(345): unsure at all n locations
  Clone ID: PAT_MRT3847_103447C.1
agaaagtttgtttgaaagaagaagatgntgttangntnatgnagaggtangatgnaantanggtgttaattttatttnaggaagtggngnattatnntnannnnaagattgattggtgngagttggtgaagaaaagngngattgagatttntaangnnagagaatatnaaatgntatggnggnatttggagtatngnaattttttggntgaaattttngaagatggggatgaanntttgnntnatttnnaggatgatgatagtganntagagtgtgagntagaagnatttnnnnntgtaagtgtggaatgtgnatnagaagntgntgnatgtgtgaaggtaatga

SEQ ID NO: 3812 - DNA, 439 bp, Glycine max
  unsure (1)..(439): unsure at all n locations
  Clone ID: PAT_MRT3847_103448C.1
gaaaataaaaacccattttcgccccagtccccgncggggcactcaacaccggcaaccgtttctctctcttatttactcttcgtctgctttgctcatacatatcctccattttttttttgcattaataaaaaattgaaaactcaaaccatttttttcttcttctcgcaatcaaaaaacacacacaaatcaaccttcgtcttccatcgcttgcttcacactcttcttcacctctcacccaccgaaatctacaccaccccatcacaccaaagtgtccaagtttgaatctttgaggaaaacgagcacgtgggtaacggtgcttgttagagagagaaagagaaacagtgtgtgtgcgtgtgtgtgaaactgtgaatcattgttatggtatggctcagcagaggcaatcgggaatggaaaggtttggggtgagagatctgcacca

SEQ ID NO: 3813 - DNA, 428 bp, Glycine max
  Clone ID: PAT_MRT3847_103449C.1
ttaggatcttttctaaaataaaagccagtatttacgtgccgcatgcgtatgatcgttaagaggaacagcagtgcagttttatagggcgatgggcttggatgttgagtcttgcttaaagaggaggaaaaagatgcatacagtattatggggcggtgctgtatttgtaactacgatgaatatttgttggtattcaagcgatgcatataagcatgtgttggcactacagactggactattgtgtaattaagtttgaagctggatcattaatgccagcgttcggttgtggcaacccatagtggaagaaatctaccgccaagaacttagagacgaccatagtgaatatgacagagaaagctacaacagtaactttagtggcttccaagcacaaactttaaccacaccattagtggtcacaacatcaatagtaa

SEQ ID NO: 3814 - DNA, 488 bp, Glycine max
  Clone ID: PAT_MRT3847_10344C.1
gaattgtataaatttgattaagattcacgattctgttggatttcttggtaatcttgaagagctaactacgataggatgcactagtctaaaaataattccatcagcattcaagttggcatctcttagagagctctctttctctgagtgcttgagacttgtgaggtttccagaaatattgtgtgagatagaaaatttgaagtatctcaacttgtggcaaactgccatagaggaattaccattctctattggaaatcttagagggcttgaatctttaaatctaatggaatgtgctaggcttgataagctacccagtagcatttttgcactaccaagacttcaggaaattcaagctgactcgtgtagagggtttgacatttctattgaatgtgaagatcatggacaaccgagattatctgcttctccaaacattgttcatctgtatctgagctcttgcaacttaacaactgaacatcttgttatatgtctca

SEQ ID NO: 3815 - DNA, 487 bp, Glycine max
  Clone ID: PAT_MRT3847_103450C.1
ggcttcggcctcttcaggctaaatcaacataatgcaaaatttgtaattaacaacatataagaaaaaaattatcataaaaacttttaattcaaaaagactagataagaattaactacctataagactaggttgcatccaagagaatgaaatccttttcatgcctcagtcatttttcttgcttctaagactcttttacgatcattagttggcacaaaggatctttaaaggtgaaaaaaataggggcttcatgcaattacatgtcagcatacgtaacaaaaaccgttaaaccaatctgtattcgtttatgcaattcaaaatttataaccatctgaacctcaatgatgctgctttccaagctttcaaggaaaatttccattcacctgatgctttggatgtgcttgaaacaccaacatcaagcaatgtaggataacgggtgtgccaaagacctcacattcatgttttaaaagactttttggttggcattcat

SEQ ID NO: 3816 - DNA, 1103 bp, Glycine max
  Clone ID: PAT_MRT3847_103451C.1
gctcctgtcggttttcagttcacctctgcctgcattttggcgaaaagatgtcagactacctcttctgcaatagacagcattagaccacctgtgctaacaagatgtagaaatctagttaaaacatagacaacataaggagcaaagatttatggctacctcttctgcagtagacattcctgttgagcaactcgaaacaagttgtagaaagctagataatactgagattacaagaaatgatctgtgttgtgcagctgatgtttctggtttaagcttaggcacagttagagtcggtcatttaaagatttcacaattctcactcgacagaaattttgccggcaaacaaaagatcaaacctcatcttttatctgagactgtcccccttgctgattttgtcattcccttcccgcgagaatatagacaagccacttgtgttgaaggaaataaggaagttgtgggaaaaggcagaacctgatctaccatgggagaagggagagtttaatgagtcaaacacattgttattggatgactcgccttacaaggcactaatgaatcctaggcattcagcaatatttccttattcttaccggtactaccacaccagagactcagaattaggacgagaaggtgatcttcgggtttatctaaaagggctggctaaggccgagaatgtgcaaaactatgtgtcagaaaatccgtttggccaacggcccataagagaagcaaatccatcttggggttactatcgtagagttatagaatcacttcaaagaagccaaaatgatgggccctcattacccaggtagggagataactgcttacagaacaatgcatgatgaaaactgttgagatggttctcattcacattgtttcaagcagtgcatattttggccactctgatgaatgaataatagctgttgagttttggttgataaggtgtctgaaatagatcagttttgtatatttgctacttaagccgactagctgggcatatagttctactgtattctgttcattatttttcggccttcaagcgtgattgatttcacgttggaaaccgttgaccactgaacgcgagtttagagttggtcaaacttgattaagtc

SEQ ID NO: 3817 - DNA, 611 bp, Glycine max
  Clone ID: PAT_MRT3847_103452C.1
cacgcgtccgatctcattctctctgcgtatacacctctaccatgatagcttagagatgcagagctatgatctagacacctaccggactataccctacaggctcgagggggaccgcgctgacgcctacccttcgttaggatcagatgcaggacccggaaggaatcccgacggaccatgatcgcaataaccttgccggatagcacctcgacgacggccgcaccctcagttgactacaacattcaaaacgagagtactctacacctggtcctaactcttcgcagtggggtgcaaaagagcgtgactacactcaccggaaagaccaaaacccaagaggtcgaacgcagcaacaccgtagaaaacaaaagggccacaactcattagaaggagaggtatcgagattcaacgcatcccattctcatctgaaatctgtatgtagcggggaggacgagcaataccactgttaggagcacgacccatataaatcaatccttctcagttgccttcctctatcgggtggactacgtatcatgattttataacccttccgtagcgtactaatcctctatataaaatatgctactaccctctactagctagttggatttttatta

SEQ ID NO: 3818 - DNA, 2815 bp, Glycine max
  Clone ID: PAT_MRT3847_103453C.1
aaaaggacaccggagggggtttaaatggaatgggtccaggggttatgtaaaggcttggaaccgtttaacagggaaacgagctccaaatattctcacaattctgctgcgagaagacgacagaagggggaaggaagagagattcaggagggagccagagtgagggatacagagaaagaagaaggataaagatttaaaattggaagaggaacaataggaagggaagggagaaaaccctaattaatagataatagaaagagattgcatgatcgatggaaaaaccctagaagaatcatcggagcaggcaggcaagggggcacaatcgacgacgccgtagatgcttgttgcggttggagcgtcgtgggatctgaattggttcctgcaactgttgctctccgtcatcgtcgtggccgttggggttcactatttcgtcaaggccaccgcttccaagtacttcttagtcgacgccaatttcgaaggggaccaccacgccctcgccgccgccgacccaatgcccggcgctctcgccgccgccgttgatcctctctgcgccgtctgtgccacgcccgcccctaagaaatgctcgcgctgcaaagctgtcagatattgttcacaagcatgtcagcagtcgcattggatgtctgggcataagacagtgtgcatgaattttcatgggaccaatgcaagaagctcggctcagaatggggtaattaatcgtgggtttaagacttctgctgctgggggtaaaggctcgtcgtcaattgcactgatacctgactgtggagatggagcaatttccaggccaatcaagcaggctaaagatgttctttttccttacgatggtgaatgagatttcttgtggtgctgttgaatcatcttatgtgcccatttctcaaacagacagtgatttgggggatgtagatatgggcagatcattagaagagacttcaggctgcaaggaagagcaagatgatactgatatggttagttctggtctttgttcgggtccaccaaatgacaattcctttgataagcacccttccgtttcacgtgatcatcaaaacatggaagaagattcagaacatatcgatgtggttaactgcattggtggtacactggctatggaaaacaagaggatgctcacgagttcatgaggttttccattgatacgatgcaatctgtttgccttgatgaatttggtggagaaaaagctgtccctcctaaccttcaggagaccacccttattcaagaaagtggaaatatcagccgacatctagatgcaatttgcacaaaatgtgataagatttcaaatcagtatgaaaatatgatggacttgacagttgaaattcatggagatgctgcctccttggaggaatgtctagaccagtttactgccaaggagcggcttgatggggaaaatatgtataaatgtgaggggtgcaaggattatgtcaaagcatggaaacgccttacggtgaaatgcgctccaaatattcttacaattgccttgaaaagatttcagagtgggaggtttggaaaacttaacaagagagtagccttccctgagactttaaatcttagcccttacatgagtgaagctggagatggatctgatatttataagctatatggtgttgtagtacatattgatatgctaaatgcttcattttttggtcattacatctgttacatcaaggatttccagggaaactggtataggattgatgactggaaggttatgactgtggaggtggaagaggtactttctcagggagcatacatgctcttgtatagcaggtgtagtgcccggacatcaagctttcaaattcaaactagcgaatcttcagggatagcagaagttcagacagaagtggaagtggaaatggaagtggagcccggacaaactgaacaagatgaatgcctctcaaatatgaaggctttgacttgtagtagaggttctgaggttttgccatctgatgctagtccagaattgaaggtttcttccagctatgactgtgagtcttttgctggattgaactcaccagtcaaaagagaacagtttaatgatgtggacatgatggatgttgattcaactggtattgtgaatgagatttcttgtggtgctgttgaatcatcttatgtgcccatttctcaaacagacagtgatttgggggatgtagatatgggcagatcattagaagagacttcaggctgcaaggaagagcaagatgatactgatatggttaggtctggtttttgttcgggtccaccaaatggctcttccttctttgataagcacccttccgtttcacgggatcatcaaaacatggaagaacattcagaacatatagatgtggttaactgcaagttgattacagctaaagataatgcatgctatggtaatggatatgtcagtgcaaacgattcttcaatgccagttgaagacgcaggctcacaattttctggcatcagttcttttcccactgaaaatgacaaaggaaatggaattaagaaagtggaaatatcagctgacatttaggtgcagctatttttgttatttcttcatatcatttaattatcccatcatcgaaaaaggtggtgagttgggaaatttttgtccggggttttcattatttgcaggaaccttggattttatttgtaacatttttagatggatatcctaatttaattttactgatagaatacaagtcctttgtccttatatcctccctccaatcttgtacatacgagaaacataattcttccaagttgctgtggacctccattgtcgggttggtttaatcattttgactccccc

SEQ ID NO: 3819 - DNA, 564 bp, Glycine max
  Clone ID: PAT_MRT3847_103454C.1
ttttttttttttttttttttttttttttttttttttttttttttttttttttttttttggcccaccaaatggggttttttatttaaaaaaaaaaatttttcaggcctctggcaggcggaggggtttcccccgataaaagatggccaaaaaaaaaaaaaaaaaaaaaaaaggccaagcccccccttgggttccccatgggctggaaaaatcccaaggggtctttggaaacggaaaaatagctgggcccccaacccaccctttgcaaaaaagttaaaacttgcttttttttttgctgggcctggaaaaaacccttcattaaaaccctgggggtccccctagttgcttaggggttaagccaactggcccgcctaacacaaacggccttttgtggggcccctttgaaatatttgtggcccgggcaagttcttcaaagtggacatcggggggaacattcctctcccttgaaggaatctgggaaaatcgagcctttgcttctccactgggggggggaaactaaattttacaatccaaccgaccagaacgcattagggcagggatcaaaat

SEQ ID NO: 3820 - DNA, 172 bp, Glycine max
  Clone ID: PAT_MRT3847_103455C.1
caaagaaacaaactgagagtggatatgaatatgaaaggtgacattgatcaaagagaggtcgtataacctatcgggcgtgtgcgacgtaagcacttggttctactcttgaggtactgcattgttggaagtcacaggatgctagaaaactagtatgtggagagtggaaactcag

SEQ ID NO: 3821 - DNA, 439 bp, Glycine max
  unsure (1)..(439): unsure at all n locations
  Clone ID: PAT_MRT3847_103456C.1
cgcgcgcgtgcgctgagtacgggtctagagaagacctacaccaggcccttatcaagacactaataatggtcctgctagccaacaccctagtactctataaagagcatccacatgcaccttagtcttcaccaaaattctcctctgggcatcttgagttgagtccctcttttaagctatttccttctcttaacacaatcggttgtgccaattgccatagtcaccaaccaattaacaaaggtatatatatcatcatatcatcaccaaatgaaaaatatagggtcgttttttcttgtggaggaggctactttcgaggaggcagccacagctggcagcttttaccaagactttgaaataacgaggggaggtgagcgtgccaaaatctatgagaattggaaccttctcacactctccctagacagagcctnttgctctggctttc

SEQ ID NO: 3822 - DNA, 629 bp, Glycine max
  Clone ID: PAT_MRT3847_103457C.1
ttccgaattaaaaaaaactgcgtgtgataaacgcgggactagcacggtccaaaaatcattattattgttttctttttcggtaaatatatgactgcaatgcgagtgtcgttagcttcgcagtactttgttgttcatagatcgctgctgtgtttgtcttagtgtgtttgttattcactatcgtcattcctgttcctcaagctttgtagtgagcagatataatggctgttgaaaggtctggaattgccaaagatgttacggaattgattggtaaaacccccttagtatatctaaataaacttgcggatggttgtgttgcccgagttgctgctaaactggagttgatggagccatgctctagtgtgaaggacaggattgggtatagtatgattgctgatgcagaagagaagggacttatcacacctggaaaggttggtataccttgataattaaaatgaagtgaagctagtaatagactagtaaggtgtcatattggaatggtataaacagttatatcatgattaactcattgtttgtgtttgtgtgaatcatgatgttcctaaacctgggcatgtaaactgatatttacaatacttggaagtggtacagtgagaaaaggaattcttggtatt

SEQ ID NO: 3823 - DNA, 524 bp, Glycine max
  Clone ID: PAT_MRT3847_103458C.1
ggctcgagaatcattacaactagagataaacacctgtttacgggacttaaagttgattatgttcacgaaatgaaggaaatgcacgcaaatgagtcccttgaacttcttagttggcatgcttttagagaagcaaaaccaaaagaagacttcaatgaacttgcaagaaatgtagttgcttattgtggaggactaccactagcacttgaagaccttggtttatatttaactaataggactacaaatgagtggagaagtgcattgtcaaaactagaaacaactcccaatcctcatgttcaagagatattaaaaataagctttgatgggttaaatgatgagaaggaaaaagatatatttcttgatggtatgttgcttctttattggtaaagacatagcctatgttacggagatactaatggttgtggactacattcggactgtggaataccagtcctcatggaccgtagcctcataaagttgaaagaacacaaacttgaatgcatattttgtaccagaatgggagagag

SEQ ID NO: 3824 - DNA, 540 bp, Glycine max
  unsure (1)..(540): unsure at all n locations
  Clone ID: PAT_MRT3847_103459C.1
tcgtacggctgcgagaagacgacagaagggggcagtactttgttgttcatagatcgctgctgtgtttgtcttagtgtgtttgttattcactatcgtcattcctgttcctcaagctttgtagtgagcagatataatggctgttgaaaggtctggaattgccaaagatgttacggaatcgattggtaaaacccccttagtatatctaaataaacttgcggatggttgtgttgcccgagttgctgctaaactggagttgatggagccatgctctagtgtgaaggacaggtaactattttccattgtcatgactattgattctttgagtttaagttaatgctttcagtagcattatgctttgcatggcttttttttattttttatttttatttcgtgcttgttttcttgtttttgacacacaagattgggtatagtatgattgctgatgcagaagagaagggacttatcacacctggnaaggttggtataccttgataataaaatgaagtgaagctgtatagactagtaggtgtcatattggat

SEQ ID NO: 3825 - DNA, 350 bp, Glycine max
  unsure (1)..(350): unsure at all n locations
  Clone ID: PAT_MRT3847_10345C.1
ggaataaagatgctattagtctgttgattgagaaggtattaaaattgttgctctctaatcaatcagctcacagagcaagggaactttgtaatttacataatcagtcccaaaggcaagggcattttttatttactaaattcccagaaagtgaatagggaccaaggcgtgccaaaagactaccaacttgtcttaactcaggcagtacctttgttcacgttcccaacactcaacatgaaaagtcatggacaagttgtaagaggtcatctaatatagttcgattctagtatcagnggtcctcctgcaaatggcgcataactcaagatcttgtccgcagtcacagtatgtttgat

SEQ ID NO: 3826 - DNA, 254 bp, Glycine max
  unsure (1)..(254): unsure at all n locations
  Clone ID: PAT_MRT3847_103460C.1
gcgtttttcattgtgcattattcantggccaccacagcagctctatccggaaccntggtgagcncctccttcatgaggangcaacctatgacgaccaagagcctaaagacattccccaacgctctttttggtctgnnaggtggacgaggtggtcgtgtnacttgcatggcctcgtacnaggtgaagctcataaccccaganggagnagtggagtttgantgcccagatgntgttttcttgttgacaaggctgag

SEQ ID NO: 3827 - DNA, 347 bp, Glycine max
  Clone ID: PAT_MRT3847_103461C.1
tacggctgcgagaagacgacagaagggtgtattatttaagcatgcaatggtgtaattttgctctttcaagttttttttagtcaatcaaatttctcattttcaaaattgaggatattttaccgctttccgttttcttctacaaaaaagcttcgaatttttattttctactctaaatcttcactcattaaatcacattttatttaaattaacaaaaatatcaaattttacccaaactaatatcgtcttaaattttctcttcaaattctaacctcattctattagatcctttaaaaattatcaatttttttctaaatttctcacttttaaaattttagaaatattttata

SEQ ID NO: 3828 - DNA, 1500 bp, Glycine max
  unsure (1)..(1500): unsure at all n locations
  Clone ID: PAT_MRT3847_103462C.1
aattcggcttgatctcatatttaaaattgctgcatgttttatggttgagcttggatatgcaaagcctgatgctaaagaagttctgaagggtctttttgtgccaggactaaaagggagtggtgctactggtcttgcaatttctcttcttggagctatgggtatgccgcacaatctcttcttgcactcttcactggtgctctcatggaaaatactacgatcagttctgggatttagggcgactagcaggttttacatgatagaaagtgcttttgctctcaaggtaaccttcctcataaacatctgcgttatttctgtaagtggcactgtttgcaattcttcaaatttgaatgctgaaaatcaactgagctgtctagatttggatctgaacaaagcctccttcctactcagaaatgtcttggggaaatggagctcaaaactatttggaattgctttgcttgcatcgggtcaaagttctactattacaggaacctacgcaggacagtatgtcatgcagggatttctggatttacgactggagccatggattcggaatatgttaactcgttgcttagccatagttcctagtttgattgttgcagtcattggtggctctgctggggctgggaagctcataataattgcatctatgatcttatcatttgagcttccttttgctttggttccactcctcaagtttacaagcagcaaaaccaagatggggacacatgtcaactctaccatgatttcggctgttacttggataatcggtaccctcctcatggccattaatatatactacttaataactggcttcatcaagctgctgcttcatagtcacttaaaaattgtggctaaggtgtttcttgggatactaggattttcaggcatggcaatgtatttggctggtacaacatatctagtacttcgcaaaaacaaagaggctacacaccttttggctctaacagcaccagaaaatcaacaaatgacaaatgaactaggcaatggttcaatctattctcttccaagagaagacatagtaagcatgcaattgcctcaaagaagtactcctgctcctgcagatgttgactgacaaatagggtagaatagcaagataggtaaatagataaataaatatcattctgttgatttctagaatcggtaactagtatcagcttgacttctggtatcacttgattggaatatctaagagcttttgatttaaaaagtgatgcctattccatgtggttcgaaactagtggaaggagcttctatcctttctccacattcaggccaaacttctaagaagaaaaggaccatcgttttgtggacttcgtaancgcaccgtctcccgtctcccacaatgtactccaaacatgaaccggggatggccagataaaactaaaataaaataaagggggtgtgttaggtaatgaagattaaagcatgtaagtgatcatgaattaaggatatcacttttttatagcccccaccctccatcgg

SEQ ID NO: 3829 - DNA, 362 bp, Glycine max
  Clone ID: PAT_MRT3847_103463C.1
cccacgcgtccggtgcaattaaaaaaaaaaaaatataaaatataaaaaataatatatacaaaaaaaaaaataaaaaaacaaaatattgaagagctggatgtatataattaagcatttgaataaaaaatttttgctgtataatacttatattctttataaaaaaaataaacgccgcatatcatctgtaaattttatattctaaaacggtacataaatttaacatttatacctttcctccatcatatagaaaaaatggctgtttataaaaaagtgttaataaaaaaaatgcatatattcataagtaacttaatgaaacatggtaaatttaatttaaaggaatcttctacaagaaaaaaaacatg

SEQ ID NO: 3830 - DNA, 277 bp, Glycine max
  Clone ID: PAT_MRT3847_103464C.1
cacgcgtacgtgatctcgggaatcgagctcaagctcctatagagcttatcagatgcttgaggtcacgtaaagttcatgcctttgaggcatcagagtctccagttgtggtagccctagaagaccttcttgcacctgatcttcatgctaccagtggctgaaatggttgatcacacatttgattcctgtacccaaatgctcctagagtctgaaagtcgtggatgaataccgatcatgctgaatcggcttccgccgaagattcctaattcagcctacccag

SEQ ID NO: 3831 - DNA, 259 bp, Glycine max
  Clone ID: PAT_MRT3847_103465C.1
caggtattcctgatgacagtctgcctctatcttacagagcagcttgttgctatataccattgaaaagccttcagagctgagaggtactactaaccaataacctgcttggctcaaagggccagcaccttctctctaaagcccaagaggagtttgaggaaaactaggtgtctgtgttcactccaggctgaagttacaggtgagtaaacctaaatgtaaggtggactatgctaaaaattcccaatgaagaaactttcacatg

SEQ ID NO: 3832 - DNA, 231 bp, Glycine max
  unsure (1)..(231): unsure at all n locations
  Clone ID: PAT_MRT3847_103466C.1
atatttacttatatttacntatatttttcgccgccttttttgggttttttttgggggtatttaccggatctacccaactcacaaaacccctgaaacttgctgcgcttaacaaaaaaggacatccaggggccacgccacccaccccacaagcaaaaacaaaccacaccccccattttagaccggggcgacataaaccccatgcgggggacccacaaggggaaaagccgggag

SEQ ID NO: 3833 - DNA, 233 bp, Glycine max
  Clone ID: PAT_MRT3847_103467C.1
gggggggctgcatgagggttgagagtcatgcccaggagcacaactatgccgtacgagatgagtcttggagcacatgcttcagctattgtcacaaccacaaacaatcccggagcttgcacatgagcatgaacttctacaacaacatcaataggctgggtgcttatactgatgacgactatgactaataactgcatatgcctcatcatgggcatgagaacggcgtatgagccatg

SEQ ID NO: 3834 - DNA, 325 bp, Glycine max
  Clone ID: PAT_MRT3847_103468C.1
gaatgtaggtttttttttttttttttttttttggaacccaagtggccgacgttattttttacttttaacaaaataattggtggctacaaacatacgagatgggacaaaataatactactactactaccattttaccggcaataactttaatacaacacaaggttttctacatttttatcacctgggggggaaacacttatttactattcctacagggagaacaacacataatttcacatgggaccatttttagaaggcgggggccgttcaaagattatacatgacctttatcgggaagaagtttttgatcaaagggccaaacacc

SEQ ID NO: 3835 - DNA, 848 bp, Glycine max
  unsure (1)..(848): unsure at all n locations
  Clone ID: PAT_MRT3847_103469C.1
ccacgcgtccggactgctcacgtcacatcaccacaacacaacttgattccaaaattgtccacactctactctagatttccgtaccttctagcacctctataaacaccttgaattccttttcactttttcattaacttaagtccaagatgaagaggcagaggggtgtgaatgtgaatgctgttaggcccatcatgaataatcctcccagtgttgaagatgtggcagcagcagcaatggggaagaagaaagtgaagaaagagggtgagcagaaggtggggaagcgtgtggtggaggaagaggagagaaaggaaagtactagagacatggtgggtgtgggtgggtatttgcagcaacagcaacaaggtggtggcatgatgggttggaattgggaggagaatatgccattggtgggaggtgtggtggatgaacaaatgtcatggggctccacttggttccctggttgggacatggacttgttggggggtgatgctttcactgccttgtacaatgatgttctttgggatgatgatatctggaacctcaacaaccaaattccaattcccttagatactaagaggtttcatttcggctagagtagaggttgttctcaagcctccattcatgtctttatgtttcctttagcttaggaatggaattccagtgttttctcttcaatttatatagtatgttgaattcactatttttttttttttaatgctaatttggctcgtcaagattccgtaccatctaatgtaagcttctttatttgagcttgtatatatacgccaaatcttgtaacttagtaataatttcaagaaaatcagaaacatgttggctaatgggnaatg

SEQ ID NO: 3836 - DNA, 229 bp, Glycine max
  Clone ID: PAT_MRT3847_10346C.1
tcttgttttatgaaaaaaaaaggtcacagtgggtggaacttacatccactactcctttctaagaaggagaaaaaccatttctacaataatacacacctactgaacgctatgaaatattttatcagcacatatggttgatggcccaattactgcaaatcagtatcagatatgtttggcatcagcttttaccctaaagcagaagtgtatacctaattatcccacgaagttt

SEQ ID NO: 3837 - DNA, 444 bp, Glycine max
  Clone ID: PAT_MRT3847_103470C.1
tgctaaagttgtctctaaacaagatcatatacccaagcagaagtttctcagaagttaaaagatcaacttggctacaagcttaatgttaaaccttctcaaatatctcacaaggattctggccaaggtctatttttagatggtgcagctgatgttggtgccgtaattgccttttatcctggtgtggtctattctccagcttattaccaatatattcccggataccttgatgagcagaacccctatttgattacaagatatgacgggactgtcattgatgcccaaccttggggttgtggaggtgaagggccggaacgattcaatggtagaaaaatgttagaaagaaagcttgacaatgaaggagctgagaagggttcagacagaatgagtaaacctttggaaggttcccaggtagaaaatgacaatgaaaatgatgatgtagagcgc

SEQ ID NO: 3838 - DNA, 199 bp, Glycine max
  unsure (1)..(199): unsure at all n locations
  Clone ID: PAT_MRT3847_103471C.1
ccccccccccccccnggggccctatgggccttttagatcttgacgcgctgcaccctcctcagctccgattcggctccagctgagccttactctcttcagttccttcataatgagtggcgtgtaacttgtcgagaaagctctgtctttaggctcttggagcttataagcaagagcaccttagagtctaagatcgggttcg

SEQ ID NO: 3839 - DNA, 293 bp, Glycine max
  unsure (1)..(293): unsure at all n locations
  Clone ID: PAT_MRT3847_103472C.1
gagtngnatgnangngtangtaagntnggaattaattaangnnntnaannnnatnantagtaggaggaagaagantagngagnnngtngannngggaattannttnnggannggtanntgnaggngtaanagntttnnntatagtgagtanangntagagttggngtnatnatggtnatagntgtttntgtgnaaaatgttatnggntnanattnnananaanaanganntngaannnnnnnnnnnnnnnnnnnnnnnnnnnnnnnnnnnnnnnnnnnnnnnnnnnnnannnn

SEQ ID NO: 3840 - DNA, 167 bp, Glycine max
  Clone ID: PAT_MRT3847_103473C.1
ggcacccagagacgaggaagggcgtagtatgcgactaaatgctttacagagcttaaaacggggagctgttcaaagttccacgctctctcgctttcccaaaaactgctgctgtatccacggtcagtcttgtgacatctctgttaactgtagcatcttattagtcagtt

SEQ ID NO: 3841 - DNA, 474 bp, Glycine max
  Clone ID: PAT_MRT3847_103474C.1
gaaacaaagaaaaagggaccgaaaaatgggttggacataaacaggcccggaaggggggccccaatttttttacccggaccgatttccgggggggaggagtccttttcctttacaaaggcgggcccttgaaaagcaccccctaaggaagttaaatggcaggaggccccttcttttcccaaaaaaaaaataataatattttacccaaataaacccggaaaaaaaaaacaacgggagggaccccttttttggttttttttgggagagcccttttccggggggcccataggggtccaggaaaaaatggggggaaaagttttggtatatgggggggtaaaaccatctgggaaactttttttataagcacctaaaaggccttcccaaacggggttggggattagttggtttctccccggggggggttaaaaactttggcgggattcccaatatgggtttttttccccctttttatttttt

SEQ ID NO: 3842 - DNA, 375 bp, Glycine max
  Clone ID: PAT_MRT3847_103475C.1
gttcgcaattttctgtttgcgatggaagaattaaagcttccagcttttgaagctgctgatcttgaaaaggataatctcgagatgggatcggcagcaaaagtggttgattgcattttggcacttaaatcgtttcaagagttgaagcagatgaacaatcagaatggatacatcaaacacataaaatctcctttgcctatgagaatgcatacaagagcagctgcgttctcctctgatgcttgtaggcacttggatttgtcttccaaattggaaaaaatgcctcccgctgagtgtaattttccgaaaagagaagaaattgtggaattacttgccaagcaactggttgaccgtatgtttgatgccaaagaaaatatcgat

SEQ ID NO: 3843 - DNA, 128 bp, Glycine max
  Clone ID: PAT_MRT3847_103476C.1
cacgcgtcagaataaaaccaataatggttcctaaaggtctctttccattctctcggatgctgcactgagttgatatactctaaaataaagggcggcccctccgtaagttgttcccaatggtatccctt

SEQ ID NO: 3844 - DNA, 549 bp, Glycine max
  Clone ID: PAT_MRT3847_103477C.1
tggagttgcagtggcttttccgcaaattgtgctgtctgaacctgtagattcaagttttatttaatctactgtaacttttaagcgtgtttaggcaagcatttatgaaattcattttgcaaaattaattttaaagtaaatcagaagtgatttgtgtttgaattctttattttaataacaaattagcatgaaactgaaaagaaattgtatccaatataaaccaaactatcctaagttacttcaagtacaaatcaatgttaaatctaaaaaatcaattcatcaacatgaattcatgaaactaatcatgtaaacatttatctaaacttacattaacaggatccaaacatgtactatacgcatgttttaatctacattttcaaacaaccaatccacttctggccaaaagttggtgagactgagagaatagcttctgcgtctcttttggatttgacttgagttcaaaacatctatccaaacatactacaagtatttgtttcacattaaatagtatgcacaaaatagtccgaggaaatcaaacgtgtacaatttcag

SEQ ID NO: 3845 - DNA, 380 bp, Glycine max
  Clone ID: PAT_MRT3847_103478C.1
gaaagatgtcaggaggagctagactgatggaatcccttctggatgagcgctcacagctatcttgaactagcatatgaaactgagaatgctgactttcatactagctagtagagagaatagctacatgctctcaaggcataaatgctccaacagactgatcctacaactccttcaggacttgtgtgtctctgcgtgtgtatggggatgagaactcaatgagtgcgcatgaatatgtgaagcctgactttagcggcagtaagctgaacagctacctagcaggccataatagcaccattacagatggaaatgacacagctagcgcaactttgcatctagaaagtgagcagatcgtgatcgcatcaagagagactataagctga

SEQ ID NO: 3846 - DNA, 774 bp, Glycine max
  Clone ID: PAT_MRT3847_103479C.1
caagagtatcctttcacttcctttaaatacctcgagtgtccccattgacatcatcaaacaagagaagagttacagaatttcctgtttacgatcttattgcaattttgcaactttcaaagcttattagctaaagtaacatcaaaagatgtcattgattccaagtattttcggtggcccaaggagcaacgtgttcgatccattctcactcgatatgtgggatcccttcaaggattttcatgttcccacttcttctgtttctgctgaaaattctgcatttgtgaacacacgtgtggattggaaggagacccaagaggcacacgtgctcaaggctgatattccagggctgaagaaagaggaagtgaaggttcagattgaagatgatagggttcttcagattagcggagagaggaacgttgagaaggaagacaagaacgacacgtggcatcgcgtggagcgtagcagtggaaagttcatgagaaggttcagattgccagagaatgcaaaagtggagcaagtaaaggcttgtatggaaaatggggttctcactgttactattccaaaggaagaggttaagaagtctgatgttaagcctatagaaatctctggttaaacttggtttcactgaaaatcgtgagagcttttaaatttgctttgttgtaataagtgtcctttgtcttgtgttccaatggtgattttgagaaagatcatacaattgtgccttgtgttgttgtgcaagtgtaattgaagtgaataaaaattaacacctgctttcag

SEQ ID NO: 3847 - DNA, 510 bp, Glycine max
  Clone ID: PAT_MRT3847_10347C.1
ttttcctctccctcctccccccctcacctttgtaggttaattccacatgtctcattcagtccgttactcctaatgattaaaatttttaattactttgttaaagaaattaacaattatatcctctgcgaagtaagcttaactttttgaatgatgtgtcagcgtattattaataatacaaacaaggttcactaaagttaatagaaagtataattgaattcttttaacatgtagtaaagcattcaattctagactatgtatatattgctaagaaactagtttcaacctatattggttgagaatgtccttttggtgaaaaaaaaaagcactagcacatgaaaattaacctctaatttacgttatagagattattatcactaaatcaagtagtttcattattttaaaaacctttcaaaacattaattactagctataaaatcgttacaagaacaagaggatgtgtaaatgggttagtttatttacataattaacaaataacctcaaacatatttg

SEQ ID NO: 3848 - DNA, 716 bp, Glycine max
  Clone ID: PAT_MRT3847_103480C.1
gaaaagagttatttgtttacgatctcattagtcattacaatctgccaagtctctaatctaagctaacaaatatcaaaaagatgtctctgattccaagtttcttcagtggcccaaggagcaacgtgtttgatcctttctcacttgacgtgtgggatcccttcaaggattttcactttcccacttctgtttctgctgaaaattctgcatttgtgagcactcgggtggattggaaggagaccccagaagcacacgtgctcaaggcagatattccagggctgaagaaagaggaagtgaaggtgcagattgaagatgatagggttcttcagataagcggagagaggaaccttgagaaggaagataagaacgacacgtggcatcgagtggagcgtagcagtggcaagttcatgagaaggttcagattgccggagaatgctaaagtggagcaagtgaaggcttctatggaaaatggggttctcactgttactgttcccaaggaagagattaagaagcctgatgttaaagccatagaaatctctgcttaagctctgttctcttttgctgaggatcttgtgagtgattttctttctttgtttttcttttttttgtgagtggtttgtgtaagaaagatatcatggactgtgtactgtaattgcaaatacaagtaatggtttacagtggtttttgaaatataaaataaaatcttagcttgtaataat

SEQ ID NO: 3849 - DNA, 671 bp, Glycine max
  Clone ID: PAT_MRT3847_103481C.1
cagcagttaacaaaatttcgataagaaaagttcccaacttcagctaagagaaaatgtctctgattccaaactttttcggtggccgtaggagcaatgtgtttgatcctttctcccttgaagtgtgggatcccttcaaggattttcattttccctcttctgtttctgctgaaaatttagcatttgtaagcactcgtgtggattggaaggagactccagaagcgcacgtgttgaaggcagatattccagggctgaagaaggaggaagtgaaggtgcagattgaagatgatagggttcttcagataagcggagagaggaaccttgagaaggaagacaagaacgacacgtggcatcgcgtggagcgtagcagcggcaagttcatgaggaggttcaggttgccggagaatgttaaagtggagcaagtgaaggcttctatggaaaatggggttctcactgttactgttcccaagaagaggttaagaagcctgatgttaaagccatagaaatctctgcttaagcaattgttgtcgctgaaaatcctgagctttacaatttgctttgctgtagtgtattaattctctcggtcttgtgttccaatgatgattttgagaaagatcatggcaaaaaaaaaaaaaagggcgcccgccgacatttagctcgtcgaaccgggaatt

SEQ ID NO: 3850 - DNA, 903 bp, Glycine max
  Clone ID: PAT_MRT3847_103482C.1
ctgaaactgctaaaaaagcaaacaacattattgtaaacaagatttttctggatcatgcaagagtatccattcacttcctttgaatacctcacgactctcccttagagcatcatcaaacaacaaaaagactttctctttacaaattttgtaactttcaagactcagctaataaacatcaaaagatgtctctgattccaagtatttttggtggccgaaggagcaacgtgttcgatcctttctcccttgacgtgtgggaccctttcaaggattttcattttcccacttctctttctgctgaaaattctgcatctgtgaacactcgtgtggattggaaagaaaccccagaagcacacgtgttcaaggctgatattccagggctgaagaaggaggaagtgaaggtggaaattgaagatgatagggttcttcagataagcggagagaggaaccttgagaaggaagataagaacgacacgtggcatcgcctggagcgtagcagtggcaagttcatgaggaggttcaggttgccggagaatgctaaagtggagcaagtgaaggcttctatggaaaatggggttcttactgtcactgttcccaaggaaaaggttaagaagcctgatgttaaggccattgaaatctctggttaaacttgttgtcgctgaaaatcctgagctttaaaatttgctttgttgtagtgtattaattctctcggtcttgtgttccaatgatgattttgagaaagatcatggaattgcgaattgtacctgcttaagtaagtgggaactgtgtggttgtgtaattcgtgtgaataaacacatgctttcagaaaatttgctgcatgagtcaggtgtctgatacatatgtgaatgtgatgtagccaagaaatagaccgtgtaattattggct

SEQ ID NO: 3851 - DNA, 292 bp, Glycine max
  Clone ID: PAT_MRT3847_103483C.1
ctaggaatgcggccttcacgcccattttgcttggcatggaccttatgacatcctatggtatgtaatgctatcattatcgccatggacaagatttcgttcgacaatgcacgatattatcggccatcaactagtagctgatatattgtgagttgtcgaaggaactttgcttgacgtgaagtacattacaccatgatgatgatccagagggcctggccaagtaaaatgggcctggcggccgattactagcttacttacgcccgcgtgcaacagacataggtcctgtatcaggggg

SEQ ID NO: 3852 - DNA, 759 bp, Glycine max
  Clone ID: PAT_MRT3847_103484C.1
cccacgcgtccgcgaaaaaagttacctgtttgcgatctcattacaatctccccagtttctaatctcagctaagaaaaaccaaaagatgtctctgattccaggtttcttcggtggccgaaggagcaacgtcttcgatccattctcactcgacatgtgggatcccttcaaggattttcatgttcccacttcttctgtttctgctgaaaattctgcattcgtgagcactcgtgtggattggaaggagaccccagaggcacacgtgttcaaggctgatattccagggctgaagaaagaggaagtcaaggttcagattgaagatgatagggttcttcagattagcggagagaggaacgttgagaaggaagacaagaacgacacgtggcatcgcgtggagcgtagcagtggtaagttcatgagaaggttcagattgccggagaatgcaaaagtgaatgaagtgaaggcttctatggaaaatggggttctcactgtcactgttcctaaggaagaggttaagaagcctgatgtcaaggccattgaaatctctggttgatccatgttatggttgaaaatcgtgagcttatcctttgttgttgtaataagtgtcttctgtcttgtgtgcctttgagaaaaatcttccatgcatgcattgtggattgtaattgctccagtgattgataactgtgtggctgtgtaattcatgtgaataaagtcctaccttcagagttcagaaaatataatttcggtgtatctagtgtctgg

SEQ ID NO: 3853 - DNA, 310 bp, Glycine max
  Clone ID: PAT_MRT3847_103485C.1
cacaggtactggattgggtgctgagatcattggcacctttgttttagtgtacactgtcttctctaccactaaccctaataggaatgctaaagattcccatgttccaattttaactccacttcccattaaatttactatattcatatttcacttaaccaccatcccactcactaacactattatcaaccctactataaatcttaaaactactattatctacaaccaatataatccataagataaccattaaatcttttaaatacaaccatttattgaaacagccattagaaccttctaccaccagttcatc

SEQ ID NO: 3854 - DNA, 855 bp, Glycine max
  Clone ID: PAT_MRT3847_103486C.1
ctcgaaggccggccgttttccggacaccaaatattttcggcagttaatagcaatttcgataagaaaagttccaaaattcagctaagagaaaatgtctctcattccaaacattttcggtggccgtaggagcaatgtgttcgatcctttctcacttgacatgtgggatcccttcaaggattttcctttcccaaattccgtctctacttccttccctgagttttctcgggaaaattctgcgtttgtgagcactcgtgtggattggaaggagaccccagaggcgcacgtgttcaaggccgatattcccgggctgaagaaggaggaagtgaaggtgcagattgaagatgataaggtgcttcagatcagcggagagaggaacgttgagaatgaagataagaacgacacgtggcatcgcgtggagcgtagcagtggaaagttcatgaggaggttcagattgccggagaatgcaaaagtgaatgaagtgaaggcttctatggaaaatggggttcttactgttactgttcctaagaaagaggttaagaatcatgatgttaaggccatagaaatctctggttaagcagaagcaaatgttgttggtcttttttgtttgaagtcgtgtgcttttctttgttctaatatgatgtgagtgggagttgtgattgtacaaacaaataaaatagttgtataaacttggaagtcgtgtgcttttctttgttctaatgtagtgaattagatttgggacaaaaacgtgttctagtttaaatgtggttttgaacttttcattttgttgatttttcaatgttcttttccgcttcctaaggttaaggcaatcaaaagctttgctgaatgtttgatccc

SEQ ID NO: 3855 - DNA, 678 bp, Glycine max
  unsure (1)..(678): unsure at all n locations
  Clone ID: PAT_MRT3847_103487C.1
ccacgcgtccgcgccaattgagtattcatgacacccgagcagcagctgcctctggctggtcaaatggtagtgcaggtatgtcaatgtagagtagcccaagaagcagcagcggacctggtgatgactggagatctgcctttgatgcagctgccaatggccctgttagtcgaagtggttcatcaagatcgggatccaatggtcacagtcgacattctagtgatgctgcccaaaatggtgatgtgaactctgggtcaaactccagcagccgtcgaacgcctaatcggttgcctcctgctcctccgggttcttcaggttacaaatattaacaggtggctgactagtgattgcttgacagttactgtttgatacatttttggagggtgaggctgctcccaccccatttcatacggtcatccccaattctttgtttctgccggtatatttaggtgaggaaatgtttgtgtaaatagaagacgactatagtttattagtataagttttctgggcattcgtctcattatccggaagtttggtatcgagggtggacttgagtacatttatcatgttttgctttttttgtttacgaagcatttatcatgttttgctattcaatattcttttcactttaatagcttttattgtttcctttttctctctctagaatntgcactcattttg

SEQ ID NO: 3856 - DNA, 217 bp, Glycine max
  Clone ID: PAT_MRT3847_103488C.1
tatagttaaagctggcacgcccccaggtcccgttccgggattgacccatgcagtccggccacgcgtttcgtgtttatggaaatggggcgttggcttatccagacttgtggaaactctgtcaacagactgatgcctctgtgctgggcaaagctttatgtgtctcacatatgaaccttgatattccgcgagatgaagggctccatgcttgtctagctgt

SEQ ID NO: 3857 - DNA, 3068 bp, Glycine max
  Clone ID: PAT_MRT3847_103489C.1
gggtcctgcaaaaacatcagacatcccttggattgcattgatcggtcaatctgtttcaatagctacggcacagtctggatctgctggttctgaagattcattaaaaactgcatggagagcagagagtgaaagcctcaagtccatattgacaggagctcctccgagtaaacttggaaggattgctttagtggatgccctggcacaccagattcagaatcgtatgaagcttcggcttcctaaccttctttctgggttacaagggaagtctcagatagttcaggatgaattggccaggcttggtgagtctatggtcaccacttcagagggtacgcgtgctatagccttggaactttgccgtgaatttgaggataagtttctacagcacattaccactggcgagggagctggttggaaaattgtttcctgttttgaggggagatttcctgatagaatgaagcaattacctttagataggcattttgatatcaacaatgtgaagaggattgtgttagaagcagatggttatcagccttatcttatttcccctgaaaagggattgagatctctaatcaaaggtgttctagagcttgcgaaagagccgtcacgtctttgtgttgatgaggtgcatcgtgtcctgatagatattgtttcgtctgctgccaatgctacccgtggtttgggaagatacccacctttcaagagagaggttgtggctattgcaacctccgcgctagaagggtttaagaatgaatcaaagaaaatggtggttgcactcgttgatatggagcgtgcttttgtcccacctcaacacttcattcgcttggtacaaaggaggatggaaaggcaacgtcgagaggaggagctgaagggccgatcctcaaaaaaagggcaagatgctgagcaatctatacttaaccgggccagtagtccccaaactggtggaagcatgaagtcaatgaaggaggacaagaaagagaaggaaaaggacaaatctggtctggcagagaaagaagggcaagaaggctcaggcttaaagactgctggtcctgagggagaaataacagcaggatttttgttaaagaaaagtgcaaaaactaatggttggagcaggcgatggtttgtgctaaatgagaagacaggaaagcttggatataccaaaaaacaagaggaaagacattttcgcggtgttattacattagaggaatgtaacattgaagaggttgcggatgaagaggatcctccatccaaaagctcaaaggacaagaagtccaatggacctgattctggcaaagtcaaccttgtatttaaaattaccagtagagttccttataaaaccgtttctgaaagcacacagtgctgttgttttgaaggctgaaagtgcagctgataagattgaatggattaaaaagataagtcaagttatacaagcaaagggaggacagataaggatctcatctgatggtgcccctactatgaggcatagcctctctgatggttccttggacacaatggctcgaagacctgctgaccctgaggaagaactccgatggatgtcacaagaagttcgtggatatgttgaagcagttttaaatagtttagctgctaatgttccaaaggcagttgtcctttgtcaagttgaaaaggctaaggaagacatgctgaatcaattatatagctctgtcagtgctcaaagcacagctaagattgaggaactgcttctagaagatcaaaatgttaagcgcagaagagatcgaatccagaaacaattcctcccttctctcaaaattgacacgccaattgagtattcatgacaaccgagcagctgctgcctctggctggtcaaatggtagtgcagagagtagcccaagaagcagcagcggacctggtgatgactggagatctgcctttgatgcagctgccaatggccctgttagtcgaagtggttcatcaagatcgggatccaatggtcacagtcgacattctagcgatcctgcacaaaatggtgatgtgaactctggttccaactctagcagccgccgaacacctaatcggttgcctcctgctcctccaggttcttcaggttacaaatattaacaggtggctgattggtgattgcttgacagttgctgttttgatacatttttggagggtgaggctgctcccgccccatttcatacggtcatcccaattctttgtttctgccggtatatgtacctgaggatatgtttgtgtaaatagaagactatagtttattagtatatgttttccgggcatttgtgtcattatccggaagtttggtatcaaggtggacttgaatgcatttatcatgttttgctattcaatattcttttcactttaatatcttttactgtttcctttttttcttgtctagaatttgcactcattttggatgcaatcgatgtatcttgttttgtaatgattgaaataatacacaatcgctgatgggtttgtgacgaccattatggaatagtcacagtcgacattctagtgatgctgcccaaaatggtgatgtgaactctgggtcaaactccagcagccgtcgaacgcctaatcggttgcctcctgctcctccgggttcttcaggttacaaatattaacaggtggctgactagtgattgcttgacagttactgtttgatacatttttggagggtgaggctgctcccaccccatttcatacggtcatccccaattctttgtttctgccggtatatttaggtgaggaaatgtttgtgtaaatagaagacgactatagtttattagtataagttttctgggcattcgtctcattatccggaagtttggtatcgaggtggacttgagtacatttatcatgttttgctttttttgtttacgaagcatttatcatgttttgctattcaatattcttttcactttaatagcttttattgtttcctttttctctctctagaatttgcactcattttggttgtaatcaatgtatcttgttctgtaatgattgaaataatacaccatggctgatgggtttatgtgactaccaaaaaaaaaaaaaaaaaaaaaaaccaa

SEQ ID NO: 3858 - DNA, 356 bp, Glycine max
  Clone ID: PAT_MRT3847_10348C.1
ccattgtgtttttttgtttttttgttatccttaaccagtttgaggaagaattaatgtcgggaaccttacttctcacccagaatttacaaatcgcacataaaacatttgtcgtgcataccttgaatcaccagcgcgaccattttgctataaggaatagggcttccagtcagcatctatattattttgtctgcattttcggaagaatatatgtgacatcacatcaaaggtcatgatctgcttgttaatcactctagcagcaacaacattgagtgagaatgcagctccttcacaccagcagtcactggttaggtcaaaaagcattctaaagttactgcatcacaaagaaagcctacctt

SEQ ID NO: 3859 - DNA, 272 bp, Glycine max
  Clone ID: PAT_MRT3847_103490C.1
gtttatgaatcgcatggaacagatactaacacaaaatggttatcaatcaaatctttcatctgctaaccctagagatcagctagtggaattgccttctaatgtacaagggttgccgacacttgaagcattaagcactgtcttgcatcgtgcagaacagttacttggtggtcaagctgttgctgcactatctgtaattaacacatcccatttactaatattcatgttcaccttaatgataaaaatatctttctattatctgcaactataggatg

SEQ ID NO: 3860 - DNA, 331 bp, Glycine max
  Clone ID: PAT_MRT3847_103491C.1
gccaattcctgttaacgaacttgctgaccgggtgggtagttatgttcacctttgtacgctatattggtggctcaaaccttttggatgtggagtcatactacgaggctatgacagggactgaccactattgtacatggttgaatcttgcggtgtttcctatacatattcttgtgctaccatagataagggcttgtaggctgataacacaaacattgaatatgtaattctggccgctttgacatgtcgactacgggttatggctctggctctaaaatgtgtggagcacatgatgatgaaatgacagacttgggatctacaaatgagctggttg

SEQ ID NO: 3861 - DNA, 168 bp, Glycine max
  Clone ID: PAT_MRT3847_103492C.1
gtcacgcgtacgctctatacttgataatgtttaactcccgatttctttctacaccaaagggggctgtgtgactaactaaaaacaaactatgattggggccatctggagatacacaaaaatatggtttgtgatcaagcctaaccacgctggaggtaatttttgacaatt

SEQ ID NO: 3862 - DNA, 594 bp, Glycine max
  Clone ID: PAT_MRT3847_103493C.1
cccacgcgtccgctgaaacgcaatatgctatacgatcactgacagagtcagtgtttctggttgtttgcactttagattcaaacctgataggcgtcgttgtaaaaggaaaaaaaaagttcagtgtttttgtggtctcgtatcagaactcagaagttatcatccttaatatcttcaaacaaggtttttcacagcacatcgatacgaggatgttgcggctgtcgattcaacgagtgaggaagttgaactttctcagtccccagatctctgctttgggaaggtcccatttgtcaactgctgctgaaccatcttccagtaagagcaatccaccgagggttccaaatcttattggaggcagttttgttgactcaaaagcatcaactgtcattgatgttataaacccagcaacccaagaaagttgtgtcacaagttcctttgtctactgatgaagagattcatgaagctgtgtcatgatcatggaaggcatgctcatcatggcgtaccactacattacaacacgccaacgttttatgctgaagcttcaatagcttatacccagagatatggataaacttgctttgaattggaccactgaac

SEQ ID NO: 3863 - DNA, 3091 bp, Glycine max
  unsure (1)..(3091): unsure at all n locations
  Clone ID: PAT_MRT3847_103494C.1
agaaaatgattggttttattagcaaaattgaatcattttacaatttgactgtacttacatgttaagatatatgttacttctcaatcctgtctttgctaaaaaagtaaagatatatgttaagaatagatattaaccagagtacaatatgttggtatccataatcatttaaataatttttctcggctcgagtaaagcttgctacattctgctttgctcgaaattctcatcatgtcaagcctcaatgcggctgaacccatagcatttctttaacctttgtagtttcatggcttccctcacttgttctgtatcaagccaatgaccatttctgctatgtacaatctgccatgaagcttacaagccgacacgagagagctccatattcttgcacttggtttcatgggcattgttctcagtattttcagagcatcttcaagcttccctgaccttccaagaagatcgactaggcattcataatgctctatagttaatggaattttacaatctgcttgtacttgtttgaatatctggtgcccctcagctacaaggccagcatgatttcaagcagataaaactgcaaggaaggttattgcatcaggtgctcttaaagtaaatgttgggtactgaacctgatgcagatcttggcaccagtcattagcaaacagtgcaacagaagaggtatacacgcgaattaattcaattctggggtatgaaagtggtgcgagactagttcttgatggaagaaatatagcggtgtcaggatatgaaactggctctgttattggcccaatcctcttatcagatgtcactaagttcgtgtagttattctcttcaaacacggttgttcacagcatatggatacgaggatgttgcggcttgtcgattcaacgagtgaggaagttgaactttctgagtcctcagatctctgctttgggaaggtcccatttgtcaactgctgctgaaccatcttccagtaagagcaatccaccgagggttccaaatcttattggaggcagttttgttgactcaaaagcatcaactgtcattgatgttataaacccagcaacccaagaagttgtttcacaagttcctttgtctactgatgaagagtttaaggaagctgtatcagcagcaaagaaggcatttccatcatggcgtaacactccaattacaacacgccaacgtgttatgctgaagcttcaagagcttatacgcagagatatggataaacttgctctgaatgtgaccactgaacaaggaaagacattgaaggatgcccaaggagatgtatttcgtggtttagaggtggtggaacatgcttgtgggatggcaactctgcaaatgggggagtatgtttccaatgtatcacatggaattgatacttatagcattagagagccactaggtgtttgcgctggtatttgtcctttcaactttcctgcaatgattccctttgtggatgtttcctatggctattacctgtggtaatacctttgttctaaaaccatcagagaaagacccaggtgcttctgtaatgcttgcagaattggcattggaggctggtttgcctgagggtgtcttaaatatagttcatggaacccatgatattgtgaatgctatttgtgatgatgacgacatcaaagccatatcctttgttggttcaaatgttgccggaatgcacatatattcaagagcagcagctaaagggaaacgcgttcagtctaacatgggagccaaaaatcatgcgattgtcatggcagatgcaaatgttgatgctactcttaatgctttagttgctgctggttttggtgctgctggacaaaagtgtatggctctcagtacagttgtttttgttggaggctcaaaaccatgggaggataaacttttagagcatgccaaagctcttaaagtaaatgccggaactgaacctgatacaaatcttggtaccggtgatcagcaagcacgcaaaggagagaatacacagattagttcaatctggggttgaaagtggtgccagactactgcttgatggaagaaatatcagtggtcccaggatatgaatctggcaattttattggtccaaccatcttatcagatatcaatgccaacatggaggctgatagcttggaagaagccataaacattatcaacagtaacaagtacggaaatggtgcttctatatttactacatctggtgttgctgcaaggaaatttcagactgagatagaggctggacaggttggcatcaatgtccccattccagttcctttgcccttcttctcatttaccggcaacaaggcatcgtttgccggtgatctcaacttctatggcaaggcaggggttaacttctatacacagattaagacaataacacaacaatggaaggattcaactggtggtagcaagattaacttggcaatgccaacctctcaaaaataatgttgatagccagagcgtgtaataaggctgtttctgaagtctttgttctcttgaaaaaaatgtcaaaggtcacctgctatgctttgttttgaaacctttctcttttctttttcctgatcttatctgtctcttgtgtctccacgtggacaatacaattctttttgcttaattttctaaagtcaaggtttacgtggagcctaatccattaattccaaaaacatccacatgaaatggttttaatggaggaacttaatttggaggcaaaaaaatttgactcaaaacccccnacgggaaaaaaagggagaaacccccccaaacaacatgtttttaaaaaagggggaaaaaaaaatgggggggccccggggggacccccaaaaaaaaaaaaaaagggaaaaaaaaaaaagaaggggggtaaaaaaaaaacacgggggggggctgtgttgttttttttaaaaaaaaaaacacctaaaaaagggcccccttcccccgcctgggggcaaaaaaaaatttaagaagaggggggggcccaaagaaattttcccccccccaaaaaaaccccccaacgggggggggggggggcaaaacgggaaaaaaaaaaaaacccccccccccccataaaaggaaaaaaaacgaaaaaaatccccaatcgcccggg

SEQ ID NO: 3864 - DNA, 1054 bp, Glycine max
  unsure (1)..(1054): unsure at all n locations
  Clone ID: PAT_MRT3847_103495C.1
ggctcgagtgaagcttttgcgtcaaattagatgaattgtgcaaccatggacttgtaacacaagctgcctccctcatatctaacagcagttctgggggtggtcaggcttctctcagcatgctgacatatactggaggaaattcaatcggaaatcagtccttccatggagaaaggaagaaaagcagcacgtggttctaagagaaagcgccgaagtttcaaggataaggatcactatataagttcaattccaaaaaatcaacatatggaggctggcctttcagtaaaagctaatgaagactttgcttctaatagattggaagcagctgtcctcgatctagtggcagatgatggtgctggcattcagaacaaagatctatgtatcactgggataagaagggtaaaaagtgcatcaagttaaacaatggtgatncgtgttgctgcaaatggaaagaataagacgaagagtggtgcaaaaacaaaggcaaacaagactggtatatataagaagtggaaagagcgctcacatgttaggatatcacttaaagggacaaataatggtgatcctcaggattcaacaagtttgacaggattttaccaaaaaggtcgtagtaattttaaaggcagcaagaagcagcattcaatgcccaatgctcatgtgcgttcagaactcaaagatatggatcaaattcgaaaggagaggcagacaaaggccaacagggtttcttatataaagagcaagtcgacaaagggtaaaaggtttggtaaaaatggtaaaaaaaaaaaaggcaaatagagtttgtttgaagctctagaaattaattagttaaggagaaaaggcttgccaatgaatttttatattttggagtggtaaggggggggggggaaagggagaaacccaactgagaaaaagtgactttttgattttgtttttttttcttggttcaccaacaaattttgtttgttcaaagtaatgattcttgcacttgttgctgtacatggatcacacatctgtgcgcttccttttatatttgaagttcccctttgtgcttttgggg

SEQ ID NO: 3865 - DNA, 235 bp, Glycine max
  Clone ID: PAT_MRT3847_103496C.1
gatgaaaggtccaggtctctactctgacattgacaagagatctcgcgatcttctgttcaaggttctatggaatgaccacaatttcaccatcactccttacacttccaccggagtgtaaatcacttcgtctgaagtcatgaagggtaagatgtattcggccgatggcatcactaacgtgaagaacaagatcatcacacctgatgtcaaaatggacactatctcaaatctgcatacg

SEQ ID NO: 3866 - DNA, 3061 bp, Glycine max
  unsure (1)..(3061): unsure at all n locations
  Clone ID: PAT_MRT3847_103497C.1
ctcacagaggtggacctctcctctatcgtggacgcgttgttgtcgctcgttcactctcacagaccctcgcacaagcctctctcgttctcgttctcgttctcgttctcgctcttgtagatcctcgttcgttctcactctcgagctctcgagcttcttctctgggtttaattcaaagcgttggagtttttgaatttgttggttcatgtgcagcaccagccccaaactcctgctcaatcctgagttcagcgggttgcattgtctactgctgcaaatatgtgcaagaagcttccttagatgcagctgattttgtgatggaagttgtttctcttttgacanaccttcagtaccatgattccaaggttctggagcacgcctctgtctgtttgactggctcgagtgaagcttttgcgtcaaattagatgaattgtgcaaccatggacttgtaacacaagctgcctccctcatatctaacagcagttctgggggtggtcaggcttctctcagcatgctgacatatactgttggagttttttgaccttttttttcgttaagagggtatcgacagatgtgtgtataattgagaacttgacttcgaagatcgcaaaagcagctttcctcgatctagggctagatagtcgttgtggcatattgaaccagacattgatgtacttcggtgtgaagatgcctaaattgttcatcatgtcaattagtgcttaacccgcaaatctaaattatttgtaaaaggtgttgaaagggttgaaaaagatggccaaactggacttgcaaattcttttgtgtctccagatcctatcacttgttttgtggatctttagaggtttctctgctcgccaatcaaacctgctcccaccgaagaagagttcttgcaggatatggatggagtattgtctagatgtgaacaggcaatggcaaatagagaaactatttatggtcgtttcccgcaaaaagtcatcgaccttgtttcagacagagttagggaaattattgatacttctgcggaactggaattgttgcagaggacctgtaaaaatgcatttcgtttgtattcaaaaacaaaacccttacccgcaaaggagtccattagaagagtaaaggatttgcctcacgaagggctgcatccaatgttcatgaatgtgttggaaacaggggagttaacggcacttgcattttctgagcatttgaaaaagtttaggccaaagcagactattttggaagctgaaggggaagcagctaaattaaagcatcaacagggcccttctggccaatgggtcgatgtgatgaaaaggaaaagagccattcatgagaatattataaatttggttcgtgaacagcagcagtcgaagagtaataaggaaaaggaggaaattcaatcggaaatcagtccttccatggagaaaggaagaaaagcacgtggttctaagaggaagccccaaagtttcaaggatgaggatcactatataagttcaataccaaaaaatcaacatatggaggctggccttacagtaaaagctaatgaagactttgcttctaatagattggaagcagctgtcctcgatctagtggcagatgatggtgctggcattcagaagcaaagatctatgtatcactgggataagaggggtaaaaagtacatcaagttaaacaatggtgatcgtgttgctgcaaatggaaagataaagacagagagtggtgcaaaaacaaaggcaaacaagactggtatatataagaagtggaaagaacgctcacatgttaggatatcacttaaagggacaaataatggtgatcctcaggattcaacaagtttgacaggatcttaccaaagaggtcgtagtaattttaaaggcagcaagaagcagcattcaatgcccaatgctcatgtgcgttcagaactcaaagatatggatcaaattcgaaaggagaggcagacaaaggccaacagggtttcttatataaagagcaagtcgacaaagggtaaaaggtttggtaaaaatggtaaaaaaagaaaaggcaaatagagtttgtttgaagctctggaaattaattagttcaggagaaaaaggtttgccatcaaaattcttgcgggaagtgttgtgccataaatttttatattttggagtgagtaggggggaagtgagaaacccaactgagaaaaaagtgactttttgtttttgtttttttcttggttcgccaacaaattttgtttgttcaaggtaatgattcttgcacttgttgtacatggatcacacacctgtgcacttccttttatccttgaagttccctttttgtgcttttggtgctctatgggtgtatttctgttgcagtttaatttggataactatcaactttggcggtatcgagctatttcaatttcagtctttagttgaaataagcatgaatgtttgaagtgaagcggactccagtttcttatttcaaatgacttcagttttcgtttgtaatgtcagtaaaaagaaacagagagagtggtgcaaaaacaaaggcaaacaagaactggtatatataagaagtggaaagagcgctcacatggtaggatatcccttaaagggacaaataatggtgatcctcaggaatcaacaagtttggcaggatcttaccaaagaggtcgtaggaattttaaaggcagcaagaagcagcattgaatgcccaatgctcatctgcgttcagaactcaaagatatggatcaaattcgaaaggagaggcagacaaaggccaacagggcttcttatataaagagcaagtcgacaaagggtaaaaggtttggtaaaaatggtaaaaaaaaaaaaggaaaataaagtttgtttaaagctctaaaaattaattagttaaggaaaaaaggcttgccaataaatttttatattttggagtggtagggggggggggggaaaggaaaaaacccaactgagaaaaagtgactttttgattttgtttttttttattggttcacaaacaaattttgtttgttaaaagtaatgattattgaacttgttgctgtacatggataaaaaacctgtgaggttctttttat

SEQ ID NO: 3867 - DNA, 283 bp, Glycine max
  Clone ID: PAT_MRT3847_103498C.1
agaggattcttcagctacctctcaatacctcgcctcttatacatgatcagctctggctgaatattacatgtgccgtgaacgtaatactttaatcatgaatgacaatctctccaaacttgcacatgcttatctgcaaatgtctgttttattacgaagacctcctgcgctctaagattatccaagggatcgcttttatttacacacacgtctattgtaaatagccggtaacttaattcttcatgtcgacgaaagacgaatgactgacttaccattagttgatact

SEQ ID NO: 3868 - DNA, 393 bp, Glycine max
  Clone ID: PAT_MRT3847_103499C.1
tgttgaactaggcattgctatcagcgggggttgttggctctgtgcataggatcgacatggatctcttttttacattggcaatactggtgatgatagtaggcgcaccatactctagcgctgctggaatgagcgaaggcaacgagaaaacagctgtgactgtgagtcctaaggctgaactgataccgagatcggttgcatagaaatatgaggacagattcagattgtgcaagaagtgatgtaacactcaatggtgaccatgctgaggtagtggatgaagcaagaaacccagtgcctcttcatgaaagttatgtgcaccactgtggatgtggcagatactatcaacctgaagatgtgactgcacacacaaactattacggacatagtatacttcac

SEQ ID NO: 3869 - DNA, 163 bp, Glycine max
  unsure (1)..(163): unsure at all n locations
  Clone ID: PAT_MRT3847_10349C.1
cagaatttcactagagatgacccttctcctagggcttacttcgagtgttcatatgcctgtagctgtccagtaggagagaagttagattctattagtagtaattaatgattactgtagtatcgactcatcaatgtaaatctaatcaatntaggttactatgttg

SEQ ID NO: 3870 - DNA, 426 bp, Glycine max
  unsure (1)..(426): unsure at all n locations
  Clone ID: PAT_MRT3847_1034C.1
gggagggggggcgaggcccaccaaaaagaagcagggggggggccagcaggccgnagggggggagcgagccgaccacgccaaggggggaaccagggagagagggcgacagcgccgccggacaagagaggggccgacccacgacccccaagatggggggggggggagccgaccaaccccaacgagacgcatgcgncgacgcacccagacgaaagaaactgggccggcgggagagcaccaagcgagcggggattaaaaagtgatgccattggatcgggaaagtggtgggagcgagacttaataggctgcacagctgtggttgtagtgctctagcttggaatgataatggccgatcttacctatctcggtgggattactggagtttatggggtttatcatgagcgcctgcggaagtatggtaggtgctaa

SEQ ID NO: 3871 - DNA, 768 bp, Glycine max
  Clone ID: PAT_MRT3847_103500C.1
acataataattatctaatttcttctaaatttaatgtttcttttgacttaaaaaaataggaatttaatttctcccgagatttttatcctgagaatgctaaagttattgaatttacacattaaccaataatggggcattgttgttcactagaaatctgatgacaccatcaagatatgctgttctataatcagacctaaaggaccctcttgatggagggtatgattctgccaatgcgccagtctcaatggcagtggaaactttgatttggtttccaaggccaacactagaaataggtctttggatattttgcattgcaagtactagaaaccgtgcaaatgagtcccaaggcttcacttcgtttctcattgaaaagtacctaaatctaacattgccaaactttttgacgttgtcttgtacccatctgtttgcgttgtcttggctagatgctactctttggaggtcgatgttagggagatctagcagcaactcaatgctggaacctcttagagcttggaggacttgttggtttcgatcatagattctcatccttcggaaatcgtactgtttagaaagggacactacttcttgtggtgatggcagattgttgccaactcttccgtagcatacaccagattgtgcacctgttgtgcctgtgttagtgattagaagcataaacaagaggagtattgaagtcatggaagaacattttccagttgaatgggattcagacattgataattaagaacaagataggttaaggaagaagaag

SEQ ID NO: 3872 - DNA, 259 bp, Glycine max
  Clone ID: PAT_MRT3847_103501C.1
gtttgctgaagagcttgaacttgaaactcttccaccctcttaccctccccctcaccctgttcactcccccgcaccagcacctcttcacgcaccagcaaatgctcctgccccacaccaacagcagcaccagcaccaccctccagcaccagcaccagcacgagcacctgttccttcaccttctgaccacaattaccctcctacccctgctgctgctaagcctcctagtcaccaccatcagcatcaccctcctgctcctgtt

SEQ ID NO: 3873 - DNA, 240 bp, Glycine max
  unsure (1)..(240): unsure at all n locations
  Clone ID: PAT_MRT3847_103502C.1
ctcttataaagggttgttttggaggataaagggcgacgtccccgacaacagtgggagaataaagagctgcggatgcagtgaatcttcccaaaacctcttgttcaagttctaatttttctgnttgtggatgacnctgttgtcgggggttgaaagatgcccccctcacaggttcgtcctttttcccgaaacgaatcccaaaccctgggcttcggctcttggtctgatcctatggcgggattg

SEQ ID NO: 3874 - DNA, 474 bp, Glycine max
  Clone ID: PAT_MRT3847_103503C.1
gacggacaaaactggagctttatttattttattagggggaagaacatttttgccatttcaccctacggggggggggccccagcaaaaatagggggggcaccaagtaactcccctccctaacatgaaaaaaatccactggagagatccattgcccactaactgggaagtttttaactccacttcttgggaaaaatgactaaatgagccctttcatcataatagctataagatacacaaaaggggatcgaggcccccaagtttatcgaaaaatgatttacaagttttccgaatgactgaataaggaaaggggggttataaacaacaatcaagaaacacctaataagaattatctcacgacttttagtttctatgcccaactccaaagggaaacctcttgtcttgcttggcgttaaaggcatattcaaaacgcaaaggacccaaaggggattccacacgggtgccaaacccatagca

SEQ ID NO: 3875 - DNA, 248 bp, Glycine max
  unsure (1)..(248): unsure at all n locations
  Clone ID: PAT_MRT3847_103504C.1
aaacacccttgtcnaccacttcaaaancaataacataaaaaaacataaaaagacattttagcataatttttggcccctaaaacattttaaaatcatattctcacactctattaaaaccctacttcccttattaccgatacctcatattccaataccttccctatacataaaaacaactccctaactaatcacacttaaaatacccaaaccacaccttaacaattatccccacactttcctcaaataaa

SEQ ID NO: 3876 - DNA, 440 bp, Glycine max
  Clone ID: PAT_MRT3847_103505C.1
tgcttggaacctttgggctgatttatgtgcttgcatggtcgtgagaagatgatagaagggaccgggacgtacgggtccaagaggaccagatcggggggaaaggacaccggaaaaacaaagggcccgtcttaccccataaaaaccgagaaaaatcacggacgctacggcggacacaagaggaacccacacatcttacaaacgcccaccgcaaataccataagcagccaacaacccaccgacaaccacccgcgtaaaaacacacacccagccgcccaccattgcgcgctggccccctcgaaaccggagaccggacccgacgaaacacactaatccccgggaaaataaaagtaacaaaaagtggttgtctcagaggacttaagtccatgcataatcgtacgtgatgctacaatctcctcacagggctattcaaacctaaccta

SEQ ID NO: 3877 - DNA, 114 bp, Glycine max
  Clone ID: PAT_MRT3847_103506C.1
atcgaggtgaacaagtgcagctgcaatacgtagtgatgcctcttcctgtgtttgcccatgaggagaagggaccatccccgtatacaattgaactctctgccgttttgggtttgc

SEQ ID NO: 3878 - DNA, 356 bp, Glycine max
  Clone ID: PAT_MRT3847_103507C.1
cggtccggattcccgggtcgacccacgcgtccgatttttctctcaaaaaaaaaaaaaaaaaaaaaaaaaaaaaaaaaaaaaaaaaaagaaagaacgaatctaaaagaaaaaaaactaaggaagcgcacgcatgcgacgtcctatcgtgtcatcctgagtcaccttaactgcactgcactgtgccgacgttttacaccggtggagaccggggggaaccccgatcgttacccgccttgactggcattgcacctctctgccccttgtctccagtctggtgtaaggcccacaccggtccgccctgctcgcccttccccacagctgcccggcctgtgtggcgcacgctacaccccctcgtt

SEQ ID NO: 3879 - DNA, 411 bp, Glycine max
  unsure (1)..(411): unsure at all n locations
  Clone ID: PAT_MRT3847_103508C.1
aaaatgttcatcatgatgaatgtggcaattatttgtgtttcgttattagcnngcctatnnnctgaagccccaaaggaacatggagatccgtgaatnntcctccggggcaattgccaaaattccacaatttgtcaatgaaaataagtgagcgcgacaaaatggttcaatttttatgaatgtcggaattatttggttttcttaattagggcctanntcctgaagccaaaaggggaaatgacgatcgcgaattccgtcggggnaattccgaattccacaattttcaacgaaataaaggaggcaacaaatcgttcaatatatgaattcggaattaatttgtttgtcttattagggcctatcctcgaagccaaaggaaatgaagatcggaattccctcgggggtaccgagctcgaa

SEQ ID NO: 3880 - DNA, 227 bp, Glycine max
  Clone ID: PAT_MRT3847_103509C.1
ggaagcacgagaacatcactcaccaaaaggaaacgtcactcccactgccaacgcgtcaacaggttggcacagcactctcaattgcgacacaagaattccatcattacgctcatcgatcagatcattccgcaattcctgctttccatcagtaagttcttaacgtcaaattggtcaacatcagcaattcactctgccatgaccagatgtgcatattcgtggatgcggca

SEQ ID NO: 3881 - DNA, 1325 bp, Glycine max
  Clone ID: PAT_MRT3847_10350C.1
ccagaccaacttccaaaaccaaaacaaccaaaacagtaaagctaacttcaacacctttaattttctaaaagtaattcagcggctgaataccaagcggagaagatgagtcaggagcagccacggcgtcccaaaggccaaaaccccatcaaatacggcgacgtttttgtcgtctccggcgaccttgcacagaagcccgtcgcaccggaagatgctgccatgatgcaaagcgcggaaactcgagtgctcggacaaacccaacccggcggagcagcttccgtcatgcaatctgccgccaccaggaatgaacaggctggccttgtcggtcaccgggacgtcaccgacgttaccggcgaccgtggcgtcacagtcacagaaactaaagtccctggaagacgcattataaccgaggctgttggtggccaggttgtggagcagtatgtggaggcaactccggttgaggcagggcgaagcagtgcaattaaggagaatgccataacaataggagaggcattggaggcgacggcacagactgtgggtcagaaagcggtggatcagagtgacgcctccgcgattcaggcggcggaggtgagagcaacgggaagtaacgttataacgccgggtggacttgcggctatggctcaatcagctgctgcttataatgctgactgcaagcttgaccaggacaaggtcaagctcgccgacattttggccggagccacagccaagttgcccgcggacaaggccgccacactgcaagatgctgaaggtgtagcgtgtgctgaggtgaggaacaaccctgatgccaccgccactcccggtggcgtagccgcttctgttgcggctgctgctaggctcaatgaaaatgttaagtaacgagtcatgttatgtgtcttgataatcatacttttgtttcatgatgtgtggtgttgatgtgttatagtctatagtgtattaataagtgtaagtggtgcaacatcttgtttttctttcttgtactctttgtgagttatattaattactggttttaaggactctacttaaggtgatgtatgtatactatgcgctatatgcatttctgtggttatcagttaataatatgtgctccaatcttgtaatttcttgtttgcaaccattctagatcccaaaatgcttgtcaagaggatttattacgtacccttttcctttagtcataatattttattctttagaaaactgtatttgtagttgtatgtattgtttggggataatatatactgcaattgttataggatagccaaaaaaacagcattctataagatattatagttgtgtttgtttatgatagg

SEQ ID NO: 3882 - DNA, 496 bp, Glycine max
  Clone ID: PAT_MRT3847_103510C.1
tttgggtgtttttttttttttttttttttttgggaactcaattagcatcttgcacaattaaactggaatgccgtgagcaccaaatacgtgctaaatggcaacaatatcaggatttacaactattcatcaataagatacatttgaagagagaggaaaaaaactcagttaattttatccctcaacaaattttagggcaagttaaaacgttgcaagagttatttataacatcaacgaaattgactagttgcaccaggtcggtaatctccaattcctagcaagtcttgacaagctttattttttgctctagtctctgcagtgctgggaacatcatgatttggtttctgaaatctcttctcgcgtcgatcacaagagccccatccgtctgagaacctgccaccttgcatgtatgcacgaatcacaaactcagcacgctgaacattacgattctcatcaaactcaatattcttgcccctgatttcataagaaatattgaagt

SEQ ID NO: 3883 - DNA, 443 bp, Glycine max
  Clone ID: PAT_MRT3847_103511C.1
ttcaagggtcaaaactatgacaattggaagcaaagaataatagaattatttgatgcttgtcatatagacatgtgggatgtcgtggaaaatgggaactacattcctatagatgagaaaggtggagagaaccctcgatctgcatggacaaaagatcaccagaccaagtattttctatattcaaaggctaggaacacgagaccatcgaacaattgtttggacaactccaaagtgcaaaacattatgaacaatttaaggtctctaagtaaaacttaagataatcatgatgatcatataaccaaaattttgcaaagtttgcttatacagtagagaccataggtgatagctctatgtgactcaaaagatttgaagtctctacctgtagaagagtttgatggaactctccaagttcacgagttggagctgatggaggatgaaggacaaag

SEQ ID NO: 3884 - DNA, 372 bp, Glycine max
  Clone ID: PAT_MRT3847_103512C.1
ctttagcgtcaacaacagattgttacacatactttatatggggacaaccagatcactgtgaagacactgaccacttgctgaaatccaaccatgctggttgctaagcccacgactctatctcaaggtacagaatgcctaccgacttacagcaggaggaggctgcgtaccatgacatacaccatgcgtcgatgtttgatgactgctcaaagctgaaactagctgaatttgagaccacttccaaggaacaagtgagcaaccggctgatgatgcaattcatggactagaactaagaagacatggagctagtgacacagcaggcaccgatcttgagagattagagagtgacatgattgtgctgatgttccaggctag

SEQ ID NO: 3885 - DNA, 1640 bp, Glycine max
  Clone ID: PAT_MRT3847_103513C.1
gagggcgcccgcggggcggagggcggagaggccaccggaggagggctggaggaggacggagcggacatcggaggggtagccgccgtgggggaagagggcgtcgggggcctccgccgccgccgtgcggggtggggcccggatgggctgccggggtccgacggtgggctgggccccggagcgggtgacgggggacgcccctccggcgggccccggggcgagggagcgggcgggcgcatgcatgtggacgatgacgccgtcggaggggtagcccgcgcgggtgacggaggcgctgtggttggcgcgcgtccgcgcgccggcggggtgccgtacggacctgaggacgcggtggctggttggtgccgagggggggatgggaattggggaagagggcgttggagctggggcgagtgggtgggcacggaggtgggggtgagcgaaaacgagtgagggagtgtccggatagggggagctggtttccttactgggctaccgcatgacgtcgggctgtttcgcctccgtcgcaagcttgggggcatttggcctcttaggttgttcggtaggcgactcagcgatagtagtcggccccccgcgctcgtcgccggagagttagtaacgacgatccggcgtttccaatgcgtcggttaggcacttggcgagtttgatgtacatgggggggaaactgaatgggcatgtggagatggtggcctgcccggtgtccggagtttgggcgtgcagggtggtgttaccggcctggcccaatccgcaaaacttgctcttcggcttagcacactctttaaacgtggtttggacggggggggttgggttcagggccaagtccaacatccaggcccttccttgtgcgcgtgcaccatccccctatctaccaaccccaccatcgtcgaagctatcgtcacctgattcgccagtttcgcgaactgtcccttcccactccctcccatgtagttcactttccccaaatgggagaacaaggcttccatacgcttcaccgtcgattcttccccgccggcgaagattgctagggttccgttcttcgcgccgcggtcgccgccggacacgggggcgtcgattgagtggcagcctttggcggtagcggcgtccgcgatttcgacggcgagggagggttcggaggtggtcatgtcgacgaggacgccgccggggcggagggcggagagggcgccggaggaggggtggaggaggactgagcggacgtccgaggggtagccgacgatggagaagacgacgtcggagcgggctgcgacggcgtggggggagggggcgaagtaggccccgaggtcgaggaggggctgggccttggagggggtgcggttgaagacggtgagggtgtagccggcacggatgaggtgggcgcacatggactggcccatgacgcccgtgccgatccagcccacgcgcgtgttagatgggcttatagtgggctccgccgcggccatgaagtgccggacgatggaagtgtggaaaaggcggtgtagtgagcggagagcgtttgcaacggagaggagggtagaggcatgtctattgccacatatatatactatgagtaataagggagaacttggttagagtttgacatacacacgtctaaagatttcggacgcggg

SEQ ID NO: 3886 - DNA, 474 bp, Glycine max
  Clone ID: PAT_MRT3847_103514C.1
accagatcaaacgaatgctctccagcttggccgatccttatactcgctttctctcccctgatgaggtcatttttcatgtgtcctttttactgtgtttgttaatcactagtattagtgttggaaagtcccacatatctgcttcaattcctgtggtgcagcttatatgcctacttgttatatcctctctctgtgtatcgccatcacctgttttagctagcagacatctatggaaggggtctaaacttaggattgagcctaactcaatcctttaaactaaagctacttcatagtttaagggttgcatcccacttatatactagtttgcgtgactgtatatttgtgttatcaggtggtctaataacatgataaagacccaattatgtgtggttcaataagccacaaaacaactactaggataggcttggatactattttgctcatatcattagtcacttgtcaatgtgagatctcgaa

SEQ ID NO: 3887 - DNA, 787 bp, Glycine max
  unsure (1)..(787): unsure at all n locations
  Clone ID: PAT_MRT3847_103515C.1
aagaatcctatttttagcatatgttatttgctttgtgcgccggtttcttctcattatcaatcgcataacaaaaaagttatcccgcagaattggatttagcatattcctaatttctattagcaacaaaataaacacagaagactaaagtgaataaacaaaatagaaggaaggagaagaaaatgggagctatatatgcaaatgtaacggacaagatcattcgttaagatttctttgtcttctatttgtgttactctcaccaaggtgtctagcagacattattcttccctcaataacctaacacgtaacgcagggctggtggttttgtcattttcaacactgttcacattcatagttatcattttatgtgtactctgatttgtaccataatcatggttatcacgcagcattggcttcggagtcacatgatctcatacaagtgtcccctaattaaataactgcttgacagtctcaaggaaaatgaaaatgatcataatgtgtgcatgtacttagttacattttatctttttttttttataaaaaataattctatgctataaaaaatatagagaataggagaaggatttactcacctcagcaataaacacaagcgtacagaatagtttattcttaaagcaattcctttctttaatttctttgncttctctatcttctgatgttcttgggcaagcactaaattgtttctgcttctatattctctttgggtggtgctttgcaggtcttattcactagctttccaaagaagaanagtgagtgattcctggggtcg

SEQ ID NO: 3888 - DNA, 497 bp, Glycine max
  Clone ID: PAT_MRT3847_103516C.1
attcattacacgcttcgctttttttgcagctcgcagagtagctctaaacgattcggtttggctctgaactgttttgcgagcttcattgggaggagtttggggatttgatagaaggttgtgtgatagagtgaagcttggacatttaagaagagatggaagaaatacgatcaggggttgacacgcaatctgtctgttacgtagagttcatgagctatctgagaatatttaaagtaccaggtaggtttggctctggagagctacttagattccaaccaaggggggatgccccccatgacaccttcttgcgtggcaggagggttagcccaatcatcttcgcattctggaattttctttcaaggagatgggcagtcacagaatgcatggaactctgacttaagctcatcttttgttaactcgtctagcacggtttcaggagccggtcgatcaaacttgggtccggtttctggccgtatgaataatgcagttttgaacagtgt

SEQ ID NO: 3889 - DNA, 377 bp, Glycine max
  Clone ID: PAT_MRT3847_103517C.1
tctcacgggctgtttaggccccacgcacgatggagggttcctgatatactgtgacattggacagaggacccactgttcaaaaaaaatcacgtactgctactgtaatagcagcaggcatggatactgtcacattacaaagaagtggtggtgagcggaatctttcacagggggtgctttagaacaacacgtggaggtccaatattaagacatcctatgtggcccttaaagataagcatcctttctcgaggagttagcaggcaactctgagattaggacgaggacgggtcctgggcccccatcttcatcctcataaggtgagagttgaagagatgatgctgaacctgtagcacatgcatgtcacaatgtgccatttatag

SEQ ID NO: 3890 - DNA, 336 bp, Glycine max
  unsure (1)..(336): unsure at all n locations
  Clone ID: PAT_MRT3847_103518C.1
ggaagaaggtttcaatcaatgggacagtatggccaaggtgagccacaaaaggtatttcctctactccatctgtgccggtggttctctagcttccgttaatttgatgtaatgagaaaataattgattttttttggggaataactaactgttattggttcagaatgaatggttctgattttttcttgtttgttcctatacccgggatgtgatttcaatttcttttcaaaattattttttctctttgaaaacttgtattgaaacaaatttaggatgtcaagctattattaggaccaaaagaggaactgaggaaccatanagtacttcactttaatcact

SEQ ID NO: 3891 - DNA, 553 bp, Glycine max
  Clone ID: PAT_MRT3847_103519C.1
acgctttttatggatctcttcaaggagtggatccttccaggaggacacttcagaggatttcaggtggtcaaattttttatataaaccgttttgcttggattttgcattacctttcattttttctacatttcttagcatattacaattatttaaatctgatcttgaaccagttaagctgtgtgaagttgtcacggttgagacagttgaacttctccatttttctctacattaaaaccattgttttagtagtgatgatttgttcccaatttaggaccaaacacggcattccccctcttaatttgtccagtttgtgacagttaggaagttgtaatgctttaagagtttggctattaatatatataacaataaggtgttgcagcttcccctttcacttgttcaatgtaggcctaatgcatgttagaaatgctagtattagttcaatacttttagcatacttgttaacgtgataaatccaattaagtgaaaggaggattttattatctacattaaacatacctatatgatttggtcttcatatgtgtaacggtgatcc

SEQ ID NO: 3892 - DNA, 319 bp, Glycine max
  Clone ID: PAT_MRT3847_10351C.1
ggagggatagtattttactctataagcagggactcattggtcatattaaccgacctttattctttagcaagcactttcctaacattcaaataaaaaaaaagaggcttccatgagcttaacacacccatcacaagtccaaaaaactggttcttgctgtaaggcgagacatgagcactttattctaagggtgttcgtttaacacaaaacaccagaaggggcggatgccatcacaaacataattgataggctttttgctgcacattaatttgcttatgattatttgcccattaaagaggtttctagagctttgaaactttgt

SEQ ID NO: 3893 - DNA, 418 bp, Glycine max
  Clone ID: PAT_MRT3847_103520C.1
ttgtcgctttggatatcccttcgtttcaaatttgtcgctcaaaagacctttcctctttccctggaaaccccgttcctgccatataccgtctttcacccgttaaccacaacgcacgtgacacaaagcatccaagccttcttccttctccttctccgtcaccgtcaaagataacgtccatcgtgcagagatgcaaaatgtgctgcgacaaggacagtttgaagaaactgaaatccagcgttccgtctaggcgaagcgattttctgatcgacaacgtcgaggaagacgaaagcgagactctgattttttgcatgacaagtttctccgaccagttttgtctcggcgaggagaacgatttgagtagtagcagcaccctgagaaggaagaaagatgggcagcgtacagaacgttcggagggtga

SEQ ID NO: 3894 - DNA, 408 bp, Glycine max
  Clone ID: PAT_MRT3847_103521C.1
tcctctagagcggccgcttttttttttttttttttccttttttttttgggagggctttaattcaaatccctaccttgccaggggcaatttgaattaattttaatttatgggatgtttttaaagataacattttattggtctcttcctcaacttcatcactatattattttgaaacattggtcatattttgatagaccctctttttctattgaaatggtataaaggtaataaaatgtttattcccacccaatcattaattggttccgccaaaaaagtatttctttattaaacctccctcataagaaagcctgggggcttcatttaaaaaagtctttaaaattaattgtgaaaaatacaaaaaatttttggataaataaaaaagggcaaaaaagggattgttttccaatt

SEQ ID NO: 3895 - DNA, 645 bp, Glycine max
  Clone ID: PAT_MRT3847_103522C.1
cccacgcgtccggcagttagatgcctcacacaataatgatagtgaagattcacatcgacaagcaataatattaacatcttgttagttattcatgttctcttattaagaaaataggaggtgatatggtttgagaaaatcagtgttttaaaacccagagatagcagcaggtgtagcagccgacccgaaaactgttatcacaggatagctgctactttgaagcagattaactagtaggttggtgattgattcttctagtgctgtgattttattgtatttttttttcagagagagtgtgtcccttcactggaaagaaatcaaacagggccaacaaagtatcattttcaaaccacaagacaaagaaactgcagtttgtgaaccttcagtacaagagaatttggtgggaagcagggaagcgctacgtaaagcttcgtttgtccactaaggcattgaattcgatagagaagaatggacttgatgcagttccccagaaggacaacaatgatttcaggaagaaataagcctatctaataattattgtaatttgtatcagagtggaagaatacattcatgttccttggtgttaattgtagaattttcttttgcgtatattattttccaaaaaaaaaaaaaaaaaaaagaaacccc

SEQ ID NO: 3896 - DNA, 1236 bp, Glycine max
  unsure (1)..(1236): unsure at all n locations
  Clone ID: PAT_MRT3847_103523C.1
cccacgcgtccggcagttagatgcctcacacaataatgatagtgaagattcacatcgacaagcaataatattaacatcttgttagttattcatgttctcttattaagaaaataggaggtgatatggtttgagaaaatcatcgttttaaaacccagagatagcagcaggtgtagcagccgacccgaaaactgttatcacaggatagctgctactttgaagcagattaactagtaggttggtgattgattcttctagtgctgtgattttattgtatttttttttcagccacgcgtccgtacggctgcgagaagacgacagaaggggagagataaggaaggcattgataatcatagctatggcaacggcgagtgcaagttgtgcggtatcatttagaaacagcttcggtgtgagtaaaccctcggatcttgggttcttgagctctcgtctgaacggcctcagaatctgcttccccaaattgccacccacacccctcactgcttctcccttccccacacccctccctatcgttgccaagagagtgtgtcccttcactggaaagaaatcaaacagggccaacaaagtatcattttcaaaccacaagacaaagaaactgcagtttgtgaaccttcagtacaagagaatttggtgggaagcagggaagcgctacgtaaagcttcgtttgtcaactaaggcattgaagacgatagagaagaatggacttgatgcagttgcaaagaaggctggaattgatctcaggaagaaataagcctatctaataattattgtaatttgtatcagagtggaagaatacattcatgttccttggtgttaattgtagaattttcttttgcgtatattattttcaaaagcaagttgtgttgatgtttgtagagaaacaaaatatggcaaggtcatgagcttactaggccatgagtctcgctaatggaaatctcttttgacaaccccctgatcgtggtgcttataataatggccatggatatcataggatccttagtagcttcgtcaacttgaattatcctacaaaaggggggggagcgtgtgagaattcgtgaatggaaagaaagaagttggggggggcgcgcggncnctntngnntttntagagggnatnnncgccgcgcnngggggnnngttntnnngtngngngggggaagngnggngngngncanggtttagncgggnnggncgagnccgtcgcgngnngggngtngagnga

SEQ ID NO: 3897 - DNA, 811 bp, Glycine max
  unsure (1)..(811): unsure at all n locations
  Clone ID: PAT_MRT3847_103524C.1
ccacgcgtcgtgtctcaagtcggcagctcgcagtcgcagagtttcccattcctggtttcctcaccctcgtgtcgatcgttctagggttagggttaggtccctattcaattcgcttcaatttctgcaagagacgctcctcccgagagacgccatgggaggtgacagtgccgttgaggaatccgaaggggtcaacgtcaacatcaacgttcgctgctccaacggttccaagttttccgttcagattgccgtcgattccaccgtcagttccttcaaagatgccgccgcttgcagctgcgacatccctgccgagcaacaacgcctcatatacaagggtcgcatcttgaaggatgatcaaaccctctgaagctacggtttggaggcagatcacactgtccatttggttcgtggctctgctcttgccaatccaactggtgggactaatactagtagcaccgataccaataccaataccaatatcccaacagataatgctagagttgctggtgcgaatgaaggtgagggtttgggagggcttggttttggagcttcactattccctggactaggtgtcaatgggactgggggcaatggtttatttggcgagggatttcctgatcttgaacagatgcagcaaccatttatttcaaatcccaatttagtgagagaaataatgaattcacccaccatgcagaatctaataaataatcctgaaatagtgcggaatcttataatgaataatccgcaaatgcaagagctcatgngatcgaacccggagctagcacacatacttaatgatcccagcactcttcgc

SEQ ID NO: 3898 - DNA, 942 bp, Glycine max
  Clone ID: PAT_MRT3847_103525C.1
aattctgttattagccattattatttcttcactttcggtgatccgcgtctcaagtcggcagctccgcagagtctcttgatcctggtttcctcaccctagggttagggtttggtccctcttcaattaacttcaatatctgcgagagagcgtgagagtgacgcgcctcccgagagacgccatgggaggtgacagtgccattgaggaatccgaaggggtcaacgtcaacatcaacgttcgctgctccaacggtttcaagttttccgttcagattgccgtcgattccaccgttagttccttcaaggacgttgtcgctcgcaactgcgacatccctgccgaacaacagcgcctcatttacaagggtcgcatcttgaaggatgatcaaaccctacgaagctacggtttggaggcagatcacactgtccatttggttcgtggctctgctcctgccaatccaactggtgggaccaatactagtagcaccaataccaataccacaacaaataatgctagaggtgctggtgccaatgaaggtgggggcttgggagggcttggttttggagcttcactattccctgggctaggtgtcaatgggactgggggcaatggtttatttggtgagggatttcctgatcttgaacagatgcagcaaccatttatttcaaatcccaatttagtgagagaaataatgaattcacccaccatgcagaatctaataaataatcctgaaatagtgcggaatcttataatgaataatccgcaaatgcaagagctcatggatcgaaacccggagctagcacacatacttaatgatcccagcactcttcgccagacccttgaagctacaaggaaccctgagatcatgcgtgaaatgatgagaaatacagacagagcaatgagcaacattgaatcttttcctgaggatttaacatgctgaggcgcatg

SEQ ID NO: 3899 - DNA, 427 bp, Glycine max
  Clone ID: PAT_MRT3847_103526C.1
aacagattaggcgcgcactcaccacaccaattcgcttcaatggcgttccctctctctccctccttcaacccctccatcgctgcgaaaccgaatcgcgtgcttctcgaagaagcagcaccgccacgtcatcacaaaggatacggaagtggtggtggtagacagagacacggcgcgtgccacgtcagcgggcgcgatgctggagaggataatgaagcggttgaggagtgtggcggtggttccgatcgtgattgcgtcggttcagataagcgcgttggtggcgccgttagttgattacgtggcgtctccgggtgccgccgaagcggttctgtattcgccggatacgaaggttccgaggacgggagaagttgctctccggaaagccattcctgccaatgctaacatgaaggctattcaggacactcttgaa

SEQ ID NO: 3900 - DNA, 632 bp, Glycine max
  Clone ID: PAT_MRT3847_103527C.1
ggctcgaggtgttggggagaggtgccttgagctgtgtatttagaggaagagttgggatttggaggacttctgttgctattaaaaggttggataaggaagacaaggagtgtgccaaggcgttttgcagagaattgatgattgctagttctctgcataacactaatgctgttcctcttgtggggttttgtattgactcggaggagggtttgtttttggtgtacaagtatgtgtcagggggaagcttagagcatcacttacatgggaggaagaagggtaggagttcaccacttccatggtctgtgaggtacaaagttgcaattgggattgcagaagcagtggcttatctgcatcatggaacagaaagatgtgttgttcatagagacattaagccctcaaacattctgctttcctctaagaagattcccaagttatgtgattttggactagcttcatggacttctgcaccttcagtccctttcctatgcaaaactgtgaaaggaacatttgggtatgaacttaaccccttcatattgattcagaaatttaatctttgggatctttttggctatttgccttattttttttcatattatgatcattaaaatcaagtattttatacttggattttctca

SEQ ID NO: 3901 - DNA, 288 bp, Glycine max
  Clone ID: PAT_MRT3847_103528C.1
atatatacctatcatatgtatgtatctatgactctaaaaaaaaggtaaccattaccttaacctagaacttgcaagtgcggaacacttgaaccagtttaatggcaagatgttggccccgatactataagggtgattgcttcaacacaaaaactccgtatgcttcaagttacgtacctccttattgtgaagatcagtaactacaaagggcatttatgattatagctataggcctttaacgcctgaaattctagcgcatgggcagcttgttcagataggtccagatttgca

SEQ ID NO: 3902 - DNA, 368 bp, Glycine max
  Clone ID: PAT_MRT3847_103529C.1
tcaaatggagatatctcatatttagaggcacttgcaaattcctggtatcatctgtaggctgacaaatggaagtttgatagggacctttgcctttaattgctggtgatacaccttgacatttagttatatgcaacatgataatctattttcaaagtttcactactattttcatagtatactaccgtgactcggtgagtataacttacaacacgttaaaaatctatgctcttgttaatagtaattgaaggattaaacaactaggaacactgtctttgctggaatgtactagaatagcagaatgttatatagtaaatgggaaagctttactcactactaatgtttatttttggtgaattcattatcaaaat

SEQ ID NO: 3903 - DNA, 1476 bp, Glycine max
  Clone ID: PAT_MRT3847_10352C.1
ttacggctgcgagaaaacgacagaaggggaccacagaatcaaacaaaacaaaaccccttcccttccacatacactcttctccaatctcaccccaaaaaaacttgcaacaaaccaaaaaccatgcttgatgaatcagtctcatccaccccaacattcttgggcagcctgtacagctggttcacccccactgtcttcttcctcctcctccaactagtcattggcaccattttcatcatctcaaaccttgccaacacccacaaacaccaacaacaagaaccacaacaagcacatgactttccacaccaccatcttcccagatccccttccatgctccaaagactcaaatccatcaacttttacccttcttcccctttcagatcccaagaccttcaaaaccctcattttcacaacgctcatgaaaatgaacaacctcaacttgctagatctccctccgttctccagagactcaaatccatcaacctctacagttacttccctaccgaacccttcacttccaaactcacacccgaccagcacgtgccggagaaaccgtacgtgcgagaacaaaaccaaccgcaacaagtggtggaaacggacgaggaaaaagaagagggttatgatgactatgttgtcgaagatgacaacaacatcattatgagcacgcacaattacaattataacctcggagtctccgaagagggtggtgctggttcttcctcgctggacgagatttactgcaagctgcagcagcaggggcaagagggtcatttcgagcggacgcactccgacacgaagccggcgtccggggaggttccggtgaagcttccgaggaagatgaagaagtcggcgagcagcaagtcggcgttctcgcacttcaaggaggacgacatcgtggagactcgccggccggccaccgtgagggaggccaaggtaaccggcggcgccgccgaggacgacgccgaggtggacgccaaggccgacgacttcatcaacaagttcaagcaacagctgaagctccagaggctggattccatcatcaggtacaaggaaatgattggcagagggtctgctaagtaagtactagttattaacaattattattattatcataatactatttttgttttactatgttattgataacaattatctactagttttatggatgagtaatctaattttcattggataacttaattggtcacgtctagcaggattatccgtttattacattttagtgtaatattttatttttttgttagtttttaattaggtttttttgtttctttttttgtaaaaatagtgagcttttttggggggttggttatgtgaagtagggtgctgagtgtggcttgttcattttctagccactacttgtgggatgttgggaatatagttgtaagttgttgctttatgttgatgaactccttagtccttattgtttctatttctatataacataatatattcttgctc

SEQ ID NO: 3904 - DNA, 379 bp, Glycine max
  Clone ID: PAT_MRT3847_103530C.1
cgttctttttttaaaaaaaacaatattgctttgatctgaaccaaacccttacattaatggattaagccaaaatgtgacgtgtgggtgaaaaataaaatcagggggtcttggggaaaactgtttctcttaaaaatttgatgaaacgcttatcataaatcttgggttcctctactgatattgtcatacggtcaaactgcttcgatttgtagtgcatgctcaatcggtgctctcagattatagtggtgctacacatcaattacgcccatgtcgagggcatcttatttttcgctatatagctctacttgttttgcctgcaccttttccttatccttctgtatcctgatagtggcttgagctgacatttgttctacaagctgaa

SEQ ID NO: 3905 - DNA, 217 bp, Glycine max
  Clone ID: PAT_MRT3847_103531C.1
aaaaatgagcggactaacgaacaacatggaacatttctttttgatttgctttgcaacagaatagatgatttacattcatgggggaaccagccccctctaaaagcccttttcatcacaaacgttttttccctcatgcaaacagttggtgcataagaataacactcgctcccttctataggggatggtccaaacaagagagcctgtgtttgaaacaagc

SEQ ID NO: 3906 - DNA, 758 bp, Glycine max
  Clone ID: PAT_MRT3847_103532C.1
gatttacgaatagccacaccacaaataataatcaattatgcatacttcctggaggaacataaatactttgaagatgccacgcgtccgtatgaaagaggtgtaaagatatttaagtacccacatgttaaagacatatgggttacatatctctctaaatttgtgaggagtcagggaaagaataagttggagagagcaagagaactatttgaaaatgcagttgaatcggccccagctgatcaagtgaaaccactttacctgcaatatgccaagctggaggaggactatggattagcgaagcgagctatgaaggtttatgatcaagcaactaaggctgttcctaataatgagaagttaagcatgtatgaaatatatattgctcgtgctgctgagatatttggtgtacccaaaacaagggagatctatgaacaggcaattgaatctggtcttccagacaaggatgtcaaaaccatgtgtttgaagtatgctgagttggaaaaaagtttgggagaaatcgaccgggcccgtggaatatttgtatttgcctctcagtttgcagatcctcgatctgatccagagttttggaataagtggcacgagtttgaggttctgcatgggaacgaagatactttcagagaaatgcttcggattaagcgaagtgtctctgcaagctacagccagacacatttcatactgcctgaatatctgatgcagaaggatcaaactgtgaatcttgatgaggccaaagacaaattgaaaca

SEQ ID NO: 3907 - DNA, 551 bp, Glycine max
  Clone ID: PAT_MRT3847_103533C.1
ggctcgagacaaaccagaacgcgatgaacagataagaacgtctagaataaagagcggagaaccatcctgagcattgtgctatacaaaaacaatcatcaatcatcggaagcgctaggcaatcgatacgagcttaaccctctcaacgtgaagatgacaggagatgcaagaggcagggtacggtcgaagatgaggaaaggctgaagccttgaaggggaaagaacgagatacggacatacaagagctgccaccggccttgcacagactatcattctgtatatgagaagttgaaacattatcacagaagcggacctagcgtacgtggtgaccatatggaatctcaagaatagtcaaaagaggactattttgacgagaccaatgaccacgatacccgtcataaccaggagacgacatgagcaatctctcatctcttggctgaatcatcgcgcatgagggcttatgatctcagcgaagcctgtatcataggaacgcttggctcatattactacgaaggcattgcatctgggcctggcacattccataactgggatatc

SEQ ID NO: 3908 - DNA, 180 bp, Glycine max
  Clone ID: PAT_MRT3847_103534C.1
atctacgaccaatcaacctcttggcatcgaagattcagtgattcctctgttcagagtgatatcaaattgtggcctttcaaggtcattcctggtgctgctgacaagccaatgatcgtggttaactacaagggcaaatagcttctctttaccccagaataaatccactacatgtggcgcatc

SEQ ID NO: 3909 - DNA, 259 bp, Glycine max
  unsure (1)..(259): unsure at all n locations
  Clone ID: PAT_MRT3847_103535C.1
acaaaggaattgaacaagaatcattggggactggggtctttattattggatcctgtactaaagatcatttttncccaaccatatattcaatcatcaaaagactggcgatttaagttgcatcaatgttgggagacaaagggttctaccacaatacggctcaaaatcttgccctaagaaattttcggtaaagaatcagtaatgaaaaccttttttggtacttttaaggaaacaagattggtcattgctatatattagcacc

SEQ ID NO: 3910 - DNA, 380 bp, Glycine max
  unsure (1)..(380): unsure at all n locations
  Clone ID: PAT_MRT3847_103536C.1
gggaacaacacacgttgaataccaaattaannnnattttgtttatggtgacaacctcctggaactacctttacatgtgaaacaaacaaaacatggtcttacatgttttccacgataatttgcccatgcccaacacatggtccattgtttccacttacgatacattacacatttgtaaacatctattgcaattcttagcactgtacttttatattttaaccccatgcaattatgggcacaggtctaggaccacactacgttaggtgatacatggtttagatgaccgatataccgatcctgctttatgcgaactttttttactgaaggtcattgggcccatcgaattatattgtactgatttgaacaactttaagaactcct

SEQ ID NO: 3911 - DNA, 995 bp, Glycine max
  Clone ID: PAT_MRT3847_103537C.1
acgagggcataataaccaccccctcctttctttcatcatctcttcctcaaacttcttcataaatattgtttgaattgtttctaagcattagggtattttgcaaaagaacaagaagaaaataagaccatgagtacagccaggtttatcaagtgtgtaacagttggagatggtgctgtgggaaagacatgcatgcttatatcctataccagcaatacctttcccacggattatgttccaacagtgtttgacaatttcagtgctaatgtaaccgtggatggtagtacggttaatcttggtttatgggacactgcagggcaagaagattacaataggctgaggcctttaagctatagaggagctgatgtgtttttgttgtgctattctctcatcagcaaagccagttatgagaacatctccaaaaagtggatacctgagctgagacattatgctccaaatgtgcctatagtgctggtgggaacaaaactagatttgcgagatgacaagcaatttctgattgatcatccgggatccgcacgaataacaactgctcagggtgaagaactgaagaaaatgattggtgcagtcacttatattgagtgcagctccaaaacacagcagaatgtgaagacagtttttgatgctgcaataaaggttgcattgaggccaccaaagccaaagaagaaaccacgcaagaaaaagacctgtcctttcctctgatatttcattattcagttatctttcaccccaaatcatttatagagcagaagtcaagtccaatgctttttagtttttgtgatctatatatataaagagcctgtgggtttttggataatatctgtgaagaactttagattcctcttgaattgtaaacgatggcaaatgagcttaagtgttacattgttcaattaattattttattttgcagtgtctagctgaggctctgtatttcaatacttttagtacaaaaagaggtctccaatttgaaattgaaaccc

SEQ ID NO: 3912 - DNA, 427 bp, Glycine max
  Clone ID: PAT_MRT3847_103538C.1
taccccctctaaccctcttctctacagcatcccacttcatttcatttcatttctaatctgcatttccggatatccaactccactctcttacactgggtttttttagatttttattggctttagtttttatatatcctatcatgttcagtgggtcattggaaaatttttgaatggagatcacttgtcaaagattaaaaagttggaattatgctattgtgcgtttagagcaacttgggtgcattttattaaaccccctgcatcaattctcttttcagttttaagtcgcaaacaactaaggctacaggtttgaatgccctggtgacattttacatctcatatttttctacttgaatatgcaaagattacgtgcccaaaatcgttttaggcacgcatggggagatataatacctcaaccagtggcaccaat

SEQ ID NO: 3913 - DNA, 430 bp, Glycine max
  Clone ID: PAT_MRT3847_103539C.1
tgcgagcatacatagagcgggataactggctgtgagcgggtgtagtttcacaaaccgtggtcttatcaactatggcggagacacttctatcgataacccagccgtgtaccaggctcaccaaaacgtcaatgagatgcactcaggcccttccgatgactacatgagcctcactcttgaggctcatatatttgaatggctgtttgccatcagggggcctcgtaatactgacttatgcggtggcatgtatcactgaccgcttcaactgccttcagaatatcccatcaaacctccttcgtttatgttgctcacacctactagccgttttgagacgcaatccatgatgtgcttgagcacatcagatcatcatcctgagcattggcatccatcatcgagcattacgactgcattacttgcattgattgcattcatg

SEQ ID NO: 3914 - DNA, 422 bp, Glycine max
  Clone ID: PAT_MRT3847_10353C.1
cccacgcgtccgcagcgggtccctctgtctaattcctatttgaggtatgaactgatttggaggacttccattcaccaaaactgacattgacatagacttgaggcttccttcaatccaagtcatccaccgggagttgaagccaaaccttctcaacatatacaacaagaattcccaagataccgaatcatacgccttctcaaaatcgatcttgaagatcagacaaggtttgtggttctttcttgcttcatctattatctcattagtgattaagacactttgcagcaaatgtctaccttcaatgaatgcgaattgagtttcctcaattattgctggcagcactcttctaattctgtttgcaagcaccttggccactatcttgtacatgcacccaattaaggatatgggtttgtattctcccaaat

SEQ ID NO: 3915 - DNA, 573 bp, Glycine max
  Clone ID: PAT_MRT3847_103540C.1
atcaaagtctcttattcctctttgtattaattttttcctcttctcccttttcattttccggtggcaattcaaatcgcactctttgcgtttgtgctgatccactgtgaatgaaaaaaacaaaactaagagagagaagagagaaaaattacaacaacattattatttattgtaactaattagctaattaattggttattaaaaattataaggccatgtttggcgaaaccgttccgcgaccacagttcatgcaatcggagccgagaatgtcgacgacggaggcgctcaccgacgacgagttcacgatgcaaagcagtagcacggcgtcaccgatgagcccttactactacgagcagggaaggttaagcggcgaaggctcgccaatgacgatgtcaccgtggaaccagacaacgaactccccattctccaaacctcaatggtctcaagaacaaaacagcgtcccgcaaaacgcgctcgtaggttctcttgtccgagaagagggacacatctattcgcttgctgcttccggcgatcttctgtacaccggttccgacagcaagaatattcgtgtctgga

SEQ ID NO: 3916 - DNA, 349 bp, Glycine max
  Clone ID: PAT_MRT3847_103541C.1
aggggtgattggtcacgcggacccttacgacggaattaccattatggagctgataagtcctgttgtgtcgaaattagctccaaagcatgccataggaagggatgcacttaccgactcggaggggaagcatatgattacgttaagaagcataatctgataccctaatgtatcaatgtcatcatcaatatgtaatttacagcgaactttgctatgggtacgttctttgagatcacagtcgtgatgaacagtatcattctgatgtaatgctttccttgacaattattgcattcttcttatccttctgttaattaagctagctttgctatggttacattccttgcgatctaaa

SEQ ID NO: 3917 - DNA, 1364 bp, Glycine max
  unsure (1)..(1364): unsure at all n locations
  Clone ID: PAT_MRT3847_103542C.1
gggtgacagaggagtatattaattaatatgtatgtgatttattgaattcgaagagaacaacaacacacacagagagaggtgtgaaaaggtgatggtttttggagcttatgcaacgtcttgcattttaagaagcacctaattacgaatatctatcttagcacacacaaccaccaccaccaccaccactactccaccattgtcactgccactgccaccttcaatttcaacctttctccaaaaataacataaaatcataatccgaatatctcagcattctctcattgctgcatcagctactcgcattttcgctttttttttccttccgggtgtccgtacttttcaatggaccgacgctggccatggaagaaaaaatcgtcggacaaggctgtgcttgagaaagcagctgcggaattggactctgctgcgggtgctgctgcaactcagaagccgagctacatccaaatctcggtagagtcatattcccatctgactggtttggaggatcaagtgaagacatatgaagaaaaagttcagacactggaggatgagatcaaggaattaaatgaaaaactgtcagcagctaattcagagataaataccaaggaaagcttggtaaaacagcatgctaaggtcgcagaagaggctgtctcaggctgggagaaggctgaagcagaagctttggcgttgaagaaccatctggaaactgtcactcttgcaaaacttactgctgaggatcaggcatcacagttagatggtgctcttaaagagtgtatgcgacagataagaaacctgaaggaagaacatgaacagaaaatacaggaagttactctcacaaaaactaagcaattggacaagattaagggtgagtttgaggcaaagatagtgaactttgaacaggaacttcttaggtctgctgctgaaaatgggactctgtcaaggtcattgcaggaacgctcgaacatgctaatcaaattaagcgaagagaagggtcatgccgagggtgaaattgagcttcttaagggcaacatagaagcatgtgaaagggaaattaattcacttaaatatgaacttcatgttgtttctaaagagcttgaaattcgcaatgaagaaaaaaatatgagtatgaggtctgctgaagctgctaacaagcagcatatggagggtgtaaaaaaaattaccaagttagaggctgagtgccaaagattacgtggtcttgtgaggaaaaagttacctggtcctgctgcacttgcacagatgaagctagaagtcgaaagccttggccgagattttggagaaagtcgattaaggaagtnccctgtgaagcctgctacccctaatttgtctncattacctgatttctccct

SEQ ID NO: 3918 - DNA, 1218 bp, Glycine max
  Clone ID: PAT_MRT3847_103543C.1
cccacgcgtcgatacaaagagatcgagcaatgggaaggggacattcaaattaaaataaacccgagagatcagatacaaagagatcgagcaatggcattagtgtcttcactttctcctgcgaccccttcttcggttcaaaccaacactttgaacccattgggttggactgatgatcagatcctggagaaggtttacattacccacgtccacaccgctgaaaggtacgatgtggaatcgcttttcaacgttactgcaaacatcatcaagcgttctactgcacttgctgacagtgttgctgttaagactggcacacccgttggtcttattgaagacaaggttcctttgtccactttcgacccaccgttcctaaaacttaagcatattgcttctcagatgatgaacacaccgcacggtgagcatcatgcacacagcacagcaatgtcgatccttgaccagctgagaacgtacacatgggatggaaaagcgatattggttctggcggctttggctttggagtatggaaacttctggcacctcgtccagactccgagtggagaccatctgggaagatcactggcacagatgagccgagttcacatcgtggagaggaacaggcaagccgtggctgactacaacagcttggtcaagaacttgctcatcgcggttgagtgcatcaccgagttggagaggctttccaccaaaggttatgacttgaaggacgtcccagccttggcagaagccatgcaagagatccctgttgctgtctactgggctatcgtcaccactgttgtctgtgctaatcactttgatttcctccttggtgaatcggactctagatacgaaatagccaattttgacgacaagcttgcagctgttatcagcaaattaaaggcgaatctcaccaggagcagaaagaaaataggtgacctagaagactactggaggcgtaagaagttgcttcaaacccccacagaaattgtagaggttctcaaggttctgatctaccacaacgaagttcacgacccccatgtctacgatggactcaccagacaaatggttagcatcgaagtgttcaagaagaaacacgtgttactgttcatttcggggcttgacagcatcagagatgaagttcggcttctgcaatcaatctatgagggattacaggaagatccaagggaagtgaaagggtacaggaaagaagatttcaagattctgtgg

SEQ ID NO: 3919 - DNA, 1211 bp, Glycine max
  Clone ID: PAT_MRT3847_103544C.1
ggaaaaagaaaaaaaaactaaatagttcatttggccgttctaaaattattcttgttggttgttggagcaacgattattggcggtgaccactatcgaaccaagaagaccaagattctcaacctacgccgccacaaaaaaagattctcttagcccacggcttcgctaactcctaaattccgatgctgcttttcactccctctcccgtaacggttacggtctctctctgtccccgaataacccgctattggctccactgtttccctcgctactctgcaaaacccatttcgagaaattccttcacttgcgctctcacacattcacccactcacaagcacgtgtaccccgacccagttcccgaattcgcagagcacgtgagagacagttcaaatttgaactctaagctgtgggcgggtctgggctcgaaccttcattcgggcgccgatgtttgcgcgagatatttagtgagtttttgcacaaggagtatggaggtcctgggacattgttggtggagccattcacggatatgatggttgctctaaagaagaagaaactaccaggagcagctctggctgcaagagagtcactattatggttacaaaattttgttgataaggattgggaagtttggaactcaaaacttaaatgacttatgctttacagctttttatcttttaccatgtaatgatttcttgtttggttgtaacatgtggatgctctaacgaaaaaagtaaatcacttgtattagattttgacacattcaaaatttatttatttttcctcttcatcttcttagtgctatacaatcatgttgtcactggaacatggttatttagttgagggtgtgactggtgatggaagagaagtctgtagttcaaacctttgctgaacttcttttgcccatatatcaggtattcattccactaagaggagcatcaatcatgaaacaggcaatcaagcaatgttctatgggacaccttacatgtaacaacctagcactactcaacttgcagactctgagatgctctgcaaagagggacgccatgattttggcttcagcgcggcatgtgtggaactcagtagtctgtatctgtctgttctcattgcctgaaactcattatgcagtgacaacatcagtactcatcgaccataaagactcacgttaaatgaagtcaaaagttatataattataaaatcctgcttatggtttctat

SEQ ID NO: 3920 - DNA, 777 bp, Glycine max
  Clone ID: PAT_MRT3847_103545C.1
cgcatggcccccaatcacttggtgtttacattcacaaatcacaatcccacacttccttcctcattgtcctcttctctcctcacatttcaacgcgccgccactctgcgatccgcgatgaattctcgtgaacagcctcagccacaacagccaccgcaaccacaaccgccaaacatgacggtgggacccaccatgtacccttcgatgttgtcccccgtcaccgccagattcccattcagcagcagcagcaacaacaatcctcctccttcggagcctctcaacaacgacaccaacgacaatgataacagcgcgttcgaggcgttgaagccttgcgcgctggccgcctcggaatcgtcgaagaagaagcggggccgcccaagaaaatactcgcccgatggcaacattgcgttgggcctcggcccaacccatgctcccgcttcctccgccgatcctcccgccaaaaaacatcgcggtcgcccccctggttccggcaagaagcagatggacgctcttggaattcctggaactggttttactccccatgttatcaccgccgaagttggcgaggatattgctgcaaagcttgtggccttttgtgagcaaggacgtcggacagtttgcaccctttctgctaatggtgcaatccgcaatgtcaccattcgagcaccagacatgcctgcgggtattctggcctatgagggtcaattttgaatcatatcacttaaagctgctacgctacaatctgacataacagaatggtgccttgagtgtgagcatagc

SEQ ID NO: 3921 - DNA, 690 bp, Glycine max
  Clone ID: PAT_MRT3847_103546C.1
caacatattattaagacacaccccaaaccaaaccacttcacacagaacacatatccattggtggtgagttccaacttctttctttgctttcttttctgtcttttagcttcccaaaggaatatactatcatatatcatagtatatcctctttcttttgtttttgtttttgtttagctgaagttggatcagtatggcaaatgctaaacacacttcacttgcaattctgatcgggaaccttctcttatatccactattctttgttttatttaatgtagatttgctgatcaatacactcttcattttatttctcattcggttctatgatctattggcttttgtagtcggtactattccccttctttgttttccaaatgcttttgtgattattactacagcaaatttggaatattttgtttcttgaaaaagctataaaattcaacttttgtatgggtaagcaagtaaagtaactaagtgttttggtttccactacaagctcccttctccagaagaatcctattctattctcttctcttgttttgtccatttttctttatgcctgcattggatatttttgccgcataaatctatctaacagaaaggaaaaagttccattttttcaaccattccttttttcttttcttttttccaatttggggcgaaagaaaaaaaaatgggacttcaaagttttgt

SEQ ID NO: 3922 - DNA, 623 bp, Glycine max
  Clone ID: PAT_MRT3847_103547C.1
ttttaagccaaactttttttttataaaggcaaactctttttgtgattaatgaacaatattatgtaagcaacatcagttccaaatcgccatcacaaactcatattgagaaaccgtaactggttaatgacaaatagaaacgaaagaataaaagattagaggtgtcttgagtgtgatgagttgtgatgtctcttttgtttaccataaacatgaagaagattcggttttgcggttgttgctgtgtaaaagctggaagaaccttctcctgcggtaatagaaagcgcatttgaaggacctcctgagtttgcaagcagaccttagccttagccacacaattttcttggcacgaaccaaagaccctttgattctctctgtcaaactcttttttctacagaactggtagcttctcaggaatagctgtctcttctccaccatggtgttgttctgctcagagtagttattgattgtagcagtaatacccaaatggtacttcactcctaaacactggattcatactcacaccacccatgttttgatacttgtaatcagagagaaatggtggagtatgtatgggagagggtgccttaagaagacgaagaatacggacgcgtgggcgcacgcgtggg

SEQ ID NO: 3923 - DNA, 560 bp, Glycine max
  Clone ID: PAT_MRT3847_103548C.1
accagcatgaaacaaattcttatgatcagaggcataggcccgaggtgaagaaatatttttgggagaaaccgagcttgactaggcgacattaccggccagtagcaggtggagcaccgtttgtcacttgtcataaatgcttgaagctgctgcaactgcctgctgatttcctcctcttcaaaagggtataccaccagctcaaatgtggtgcatgtcaagaggtactcaagttttctctgcagaacagaagtcatatagtctcgtatgcaccaaatgctctcgagcccccatcatcatctagtaaccttgatgaccgaaacgaggtgattgatggaagcaatccacattcagtgtctcacgcagaccacatttcatattctgatgattatggtcattctgttggtaaaagctactcttcagaaggtgatcctgtgtctgcggcaccattacatcccttgcatgacagtgcatatgattagcaaactgtctcttccggcaccttggagcctataacagaaaaagaccaaaatgccttcagaagttctaccacaggtaaggttcaa

SEQ ID NO: 3924 - DNA, 2043 bp, Glycine max
  Clone ID: PAT_MRT3847_103549C.1
ctctttatttatatttgagttaaaattgttcctgccaattacatgtacgtgtcatcatgtaaataaaagttaatacaaaatgataaaataaattgacaggtaacctagaagactataacatgtttacaaaacatatttttgttcttattttcttatcaaattattgcttttaacctgaataacaagcactatggttatagtagtacagtaataataaaatttgttggcactaataaaagaacacaaatattggttatcattaatcctatattgggttcctctttaattgttggtatcagtttatttttgccttctccatgctccaagcactcaatcttgtaatcttgacggcggcagttccattattgaaagcatatagttgtgccttttcattaattgctattgtgggatatactctggctgtgatgcaagcccttccctctcctccaaaactctccactactgagtgatcaatcaaagttcttagtgacagcttctcatgaagagggtccatgtccacaaaagtcccataggtggtcatatcgttatctttattcaaagaggatctgctttggtcgctacacatgagaaccaaatttttattttggtatctgaatattctaaagaatactgccgtgtactcttgcaagccacgagaagcaaaaactagcaagccaaagggtcccaaaccaccctttacggctgcaccctttctactacacagaatttggggatccacccattggtccaatacttcgccctttccaaactcattcacgtcaaatgaaatttcaacgtcagcctgtgccgcagtaacaccagtaacttgaagcatttcaccacctttgaccactttggtgggccagtggacaggattcacacgtaagctttcaagttccaccaccggccattgcaccaactgttttccagatttatgaagccagatggcccttggaatagtatggattccagcccatcctttcttgatatcatccgaaacacttgaggattcattaacccaacccaataagacccttctgttctttccatcctcaaaaatggtttttgaggcataatattttccatagtcatatcttaggacagtttgactatcctcaaatccattatccggagtgaagatatccttggcaatgtcataagtcccaatcaaataatgatcatgttttttatcatccaaactaaccttaagcacatgcctaacattatcaccattcacagatgtgtcaagaccaatagttgatgatggtttattattcagcactggatagaaatcagggcactcccacattccagtgccttcagctgaatgtaggggttgtttggcttgaacccaattaacaaagtttttgctcttgtacaaaattgccatacccctagtgtgtattttgcttccaatcagcaccctccagtacccatctttgcctagccaagcagtggtaggatccctaaatgagcttgaattgatcatgttagcactagttggtgccattagtggatttttgggtgacttaacccattccctaagtaatgggtcagacatgtttttgggtagggctaagttttgaacttggtgattattagggtcaattcctgtgtataaaatggctggtttgcccccaggaagtattgtggctgagcctgaccaacaaccgttgatatcagacggttgagaagggtagatggcatgatctagaggggtccaattcacaagatcctttgatactgagtgggcccacacaatattaccccaaacagcaccttttggattgtattggtagaagagatgataaagtcctttgtacctcattggtccattagggtcatttatccaatttttgggaggttggaaatggtaagcggttctataaggttgatcagaggaatcagaagatagagtctgaagatttctgtaaacatggtgggtagcttcaatgggaagaataccattgccataaatgagagagaagatagccaacaacaacaaaattggagatacggccatggtatagcttttaatggaat

SEQ ID NO: 3925 - DNA, 479 bp, Glycine max
  Clone ID: PAT_MRT3847_10354C.1
cttggtcataattgttttttattttttttttaaataaatctttttgttgattaaccattcaaccaaagatgaaaggccaccgattgaaccggaaagaacacaccatggcaggttaaccattctccgatgaagactcctgagaaataaaatagtccacatatgggctttttattaatacatatctcccctctagtagtcagtgctgggaagctgcctcatgggtgtggctgatgaagacaaccctcgtggataagcccagcggtggcacctccgatgatagggcctgcccagtagatccagtggttggtccaggcccaggtcacgacaggaggcccaaatgttacaacagggttcatgtgctgctccggagaaaggtcccacccaacaatatgcttctgcccacaatgaaaccaatggcgatgggagcaataatttccaaattgcccttcttgggggcaacgggagtggcgtaaactgtg

SEQ ID NO: 3926 - DNA, 343 bp, Glycine max
  unsure (1)..(343): unsure at all n locations
  Clone ID: PAT_MRT3847_103550C.1
gaaaaaaccaagatagaatgtgcacagccctaaatactaattaccagcttaactaggagatcgttgcgcggtcgttncnncgccatgagtctatttcttccatccactctccaacttaccctactccttcaatctcatcgacatatcccttctctctgacttccacctaccgcaacttcctccatatcgatcccaatttcatttcccttctctcacctcacccaaacatccttctaattttccatttttactattacttccaatatctttccatagtataatatcccttccaaccccacacgcttttctacctcattttctatttacccatccatgattccca

SEQ ID NO: 3927 - DNA, 126 bp, Glycine max
  Clone ID: PAT_MRT3847_103551C.1
atgagggtagaattcaggttggtgttgatagtgttacaagaggtgagggcagtgtttggggtcgtgcaacttctgtttgagaaggttgttggtgatgatccacatgttgctgtcactcatagagag

SEQ ID NO: 3928 - DNA, 383 bp, Glycine max
  Clone ID: PAT_MRT3847_103552C.1
cggaccccagctggggccgcccagcggccgccctccacgcgttttttcgaccattatacacacaacgaccgaggaaacctcgcgaacatagggccatacatggcagcggcacccagcccccggaaaaagcacaaaagaaaacagaggtccaccaccacgaactaagaggacaaggggggctaaaaacgctagccttcagcctattggcatgaaagaaccagcaactgatgaaagatcaaccccccaacacccaatgagaagaacatcgccgccgtgccgaaaagcaggaacccgatgagaaaaactgccaaccaccgccccgaacgaccccaaaacaccaccgcccggatctctggattctaggagccaagaaaacaggccca

SEQ ID NO: 3929 - DNA, 638 bp, Glycine max
  Clone ID: PAT_MRT3847_103553C.1
gacacgtcgcacgttaacaaaactcttccttcctagttcgttcgttctataatctcttttttctcttgtctttgtctctctggatgcgtcacgcttctcgctctctgtctctctctctctctctacgatcgtgtccaatttccagacctttcgcaatcccccttttttctctcactctgatttcaataactaagaaaaattattccctttccgattccccaacgacatcccttgaacttcgcgtttaaacacctacttgctgcgctgttaatttattctatattcctttttttttttttgggtttttttccttcgtttcaagcttgatccctcacgtagagctaaaaaaaaaagtgttccaattccccaagaattcgaacacgagattatttcctagctctctctgttcgagttctttggaccttggattcgttgcctctccgcaatgctgctatcgtgagttctgtgattctatttgatggtgagatcgtggagttcttaacatgggaacttcggagaaatagatttgtgcagtaaattggctttgaacttgacgactcagcaatactctgaatttgtgtaaaatctgctcgtgcatctgtatattttgcttggttggacaaaatggtttttgaaat

SEQ ID NO: 3930 - DNA, 1081 bp, Glycine max
  Clone ID: PAT_MRT3847_103554C.1
tggctcgagcggaaactcgatcgtcttgcctagcctaatataattggccaccatgaccgatgaacaacgagaaccacaagcttccccgagcaatggcgtccacaagttagaaagaaaacaaatagctgaaagagaaagaaaacaaatagctggaagggatagatcggtttttagaggcaggcgtccacgacctgggttttctgattcattttcaagcactgacttggaagctttagagattgaagagggctctcctaggagtcaagggtctgaaaccccaagttcaagggccagcacttctgattcggagagtcagggatcttttgctggggcacctaataccaataaccaatggcggggtttctttaaactactcaagaaaggatcacaaatgcctttccaaccttttcacccacttaaaaatgttccaaaactgacaagaagaaaaagcaagaggatcagggaggacctcattccttctctgaattctccagctcttcatgcatcttttgacgctgagtttggctgcttcaaatcttcctggaaaaacttcactctcgccgagatccaagctgcaaccaatgactttagccatgaaaatttgattggggagggaggctatgctgaggtttacttgggcaaattggaggatggaaactttgttgccattaaaaggttgacaagagggtgccaagaagaaatgactgcagatttcttgtctgagcttggcattatagtgcacgtggaccacccaaacatagctagattgattggatatggtgttgaaggaggaatgtttcttgttcttcaattgtctccacatggtagcctgtcatccatactttatggacccagagagaaactgaattggaacctcagatataagattgctttggggactgctgagggccttcgctatctgcatgaggagtgtcaaagaaggatcattcacaaagacatcaaagcttctaatattcttctctcagaggattttgagcctcagatatctgattttgggcttgctaagtggttacctgaccaatggactcaccatactgtctcaaaagtggttggcacattc

SEQ ID NO: 3931 - DNA, 340 bp, Glycine max
  unsure (1)..(340): unsure at all n locations
  Clone ID: PAT_MRT3847_103555C.1
gaagatttangtggttacaaagaanacgaccncaacacaacgatgtttttgctcagatggaaacccattcgtttaaancgtctcttgatgatgttgaaactcctaaaggttccatgttggatcttaaaatttctcaatctaaaattgcactttccaagaacacagttggaggaaccattctgcgtagtgatttattggcaaattttttgacagagggcaattttagagcaagtgttgatttgcagcgcactcatcgtattagaggaatgattaaaacggcggccacagctcggattcctgagaaaacacgtatagcattggcctgggctatgaatagttc

SEQ ID NO: 3932 - DNA, 789 bp, Glycine max
  Clone ID: PAT_MRT3847_103556C.1
tttggaatcggcgaaataaatgatatataactaataaatggtacaggggtaccaaaaacccttttacatcagattcaatagcgaagcatatgcctgcaacaaccccacatggttataatgtatttatattccaagaagccaatacaaaataaagtataaccttaactacccccactttatacccctgcaaaatagccctacaatgacaggttaacccttgtgcacagtacacaagtttttcaaacttatgcaccatttgattctccttccttcaaggaatttaatttttcctcgcagactatcttcttggctgtgtccttatgagcaccgccatccttcaaggaattcaaaatttccttgcagactatcttcttggctgtgtccctaagagcatcacctttatactcgtacttgtgaatgatcccatcagcttctacctccattctataataagtcagaccttctttgaatcacacggaatctctccagatcttataacctcttttttggcctagctcattcgggagtgatgtctctgcctcgtaaccaaaagtggacaatgaagatagctcctcaaatttgttgagtgtagcagaaacatgcatatgcagttcttgtgaggcatggagtacatgtttgtgcaacccatgcttaatggcggaccatgcataacaatcattattcaccgaagctgacctcatgtcagttaactgcccaggtgtcatgccagggtatttattgtacaaatgccaagtaatcagataatccaatactgaatctcctagaaat

SEQ ID NO: 3933 - DNA, 105 bp, Glycine max
  Clone ID: PAT_MRT3847_103557C.1
gccattttgagctatatttgttgcagtgttacgccaacaggatgtccagcgctatcttgcgcgatgaaatcggtcataatgatgagagcatgctgggtccatccg

SEQ ID NO: 3934 - DNA, 259 bp, Glycine max
  Clone ID: PAT_MRT3847_103558C.1
atataatcctaattctcaaagctatgcctctacgtcctgtcttcaaagcttcaccttacgttcatcatacatagcaacttacttcagtcgataactgaaaccaatctgggacatgacaaccacacgacgatgatgctcccgttgtcgaggacgtgacggatgatgataaggacaacgactactaccactacgactacgatgatcaagatgacaaggacgacgatgctctagatgatactgacggctcaaagcacagcag

SEQ ID NO: 3935 - DNA, 297 bp, Glycine max
  Clone ID: PAT_MRT3847_103559C.1
tgcacagtatgattttttttttctttatttggcaaaaggccgacttgggaggacttttgattacttatcaacccactccctggcttgaggttttttgtggggaaaagtccaggtataaaagccactacttttatatccaaaacttttcggaacgatttttaaattttttaacacagcctctagttgggccaagtattttgtttttattataaagaaaacatatgtgcgtaaacagtaaccaccaaaacccctgggcggctaggggagacaaacggcgcccctaaaaaaaaaatcagc

SEQ ID NO: 3936 - DNA, 230 bp, Glycine max
  Clone ID: PAT_MRT3847_10355C.1
ccacgccgtccgactatatctctctcccttcgtcacggggattcatcggtcttcttcccaggttatttagaaaagcaaaatggtcaagattggctccattggtgcgtgatatgtggggggtcctactatggcagacattgcacttaagtgctcatccattgaggtagcggttgatgatagctcgtaatcccgcattgccgcctggaacagcgaccagcgatctatctatg

SEQ ID NO: 3937 - DNA, 349 bp, Glycine max
  Clone ID: PAT_MRT3847_103560C.1
cccacgcgtgcgcccattttttctttttaaaaaaaaaaataaaaaaaaaaaaggacgcgagggcaggacccaagggggggccccggaaatagaccaaccggaaccagcaggcctaccagcttaccctatagggagagggataaaaacttgcaataaacaggcccatagttgacacctgggagaaagggaaaacccgggacaatcccacacaaaataccagccagaacaataaagtgtaaaccctggggggcctaaagaagaagccaactcaaataaattgggttaacctaactgccccctgaaaaggaaaaaaacctggcccgccagctgcataaaaaaatcggccaac

SEQ ID NO: 3938 - DNA, 428 bp, Glycine max
  unsure (1)..(428): unsure at all n locations
  Clone ID: PAT_MRT3847_103561C.1
aaattggccaacatggctttaattcttccattttggttctattccaacccttccttacatcccaaggggccatatatagcatgcccaaattaaaaatgggaataacccaagaattaccagataatggttgaaaattgatgggggaggattacacaccaaaacccggggttacatttaattacaaaaacctggacccgggggtgaaaaaaaaaagctcccataaacggagattttactagcaaacatacatttgctttggaaactaaacatctcacgccacaaaacaagggaactatgcacaaaatggacgggggcagaggaattcaccatcttatcacacttgggggggggcccaaaagacaaaaaaaggtaacactnnctttttagcccccaaatacaaccttataaggaattattatacctcaaaa

SEQ ID NO: 3939 - DNA, 135 bp, Glycine max
  Clone ID: PAT_MRT3847_103562C.1
tagaatggaaataaggactatgctccgccgggttcaccagaaaagtggaacaaccaaatagatctgcaggacgcatgtatctgagatatggaattattataggttgccttataacagggggtacaattctgatat

SEQ ID NO: 3940 - DNA, 464 bp, Glycine max
  Clone ID: PAT_MRT3847_103563C.1
gaacctttgggttgatttatgtgcttgcatggtcgtgagaagatgatagaaggggaccctaccctctaacctctataccaccacctagagtctctctctctctttttaagaaacctaatagagccccgaccaatccgaaaccgcctaataagaaacggagaacctaccgggaaagcatggaaaagagtccaactctgaggtcatagagccgaggccggggccgttcggaagtgacgagttcgagaaatgccccgtcgccagaagtaataagagactcctattagaagtaagcgaagaagagcgtacaagtaagggtaatacgaacctcctcgacggcctcgacactataagcgacgattaagataatgccgcgttattcgtaaagcaagcgcgacacacacacacacacacatatacacttccccaaccccttaaaacggcgttagagacaaaagaaaaaaata

SEQ ID NO: 3941 - DNA, 267 bp, Glycine max
  Clone ID: PAT_MRT3847_103564C.1
gtcatggcttaattgatcactcatcagactccttgcattcttgcgatctatacaatcatgggtttcgcatagatgagaatccatcaaacctctgtagcctcaattcccaactacgcctctctagagtgtgtcttggggctatgcttcaacgtgataagcatactccttcagcttgcctatgagtacatagtccacagtcaaattctcgtcatagtcttcatgggtcgcccaagtaccttcgatgcctgcatagcatggtaatctggg

SEQ ID NO: 3942 - DNA, 878 bp, Glycine max
  Clone ID: PAT_MRT3847_103565C.1
cttggcttttgcagcaatggagatcaacccccatctctaattcaagagcaaatgccactctcaacaatcaggatacggacaaggcaaactggggatggagttggttggaacgttggatggcagctaagccatgggagagtagattaatggaacaaacccatcatgctaatgccacagagaagacccctcctcctccgccaaagaaatgtgttgactcctcaaattcaaaaacatcagaaccatgcaatgtcaaaatcagaaagaacaatgtcagcacaaggatctctgctagacctccccttatttggcaagctaatcatttgtcctcaagtccaagttccgagtttcactatgatgagagctctaattcatcctcaatatgcacttctacaacgccaatatctgggagtgctgcattgccctgtgacaggacagaggatactaacaacacaaggcctagttacatgaacctcaccgagtcaaccaaggcgaagcagaaaaccaacaaccatcaatacaatagatctcataggcagcagtccatggatgagttccagtttctcaaaagaacagcggttttctctaatggtgcttctgacccttcaaccaacttctgtaggcctctttacctaccaacctacatggataagaggtcacagtgaaagggtcttgattcaattgattgatcctctctgttgtatttattttcaagaagttcaacacttcaacatcttgttgttcaatggtctgttaattgaattacaactgtagcagtggtgtttgtgctttccctaagcaattctactttagggggatttgtataatcaattgttaatttttcatgggtatcatgatatatcaagagaactgcaaggcct

SEQ ID NO: 3943 - DNA, 300 bp, Glycine max
  Clone ID: PAT_MRT3847_103566C.1
caaaaaaattgttcgggtggaaaagaatttgcctaaatgctttcccttggcatgcaaagggcattacactggcaaagcacaagcttgacccatttaccaaataaaggaagatggcccctgtgacaaaaatgtgtgcatgaaaaacaacccccatcctgttaagaataatcgcctcacttcataggttcctgggaaccctatgaaaccaagggcggaaacatgaaatcatcctgttaaaactttttcggccccatattatccctagatatgactggctccattagcgataccaaccaaaaa

SEQ ID NO: 3944 - DNA, 105 bp, Glycine max
  Clone ID: PAT_MRT3847_103567C.1
gttcggccacgcgttcgggcactcgtgcgcttaaaacctctgtcactgtcttctaaaagctatctgtgtccggtggtactaagtcttcaacaagcaaagtacatg

SEQ ID NO: 3945 - DNA, 2362 bp, Glycine max
  Clone ID: PAT_MRT3847_103568C.1
atgccgcgtgcgcatgcacgcagtccgaccccgcgatacgaagtgaactcctcacgagtccgacactgctatcgctctccgctctaattcaccgatccactggataagtatgaagaataaaaacagtcgagctaatcggaaagctcgttcggtgaaaccccccgattcctgtttatcttcttccaattcaaacaagaaatggatggttccctataaattctacgatgtcaagggtcccaattccgagtcaaaccctaatgttgactcgtctagttgggttttgtgcaccgaggttcaattggaaaccattctgttgaaaaacattgaaattatatacaatgacactgtgccaaagcttgttgctttgggctacagtgaggagattgctgtcaaagcgattctgtacaatggacattgttacggtgccaatgatttggcaacaaacgtgctgcacaactccttggcttgtttgacaacggggaccttggacttgtctgagtccagccctgcgttccctgatatgaagaagcttcaggagtactctttgatgaaccttgtgtctttgttgaaagaggtgaggcccgatttaagtaggggtgatgctatgtggtgtctcctcatgagcaatttccatgtgttgaaggcgggcgccatcccggttcctgttggaaacacgtgccctcctcctcctcctcctttgcccgagcttgagaacacgggatggagatttgcgaaagagggaggcttgggttttcctttgaatgggctcttttctgatactgatatgactatacggttacagagagatattgaattcccaaaaagatttgaccttactcctgccatgaaaagcttgttgaaaagaaatgttgcaatgtttgctgatggttttagggctaactcaaaacaggtgcagccgcaagccagtgaatttcctaggactggctctgtttcgaaattgggttcttcatctgcttctgggactgctgcagtccttggtgagcagcctggtgactctcacaatcagaatgaccaggaggacttgaactctgtgatgagtaaatttcttgatctaaatattgatgataatgtggagtttgtgccagaagacgacaaggaggaggtgatagtcactctagttaatcagataaaggatcttgagaaacaggtcaaggagcggaaagattgggctcatgagaaggcaatccaagcggcaaaaaagctaagcagtgatctgattgagctgaaaaagttcaagatggaaagagaggagaataaaaaactgccgaaggagacaggggcagctgaggagctggacaacccaaccatgatgagactctcagaaatggagaatgccttgagaaagactagtggtcaaatggaccaagcaactgcagctgtcagaaaacttgaggcggagaaagctgaaatcaaagcagagttagaggcttctaaattaagtgcatcagagtcagtcacaagctgtttgcaagttgcaaaaagggagaaaaagtgcttaaagaagcttctgacttgggaaaaacagaaagtaaagatacatcaggatatttcagatgaaaaacagaagatattggagatacaagaagaactagctcagattaaacagtgtgcaaaggaaactgaggtaacgaggaaggaagagttgaaggctaaggaagaagccttggcactaattgaagaggagcgccgttctaaggaagcagctgaggctaatcataaaagaaatcttaaagctttacgcctgaagatagagatagatttccagcgtcgtaaggatgatctccctaaggctggagcagagattcacgccttaaaagcacctgcacggtctactactttgcctacaagtgagtctgaggatgcagagccccagagagagacacttgctaagcttctgctagagttagataatgtgaaggatttttctggaaaagaaatcaacggtgatagagaatgcattatatgtggaaaggatgaagtttcagttattttcttgccatgtgcacaccaagttatgtgtgctcgttgcggtaaagagtatgggaaaaagggtaaagctgtttgtccatgctgccgggttccaattgaagagagaattcctatatttggggcatgttcgtagtcttacatcggtaagctatgaatattttgcagaaaaactatgttctgccgtagcttatcttttgaatgtctgaaaatgaaaatctattattactaccttgaaaataagataggtaaatactaacatgtgctttgaaggcactagtcaaggattaaaaaatataaatgattttaggatatgagtaaactgtaaagacctgagttgtttatgcaacaaaac

SEQ ID NO: 3946 - DNA, 478 bp, Glycine max
  Clone ID: PAT_MRT3847_103569C.1
aaacccaagggatacaagttttgattaattgggccccctttctaaaaaaacccggaaatatccctgggtggggaacccagggtatttaaaaaagggcaaaaaatatgagcgggaaaagtttttttgataaactttttgggggcctccttcgagcatttgaaaattccctgaggaacaacccgaaaaacaacggggggacccttaaaggaggaagttcaatttgtttttggatgccaaagttctttatcacaaaaggggaaaaaacttttcaataagcccttttaaaaaaaaaatagggggataaaaattcaaatttatcctttaaggaaaaaccaagttatacctctcaccttttgcaaaagttaaaagaaaaaacttccaaagaatttgagatgcctagggggattttaatttattggagaaggtggaccatttaattttttttatatctcttctataggggctaagggaaaagggt

SEQ ID NO: 3947 - DNA, 256 bp, Glycine max
  unsure (1)..(256): unsure at all n locations
  Clone ID: PAT_MRT3847_10356C.1
ctaatnaattntttattngnnnttnttttccttctcaatgagaaccctgaccattctaaacacctaacccatacaaaacacctgcatacttctccaaggagccactaaagaaatagaccttcaatnacctgaatgaacaggaagagagcaagctatcggaaccggccagaaggcaaaccccaaccctcccaacctccaacaacccgacaagccncgctcaagcctcccatggaggctcgccgcaaaactccatgag

SEQ ID NO: 3948 - DNA, 187 bp, Glycine max
  Clone ID: PAT_MRT3847_103570C.1
ggctcgagatcggtgatctgcagtactggatggtctagaactatttctatacctgctctgctcacaccggcggggtaacttgggttaaagttattcaaaacaagcaaactactcaatctgaaggtgatgggttcattgagtttaatagtcatgcctgaacctcgaaaaattcttcaaaatttaatgg

SEQ ID NO: 3949 - DNA, 313 bp, Glycine max
  Clone ID: PAT_MRT3847_103571C.1
atcgcacaaatttttttaaatattggtgacaagtcacttgtttctttaggaaaaagctttctcccccatgattccacttttttgtttgagcacaacctgtgtgggactattcacaaaactcaacttctgggaaggttctggactaaaaaactttagtgagtgtgccgctcttttttttgtagaaaccgaaactcgggttacaaaactttttttttttttacacaaggttatacagaaatacctatttttcagcctcttcctgatgggggtgaaactttcaaccccccccccccggggattttttccctggggg

SEQ ID NO: 3950 - DNA, 670 bp, Glycine max
  Clone ID: PAT_MRT3847_103572C.1
ccacgcgtccgatatagggagggtgcacacaaacaagagtttattgagagagagagagagagagaagaagagggtggtgttgttgctgattcagtggagagaaagtggtggtgttgagagtgatcaagagagagagagagaaaagacaaaaaatggagtttggaagtggttctcctggtgatcaccatcatcaccatgatggttcttctgattcccagagaaggaagaagcgttaccaccgtcacacagctaaccagattcagaggcttgaatcgatgttcaaggagtgtccgcacccagatgagaagcagaggttgcagttgagtagggagttaggcttggcgcctagacagatcaaattttggttccagaacaggaggacccagatgaaggctcagcatgagagagctgataattgtgcactccgggcagagaatgacaagatacgttgtgagaacatagccataagggaagccttgaaaaatgttatctgcccctcttgtggtggtcctcctatgaatgatgattgttattttgatgaacagaagttgagattggagaatgcccaactcaaagaggagcttgatagagtatctagcattgcagctaagtacattggaaggccaatttctcaactcccacctgttgaggctattgacatatgttgtgt

SEQ ID NO: 3951 - DNA, 994 bp, Glycine max
  Clone ID: PAT_MRT3847_103573C.1
atctcgtaattcgcctggaggtggaggacagaaatttttagtctcagccagcacaatttatctcttgcaatccaaaatgaaacaacatttgttcctcccccttcaacagctcggtctgtgtcaatgagagatatgggtaccgaaatgacccctattgctagccaggagccatcaagaacaggtaccccagtgagggcaacaacaccaatgcgcagccctaattcttcccggccttctactccccccagagcctcccctgcatctactttaactgatctacatagtgacaatctgaatctcaacatgaatgagttgtccgaaaaggagctacaaatgaaaacaaggcgagaaataatggttctcgggacacaactaggtaaaatgaacattgctgcctgggctagcaaagaagaggaggataaggatgcatccacttccctgaaaacaaaagcagaattacctaagagtgtcgttgaagcacgtgcagcagcatgggaggaggctgagaaggccaagtacatggccaggtttaggcgtgaggagatgaaaattcaagcatgggaaaatcaccagaaagcaaaaacagaagccaagatgagaaaaattgaggtagaagttgaaaggatacaaggtaaggcacaagataagctaacgaataaattagcagctgcaaggcataaggccgaggaaaagcgtgcagcagcagaagccaatagaaatcatcaagctgcaaaaactgaagagcaagcagagtatatacgaagaactggtcatgtcccttcctcatatttatcattttcttgctgcaattggtgctcttaaaaaaagccaatctttgtcaatgtttattttttgtttctataggtatgaaatgccttttgctgcttacacccaagcatgttaaatatgcctgttgcatttccctcctggtgtaaaatgttacattgttctgaagaataattgcaatttgaaagtgctttgctatttgttcagt

SEQ ID NO: 3952 - DNA, 294 bp, Glycine max
  Clone ID: PAT_MRT3847_103574C.1
gacaggcaggcaccaatcgaggttctgatttctcagcactgagcactcttaaaaccaataacggtgaaccaaactaacaaaaccatccatcatcatcatcatcgacatcaacaatctcacttttctctcttttttttctcattaaaatataaattgctctcttgtctccctcttcacccactaaccctcgatcctcatccacctctctcagttcccttccatcaagtttcgatctggatccactttttccacacccaatatttcctattccaacccctttattcatctccacgt

SEQ ID NO: 3953 - DNA, 478 bp, Glycine max
  unsure (1)..(478): unsure at all n locations
  Clone ID: PAT_MRT3847_103575C.1
tctcgccccccttaatatttaaccccncccccggccgacgaaaaggcgggttatttaaagaggtcggcgactattaaaagagagcccaaaagcttgacaccgaagcacggtggataacatcaaaatctgaacgctgggagagtctataaactgggaagatgcgccgagatttgatagaagaggctctctatttccaacactagtctaaaagaaatacaatcccactataattgtcatggaattccccaaaaaaaagtaattgtagcacaggagtccaataaccgtgtgatacagcagaaaccgaccttgagctctttaagatgttggctgatgaacccttatataaaaagtgaatgagatcaaacgtatattaggtttacttagcccaatatgagcacggacgggtccttacagaatgataaacaacctttaacgctcggtgcggttcacggaacactaacccaatgtaataaataca

SEQ ID NO: 3954 - DNA, 208 bp, Glycine max
  Clone ID: PAT_MRT3847_103576C.1
taattgctgtagtgagaatatagaaatagaatcattagaacatattttcctccgtttgaatatcgttttaagttggacggctcatgtgcttgctagctacaagtggatatagaacagtagaaaattcttaaactattgcaaattgtttcggacatattgtgtgtacgcacatagttatgagctgaggatatactattgatgatcacta

SEQ ID NO: 3955 - DNA, 614 bp, Glycine max
  Clone ID: PAT_MRT3847_103577C.1
tttgtgtatcttttatacccagccctcccttttcttttggtaagcaaactgattcccatttcatccatgctatcttcctttgatccgaacctcctccccataggaaccttcgctgaattttgatcagtttcgccgctgtttcgctaggtaacctgaaaaaagaaagaaaatagattgggatagatgatagggtggactgtataagggtcactctccccccaaaggatagacatctttgtttccatgtagatagctttctctcacactttctaacaactggatcccacagctcattatgccttgggtttgccccaatagggatgcccagataaataaaaggcaaggtcataatactgcaattgaagtaatcagctgcttctttagtccactggtcagattttccaaatgccataaagcagctctttgcaaagtttattttaagtccagaggcaagttcaaaactccgcaggatcgctttgattaccttgatattttgcagtgtagtctccccaaaaatatagtgtcgtcaacatattgtaaaatgctgactggaatgtgtgctttcccacagcaaatgcaaggaatagcttcttgtggattgcttctctcatgag

SEQ ID NO: 3956 - DNA, 254 bp, Glycine max
  Clone ID: PAT_MRT3847_103578C.1
caagatacacacagactattatggatcgggaaactttaatgcctcaaaccattgtttaagaagaccaaatacacgcacctacctgcgttgaattttggtataaaaattatataaagcttgccctacatatcttaaatacaacaatcggattttacccgaagtacaaacacccaaccctgaccccttgttttatttaaaagcctttattgcaaacagatcttgtgagggccaacacattaatgctgaacaccaac

SEQ ID NO: 3957 - DNA, 394 bp, Glycine max
  unsure (1)..(394): unsure at all n locations
  Clone ID: PAT_MRT3847_103579C.1
ggaattcggctcgagcaggaggagagatatcaggatagcgtttattgtcagtgcaaaagagaccgngacatccgggagaccgagtgaatagatatttcaatccgcgatatttaaaaccctcattcacttcattattgttgcttctcttttcatttttatcaccctgccacacatccacatttccacttcctatgtacaattttatatcattatctcctatcatgttaggttctccttgaattattaattattttaatatcaccaaaatcatcattcatcccttgcaagccattagaatccaagcaccaacgtgtgcatctcgcattaagcaatgacatcaatgtatgcctgggccgccgccaacaaatggtctctcttccccggaaattctttt

SEQ ID NO: 3958 - DNA, 780 bp, Glycine max
  Clone ID: PAT_MRT3847_10357C.1
tctacggctgcgagaagacgacagaagggttcgttacagttggtgaaagaggcattgtacgcatatggaattccaaaggtgcaggttgcatctttgagcaaaaaacttcagatgttacagccggcatggatgaggatggctcacgtaggggtttcacttctgctgttatgcttgcctcagatcaaggattgctttgtgtaactgcagatcagcagtttctgttttactctctggacttcactgaacagttgttgcaattaaatctaaccaaaagacttgtgggatataatgaagagattgtagatatgaagtttattggggatgatgaaaaattccttgctcttgctacaaatcttgaacagattcgggtttatgacctttcatctatgtcatgttcgtatgtcttatctggtcacactgaaattgttctatgccttgactcctgtgtatcaagttctgggaaaccactgattgttactggaagtaaagacaacagtgttaggttatgggaatcagaaagtgcaaactgcattggagttggtattggtcacatgggagctgttggagccattgccttttcaaaaagaaagcaagatttctttgttagtggcagtagtgatcatactcttaaggtgtggagtatggatggcctctcagacaatatgacaatgccaattaatttaaaagcaaaagctgttgttgcagctcatgataaagatataaattccgtagctgttgctccaaatgatagtttagtatgtagtggttctcaggatcgta

SEQ ID NO: 3959 - DNA, 719 bp, Glycine max
  Clone ID: PAT_MRT3847_103580C.1
atgttaatggtgttgacttagatgattcagttgatggcaatgaggcttctgctgctatgaaggctatcgcagatgttctttcatcacagcagcaaacaagtgtacctgttcaaaatgatttatatagtgagaatgagttgaagggggaagctgctgaccaatatccaaacactaatgcaaacgaagatattctggcccctgatagtaacacatctgaagaggatccaaccaacgtgtcataacttttggttgctgttatcagtcgggaaattgtatatttcaagttggttttgtttccatcctctaaaaagctttgaagagaacaagctcattttccctcaacccatttatgcacgagtttcatgctggaacttcatctgtctcaaaaatatgctcttctcaaatgcatcatttttgctcttgggaatgttgtttttggtcacctaaatgaagtttcggggaaggtcataactgttctttggattcatgagatgggggaaatatactgctatggagatcataaaaacatgcaggagcttttggtttgttgaacattaggttttttttttaatttaagtaaagcataagtttgagcgatatagcttaatggtggaaattttgttttatttgccaatataccattctatgattcctagttgtgaacgttgatacctgcgatattttcttatttaatgtcattatttttatcgttcatgttt

SEQ ID NO: 3960 - DNA, 501 bp, Glycine max
  Clone ID: PAT_MRT3847_103581C.1
ttccttccttctcccccccaccctttactccctctcttcttctttttttctcccttcttctctcaccccacccatctctccttcctcagatctcatccttcttcccccatagtgtgtcacgccccctctccctctcccatctctccttcctcaaatccgatggtccttcatccagatcttccttcaaatcgacaccaaccaaacgccgccgcaacctcggagaagatgacaatgaccttgcatgcacctgaccaaacatcgttgcaacctcgaagaagacgatgacaccaccacaacttgaacgaatgggttcaaagacaagcatttccacatcttttttatttattattttttttcatttttaattgttgttgaattttgttcaatgctaggacgacatctatgttggtgttggtgttgttgtgtatttctcctcaaagagcttttattttttctattgatggttgttgcttcccgtgagatgttgtagagagagagagt

SEQ ID NO: 3961 - DNA, 273 bp, Glycine max
  unsure (1)..(273): unsure at all n locations
  Clone ID: PAT_MRT3847_103582C.1
ttgtnnccctctgcccnnncccctncgnnttnntngttttcttttttcgtgcctcgngtnttcggtttgtccgtgtgcccttnttgnnttgttttgtgttgttttcttgncctgnttggcttnttnnnccctngctttgtttctgntgngnnngcctttggctgggttgtttctnnnttgtgnnncnggcngngctngctngtcnnttntcttnttcngtntttctgccctgccctttttttggtnggttnttctgcncctcctccccttggt

SEQ ID NO: 3962 - DNA, 268 bp, Glycine max
  Clone ID: PAT_MRT3847_103583C.1
aataactccttttacttccacgtcaattacttaaccataatgactttttttaacgcaatcatgctcatcacacatccattctcgctaatcattctctaacaactactatcctctcaatagcaccatcatatctattaccctacatatcatactgtcacactcttcatacacacattctcctatcaccaaaccatacttattctacacatactcaccaaattccatactctactcaacatcataccatcctacttaatctcttcaatca

SEQ ID NO: 3963 - DNA, 494 bp, Glycine max
  Clone ID: PAT_MRT3847_103584C.1
actgcagattacgaacactgcttcacggtgaagcacctaagccacttctccaccctagacgtcctcttgaaaccctactacagcaccacacttccccctctcaattcatctctctctcgatttacattccagagatagaagaagaaagagagcaatgacagcaacaacagagagcgagaagaagaagcgagaagaagaagaggaaccagaacaagttgtgaacccatgggaagtttcagccaaaggtaaaatcgattacgacaaactcatagatcgtttcggttgccagaagctcggcgaagccctaatttcgcgtctcgagcaactcacctctcgcactcctcacgtctttctacgacgcggcgttttcttcgcccaccgcgatttcgcggagattctggacgcgtacgagaggggcgacaagttctacttgtacaccggacgcggaccttcctccgaagcggggcatttgggacacttgattccggtcatgg

SEQ ID NO: 3964 - DNA, 131 bp, Glycine max
  Clone ID: PAT_MRT3847_103585C.1
ttctatggccaggcatttgattataaaacgtagaacagtgacttgcggaacaggagctgctggtcaagtagcacacatacaggtgttgagatgacacatgtcaaactatggggggagcaaatcctaaaaac

SEQ ID NO: 3965 - DNA, 1911 bp, Glycine max
  Clone ID: PAT_MRT3847_103586C.1
taccggtctagaattcccgggccgacccacgcgtcagactgcggattacgcacacggcctcacgctgatgcacctaagcgtctttactacggcacacgacttcacggttccgtaccatagctctctgtttctgtttacattcaagagagagaagaagaagaagagcaatggcagcaacaacagagagcgagaagaagaagcaagaacaagaagaggtacaagaacaagatgaggtacaagaacaagtggtgaacccatgggaagtttccgccaaaggcaaaatcgattacgacaaactcattgaccgtttcggttgccagaagctcgacgaagccctaatttcgcgtctcgagcgcatcacctctcgcactccccacgtctttctacgacgcggcgttttcttcgcccaccgcgatttcgcggagattctggacgcgtatgagaggggagataagttctacttgtacaccggacgcggaccttcctctgaagccttgcatttgggacacttgattcccttcatgttcactaagtatttgcaagatgtgtttaaggttcctttggttatacagctcactgatgatgagaagttcttctggaaaaatctttctatagacgagtgccgaagacttgcaagggagaatgcaaaggacatcattgcttgtggttttgacatttcaaagacattcatcttctctgatttcaattatgttggcggttccttctacaagaacatgtgtgaggttggaaagcgtgtgacttataaccaggctgttggcatatttggttttgttggggaagatcatattggaaaagttagttttccacctgtgcaggcagttccatcatttcctagttcgtttcctcacctattttctggaaaagagaatcttcgttgtttaattccttgtgcaattgaccaggatccatattttagaatgacacgtgatgttgctcctaaaatgggtttccacaagccagccttgattgaatcattattcttcccagcattacagggggaaacaggaaaaatgtctgccagtgatcccaattctgcaatatatgtgaccgattctgcaaaagatataaagaacaaggtaaacaaacatgcgttttctggtgggcaagattctatagagaaacataggcaattaggagcaaatcttgaggtagatataccagtcaaataccttacttttttcctagaagatgatgatgaacttgaacacataaagaaggaatatggagaagggcgcatgctaactggtgaggtaaagcagcggctaattcaagttttgactgaactagtggagaggcatcgcagagctcgggcttctgtgactgaagagatggtggatgcatttatggctatcagaccacttccccacatgtttgactgaaattatcctaccttcgtctgcccaaatattgctcggagatcactggataactggatttattttgtttctcaacatgaaaatgggttttctatgcaacggtattgctatatatgtgtaccttttttttgccaccacctgataattcaaatgccaagaaacttagttcggctgaagtaagaccttagttgagtaaaaaaaatagatcggaagaacattgccatcttagtgactttgcattttgatttggctcgagttgcttagcgtatgaatgaagttctataaaatgctataatggattatgctattgtcaatttcaatttgaaatcagagctccactgcaattttgtgactggcaatgtattcggaacttcttataaaatccctagtaagcaataagttgatttatctcctctcaaccccgttgtgtcccttgtgttataaatgagggaattttttttcttgtataaattttcccaccccggaccatgggataattttttgattgggcccc

SEQ ID NO: 3966 - DNA, 511 bp, Glycine max
  Clone ID: PAT_MRT3847_103587C.1
ccatgcacggcgtaccttaagcttgagatcctctaggagcggccgcccttaggattacctttttttttttttctagtagggagaaaagtttaaataaattgatgcataatttaagcaggctgctcaacaagcgactgctttgacgcctactttctgtcaggcgaggaagctttcctatcagaaaaatctgttaagagttcgagaaacacacgggagtacatttatgtcggtgggcgcccatcctaggactggggaatgggccgctcttctttatttaagcaattatcaaaacgcgaaattattgggtgaaaacttcaacagctgtctaattctttaccgtttactctcctcataggtttccaccaagggggtgggggacagatttcaaaatacaataggcaaggggttaatcttgcaagcgagttgccataccctaaggtcagcatatgcattactccattcttatcctcggtaaaaagccaactcacttcccttattcttgaccactttc

SEQ ID NO: 3967 - DNA, 1133 bp, Glycine max
  unsure (1)..(1133): unsure at all n locations
  Clone ID: PAT_MRT3847_103588C.1
ggctcgagctcgagccgaatcggtttgagcggctcgagcggctcgagcggctcgagggcgttccgaggggactatgaaacgtgcctggtgtacacggaggagatgaaagagcggtgcgtggagcagttcaagcaggggacggtgtgtatggaacagctggcagcggtggaagggttgtgtgaattggtgaggaaggcggttggggcggcggaatcggttcggagatatcacgtgaacttgtctattttcacgtccgttccagacgcgtggggcattgaccaggtgtttcccattatccccattcaccggttggaagaaaagccttcggtgaggggtattctctcggacttgacttgtgacagcgacggtaagattgacaagttcatcaacggagagtccagcttggcgcttcatgaaatggaagagggaagctactatctgggaatgtttttgggtggggcttacgaggaggcgctcggtggagtccacaatttgttcgncggccccagcgtgatcagggtgtcgcagagcgatggccctcacagcttcgcggtgacgcgtgccgtgccggggccatcctgtggagatgttcttcgagtgatgcagcaccagcccgagctcatgttcgagacactcaagcaccgcgcgcaggagtatgtcagccacgacaacgcagcagcggttctggccgctggccttgctcgcacctttgacagaatgccttatctgctgcctctgtcttcctttgtggctgatgatgttgctgctgctgctgctgttcctgctggtgaagatgatgaagagcagtggtcttatatatgtgcttgaaatctgtctcgcagtagtcattccctttgtttctgttgcttgtgtcttcttcttgttgttcgtcgtggtcgttgttgaggtgttcaattttttttttttttttttattattctgttttcgctgtttttagtttagcacaggatgcaggacaaggacagggtcagtcagttattgttctctgcattttgttcccaaatgaaatgtctatgactttcttcgtcaagttctagagtaacaaattttattgttgtcttgcttgttattatactaagaataaaaatgttctcttatgggcaagttctttt

SEQ ID NO: 3968 - DNA, 529 bp, Glycine max
  Clone ID: PAT_MRT3847_103589C.1
ttcggatcgagggggtctatcgacactaatactaatgcaattagacatttacaccactaattaatatgtagaaaatgattttgattagtctaattctagaattatagctaattattatgtagatcttacatgttaaattttagaattttaaaaatattattactcaatcaataatttatttctttgaaaagtaatttatacattaatttagtgaaatacattttggtagagtaagaaacaaagttacatcgttcaaactttctgttcagcaatgaatttgtgagaatttatcttataagaagttactcgttggtgtaagatgattgactttgatttacaatctcttttttttcccacatgcattgtcagtttaacctgccagccatggatatctatcatggggggggggggctagcggcctgggggtgaaaagggaaaagtacataatcattgaattttgtgaggcagcagtcatcgcataaaaaattagtaaccatgtacagctagctgcttttgctgtacatcactg

SEQ ID NO: 3969 - DNA, 683 bp, Glycine max
  Clone ID: PAT_MRT3847_10358C.1
ggggggttggaaatgagacaatggcttttcctccgaagattctctctgtggtcgatgaagaaggaacctgacttagaatccgcactctcacgcaatcgccgttggatagtcaacaaccaaatcaagaacatcatcctccgctaccccaacaacgaaatccccatccataccctccagaacaagttcaaaaccctagatctccaaggcaaagcccttaactggctctccaagtacccttgctgcttccaaatccacgacaaccgctgccgcctcaccaagcgcatgatgaacctcgtcgcagaggaacagtccctcctcgattccctagagcccctcttcgctcgcatcttagctaaactcctcatgctatccctcaccaagagactcaccgtcctcaaaatcaacgaattcaaacgtagtttcggcttccccgacgattacatcctcagaatcgtccccaaataccctaatttgttccgaatcgtcaacgaaagcggcaggagaagctccatggccgttgagctgctgcattgggatcccgacctcgccgtctccaccatcgaagcatcggcgaagaagctcggcactccgccgcggttttcgtgctctttgccgtccagttgggtgaaatcatgggagaggtttcacgaatttgagtcaattccgtacttttcgccctattc

SEQ ID NO: 3970 - DNA, 245 bp, Glycine max
  unsure (1)..(245): unsure at all n locations
  Clone ID: PAT_MRT3847_103590C.1
gtcgnatgcacgcgtacgtaagctcggaattcggctcgagnataggtcctgnanantgaagatttaanttcaaggtcatggctaancatctgnngttcattncnaggactgtnatggttcacgangggnacgtggannntgcntacaggaccctgaacagnatcctcaccaccgacgggcttnttgncgncatanagcgncgangctantatgagacgcctngcccgcngngccagagggagagt

SEQ ID NO: 3971 - DNA, 318 bp, Glycine max
  unsure (1)..(318): unsure at all n locations
  Clone ID: PAT_MRT3847_103591C.1
acgaagcaaatcggatattcgttggatgatacttcggctccaccttcacctttaataaggcctcatctatactctacagacgctggcgcacacatataaattgccttaaaaaaatgtctgagacggctgctcttgtatcatggtcgaatggcttgtgcggttgcttctctgactgcaacacctagtgcctcacgttctggtgcccttgtgctaggtttgggagaataggatagatcgtggcaaaggaacaacttctcgttgncttcatggatcaactttatgcctaacttggggttcctcttatttagcgggtatcta

SEQ ID NO: 3972 - DNA, 484 bp, Glycine max
  Clone ID: PAT_MRT3847_103592C.1
tttttttttttttttttttttttttttttttttttttgggtttttctcttgggggggccctttaatttctttcctttaccttcattttttccaaacccccgtatacaaccggaaataccgcacggggtaatgagggccaacgctttttccttagagaggggcttttaacgcacaggccaaaacaaaatacaaaccggaaccataaagaaaaagtcttggggtaaaaaatgaaaaaaaaaacccaccctaaatgaaaagggggaactcccgggtttccaattgggaaacctaccctacaaaattggttaatgaatcacccccccctctggaagaggaaaaacggttctacggccccaataaaattatccttcaaaccagggaaaaaggccatttttattttttcccccccggaatgtcttttctagaaacggaaaaagcggccaaatctaatttgcctaaaccggccaaaattatgaatgttgcc

SEQ ID NO: 3973 - DNA, 784 bp, Glycine max
  Clone ID: PAT_MRT3847_103593C.1
atattatcaaaattattatatttaatatacacgttataatttttattattttggtccctaaagaaaaattgccaagtgcttcccttgatcgtctatgctttatagttttaatctttgccactaaaaaaatgggtcagactgcaaacctgctggaccccttgatgacgccggcaactgcagatggcaaatataatatgaacttaatttgtttcaaggatgcatttgattcgcatctttagtagaatgatgcagtcatgggttttacttaaaacccaattggttcttcacaacattaggcattgacttaaaatccaattaattttccctacaatttcctcgataaatacaacaaattaatctcacgagaaaatagcatatacgccaacaagcccgaaccttccccgctaaagcacaaacatcaattttggcccttatattattaggtgcctcagttcatacttaggcaaaatatatgattacacatatatattgagaccaattaacaaaagtcagaacctaaacgaccatggcacaaaactcccataggccttagtaaccacaaacattttgacacatatcatatatatagactttaagaaaataatattgaagaagctaaatggctaggttgaaggtgttgtctgccctagacacagcaaggacacaatactaccacttcaaagccatcatcattgcagggatggggctcttcaccgatgcctacgacctcttctcaatcactctcatcatcaagataattggaagggtatattacggccaccgc

SEQ ID NO: 3974 - DNA, 325 bp, Glycine max
  Clone ID: PAT_MRT3847_103594C.1
ggagtaaaaatccacaccaagacatcctctcaacaaaaagaccccctacctccctaaccaaacaaacccgggagaagcaaaaacacaaaaccaaaaaaaaagaaaaaaaacggacagaaacaaaacaaaaaaaaaaaaaagacaaaagacataacaaacaggacctcggggccaaaaattccttgactaaaaggcaacaccggagggaacctccagctccacaccgggctttgatacaaagccgactttccccggggggaaaacaccagttccaaaccatacatcaccagccacttttagactggcaggggcaaccaccctagga

SEQ ID NO: 3975 - DNA, 283 bp, Glycine max
  Clone ID: PAT_MRT3847_103595C.1
tcttctcgtgctatcgcttatccgtttatgttcataggtgaagagattgttaatatctgcagaaaggggagagaatgatatcacctgcctactgctggctatattagggtctagcattcatgccttggtacgaactttgacatctatagccgtgggaggatgatagacagatcgctatggtagaaaacctgttgtgattataagagtgatttctgttgacattgtcaacatactattccgtcttagtacaagtttttagatggctgagattacaagacttttt

SEQ ID NO: 3976 - DNA, 859 bp, Glycine max
  Clone ID: PAT_MRT3847_103596C.1
ctcgagccgcgagagctaagtaatgttgaaagtgatggcggtgtaactgacctaagttttggatagatcagccgcgagatgatcgagctgcagggcggcgaaatcggcgtcagatctcgacctggaaaaggcgctacattcgccttctacatcgccgctcgcactgcagatgcgccgccgccgtccgtgcaacaaagtctctcttctccggcgctaatgtcgggaagacgaccgtcggagaataccagagccagatattccatcctggtggtggaagacaacctggtcaaccagaagatcttgagaatgcagctccaaaagctcggccacgaggtgcacgtcgtctcccacggccgcgaagccctggatttcctggaaactacttcctgctgggaaggcggtactgccagtcacacgcacgtttcgattatactcatggacattgagatgcccgtaatgaacgggctggaatgcacgaggagaatccgagaagctgagagcgaaggccgcgttaagcggcatttacctattatcgcggtgtctgcgaatgcccgtgagggccaggtgcgttatgcgatggagtgcggagtggacgacgcgattagcaagcctttccgcgtggctgatctgatgccgattatcgagcgattggctttggtttagaaatgatgaaaagcgatattccggacggcgaaagcgatgcgcccttgcagtcaacgcgtgcgtacgattgtgcgcagctgcgcacaatcttgtatacaaaacaacgcgtcggtatgcattgggaggaaatacatttgctggtggtagaccatcaggcacagacatagatcacgaatccatatacgacttttgagag

SEQ ID NO: 3977 - DNA, 387 bp, Glycine max
  Clone ID: PAT_MRT3847_103597C.1
gaaacaaaggaaggatcatttttaaaaaatttttttttgacaatttacaacaatttgattctgatataatttttcaagaaaaggggggtgcaaatgagccagaattgcaacattgccttaagcaacgggaacccacctgttttttttggggccatttgcccatcaatttgggaacaaggggggcttaagccagaaatgtatggatctttcatgtaatatgcccatgcttctggtttaaaaatgaattgacggggttccaaaatttaatgccaaaaacttgctataaggggttcctgaaaaaaaccgcatcaacttggcatggcccaaaaatgcatgggaaaaacccaagtttaggcatgaatatcaaatgccctaatcccaggtttt

SEQ ID NO: 3978 - DNA, 549 bp, Glycine max
  Clone ID: PAT_MRT3847_103598C.1
acccacccgtccgatcatcttttttttgttatagaaatgcatctttattgcagccgcacccttgctgactacaacattcacaaggagagtctcttctcctcgccctacgcctccgtgggggcctgcagatcttcgtgaacacactcaccggcaagaccataaccctagaggttgaaagctccgacaccatccttaacgtcaaggccaagatccaggacatagagggtgtccctccgaaccagcaacagagcatcttcgccggaaaacaactcgaggacggtcgcaccctcgccgactacaacatccacaatgaatcaacccttcacctcgtcctccgtatccgtagtggcatgcaaatcttggttaagaccctcaccagcaagactattaccctagaattcgagagctacgactccatcgacgacgccaaggctaatattcaagacacggagggtaatcccccataccagtagaggctgatctttgccgggaagcaactggaagacagacgcaccctagctgactacaacatccagaaagagtcaactc

SEQ ID NO: 3979 - DNA, 520 bp, Glycine max
  Clone ID: PAT_MRT3847_103599C.1
aggcgaaaacaacaactttttgatttcctttataaaaggggactttctcaaaaaaccctagtttcaagaaacaaaaacctcaaagggtggaaatcttggttgaaaatcacatcattcaccctaaggatcacaacgaaactgggaaactggaccttacaggccactaatttagcaacaaatattaaaatagcaaaaattaagggccgcattggtaaaattacccttccatgggatgattctcctctgattgggggggggaaaccttgactttgatctttggaaaagggaaagaaggatcctggtgaaacacaaaaggagctttgaccaaactggggccctggtccaactcctttactggctccttaaaaaatttttcctttttgcctttcatcctggtcttaagggggctctcccccctcgagactctgatcttatcaatcttaagaagggccttgaggacattttccgcaagattcctggcatatttttcaggcctgtttttttttttctcaaactcaaa

SEQ ID NO: 3980 - DNA, 583 bp, Glycine max
  unsure (1)..(583): unsure at all n locations
  Clone ID: PAT_MRT3847_10359C.1
actcgagccgattcggctcgagaaagcccagaaagaagtatttgaaagtaacaaacaggatataactgttgccatgatgaagacttacccattactcttgcgaaaattcatttcagataaagcaaaagtctcatcactggttgagattgttttgcatatgaaccttgaatactattccttgaagaggcaggaacagaatttcaaaaatttactccaactcgtgaaagaagcattttttaagcatggtgacaaggaccctcttagggcttgtgtgaaggctattgatttttgttgcatagaaagtcaaggggaattgcaagattttgctcgtaataaattaaaggaacttgaagatgaaatcattgcaaagctgaaatccgctattaaagaagtactggatggtggtgatgaatattctcttcttgtaaacttgaagaggttgtatgaactccaactaaaaagatctgtgcctatcaatagcctatatgaagacattgtcacggtgctacgtggtaatagggatatggaggatgagggttggntggtttcctgcttctgaacatgtatttgcatctggcttggg

SEQ ID NO: 3981 - DNA, 215 bp, Glycine max
  Clone ID: PAT_MRT3847_1035C.1
catccgcactgggtcctggcctacatccacaatggttcgcattcccacggaaaatggcagagaggaacgcatggaagagatcatcagggaccatatggaccccatttcaaagcaagcgatggggatctggaaggatcattgagctagtgccaagcgacaagtcgcagacgcagaaagagcttaacttaagaaaagggatggtctcatcagaaaca

SEQ ID NO: 3982 - DNA, 260 bp, Glycine max
  unsure (1)..(260): unsure at all n locations
  Clone ID: PAT_MRT3847_103600C.1
cttccatctcacttcaaattcattctccctttcctaatatgagtcaaagatatgacaacaatgttttcaaatctcacataaataatatccaacttgctcctggtatcaccgaaacacttcatcttcctcccccacttcaaaccgagnctaccataagaggaaagcaaaatggtaaatcaaaaggtccaagaaatgcaaaatctgcgaatgccgattcccctaattcgactgcagttaacaattgtcgctatgacagttcc

SEQ ID NO: 3983 - DNA, 703 bp, Glycine max
  unsure (1)..(703): unsure at all n locations
  Clone ID: PAT_MRT3847_103601C.1
ccacgcgtccgaagaaatgttcaaggtagagacagcaattcagaaggatgaaatgcataagtctgatgaagcacataaggaaaggaaagaatcaaaagagcagtttgaacttaaaaatgaaaaatctagggatgatgttgaatataagcaagatcaggtaactgaagacattttaaatactggacctcctgcaaagaaaaagaggaatggcaaagagaaaagtggagaagaaagtttgtccaaggcaaacttgattaatgatttcaatgtagacagtacttctcaccacattttggaggaccaacagaagattaaaaacagcaatgctgaccaatcagctgaacattttgatgacactaatccaccgcgaactagtgtgcggggtaggaggaagaaagggaagataaattcatcaaatccatatgaaacacnctgtagttancttcttccaggaaagatgaagaagcagattgttccagtattcaaaggaggtgttcagaaggaaatatccgaagatggcctatcctctaaagagtcttggtatgagcaaagctactattaacaacatnggagactgggaacagatgcatgcaaagaaggctttcaatctacggaaagaacaacagcaaattataaaaaccattctgacattggaataaaagcacacactgctgatgttggatgagcctatgngagctgactg

SEQ ID NO: 3984 - DNA, 472 bp, Glycine max
  Clone ID: PAT_MRT3847_103602C.1
gaatgaacttcgtattttcttaattaagcgaattttttctcctgtaaaacaacatttcttcttttattatcgcatgcttcgatcttcagttcttctactcacgttaacatgcacaatctaacaagtcaaagggacaaacataataaaattggaagcaaagcatggtttagtaattcactcatagtgataatagtggtctacaaagcttgtttttgatccatttgaaactgctgcgaaaagaggatttgagcttagcttccacggtgtacatgttgtaggatgctaccctttttcttcttttgagctctgggttaccattagtggccagaacatctcttttgctgcttcttggaccgttgaagctgtaagatatggttcgaccctccaacccagccctgaagtcgtgataggaactggagtgatgataggcagagaagggtttgcctttctccatgttcatgcacaaaaattg

SEQ ID NO: 3985 - DNA, 461 bp, Glycine max
  Clone ID: PAT_MRT3847_103603C.1
caaagttttatattaagaaaatccagttaaatgactcaaatctttgcgatggccatttgtttagggtgaatttgtttaaactaagtaactttaaaataagtgttttttatataagcgcttttttatgaagtagataggatttacttcttaaaataagcagaaatagtttagacaaaacacactaaaaaatcaaaaaaacttcttattattaaaacaagcgcttatttcaacaaataagtttaaacaaattggcccttaatcttaaaagaaaaaggggttataggatatagcttgtttttaagacccttaattctcagaagtttttttccatataaattgctgagaaaaactctgaaacactttttatttttgagtgtttttttcttctgaaaacttaataattataaattttattaaacatatattttgattaaaaagcatttttttcataaagacaacac

SEQ ID NO: 3986 - DNA, 335 bp, Glycine max
  unsure (1)..(335): unsure at all n locations
  Clone ID: PAT_MRT3847_103604C.1
ttctaanatgacttctttctacatcaaatgtacagnctctttgtggaatcatttgaaaaggaggctgctcactccatccatttttaagcttttccccacaagctggtgcatcttggagagattcaagaaaaagtcgtattgaaattttcacaataggaatttctcacagctcgatcaactcaggtgcatcctagcaacatctctgtttgctgatgggagcccatatattgtatgcaatggtgcatgataattcagcgtctacaattccatgtgattttgtcattgatgtcaagttgacaaccataaacaatatgtgtgcatatgggctcaatcct

SEQ ID NO: 3987 - DNA, 235 bp, Glycine max
  Clone ID: PAT_MRT3847_103605C.1
ggtcatacgagaggtaataggaagaaaccagatgatagacagcttgggagcgtaaactgaagacgaagtaacgaaggacggcactgaagcaaaaaatgctctaggcaaacagaacaagaaattatataggatgaagaatgtgaagatacagtagacaaagaatggtggaaggcggagagcaaaaatttttttggaaaaaaagacgggggccagaggattaagaggtgtactggag

SEQ ID NO: 3988 - DNA, 330 bp, Glycine max
  unsure (1)..(330): unsure at all n locations
  Clone ID: PAT_MRT3847_103606C.1
ccttcccttgcggccgcccacgcgaccgnatangggcagaagtcccaaaaaaatatcccacccccaccccacagcgaccaacaacaaaagggaacaacggcacccccaagcgccaacagcaaccacaagcccaccaccaaacccaacaatgggagaagaagcccccaaacccgcaaagaaacccgacagaagcaccacgacagcacacccaccgaccaaacaaaccgaagagaactcacacagagaagccgcgaaacagcaaccacgggcgccaaccagaacccgcaaagggacaaaaccccgcacacccacggagggcaagcaaacacc

SEQ ID NO: 3989 - DNA, 370 bp, Glycine max
  Clone ID: PAT_MRT3847_103607C.1
ggaaacattaatcttatgttaagatttaaattttaaaataattaatttattataatgacaactaaaagtaccatgacaaaaaagtgtattggaaaggcaaacgtcttgggaacaaaaaagcgcattggaaaggcagacgtcttgggaataaaatataaatagttaattattacatatttacatttacaatgataataaattaataaacacatcgtaactggagcaaaagcaacacaaaagacaaaaagtgttaaatgcacaataaaattaataaaattcattaatattaattaataaaaataatgaatacaggttgacagtgacatttttgggcgggaatgaggcccttgcatacaatagcgattgtagt

SEQ ID NO: 3990 - DNA, 372 bp, Glycine max
  Clone ID: PAT_MRT3847_103608C.1
aaaaaaacaaatctttttgtttccttgtttctccatgaggattagtttcacttttttcacatttaacattggttttccaaacccacccctttgtcccgagacgacggtttcaacaattttttgagaaggaaaaaaaaagttccgttttgataaacaaaatcacgggccttgaatttttttttgggcctaactaactggaaagcccaacttttccctggcaggggcttggttctgacgggtttttaaccgggctccccccttgacggggacaactttttttttttttaatggccttcatgatgtccaaacatttgccggggaggttaaacacgttctgggccttttttatttttggggatttcccggggggga

SEQ ID NO: 3991 - DNA, 363 bp, Glycine max
  Clone ID: PAT_MRT3847_103609C.1
tttctttcaaatttgggcctggaatggggggggctggcggggcttttgaaaaaattgggggaggctttcagttcccttccactttctggttggaaatggctgccctggaaccgggggaggagaaaatagccaggtccttccagattggaaggaaaaaaatttgggggccttccatggttataatggagggattaccagggccttatgaggtagaaggagattttttaagggaggttatatattctaataaaggggttggtatattaccctggttattttaagggggttggcgggggaatttaaggatcatcactttatttggaataagaaaatatattcttccttataaattttttttacttc

SEQ ID NO: 3992 - DNA, 612 bp, Glycine max
  unsure (1)..(612): unsure at all n locations
  Clone ID: PAT_MRT3847_10360C.1
gcaccgcgctacgctaagccttggnactcctctagaagcggcacgccctttttttttttttttttttttttttttttttttttttttaaggaagcgtcataaggggaaactcattggatcgaaccataaaaagatcaccccaagaaagacttctttgcctgttctaatcagggaaatagccaaatgggatcgaagcaaaagctccagtttttactaacagttttccacggtctgcttatctagggaaaacaaaaaacactacgacggaaatataactatccggaatataacttccgctcactttttatccgtttggcaaacttcctaaagttaataatgaacaccctcttccttggggtcttccccagtttccgtttttgattcagcatgggagtcattgccagtttcataagaatcttccttttcctcatcagcatcaaagtcaacggggccatccttggattcctcctcttccctctttttctaagccttttaaaaggctgtcttctaaacatccttgtgcttgccccatgtttcttcanccagttgctgggcttattcaggatcatcagtaattaaaactttggcaaacaaagtaccagatttcacctg

SEQ ID NO: 3993 - DNA, 456 bp, Glycine max
  unsure (1)..(456): unsure at all n locations
  Clone ID: PAT_MRT3847_103610C.1
acggncggaaatacccggccgaccaacccttccaatttaatttgttcaatttcttccggtttcaacttataaggttttttaaaagcaagcgaaggactttaaccttttataactcccctccctccattttcaaccgggttgaaaaagttaatttcttaaagttttttctttaaattatttatgtaaaaagtccatatttttgaattttgttattaaaatcatattttgccttttttagtaaatttttcttttatttgttaaaacttcatattgatggtttatttttttatttcaatttttttaatgtttaagaacccttttattttattttaataggaggtatcagttttttattttttcctttattttttttatgtctgttccaaaatccttctttattatttttggttttgaattgtatttcgaatttcttttttctcatttattttttaattt

SEQ ID NO: 3994 - DNA, 938 bp, Glycine max
  Clone ID: PAT_MRT3847_103611C.1
atgctcgagtttttttcttttcagagattctttcttttctctctctttctctcaggctcagctctaaaaacttgtcttcaatattctgtttttcttatcagtctttggttttctagatcagatggaggaaagcaagaaaaacccttctcaacttaacagattccaggatgatggaatgcacgatcttgacatagttgaatggaaaaagaaaagaaaattacagagtgatcagttggatttgattagacctaaacataaatgctgggttggaagtttctcctctgaacatgcttcagtgtttgataaaaatccagttttagagagcatgcacaaccacacagttgaaagctccaaacatgaatctgccaaagacagcaatagttttatggaagactgtgatactgccatgtctgtaaatgaagaaccccagcttattttcgcttctgcagacactgaggaaattgttgatgcttaaacttactttcaaattagctagatatatagcttttcttttcttttctttctgtttggtccctacttaattatgattttaattttggaataaatgaacaacatgtgaattatgaaggagacaatacttgttgttacattgtatttggacagcacgtgccacgtatagcggaggaaaccatatattatcaaggatgggagagatagacgccacttaatttttttcatctattctcaatcgatgaaaagtgaccagtatatttctttctataaggtatctgcttgtctacgggatagtatccactcaattgttatgtaaattgtaagaaagtgacgttaataaaggctatgttaacatattttggggctaaagtttattttgccacataatggacgatatgctctcattcaacgacgtctctatgtgaaaaaaattatagacatccaaataaagtattattaacgtc

SEQ ID NO: 3995 - DNA, 808 bp, Glycine max
  unsure (1)..(808): unsure at all n locations
  Clone ID: PAT_MRT3847_103612C.1
gaattcgagctcggtacccggggatcctctagagtcgacctgcagaagaaattaacaggcacagcatgagatctatactctgaaagctgggcttgaatattagatcggtaaaaaatgcaaatttaacaggatggagaagttctcccctataatttaaaaataaaataatatcatgaatgtagttcaattgaaacatgttaaaaagtaagtgtacaggagtggacatttcaaatgggaatttagactaaccataagtttctttcagcatcaaaataatgtgctactgcacttgacgtgcttatgaccctggattttgttgctaaagtttgtataataagttgtgtattgttgatgaacaagcaaatgagagggaaaagatattctgtatctgaaagttcatgaacgatattcagagaaattttttcaattcttatatcaatacnaaggatgtttcccaccctgccacgaagtactttcttcatctgtgcgcagagtagtttgtggagccattctaggatagctggctgtctctgaaacgccataagcagcagtaatatcattaaaaactttgaacttgattggacttccaggcttcctgacaaactctagagcaccatcaacaaaagcaatagcagagtcattctttttgttcacaaggtagaaagttctcttcattgattgattgctagcctctgagtcagtgattcctacatagttttcaccttggaggaggataaactctccacagtgcacatcctccatcatttgtacaagagatgtcaacaaaacaatgatccctggtgaaaat

SEQ ID NO: 3996 - DNA, 769 bp, Glycine max
  Clone ID: PAT_MRT3847_103613C.1
tgcctcagattgatgttacatttgacattgatgccaatgggaatgttactgtctctgcaaaagacaagtccactggtaaagaacaacaaatcactattcggtcatccggtggactctcggaagatgagattgaaaagatggtcaaagaagcagagttgcatgctcagaaagaccaagagagaaaggctctcattgacattagaaacagtgctgacaccaccatatatagcattgagaagagtttaggtgaatacagagagaagattcccagtgaagtggccaaagaaattgaggatgcagtttcggatttgagacaggcgatgtcaggggataatgttgatgaaatcaagtcaaagcttgatgctgcaaacaaagctgtgtccaagattggagagcacatgtcaggtggttctagtggcggttcctcagctggtggttctcagggtggggatcaggctcctgaggcagaatatgaggaggtgaagaagtaagtcggggaggagtttgtatccactttttactgatttatttgtctagatcacaagttagagatgaatcatcttttttcatttagcatataatataaggttttttgtactaaaagatggagttcattttttaccttaaggccttttaaacttgtagtacttctggagaaccaaattatgcctgtttgaataacgatattcaaaattttgcctagtgactagtgacacattttttactctaactttgtaccccgtctcccgggcgataaattcggggcggt

SEQ ID NO: 3997 - DNA, 298 bp, Glycine max
  Clone ID: PAT_MRT3847_103614C.1
ggggctatggagcactatacttggtttcggctttccctattattataggtatttcagttgttctgattttgttttacaattccctccagtaggaaattgcattccactcaaattcagtgtataatgttacactatattgaaatgagttagtatatcgcaatgttcacctaacatcaaaaaaaaaaaaaaaaaaaaaaaaaaaaaaaaaaaaaaaaaaaaaaaaaaaaaaaaaaaaaaaaaaaaaaaaaaaaaaaaaaaaacctaataacctttcaaaacaattcaacacccctcaatg

SEQ ID NO: 3998 - DNA, 206 bp, Glycine max
  Clone ID: PAT_MRT3847_103615C.1
acataagggcaaggtaacaaaacctgagtgttttcaaaaactcaatgcaacaagcatcattctttactcctgcttataataactatgataattcaaatgctcttttcatcattaattctctatattataacctaacttgcaaagaatgctacaatcaagataattttagtgactttattcctaatcttaccttgcttgaatcttta

SEQ ID NO: 3999 - DNA, 615 bp, Glycine max
  Clone ID: PAT_MRT3847_103616C.1
gccaagaactgcaggatagtgtgcaagtctaaaaaagaccaccaacacaaaaacataatgaaaacatacatacagacaaattatggctctgccctttaagaagaggagcagaacggcagaagagagttggagaagaagtaactctgcctactgaaacaaattccggtctttctctctatttcttatttcaattattcgattccacacgttttgatcctttttttgtatagtgtattactatcgatgagagtaaaataacatgtcgttttagtttttggaattataaaagaaaaattgactctaaattagttaatgttggtaatttagcttgacattcgacaacattatttcccttatttgtttgataggaaattaggaaggagaaagtgataaaatgccatgggcctcaatgttagaacaaaactcttgaagagcatgaagtccctagtttagttttgttttgataattttgtaatgcctaacatgttttgatagatgagacatttatattagttgttttagtctaggcatgtgtgtctgatatagttttatctttttcatgcttagtgcttgatagttatgaggtaaatgaagattttttttctctgagttaaa

SEQ ID NO: 4000 - DNA, 300 bp, Glycine max
  Clone ID: PAT_MRT3847_103617C.1
aaaaaatggccactttcaatttgggtgtataacacgggaaaaaccctggaagtcggagtggtgagctcattcatttcagcaggggattccttcacctgggggacaaatacagaatcactattcctatggaaaatctgagaaaatccgcatgtttattgtccaactggattgggggcagtcttctattgcttgccctcacacagctagtgcattggaaaccattggataaagatcggacagcccggatctgaaaaccccgttctatgtctaatttactgagatagatgtccgatctttatg

SEQ ID NO: 4001 - DNA, 203 bp, Glycine max
  Clone ID: PAT_MRT3847_103618C.1
ttttttttttttttttttttttttaagaataataacccaaaatttcattggttcacaggaaaagacccataatggtggcttaacttatttattacccaaactgggcttttaaaagaaacttgaaaatgaaccaaaagcctgggtttttgattggatgaaaccacaagggcctctaaccactcttccaccttcgaagccttctt

SEQ ID NO: 4002 - DNA, 419 bp, Glycine max
  Clone ID: PAT_MRT3847_103619C.1
ttcgtcacgcctccgaacgagacaaacaaggcctaccaccgttccaacaggggctcatttattttggggaacagcttgcggatggccgtaccctcgccgattacaacattcacaaagagctgaccctccacctggtgctccggatgcaaggtgggatgcaaacctttgctaagaccatcactggaaagaccatgaccagcgaggaggctagctacgacactatagacaatgtcaaagataaaaatcgagacaaagaaggtctaccaccggaccaacagagggtcaaacatgctggaaaacagcttgcatatggccataccttgacagataacaacattcacaaagaatctacgctccacttggtgcttcgtcttcaaagctgtatgcaaacctttgctgagaccactactgcgaagacc

SEQ ID NO: 4003 - DNA, 268 bp, Glycine max
  Clone ID: PAT_MRT3847_10361C.1
cgctgctgactaaaacacttctgaacctttaagtgggtttgtggtgattaattccgaatggaggataatgactagggatcaaatggaggattcagatacacctaaagccaatgatatacctagacgtgcttgtcatgtctggtcatcttacacagaagctcctcaaactattagatactttcataatgccattcactgaaacatgagtactcttacttacacagcctatctgaacatctaccgttatgcattctgccagctccaggaa

SEQ ID NO: 4004 - DNA, 277 bp, Glycine max
  Clone ID: PAT_MRT3847_103620C.1
ttctggtatcgcagagacgccttggaagaattcatatgctagacttgtgcttgcatatggctcactttggatagctaaagcgtttggagcttcagggacccaaggtggctacgttgttatcgagacatcatggacagggtatcaagaaaggttgactgatcctagctatgctgtccaaggtgggctcatgacacaccctcatattgcgaataatggcataaaacttgatgatgatgaatccttacagtgtgtccttgctggacttgatgttataagg

SEQ ID NO: 4005 - DNA, 1302 bp, Glycine max
  unsure (1)..(1302): unsure at all n locations
  Clone ID: PAT_MRT3847_103621C.1
gctgtctttcactaaaaaccaaacccacccctcattttccattctctctattttctctcctctatctaaacttaacttccattccagtataagcagataggcagatacatcgtattcacgtgggtctgcatgcccctaacaaaactctccttccactatccattaataccatccccctccttaccctaatttaacatcacacatccaatacatttcgtttacccacgctcccccctctctctctctctctacactatcatactaccactcagctcaaaaaaaaaaatatatatatatatatcttttccttttaattttataattttggtgaaaatagcaagagagaaagggttggaattggaaatatcttaccggagaatgggcgacggcagcatcgtgggccacctgccggaggagattctgttgaacgtgttctccgccgtgtccgacacgcgcacgcggaacgcgttgtcgttggtgtcctggagcttctaccacttagagcgcaagacgcgcacctcgctcacgctccgcggcaacgcgcgtgaccttcatctcatcccgacctccttcaagcacgtcacgcacctcgacctctccttcctctcgccttggggccacgcgctcttttgctcctcctctgccaccgtcggccaccagagcctcctcgcgcaacacctccgcgccgcgttcccgcgcgtcacctcactcgcgatctacgcgcgtgacccgtacactctccgcctcctcctcctctccgcctggccggagctctccgccgtcaagctcgtccggtggcaccagcgcccgccgacctccgctaacgaagccgacttcgccgagctcttcaagaagtgccgatcgctcgcctcgctcgacctctcctccttctaccactggacggaggacatcccgaaagtgctcgcggcgaatcctatctccgccgccacgctccgccgcctcaacctcctaacaacctccttaccggagggattcaaggctcacgaaatcgaatcgattaccgcgtcgtgcccaaacctggagcactttctcgtggtctgcaccttccatccgagatatatagggttcgtcagtgacgacacgctggttgctattccatccaattgcccaaagctctcgctgcttcacttggccgatacgtcgtcgtttttgaatcgcagagaggacgagggtttcgacggagaagacgctagcgttagccgcgctgccctcttgactntgttctctggacttcctcttttggaagagctggtgttagatgtttgtnaaaatgtcaagaga

SEQ ID NO: 4006 - DNA, 523 bp, Glycine max
  Clone ID: PAT_MRT3847_103622C.1
cacgcgtccgctcactcacacacacacacatctctctttacatgtggttcgtattgcacacctcctcatcttgcatgttctctcggatggatacttactgctgctctatgaggcacaaggataactatactgagactcacaatgagtacttacatcagccacggggcgaactcggagatgcccgagagctataacctctacgctgggtggtatgagtcgccactgatagaccgcgtcgtgactagcaggagatgatttagacctacgacaacgccatccacggagtacgcgacgagattaaccggtggggaatcacgtttgctccgacgccaaacggcgattttgtctgctcagccggacacgatgtaccatctttgcaccacgcgatggccttagcttctcggatctgacaagagcgcctgctcgttccgcgagactgatactaggaatgtgacgtattcaactgattcctcgaaagccgtgcaggtactgatagcgagaacttggaccaagccctactata

SEQ ID NO: 4007 - DNA, 533 bp, Glycine max
  Clone ID: PAT_MRT3847_103623C.1
gttttttttttttttttttggaaaaataattaagtttttttctcgttaaaccatgaatttaatgttagaagactttctatggaccacaaatacacatatacaaatagttgaaggacaattgttagttattaataaaaatatgtatttctttaaaattacaacatgtgaagtgaaagacttccaattcttccaatatgttatgatcgatctctatagcaacgtcaggttgtgtatgtaatcacatgcaacgtatgatatatagatcaagctcacacatccatggggagcacaagaaatctcgcagaatcacaaaaggcccaaatttagcataaagaaaacacctgatagtatttaattaggaaactgcaataacagtgttttgaatgataggagagagaaagaaagaggagggatgagagaaacactattctttctagtctcatcattactcttagccttagccagtaaaatattcttcagccaaacctttttccaatcgacaatgaaatattagggttcttattctgcttcta

SEQ ID NO: 4008 - DNA, 287 bp, Glycine max
  Clone ID: PAT_MRT3847_103624C.1
ccggctgcgagaagacgacagaagggtcccaattgaaatgtgtattaattagtaaaattttcagatccacggtggtctaattaataactttatacaaagaagctcatgttaggacatgagtacaatatccatttaattactggttcaatattgagtgagagtgaaaactaatgtaagtaatgcaatctgatttgatgatgcatttgccagcagttatttgatatttaaagaaacaaaagtaaaacatttaaagaaaagtatttatttcatcaaatatataaaactat

SEQ ID NO: 4009 - DNA, 226 bp, Glycine max
  Clone ID: PAT_MRT3847_103625C.1
tgccaaaagaccacagaaagggacaacaaccattacaatgggaacctcaataaaagctggaactaacttcaagcaacccaacaaagggggcaagggcaatcccaaactcaaatccacacaatgcaattccaaaggctttggctttggaaccgctgcaactaaactcaattgcccccctaaacccgatttcaaaaaatttgccccaaaatgtttccaagccaacaaa

SEQ ID NO: 4010 - DNA, 190 bp, Glycine max
  Clone ID: PAT_MRT3847_103626C.1
cgcgtcacagtctgactaggaattcggctctagctggctcgatgtcgagccgaatcgactcgagcaggacttcgaccatctcggcgtgattttacatactacactcacactagtgcacctagggatagattccgcgaaagagaaacatggatgatctagggaactgaaggtgagcacctacaagtctggc

SEQ ID NO: 4011 - DNA, 400 bp, Glycine max
  Clone ID: PAT_MRT3847_103627C.1
ctgattcttaagacccttcaaaatatttctcatcaaattgtttcaaacttgatcaccaaaaagtacagttcaccttacaaaaacaactttggttagtttctttgagcaagttaattgctagagatggtgttggggtggaggagaaggaagggctgcaacaataaccgccgaaaaggtggcaaatccatcacggagttggtgattcccaaccacttcaggtgtccaatttaccttgacttgatgaaggatcctgtgacattgtcaacagggataacctatgatagggagatgacatagtcgtggtttgataactacgacagggcatgtgtggttgcaaaccattgtgagagaaacttggtcatgatgccaaaccattctctcaggataatgattcaagatt

SEQ ID NO: 4012 - DNA, 539 bp, Glycine max
  Clone ID: PAT_MRT3847_103628C.1
agcaagtataaatccaaaacctaatatgattggagaaggattccctactcgtgttcagataacaattgtaataagggtttggtagactcatatgaagcgagtgcgcaaaaaaaatatgaataaagtcctggtaaggattacatgggcaattttagttaggttccaaacgcagagccctctcataaaaacaatgctactatgggcaccaacacaagatagcaagagtaatatacactctccttgaataacagagggaaactgatgatagtggagaattaaccgaataagctccctggatcccaagcgctagatcaacatggcctagagaaggcttgaaccgaccccagaatttccgataccaggaaaaaacggaggtgctacccaagggaacgtcccctggacataatgcaaccccctttgtacttcccgcatggtgcccaacaatgactgggccccggaaccccctcggagttcacacgattacctttagctgcggaggatcccggaggctctaaccgagaggcatgtgatccgggatg

SEQ ID NO: 4013 - DNA, 325 bp, Glycine max
  Clone ID: PAT_MRT3847_103629C.1
tcttactataccgtttttccctaacaaacttaccactctctaacttctatccaaaacactacattgttccgttttatttacataactctaccctaccattaatatacacatacacaataacaatctaccaatctacacttcaaaatatattccacacttaccataacacactatattattcttaacataataatttcatcatctaccaataacattaacacaacaccataaacaacgaacaccacatcacactcaacatcaatcactacatctttatccgcaactcaaacaacattctcccattaccaaaccacaaatccatatc

SEQ ID NO: 4014 - DNA, 423 bp, Glycine max
  Clone ID: PAT_MRT3847_10362C.1
tgacactccaaggaggcaagggaaaacaaaccagaaagtctgacctttccctttctccaaaggatcatcaaactaaactaaatcaaatcaaaatcaaactttgtcacggttatattagacccttttataaacctctttcaaggcttttcaatcacaccctttctctaatcacttcttcttgtgctggcataacttcaacaacttattctttgttctcgatctcacgatggctcatttggccctgtctcagatggctgtaactgttcctgttggcagcgatttgtctctcagaagatctgcggttaaggcacctaactttaacttttgggataaatcatgggcaccagtatttactttgtacttgaaggcaaacaactcaagtttaagaagtcgtcatgtggtattcatgtcagtgcaacaagc

SEQ ID NO: 4015 - DNA, 204 bp, Glycine max
  Clone ID: PAT_MRT3847_103630C.1
gcatcaccaggcgatgttccttgagaccatccacctcgatggcttccctgagggttctattcatcttcagtgtggctcttccgttcactcccagttcgatactcgcaccagtagggtattcttctccaataagtgttatttaccgtaagatataccgggtcgtttcagtggagtcagtccgagagctttgactactctgcgagc

SEQ ID NO: 4016 - DNA, 264 bp, Glycine max
  Clone ID: PAT_MRT3847_103631C.1
ctggatttctctcttctaaatcaatcaatactgattttatttactcaatcaatcctccaatcagtgaatcaaaatgtccggagacgaaggccccaccaccgcctacacatggcaaatctccgcccaggaccagcagggcggtcccggtctcgacaaagacatgaaggagcaagccaactggacccagctcgagtactggggtgatgacggcaaaccctacctcaaagagtacgaaggccgcggcctcctcgagaacaaggccgt

SEQ ID NO: 4017 - DNA, 520 bp, Glycine max
  Clone ID: PAT_MRT3847_103632C.1
gaaaggtcgcatgtcatcaagcaaaggtacccggacgaaaattagtgtatgacactaattttgctactctcggttgacgagagtcgcgggtgaccataaaagttatgaccatttgaatttctcgagagcttccattgttcattttcgagcatctctatatgtgatgcaccttaatcgggcatccgtttgaaaagttatgaccatttgaatttctcgagagcatccgttgttcaattccgagcatctcgacatattatgtgcccgaatctaacctccgtgtggaaagttatgaccatttgaattcctcgagagcttcggttgttcaatgtcgagcatctcgacatattatgcgcccgaatctgacctccatgtgaaaagttatgaccatttgaatttctcgagagcttccgttgttcattttcgagcatcgctatatgtgatgcacctgaatcggacttcagtgtgaaaagttatgactatttgaatttcacgagagcttccgttgttcaatttcgagcgt

SEQ ID NO: 4018 - DNA, 342 bp, Glycine max
  Clone ID: PAT_MRT3847_103633C.1
aatttatttctttttttttttttttttttttattttttttttttttttaagggccaaaacccgggcccaaaccttattaaggggaaaaaaaaaacgaggaatccccccccccaaaatagggaagctctttctatgcccattttttcgaaaggggacacaaaaacgggggggcaatcaccggtcattttaaaaaacacaaaactttttccccccccggatgaagggggggggccctgtgtccccttcaaaaggggcccaatcctcagaaggaaaacaaaaaaaaaaatcgccccccttggaaagaaccgaaccaacaaatcttcggtccccggcccgacccgg

SEQ ID NO: 4019 - DNA, 1189 bp, Glycine max
  Clone ID: PAT_MRT3847_103634C.1
agctggagctccaccgccgtcgcggccgcccgtgaaccgggggtcccccccggcggcaccttctcggcacccgcggatccgtgagccaagtgaggcagaaccgaaggaaccttcagtcggaactctgagcgtccttccggcgaaggactcggtgctgggaggctccgaagctagctgtccttctggggtcactcgctgcgatgcccccgccggaaactcatatcaatggtccaggcaagaaaacagtgatagttgagtcagaagctaagaaaccttctgaacggtgactcttgagccaggagcccggtaaggattcagtgatagtagaagctgagaaaccttctgaggacagctcatatcaattaagaagctaaggaaataatagaagtagagtcagaaggcaacaagcctccgaaggaaactcttgtcaatgcaacagcgaaagtttcagaggaaacacaaagcattggaagcatccaactcaaggaagcgcttatagaaccatcagaagaaggtaagccaagtgggggatcagagaggaatgcttcagaaactaaaaaacctgaaactcccattgtgactgaggtgggtcctatgcctgaggagagagtaattgaagaaattccaactgatgcaaagtctgttgagaaggtaacaaaggaagctgcatcaagcacagaagagaaaagccataatggggtggagaatgcacctaaggctgttgatgctggcactgagattcactaaaacctgaaatctgaatgagaaccatcaacaatttgaaacattggagagtttcagattgttcttgggttcatccctgccgaatcattgtgtgagatttcccaactccattttcctcgtgttatttttttaaatatttaaaacattgtagagtgtttgaagaatctatggtttattcttgtcgagtcatttttttttatttcccaactgtattttctatctgtattggtaggtccaattatagtttgtaaattgtaattttgttgtcttgtcaagtcacttttttttatcctatcattgcttatctgtattggtaggtcaaattcaccaatgtaaattgtaatttgtggatccctgatctgcgagggggaattccaaggacctcaatctttttttctttttttaatattaccgtcaagtaatttgtgcaaaaaaaaaaaaaaaa

SEQ ID NO: 4020 - DNA, 382 bp, Glycine max
  Clone ID: PAT_MRT3847_103635C.1
gggaaccgcccaaaaaaaaataatgccggcaaaagcattctccggccccgggggcgaacccggggtgggacccggaaatttcgaaccgtgccctacaggggaaccaattttccctagggggagccatattaaagctgggggaaccctggggcataccagcttcccgggtgaaagggtaacccgccaaccgtgccccaaaaaatacaacccggaggcataaaaggtaaagccgggggcccctaaagagggaccgaacccacataaattgcggaggccaaaatgcccgttttccagggggaaaaccggtccggccaccggccttaaggaatcggccaccgcccggagagaggcggctggctttttggcccccagggaggttttt

SEQ ID NO: 4021 - DNA, 370 bp, Glycine max
  unsure (1)..(370): unsure at all n locations
  Clone ID: PAT_MRT3847_103636C.1
accagcttgccaaatctctaaccctaggtgcagcggcggagatggcccccaagcgctcggctccacctccgccgcctccgcccccggctgcctcctccgaggagaccgcctctggttcgggctccgaggaggaggaggaggaggaggaggaggaggaggaggatttggagaccgcccactcaccgcctccggncgctcccaagagcgttgctccgctgccgcanaaggtccaggaacccgaagcgtccgacgaggatgagtatgacgatgaagatgacgagccgcacaaggtccaggaacccgaagcgtccgatgaggatgaagacgacgaagaggaggatatcgaagaggacgagaaggccaaccacgt

SEQ ID NO: 4022 - DNA, 737 bp, Glycine max
  unsure (1)..(737): unsure at all n locations
  Clone ID: PAT_MRT3847_103637C.1
ctcctcggacattcggctcgcgagaagatcaacgaggaggttcgggattgggttaatggctcaacaggtcggttttcaccggattattgtcggggggcggacggcctcgtttgggtgaggaaattctcgcgtggagatgaaaaggagtgtgattgttcggcacttgagcatgttttgtctacggtgcccggtgttaagagaatggtgatggggcacacgattcagactgtggggattaacggcgtttgcgacgacaaggcgattcggatcgacgtgggtttgtcgaaggggtgtggggacggtttgccggaggttttggagattagtggcagttctgggttaaggatattaacggggaatccgttgtatcagaataagggcaatgtggatgttgggaaggaacaagggcttggggaacacggtggacctaggcaagtggaagttaaggcttaagggatggatattcgattgtggataccgtcaatgatgttgtaagtggttaatttttagtcaatttgtctcgttgtagatgaaatgcgcattggttggttgagttctataatgtagattctagatttatgatgacgaataacatctattttgtgtggtaaattcggaaggggtatagggtgggatttggattnctctagatgcttatcaaaattgcaaagaggagtgcagttcctacatcatcaattagntcatttnttatatttaatcttcattgcttgcttgat

SEQ ID NO: 4023 - DNA, 430 bp, Glycine max
  Clone ID: PAT_MRT3847_103638C.1
tggcctggaacctttgggctgatttatgtgcttgcatggtcgtgagaagatgatagacgggggagagggaccggagccgggaagaacgagaacgtgttctggactccacctagtctaatctaggcacacacggccactttatttttcgcaaggttctttaggaccatataaccctctaaattccacgcctcgaagacgaaccccattaacaagcacgcgagcgtttaggcgacctatagtttaatcgtcatcgcagttctcctcgtaagtctgtaggagaaagtgccgagactaagtccggaaatcagctgtgacgcggtcgtagtcgtaaagaccgggaagacatcagtagaatgttgcccgtccaagaatacactcgtcgccctcgcctatccgtagagagagtataagcactacggacaggccaaag

SEQ ID NO: 4024 - DNA, 449 bp, Glycine max
  Clone ID: PAT_MRT3847_103639C.1
cggacgggtgccaatactacagaggggcctccacacccacctgctctcaactcaaagatgaatctggggtggctggggtagccatctactcccccaaactcagggaagggagttgtaaccatcgaggattggatcactttctttttccccttcaaatcattaatgatcaatgggctacattcacgcttcacctgcttgctgatagaaagataaatatctatcttgggaaaaacatgattaaagtttataaagcgttcagtgtcctcactgaaatctactttccactatgggcatatgttattgttaaggaactgttacatcccgctcactccttttaatgctttctacagatctttgatggaaagaatgaacattagttggagggagtgattataactaaaagaatgcttaatacatagaatataactataagattctatttgaaaact

SEQ ID NO: 4025 - DNA, 357 bp, Glycine max
  Clone ID: PAT_MRT3847_10363C.1
ttttctaggtccgaaattttggatactatttttgaagttggagtagccgttttttttgtcaaaaaaaaaaaaaaaaaaaaaaaaaaaaaaaaaaaaaaaaaaaaaaaaaaaaaaaaaaggaaggacgaaaaaaaggaaccaaacctaccgaacgcgagcatgcaacgaaatacctcttttttggggaaaccaaaatacaatcaacgggccggcgtttaacaacgtcgggccggggaaaacccgggcgggccccacctaaatggcctggcagaccatccccctttggccggctggcgtattagggaaggggccgcccccgatcgcccttcccaccagtggcgcaccctgaatggcgaa

SEQ ID NO: 4026 - DNA, 379 bp, Glycine max
  Clone ID: PAT_MRT3847_103640C.1
aaaaagaaaacagtttagatagcccattttcttttcacaaggaaaggaactggtcaacaactttacaaatcaggcccattactttaataagaggaatctttacccaacaaccccgaataaaaactttgtgtggaccctccccttcttccaactaaggctttggttttccccttacaaaaacaatttaagttttgaccatttcaggccaagttttcttaacttctttttgacatgtagacctttacaataaacaaaggcttttttgcctgaggaaataaaatccctcagtggcaacaaaaaatcaaaaggttttccttttttgatggattaactggagccattcaacaccccaagttttaatccaagttcaatttgaaac

SEQ ID NO: 4027 - DNA, 734 bp, Glycine max
  unsure (1)..(734): unsure at all n locations
  Clone ID: PAT_MRT3847_103641C.1
aaatgatacagggtcatctcaaacgagtggcagtcatcaccaaagggtgcttgttgttgcattggtacagatcacacattctctacacatcttatgaccgctactgggaatttcaattcaaaaaatatcctaggacaaggtggatttggtgttgtctacaaaggatgccttgcaaataaaatgttggtggcagtaaagaggctgaaagatcccaattacactggagaagttcagtttcaaacagaagttgagatgattggcttggctgtgcatcggaacctcttgcgtctttatggattttgcatgacaccagatgaaaggttgcttgtttatccttacatgcccaatggcagtgttgctgatcacttgagagagacttgttgtgaaaagccatcgttggactagaacaggagaatgcgtgttgcatgaacagtgcaatccaaaaataatccacagggatgttaaggctgcaaacattttgttagatgaaagttttgaagctgtggtgggggattttggtcttgctaagctcttggatcaaagggattcacatgtaactactgcagtgcggggtactgtagggcacattgccccagaatatctctcanctggacagtcttctgaaaaaacagatgttttttggatttggcatattcacttttggggcttataaccggacacaaagcactggatgctggaaagggcaggttcaaaagggaatgatccttgttggg

SEQ ID NO: 4028 - DNA, 1031 bp, Glycine max
  Clone ID: PAT_MRT3847_103642C.1
cttcactcgtatatagtacttccttgttattatacgtttgtttgcttagttaatgtttttctagtctacgcatgcagtttcttctaacatagatattaagagctgagctatatatatatatatttactgaaaagttcaatcgattaatttttgcgttgtagaagagctgaatgtttacatggtcctaaccagtcgttctcttcattcttcaagaaccatagaataataattagctaactacgactatgagcatgctgattagtctcttagtggttcaacaatgtatactcggtgcctggtatgtgatccttttaatttccattttcctcaaggaaagtgctgtactcttaatatatttagtttgcccttttttaaatcatagtattttaaaatcaaatgcaagactcatcttacatgttcctgacaacttatttgcagaaaacatgcgttgtcaaaagttttcgaggttggaacctactacagtaacggctgatgggagaagttgaggcaaaatcttacactttacagtgtgcaagatctgcttacccttggacaatgtcaaagtgacacttttgacattcttcaaacacggattcccagctgttgaacaattgaaagcagattgcatcacgagagttaatttcaaccatgttataattccgtacagattaaattatagttacctatattctttgggggtggttactggccggttagtgtatttcttgatcagaatgttcggtgaatctagtatgttatataattaatttgtctttgctctaccgaactcaagttgttgagttatttgcaaagtgcagacaggaaaatctggataccgtttaatttcttgttgtgactaaaaatattttaatgaaagacttaaaaaaaaaaaaaaaaaaaaaaaaaaaaaaaaaaaaaaaaaaaaaaaaaaaaggggagccgaccctgaaaattccaaacctagtaactcgtgagattccaatatattgcctattttatagtggaaccaaaactcagttcactgaccgtca

SEQ ID NO: 4029 - DNA, 878 bp, Glycine max
  Clone ID: PAT_MRT3847_103643C.1
gctcgaccacattttgacgaaattttcgggattaaagaactggcgttaaaaaatgccgcccagtgcttcaaaatgcgaaaacaatgaagcagcatttttcagaaggtgttcgacctttaacgccgtggcaaactgtatataaactgcaccttttttcgtccattttcttaccataaatattcaattcaatgcttcatcctcatctattgcctattgcattcgtacctccctttgttttcgctattgctgtgtctctcgaggattgtctcaattgagttggtgctgaatccgaggtttattttagctggtgtggaatcatttcaacattatctggaagaagactttcagatttttagtcaaatttaatacttaaagatggggttatacgagcatccagatgttgtgcagtggggtattaatctttttgacagtgaccctgcctatagtcctggatactacagtgacataattcaacatgatactggtgatgtctataatggacactactaccataaccattatgatactgaaagtaaccaaatacaaaatgatgagatcattgcacgggctcttcaagaagaattttcccggctagatattgctgagtgttcaggatattcacagacagatgaagaacagttccatgcttctgagcctacatatgattggaataatacatcgatgatgaactattgttcagggtcatgattatgcttacaacggagttggtgacatagaaccttctagttcatcatgttgcagtccctgtgagccagaggaaagctcattggagcttacagacaactatccacttgacgatgaaatagggaaggagattgagccagatgggtccgactcctcatggtccaaaaatcaat

SEQ ID NO: 4030 - DNA, 364 bp, Glycine max
  Clone ID: PAT_MRT3847_103644C.1
attcaatgcgggatcctcatctattgcctattgcattcgtacctccctttgttttcgctattgctgtgtctctcgaggattgtctcaattgagttggtgctgaatccgagagggttttgagcccttgcaccgcaggtcaaatttactgcctcttgacctggaaatcattggcctagatgtggaaacagcctctctgctcactcaatgggacgaaggctctctacatttggtttattttagctggtgtggaatcatttcaacattatctggaagaagactttcagatttttagtcaaatttaatacttaaagatggggttatacgagcatccagatgttgtgcagtggggtattaatctttttga

SEQ ID NO: 4031 - DNA, 876 bp, Glycine max
  Clone ID: PAT_MRT3847_103645C.1
caaaacaaaaaggttgggagtgacaacaataattttggtcacaaaaaccctaactggatcaacccaagggtttatcctaaccggaccgaactccttctttcctcacttggactttttctgactgtcagagtcagatacaaattctaactttaggattatggaggagccatcttctcttagctcggtggagaggaacgtccacatagcctctgttgtggaagccatggcggtggacactattctcgctgctgccaaatctctcatttgcttcttcattctgactggatctctgctgactgacgtcaatcattcagtgtccccaaaattgaccccaatggatggaagatttccttttgatgatctctgcaagggaaaacatacttaccttttaaacaaggatgctagtgattcagatgaagatggggatgaagaagaagatgatgatgacgcagatgatcaggatgatgaggaaggagatgaagacttctcaggtgaaggtgaggaagaggctgaccctgaggatgatcctgaggccaatggtgcaggaggaagtgacggtgacgacgatgatgatggtggtgatgacgacgacgacgatgacaatggggatgatgatggagaggatgaggaagagggtgaagatgaagatgaagaagacgaagaggatgttccacaaccacctgctaagaagaggaagtgaaattggtaatagttggtagtttcttttcctaccatgccctagccaatcttagttggaacatgaatatctttcaaatgggcccatctccacatatagaagttcaatttatgcattgtcgttgttatttcagttcattttccccaacattatttagtagtatgttgtgttagttaaaa

SEQ ID NO: 4032 - DNA, 988 bp, Glycine max
  Clone ID: PAT_MRT3847_103646C.1
ccacgcgtccgggattttgcccaaaaaaaaaaaagcttgtgagtgacaagaacaattttggtcagaaaaaccctaattggagcaacacaagggtttatcctaaccggaccgaattccttctttccccacttggactctctctctctctcactgtcagagtcagatactccaacccaactctatgactatggaggagctatcttctcttagctcggtggagaggaacattcacatagcctctgtcctggaagccatggcggtggacactattttcgccgctgccaaatctctcctttgcttctccattctgactggatctctgctgactgacatcaatcattcagtgtccccaaaattgaccccaatggatggaagatttgcttttgatgatctctgcaagggaaaacatacttatcgtttaaacaaggatgctagtgattcagatgaggacgaggatgaagaagacgatcatgacacaaatgatcagaatgatgaggaaggagatgaagacttctcaggtgaaggtgaggaagaggctgaccctgaggatgatcctgaggccaatggtgcaggaggaagtaatgatgatgatgatagtgatgaagatgatgatgacgacaacgatggtgatgatgatggagaagatgaggatgagaaagagggtgaagacgaagaagatgaagaggaggttccacaaccacctactaagaagaggaagtgaaattgtaatagttggtagggtctgttttttcttctaccatgtaatgtcctggccaatcttagttcttggaacatgaatactttcaagtggacccatctccacatataaaagttcaatttatgcattgtcgttgttatttcagttcattttccccaacattatttagtagtatgttgtgttagttaaaaaaaaaaaaatattattaaaccctaattgtaatataaaattaaaaaaatcaaaatataaagcttaatgaaaaaatgggcg

SEQ ID NO: 4033 - DNA, 238 bp, Glycine max
  Clone ID: PAT_MRT3847_103647C.1
agcgaataccctaatttgtttgccagagcctacctgggccgaccccgataacattcggagagatgctggactgcctaggaagacataccgttgctattaccctgagtctacaagatcggattattcaggactgatggacgacatacagaatgctccagatggttccttctttctgctgcatgcttgtgctcatactcctactggagtatatccttcagaacatcccaggagagagatc

SEQ ID NO: 4034 - DNA, 244 bp, Glycine max
  Clone ID: PAT_MRT3847_103648C.1
actatcattgaaccactcttttgggacacccgaatcaaaaacctgtaggggctgcacgaggcttagctttcttacactcctcagcacaagcacatcatatacatagatcttaaagcctcaaaatactactatacaaagcctgttataacacttacttctctctgagtatatgaagactttatgaattcagaccccccttttgggttttattatgaaccaaacgtttgcgatagtttaatttcat

SEQ ID NO: 4035 - DNA, 304 bp, Glycine max
  Clone ID: PAT_MRT3847_103649C.1
tctgggtattgcgaacttgagggtggaaacattattataaaatgaaaaggaagtgcgtcgccgtttgcattgaatcaaaaaaaaaaaaaaaaaaaaaaaaaaaaaaaaaaaaaaaaaaaaaaaaaaaaaaaaaaaaaaaaaaaaaaagaaaaccttataaaagggagggcgggcccctttacggggtccctactttccttcccgcttgcttttctctgttcctattttttttatggggtgcccctaaatttattcccctgggccaccctttttaaacccgtggggtttcgcaatttccttgggt

SEQ ID NO: 4036 - DNA, 1691 bp, Glycine max
  Clone ID: PAT_MRT3847_10364C.1
cctagatctatcatcatggtcatggagcttcacaaccacacccctttctctatttacttcattacctccattctctttattttcttcgtgttcttcaaattagttcaaagatcggattccaaaacctcctctacctgcaaattgcccccaggaccaaggacactacctctcataggaaacatacaccagattgttggctcactgccggttcattactacttaaaaaatttggcagataattatgggccgctaatgcatctaaaactaggagaggtatctaacatcatagtcacttcacaagaaatggcacaagagattatgaagacacgcgatctcaacttctctgataggccaaaccttgtatcatctagaatagtttcttacaacggttctagcattgtcttcagtcaacatggagactattggaggcaactaagaaagatatgcacagtagagttactaacagcaaagcgcgtgcagtcttttcggtccataagagaagaggaggtggcagaactagttaaaaaaatagctgcaactgcaagtgaagaaggggggtccatttttaatctcacccagagcatttactcaatgacttttgggatagcggcacgagcggcttttggtaaaaagagcagataccaacaagtgttcatatcaaacatgcataaacaattgatgcttctgggagggttttctgttgctgatctctatccttctagtagagtgtttcaaatgatgggggcgacggggaaacttgaaaaagtgcatagagtgacagatagggtgttgcaagacatcatcgacgagcacaaaaatagaaacagaagcagcgaggagcgtgaagcagtggaagatctagttgatgttcttctcaagtttcaaaaggaatcggaatttcgcttgactgatgacaacattaaagccgtcatccaggacatattcattggtggaggcgaaacatcatcttctgttgtggaatgggggatgtcagaattgataagaaacccgagggtgatggaagaagcacaagcagaggtgagaagagtgtatgatagcaagggatatgtggatgagacagaattgcaccaattgatatacttaaagtccatcatcaaagaaaccatgaggttacatccacctgtgccattgttagttcctagagtaagtagagaaaggtgccaaatcaatggatatgagataccctctaagactagggtcattatcaatgcttgggcaattggaaggaatcctaagtattgggctgaagctgagagttttaaacccgagaggtttcttaatagctccattgattttaggggcacagactttgaatttatcccatttggtgctggaaggaggatatgcccaggcattacatttgccatacccaacattgagttgccacttgctcagttgctttaccactttgattggaagcttcccaacaaaatgaacattgaagaacttgacatgaaggagtcaaatggaattactttaagaagggaaaatgacctctgcttaattcccattgctcgtcaaccttaaaatgtatgaacaattaatgtcataaactatttaagttttatcttttactacttccagcattttgtaattggacaatgactatgattaacttaagttacttccttatgattaacttgacatatgaatgaacatttctaagataa

SEQ ID NO: 4037 - DNA, 345 bp, Glycine max
  unsure (1)..(345): unsure at all n locations
  Clone ID: PAT_MRT3847_103650C.1
acaattactactttctctctctttgtaacttgtaagcatggagtcctcaaagatctatgcttacctcttcctttgcatgctcttcctctcctccgccactcccattctcggttgtggctactgtngcaaaccccccaaaaagcacaagcctggnnaaacaccaaagacaccacagtaaccgtgttaagccacagtcacaatcctcccattgtaagccacagtcacaatcctccatgtatcacagtcaaatcctccatgtaatcacagtcaaatcctccatgttatcnacagtgacnttccaccgtgtgttccacatntgagcccgggttctcctccatcttaacc

SEQ ID NO: 4038 - DNA, 387 bp, Glycine max
  Clone ID: PAT_MRT3847_103651C.1
atctatatctattaccaactgcgggctaacctcatatcaacatatggtgttgattgatataaacatcacgacggaggggatggagatcaatacccattacagtgtgcgtaacccctctcctgactattcatctcaccccgaaacctgatggtactctatctcgcctcctatactgggaccaaggtgcatggaccaggccataatgagtactatgtcgcggtggatagtgcaaaacgccagggggccagcccgagccgacggataagcctctgatgtttgctgaagcgccaaatctgcactggtctgctaacaaagacctagagggaaaaggttacctattatcgtgactagcccatggaatgggagatcctaaggcacaggggaagc

SEQ ID NO: 4039 - DNA, 394 bp, Glycine max
  Clone ID: PAT_MRT3847_103652C.1
gaattcggcacgaggttcctcttcatacgattattgagatacagatgggagtcacgggtgtccaagagaaaagatataaactaatggactgaaatgaattgaagaaaagttctctttctaataccatactgatactatggcctacaaaccaattatccattcttctgattttaatttattggcaaaatgtaatattcccgtaaatggactacattgtttaaaattaccataatgaagggaagctacgctcttcaaattcaatattatttcatttcaagtgtaaatgaggtatcttacataaatattatatttcatcaatagctaatacacattcctaggctaaatattacctgtttaagctcttgattggaattgaaaaaagaatgcttcccat

SEQ ID NO: 4040 - DNA, 522 bp, Glycine max
  unsure (1)..(522): unsure at all n locations
  Clone ID: PAT_MRT3847_103653C.1
ngcangnnnngnagnangnannnggnnngnngcaggataactgcgattctgattttttttatattgtttatataatttttactatatacatataaattctcaaaaacgataaaaattacttaaaattcatgacattcagaagattcattggaaggtcacacagtcgacgacgaagagtcacacgggtcatgctatagtcacaaggtaggagaggagagttatgaacttttaaagggttttctacaagctgaaacccttttttttttaatccaaaatcaccccattagttttctcctctaacgttaatattggaggccattctcaagattttggacaccatcagcattgctgtccaaatccagaaatagtcttttggtttgcacagggtaatttgtgtaattttatccttcctatattggatatactatataccccatcagatgagtctcgtacctagatggccctttggctttttctcaagtgtcaaatctattaataaaccagggaaagagagatttgttt

SEQ ID NO: 4041 - DNA, 135 bp, Glycine max
  Clone ID: PAT_MRT3847_103654C.1
gctacacaaaggcatattttgttaacacactattatataccaaccatatatcaattcgacttttgaagggcctaaaaaaaaaccacttgcatagattctgcctcaatgatcaatcttcctaataaacctaaattt

SEQ ID NO: 4042 - DNA, 318 bp, Glycine max
  Clone ID: PAT_MRT3847_103655C.1
tccccacttcttttatctgtttcacaccgtgtaccaccatatctccaccgcacgcaaccgcgccgtgttgtcgtcacctacctatccactatgctgctgccactgaccaaggcttctgcattttcatacatctccgcactggtttttgagaccaacgaactgaggagaacgcgtggtgtgaaggtcgtagctgaccatccttgaagacggtgagcactgagacttgttggcgcggagaagccgtggaaaactttatttattgagtcatttattctgctagacaggagatcgaaagacaaaaatcctaataacatggag

SEQ ID NO: 4043 - DNA, 502 bp, Glycine max
  unsure (1)..(502): unsure at all n locations
  Clone ID: PAT_MRT3847_103656C.1
tgcaactctttcctctctctcattcactctcacttttcatttctctttttttattctttgcttcactnccctttgtcatggtttattctccaatttgcaacagtgancttcattactccttaatttaaaatcattattccaatttattcatttcccccattttctactaatattaactttatttctaatttttttcctaattacatacttgattcttattatcaatttctttaataaccaatttattatttccattttccttcattcaattacttttataaacatcatacttccatttattcatactaattttttcctttttttatttacttaccttttcttatataatttatctttattttcttcttctattttctttattttttttttccatcctttattatactcccatcttttttttcattattttttacttcattattactttcttttttcttttttttttaaaatttttttttcttttatttttattctaattttt

SEQ ID NO: 4044 - DNA, 265 bp, Glycine max
  unsure (1)..(265): unsure at all n locations
  Clone ID: PAT_MRT3847_103657C.1
gtaccatcaaagatgcaaagtcttgaatgcttgtaatgtttgatgtgaagtgaaagcctgatgaaaatatgaacttgtgttcaattaaaatgggaactacatgatgaaaaacatctgaagacagtacttagacagatgcaatttgtgactgaatttcattgttagattttagggagaagacttgggaggtagttgaatgtcaagtatattgttgtgtntttnttataagatgaaggttatctagtttccctattcctgacatgca

SEQ ID NO: 4045 - DNA, 822 bp, Glycine max
  Clone ID: PAT_MRT3847_103658C.1
atgccaaagaagaagaacaaaaggataaagaacattggacacaaacccacagtccctagaacgaagaaggagaaggaaccgacaaagggtggtccttcaggcagaagaaaacgggttacatgttctcccttacctcctactactccaaagggaactccttggttttctgaagaacactatgaggcttcttacaagttcagttatgcgaagaaggagatgattcaaccaaaatatgtcaatttagtgtggcttagaagtgaaggatttccttttcttgagttgattgagcatcacgggttaaagaagctggtggagatgaagggcacctactacactgacctagtaaaagttttctataccacaactcatattgatggtgatactgagttcttgtgtgttgaagtgaaagggcaacaaattgtgatgacaccaaaggtttggtttggcattgttgggttatcgtcaaaaggagttatggcgaatcaactgggtctcaaggaagctagattttctttcaacaaggttgagaagtacaagtctatgatgaataatccttctacctatgatgttgttgttacaaaatcaaagggaaaggaatgctttggtaccagacccctgatgcttcagcataggcttttggcgtatgttgttgcttggattattactccaagggggagaaatcatgctcaattgattgaggaggatcttctccttatcagtcttatgcaaggaaagttgaagattaactgggtcaacattatttttgatatcatgttgaagacaaaaaggattggctttttcaaatatccttatgcaattctg

SEQ ID NO: 4046 - DNA, 583 bp, Glycine max
  Clone ID: PAT_MRT3847_103659C.1
cgccaagcaactgctgatctactccggcgagtccaacatgaagcgcgtctggctcgaagccggcggcaagagcccgaacatcgtctttgccgatgctccggacctgcaggccgccgccgaatccgcggccagcgccattgccttcaaccagggcgaagtctgcaccgccggttcgcgcctgctggtggagcgttcgatcaaggaccgcttcctgccgctggtgatcgaagcgctgaaggcctggaagccgggcaacccgctggacccggagaccaatgtcggtgccctggtggatacccagcagatgaacaccgtgctgtcgtatatcgaatcgggtcatgccgatggcgccaagctggtggccggtggcaagcggaccctgcaggaaaccggtggtacctacgtcgaaccgaccatctttgatggcgtgagcaacgcgatgaagatcgcccaggaagaaatcttcggcccggtgctgtcggtgattgccttccacagcgtggaagaggcgatcagcattgccaacgacacgccctatggcctggcggcagcggtctggaccgcgaacatctcccaggcgcac

SEQ ID NO: 4047 - DNA, 225 bp, Glycine max
  Clone ID: PAT_MRT3847_10365C.1
aacacaaattcggggttttatcaaaaaaacccaacataaacaagagggttgattgacaggtcacctaatcacaaacagttcaaactaaactttataatggagttttggggggggggatgtctcatttcccaatatagatgacaaaaggaaatgaaaaaagatagttttgatttatccagcggacggttgacattaattggctcccagggtaaagatctccacctc

SEQ ID NO: 4048 - DNA, 359 bp, Glycine max
  Clone ID: PAT_MRT3847_103660C.1
gaaacgaagcctgttaatttcttcctacttggcaaactataggaagagccacacggtatcttataccataggtcaccatgatccttccattaaacgttgctatagaccgatccaaatgcatatgatatacactttcatgaatggctagctttatatactgaacctcatgccccgatgacaaacttttaagacacatacatatttgctggatttctcggcatagaccagatagagcatgtaattccaaattaacccataataacacttccgcttgctcaccatacatatattattgacgacggagatgccaatatccaagccttatctaacggataatatggtgaaagcttcaactggtc

SEQ ID NO: 4049 - DNA, 619 bp, Glycine max
  unsure (1)..(619): unsure at all n locations
  Clone ID: PAT_MRT3847_103661C.1
gagaattttctccacttctccccgtttgggggcttttgcgaggctgtgcacgccatgctctccaactacaccaacggcgtgcacaagatggaggacgaagggggcagagagagagcgacccattgatgtcttccggcaacacaggggacgcacacatgaagacatctttgccaaacatgggttagttcgccgtgggacagtggtggtggcgctcgcgattatggtggtcggaggcgttgtggattagatctggtcacctcagaatctgcagattcccacaagcggcaatcccgcggagaatgttgtcgctgtagcgctgcagttggagttcctacaaagtggagcacttttaggcgatgaccgaggtgaggccattgtcgacttctcgatcacttccaaggggagcatgtcctggcagaagcaccaaaaagggagaagcagagaaagttttagtaggtcatcatggaccattagattgttttgatttttttttttttacgttaattgattctagcaatttttaattgcaaaaaaaaaattgtatttgattttgaaataattacttatcatttttaaatcccccgggggaaactnttnggaaaggatccggaataacaag

SEQ ID NO: 4050 - DNA, 834 bp, Glycine max
  unsure (1)..(834): unsure at all n locations
  Clone ID: PAT_MRT3847_103662C.1
acgagcccagtacctgctgctgccaccggtgatgtttctgcaatggctttcatggacaacaacaacgaggattgcaacgatgatatcaacatcaattattactccgacgatgttttttcttccttcctncaactctttgatcaacgatgatgcttttgcggcgcaacagcatcacgtgcaaacggaaatccccacacccagtgaggcgtagcatcatgaatccacttccatgtgatgatcgtgttggtggtcatctgggttcaatcgccactgcttctgcagcgcaaggttacgatgatgaacttggggttctgtgggaatcgccactcgtgaatgctgctactttcagccaacacgttgacgatcacatcaccaagagggttcatgatcaccacaatcaatagtatctaatactgttgttattagttaactgctgcatcaaagggttcaagaatacttgtgttgttgtctatcctgctgtgaaaagatggagagagttagtaagaaggacattaaagaaagttgtcaagaaagatcttacattaaataatattcttgaagctagctatggtctttaaccgagatgaataacgtctaataattcatatagtcgaccttacttaatggaataattaagcttttcgttgttgtaattgtgttgttgtggtgcttccatatataagttattgttgcttttgttgtgttgaaattttagtattggacttggtgagtttggtgtgcttaatttcatgtcatgcatgtttgcctctagctagctttctgcccttgatctattcaacacaagacagattntcatnnattaatgtcctataa

SEQ ID NO: 4051 - DNA, 305 bp, Glycine max
  Clone ID: PAT_MRT3847_103663C.1
acgctctcacgttactgatcgtctattcggcaaacctagctatagtattggagccgatcctacggggaggaggaacccgagcacttccagtgacgttggagacaagataactagtgaaggcaggtgtgacgatgaatgagactatctcatgaaacatacgaccaacttggtttaagattaaacactacattatcaatctgcataatcatgactacacacaaagatcatcaacaacatgactatgaacaacaccaagaatactaacaggaacatgcttaaccaaggagctgcaacagtaactgaat

SEQ ID NO: 4052 - DNA, 295 bp, Glycine max
  Clone ID: PAT_MRT3847_103664C.1
acgatcactcgtgggttatagcaacgcttttattatcattagcatacattttgcaacactgtgctgtatcctatatcaaccgctctcaaacaaaccgaacactcttactatttctatctcatttcatttattaaacaaaaccatatttcaacaacatacttcgtacaccctctatagcactggagttgtacctctgatttctctaactctatcatagattgagaaacatgaacaatattcacgactacgattataagagactgggtcttttcaacttttaataatggccgtggaa

SEQ ID NO: 4053 - DNA, 381 bp, Glycine max
  Clone ID: PAT_MRT3847_103665C.1
actatgatattacagaacacgggcgcaattaattgcaactgattagcccatgtcattaaacagatactatagcgtgggtaccttaagtcacctgctacattgaaagtgatcaacctggaaaccttgcatcacgagttttcatcttgccggggggactctgatgaaggagaggcctttaccccccttttttgcaaacattttttccattctgaggggattaacatttgtttgaaactactccaagttggccccagaagcagaaccctgggttctgcttactggggcaaccttgtggatgacctaacaaatgttcttgccctcaaaatggaaaaaatttttgccaaaaagaagggtaaaagaccttactttaatataattccc

SEQ ID NO: 4054 - DNA, 129 bp, Glycine max
  Clone ID: PAT_MRT3847_103666C.1
ggtcagggagcgggttttcttcttccacccttctaattcagtcttctctgaagctatcagtacttgcttttcatgaatttgcaaccagaggctagagttgctcctattcagtatctcctgtgcttcaaa

SEQ ID NO: 4055 - DNA, 1017 bp, Glycine max
  Clone ID: PAT_MRT3847_103667C.1
gaaaaatcttttaacttgaaatacgatgaaattcatactggttctcatttaagtggttcccagaaatccaaggctactgacgaggtgaagaaatccattgttaaaggtaagcggtcatctgtttctacagcacattcaagacaactaaaaggggtgaaatcgttaggaaatctgtcttcaagcgctaatgacaaaggggaaaaggatgattcatctttttcgctgatgaaggtttcctcaactaatcaaggtggtccattaaacagaggaaagccaagaagaaagatggaaaaaccaaaaccaatggtacaacaagatttggtggtgtccagaaatatttttagcagtcaacataagaaatccattgcctcactccaagatggctcttatagtcaaaagggaaagcttatcaattgcctgtcttcatatcaaatgcggcgatggtgcactttggagtggttttatagtgctatcgattacccatggttttcaaagagagaatttgtggagtacttagaccatgttggattgggtcatgttcctagattgactcgtattgagtggggtgtcattagaagttctcttggcagaccacgaagattttcagagcaatttttgatagaagaaaaaaataaacttaatcaataccgggaatctgttagatcacattatgctgaaattctttctggtaccaaggaaggacttcctactgatttggcccagccgttaattgttgggcagcgtgttattgctattcatccaaagacgagagagattcacgatggaagtgtattaactgttgaccactgtaggtatagggttcagtttgaccagcctgaacttggggttgaatttgtcatggatattgactgcatgcctctgtatccatttgaaaatatgcctacgtctctgatacaacacaatatctcttctgctcaaatgaagttgttattatttgagctcttgaagccaagaaaactgggtgaataggcatttgctgtatataacatgtatttg

SEQ ID NO: 4056 - DNA, 171 bp, Glycine max
  Clone ID: PAT_MRT3847_103668C.1
gtccatatttgtatgcaatggtgcatgatagttcagtgtctacaaatatggacaccgagccgcctaccgtgctgttgcccgacgcacctgatttgtccaagctgtgagaactttgttggctgatgggtgttcatatttggttgccctggactatgattgttcaacgtgtac

SEQ ID NO: 4057 - DNA, 266 bp, Glycine max
  unsure (1)..(266): unsure at all n locations
  Clone ID: PAT_MRT3847_103669C.1
tgagcatatacataactattgcgagcttttgagtttgattaaactataancaaaaactnccagtatattcaaatacccttttgttttgtgtacaaaatgtgtcccctaacacccagtgacttgaagcggattttcaacnaggtggacatgaatggcgatgggttattgagccttgaggagctgaagatgctgctggagnagacagggttcagttacagcattgaggaattggagtctctagtgggaaagaagagccttgacttcag

SEQ ID NO: 4058 - DNA, 309 bp, Glycine max
  unsure (1)..(309): unsure at all n locations
  Clone ID: PAT_MRT3847_10366C.1
aacggggactgccagcttgtggagttattatgttatctngaatatttttgtatttagaatnctncataccacggtattctagactatataataggcaaacttttttttttatatattcataattttattcaactaatctcttctggctttccaactattgcacctgtgcattgcaagataaacaatgcaggtttttggcatgaacctaggaatgaacatccatattctccttgttccgatgatggaggggttaaatgcaaatgtccctcatcttttaaaggtcattgtgtaaaaaattttaaaaacatt

SEQ ID NO: 4059 - DNA, 652 bp, Glycine max
  unsure (1)..(652): unsure at all n locations
  Clone ID: PAT_MRT3847_103670C.1
actcaattcagccaacttttcagatattttcactgctcaacttaagactaagcatgagccgcaacttgtttgaaaatgggtgaagtgccggctgtattcgatgcagacgacgcaaggggaacagagcaacaatgcctccgctgttcattgggagcgctttctgcctcggatggtgcttcgggtcttgcttgtcgaagctgatgattctactcgacagatcattgctgcacttctccgtaaatgcggttacaaagtgatgtcttctcatgattcagtaagcatggtgtttaaatgcatgttaaaaggtgcagctgattttcttataaaacctgttcgcaagaatgagctaagaaacttgtggcagcatgtatggagaagacacgccataagcaggcctcctcaaaatttaacactgccggagattgaacttggttttgctgcagaaaaccatgctgcaagcaatgactctagtggttctgtggcttctacaccaaaagatgatgaatgcagtgagaaaacangtgaggctcatgatatattgcagctgaagagctcttcaaatctgagcaatattgacacagtgaagcatgaaaactctaccaaatgtgaaagggagtcagactagcataatgatgaagcttgagagaaatca

SEQ ID NO: 4060 - DNA, 810 bp, Glycine max
  Clone ID: PAT_MRT3847_103673C.1
actccaatgcccaactcgcgagtgagtccacgctcccaatccttgacattactcttctctccaaagtgattatgaacaaaagactctcttttctctcccacaacgaaaaatcaaagatgaaagattcaacagaaacagatgctatcagcgattcccttgagcttctgagtacctttctggactcggagctcccaagcgtgagaaacttcaaagggaaatggtcactcgcccgagtcaaactcacccaactccaaacccacctcaccgatttctccgccgagttccccaacgcctccaccacaaaccccctctccctccacctcctccactcaatcttcaaaaccctaaacgacgccgtttcgctctcccgctcatgccaaccccaaaccctcccaaacggaaaactcaaaacccaaagcgacctcgactccctcctcgccaccctcgaccgccacgtcagcgactgcgacattctcttccgcagcggcctcctcctcgaaaacgacgccgtttccgtttccgtttccgtttcatcgaaacgcgaagccatccgctccgaatcacgtaacctaataacccgtcttcaaatcgggtcgcccgagtccaaagcctccgccatggactccttactgggccttctccaagaagacgacaaaaacgtgaccatcgcggtggcccagggaagtcgttcccgtgctcgtgcgcctactcgattcccccccctcgaccaaaagagaaaccgtcgctgccatctcaaaagtctccaccgtggaaagcgcgaagagcgtgcttctcgcggaaggcttgctc

SEQ ID NO: 4061 - DNA, 2071 bp, Glycine max
  Clone ID: PAT_MRT3847_103674C.1
ccacgcgtccgctcgcgagtgtagtccacgctcccaatccttgacattactcttctctccaaagtgattatgaacaaaagactctcttttctctcccacaacgcgcgaaaaatcaaagatgaaagattcaacagaaacagatgctatcagcggttccctgaacctcctgagtactcttctcgactcggagctcccgagcgtgagaaacttcaaaggaaaatggtcactcgcccgagtcaaactcacccaactccaaacccacctcaccgatttctccgccgagttcccaaacgcctccacatcgaaccccctctccctccacctcctccactcaatctcccaaaccctcaacgacgccgtttcgctctccaaaacatgccaacccgaaaccctcccaaacggaaaactcaaaacccaaagcgacctggattccctcctcgccaccctcgaccgccacgtcagcgactgcgacatcctcttccgcagcggccttctcctcgaaaatagcgtctccgtttccgtctctaaacgcgaagccatccgctccgaatcgcgtagcctaataacccgtctccaaatcgggtcacccgaatccaaagcctccgcgatggactccttattggggcttctccaagaagacgacaaaaacgtgaccatcgcggtggcgcagggagtcgttcccgtgctcgtgcgtctactcgattcctccccatccgaaacgaaagagaaaaccgtcgccgccatctcaaaaatctccaccgtggaaagcgcgaaaagcgttcttctcgctgagggtttactccttctgaaccacttgcttagggttttggattctggaagtggcttcgctattgagaaagcatgcatcgcgcttcgggcgttgagtttgacgaaggagaacgctagggcgattggctcgcgcggcggaatctcgtcgctgctcgagatctgccaggctggcacccccggcgcacaggcttccgccgccgctgtgctgcgaaacctcgccgcgtttgaggaaattagggttaattttgttgaggagaacgcggtggtggttctgattgccttggcttcctccgggacagcggtggcgcgtgagaatgcggtcggttgtttgtcgaatttgactaattcgggttcgtcggaggaggccgatggtttgttgaatttgagggttatggtggtgaaagaaggtggagttgagtgtttgaagaattactgggattcagggaatcaaattcagagtcttgaagtggctgtggagatgctgcggcatttggctgaaagtgatccaattggtgaggttcttgtgggtgaaggttttgttcagaggcttgttggggtgctgaattgtgaggttctggctgttcggattgcggcggtgagggcggtttacgccttaggattgaacagcgggagggcgaggaaggagatgggggaattggggtgtgttctgggtttgattaaaatgttagatgggaaaggtgtggaagagaaagaagcttctgcgatggcattgtcagtgctgctgatgcacccggcgaatcgaagaattttccgcaaggacgaaagaggagttgtgagtgctgttcatttgttgaacccttcgttgcaggggttggataagaagtaccctgtttcgttactcgctttgcttgttcattccaagagttgcaggaagcaaatggtggctgctggagcttgtgtacatacgcagaagcttgtggaaatggatgttcccgggtccaagaaactcttggagagtcttggccgtggtaagatttggggtgtttttgctagaccctagagatgatgatcttggatttctgttacatgaaaaccatgattattcattgatctgtatgcatgataggcgtgttcaggttttttgtcttcttctttttctcttgtaattattgattaataattggtgtttgtatgtagagaggtacgttttttttttccctaatgattttatctgaggacttgtgtttatgtttaggaacaatgatataaagtagtacatgattttgcgatcggtggtagagtacgacctatccacttagct

SEQ ID NO: 4062 - DNA, 355 bp, Glycine max
  Clone ID: PAT_MRT3847_103675C.1
tttaacgcggtcataatatgaccatgtccacgggtacggaaaaaactggtgctgacaatgcaatattattaaagagagcagatatgagatgttaataaataatgaaaccttaaacaaagtgtctgatggtgatgctgaaagtacttactgacagggagtgtattagggcacaacattatattatgtttctaagtattagtgctgggaatgaaaaaagctgataaagaccacttatggaacaggaagaaagaattgtattttaacgcaagaattgaagatctgcaatggtgaatgaaaattgtatgtcttattgaacggctgtaaaaagctgagctgtctaccatattcacagatt

SEQ ID NO: 4063 - DNA, 377 bp, Glycine max
  Clone ID: PAT_MRT3847_103676C.1
aaaaaaaataaaaaaaaaaaaaaaaaaaaaaaaaaggggaaaaaaaaaaaaaaaaaaaaaaaaaaaaaaaaaaaaaaaaaaaaaaaaaaaaaaaaaaaaaaaaaaaaaaaaaaaaaaaaaaaaaaaaaaaaaaaaggggggcccccccctttgtgggctcttcaccccggaaataaattccggcccggtccctgaaggctacccagttttccttttagggggtctttttaaactttggcgaaaaaatggcaaaagctttttcctggggaaaatttttttccgttaaaaattccaaaaaaaatacgacccgaaagcataaagtgaaaaccctggggtccctaatggggggcctaccccacattaattgggtggccctc

SEQ ID NO: 4064 - DNA, 473 bp, Glycine max
  Clone ID: PAT_MRT3847_103677C.1
gaatataactgcattggctcaagcgcccatacaacacattgctcccttccatgcggagttctactagatgggaggacagggtttgctcataacctttgatgggcgtaggcgactatcatgctaactggtggtcctttctcaaggttccctctctgaagaaaaaaactttctcctaccctacccgaaccatgtgtaagtgtgcaccttcctgataaattctttcagtctaaatgctactggacgaacataccccagcttattgagctctaacacctcgattgcggagaatctttcatgagtgattcgcaagattggaatcttatatacccacttgtgcactaccaatcgaatgatctatatctatatgtctatatctctccctctgtgtatatattcgtgcaccatactagagccatctgtatagatcttttcttttatatgcatactgcctgttgctcacattgatgctagac

SEQ ID NO: 4065 - DNA, 293 bp, Glycine max
  unsure (1)..(293): unsure at all n locations
  Clone ID: PAT_MRT3847_103678C.1
acggctgcaaaacaacaaaaatttataattgacaaaaaaaaaaacaaaaaccgaaaaatgtgaaattttaaaacacaanccccccncaaaaactaaatacaagacacaaaatgccgtttatacgcctttcaactttattgaataaactttcatcaaatgaaaccctttcttctatctataatgcaaccattgacgcattttaccctctttcaaacaatgctctaatgtatataacataaatagccatacctctaaccttacccaaatccatacacaaatatcttataaaaatt

SEQ ID NO: 4066 - DNA, 548 bp, Glycine max
  Clone ID: PAT_MRT3847_103679C.1
ggctcgagctctccctctctcaacttgttcagtttgcaaaacagtttgacttgacttgctattatccattccatctccaacttcatctacttcttcatagccatatatagttttaattttaacgcgttttttaattagccaaacgaatcttcttataaaccctcaaacctcttgggttgttcgcattccgacaaacaaatacgtagatttgaaggaacgaaggaccggccgttttgtttattaagaataagaatttgttggtttgcaacgaaacaggacaaggttggtcttaagcttagatctttgtttggaaatggcgagagggagcagatcagtgactagcagcagcaaatggaggtactgcaacccctcctattacctgaagcgcccaaagcgtcttgctctgctcttcatcgttttcgtgggcgtctctttcattgtctgggaccgtcaaactctcgtcagagagcaccaggttgaaatttctgagctgcggaaagaagtgactggtttgcaaaatttgttggacgatttaaataacaaacaag

SEQ ID NO: 4067 - DNA, 140 bp, Glycine max
  Clone ID: PAT_MRT3847_10367C.1
aaaagacctccgaaaggtacttctttctctttaccacactaattcttcggtgtgaaaatcaggatacaatcctccttatcatggaatccaacctacaacctctcatattacatccataagcctctcatgtattccataac

SEQ ID NO: 4068 - DNA, 349 bp, Glycine max
  Clone ID: PAT_MRT3847_103680C.1
cagattatgagggatatgatccttttgttggtggagggcaaaaatatgccactcccatggtgcccctagatgaagaaattctttctaaggttgcacaacacatggatgaggaacggtttgattgtgctgatgaggaggattcctttgcgtatgattgtttaagggcaccacttagtggtgtagagggattggtctatctggacagacttcctcatgccacatgagagggtattgctcatgagctttcacgcaaacattgcgaaaatggtttaccgagattcgattctggggaatgtgaaaaaaatacattgtttccgatagccaagagtgaaaaatttttcaacaagct

SEQ ID NO: 4069 - DNA, 302 bp, Glycine max
  Clone ID: PAT_MRT3847_103681C.1
ccacgcgtccgcaaggatggttataattctagtgtagagtctttttgtcatgggacaaatgctgtggtggttgctggaggtgtggagaaagggacccctttgaccgagaagaatggagaaattaaatctggtggcaaggttgggaccatggataacaagagtttagcatctcctgaggagaggaaagatactattacaaatcatcaatctgatggtattttgaagggctctgggaattctcaaggatctctgtccacctctgaatgtgaagctgtgggtgtaaatgaagaatgtgtatcaaa

SEQ ID NO: 4070 - DNA, 297 bp, Glycine max
  Clone ID: PAT_MRT3847_103682C.1
ccaaatgtgagtcacgcagctcttcactttgaagactgtagacggtggcgtttagggtttcggaagagcatgcaattgaacccaaatggcgacggctgaagatgctccagtgctccctgaggacctcatagtggaaattctgtcatggggtgaagtgaagaatctcatgcgattcaggtgcgtttccaagtcctggaattccctcatcttcaatcccacattcattaaattgcaccttcaaaggtcctcccaaaacatccacattcctgttaacatttgaccaagattcatcgaacc

SEQ ID NO: 4071 - DNA, 1668 bp, Glycine max
  unsure (1)..(1668): unsure at all n locations
  Clone ID: PAT_MRT3847_103683C.1
gcctgccaccttcacttttcttcatagcactcaaaaacaactcacctcatcgttattcactttctctcaccacattctaaacagacagtagtagcaccatcatccccaataatggcatcatccccaacctttgctttgagaaccatctcctctttctctgtgaaacctgttaccaccacaagatcatcactcaccacctcatccaccacaaccctcttaccatttacttcaacaaactcatctctccccagaactctcaaactcaacacctcttccccacatcctcacctttcactaccccacaagtctttcacttgtagaagccaggctgagccatcttctgattcagccaaagtccaagaactgagtgtgtatgagatcaatgagagagatcgtggaagccctgcttatcttagattgagccagaaaactgtcaattcccttggtgatctagtccccttcagcaacaagttgtattctggatgtttgcaaaagagggtggggataacagctggaatctgtgtcttgatccaaaacaaagccgagaagaagggagataggtatgaggcaatctacagcttctactttggggactacggtcacatttcagtgcagggttcatacctgacctatgaggacacttatcttgctgtgactggtggatctggcatctttgaaggggcttatggtcaggtcaagctgcatcaaattgtgttcccctttaaactattctacacattttatcttaagggcatcaaggacttgcctcaggagcttctttcccagcctgttgagcccagcccagctattgagcccagcccatctgccaaggcctgtgaaccacatgctgttattgctggctttactgactgaggaacaatgaggatcgacatttttcttttgtttcttttttaaggaagaaactcggatacagtttcttaggtgttcttcgtgttgttttctggttagaattagagttttatttcgacaatttacataataaaagttttcattaaaggattattcggattgccgaagtgaattgaaacttcattttgattggagaacagcagaaattagaaagtgttaagttttctcctgttatttttttttttttaattctcttcattgttgacttagtttggagacccttgcaacaagttcacaatttaaccacctgttacttgtgttgaaatttatttatgtagtaaatgtgggtcaagatgtctcaggtagtagaagagttttttgttgttcaataatgaaagtgacaagagaggttgggttttgtagtggtggagagatgggagtttatagaagccattactgtattttagtggtggtaggccacatattcaagatagtggtggtaggccacatattcaagatagtgttgcacgagcaattattgttgagcttactgaattacatggcttaattttatgaaagatctcgtgaattttttagtttgtcttggcctcnttagacttgtttttttatgacacattgaatgccnagtagtttggtatgtgagaatattgtcattagttaattaatatctaaatatatcataaatgctaatgtgtaaaaccgaagtactaatatcaantactaccacactactatatatactcaattttttttatatataaactcatttcattcaaa

SEQ ID NO: 4072 - DNA, 416 bp, Glycine max
  Clone ID: PAT_MRT3847_103684C.1
ggggtcagaggtcttagatccagttgcatctatcaaatctaaggcagtctctgtgaaacatgaactgaaggtaggggatgatgaggatgatgatggtgttcctagtgtcccagagaataaagaaatcagcaatgtcaggtgataaatcatcttccatgaagaaggtgctgacaaaggtgtactaaagttaataagcctggttcaaaaccttttaagaaacagataaagaagacagttaaaaaatcaggcagtgggttcagaatattctaaatcttcaaaaattcttcctagctctggtgatgggcagaaaaaatggactactttggttcacaatggtgtcattttccctcctccataccagccgcatggggtaaagatgttatataaggggagaccaggtgatttgactcctgagc

SEQ ID NO: 4073 - DNA, 2408 bp, Glycine max
  Clone ID: PAT_MRT3847_103685C.1
ggctcgagctttggcaaaaaagttataccgtaatcccaatttgggaacaactagcagtaaccgtgacgactctgatcagaagaagcctatttctaaaattcagaaagagcggcaaaatggtgctggcttgagtaataaaaaaagataggccatctccattgccagctaaaagacccctagataatagtgattccttgcatgcctctgttaagaagccaaaggtctcagatccagttgcatctatcaaaactaagccagtctcggtgaaacatgagctgaaggtagaggatgatgatgatgatattcctatttcccagagaataaagaaatcagccatgtcaggtgataaatcatctgccacaaagaagttgctgacaaaggttactaaagttaataagtctggttcaaaaccttttaagaaacagataaagaagacagttaaaaaatcaggcagtggttcagaatattccaaatctacaaagcttcttcctagctctggtgatgggcagaaaaaatggactactttggttcacaatggtgtcattttccctcctccataccagccgcatggggtaaagatgttatataaggggagaccagttgatttgactcctgagcaagaggaggttgctacaatgtatgcagtcatgcgagatacagagtacatgcagaaagataaattcaaggaaaatttctggaatgactggcgaaagttgcttggaagaaatcatgtaatccagaatttgaaagattgtgattttactccaatctatgactggtaccaaagtgagaaggacaagaagaaacaaatgactacagaagagaagaaggctttgaaggaagagaaaatgaaactagaggagaaatacatgtgggctattgttgatggtgttaaagagaaggttgggaattttagagttgaaccaccaggattgttccgaggccgaggagagcaccccaagatgggaaaattgaaaaaacgcattcatccaggtgatatcacaattaatattgcaaaggatgccccaattcctgaatgtcctattcctggcgaaaggtggaaggagataagacatgataatacagttacttggttagcctattggagtgaccctatcaatcccaagctattcaaatatgtgtttctggctgctagtagttccttgaaggggcagagcgacaaggaaaagtatgagaaagctaggacgttaaaggattatatagggaatattaggtctgcatacacaaaagattttaccagtaaagatattacaaagcagcaaattgctgttgctacttatcttattgataaactagctctgagggctggcaatgagaaggatgatgatgaagctgatactgttggttgctgcacattaaaagtagagaatgtgacaagagaaccccccaacaaacttaagtttaacttccttggtaaagattctatcaagtacgaaaatacggttgaggttgagcttcctgtttataatgcaattttgaagttccaaaaagataaaaagcctggtgatgatcttttcgataagctggatacaagtaaactaaatgctcatcttaaggaactcatgcccggtctaacagcaaaagtcttccgtacattcaatgcatcgatcacattggatgttatgttgaataaggaaactaaagatggagatgttggggaaaagattgttgtttatcaacatgcaaataaacaggttgctatcatttgtaatcatcaacgcagtgtttcaaaatctcatactgcacaaatgtcaaagttaactgaaaaaattgatgaacttcaggctgttctgaaagagctgaaaacggatttagacagggcaaggaaaggaaagcccccttcgaagagttcagatggaaagagaaaaaagaacttgagtcccgaaatgctagagaaaaagatatctcaaaccaatgcaaaaattgagaaaatgcaacgtgatatgaagacaaaagaagatctgaaaactgtggcattaggcacatccaagataaactaccttgaccctaggattacagttgcctggtgcaaaaggcatgaggttcctattgaaaagattttcaacaaatctctgctggcgaaattctgctgggcaatggatgtggatcctgacttcagattctgagatctatagaatggagccatgttatgatgggtggggaaaaacatttcttttttacttatttcttttctataagatttttttttttatttcgtcaattttagcggaaattgatgttgtaagtccatctaacctcattatggggtgagtttccccttcttcattgaccagttttatacttgagctgttaaccattcatatgattttaatgtgatacacactgccaaacgtggaaaatgaggtaaagtttcgttcattatttta

SEQ ID NO: 4074 - DNA, 143 bp, Glycine max
  Clone ID: PAT_MRT3847_103686C.1
gtaggaactcaagatcgcacgattggccatgtcctctataattagctacattcttcaggccattgtcaccggaactggaccatcggataccctcgccgatcaccttgctgaccctatcaacatcaacgcctcggcctatgtca

SEQ ID NO: 4075 - DNA, 450 bp, Glycine max
  Clone ID: PAT_MRT3847_103687C.1
aaaaaaatacctgtgtcataatatatatatcgggggcaaggcacggttttagaccttttaatgcagtcttaagaacctagcgttcgttacaaccaaggtgcaaactgagaaataaaactacagtttagaggagagcaatgaaaatcactctactctaacacacagttttatctaggccccgaaaggaagccttgtgctttgcgggggcaagtggcatggcccttttccgaatctgtctcacagcaaatgcacggggtatataattttgaccaccaaactcgcctccaggggaatcagaactacagggcttatttactggactgtgaccccaagaaagttttttctggctggtggccaattgcgtgggcattggatgcgcgaatagtttcctcagcattcttactgaaaggaaattgttcaaatccacaccctctacccactggaatgggg

SEQ ID NO: 4076 - DNA, 1166 bp, Glycine max
  Clone ID: PAT_MRT3847_103688C.1
agcgcggggtggggctcgagccgagataccagcttgttttggttttggttttgagggtgggaataatattagtctgtctgttttgctgaatggtactgataacttgtggtcttgttgtggaagtgagaggatttttgtgtttaccaccaaccacattgagaagcttgacccggctctgctgcggagtgggagaatggatatgcatattttcatgagttactgttcgttcccggcgctgaagattctgctgaagaattacttggggtgtgaagcgtgtgagcttgaggaatcgattttgaagcagctggaggaggttgtcgacgtggcgcggatgactcctgccgatatcagcgaggtcttgatcaagaacagacgcaagaaggagaaggcggtggaggagttgtttgagacgttgaagctgagagcggagatgaatgagaagagtggtgttttgaggggaaaaaatgtggttgaagaggaggaagaagaggaagagcaagagaagagggctttggacagtgagagtcctaagcaggagtcagagattgaggacaattgcaaggaggaggaggaagaaaagaagatcaagtgatatatagtgatgtgataataatgttgtttgttcccccgtccaatggagagaatggatcctatccaagtgtagtactcgatcatcatcaacaattttttttacgggggatatcagatatgacttgtgagatacaggggaagaggctaggggggcttccaattttaaaaacatgtcacatacttgtgtctcttttagttttgaataatggactcctttattgttagatatgtagggaaagtttatttgcatcgtgattatgtagtttaagatttgttccctttagtacattttgttttggctccgggtaggactttacaccctgacatgctttgggagccagctgggatgttggtgaacacttgggtgcacatggcatgggaaaggttggtgtcttgatgggacgtgtaggggaatattggtaataagtagggtaggactattacctaatgccaatttgaatcatacaatgaagatgagggctgtttgggttgtgccttcagattatccttgttctaagcgatttgtgacgctgcctatttttaaattctaagttatataaactagtttttgaact

SEQ ID NO: 4077 - DNA, 1361 bp, Glycine max
  Clone ID: PAT_MRT3847_103689C.1
cacaccatcacttccttcccgctttccacgaaccttcttcttcttctctctgtcacattttgaatctcttattttcatgcctcacaatcattcacctcttcttcacgctctctgcttccttactcctcttccggagtaggctgtgagattttgaggttcatgaagaagctatttactgtcctgtgacggttgcgcgacactgatttgttgaattctaccttgcttttgaactaggctacaatcatgaattttcagcaagatcttctgtgcctatttcgggattggaattcagacaagggctccgagagcaactctcctgcaattcacgtaacacgctcggggagtattaggaatacactaaattcagtttctgagaagtttcaaaggggtttagaatctagttcggaggggataaagagatttagaaaatcattcaaatctcttccctataacagagttctttctagaaattttagttctagaaagaaaatccttgatccgcagggccctttccttcaaaagtggaacaagatatttgtattatcatgtcttattgctgtatcactcgatcctttgttcttctatgtccctgtgattgatgataacaagaaatgtctttcaatggacagaaaaatggaaattacagcaactgttttaagatctttctctgatattttttatataatccatataattttccaatttcgtactggattcattgctccctcttctcgagtatttggaagaggtgttttggttgaagatgcttgggcaatagcaatgcggtatctatcatcatacttcttgattgacattcttgccgttcttcccctcccacaggtggcaattctaattatcattccaaagttgagtggctctgaatcactgaatacaaagaccttgctgaaatttattgtctgcttccaatatatcccacggtttttacgaataattccattatataaagaagttactagaacctctggcattctcactgaaacagcttgggctggagcagcattcaatctctttctttacatgctagcaagtcatgttattggtgccttttggtacttgttttctatagaaagagaaaccacatgctggcaagatgcgtgtcgacgaaatagcacatgtaacacaacagctatgtattgtgataatcatcaagttttgggcacaatgtcagcattcctgaatgcttcttgcccaatacaggatcaaaatacaaccctctttaattttggaatatttcttgatgcccttcaatctggagttgtggagtcaagagatttcccacataagttcttttattgcttttgggtggggcctaagaaacttgagttctcttgggcagaacc

SEQ ID NO: 4078 - DNA, 422 bp, Glycine max
  Clone ID: PAT_MRT3847_10368C.1
ctcgagcgctccttctctgtcccaagaatgaattctcaatggcgattgaccacgaaaacgatctcaaagacgacaagaaccctggacctctcgacgaggatgacatcgcccttctcaagacctacggactgggaccgttactccacaagcattagacaggcgcatgagagccatcgagatatggcctggacagtgaatgactgatgtggaatgaaggagctctgatactggtttagctgcaccaagcctgcgggatcttgattctgagagcaaatgatgcaggaggagcaccctcttcaggaggcaaggagcaccgagattataaaccctgatcctgtagatgcccagtatgttatcaatgtggagcacattgcagagattggtgcagggctaggagacaaggcttaccacactgtcataga

SEQ ID NO: 4079 - DNA, 158 bp, Glycine max
  Clone ID: PAT_MRT3847_103690C.1
ttaccggggcgacccacgcgtgcgcacaatgtaactatagaaccttctgtcaccgtttatgaatatttactccaaaaatgtcgaggaagttcaaatgcttgagtcgatgaaacttttcaggcggaaggcgcggatcatagggactcctatctgtatga

SEQ ID NO: 4080 - DNA, 232 bp, Glycine max
  Clone ID: PAT_MRT3847_103691C.1
gcttgaccactatgcgtcagaggctgacctattgcgggtcaagaggatctgcttagtctagcagagcctatgaggagcttttgtcatttgttacagagaaacttatgggcaatatgactagctcacttactgatcacatttggcgactaatggatctgggcagtttgggtcttcttttttatagccagatctttgtttggcccttgatggaggaagatcggggcggatgggc

SEQ ID NO: 4081 - DNA, 328 bp, Glycine max
  Clone ID: PAT_MRT3847_103692C.1
aaaaaagggccaaaccggcgggagggcttttattatttggggtcccattacacaaacaggggttattagggacaaaaacaagttcttttaccccctccaaatacataacttaaacatacccaaggggggaaggaatcaaattccttttatttcacatttatttaaagccggggacaggtcttcaacaaccataaagcccttaaataaaaatacgggggggaatccctttaaaaggcaatccctcctccctaaaaggatagagcaaaggggaggggattttacccggcccataggggggtccaaagggcccattatggggcttctctaa

SEQ ID NO: 4082 - DNA, 424 bp, Glycine max
  Clone ID: PAT_MRT3847_103693C.1
gggcaaaagttctggtgaatttcaaagcatttttcccccatggatagattgatgtccaaaggccttgccaatttaaaaatcctgttacccaaacacccccaactttttgttgttcccggcgtaatttattttcgtagaaactttacctttttagctttaagcacagctgtttttcaaatcttaatcttttttggaaaccccgacgtaattgccccacgaatttttccaaagcttgtgctccttaccatgtgatggcgagaaaaagttccctccaaatttgaaatgcttaggagaaatgctttaacggaagcctaaaaagagctcaatgtttatgtggagttatccgaacaagcctttggagtattgacattatgggaagagatatcgcctgtagctctaaaattgatgtgggtgctcacccctc

SEQ ID NO: 4083 - DNA, 733 bp, Glycine max
  Clone ID: PAT_MRT3847_103694C.1
tttcttttgttcaccaaaatcgaacttgctcctggggttcctattactactctcggcagagggcccacgcgtccgcccacgcgtccggcgggtatgagcttaacctatcctcctctaaccggaatatatcatccatcggttcaaaatatgggaaatccataaagcgaggcattatatcattcctcaacgttgatgacagcagattcacccgcgccgatgaaattgaattcgccccatatttttcaaagcacaagtggggtttgttccgccgaaaaaccaagcttctttgtcgcaagtgttgcaaccatattggatatgcctacaacgatcgcacttcatcattttttcccttcgtatcaaacagaacagaaccatcaccacccaccgaagcatcaaattcaagtccaatgaaatacgatattcgcattcgtgctttacaaccttcatcttctcaagaacatggaatcactgtgttggcttaaaatttcaaatacgcggtaaaaaattgttatcactaactacagggagggggggatttcttttttttttttttttttaatagatttgaagttctgttttggcaagggtgttgtgttcccctttccctgtgtctcaagtgtgattaatatacccttgtatactaaaagtagtagctgtggaatttttggaatgttaagttaaattttgcaaaccaacgaagatagaaagaccatttatggtggtgctacttcgt

SEQ ID NO: 4084 - DNA, 658 bp, Glycine max
  unsure (1)..(658): unsure at all n locations
  Clone ID: PAT_MRT3847_103695C.1
ccacgcgtccgctggatttaaaattaagccatgtaagctaccttgcaatactaagctacttccaaacttatatttccatcaacattatgcttttccttcattctctcatcgtttgatatcattctgagagggcaggaaggaaacacttctacctcagcagctgctttcaagtggggtatgtaagttgtaaccaacagaggttttcaagaatcaactagtcatccaccagttcaaagtccttaaaatacccaagaaatggccagacagcaagatttcaagaagaacaagatgatgaagaaggaggaaagtaacaaaacactaccatttcacaaacttttttcatttgcagactcaagggattatctattgatgtttgttgggacaataagtgctgctgggaatggaatgactaaggcttcaacgaatatagttatgggagaagcaattgaagcttttagaagaagtggtaacactaaacaagtagttcatgaagtttcccaggtgtctctgaagttcgcactactaggtgcaatttcctttctggcagcatttctacaggtggcttngttgggtatccaccgnnngagagacaagcagcgagaattcgaggcttatacctaanagcagttctgagacaagatataagctactttgacaa

SEQ ID NO: 4085 - DNA, 484 bp, Glycine max
  Clone ID: PAT_MRT3847_103696C.1
ctatgtatttgttttttcgtttttggacccaacggatagcgatataaattggggggggggtaaaagtcaagacaaaacactcgatcaaaaagaaaaccattgcttcaagccgcaacaggaaccctaaaaacacgagccaaaaaggccaatcgggttcatacacatgggacgaccacagggcacaaacctggaaacgcaccgaaaagtacaagcagggaccaaatagcgacccggggatcaaacactgctggctcgcactaacacgggacaaactcaaaacaaactcacgcccgcttgaaagtggaacctggaccgaatccaacgcagaaatgggggccaaaccaaacttgaagccccgagcccacgcaaccggggacccaaagcaaaacaaatggggcggcccgaagaatcccggacccgaaccggaaacccaacccagcaaaccctataaagaagaccgaaaaaaagcccgggggaaaacaag

SEQ ID NO: 4086 - DNA, 243 bp, Glycine max
  Clone ID: PAT_MRT3847_103697C.1
gggattattgcagcatctggaggtgtgcatcttgtttgagtctgatgttctcttgcaggatgcggccattcattaccattatatgctgcgagtctctgagaagctagcttcagatgatgatggacttgattacttagttgatggaataggaaatcaacttgagatagaaaacatcatctccagtttgctagctctaactcagggtccagacccagctcactaccgagagcctgcattacgtgc

SEQ ID NO: 4087 - DNA, 790 bp, Glycine max
  unsure (1)..(790): unsure at all n locations
  Clone ID: PAT_MRT3847_103698C.1
ccacgcgtccgcaagttcttgcaatgacaaacccaaaagaactcatagaacaagtttacattctcttgccactactcacaacaacaacaacaacaacgttggtgtcgtgtctgaaccacgaaggcttatacctctaccagctgaaactctcctttgacgacccagactcgaggctctcctcatggaactcgcgagacgccactccctgcaactggttcggcgtaacctgcgacgccgtatcaaacaccaccgtaacggagttggacctctccgacaccaacatcggaggcccattcctcgccaacatcctcggccgtctccccaacctcggttctagtgaacctgttcaacaactccatcaacgaaaccctaccttcagaaatctccctctgtaaaaacctcatccacctcgacctctcccagaatcttctcacgggcccactcccaaacacgctcccgcaacttcttaatctccgctacctcgacctcaccggcaacaacttctccggccccatccctgactcattcggaacattccagaacctggaagttctctccctcgtttcgaatcttctagaaggcacaatcccttcctccttaggtaatgtgagtactctgaagatgctgaacttaagctacaacccttttttccccggtcggatcccgccggagatcggaaacctaacgaacctccgagttctgtggctaacgcaatgcggagtcgtcggcgtcattccaacctnccctcggagggtgggaaagctacaggatntggacctcgcgctcaacg

SEQ ID NO: 4088 - DNA, 443 bp, Glycine max
  Clone ID: PAT_MRT3847_103699C.1
atctttgccgatgtaatggccatgaatatgagacgggcagcggggagggagctttcaacgtatccgaggagtggaatggttgcattacaatatggacatgtagcgcgcgttattctaactgggggtgccggccgcaaaagaaatgagacttacgagtcatattcgtgagagggtagtgtggtatgaacgatattatgaagccgacgtcaagtcgggtgacgccgccctggactggcttttgaggggcgatgaggagtaggttgaagaattcatagagaaagtgggtcctggtggacacaacggagacagcgagccaagatacggcgatgatagggcacaaaagatcgagtggctgaatgaaacagcactgggtcaaggaattgggtaaaaaatagcgctgcggacatggtgaaccaaggggataatgcatacgaacgctacta

SEQ ID NO: 4089 - DNA, 143 bp, Glycine max
  Clone ID: PAT_MRT3847_10369C.1
acacgggcaacataacggggggggggggtggggtggctcttatgggggcgtcctttgggtctcattaactgggttggggtttgggttacttctacacctttcctcatttccgcagtggcgacctgggaaccaatctctctgag

SEQ ID NO: 4090 - DNA, 485 bp, Glycine max
  Clone ID: PAT_MRT3847_1036C.1
cctcgtgccgaattcggcacgaggcgataagaggatcggagtcgatacgagtgaggccccacagagaaggtgggaggttagtgcttcaactcactaaggtcccatcttgtttccaagctcagaggagccctggacgccttcgcctctgcttttggactgacattcaaacacaagaacatgaagatgaagaagatgatgatgggcgtggatgggaacacaccaaaggctgcaacagttgggtggaaaataactatgagaggcaaatcagcaggtgcaaggaagaaggtcatgaccatgaaaacaacgatttcttaataaattggggtgaatctcgtttggtcgccacttcataaaattttatttagattttggagcactctatcttcttcttcttcttcttttttacattttttgcgtttctcaatttcgatgccttaaccttaatgatcaattcacatgtatgtacgtggcagtactattttttt

SEQ ID NO: 4091 - DNA, 393 bp, Glycine max
  Clone ID: PAT_MRT3847_103700C.1
gactgaaaatgcattcttattaaacacatggatggggggtgggctaacccaacggctaatttacattgtgtactggaccacctatatctataaagcctgattttcacatttcaaaaggaacagatcttcgcatattgagcataagggacattaaacgaactacatgatgctgatcttttcttatactgatgtgtagcactcacgctagaatctttcaaagctttggcatatctctccaaattaatctttatacattcctacaggatctcacaaggaaccttgttctctggggctgaatttaatttgtgcttaccacgacaccactatccgaattattcctatcaactttctacacacttcgtcatactagtagaaaacagggtgagttctaca

SEQ ID NO: 4092 - DNA, 1441 bp, Glycine max
  Clone ID: PAT_MRT3847_103701C.1
ccttggtaagcttcggtattttcttggtatcaaagttgctcaatccaaggatggtgtggtgatctcacagaggaaatatgcccttgacatcctggaagaaacaggcctgttaaattccaagccagtaggcactcctatggatcctagtgtaaaactgtcaccagatcaggtggaaccattctcagaccctggaagatatagaagattggttgggaaactgaactacctcgcagtcactcttcctgatattgcctttgcagtgagcgtggtgagtcagttcctgaactctccctgccaggatcgttggaatgcagtcagttgaatcctgaaataaactaagagtgctcctggaaaaggtctcatttacgaagataagggacattctcaaattattggctattcagatgcagattgagtggggtcacctagtgatagacatcaggatattgtgtattgattggaggaaacttgatatcttggaaaagtaagaagcaaagtgttgtagccaaatcaagtgctgaagcagaatacagggccatggctttggtaacttgtgagctcatatggctgaaacaacttatttgagagctcaagtttgaagaggatacacaaatgacactaatatgtgacaatcaagcagctttacatattgcctccaatccaatctttcattagaggaccaaacatattgaggtggattgtcattttatcagataaaagattgaatcgggagatattacaagatttgttaactatagtgatcagttggcagatatcttcacctagtctctaaggggaccaagaattggttatatttataacaagcttgacgcttatgctccagcttgagggggaatgtagagaatcagtattgatattctgcattcattgtaataaatatagtttataggcacataatcactgatttagaggaaatcaaatatcctccatttatttgcaataagtgcaataagcctctgttctttctcctttaacaagaccaatcaaagtccacaataatgttaatggttgatttctcctcacctacttttgcagcttgttcgagagacagctattcaatgtcttgttgccttgtctgagttgccccacgcccgtatctatcctatgaggacacaggttctacgagcaatatcaaagtgtcttgacgattcaaagagagctgttcgccatgaagctgtcaaatgtcggcaaacatgggcatcaatgtaatctaggagtctccatttctgaagttcaaaaccaacttcccaaggtactgggaaagcttttgacctttgttttctaattaacagtgattctttcaccgaaaggaaaatctgaatttttgaaatgtaaaataacttgtaaatattaaagtctatcaatcttattgtctactcttatagctgcattaatgagaatttgattttgaattcgccca

SEQ ID NO: 4093 - DNA, 192 bp, Glycine max
  Clone ID: PAT_MRT3847_103702C.1
ggggacccacgcgtccgcaggtaccgtgatcggagcaagccactctcctcctgttagcatagccacagaacggcggcgggaagaccagttggctcagattagaggaatttcttgatagatgtcagaatataattttaaaaaggttgtcttttatatcccaagacttacataaaaagtgcttttggagagttt

SEQ ID NO: 4094 - DNA, 558 bp, Glycine max
  Clone ID: PAT_MRT3847_103703C.1
cttgggggggggggggggggggggggggggggggggggggggggggggggggggggggggcggggggggggggggggggggggggggggggggaaatataaagggaataactttggtagaaatattagggcccacacccattttaagctttttaaaaatttttcccaaaactcccggggaaaacttcaaaaaaaaaaacccaggggacctttaataacccctgaaaccgcaaattaagttttttggagaaccccccctaaacccaagttttgttgggaaaaaaaaaaatttttcccccccccaaattccccaaaaaatgcccttttcctttttagggttaatttagcccccccttctttaatgcccccccccccctttgaaaaaaaaaaacttaccccccccaaaatttttcctcccccccaataaaaacttgggtaaaattggggaaagccccccttgtggggccttttcaaaaaaatagcgggttttattccctttggaatttaaaccccccgcccctttttttgcgaccccccctatggcctggttttcgccccc

SEQ ID NO: 4095 - DNA, 326 bp, Glycine max
  Clone ID: PAT_MRT3847_103704C.1
tttgtttttgatgaagggttaaaactttattgactctgcttgattattcgagcctagggcttaacctttgccatcaaattagatcaaagtgaatggtcttcacagcccagacctgtctttaacggacgtcaccactggctcaacttccagactcgttcttgaggctgaatcttccatgggatctgccttggcctggggtattgtaccctccactggggctggccgccccagaggtctcacagccagacacgcacactgctgctactggcagtgctgtagtcaaggcgctagctgcattccaggagctagtgaacgccgcctctgct

SEQ ID NO: 4096 - DNA, 337 bp, Glycine max
  Clone ID: PAT_MRT3847_103705C.1
ggggaaaatagggctaaaaggcccccaaacacgttttttttttttaataaaaccgccccaaaattactcataaaggggtttttttttttgggggggggtggttggcaaaaaccccaataaggttgaaaagggggtccctaataatgaaatatatttgggggctttgcaaggggcccctttttgaaaaaaaacagtttaaagggaagggacgggcaaaaaacaaaaaaacatccccaattaaagtttttaaccgggggttttttgacaatttaaaaaaaattccttccttttttaacccaaaataaaaagaaaacacccgctggaagaggtccaattt

SEQ ID NO: 4097 - DNA, 613 bp, Glycine max
  unsure (1)..(613): unsure at all n locations
  Clone ID: PAT_MRT3847_103706C.1
gtagaatgattgcgtctacttatgaagttatatacagaaatctctataactttgagacttaagtgctgtgaactatcacaaaagcattcagaaacatgagttttgcatttgtaccatgtcttagaacatttttgtacatatcctaaaaacttctacaacgcctcaaagcaatatggctgacaaacacagtccatggcatggatcagtttcctgcgaggtcccactgcactggcgcccatatccttgagttttttcatggttaggtttaccagctgatacttactgagactattcccctgaaaaattctcacaaactgccccagtccaagtgaagtcagccagttgctcagtccaccagctctttcaagcttcctctcaaggtttgatgctcgcaaatttttattcagagtttcctggttgaaggaccttcttggtgcaagtagtgttctaggctgcttaataacttttgatgcatcagaaactccaagtagtttatgtaacttcaaactgttcattgcttggnggattntctgattctattctttgatctaaagatggtggattgaccacagttgatttaggtaaggtaaggagagcttttctttcggcatga

SEQ ID NO: 4098 - DNA, 238 bp, Glycine max
  Clone ID: PAT_MRT3847_103707C.1
ggccaataaaaaatgtgttgttgatgattatatatattagaagaggggggggccctatgttacaggggaaatgacctcattaatggatgtttattaggctctataatgttgaaagacttataaatgaatttgcagttaacaaatattctattgcattaatattggcaaacctccttatcttgtcttactgaattttatacccttgttcctcatggcagagaaatatctggcccccttt

SEQ ID NO: 4099 - DNA, 493 bp, Glycine max
  unsure (1)..(493): unsure at all n locations
  Clone ID: PAT_MRT3847_103708C.1
ggttgatttacattgaaaatcaaagatgcctagttccaaaacaccaaaactctctctctccaacaacaagtccttaccctctttacaactacccttccacaccacagatatctctcccaccactccttccatttacaccacttacaactactatctccatcttcctcaactcagaaagctttaaaactccactgattttcctaattaaaacaacgaaccaattctaaaaccaattttacaaactctcaaaatcacattccactttctttccattattctctccaatcccagaccttactccaaccacagaaaataaactcaccgaatagagtctctcatcacacatcagattnaaatcattaccatactttgtnaaaatgagaaacaaaattccgacacacgtgacactacaccaaccactaatctcancancagcaatagcagcataaacanaanctacancngaacgaacctacttcctcagctttccacg

SEQ ID NO: 4100 - DNA, 137 bp, Glycine max
  Clone ID: PAT_MRT3847_103709C.1
cgtggattcaaccaaaatcgagatagaatataacgcaattggttgtattctccgaacctttttttcttgtgcgtgtccagttatttgtacgtgatagaattagagagaaagagacaaattgagttttgtgtttgatc

SEQ ID NO: 4101 - DNA, 139 bp, Glycine max
  Clone ID: PAT_MRT3847_10370C.1
agttcgcagacacgtgggagtccactctctgagccaccctgatcacccctgatccgctattgctaaagcctgagtgtgaatattgtgtgaagagatctatacgatcaccatagcccggagagtgctatattgctgggcg

SEQ ID NO: 4102 - DNA, 1383 bp, Glycine max
  unsure (1)..(1383): unsure at all n locations
  Clone ID: PAT_MRT3847_103710C.1
ggntngagaaagtttcagactgaaccttgttacaaggatacctcatacacaatgaagtttcctgctggctatgagctacatgaagcacttggaccaagttttctgaaagggagtaagtgttttaattgggcagcggaagcaaatcaagatgttaaaaatgctgagatgtcagatgagattagctgtagccaattgacttctgaatttcgcccagagcatctcttggaagctatggtggctaacattagccatagtaataataatgttaatagtgagttatcattttcgacatcaatgcaggctgcaattgcctcaggaagaaatcctgaaggttctgttcacactattaattctgaaggctgttcaatagatcagcttccttttgttaaagaggacaaacattatagtttgagttcatctgggatatgcggtgtaatgtccccaaagggattttcttctacatgtcctagttcatgtagtgaacagtttgagaggtcttctgaaccaactaagaacagcaagaagagggctaggcctggggaaagttgtaggcctagaccaagggacagacaactgatacaagatcgtattaaggagttgagggaactggtgccaaatggtgcaaagtgcagtattgattcattgctggagtgcaccattaaacacatgctctttcttcagaacataactaagcatgctgacaagctaaataaatttgcggatacaaagacaaagttacatcacatggaaaaagacattcctggtcaacaaggttcaagttgggcaatggaagtaggaggccatctgaaagttagttcaatactagtggagaatcttaaccagaatggccagatgtttgttgagatggtgtgtgaagagtgcagccattttcttgaaatagcagacgccatcagaagcttaggtatgacaattttgaatggtgcaacagaagctcacggtgagaagacatttgtatgttttgtggtcgaggcaggatcagaggtaagaaacaactctcgttcaatcagacaaactaactgccgctcaattgttacactacttcatgccaagagcacaacatgttcataaagaatttatgattcttgtgctcttaaaaatgctagggtgtgttagatgattcatgttatgttttcaatttgaataaaaaaaaatagaaaataagattggaaacatgtttggttgtactttagaaattgtttttcttttgaaaacattttttaaacctagaccaaatcagaaaacatataaaaggttttttttttttacattgaaaaaaaaatatggtagatgaaaaggataaaaacacctactctttgtaatgttgtgcttgattttttagattttgtgagtnnttnnnnaaaa

SEQ ID NO: 4103 - DNA, 276 bp, Glycine max
  Clone ID: PAT_MRT3847_103711C.1
cctaaatgcacttgatggtgttgaaatgtccaccttcttaaatttttaagatgaacttagttctaaagaagataacaggccaatcctgaaggtactccctgtttgctgcagaatgtcagatattttggatgttgcataagagtcctatttgccccagttaattcaacttttgtctgcctgttttgtggactggctggctctgttagaactctgtccaaaaagtgcatggaatataacttgtaaagcttcccacaattgacaatatatatgcatgtg

SEQ ID NO: 4104 - DNA, 1569 bp, Glycine max
  unsure (1)..(1569): unsure at all n locations
  Clone ID: PAT_MRT3847_103712C.1
accaacataatcgttccagtgtagcagtgtctttcatcatcctcttcgtgatcgtcttctgttgttgctccactcactatctttatttttcctattctatccttctcgcttcttaggttagccgagcgtcatcgatccagaaacgataaaggcagtcataaagtgagaatggatctgtgtgctgctcatgcgaagaaccttttccacacaaattcgttttaccacagacccattccctccaatttgggaaggagcagagtgtttgagatcactgtttcgaggagaaacccttactctaaagggtatcgcctatttgttgtcagcgccacggggaagaacaatcatgaccacaactcctcttcttccggcaatgatgaatggtccattccagaagaagatggtactagagggaataattcttctgatggcaacaaatcagataacaactctgagaaatgtcatcatactaatctggattggcgcgaattcagggcaaagctatatagggatgagttgaaagaaatatcagatgctgacacgcataatcaaggtggaacattgcctatttccaaacctcttggagcacagtgggctcatcctattccagtacctgagactggttgcgtacttgtggctaccgaaaagcttgatggtgttcgcacatttgaaagaactgttattctccttctcagatctggaactagacatcatcaaggaggaccttttggaattgtcatcaaccgtcctcttcacaaaaagatcaaacacatgaaacctacaaaccatgatctattaactaccttctctgattgttctctgcatttcggcggacctcttgaggcaagcatggttttgttgaaaacagaggagaagatgaagcttccaggatttgaagaggtaatccctgggctatgttttggatctcgaaacagtttggatgatgctgcaggacttgtgaagaaggggattctcaagcctcatgacttcagattctttgttggttatgctggatggcaactggatcagttgagagatgagattgagtcagattattggtatgtagctgcatgtagctcaagtttgctttgtggggctttatcagattcttcagaaagtttgtgggaggagattttgcagctaatgggtggtcattactcagaattgagccggaagccaaagcaagacatgtagctactcatgtatggtttcaaattcagagtcaaatgaatgaagaacctgtaatcagggtgctacaaagtcaactgtactgatgttcactttaatgtcaaataaatagataatttatccccctgtcctactctattgttataagaggaattgtacgttgcttggtttttgtaattatgcttgttagtatagtttgatgtaagtatgagaataagttgtgttggctagcatttttacgattaaactttagaatttcatctagagctcaaagagctccagcaccattgaattggtatttccacgaccgataaacgatattaaaaaggcttannnnnnnnnnnnnnnnnnnnnnnnnnnnnnnnnnnnnnnnnnnnnnnnnnn

SEQ ID NO: 4105 - DNA, 611 bp, Glycine max
  Clone ID: PAT_MRT3847_103713C.1
cccgcgtccggctcgagatcgtagtgtctttcttccttctccctttgtgatcgccttctgttgttgctccactcactatcttcttcttctaaaattattttccttttctatccttctatctatcattcttttacgctaaaaatcttctcgcttcttagcttagctgttctgttccagaaacgataaaatcaatcaatcaaaggaagcaaaaaagtcagaatggatctgtgtgctgttcatgcgaagaaccttttccacacaaattcgttttgccacagacccatttcctcccatttgggaaggaccagagtgtttgagatcactgtttcgaggagaaagccttactctaaagttgggtatcgcccatttgttgtcagcgccacggggaagaagaatcatggcaactcctcttcttctggcaatgaagaacggtccattcccgaaggagatggtactagagggaacaattcttctgatggcaacaaatcagaaaacaactctgagaaatgccaccatactaatctggattggcgcgagttcagggcaaagctatatagagatgagctgaaagaaatatcagatgctgacatgcacaatcaaggtggaacatt

SEQ ID NO: 4106 - DNA, 377 bp, Glycine max
  Clone ID: PAT_MRT3847_103714C.1
ttctgacagagatttctactgatggggacgacttcgaggaacctccgggaggttctggatgtgagatgggggcttattgttattgctgtgataacacctccacgcatggcacttagcttcttacaacgtgatcattcatcaacttatgatcatgatgagtatccaaaaccatgctatgatctctgcatctgctcacgctcaatgcctactgaatccagttgtgaaaatcttaagatgaattcatgccactcagattgctagatctgtctgtgcacacgctcacagccaggacatcgtctgcgacttgacaacaacaacttctgctacaaaccttgcaagtccacagatgactagaacatctaatagctctctgatat

SEQ ID NO: 4107 - DNA, 155 bp, Glycine max
  unsure (1)..(155): unsure at all n locations
  Clone ID: PAT_MRT3847_103715C.1
gtccttanaacaacaaaaaacagccgcacgggggcggagttctacccttttattctacaaccgaaattttcactcctaccatcttgccctataatgagttttataaaaacatggcgaaataaaccgcataaccccttcctgtatgaaattcctat

SEQ ID NO: 4108 - DNA, 347 bp, Glycine max
  Clone ID: PAT_MRT3847_103716C.1
gagacaaactttgataaattccccttaacgggaattaatgaggggctggttgcagatttcaaaggtcagacatacaaaggtctgtatccctccctgtgatccccggccagaaagtttaattaatcaacaacacatttcacaacttatggtggagaaccaaattttttaacaagttaaccaacatcatatttattcgggaattttttgaacaaatattgtggttgataatataccaaggggcgacatgcaacacaccacacacattagaactttatttagcgtgaaccacttaaggatcattttaacgagccctaacatgatgagctctccacgctcttggtgagttt

SEQ ID NO: 4109 - DNA, 405 bp, Glycine max
  Clone ID: PAT_MRT3847_103717C.1
cgcctcgagcggctcgagagaaagggaaatttgactaccgcacttggaacctatcactaggcgagtagcagcacctccttagagtagatccggtcattgacgtactgcatgacaagaaagcattacaacctgtgctatatccagctgaagtggaagcagtctgcgatgcacctttcgaagtgtatctcatggataacaatcgcaggcacgatgacatggagtggatggtagataagtactagtggcattcattggactatggcatggggcatagaatatatctgactatggagtgcaacagctggaatctagattaggttgcatcatttgcgcaccagcaggtgccagctttaccgaagcagaatcctaaacacaagcttccacaggatgtatccaaggatacta

SEQ ID NO: 4110 - DNA, 405 bp, Glycine max
  Clone ID: PAT_MRT3847_103718C.1
cccacgcgtccggaaagatgaaagtatgtaaggaaagatgaaaacattgcatcactgacaaattagtgatttcattgattcttttgcaacctcaattgtttccttatttgatttggtttgattattatagaaagcatgtgtgtgggtacaacacaacaatcagtaaatcctttctacaatttgtttgctgcgcttttgggaagatacctattctatatttctctttaattaatttttcttactagaaaagttgttttgtagtttagataattgctagagtaatagaataataaaaaatatcttgtccttgtctattttaatgccttttataatgaactgagtaaatacaatccaagtgaaaaacctcaacataatgaaacaaaaggttgattaaatatcttcacg

SEQ ID NO: 4111 - DNA, 343 bp, Glycine max
  Clone ID: PAT_MRT3847_103719C.1
ctcgtgtttgacgtgtccaggatgacatttgcctacatcaaatgttcagcgtctttactaatagtaatagaaaatcaggatgattacaccatcagagatcatgctaaaccgcgcaagttgcatcaaattgtagagagtcagctataaggtgtgttgaacttcttacaccagtactttattactcctaggtcaattcaggtgcttactgaaacaactctgtctggtgatcggggttcatatttgaaggctctggtccatgataggtgagaggctacaataccccttgatgatcacaatcgtgatgggtagcaaccatacccgactttattgcataatggctcaa

SEQ ID NO: 4112 - DNA, 406 bp, Glycine max
  Clone ID: PAT_MRT3847_10371C.1
gggtaccaatatatgtgaattgtctgtatgctggatgacaataaccttcagaagctgtaccttggaaatgcaacatgtggttgtggacgtggaggtttacccaccagcgcgtgtctgagttctgcaatctctatttggtcgagacttttaaacgaagggacagttacagttctgggaagcggtaacaaaggtggatctgtgactacaggggaacttttttcagtagcttcaccgactgatctttggggcgtgatgactatacatatgagttgtagcggctctaaaattataatgtcgcgattttttgtgaactgtacaagcacaacatcatctgtttgtgagtgggacgcttgaacacgggacgaggatggtatttcatcaccacgcaaccaagtgctttactcat

SEQ ID NO: 4113 - DNA, 318 bp, Glycine max
  Clone ID: PAT_MRT3847_103720C.1
cccttaaactctgaaatcctctcataatataaattattttcagccagaacattattctgtaggaaacaaggacaaaattgatttttcgaacgagaagactacaaacatcatgaagcaagaaaaaaagggggaccttgtaaaaaccaagggggattaccccccaaaaaactcgagctacctaattttttttttttttttgggaaaaaaggaaacctatatacatttgacccaaaaagaatgcctggttaaatcgggggggggggggataaaaaaataataaaaaaaaagcttcggcccaaatgggggcggtcttaaaat

SEQ ID NO: 4114 - DNA, 434 bp, Glycine max
  Clone ID: PAT_MRT3847_103721C.1
cggaaagagagagagaaccttgagagagaaagagacttaactatattacgtagaataaacagagacgctccgtgggcgcttgcccacaggattgggttaccggcccttattgcccataatatcaacattgtaccccgtttgcacatttgcttcttaaccaaccacacagactgatgacaccccacatattttgtgaaacatatttattgagacattcattgcaagcccttattttattgcttatcctcaatcctcaattgatcacacccttattggagcccttgtctcatcatgtttcttacttataacatctatttacacgagttatataacctttttattcttctaatatttttaaacataacaatcctttgacccctttttattacccaatccaatctctctccatcctgtttccgctcttttttcttttc

SEQ ID NO: 4115 - DNA, 701 bp, Glycine max
  Clone ID: PAT_MRT3847_103722C.1
ccacgcgtccgcacctccacgcccacgtcctcaagtcgggcttcctcgccgaccgcttcgtcgccaacagcctcctcagcctatactccaaactctccccacacttctcccaggcccgcgccctcttcgacgcgcttccattcaaagacgtcattgcatggacttcaatcatctccggccacgtccagaaagcccagcccaagaccgccgtacacctcttcctccaaatgctgggccaagccatcgagcccaacgccttcactctctcatccatcctcaaagcctgctctcagctcgaaaacttacaccttggtaaaaccctccacgccgtcgttttcatacgcggcttccactcgaataataacgttgtggcgtgtgcgttgatcgacatgtacgggaggtcgcgcgtggttgacgacgcgcggaaggtgtttgacgaattgcccgaaccggattacgtgtgctggacggcggttatctcgacgttggcgcgcaatgacaggtttagggaggctgtgcgggtgttttttgcaatgcatgacgggggtttggggttggaggttgacgggttcacgtttgggacgttgttgaatgcttgtgggaacttggggtggttgaggatggggaggggaggtgcatgggaaaggttgtgacattggggatgaaggggaatgtgtttgtggagagtagtttgttggata

SEQ ID NO: 4116 - DNA, 602 bp, Glycine max
  Clone ID: PAT_MRT3847_103723C.1
ggggaaaggaaaaggggccttttaaaaaaaggccctcacgggggaaaaaaaatttaaccctggccccttggggaaggcctacaaaaccgttttttccccctttttttttggaaaaaagagggtccttttccccccctttggcctttcttgggaagggatttccccctaaagcgaacgaagattattacccctttcttcccttgttttgtaaaggggggggcagacccaaggaggaagggccccaaaaacccccaaagcccccggaaaaaaacctcggaggatgggccccccactaaaatttggaagctgatggggccctttttttgggccccctaagggtagtgaagggggaggggaggggtctcccttcttaaaaaaggaaaccccctatatggggagggaaagggggggggaccccaccctcccccccgcgggaaaaaagcctgtttgtcccggaatctttgggtgtctaaaaggccccgccttcaaaaatgggcccccccaaagggtgcgctggggcgggccaccctggcactctttaataaggggggcccactggggcccttttgggggggggggtcaataaccacctcccctcaggg

SEQ ID NO: 4117 - DNA, 291 bp, Glycine max
  unsure (1)..(291): unsure at all n locations
  Clone ID: PAT_MRT3847_103724C.1
ctcgagctcganccgaatcggctcgagctcgagccgatttccttcaaagtgaagacagcttcatgtggtggaacacaatgtgttaatacttttggctgatgagcagcttgcagagcgatttgcgtagctaattcagcttcgtttcttgagggcctctaaatgtacttctcactttcttgcaagctatagcatcgcatctgacataaaatcctgtgctcttggacatggtaggtccactctaaagtggatttaatgctgcatttgatcccctttatggctgcagaattgggg

SEQ ID NO: 4118 - DNA, 348 bp, Glycine max
  Clone ID: PAT_MRT3847_103725C.1
gaatctcccgtttctgactccctggaactggttgttggatccccgtggaagcatcataaggatgaagagcgtttcaagtcaaagcactgcaacatagtgagatctgactcataatttggcgacactctatgaaattatgaggttacctggattttgtgaggttgtcatggtattggagtcatggcgggtgaggttgtgggatttcaaaaggatcaaggcacacttgacaatggttctgacgtatgaacacctgtattgaatgacaacgataatggcaagctgcaatgttatgtgggatccgctgcggatgccatcagatttgggacacatggagaggaatctgcaaaa

SEQ ID NO: 4119 - DNA, 302 bp, Glycine max
  Clone ID: PAT_MRT3847_103726C.1
gttgtgcctttatgacattccacacaattcagaaaatataaaggtgtcactgctattattgtaagaaattaaaaacacccatttacttattctttcgataataaaaaaatgctataacgtggcgccatctacacccttctcccgccctccctgcgcctacgtgcataacccggcgcgcgcagaaccgtgaccagcgattgctcctcccccagcggcggaggggaacacccgctgtcggactacaacacagggctggagtcacgcgggttctctgtccggatacgcacagaggggctggacct

SEQ ID NO: 4120 - DNA, 289 bp, Glycine max
  Clone ID: PAT_MRT3847_103727C.1
gctcgagtcccatactatcaattacatgatcgatgaccaccccccccaacagcggcatttttctaccgaacgtgaggaaaaacatcctgcctaccatatttaatactgcgagaaacacccccttgcccccaatcccgaaaacaaacaatgcgacgaccatatcaacgcctcagacactgagttcgccaaggtggacaaagggacgctcttctatctcatcctttatgctcactacttgggcatgaataccctgctggaccttatatcattaactgtagccaacatgatc

SEQ ID NO: 4121 - DNA, 2289 bp, Glycine max
  Clone ID: PAT_MRT3847_103728C.1
cgagacctctctgagcccggcaaccctttttgcgtgggcggaatccggtgacgatggcggcgccgactccatcgtggcagcctcagaattcggctcgaaaggagatctgcggcctccttgagcagcagatttcgcattcttcttccgccgataaggctcagatttggcaacaccttcagcgctactcgcacctccctgacttcaacaattacctcgccttcatcttctcccgtgccgagggaaaatcagtggaggttcggcaggctgcggggttatatctgaagaataacctcagaaacatgttcaaatctatgcagcctgcataccaacagtatgtgaaatcagagttgctgccttgtcttggtgcagcagataagcacataaggtctacggcaggaactattattagtgttgttgttcaaatagaaggagttgttgggtggcctgaattgttgcaagccctcgtaagttgcttggatagtaatgatctaaatcacatggaaggtgctatggatgcgttatccaagatctgtgaggatattcctcaatatcttgactctgatgtaccagggttagcagaacgccctattaacatatttcttcccagattgtttcggtttttccaatctcctcatgcttcattgagaaagctatcattgggttctgtaaatcaatacattatgttaatgccttctgccttatatgtatccatggatcaatatcttcaaggtttgtttattctcgctaatgaccctgttgctgaagtacggaagttggtttgtgcagcatttgttcagctaattgaagtccgcccatctttcttggagccacatttacggaatgtgattgaatacatgttacaagtcaacaaggatacagatgatgaagtagcccttgaagcctgtgaattttggtctgcttattgtgatgctcaactgccacctgaaaacttaagagaattcttgccccgtcttattccagtattgttgtcaaacatggcttatgcagatgatgatgaatcagttattgaagctgaggaagatggttctcaacctgatcgagatcaggatcttaaacctcgatttcacgtatcaaggtttcatggatcggatgaagtagaagacgatgatgatgatgttgtcaacacatggaatttacggaaatgcagtgcagctgctcttgatattctttcaaatgtgtttggagatgagatccttccgactcttatgcctattgttcaggctaagttgtctgctggtggggatgatgcttggaaagatagggaagctgctgtcttggctcttggtgctataggtgaaggttgcatcaatggtctttatccgcatctgttggagattgtggcatttcttggccctcttcttgatgataagtttcctctgatacgaagtatttcatgctctccagccgcacgatttagcaaatttattattcagggtattgggcatccgaaaggctatgaacagtttgataatgttcttatgggtcttctacgaagaattttggatgataataccgggttcaagaggctgcttgttcagcttttgcaacgctggaagaggaggctgctgaagagttggcaccacgcttggaaattatactaaagcacctaatgactgcatttgggaaatatcagagacgaaacctcagaattgtatatgatgctattggaactctagctgaagctgttggaggagagctgaatcagcctgtttatcttgacattctcatgccaccattaattgagaaatggcagcaactttcaaattcagacaaagatctttttccactcctggaatgctttacatctatatcacatgctctgggtactggtttcactcaatttgctgaacctgtatttaggaggtgcataaatataatccagacccaacaatttgctaaggctgatcctgccgccaccacaggggttcagtatgacaaggagtttattgtatgctctcttgatttgctttctggactagcagagggtcttggcagtgggatagagagtttggttgcacaatgttctttgagggacctacttctgcattgttgtgtggatgatgctcctgatgtaagacaaagtgcctttgccttacttggagaccttgcgcgagtgtgctcggttcatttggactctcgtttgtctgagtttcttgaggctgcagccaaacaactggagatttctaaggtaaaggaggctatttcagtagcaaataatgcatgctgggcaattggagaaatagcagttaaggttcactctgaaatttc

SEQ ID NO: 4122 - DNA, 395 bp, Glycine max
  Clone ID: PAT_MRT3847_103729C.1
ggctcgagcagtgccttttccaatttcaatgttcaagcaaaaagaagtttagaatcagaattgatgcataggaagcttgtgccttccaccaataaagggcatttaaattttgattgtgacaaatattcaagttatcccaccatccatgggggtgtcacagaacaagtttttgagggaaaccccagcaaagctcaacttatggaagcattgtgtcatttccaaacacgtgcgaggaaagcaggggaggcagcaaaacaggcttgtgctgaaaaagagaacactattgcactctttttcatacaagcttcacagctttttgcctataagcaatggtttcaactgttgcaggctggaagctcttaactctcaagtaaagaaacaaggatcaatcaatc

SEQ ID NO: 4123 - DNA, 121 bp, Glycine max
  Clone ID: PAT_MRT3847_10372C.1
gaccaaaaaaggccaaaacctacttcttttgttccttggcggggtcgccttcttaaaaattgggtggtcccaaggtcctaataagggttgctgattggtggttgaccttcaaccttggttt

SEQ ID NO: 4124 - DNA, 521 bp, Glycine max
  Clone ID: PAT_MRT3847_103730C.1
acattctttgaacagtgatcatccggagagtccttggttcacttgagctcgtctcatcttcagcggaattgatagagatggcgagacgatggatcggagcagggacgctagaagagacgactcccaccaacacgataaaggtgcgttagctagacctaatgatgacccctgatcacatctactccatgaattggagtgcgcgatcggacacgacaaactcactgaccatcgcgttcctcccctgccgtactcgtacatccggcgccagtatgcgccatgcatccaccactcctacggggcagatccgatccgatccaatcatctctccttggagaatccctaccctccgacaacatcgatctccttccccgaggaagaatgacattgctccgagctattggctacgtcatccgactgcttctgggctcgatagatctctgaatcctcctgtgcattcatcgccgcctctcctgttccagaataagaactcgcactgggagccgcacatgtcaatccattgg

SEQ ID NO: 4125 - DNA, 713 bp, Glycine max
  Clone ID: PAT_MRT3847_103731C.1
atgacagaaggaaaataatttattattaagaaagataaaattcccatattttttatgatacgaatctttagtaaaaattactttcagtgcaaataatagtaataataatgaaaaggaaaaaaaaaatttgttttgcaccatataacacttttcaattatatttgcaacaacaatatgttaatattcacatatcttaatgatattctctcatataagttgttcaatggtacattaattttattattgcttttttaaataattcaaattatatccttatcgtatatagtttgagtaaaattgccccctcttgcaagtgaatttttggacgattcaaacaattttgagatctgataaaaatatttaaaaaaattattacaagggttttgtaatcaataatcataagtgtaaaattctaaaactttcgattaaaaaatactcctacgaaacttttggagtattaaatcatttcttaactttttttcatttttttagccaataattaatattttaagaaacctattgtttcatacgaaaaggttttgtataaaaacgtgataaagtcgcgtgtcattattgcgaaaaattaaattttttttttaaagaaaagtgattgcttcaatgtcattatttccagagtaccaatatcttttcacagtgaaccaagataaaaagtgaaaaaaataatctaaacatacattagaaaagcataaaaa

SEQ ID NO: 4126 - DNA, 179 bp, Glycine max
  Clone ID: PAT_MRT3847_103732C.1
cggaattcccgggtcgacccacgcgtccgctccatcttagggagcactcagattttgtaatactcatggcctcgcgctagactgcttcccgccgctcagccgcgacagcgatgatcaaccttagtatatccatcatctctgccgagagagcagatggactccatgaccctcgacgagga

SEQ ID NO: 4127 - DNA, 438 bp, Glycine max
  Clone ID: PAT_MRT3847_103733C.1
ggctcgagcttaattctttttttatattttttggcgagcaaagaatgtatatataaaaagaacaagcgggcccgtatcgttcatatttacctcatacaaatcttcacgacatatgattttccattactaaacttctagatcgcaccaacaccatctatatcatgaattaccacgctgcatctcagtggaaaatgattcaattcgaataatttcaagaacgcttatttactttcactttcaaagggattgagaccacgatatcgtatgctcttaaatctctacttaacattcagaaacctgtttgaaaaatgggttgacatgcacctgctcagccaatgtaaggatttaatggggcccgagtctggtgcaaccaacacctccaccgttaatataatgctgattatgggaaacgagattggtcatcacgtccacatgcac

SEQ ID NO: 4128 - DNA, 943 bp, Glycine max
  Clone ID: PAT_MRT3847_103734C.1
tgtgggagatataggagctttccatgggttagcaagcttctatagaaggttcgttcttagtttctctacaattgcatcacctttcaatgagctggtaaagaagaatgtggcatttacttggggtgaaaaacaagagcaagcctttgctttgctcaaagaaaagcttactaaggcacctgttctagctcttcctgacttttctaaaacttttgagctagaatgtgatgcctctggagtgggagttggagctgtattgttacaaggtggggacttgtatgctttagatgaacatttctctcccatttatgagagttgtgggaaaaaggcccaagatggattctatttggctgaggggtatttgttcaaagagggaaagctttgcataccccaaggatccattaggaaattacttgtgaaagagagacatgagggtgggctcatgggccactttgggatagataagacccttgtcatactcaaagaaaatttttattggccccatatgaagaaagatgtccataagcattgcactaggtctttatccacccttttaagggctcttctgaaaggcaaccataagtcttgggatgagtatcttcctcatgatagattccctactcaaaggaaatccaagcttagccctagaggggatggaccttttcaggttttggagaggatcaataacaatgcgtataggttggacctcccagaagagtatggagtcagcaccacttttaacatttctgatttaattccttttgcaggtggagctgatattgaggaggaggaactaacagatttgtggtcaaatcctcttctaggggaaggggatgatgcaacccttcctaggaagggaccagtcactagagccataatcaagaggctccaagaggattgggctagagctgctgaagaaggccctagggttctcatgaacctcagg

SEQ ID NO: 4129 - DNA, 388 bp, Glycine max
  Clone ID: PAT_MRT3847_103735C.1
ccaattttggcccttgttacccaatccgaacgcttccccaaactcaacatcaccgctagccacgctttccctgccactcgcctccgccaccgtgccatttccgcggtggttaacgcatctcaacctctactcgccatcggcaccggcaccgagggccattaccgactacgatgagcactcgcattcactcccctgcattcagaatatacgcggcaaatccatcgtcgtcaagtacggaggcgccgccatgaatgccccggagctccaggcctgcgagatcaactaccttgtcctcctctcctgcgtcggcctacgccccgtcctgatccacggcagcggccccgatatcaactcctgcctcggccgtctcaacatccccgacgacttc

SEQ ID NO: 4130 - DNA, 533 bp, Glycine max
  Clone ID: PAT_MRT3847_103736C.1
atactggcatggtttaacatgctgattattatgaggatatatacattaaaagagactctgaactctttcatgaaaagaattatgtttggagcgagccaatgtaattgatcctacctagatcaaatatatgaatcaaacatgcacaatatgaatttctggcgttcgcttctcacaggaatagccacaaagtgtcgatttggacctaatgaatgagactgacattaggggagcggaacagtggtcacttgcctatcaacatcataacccgggcagcgtgagggaatcctacctggaattgccgtttggcgattcacaacgaacaactgtggagcgcataattcaacggttgccactgtgcactccacctgaacttgcaccatgatagcgagcaaatggaaccctaaaattgacagagtgggggacctgatcatcaaatacggaaccctgctatgctaccatgggacttgctgcatgctcgagggtcacaacatcgacaaaacaaagtactagtggatcacccccaggttgtctcg

SEQ ID NO: 4131 - DNA, 669 bp, Glycine max
  Clone ID: PAT_MRT3847_103737C.1
cccacgcgttcggtttgaaacctaagttcaattcagcttctggtaacttttctaggaactcttcaatttttttatcgaatcagacaagttccttggccagggcatcagaaaggccgagagctaatgatgggaggaagcaaggtttgacacatgcaagtgtttctgggagtagttttctcaatttagcttcaccagctgttcatcaggtattagttttacccttgtttagtttacatttggactgttgtcctgtgcattcctgcagattgttaaacgagtatcaacatttctgagtgaaattagttgctactactatacttggttaaagttttccttgaccaaaatgttttttttctttcacaagtacacctgtggaggcaatgactagatgactattagtttgtggcctttcagaagatcttcatataaataaaacctagatgaatttttgttcataatgtctggtggtttgaagatacttttctgtttttgtaggatagaaaatctggttgttgttcttttcaacttatagttataatttctattgggaatgttatgtcccatcatcaattgaaaatagtttcttcaaatattgaattttctgatttttgatctaatgcctatggacagtctgcagttgctaaacttaggccgaagcttcacattggc

SEQ ID NO: 4132 - DNA, 369 bp, Glycine max
  Clone ID: PAT_MRT3847_103738C.1
aacctaacaaacatatttagactaatattctagcagggacaagtgtaatacaattactggtaacagtcctagtatgataaaactcctagcacaataataagaatcctaaatccaacactctaaattcttgaccaaccagcaatatcagcaagcaactataaatatagatgcaacatgtcaacccccaatgtgtgtacaactactcttttacagaactctcagattaaaacaaggtggacatcttataattggcccaaaatctgcaagagactttactctgtatgttaccaagaaaactactttttagaaaagcgcacaatgtctttcaacaaaccttgagagcggaaactgaagggtacaatcacaaat

SEQ ID NO: 4133 - DNA, 468 bp, Glycine max
  Clone ID: PAT_MRT3847_103739C.1
aaactaaatatgaatattttcaaggggacaaaaaaactcccatgggaaaactaatccattttcccacgtaaaccagcgtccgagtttatttttggagggccaaattatctttacaaactcaactttcccttgaaaaaaaaccattttacttctcacgggtattttgttttttcctaaaacaaaaaccatttaacttttaacgggtattttgttttttcctaaaacaaaaaccatttcattttttcagggccggatagttctaaacatggttttcatcacaatataatttcaaggtatactcaatgagctcaatggggccaaacccctaagtcttaaaactttattttttttggggcaggttggatgttgcccacaatttcagggctttcataataaatgccagcagcctttatccttttacggcgtttttggccatgtttaaaaaccttatccaccaacttggggggc

SEQ ID NO: 4134 - DNA, 1508 bp, Glycine max
  Clone ID: PAT_MRT3847_10373C.1
gatggttatgctggttttgcaatcaaagaccatgtaaaataagctataactttggcaactaactgaagcggcgtaaaggcagaaaataattttgagtttagaggattatgcgaggggtctggtagaaggaaaggctcgggaagaagctggaagagttctaatccgcatgaaagacaggtttacgatgttgtttagccatgattctgattcaatgcctcgtgtttggacgggtaaagaagatatacgagccatcaccaagactgctcgctcttcttctttgaagttgctatctgttatggctgcaattcgtttggatgatgatgacactgacaatattgagaaggtgttagcagttgccttggtggattcgtcaccaagcagtaatgctacaaggagcatcacaatggttgatccactagcttctagcagctgggaacaggtttcatcctctaaaacattgattacacctgtccagtgcaagtctttgtggaggcaattcaagacagagacagagtacagtgtctctcaggccatttctgcacaggaggccaacaagcgcaacaacaactggttacctcccccatgggcaatagttgctttggttattctgggatttaatgaatttatgacacttctaagaaatcccttgtatttgggtgtaatctttgttggttttcttctcattaaagccctatgggtgcagcttgatgtttcgggtgaatttcgcaatggagctcttccaggaatcatatccttgtctagcaagtttattccaactatcatgaaccttatgaaaaaaactagcagaggagggacagaaccctgcagctaacaatcctcagagaaccccatcaaaaagcagttacaatgagggtcatgccgtgtcatctagcgcctcatctaacttgactagattggacaacggaaccgagtatgcgagtccattaaaagatgattaggtgaagacactcatcttactgaaaaccaatttattctgttgggagatggtggtttgtctggtggctgcatgcttgtccacaaaattcatgacttgtgagcattcaagacattcaaaggcattgggtttttttttttttttttttttgtgcaagtgccatatacagggggcaatgatttgttgatgtagtccccccttgagataggtctcttttccaatttaggcgcttcagttagttggaaaagttatagcttattttacatggtctttgatggttatgctggttttgcaatcaattttgtttgtaaattcggtgtactgagtttttttttttttttgtggaaaatttattaattggattgtgtgtttatgttagatcttttcaaagagatactagagttgatcgtgcttgctgcttgtaatgtcaactattgtttcacgtgtaacatggtcttggaagataggaagattgttttcttctatttattaaggaattaaaagtaaaccattttaataagccaaaaaaaaaaaagggcgcccgcctcgagcc

SEQ ID NO: 4135 - DNA, 498 bp, Glycine max
  unsure (1)..(498): unsure at all n locations
  Clone ID: PAT_MRT3847_103740C.1
gcaaattaagttatatcttatcagcttattgcaaacttgcagcttaaatagtatgttttctactaaccataatatcaacaacaaaaagtcaaaaacaataatagtatgctcgatctcatatgacaagaaccatgtaaacacagtcacaaacaatcatagaccacttttcgcaaattaatttaaaagctttctgattagtctctggactgcatatattttcatatttgtggtagcagccagccataataagtacggcattgataaatcacattttagaggtgagtctgaaccgttcattcaagtagtccccactacgtattggagagaatctgggaggagatgattcactgcagcaactttcaaagcactccaccacacagtctgaggccgggtcaaagaagaatgccacctgtataaacaatttgtccacctctccatcatgtctccaatgttcactattaaggccccttctaccccacgcgtncgcccacgcgtncg

SEQ ID NO: 4136 - DNA, 1408 bp, Glycine max
  Clone ID: PAT_MRT3847_103741C.1
taacaatgcgagaacttttcttcgccgtctgcactatccaggtgatatagtactgcagcgagaagacggaagtgaagggggaaagagacagaaccgaaaatggttgcgactttgagtcttccgatcatagacctctcttctccccatcgtctttccacagccaattccattcgtcaggcatgcgtggaatatggtttcttttaccttgtgaaccatggggtggacaccgattttgtgagcaaagtcttcgaccaaagttgcaagttcttctcgcttccggtccaacgcaaaatggacctggcccgcaaggaatatagaggctacactcctctctatgctgagacacttgatcctacttcactctccaaaggtgatccaaaagagacctattacattggtcctatagaagatacctctattgctcatctgaatcaatggccttctgaagaattactgccaaactggagacctacaatgaaatccttatattggaaactactggctgctggaaaaagtctgctgtctctgattgccttgtccttgaatctggaagaagattactttgagaagataggtgccttgaacaaaccagcttcttttcttcgccttctgcactatccaggtgaattgggatctgatgagcagatatgtggtgcctctcctcattcagattatggcatgatcactctcctaatgactgatggtgttcctggactgcagatctgcaaggataaagtcaaccaacctcaagtctgggaggatgtgcctcatgtagaaggggccttaatagtgaacattggagacatgatggagaggtggacaaattgtttatacaggtcaacacttcacagggttatgccaacaggaaaagaacgttattccgtggcattcttctttgacccggcctcagactgtgtggtggagtgctttgaaagttgctgcagtgaatcatctcctcccagattctctccaatacgtagtggggactacttgaatgaacggttcagactcacctatggttctgaaaaggatctaaaatgtgatttatccagttgaaggactaaatgccgtacttattatggctggctgctaccacaaatatgaaaatatatgcagtccagagactaatcagaaagcttttaaattaatttgcgaaaagtggtctatgattgtttgtgactgtgtttacatggttcttgtcatatgagatcgagcatactattattgtttttgactttttgttgttgatattatggttagtagaaaacatactatttaagctgcaagtttgcaataagctgataagataaaaaataatttgcaataagcatacttttagggttaaattcttccttgaaaagtaaaaaaaaaaaaaaaaaactcgagactagttctctctctctctctc

SEQ ID NO: 4137 - DNA, 721 bp, Glycine max
  Clone ID: PAT_MRT3847_103742C.1
gaaactgcttatgtgtcaaaatgcctcgagccgctcgagccgattcggctcgagctcgagccgcatttactcatccaaagcactctgataaagaaatcaatcagcgctataaaaagttgaattttataatacctaatgacactgggtcagcaatggtacacggatttgctggttattttgatgcaactctttacaaggatgtgcatcttggaattgaaccttcaactgcaacaccaaacatgttcagttggtttgcaatatttttcccattaaggacacccatttgtgtggatcccggttctacacttgaagtacatttttggcgttgttgtggttctacgaaggtttggtatgagtggtgtgttgcttctcccgcgtcgtccccaatgcacaacagtaatggacgttcatactgggttgggctttagtgccttgtattttttagaatgtttatcagtcttgagtagttaagttttttggagcaagcatcttggtggatctcttcaattcaattcattttgggaaattttgttgtacaataagatattttgtttgctataggtgtccttaatgcttccatccaatgtaattattttatagcattcgtatatcttgaagttctattttacttgtttctcccgtttgtgtatgtggcttatttatttattaaatataagcgtacccccagtatggtgtcagtctccattttagacatgaaaaa

SEQ ID NO: 4138 - DNA, 1013 bp, Glycine max
  Clone ID: PAT_MRT3847_103743C.1
ctttggttctactcttgtatatggttatcaaaatattgcctttgaggtgatgaagaatggatatattgcaacaataactctcttccaatcatgatgatgggacacttcttttattgtgtgttcttctatgaaaatttatagcttattcacatagcaagtaatgaccttaatattttttctttaaatctcacttattagttcaatcttaaaaacccatttttaattcctagcagtcaatgttagatcattgtcttcatttgtccaagcttcagtcatgcttaacttagtctcaggtttatgtactatgttagtgcctggtcttacacatttttcatcctagtctctagttgtaagtttttctaattgggttcttacacctatccagcctgtttctacatgcacacttccaaagccatatcatacagaaagcagttgatgtcataaaaagttgaattttgtgattcctcataacatttggtctgcaatggtccacggatttgctggttattttgatgcaactcccacgcgtccggtgcatcttggaattgaaccttcaacggcaacaccaaacatgttcagttggtttgcaatatttttcccattaaggacacccatttgtgtggatcccggttctacacttgaagtacatttttggcgttgttgtggttctacaaaggtttggtatgagtggtgtgttgcctctccctcgtcgtccccaattcacaacagtaatggacgttcatactgggttgggctttagtgccttgtattttctagaacaatcatagacttgagtagttaagtttataatgttgcaaatcagggtgaaaagtaaatactctggtcatttcaagattcaagcaaaagctgaatacaatgttttttggagcaagcatcacggtggatctcttcatttcaattcattgtgggaaattttgttgtacaataagatatttgatttgttattagtgtccttaatgcatcgatctaatgtaattaattttatagcaaaa

SEQ ID NO: 4139 - DNA, 250 bp, Glycine max
  Clone ID: PAT_MRT3847_103744C.1
gcaactccgcgacatcggtgcgcaggccgtcatcgacgccggtctagcggaccaaacacacattgagtacctatttgagagtgtctggtacccgtggatccctacaccatactgggcaccactaccgaacgctcctacatctccgtcacggcttctagcatggtccagctatcccgctgtaccgtgaccctccgcagtgcctccatgtctgatagccccctcattaatagcaattactatgccgacccca

SEQ ID NO: 4140 - DNA, 147 bp, Glycine max
  Clone ID: PAT_MRT3847_103745C.1
ggttatagaaagagagatagaaagaaaatgattgatggcaataacagtgtcaacatgagccaccacaagcctaatttcacaggaacaaatgaagttgttggttaagactatgaatcaccattgttggcgttgccactgctaagaaac

SEQ ID NO: 4141 - DNA, 535 bp, Glycine max
  Clone ID: PAT_MRT3847_103746C.1
tttcaactccaatgccatgcatatactaggaaagcttcccagcctccaagttctgaaactgtcatcgcagacaaatgatactcgttttgacctccactgtgccacgggagggttccttcagctccaagtgtttgagatgatagcaatcaaggtaaaaaattggagacttgacaaaggttcaatgccacgcattcgacgtttagacgttagaagctgcaaatccttgacggagcttccaaaagaactatggtctttgactagcttgcgggaagtgcaggtcttgtggccatgtactgaattggtaaaaaggctccaaaatttggtggtgaacaatgggtgcaagctcgtggtctatcctctctcaacaaatgatgaattagattttctctaaatcaatgactaattaattaaaaatacatgccattgcctagttcatgcaagtgtctatgcatgattttaagcatttatttttcgttatggtcgtctgtattatattcataaaaattagaagtatccaataactaaattttgatat

SEQ ID NO: 4142 - DNA, 138 bp, Glycine max
  Clone ID: PAT_MRT3847_103747C.1
gcaagctacgaaaacattgttttggtgaaaaaatatctattataacgggatggttgaattagttgtagactggaaatagaattggctaatctgttaactgaacactacctattcgtttataatagtgtgactgtatta

SEQ ID NO: 4143 - DNA, 610 bp, Glycine max
  Clone ID: PAT_MRT3847_103748C.1
ggggaggtttttttttttttttttatttttttttcttatggtatataatttgtatgtttagtatgtttttatttctgaacctggatccaggccttccttggcagattctaaaaataagactacgcaaaaagaaagattcagtgcccaaaaagagacataacattgctagacgaggaaacttacattttttttgctggaaaattaatgtatgcaaatacaaaagaaagacgagatctattgttcagaaaaaaaaaacctttgaaaaaaggttttccccccgaaaaaaaacccgatctgaaaacgggggcccgaccacatggttgcccccccaaattggaacctaaagcccccggaatggccaccggaaggccttttttggggggcccccaaattgaaataacggggcggtttttaacagggggggaacggggaaaacccggggggcccccaaaaaaagagaccggaaaaaaaaccccctttcgccgggggggaaaaaaaaaaaaagaaccgcacgggtcccctttccgaaaatttacccaccctaaagggggagggggcccccccctttaacggggcataaaacggggggggggggggggttacccccagg

SEQ ID NO: 4144 - DNA, 378 bp, Glycine max
  unsure (1)..(378): unsure at all n locations
  Clone ID: PAT_MRT3847_103749C.1
cggttgcaaaaaaacaacagaaggggaagggccagaagttggtgggaacctttaacctagttattgggaagagaaaatgaaagtggttggtttccttggtggctgaagaagttttggaagcatggccttgccttgggccaggctaccaaaggttccctttccgaatgaaaactggctttgggaaccgtccttcgggggtaaaatgcccaagttttaggctggctgtggaagcacacaacattccgagcctttaaaaccattcctgaagaggtgcgtgaaccaacataggactacatntatggcgaacaatttagatcagactctaaaacagttaaccaacaagctttcttttatgctagtgaacgcgaagtccatcac

SEQ ID NO: 4145 - DNA, 273 bp, Glycine max
  Clone ID: PAT_MRT3847_10374C.1
gggtggaggggacattgacaatgtagggctgtcacaataagctgacacttcaaagtgctatatcaagaccacatcttaagattatgagacccaaacacctgccatgcattaatgttatatattgatggagaaacaactatattgcatgtgatcagccaatgtgatcacaatattgatgctgagggaaggtgactgacatcagaatgctaagagaatagattttgtccatatgtagtgcacgaaaatagatctacatactggccagtataccta

SEQ ID NO: 4146 - DNA, 273 bp, Glycine max
  Clone ID: PAT_MRT3847_103750C.1
cggctctaggtaactcactccatttttctttttttctctctcgaacttatgggatcatcgtagataatacgggcgctggggcacattaagaagtctgtgattattgttcctccactgttgagaatgcggatatagaatctttatgctcgatataattctctacacggataatggcttgggaacctttcgtgtgttccaatgtaccgaatctgataaaaaggcagttgccgtactataattttgtggctcatttcacgttcaaaaatgcgttaa

SEQ ID NO: 4147 - DNA, 233 bp, Glycine max
  Clone ID: PAT_MRT3847_103751C.1
tccacgcgttcgctccagttttcgttagagacactgtgtcatgatttctctgaatctaacacagacccgattgctacgaatggcatccatcaggggtcaaggtggaattcaacagttgctggctgctgaacaagaagcgcatagaattgtcaatgctgcaaaaaatgaaaaattggctagactgaatcaagccaaagaagaggctgaaaaggaaattgcctagcatagggcta

SEQ ID NO: 4148 - DNA, 440 bp, Glycine max
  unsure (1)..(440): unsure at all n locations
  Clone ID: PAT_MRT3847_103752C.1
agaatttgatcctccatttcggattaagaaagacgagcaacaattgcctgatttgcaactgggtttgagtcacacagttggaactgatggcaagatagatcattataaagaaaccccagaaatcagcaccaagctttcactttcttagagcttcgtaatgtcaataacgcaaatgtagcctagctaatcataaaaatagagtgatgatatattgtccaaacatcaaaaataggtacacaaggatcaatattgtccctggttatataggacatgggcttgttagatatacatagttttttttttttttttttaaacctacataggatttgattgtaaaaggaaatgtgtcgtcctgattgagagtgagttcccncattagcgatttttcgtgtgtaagtgattggttagatcaatgcactaaatttaaatgaagagaccaa

SEQ ID NO: 4149 - DNA, 197 bp, Glycine max
  Clone ID: PAT_MRT3847_103753C.1
taaaagcaaaggcagtaaaaattaaactaccatcacagattcacattaatttgccaataaatagaataataggttaggggtatggaaacgctttacagtgatcattctgcggaaccacatgaccaaagctacatcctcttgacatcgctcgtgacattctataaaaccaaaacccaaacaaaaatcatgagtcggag

SEQ ID NO: 4150 - DNA, 416 bp, Glycine max
  Clone ID: PAT_MRT3847_103754C.1
gcgtgcatccttttcagatcgttatgcatggatcaactttatgtgtcatgataacagagcacttgtgcatgaagctactcgctcaacatgtgtagaactggaagaaaccaaaggagcaaaaggtgcatgagaatgatgatccttatggccccattgaacgctggggactcctatgctggttggataaattgctttgaaagagaagctccctccattttcttggactcagtgaaagagtgctgtgaaagtctggtgattgctaagttcttgggcttgatgagcacttatctaaacatgagcttaagggggaacatagggccgtgtgaaaccaagggaaggagagtgcgtcgtgcgttgcgaatgactgctgtgggaagctggcgctgcggggggtgggccatgaaacgctgggggtt

SEQ ID NO: 4151 - DNA, 421 bp, Glycine max
  Clone ID: PAT_MRT3847_103755C.1
atttttcttttaatctctatctttttctcttgttgtcttttctgcttttattttcttaggtgcgacgtactcctgctcctcaaaactcctggcgccaccgaaaagcgacgagcctattgctatgagttaccgtggtacggatgcaacaccacaagttgggtttggttggattgaataaagggggaaaggttatttggacaggaatctccaaaaactacctggaaacgccctcttcgggggggttgccaggctgctaagaacactttctccgggaaacacctattcgccttgtaatacatccccctttttgaatcactttcgttttggtccctgaattacgtggacgaagaacaggtccagattcggactccctgtggattcacagaccatatcgtgaccctgctgaagctagcaaatcatg

SEQ ID NO: 4152 - DNA, 480 bp, Glycine max
  unsure (1)..(480): unsure at all n locations
  Clone ID: PAT_MRT3847_103756C.1
cgaaactcgnctcgagcaggccgagactgaggattcggtcactgctgatggatcataggtttacggtatgaggagatgatgatccatatgttattgtaatgacaatcggtagacggatgcatggagaataccaaataacaagtggttatggtcccacaaaagctcaccaagttatgaatgtaacacaataaaaaagtcaaagaattgaaaaacattgccaaaatttgcagatcatgtcggtagcatgagatatatataggtcataagaatgaactataatcacaaggcctaatgactgcttgctttagtttgatttttatttacatgtttagaaatcgaaagtccttcaactaattaaagtttttgaagaaaataaacaaacaaacattctttgaagcttgaatataatcaaaaccaaatatgtctccccatgtacatgtatattcagagcttattattttttatggtatatacgaatgc

SEQ ID NO: 4153 - DNA, 206 bp, Glycine max
  Clone ID: PAT_MRT3847_103757C.1
gaaaaaacagaagatcccccagtttgctcttttagcaatgaaactagagtcctaacaccagctccagaggatgagagtcagaggcatggtggctctggaagcagaagtataaatgctgagctgggaggagaacattgtgagaaatctgaatgtgattctcattggggaacgggatctgtacacagacccgttaatcctgagctgca

SEQ ID NO: 4154 - DNA, 385 bp, Glycine max
  Clone ID: PAT_MRT3847_103758C.1
acggtacgggacttggttttttcatctttcctgtattcattctttagggtctgtagaccttatcgttgtcgcaagaaagctgtccagctaaaaagggtgtacttccaatccgggaggaaagagggacagccaagccatctttacagtagcaggagaaacgctggcagccacatactaaggggggcaacaattagagcatcgacccccaagctgattggccccaccccttagaacatgcttggccagggggattacacccccggagtggaaaattaccgcccccccagaaatgcacgcataagaagctctcttggggggatagatgcgccacagttaccgggggggaatctataaggcccccaacgttggccccgaccaccggggg

SEQ ID NO: 4155 - DNA, 403 bp, Glycine max
  Clone ID: PAT_MRT3847_103759C.1
tcgttcagttgccagaagacgacagtaggtgctctctctaaagtctaaagcgggggggtggggaatcatatgacctggaagaggagttctttttttctattccctttcttaacatttttagctttttctctttctcaaatccccctatcttcaaaagttcaaggatatcactctaaatacaagattttttttaaaatagactgtggctatgggctgcttggagtgctggtctggcactatagtgctgctacgaaggctcatagtagcttagaggcctttggagaaaattatttgcactgtctctttcttcaaggcctaatctgggtttgctgctactaagccattctggatccttaacacaacaagagtgggatattgtggaactacaattatcccctcgagc

SEQ ID NO: 4156 - DNA, 438 bp, Glycine max
  Clone ID: PAT_MRT3847_10375C.1
tactataggagagcgcctgccgtgccggaccggtctctgcagggccgacccaggccacccgtgtccgcttcgcgttctagatcgcgagcggcaggccttgtctcctctcttaaacctaaaaccgaaaaacgtctccgtcgtacctctcactcagccaccaccgcctcgctcaattacgagttggctatcaaacaaaggttggggggagaaaaatgagttggatatcccaaaacgctcgcactaaaaatgtggtcaataagagcaagagggaggttgaagaagaatgcgggaatagtgatactctgaaagtgaagaacaagaagaaagatgacgagggggaacaattggctatggaacacgtgaaagagatgacgaagcttgagaactcatcgtttggacctttatatcccccacttgagcttggaaaggaggaggatg

SEQ ID NO: 4157 - DNA, 654 bp, Glycine max
  Clone ID: PAT_MRT3847_103760C.1
ctcgagccgcgaaggtccaatccctgaaaatgtgtgcaaaggtaacaagctcgtgagactcatactcttcctcaacagattcaccggttctctcccacattccctcgccaactgcacctcactcgctagggttcgcatccaaaacaattttctcaacggttcaatcccccaaggcctcacgctcctccctaacctaacatttctagacatcagcaccaacaacttccgaggtcaaattccggaacgcttaggtaatttgcagtacttcaacatgtccggaaactccttcggaacctccttaccggcctctatttggaatgctactgatcttgcgatcttctctgctgcagcaacaatgagtgcaccatgctgctttacgagtacatgcccaatggcaatttggatgatttgttgcatgccaaaaataaaggagataatttagttgctgattggttcaataggtacaagatcgccttgggtgtggctcagggaatttgttatctccaccatgactgtgatccggtaatcgacaccgtgatctcaaacctagtaacatattattggacgctgagatgaaggccagagtggcagattttggtgttgccaagttgattcagaccgatgagtccatgtctgtcattgcccgttcctatg

SEQ ID NO: 4158 - DNA, 243 bp, Glycine max
  Clone ID: PAT_MRT3847_103761C.1
ggggcacaaaacattcattgggggtcattaaaaatgttgcttacattattccaacatgcaactagacaccctaaaaataactactacaaccctgacttgattcctccaccactcaatgaattatactattgacccttactaacttgcagcctcccattcatctaactattcctcaccaaagattaccaattcagtcatagacagccctgcctatgtgcctaaacacgtatccctctgacggtt

SEQ ID NO: 4159 - DNA, 258 bp, Glycine max
  Clone ID: PAT_MRT3847_103762C.1
acttgatatcacattctgccacagtgcttaacatgcggattggataagcccctctatctgcagatcttagattcagacttttaaatgcgaattagccccatgtttacttgtttgcataacaagaggaatggctgtgttgatctaaatccttgccccacacatacataacctaaaggagaaagaactacaaggaggacttgaattttctacgaaagtgactctcacaattcgcgggaccctctcaagaattcaggctaa

SEQ ID NO: 4160 - DNA, 413 bp, Glycine max
  unsure (1)..(413): unsure at all n locations
  Clone ID: PAT_MRT3847_103763C.1
caatgctcgggggatcgtgacacagcagttccgagcacataggggatctaccgctgcggctctactgagaaccatacttcttcaacatcgaagcctacggacacttagagcatggatgtaactttgagccgaccacatgcttacatgttgacgactcaatcacaagggggtgagagctgccacatcaatgtgaggaaaccgattatcatctaggtgaacgcggtgacggcacatagaatatctcgacctgnactataactcagcgaataccgtacctgtccggcgtataagtgcaaattgcgaattgaactcacagcagagctattatcgaaccttgctcggtctgacattgggaatgtcctgctggactgaacacatgaccagcgcctaatattacatgatgacacccatag

SEQ ID NO: 4161 - DNA, 166 bp, Glycine max
  Clone ID: PAT_MRT3847_103764C.1
gttcattcaaatggttgggttaactagccagagagggtcacatggcaggatttgatctgcgactatacagattggtggcttgccgtatgccagagataaaccaaaactgctaatacaaattctgctcggggggttccaggcagggggtctgataccactgtatact

SEQ ID NO: 4162 - DNA, 741 bp, Glycine max
  Clone ID: PAT_MRT3847_103765C.1
ggggacagcaaactctttgaaactttctcttctctcccacgcctctgctacacgccagccacaatccacaataataatggctttgagaaaatcaagtaaacttcctcaaacagcactcatcaagcaaatcctcaagaggtgttcgagtttagggaggaaagatgatcaaggcctcttggacgtgccaaagggtcactttgttgtatatgttggagaaaacagaagcagatatattgttcctatttccttcctaagtcgccctgagttccaaacacttctccaccaggctgaagaagagtttggctttgatcacgaaaagggtctcacgattccatgtgaagaggacgtttttgagtctctcacctccacgctcagatgagaaacttgccttaccacgtatcgatcatttttcgttttcttttcttttttttttttgaaggagaggagaaaattaatagctcaagatgaagctgcttcactgcttctcttacttgattttctccatttctttttctttatatatatgaggtttgtattttagagagactctaacctcacggaattatggtttagattgtaaatgtactagaagttaagcagcattttttcccacagaggtgaacgatcgagtaaatgtgccctgttggagaactaatttaaatgatagtatatattatatgttgaactctttgggttctttctttctctcttttgggtaaaattatgcgtttccctgctttt

SEQ ID NO: 4163 - DNA, 630 bp, Glycine max
  Clone ID: PAT_MRT3847_103766C.1
attgatgttgactctctcaagggcttgccttatctcagaacgttgagtttcatgaacaatgatttcgagggtgcatggccagagattcaacatttgattggtctcaagtctatttatctttccaacaacaagttttctggggagattccttccagaacttttgaagggttgcagtggctgaagaaggttcatttgtccaacaaccatttcaccggtgctgttccaacttccctcgtgttgctgccgaggctcatagagttgaggttggagggaaacaaattcaatggccccattccatattttagttcccataacaaattgaaatcatttagcgtagctaataatgagttgagtggccaaattcctgcctcccttggagccatgccagtttcttccttttctggtaatgaaaggttatgtggaggcccattgggagcatgtaattcgaagtcctcgacattgagcattgttgtggctttggtggttgtttgcgtggcagtgattatgatcgcagcagtagtattattcagccttcacagaagaagaaaaaatcaagtgtcagtagagaatccagcctctgggttcgggggtaataaaggacgtgtgagggaattgggtagtgaaagtatg

SEQ ID NO: 4164 - DNA, 183 bp, Glycine max
  Clone ID: PAT_MRT3847_103767C.1
gtttgtctgcaatggtcaaagacagacgcttattcttctttatttatcatacaaaacgacttcacgtgcggggaagtacaaaaaaatagtggaagataatcattgatcacgtacagaaaattattgtattggatgtatgaccttaacttcagttttaccttaaatttaagcaaaaacatttta

SEQ ID NO: 4165 - DNA, 247 bp, Glycine max
  Clone ID: PAT_MRT3847_103768C.1
gcgcccacgcgtccgtccacgcgtccgtacggctgctagaagactacagaaggggacacgagtaaactggggcatatcttccctgttgcttccttcctctcccaaaatcaaaacccctctcctgtgttgttgtgagagaaaaacacatagacagatacagagggttgtaattgagttgcgcgagtggggggaactcgcaattaataagtatgttttaaggaggtgtaatttctttcataattatttt

SEQ ID NO: 4166 - DNA, 264 bp, Glycine max
  Clone ID: PAT_MRT3847_103769C.1
caaagaggagctgaatatatttatgcgagggggaaccgtcttcaaaaagtggaggattcccacaagccttttttttagaatagtagctcatttcaaccctatgacaaaaacccgtttttaagggggaaattgacccccctgtttaaatccacatatctgaagagcacggcccacaccgattttttattttatgggcgagaaaagggccattagggttaatttccaaagcccaaaaaaaactgggggttaatttgaaaccccctt

SEQ ID NO: 4167 - DNA, 478 bp, Glycine max
  Clone ID: PAT_MRT3847_10376C.1
cccgccatgacgtccgccattttccgctacaccatccgccatatttttatggtggatttttggctttccgccatgaaccgccatccgccattaacaacactggttccaatttttttagtaggaactacaaagagctcctcatatttttggactttgtgatatatcttttagtttttagaaaaactcttgcaattagactaagtggttgaagtcttgtgttaatttgattttgtttttggttatatggtgtttcttgtactactgcattcagttcttgtgagatttttgtcgtaccttctgagatcttcaacatcattttgcagattaaaagagagataaaaatacttcagaacctttgtggtggcccaaatattgtcaagcttcttgatattgtcagagatcagcactctaaaactcctagcttaatatttgagtatgtcaacagtacagatcctttctgtcgtcttctcgcagccgt

SEQ ID NO: 4168 - DNA, 266 bp, Glycine max
  Clone ID: PAT_MRT3847_103770C.1
tgatgaacttgtaattattcacctatgcgactgcttgtggtatgaaagatgtgtgatagcgcaagactcagtctatatttgagcagatcactggaaatgtcctcgaacttattctagtccagaggctatccagatgaccgagttatatgtatattcataggtggttggatactctcagttaactttgcatccatttcagccatattagcttatatatgcatttatgctagtctgaagtggggatggattcagactcactgtagtac

SEQ ID NO: 4169 - DNA, 819 bp, Glycine max
  Clone ID: PAT_MRT3847_103771C.1
cctctgccaccgcaaacccttcctcacagcactcatcgattcttttggtgccgtatttgtctattcggttgaagttgaataatagaacattccatggctgaagaaatgaaaatggtagaacctggaagaggtaagaggaagtttttcaaaacgcaaggccataaaaagtcaagtaagaaagcaaaagtgatgccacagcacctgggacaggtgagaggtaattttgtcaaaagcatggccatactttccgcgtggagcgcgggagtgttgccaccacaacatggacaaaagaaagttaaaatagacaaaaaaatgaagaaacttttccgcaagcgagcacgggagtataattctgatgatgaagaagatgatgaggccactgtccctgctaccttagagcctaaaagtctggcatctatcaccaataaaagaaatgacgaggatgacacagaaagtgaggataggtctgaggatgaaggagctgcaggaccacaaaaaacatggaataagaatgctactgatatgaataaccacagctctgatgatgaaggagaagatgataatgaaattcagccaggaattacaaaattcactgaaggatgtagagcattcaagatggcctttaagaatattatgcagaagagtgttcctgatgacatgttgggtccaatactgtcagggcaaaggaaacttgttgtagacaaacttgcagaagaggaagcagaaagcaaggtcaagggagaggccaaaaaagaaaagaagatgttggccagaaaaggggcatgtcaaacctgctacatacttggattcacatgaaaa

SEQ ID NO: 4170 - DNA, 473 bp, Glycine max
  Clone ID: PAT_MRT3847_103772C.1
gttatgttggttgctctacttaagtgccccccttttccctcatagcatttctttcttgtcacacaccctttgcttcaccccttttttcagtttttagagagaaggagcataaggaggagaaaaaaaagaacaacaacacatacatatattggtcaagaagaatgggagataacaaggaccatgatttcttttcccacaaattccccacaacctctcaggtgatggaagagatgaaggagctgtggggcatggctctacccatcacagctatgaacatgttggtgtttgtgagagcagtggtttctgttctctttttgggtaggcttggaagcctagagctagcaggtggtgcactttccataggcttcaccaacataacagggtactctgttcttgtgggtcttgcagcaggcctagaacctggtgcagccaagcctttggtagcaaaaactgggaccttctctctctctctc

SEQ ID NO: 4171 - DNA, 374 bp, Glycine max
  Clone ID: PAT_MRT3847_103773C.1
ggctcgagcaaccgttcactccttcttctgcgtcaccgacaccatcataatcaccatccctttccttattcttcttctgcaacatccctctccccattttctcgctctcgttatttgtgctctactccattctccatggctactgattacccttcacctgtcaccgctcaaaacatcaaccccaagggtctgaaatgtgagtttgctgatggaggagaggcagtcacactagcccagaacttgcaaaaggatattacaggcccatccaggagctcacccatctgacgagatactatactgcaacattggaaagcctcagtctctgggccaacagacaacaactattttccgagaagcttttgcaccatgtgacc

SEQ ID NO: 4172 - DNA, 380 bp, Glycine max
  Clone ID: PAT_MRT3847_103774C.1
gttttatcattggttgaaccggaatgaccggtggctgagaattttaatcggagacaaatgctagacatacttgagacgcacagtttcactattcttccctaggtgtttgagtacgaggtcttaaaggaaagaaaataactctctgggctgatcacagactaaagggacaagcttatttgccaatgttagaatatacgcatactacatgtgaatggactgatatgaccattagattaatgaaaacgggcaacgattttctgtgaggtgactgtgctagtttaggtggatggagtaccaaacaagttatgagcctgatggtatacatgatgaattgtgattgcggtggtgaagaaaaatagatgcgtgataggacacacctg

SEQ ID NO: 4173 - DNA, 1032 bp, Glycine max
  Clone ID: PAT_MRT3847_103775C.1
ggacgcgtgggtctgcaaatccaatgatgttcctgtgtatagaagggatcctgatcaaggtgttgatgtggtcggtaagagtggtggtaaccatgctgtttcgggattgaaatttcgtattttgagagaatttctgcaactgggttacagtgttcttctctcggatgttgatattgtgtacttgcaaaacccctttgattatctctatagggattcagatgtggagtcaatgtctgatggtcacaataataagacagcttacgggtataatgatgtctttgatgaaccctcgatgggttgggctcggtatgctcataccatgagaatatgggtttataactctggtttcttttatataaggcctactcttccttcaattgagctcttggatcgtgttgcaactcggctttccaatgacccaaaatcatgggatcaggcagtttttaatgaggagctctttttcccttcacatcctggttatgatggacttcacgctgcaaaaaggacgatggatatgtacctttttatgaacagtaaggttctatttaagactgtaagaaaagatgctaaactcaagaagctgaagccagtgatcgtacatgttaattaccatcctgataagtttgcaaggatgaaggcaatagttgagttttatgccaatgggaaacaggatgcgctggatcatttcccagatggttctgactgataggaacattagaacaaatatgtttctaacacaggaaggatttgtatgctcaaattgatgtgatacagagccaatcatttcagttcacctcccaggataagttttatgctaatgtactttctgttgagttttagaatttgttgtgtttgactattaaacatgttttctgtaactttgtatatatttcttctctgtaatgagttgaaattcaatatctctgcaatgaacttggtcatgtcgaggtcgtttttttttatgtaaagaaattaactgtttgttttacagtttttgggatatgaaataacatgaagaccacgtggctagtt

SEQ ID NO: 4174 - DNA, 336 bp, Glycine max
  Clone ID: PAT_MRT3847_103776C.1
aaaaaaaaaaaaaatcaaaaaaacaaattttttttttttactgagctaaaaaatatacgggccggttatgtcatcatttataaaaccactacaaatgcaaatcatacttatacttaatttgctcttcgaatatgtcccatagactatgtatcctgtctcaaagttctatactaattctaatcagagcattccacttatttatcctaaactttacatgcaccatatttccattagcctggtttatatacacactgttcctgcaggcagacacaaatattctaagcctcaaaatatactaattgaccctcttacacaccagtttcagatattttattt

SEQ ID NO: 4175 - DNA, 338 bp, Glycine max
  Clone ID: PAT_MRT3847_103777C.1
ggaacattcttttttttttttttttttttttgttttttgtcccaaaatggaggattccttgtcgcacatagctcctcctgggggggagggggccaagctggaatgttccctagcgggcttctgtcggaggggggatatttgcgggccacctgggccgcccaattaaccaaggggggcatcagggacaaacccccccctccccaagggcaagcctcttgggttgccgccctcggcgctaaaagtttcccggggcggggctctcaggtccctacctttcctgaactcggggggccttgggggggcacccctcaaagggaaaaacgggcccccccaacccc

SEQ ID NO: 4176 - DNA, 135 bp, Glycine max
  Clone ID: PAT_MRT3847_103778C.1
ggctcgagcgccagcttaccactccagtctcccaggcttgagcttccggacacggcgaccagcggacacggggaccggtttcccctctccctatgcgatgtacaactgcgggtggtaggagaggctcataacccc

SEQ ID NO: 4177 - DNA, 417 bp, Glycine max
  Clone ID: PAT_MRT3847_103779C.1
ttattgggggagagaaatgtgacttttctaaattgtattgtagcagcgtgcgtgagttagtaatttcgccaaacacccttcccgcagaagtctatgaaccttgagttgtggactttataatataattcttcaaaatcaagcgcttcccattcatatagtatcgcctcatcgtgaccggaattcaacggaaccgcttcttcatcctccaccgtcctgggtaagctaagctagctgccatgtctaaggataaagacgctaccaatctctcacgcaccttcaagtacctattagctactcagttcttgtcaagaggaattccatttatattcaatacatggattgtaaggcatcttactcaagaggactatgcgctgtatgcagttgcagttcatttgctagtcacatgtattttatttc

SEQ ID NO: 4178 - DNA, 1657 bp, Glycine max
  Clone ID: PAT_MRT3847_10377C.1
aaaaaaaaagaggattttttttaaaaaataaagcaaataatattggaatatcctgcacaaagaaagatcataaagatgaacaaatgaaacatcatctggtgttttttatttagcactatattattgacaaagaatactaaaacggactaccaagggttatcaatcaatgtgcattgtgaaagggcagcgaatatttgaaagcctgcccattccttgtctttggttgtaaaatgtcacacacatgggtgagttttcctttaagctgaggtaatcccactctttcggattaattgggttaataaatagaaaattgactgaaaatcaaaatcataagcaagaatttcttgctgactccaaaaccaaaatctaaagatgatcaataattgcctttgtgaattcagttgtctttgaactgccaccgaggtcagctgttcggtacttcccttctgcaattgtgttcaggatggctttttgaatctgttctgctttgtcatggaggttcaaatggcgcaacattgtaacaccacttagcagtaaagcagttggatttgccaaattctttccagcaatatcaggtgccgaaccatgtacagcctcagcaagtgcaataccgccctcaccaatgttgcagcttggtgttaagcccaatcctccaatcaagccagcacaaaggtcactgataatatcaccataaaggttaggcatcactagtacatcgaaaagtgcaggattcttcacaagcatcatgcagcaattgtcaatgacaacttcctcataagttatctcaggatatttctctgcaacctcacggcaacacttgaggaaaaggccatcagtcttttgcataatattggctttgtgtatggcagaaaccctctctcttccatgagccttggcatagtgaaaagcatactcagctacccttaaacttgcttgacgtgtaatgattttgagactttctacaacacctctcacaacctgatgttcaagtccactgtactcgccttccgtattttcacgaattgtaattagattgacattatcatatcgagttttgtagcctggaagactgtagcaaggtcgaacattggcatacaaattgagctcttttctcagagtaagatttaacgaacgatgcccttttccaataggggtggccattggccctttcaagccaaccttatttttccttacagattccaaactttcccatgtcagaaagctttgcgttctagggtcaatttcagttcctacatagtgctcttcccattctattgggacatcagctgcttggaatatctgtttgacggattcggcgatctcggggccgatgccgtcgccggggaagagagtggcgcggatcggagtggaagcagcggaggagaaggagaaggccctagggtttgcaaggatgcgacttccgaaggttcgtctcaggagctgagaagccatggttttcaccacgcgcactttctcacgcacaacgcaggcgtaacgaagaaactaaaattattattattacaaacctggaaacgagactagaggcgcgtaatgtattgagtagaagaaggcagaacagaaatatgcgattgttcggttagatcaccagttaaagagtattctcatgtgtaaaatacatcaaattaaatctcgagcc

SEQ ID NO: 4179 - DNA, 248 bp, Glycine max
  unsure (1)..(248): unsure at all n locations
  Clone ID: PAT_MRT3847_103780C.1
aacgattattgtgaagaacganagcnagcaaaaatgtttcatcagggagttntaattttctgtaagatggaaaagaaaaatcaaaatagaggtaacttttgttttgtttcaactttcgagtaatgtggtagtttgtgtttaggaacgtaattatgattgaattggttggttatgagtagtatntgtgaatctgcttttgcatgtggaaagctgtnnttntatttactgggtggnagannacatcactg

SEQ ID NO: 4180 - DNA, 397 bp, Glycine max
  Clone ID: PAT_MRT3847_103781C.1
tcaaaactctcctttaatccaaaatactaattctcttatctattttttgactccattacaactactagagacagggtttatatcactatttacccacccccccacaacactcaatacatctaaaatacaaaatttccacattcataaaacaacaaacctaacctaaaatcacatttacagaaacatctcactcttaaacatctataaccatctctccaaacaaaaacaatcttattatccactcactattttattacaaaaaccacctcctccaaaaccttattcaattcataaccatcatatacattcaactaacccctaaaaacccccttaatcaaaaacatccctactccaaccaaatattacctcatttaccaataaaccaaaactccttttt

SEQ ID NO: 4181 - DNA, 621 bp, Glycine max
  Clone ID: PAT_MRT3847_103782C.1
caatccttcctttcttcatcttagtgttcatgctaataatcaacatagtttggagatcaaaaaccaagaattcaaactccaagttgccaccaggaccaaggaagctacctctcatcggaaacatacaccaccttggaactctgcctcatagatccctagcaagattggcaaatcaatatggtcctctcatgcatatgcagcttggtgagctatcctgcataatggtatcttcccccgaaatggcgaaagaagtgatgaagacacatgatatcatctttgcaaataggccttatgtgcttgctgctgatgttatcacttatggctctaagggcatgaccttcagcccgcaaggaacttattggaggcagatgagaaagatttgcaccatggaactgctagcaccaaagcgtgttgactccttcagatcaatcagggaacaagagttgtcaatttttgtcaaagagatgtctttgagtgaagggtcacctatcaatctcagggagaagattagttcattggcatatgggctaatatcacggattgcttttggtaaaaaatccaaagaccaagaggcttatatagaatctatgaaggggggcactgatacaggttgagggttct

SEQ ID NO: 4182 - DNA, 1022 bp, Glycine max
  Clone ID: PAT_MRT3847_103783C.1
gtctccaaaatccaaatgccattcaaatagctactcatccaatatcaaccatggtaccagcatattgaagtgaattatcactatatttgtcaagttgtagatactacttgggtcatttatctttcacatgtttccacaactttgcaaatggctgatatgtctaccaagtctctccctagacaatttcatcagtttcttgttcacaaattgatgcttcttgattaaccagcatcaatttgaggggggatgttaccatataaaactctaactcattttgtacagatgtttcttttgggattgaatggttgtaagtattacatatttactgcaactgtgtattcctctccacaagcacattttaccacatggcgaatttgctcgagtttctcaacttgtttctctagagattgcaagtattcagcttctcctgctttgtctgaaataagggctgtacattcctcttcaagagcagttatatctgctgcttttagctcaggctagcatagctcattcattagaataaaataatttacaaaatcattgattaaaagccacaaatttattgcttgtccaactaagaggagaaaagaaagtagcttgcaatcaaagatctaatgtaaaacaatatacagggaaatacatatatataaaatggaaatgttttccactcaaccatcctaatagaggaaaattatgataatcacaaaattcttaataattctttcagaataacaaactaacaaccaaccttaaactcattttctctgcacttcacatcctcaatagcccgttttatcttgttgttctctgtaagaactttggctttcagagcaagaatcccatcaagggttgctttagcattatccaattcaattattaaatccttccttacatcactcccctgtcaaacaaagataaattaccagattccaacttcatgtaatatacattgatgaaagtagtctaccatgttatccatgacaaggttaccatctgcaccatccttccctgcaagttaaaat

SEQ ID NO: 4183 - DNA, 500 bp, Glycine max
  unsure (1)..(500): unsure at all n locations
  Clone ID: PAT_MRT3847_103784C.1
tcgcangcacgcgtacgtaagctcggaattcggctcgagatgggctctgtggaggaggcagtgcaggcactaattgagctgcacaaccatgacctgggcgagaaccaccacctgcgagtgtccttttccaagtccaccatctaggtgcctgtgggcctgcgaaagcttccgccattccagaaaagccactttaaaaagcagctgaagtgaccttacagaccagagattttatttttttaaagagagatcagtttacctgtttttaaaaaaattaaatctagcccactttgccgtggcaggaaatggcttgggccacagaggcccagtcccagcaaccatgccttgaggggcttaggcgtgaggccacagcggtgccccgaacacagccgctttctgtgccttacaaaaccagcgtgcctcacggccgcacacccaccctctaaggccaccagttgtctctagacctgcagtgagccaggcggcctatacttaggctcccc

SEQ ID NO: 4184 - DNA, 272 bp, Glycine max
  unsure (1)..(272): unsure at all n locations
  Clone ID: PAT_MRT3847_103785C.1
tcactattctccctatggagtttaatcttgtggttcgtcanaagtttttaaattttgtgangttcattatgnacaaaagggncnancntagttggcnangtngnanccaacccnaacncnanggantggacctggtttggccantngattactgantaagggcaacgatattccgtgttncgattatgccaagttttgatggtttgattaccaagcaagttatgagcaagatggcaganatgataaacagtctttgtggtggtgatgaaaaa

SEQ ID NO: 4185 - DNA, 159 bp, Glycine max
  Clone ID: PAT_MRT3847_103786C.1
taacgtttgacgaagtgaacacattgcatggctaactcaaaggcaggccattactataaatgatattcgagtgtgatcaggaagcaaatctgcaggcttctgacaatcatgtcctacaagcggtttttcctaagagagatatatgccatcaactgaagg

SEQ ID NO: 4186 - DNA, 312 bp, Glycine max
  Clone ID: PAT_MRT3847_103787C.1
tcgtggttgcgagaagacgacagaaggggggtctagttttccagagagtgatacaatggggagggctgttttgctgctgggccacaactccctgccaacatggatatttccagagattctatgcacaagaggcgttgccactggtggcaagaataaggcatgtatgaagaagagaaagtatgatctttggctccagtctgttaacacttaactttcaagcaacaatgacagtctagtggatccgtgttagaggtggaattgttaagtttagggcacttgaaattggttactggaaattactcttgtggaatg

SEQ ID NO: 4187 - DNA, 261 bp, Glycine max
  unsure (1)..(261): unsure at all n locations
  Clone ID: PAT_MRT3847_103788C.1
ctacaacaagctaatagttnannttgagatnagtnttcctacattggttggcattgaatgtcccanggatgagananttcctcgtcncaanatttttgncaaacctnagacgcgctgcntcgctattctgcctatggagtcnaatcttgtggttcgtcagaagtttttanattttgtgaggttcattatgnagnaaagggacaagcttagttgtcaagttggaatcaacccatnctccatgngnntgnactcgttcggnca

SEQ ID NO: 4188 - DNA, 433 bp, Glycine max
  Clone ID: PAT_MRT3847_103789C.1
agtcattctcactagggaaaggatcctttctcataaataagtattgaacacttatcaaagaaaatgtgttagaaagaatattgctacccaataagaaaatctgtcatacccaacttatatggaggtgggctctgttctttatgagggcgcgtataaagtaaattataagagacctgggggctttgacctgaggcacaactggggaaagcctttaaccataatggcctattgaaacatggaaattaagaatctacgtggcgaatgaagataggccccagccaatgggaaaaacttgactggacctattgctgactttctcatacacctcgagggtgctatgcccatacaaatcggagggtcaagaacaccttagaagtcagtaatgggtcctccaactgtcaaatctcggtgcaatgtccatggtacgttaaag

SEQ ID NO: 4189 - DNA, 505 bp, Glycine max
  Clone ID: PAT_MRT3847_10378C.1
ttcagtttggtctatttaaaaaataataattcaatcatttattttcactctaagaatataattcttttgaaacaataattgtttttgaatttgggacacgaatagaaccattttttttattaattatatttgatacgtgaaaacttgtttcatttcttggaaagccaaaggataatatattatagatcataaaagaccatgatatttgacacaagatgtatcaaacatcaggccaaattaaaaagataaatagtgacccatagtatcccacatggacttaaacggacccaacatacccaataaatgtaccagaatccttccctgctagactagtcacttgctgctaaattaaacaaaacaaacccaaggtgccgtttatattagaaaaaagcagcacacgaagcccttataacagaccataactactcccattgacctaagtgagcactttgaccctctttcataacaatcattcataaatccatccctttctccaaatgctact

SEQ ID NO: 4190 - DNA, 175 bp, Glycine max
  Clone ID: PAT_MRT3847_103790C.1
tttgctgctagcgtttacatgtacatgtgcaacactgtgactgtcaaaagttggagagagctgaggtttgcatctgcgttagtgtaaccctaatcctaataagctgaaggttatagggggacttggaggtcgctctggtgtggctgttggtatgcgagttagacaaggacttgga

SEQ ID NO: 4191 - DNA, 160 bp, Glycine max
  Clone ID: PAT_MRT3847_103791C.1
cggctcgagtcgaaatccaagtcgcagttgctaaaccgtaacacaaactgcgatagcgtcgtcccgcaccggggcgttaaccgacgcgtctgtcgttcattcaatcctccccgcagcagaggaatttttggccatggttggtagtcctgcaggactgtct

SEQ ID NO: 4192 - DNA, 305 bp, Glycine max
  unsure (1)..(305): unsure at all n locations
  Clone ID: PAT_MRT3847_103792C.1
cgggnccanttcttggtaggncaaagcagagcaggaacagcggcagaaaattgtgcaggccgagggtgaggccgaggctgccaagatgcttggancagcactgagcaagaaccctggctacatncaaacttcgcaagattcncgcagcccagatatctccaagacgatcgccacatcacagantcgtatctatctcacagctgacaaccttgtgctgaacctacaggatgaaagtttcaccaggggaagtgacagcctcancagggtnngaaatgagctagtcaccaagaactccacccccagag

SEQ ID NO: 4193 - DNA, 303 bp, Glycine max
  Clone ID: PAT_MRT3847_103793C.1
aagactacttctgattatgcacctaaatacttaacatggcccttgttctatatttattagcactatttaaacccctaccttgttagttatctccttattctgaaccttaacttactacataccttacgacatcctccaagacgagttctatcagattaggcaatctatcatgaacgacctgatatactacacttttattgacattactggaatatttagcgacttacttcgttacgaaccttgccataacactttaactattacttccattccaagatccaatgcattctataatggacttga

SEQ ID NO: 4194 - DNA, 1348 bp, Glycine max
  Clone ID: PAT_MRT3847_103794C.1
gattcaacatacaattctctggtaaaggggttttgtaaggcaggagatcttgtaggtgctagtaagattcttaaaatgatgataagtaggggtttcctcccaagtgctaccacttataactacttttttaggtacttttcaagatgtagaaaaatcgaggaggggatgaacctgtatacaaagttgattcaatctggttataccccagatcggttaacttaccatcttctggtgaagatgttatgtgaagaggagaagttggacttggcagttcaagttagcaaggaaatgaggcataatggatatgacatggacttggctacgagtaccatgttagttcgtacgcaaggattcggctcgagacggctgcgagagacgacagaaggggaggacatgatacggaggggtatagttcctcagtatctgactttccagagaatgaaagctgatttaaagaaacaaggtatgactgaaatggctcaaaaactttgcaagttgatgtcttctgttccttattctccgaatttgccaaatacttatggtgaagtcagagaagatgcatatgcacgaagaaaatctataattcggaaagccaaagcattttctgatatgctgaaggactgtaaggaccctagtgaacttcgtaagcatagaagttcatcagaaaatactgtctcaagcacaaacagtttgatagaggatattgagagaaaaagaaatacaggatgaacttctgcgatctcagtatcagctgggagcaattatgggcagtttgaagcacatgggaatcagtttgcatttattcacatttgttgaaaagaattttgctgtatttccttatgcaatttgtacgcttcaaagcaacaggaagtggatcagtgaaacggattcgctgttgtctacaacagcatctgctaccagtgttcgttgtacagaaaataacttctaatagccaaattgtggatatttatcaatgaagataacaacaactgaagttatttctagccgttggagctcacagtaaattgcttttaacgtgttccatcaaaaagttggtacaaatccctgtaatcttcatttttggtaaaaatcctagtaatcttctgatggatcaaacaggggtctgtttaagtgaaaattgtgattatatttaaaaaaaaaaatatttgtatataatttttgtcatctaatatgctcatctttaccatatataaggagagcctattaagaatggagaacaggttaggattgaaacacctgattaggtgctttttaagaaaaccccagatgctatcaaccaaactgttcagttttgaaatgaaatcctccccctttttaagaaaatctt

SEQ ID NO: 4195 - DNA, 359 bp, Glycine max
  Clone ID: PAT_MRT3847_103795C.1
agcggtgagcctatccttttgttgtattacactgaagtgagatatcaaacattcaatacgccaaattctagttctagagaaagcaaagttctttgatttgccttccacccccttaatttccttaattaaccaactgggaaatttggtctaattgtgattcattctctttggggggcttttgtggattaaggttagtatttgcttgattagggaagtctttatgtgacctgggtggaatgattctgtgtctgcatgtgtgaattctggcaagggaactagggatctgaagataagatatgcaatctaaatctgaaactgcaaatcaactgaggtctgatccacattcctttacacctaac

SEQ ID NO: 4196 - DNA, 298 bp, Glycine max
  Clone ID: PAT_MRT3847_103796C.1
gatcgaactgtccaaggtcctgtcactgcaatatcaaaataataaggcgggaatgcatggttgtggcaggtagccgtataaccccataaccaccaaagttaaccggagccgagatggagagggaggggttgtaacggcatggggcggcctaattgcgtaggtagcaggtgttacataaacaaatttatcgggcaaccaatcccaccggccgttgttgatttgcaataggttgtacacgttagcatagggtgtatcaagggatttcacgtatcgggcgttatattaagggcgtggggca

SEQ ID NO: 4197 - DNA, 715 bp, Glycine max
  unsure (1)..(715): unsure at all n locations
  Clone ID: PAT_MRT3847_103797C.1
gtacaaccccggtattttcttacttttttattttcactttgactcatgaatgaattcctttatcctcttacatcacaactgaagtgagatatcaacattcaacaccccaaattctagttatagagaaagctaagttctttgatttgccttccacccccttaatttccttaattgatcaattgggaaatttggtctttgggggattttgaggattagggttagtatttgcttgattggggaagtctttatgtaacctgagtggaatggttctgtgtctgcatgtgtgaattctggcaaggggcatttggttgctgggcactgaccaagagttgaaagattttatatttacctttaaacagctgcggctcctgctgaagatcaaggagctagggatctgaagataagatatgcaatccaaatctgaaactgcaaatcaactgaggtctgatccacgttcctttgcacctaaccaatcttattctgaaccctggtggcgaggtattcagtgcaatcctgtcccccaagcaatgtcaggagtgaatatatctaattcatcttcacttgaacgccctaatggtgattcagaatccagtgaagaagatgatgatgccactaaagaaaccacacccactgctcctaatcaaccaggaaattatggaccagaccaccnagcgttgcaacattcttcatcatctgcacctttggtgcgtgatga

SEQ ID NO: 4198 - DNA, 416 bp, Glycine max
  Clone ID: PAT_MRT3847_103798C.1
gggaaagaaaaaaaaaccctcttttttttaccacctttttccttacaaagaggggtcaacaaaccccttttttttcatttaaaaatgggtttccccaaaaaaaaaaaataaccccccccttcaacataaaactttttcctaacaaaaccccctaaatcgaagggagggggcttaatagccatttaaaaaccttgggaacttggggacccccttggccccctaaaaaacggggggtttggccatttccccgggcaaaaaaaccctgaccgggggttaaatttcccttgaagggagggggggctttttgttggaccggccaattttaaaaaattccggggcaaccttctcaaaaatggcgtgaaaaaaacttgtcataatccccagggccttgtttgaaaaaccaagggggggggggc

SEQ ID NO: 4199 - DNA, 425 bp, Glycine max
  Clone ID: PAT_MRT3847_103799C.1
gaagaagagtttgaagagtacattagagacgtggaaaagcggctcggaagagagattgaaagtggcagaggaaacgcaagatgcctgaggttgtcgcttgacaagattgaaatgtcgcaccgcagcctattctggtatctggtaagtataatcccgggctctacaaatgcgatatttatacaaggcctgcagtgtgtcttcgtggttgactcgatagcgtccgcccgtcttctgtattacaacttcgactatcaccgcactcctcgtcgtcactacttttcagtattcccgattcgcccgcacaatttgttcgctaatactcgttctccatccagtaagattacttactggcaccggccacatacagcgaaaacgaaacttcccatcctattcatccacggcattggcattgggctctatccata

SEQ ID NO: 4200 - DNA, 819 bp, Glycine max
  Clone ID: PAT_MRT3847_10379C.1
tatggcagaacccctctctcttccatgagccttggcatagtgaaaagcatactcagctacccttaaacttgcttgacgtgtaatgattttgagactttctacaacacctctcacaacctgatgttcaagtccactgtactcgccttccgtattttcacgaattgtaattagattgacattatcatatcgagttttgtagcctggaagactgtagcaaggtcgaacattggcatacaaattgagctcttttctcagagtaagatttaacgaacgatgcccttttccaataggggtggccattggccctttcaagccaaccttatttttccttacagattctaaactttcccatgtcagaaagctctgcgttctagggtcaatttcagttcctacatagtgctcttcccattctattgggacatcagctgcttggaatatctgtttgacggaatcggcgatctcggggccgatgccgtcgccggggaagagagtggcgcggatcggagtggaagcagcggaggagaaggccctagggtttgcaaggaaacgacttccgaaggttcgtctcaggagctgagaagccatgctttttcaccacgcgcactttctcacgcacaacgcaacacaacgcgtaacgaagaacctaaaattaatatttgaaacgagactagagcgcaatgtattgagtagagagtattcagagagaaaagggttaatacttgattccaataggaagcaaatatcggattgttcggttaaatcaccagttgaagagtcttctcaagaggtaacactaatatagatcaaattaaaagaatt

SEQ ID NO: 4201 - DNA, 186 bp, Glycine max
  Clone ID: PAT_MRT3847_1037C.1
ctagtcggcgggcgccctgcttgaggttcctatctccggctccgagggagaccactttatagggaggtccacaatccttgagtggagcgagggtcccactcttgctgatgcaccctaccccattatcgcacccccaaagcccatctgtcgagcccctaagctatcccttcatgatgagtacccaat

SEQ ID NO: 4202 - DNA, 1482 bp, Glycine max
  Clone ID: PAT_MRT3847_103800C.1
cgtttattctatagccctgaagatgtgaagtgaggataggaacaaaatcaaattgagaacttttcttttcctcctctgttcttctgatttgaagtttgtccatgaatatttcctgttatatctaccttgcaaacttgcccttgagactttagtaaccttgggatatagaggaggattcaaatgttgctgcttctgcaaatgtttcacttcaaatgaaagcagacttcttatagattatttcattggtctaccccacttgagacttggactgtggtcatgtctcccattaaagctattttattgcaatgagttttagagttgctgctattaccttgctgtgagggcatgtatgttctaaacttggagatcatttctgaatgaacacaggattacaaatttaaatgtggtattgaaacagttcggtggccatgtcaaaaatacctaacatcaaagcaggaggcgtaagtactacaaaagatatatttgtttcagctgttcgttttgccgtgtctattgagggaccatgttttccatttggagatgagctgcgaatctctgctcaagagcaaattgactacatgctaggagaagatggagatactactatcatcatgtctgatgatgaagtacaatcagtagtaagaatgggtttttataacatcattcattcatttgaaatggatttgtcttccttgcttttgggcactacccttgagcttgagggtgtgtatgataggataatgaaaagggtatctgatcttgaatggatgtgtaatgtactcccaaagatggatttaatgaagaattttgtttccgactggtcggcaatctcaagcaaaattttggggatcattgaagacaagaagcttgaccatgtcatgtgggggctgaaagtgaaattgatagaagtagcatgtaaagttttggaagcagttggttatggtagcgtgattcttccagctccgtgtcgggtgcaattgctaaagacctggtttccatatgttcggaagatgaagcctttactggattcaaaagccgttgaggagactggttttccttacaaaatggatgaagatttgtgtcaggccattgagggagcaattgtgtcactgatattgacgttgccatcaaatgatcaagcagacattttggcagactggattaaaaaccgggaagttggatatcctgacttgagcgaggcttttgaggtatggtgttatcgaaccaaatctgccaaaaggagattagtcgaagatttagatggccaaagtgatgctgctgtcagcccttgagtttggttctgaaatactaacctttgtccttttcttttttaaaacttaattttggataaatttagcttcaattgtaagattaaagttatcatgtatgatggaggtgttgattccttttctgacttaagctgaatgaattgaggtactcaatccgtccactttttattgatttaattgtgcttaggcaact

SEQ ID NO: 4203 - DNA, 364 bp, Glycine max
  unsure (1)..(364): unsure at all n locations
  Clone ID: PAT_MRT3847_103801C.1
cnanagccnnaaanacaataacttttgcttttatacaaaccaaaaaaaactcgaatcgttcaatttaaacggggccggcacaanacaaaanataaaggacgcttatacataacatacaacggtcgttttaaaaatattaatcacatcttttcaataaaacaacttgaccaaaatcacctacacaaacatactgaatccctctctcatcacataactctaatttttacataccaccctaaccttctcaacctaattgattattgtgctgaaaacaatcaaaactttcaatttatacataacatattacctatccttcaaaaccacccaaatgatatttctcctgcaaaaaacaacttactgaaca

SEQ ID NO: 4204 - DNA, 315 bp, Glycine max
  Clone ID: PAT_MRT3847_103802C.1
cgaatctgcacactataaaatgccccaaacgccgcttctcttatgttcaaattaattgtgtaactgattaagcgcgatatcctcaacaacaccaatgaaaaaacatacaccaaaaaggatgtacatttgaacatattatagtgcttatagaactcctactctgtgcacacaaatatactgcacctcaataaaacagaatcatcctataaacccagactggtcaatcatttccttgcattacctagccaaaaatattgaattcgtgcactatagccatttgctaaattctctgcattatcaaatattatcaacatc

SEQ ID NO: 4205 - DNA, 426 bp, Glycine max
  Clone ID: PAT_MRT3847_103803C.1
tgtttcgcttttattcgattcccttcagaattgccgaaatcttccattgttttgtgtctgcaactctcaaaatcgaaaattcaccatctctctatccgtttgagtagaaacctttcagtctcggcgttgcatttgtttgcatataaatgcatctcaaatagcataggcatggtggaatggtgcttcctttgaccaaattcattttgattcgtaaccatttcttcagaaagttttcacctttacacaggatttttcaagggcatgtctgctttgagcagtttccttttctgcaaaaattttccacttttggccactgtgaaagactatcatgggaacgttccaaccgagaaattctattggggaagcttaaatttgctttgaggaatcaccaggtgctagaagcatgggaatcatttcatgatttta

SEQ ID NO: 4206 - DNA, 634 bp, Glycine max
  Clone ID: PAT_MRT3847_103804C.1
aattcggctcgagcggctcgaggaaatttcccaacctcagaatttttgcactcaaaagttaaaatcctaaccctagcaatcggaagaacaacagaagcagagaaaaatgacgcagaaggcgaatcttttcaagggtaaagcaaagaagaaatcaatacctcccaatcgtcatgggaaagtccctgttactcgtaaaggaaagagattcgtgaagccatccaaggttacaaaggatatggatactgatcgtgaggtgagcaaattcattaaccactgcaatgagatcaaagcagcgactctagcaacgaaggatggtgggcaactaggcatcattaagccgccacaagagccagcaagtaaatagttaatgatcggagaaacaaggatggttttgaatgtatcttgtgaatggcgcattgtctttgagcctttgtccttataaattgtaaaagcaattttgataatcttaccttgctagagtattttggtatgtgtgtattgctttgaattgctccattttttctccttttggttattgtgtgtttgggaaactgtagttgtcatagttgattgttcgatttctgaagtaactgaggaagctctattttatcaattcaacaaaagtgattatgtc

SEQ ID NO: 4207 - DNA, 252 bp, Glycine max
  Clone ID: PAT_MRT3847_103805C.1
gaggattatgaccgctgtgcatgctacatgcctcacaggctggagtatagacctgatagtagaactgactctcaatctaccctcgcaacatacatgccagtaagatatcataattctggggtggtggatgcagcgtaagagagacggcaagttataggtactcagggcgggaagggcagggaaggattccaatgtgcaggaaggggctgtaacatacatggtgagccataggtaatggtctccacaggaaat

SEQ ID NO: 4208 - DNA, 245 bp, Glycine max
  unsure (1)..(245): unsure at all n locations
  Clone ID: PAT_MRT3847_103806C.1
gagtgaaaaactttaatttataacttaatcctgngggggagaattgcgtgtgattacaagtgaggtgtgctacaaatgcgataaacataactattatagagatatatcgagagagactttgtgatgtgcgagctaccatttcatctactattatgtgcggaagtgagtgtgcttatgtgcaaaactattataaagtggggctgcggggtaacttgaggtgcgtcacggacgcgtggggccagccc

SEQ ID NO: 4209 - DNA, 969 bp, Glycine max
  Clone ID: PAT_MRT3847_103807C.1
cggtccggattcccgggtcgacccacgcgtccgattagcaaaagatgtgctgtcaaggccattgtcagatgctgatcgcattaagattaagaaagcccttagaggagttaaagttgaagtaacacacagaggaagtgtgagaagaaaatatcgtgtttctggattgacttctcaaccaaccagagaacttgtgtttcctgttgatgagaactcaactatgaaatcagtagttgaatacttccaagagatgtatggtttcactattcaatatactcaccttccttgccttcaagtaggaaaccaaaagaaggctaactatttacctatggaggcctgcaaaattgttgaggggcaacgttatacaaaaagattgaatgagaagcaaattacagctctgttgaaagttacttgccagagacctcgcgatcgggaaaatgacattttacggaccgttcaacataatgcttatgatcaagatccttatgcaaaggaatttggaattaaaatcagtgaaaagctagcttctgttgaagcacgaattctccctgccccatggcttaaatatcacgaaagtgggaaagaaaagaactgtttaccccaagttggtcagtggaatatgatgaacaagaaaatgattaatggaatgactgtcagccggtgggcatgcataaatttttcacgaagcgtgcaagacagtgttgctcgcactttttgtaatgaattagctcaaatgtgccaagtatctggcatggaatttaatccagagcctgttatccccatctacaatgccaaatctgaacatgtggagaaagctttgaagtatgtttaccatgtgtcaacaaacaaaaccaaaggaaaggaattggagcttttgttagcaatattgccggacaacaatggttctctctatggtgatctcaagcgtatttgtgaaaccgaccttggtttaatttctcaatgttgtttgac

SEQ ID NO: 4210 - DNA, 445 bp, Glycine max
  Clone ID: PAT_MRT3847_103808C.1
gtataaacaaatttatattcagcgggaaaaaaatttatatacaccttaacatgactgattattcttgttggaacatgtttattaataaatataaaaatataaacagacagggtacatggcaaaaaaatcaggggcccccccccaaaagaagggagataggctcaaaacccttgaaaaaacacgagggcaacctagacatgaatcttacaagaaaactaacaggggataccacattgaccattggttaattagaaggacccccacgcgaaaggagcaatactcacccacagccaggagaatataaaaaaaaaaaaaacccgccggacaaaaacattggttggggggggagtggcccgccccagagacataaaaagaagggccttatgggcaacgacccaaatcgttaataacagggggggggggaggggaccccaaaactgggaac

SEQ ID NO: 4211 - DNA, 2504 bp, Glycine max
  Clone ID: PAT_MRT3847_103809C.1
gggcgtgccgtcggttgcaagaagacgaccgaaggggtctcagtcgccgcttgccacgtgcatttcttctcatttcttgctgatgccgtcaatggccagaaacatagcacgttaaatgctgctgcctttcgcagatgcgacgagctgtggcgtcgctattcccggtgctgtctcctatttccatctgcgcaccgctttgtatcttttcccggggttctgttctctttgcacgttcgtccttagggctctccgagggctcgtaatctattttataagatgctatatagatctaagctcttgcctgaagttgttatggttgggatactttccattgtgttaactgtgtctggcttcgaattagtagtaagctttgtgtttttttcgcctgtgcaggagcagatcaaggcgagagaaagaatatggatggtaaacttaaaggcaaggtgaatattgtttatagtttaatgttttcatactttacactagtgtttctgattcttttaaggtctttgggatctgatgttgatttgcttgttagagatggagaatggacattacattcaatgaagattttaagtctaagatatggaaggtatcattatagttctgataatccatgttctagtatctatgatgctggattagcacttgaagcactggctggtgtgatctcattagcatcttctgaaattgatcagtctagggtgaatacagtgaaaaatgatatattgaagctttttgacagcattgagaaatatgatgatggaaccttctattttgatgagaaatttgttggtggaagtgagcatcagggttctctttccacaacttcttctgttgttcgaggggttacagcatttgctgctgtaacttctggaaaaataaatcttccaggggataaaatattgggtttggcaaattttttcctgggaattggaatcccaggagatgccaaggacttcttcaatcaagttgaatcattagcttttctagagaacaacacgtttctctatcccattgatattttcacttcctgcaactgtttattcattatccaaaaaagatcagctcaaggtgatactgaacactgtacttggttcagttgcaccaccatctaacaaagaacctcgtccgagcttaccgccctgatgctactgattcaagatttattgccagcaaagagctcccatatgtattcagttctcctgtaaaggtattggaacagttactcaacaatgcggatgtgggtattatcgtcttttgtttttttgattgttcgtcatgattctggtgcttgaaaaagtttatgactactggcagggcttaaattcatgtaccaatatatgtcactggcattatcaaagtcagcaatgcggaaattgctgttcttgacagtgatcttggaagtgttgaaacccaaaaaacgctagatttggctggaaatgatgttgtttcactctcagctaaccacttgcaaaagttgcgcttttctttccaattgacaacacctcatgatcatgcttttaagcctcttcaggcatttttcaagttgaagcatgagacaaagcatgaacacatctttgtggttggaaatactggcaagaagtttgagattattcttgattttcttggtttggtggagaaattttattacctctcagggagatatgacattgagctgactgtcggggatgctgtcatggagaactctttcttatggctgcttggtcaagttgatttagatcttcctgaagcacctgagaaggcagcccgtcttcctccactccctgttgatccttactcaagatatgggcccaaagccgagatagcccacttattcagggctccagaaaagcgaccaccccaggaactctctcttactttcttgggtttgacccttctgccatttattggctttttggttgggctgttacgcctgggagtgaacttgaagaattttccttcttcagcagtacctgctgcatatgccatcttattccagcttggcattgccactgttctattgctttatgtacttttctggttgaagctggacttgttcactacactcaaaactgtaggatttttgggagcttttctgttgtttgtgggacacagaattctttcccatctcgcgtcaacatcatccaagttgaagtctgcataagtaaaaggaagattgtctatttataaagacatgacatgataatgtgtttttccttgaaaaaatggtaccaatccaattttgtaggactttgttgtactagttcgtgcgaatttagagctcaattatatcaagagaaaagttttatcttgatcttgccttatcttaatgaaagtcattgacataccactaaaagaatcttgaaggggcggcctgacaagaccgcttccaaagcttactttacggcgccgcatgcgccatatgctatcatggtccatatcatgtaatctctcactacctacttaattcagcttcaaataacgtattgctttttatagat

SEQ ID NO: 4212 - DNA, 570 bp, Glycine max
  Clone ID: PAT_MRT3847_10380C.1
gcacaaagaaagatgataaagatgaacaaatgaaacatcatctggtgttttttttatttagcactatattattgacaaagaatactaaaacggactaccaagggttatcaatcaatgtgcattgtgaaagggtgtcctctcaatgccataagactgcactgggcaacgaatatttgaatccctgcccattccttgtctttggttgtaaaatgtcacacaaacatgggtgagttttcctttaagctgaggtaatcccattctttccgattaattggggaaatagatagaaaattgactgaaaatcaaaatcataagcaagaatttcttgctgactccaaccaaaatttaaagatgatcaatgattgcttttgtgaattcagttgtctttgaactgccaccgagatcagctgttcggtacttcccttctgcaatcgtgttgaggatagctttctgaatctgttctgctttgtcgtggaggtccaaatggcgcaacattgtaacaccactcagcagtaaagcagttggattagccaaattctttccagcaatatcaggtgctgaaccatgtac

SEQ ID NO: 4213 - DNA, 263 bp, Glycine max
  unsure (1)..(263): unsure at all n locations
  Clone ID: PAT_MRT3847_103810C.1
agaaaagaagggggaaagtcgtgaaaaaatggagggaaagaggtatttcgtcgcggttcacgtcggcgccggttaccacttctccgtcgaacgacaaagccctcaggtccgccatgaaccgcgcttgcctcgccgccgcgtccgttctctctaacggttcgggaacgcgcttagacgccgtcgtagccgccatccaagtgctggaggacgatccctgcacaaacgccggcngaggctccaatctgaccgaagacggtggcgtg

SEQ ID NO: 4214 - DNA, 412 bp, Glycine max
  Clone ID: PAT_MRT3847_103811C.1
gggtaagtctttaaccacaaattattgggttcatcaccatcttaaaaatctacaaaaacttgagtgtgaccaaaaaccaaggctgcgccaattgaaaatagatttgcgacgggccacactcctggttatccatataaaaaacaacgaactcaatgacgcgtgttcagcggcaatcaaaagcccacagagagcccccctccccgcaaattggaaaaagatgacaaccattgttcctagccagctctacttaagcaactatattcatgcgggaacaaccgggggctctaaaggtgaatacccaccaccttttttcgcgggatataaggcgctttgacgcaacctgaccctctaactttataaaaccccgagccaaaaaccaagcttacagacgcctgggtgcaaacataaaact

SEQ ID NO: 4215 - DNA, 1961 bp, Glycine max
  Clone ID: PAT_MRT3847_103812C.1
cggggtaagctcggaattcggctcgagaagaaactgtaggattggagggaagttctgttgggcagtggtggctggatatgataggcaaaacattagatgaaggttcaacatttgaacgtattggatccaggcaacttgctggcttggtcattgctgtgtgggttaaaaccaacattagatttcatgttggggatgttgaagtggcagcagttccatgtggcttcggacgtgctattggcaataagggagctgttggtttgagaattagagtgtatgatcggataatgtgcttcgttaattgtcactttgctgcacatttagatgcagttggtcgtcgcaatgcagattttgatcatgtataccgaacaatgtccttcagtcggccaacaaacctcttaaatactacagctgctggcacttcatcttctgttccaacgtttcgtggtacaaattctgcagaagggatgcccgagttatctgaggcagacatggttgtgtttcttggtgattttaattatcgacttgatgacatttcttatgacgaagcaagagattttgtttctcaaagatgctttgattggcttagagaaagggaccaacttcgagcagaaatggaagctgggaatgtcttccaaggaatgcgtgaagcaattataacatttcctcccacatacaagtttgaacggcaccaagctggtttggcagggtatgattctggtgaaaagaaacgcatccctgcttggtgtgacagaattttgtatcgtgatagctgcacttctttggtgtctgaatgcagtttagagtgtcccattgtctcctcagtattacagtatgaagcttgcatggatgtcacagatagtgaccacaagcctgtccgctgcatattttctacagatattgctcgagtagatgaaccaatccggaggcaggaatttggagagattcttgagtctaatgagaaaattaaatatcttctgaaagaattatgcaagattcctgaaactatcattagtacaaacaacataattcttcaaaaccaggacacattaattttgcgtattacaaataaatgtgcggaaggcaatgctttgtttgaaataatttgtgaaggtcagtctactgttactggggatcagaaggctactaaccatcagttgagaggttcctttggcttcccaaggtggcttgaggtgagtcctgcaactggtataataagaccagatcaaattgttgaagtatcagtgcatcatgaggaatttcagactctggaagagtttgttgatggcgttgtacaaaattcttggtgcgaagactccagagacaaggaagctattttggttgttaaggtgcatggcaattacactatccagccaagaaatcaccgagtccgtgttcaccactgttattcatccaagaaaaaacctatgattgactctcaaccagatagctccaggcatatccaaggaactgtactacaccgatctgatttccaaccattcagcagttcctgtgatgtggttgaccagctacagaaattgcatagcccttgaatctgcagttaacggagcttgtggtccaacttgtaatcatccagctgattgaactgtacagaaagaaagcgcaaatgcaaggcaaagtagcgagacagttttttacttgatccattatttaatttattgagaatgagcccaattgtaaatgactatgtaccatatcaaccaacacaagctgcaattttaagggaaaatgcagcgacctgtggttactgcagctgaagctgctatagttgattgtgtcgtttggatgatgattgctccctacaaatattctaatattttttactttctattgtctcatttgcctggaattttgtgtaatggaagttcattttgttaaacgacttcctgttatattttaccttaaaaaaatactgctgccttagaaaaaaaaaattattaaaa

SEQ ID NO: 4216 - DNA, 173 bp, Glycine max
  Clone ID: PAT_MRT3847_103813C.1
accccgttagcacctcctctgcttaatcccaaggagagccttacgcctagatatttcatccacttgaaatccattaaaatctactaatatacagtccctttaaacaccacttttttgaccataaacagcaaacgcttttcttgaaccaagataagatccgcaaacacctacac

SEQ ID NO: 4217 - DNA, 1078 bp, Glycine max
  Clone ID: PAT_MRT3847_103814C.1
gtttacatccctgcttctcctttttggtttatgagttcctagagggaggtagcttggataaattactaaacgatgatacgcatgcaacactgtttgattgggaaaggagggtgaaggttgttaaaggtgtggcaaatgctttgtaccatatgcatcatggttgctttcctcctattgttcatcgagacatatcaagcaagaatgttcttatagatttggattatgaagcccgagtctctgactttggaacagctaaaattctgaagcctgattcacaaaatttaagctcgtttgcaggcacctatgggtatgctgcaccagagcttgcttatactatggaagtgaatgagaaatgtgatgtcttcagtttcggagttctttgtttggaaataatgatggggaagcatccaggcgatctcatttcttcatttttttcatcccctggaatgtcatcggcgtctaatttgctgttaaaggatgtgttggaccaacgactacctcaaccagtgaatccagttgacaaggaggtgatcttgatagcaaaaataacatttgcttgcttaagtgaaagtccacgttttcgcccaagcatggaacaagtgtataacgagtttgtgatgccaacatcatcttcagtgaatttattctccatggtcacacttagtcaactcgttgataattgaaccttgtttccagcctgttgtatgcttttttattgctttaactagtgaagaatctcagcacggtttactggagactcaatgcagatcagtaatgatctaaacagaataacatctgtgtctcacatcctctttattcctcaactcactgtattgttgttatacataatgtttctagacttctatatgctgtaatcgtgttagaatcatataaattgcattagatttttttctcttgcatattctgcatgtttctaattgagtggagtgctttgtatgttctgttccgttaaagacttggaaaataattgtatgttgtcttatgtcttttgtaagatcaaataaataaagtgtgattttgaagggaaaaaaaaaaaaaaaacaaaaaataaaacata

SEQ ID NO: 4218 - DNA, 526 bp, Glycine max
  unsure (1)..(526): unsure at all n locations
  Clone ID: PAT_MRT3847_103815C.1
tnnttaatatnttaatttttnnngggaaaaaaacttaaacggggggggtattaataagaaaggaggttccaccccaaaaacgacaacgaggcttgggagggaaaacaaataagcacaagcacaaaagacaaggggacacaatccacttcaattggataaaccggaggaatttacaaagaaggggattgccattaggcaaaacctatgctagccgggaagcggaagcggcaacgagaatattatccgttagctttaaacgggggcataaaaaataggcagccttaattaatcaaatatgggacacaaaagggcgggccccttctggaagggaggaggaaaggcctttcattgccgaagaaagggaagctacagcacacaccgactggaaaaaaaaggaaatctgctcttaagaaaacaaaagccccatctgctgtggtaagcataactatgaccccaccaagaggaggggccaccacaagcccaacaccattcaaaaggcaaacatccttaaccatgggtgccccca

SEQ ID NO: 4219 - DNA, 473 bp, Glycine max
  Clone ID: PAT_MRT3847_103816C.1
ggctcgagctaaaatatttgcaaaggatgcttgttttgctattacagcagctgacctgaagaccgtgaccatggacatggtcacgggcctgttactgttcacgggcttaacgggcgcatctgccctagacatggagataatgtagttcgacagcgcccactgccgcctcgaagggcaagactaggagctgaagtctcatgtacgagcagtggctatgaagacacggtaaggagtacaccgcgctcggagagaatgacaacaggattcaaagcttggggactgcctgcgaggataagggaccacaactccccagatgaccgaacctgcatgctgtgtcttgaccgcttcgctgatctaaccaactaggactacaaggacaagcacttgggaagcaacatcgataccaaccttatgctctgttagaccctctgcaaccgatgcacgcaacgtgtaggggacagactacctgaatc

SEQ ID NO: 4220 - DNA, 571 bp, Glycine max
  Clone ID: PAT_MRT3847_103817C.1
aattcggctcgagcggcagacgacagaaggggaaggagattgatgatggtagtgaagaagaaaattttgatagtgatgatgacaataacgaagaaactagcctcgaacaatttttagatttcatgataaagaagatagaaactcaggaaatggaggcttaaaagaaggaacaggaggctaaagacgaagaggaacagcagaggaaggagattgatgatggtagtgaagaagattttgatagtgatgatgacaataatgaagagagaagcattactgagttaaacaccacttgttaaaattttgtattttgtagggtcagataagattagtccctaacataaaagtttacctttttgtttggtttgaactatacaattgtgctgtatggttatccatcgttttcaatcttcctgagattttgaggtacttatttttctttttcactttctgtttgttaaatccaaagaatatactataaccactgttgatgacaaaaggattgttactgttcgggagtgggtgtccattgtcaaaccgtgtccaccatattttatctctgttttttaccttc

SEQ ID NO: 4221 - DNA, 203 bp, Glycine max
  Clone ID: PAT_MRT3847_103818C.1
cggacgcgtgggaaaaaaaaaaatgtgtataatatatacccaaaaaaagacttacaattgattataattttagcaatttgtgcaattcaagctttccaaaagctgacaagattttttaaatccttgtgagtgaaagcaatttttgatacaaattgtagcagagatttgaacctattcggattttgtgtggagggcatcatatg

SEQ ID NO: 4222 - DNA, 213 bp, Glycine max
  Clone ID: PAT_MRT3847_103819C.1
aaaaccccttttgaattacgcgaccaattttaagccgccagcctcagaataaccacacgagcaggcagcaactggtccttagtcgctttgcagcttactacagacataacagatcttttgttgtgttaaaacatacccattgtcggcgacatctacttgcacactgttaaccagaaatcatactgtccttaagaagccctaatctctttgaag

SEQ ID NO: 4223 - DNA, 1754 bp, Glycine max
  Clone ID: PAT_MRT3847_10381C.1
tttttttgttttcgtctatgcctgtcgaaaacaaacctgtatcatcttcttcgtctttcctttgtctctcttctttcccctctctttcgagggtttttctttttcttttttccctttttttatttttcctttattttgtttttttctttctcttgtttttcagttttgcttccatttcctttgaatccccatttattcttcttcttctgcaaccctaaccctagaattgaagatgcagcctcagaggttaaggcagcaagccatgatgcaaccatctctctaccaccaccctgctctacttactcctcctcagatagagcctatcttgagtggaaatctgccacctggctttgattcgagttcatgccgcagtgtttatgtaggcaacattcatccccaggttacagattcccttcttcaagagcttttttcaactgcaggcgcccttgaaggatgcaagcttattaggaaagagaagtcatcctatgggtttgtggactactttgatcgcagttctgctgcatttgctattgtaactctcaatgggaggaatatttttgggcagcctattaaggttaactgggcttatgctagcagccagagagaggatacctcaggtcactttaatatttttgtcggtgaccttagtcctgaggttacagatgccacattgtatgcttgcttctctgtatatcctagttgttctgatgcaagggtaatgtgggatcagaagacaggccgttccaggggatttgggtttgtttcttttcggaatcagcaggatgctcaaagtgctataaatgatttgactggaaaatggcttggaagtagacagattcgttgtaattgggcaaccaaaggggccagtgccagtgatgaaaagcagacttcagattcgagaagtgtcgtggagttgaccaatggatcatctgaagatggccaagaaacaaccaatgatgacactcctgagaagaatcctcaatataccactgtttatgttggcaatcttgctccagaggttacttctgttgatctccatcaacattttcattctcttaatgccggaactattgaagatgttagggtgcaacgagacaaaggttttgggtttgtgagatacagtacccatgctgaagcagctcttgctatacagatgggtaatgctcgaattctatttggcaaacctatcaagtgttcatggggtagcaagcctactcctccagggactgcctcaactcctctcccaccacctacttctgcgaatgtgtcgggattttctcttgctagtcttgcagcttatgaacgccaaatggctttgagtaaaatgggtggtgcacatgcccttatgcatcaacaaggtcaacatgccctaaaacaggtagccatgggaatgggtgctcctggggctggttatgatgcaagattccagaatgttgcgaccacccaacacctaatgtactatcagtaaaatgtgttggtgtgcaactctccgcgataaacaagggaggattaaagtatgtaagaacggttttacaataccgattgtttcttctgtgcttatgtatggttattacatttgtaatactacagttatttagccgttgcatgcatgaatggtgtgtcttctattaatacctttgtgcacagcttgggaggtatctatcaacttagctgtgtaattttgccccaagtgttaaaattataataaaaaaaaaaaaaaaaaaaaaaaaaaaagcggccgctctagaggaaaa

SEQ ID NO: 4224 - DNA, 400 bp, Glycine max
  Clone ID: PAT_MRT3847_103820C.1
gaacaaaatcaaagttcgttttttttgttttttttcatttttaaatgaagttgtagcaaaaactttatttccttttaggcccagggaaggacatttatttactgggggggggtgctcgccggcataagaggggtaacaagagggaaacccaggggccggaaaacgaccttgaatttagagccagcggggcccgtaaaaaaacttggtggatcatcgggggggaaacgagaaaaaaaatgtgccctatgggggaaaaaccttgagtaaaaagaagaaccaaatttaaaccccagcagattcaccaacaaattatatagaaaggaacgggggcgggcgaaaaattgccaacatttttgccgaacccggaattaacaaaagggggaggaggccctggtttttt

SEQ ID NO: 4225 - DNA, 505 bp, Glycine max
  Clone ID: PAT_MRT3847_103821C.1
tccgttccaaggaaggtttcccgtcatcactgtatgacgtcctccttctttgggggggggggggggatgcggaataaagagggaggaaatataaatccctacagttaagggatcgatctagctaggtaacgggggccgtgtggatgaaaacgaatagcagacaatccgtggggggaagtgaagctaatatggaatgtggtggcacatggcgaagagaagcgagactaagggtaccgttagtgcccatggcacagtagaagattgagtgattgggagttacaagtaccatgcgtagtgttagaccaaatgaaatttgggccgttccaggtacagtgccagtgagattgcgtgatcaccgatacaacgttggggagtagagtcgggccaccacgccatagtaccccagtgcacgcacaacacttgggctgttgacagggtcattgcgattgtcattggttttgcgtgctacgttggtcgtatggtggccattacgtgccaggggaag

SEQ ID NO: 4226 - DNA, 376 bp, Glycine max
  Clone ID: PAT_MRT3847_103822C.1
gagagcacaaatcatactgtgcgatacaacactattcgaggactttgaatataacaagtgcttgcacaatatagggggaacgaggtaacccttatctactccggactcggacgcttctttgggcaggtcttcctatgcactacgtccagttcacaaacactagatcctggatccttccttgatcccgaaaaatacaatgacatatcctgctatataacatcttagatctgtgcctacttggagcgcgtgcgcacgaatgctgacctcctgcaaagctgataccacgtgggcgctggcgggcgccttcctaagaggaaccgtcacctgctttgacgtcccaggtatctctgagtagatacaaaacaggtcctgctcg

SEQ ID NO: 4227 - DNA, 1203 bp, Glycine max
  Clone ID: PAT_MRT3847_103823C.1
agaaaagaaaggcctttccttcacgggcttacttagtgcttgtgctaaggtttgagctcgacccaaacaacggctaacgagcccctatcagagaaagccttggttaagtaaagcgcgttagctcttttaagttaaggcgcgcatcctcttgctgggagaggataaatcgttttgattcgaggcggatcccttttttgtttgcctttacgagttgagtcaaaaaaaatctctcgttatttaaggtaaggttataacactctaatgacaaagcgtccgctcactggccctttgaatctggagatgtagttgcgtgtactgattctcatcgagattgggttggtcttcagtgtaccgcttgtgtagcctatgcgaagcgaacaagcaagggattgaggcgaaagccgcgttcgcgcattcgtttgtttgggtacaagatcgaaaagaatgcattggatggatgcccgggcattgagaaggaaggacgctttcagaggcgaaaggccatggggagataccgtctgtgatccatggatctccgatcgggaaaccgtatccaagctccgcggctagtctgcgctctttggacttttaaaacttagcgaactgaaacatcttagtagctaaaggaagggaaatcaaccgagaccccgttagtagcttctagcgaaagaacatcctgttttcccaaccaacttgaagctccttccaacaccatcatcatcatccatggcatctcaaggtcatggtaacaagctcatcgtttccacatcaccaaagagtgacagtggcagcggcggcggtggcggtgcagtgggatcattgcccaaagggcagtgcttgtgctcaccaacgacacatgaagggtccttccggtgtcgtttgcatcgtgggcctacagcctcaccaacaaattggatgaaacgctccaagtccatgcctgctaataagcctgtggtttctgactccacatgctgatgataacaccaaaaaatgctattgtgagttatgtgctcatgtgtacctttatatgatatatgatatgaatccttgcttgcaactcttgaattttggcagtgttaattattatatatatggttggaactttgttgttccacctctcagcttccctccgcgcgcttacatatacataaattaattatacaaataggtgtggctaatttaacccccccattattaccttct

SEQ ID NO: 4228 - DNA, 748 bp, Glycine max
  Clone ID: PAT_MRT3847_103824C.1
acgaaagaatcaaatagtaatgtgcgtgatgacaaaaaggatatgtccgtttcagtagtgattacagcaggtgatgatgatgatggaaacaatgcaattggtcgggtatgtgaaaccctatgcccatttcgctttggagatggtcgggtatgtgaaaccctatgcccatttcgctttggagatggaggctgcaggtggccaaatggtggttgtgctcaactaggtagccagtatgttggcctgaaggcaaattttgatgcatttgacaaactatcaattgatgatagttatttcaagtctgagtgaacagggaacttacttcctaaaagactccgacagtgaacagttgcataaccaattttggtttctttaagcaatgaggatagttattaattctttgtaacactccttgtaatgacaagatggggagaagtagtggaccctgttatttttattgggtctcgggaattgtacaggctataagagttggctggagatcatcttggtgcagacatctatatgggaatgtattgggttgatgcgcatcatggtggtccacattgatgatatatgcatgtttaaagtttgtagtcgctgattacatacatcgtaattgttcttgaataagatcaattttgtacagacgatcaagcttttctgtttttaatgcatcttgagggatcaatgtatatcaagaataatgttaccctatattaatgaagaagatcgtcgaccttgacaagtaaaa

SEQ ID NO: 4229 - DNA, 244 bp, Glycine max
  Clone ID: PAT_MRT3847_103825C.1
ggttgaaatacacctattccttccggctcaaatttgtgcacgggaagacagactatgacactaggcactaactgactattccaactagcgcctatttacttaggagagggtgtatggagcgcagactgctagcatactgatgtgcgattaagccggttcttccatattggatgttgaagcctcgagtcaatatttagagtttgctaccatacgtgggcctacgatagatgatcctgctcattct

SEQ ID NO: 4230 - DNA, 159 bp, Glycine max
  unsure (1)..(159): unsure at all n locations
  Clone ID: PAT_MRT3847_103826C.1
agtctgcangcaacgcgtaaacgttaaagcttcggaattcggctcgnagntantcnntnnnncgtganaggtcgctnnccnancgnncncgntnactaggnaactaattncnngataggtacctgnnnncgtacgancnttnccgatantgacncntnt

SEQ ID NO: 4231 - DNA, 586 bp, Glycine max
  unsure (1)..(586): unsure at all n locations
  Clone ID: PAT_MRT3847_103827C.1
cccgcgtccgcccgttcctccttgggagagtgacgttgcaacgatttccacacaccgactcacatgtctccttctcttctctctctctttcactctgcgcattcttttcgccgatccaatcggagtgagagtgtttattggcatggattcagcatttgcgagaacgagatccatgttcttcgcagcttcactcctcctctacatattcgcagtcaccaccaccaccttcgcatccatccacatctacgatcatgaacctttcagagaactcggcaattcctacctcctcgctggcggcagcgaaggcatcgtcacttcccaaccctattccgtccacgatgatggccgttcctacatccgatttgagaatataaccttccggagaaccaaagcttcagccaagggcacgcggttctgtgccagtacacatcataatttttgaggctgctgatcgtaatgatataggtggttctgcttatggtggacaacgggcaatctgttgcactcctgatttagccaagatgggagtttgtaagcaaggagagattattangagaccttctgcaacagacattaattggccagt

SEQ ID NO: 4232 - DNA, 274 bp, Glycine max
  Clone ID: PAT_MRT3847_103828C.1
gaaaaaggaaacactcttatactgaaataacagaaaatagtgaagcaatcataacaactgggcttgagtgtacataaaaagccataaacacatagaagacaaacaccggttactacaaagacacaagaactcaacatgagtcgaaaacacatacacgctttaaatgggcccggttgccaaccagctgtctgaacactcctggatatgcctaagagcgggttctaatggaccgttttgctcgccactgtctgaaagatcctaggctcttcaatgc

SEQ ID NO: 4233 - DNA, 350 bp, Glycine max
  unsure (1)..(350): unsure at all n locations
  Clone ID: PAT_MRT3847_103829C.1
ttcggctcgagaagagtttaattcgtttgttnngngcaaggagagagagaggcgatggagaggtgcaaatagagtaacggcagctgttggcactaacggtggctatctacgaggcctgtgtgaacgggctcgtgccgctgactgtggtagcggatgttcccgcggctgtgctggagttgtcccagacgctgttcaacacgaggccgcacatctagctgttcgtgtctcgaacggtgttgcacacagacctgatggggattctgtgtctgcttaacgtacgctgttgcattatgcacacggtacgtgacaggcacgtgcctgccagtgtggcgacctacatgaacgaccac

SEQ ID NO: 4234 - DNA, 403 bp, Glycine max
  Clone ID: PAT_MRT3847_10382C.1
gagtactagcagtggggtccggggtgaggatgttgtatcctttggaaatcagagtgagctttccccccaacgtgctatttttggctgtgaaaatgatgagactggtgatatttataatcaacgtgctgatggcgtcatgggtttgggccgtggagatctaagtatcatggaccaactggttgagaaaaaggtgataagtgatgcgttctcactgtgctatggtggaatgggtgttggtgggggtgctatggttcttggtggcatatctcccccatctgacatggtctttacacattcatatcctgttcgaagtccatattacaatattgatctgaatgagatacatgtttcggtgaagcgactgcatttaaacccataggtttttgatgggaaacatggaact

SEQ ID NO: 4235 - DNA, 132 bp, Glycine max
  Clone ID: PAT_MRT3847_103830C.1
atggccatggtgaaccccgggaaggtctatctatctcccttcccccgatggtacaatcacaatgcaacctgtgcctatcacggtggtgctctggggcattctatagagcagtgcatggtctttaagcacaag

SEQ ID NO: 4236 - DNA, 635 bp, Glycine max
  Clone ID: PAT_MRT3847_103831C.1
ggctcgaggtccatctttcgataaacaccattttttctcttcctcttttgaccaaacatgaaacccacggcaacattcttctttctcctatccacaacaacactccttgtttgtctttgcctcggaacaacaacgttccaaaccactctctttataaccttcttcactatttcccttaactatcactcttatcacaccaacgaaaaaccaaacaaaaaacttactgggtgacgacatggtgaagagcgcgtggaaggagatggagatgaaaggcgtggtggaggttcgcggtgtgtttcaggaagggtctctttgtaatattctggagagtgtttttgggagtaatgataagagtgaagagttgggggatatggttagggaaaggtacgagctgattgcgatgttgaacttggaggattattttcctttgaagtttatggactttcatggggtgaagagaaggtgccacaagttggcggctaaggttggtagcgtggtggggcaaattgtggaggatcgaataagagaaggggagtttgttgtcaagaatgattttcttagcactttgctatccttgtctaaagaagataggttggctgattcatatatggcggctattttgtgggaaatggtgt

SEQ ID NO: 4237 - DNA, 186 bp, Glycine max
  Clone ID: PAT_MRT3847_103832C.1
acgctccgatcgcatctgtaacaatggaagcgtgtcatgcaactcttggtcgacgagacgctgaacgcaattcggcaaaactaggccgcggagacattgagtaaagactcttcgggatcagatctcacgcagggtcacagcaccaccgagattgcgggaatgagcaagttcgagagcgcaaatgag

SEQ ID NO: 4238 - DNA, 958 bp, Glycine max
  Clone ID: PAT_MRT3847_103833C.1
aattcggctcgaggtccatctctggataacaataacaccaattttttttcttcctcctcttttgaccaaacatgaaacccacggcaacattcttctttctcgttccttcaacaacactcgttgtttgtctttgccttggaattggaacaaccaccctctttataaccctcctcgcaatttcccttaactactggcttgtccctggaggctttgcatggagaaactatcactcttatcacaccaacgaaaaaccaaacaaaaaacttactgggcctatgggctggcccatacttgggtctctgcctctcatgggctctttagcccaccaaaaactcgctgccttagccgcgacgttaaacgcgaagaggttaatggcactgagtctgggacccactcccgttgttataagcagccaccccgagaccgccagagaaatcttactcggttcctcgttttcggatcgtccgataaaagaatccgcacgcgctctcatgttcgagcgtgccattggcttcgctccatccggaacctactggcgacacctacgtaggatcgcggcgttccacatgttctctccgaggaggattcagggcctggagggtctccgacagcgcgtgggtgacgacatggtgaaaagcgcgtggaaggagatggagatgaaaggcgtggtggaggttcgcggtgtgtttcaagaagggtctctttgtaatattctggaaagtgtttttgggagtaatgataagagtgaggagttgggggatatggttagggaagggtacgagctgattgcgatgttgaacttggaggattattttcctttgaagtttttggactttcatggggtgaagagaaggtgccacaagttggcggctaaagttggtagcgtggtggggcaaattgtgggggatcgaaaaagagaaaggagttttgttgtcaagaatgattttcttagcacttt

SEQ ID NO: 4239 - DNA, 170 bp, Glycine max
  Clone ID: PAT_MRT3847_103834C.1
gtcgatccatttgcatgcagactctccgtattgttcactgtatacgtgtaaagtttaatattcttttgaatgagattttttccaatatgccttagtcttactgtactactattgtttggtagggtaatagctagtaaattattttcctaaagaaggcattcacgagcaaa

SEQ ID NO: 4240 - DNA, 511 bp, Glycine max
  Clone ID: PAT_MRT3847_103835C.1
atgaaggcagggagatctttgtacatggaggatgatagaaatgatctctgtctttttttctctagttttttttcccgtgaatggggggcttgtggattcttttttgtggtcacaaataggatataaatatgatgtgaaaaatgatagatagaggagacatgaaaatgtttctctcagagattggattcaagatgcgtggatagttttttgttaataaaagaaagtgtacagttgatttagaaaggatagatgacaattatttatttatttatttctaaatcatggtaattcctcttctttcttttttccccggtaagttggggatttcttgtttaatttgagatatttggagacaaggttgtgaaatagagggccaatggcgcattgggatttctccaacacaaccccagtcgctactttttcattttcaaaatataaataaatgagttttaatgtgactctgctctgtacggtgctgaggaacattaaaattgaaggggtcgtttggctt

SEQ ID NO: 4241 - DNA, 433 bp, Glycine max
  Clone ID: PAT_MRT3847_103836C.1
cacccccaccggatcttgaagaacacttataccaaaatgtacatgaagtatgcatgagctaacaagctagctagatcgaaaaaaagaggaagatttaatggttacgaagacatatgactaagaaccctttactctaaaggagtaacagggcctaaacgctacaaaaaaaccaaacagacagcatcagcacaccacaatatgttcacactcaaactgcacacaactacaaacatattccagactactcaattttgccaatacaactacgaacccaccaccactgcttctccaaaagcatactgacgatgattaccatcaaactatacttatcggaactgccatactgaccttgccaaacaaccaacacagatactcctacagactgcaatctgtcaataccctgagagtgctctcatgaaccacatactatgtg

SEQ ID NO: 4242 - DNA, 364 bp, Glycine max
  Clone ID: PAT_MRT3847_103837C.1
ggaaacgcttgtgcaaaaggaaaaccagttgctcatgtctcttgctccaatttttctggaggtgagaagcatgcaagtaggccaaagcagtattcaaattcttctgaacaactatctgctccaataacttcagaattaaatgttcccaaatccttctccagtaacctaaaatccttcagcttgaatgatcttaaagaggccactaagaacttccggcaagaaaatttaattggagagggaaggattcgggcgcgtcttcaaaggatggatcgatgagaacacatatggtcccaccaaaccaggcactggaattgtagtgcccattaaaaacctaaagccagaaagcttccaaggccacaaggaa

SEQ ID NO: 4243 - DNA, 299 bp, Glycine max
  Clone ID: PAT_MRT3847_103838C.1
ccacgcgtccgcccacgcgtccgctaactcgcccgctgaccttgttaaaaattcaaaataacacggggctggtttttaagggcttgagctcctcttcctaaaaccatttttccatcaaataccaattccttattcctgctataactccaaaatccctttttttacccctacccctgattttcatttctcttctactatgaacagctgtttaatttgagaacatttctttacgtttctccatcttcttgtaataaaacaatccttttgctctattataccctcaacatacctcccccttc

SEQ ID NO: 4244 - DNA, 109 bp, Glycine max
  unsure (1)..(109): unsure at all n locations
  Clone ID: PAT_MRT3847_103839C.1
ttcanagtcgaaaacggcagttcccctccctgcatcggatnggaggaacacagaccagccaacgacagtgattactcacctggaatcgggttctgtcttccttgcattg

SEQ ID NO: 4245 - DNA, 343 bp, Glycine max
  Clone ID: PAT_MRT3847_10383C.1
tgcttgaagacacagctggcctggcagccaacatgtccaactcagggaaagagttagataaatagaaatggacgaaatcccctgctgtaacaaaaagatttttgtaaccataatagttcctcctgtatcagcacttgctcctattcctgccacaactcttgttatctgtaaacgagatcatcagaaaaggaggagcccaagcacgcttccaatctctgaatttgcttaaggagaccctatttgggaagatattgccaaacacctcccggttccaattttggagatcatgggacaaagacagaatgccctgatcccaattggagccacgaccctaagagcttgg

SEQ ID NO: 4246 - DNA, 282 bp, Glycine max
  Clone ID: PAT_MRT3847_103840C.1
tcgtacggctgcgagaagacgacagaagggtacgggtgggagaagaccaccgaagggttcgggtgggaaaaggccaccggaggggtccggttgcaagaagccaccaaagggatccggttgcaaaaagccaacagaggggccctttaaataaaattcttaataatgaaaagacattctaaccacttttaaacccggattacttccatcactaaaagggggacttacttggaaaaaaaaaaataattataataaaaaaaagggggccgttttgaaggttcaagg

SEQ ID NO: 4247 - DNA, 131 bp, Glycine max
  unsure (1)..(131): unsure at all n locations
  Clone ID: PAT_MRT3847_103841C.1
gcctatcatcccggtaantacaangcncctcacattanggggatggctagcggngaactttcngcgaatatgcgncgtatcgagantctttnagatccaanaaaaggcaantntatgtatctgacggcagg

SEQ ID NO: 4248 - DNA, 178 bp, Glycine max
  Clone ID: PAT_MRT3847_103842C.1
gggagcatttcaacactctagatttctagctggggctgctaccacagctgcaggaagattggtggatcagaaaggtgaacttgaggctatttggccctaccccgcctcctatcaccccccacaagagaacttaaaagacttcataagctttcttgacgagcacaaggtggatctttcc

SEQ ID NO: 4249 - DNA, 240 bp, Glycine max
  Clone ID: PAT_MRT3847_103843C.1
tttgtttgcacgccaaacaaattctagcaactcagggagtttgaagataagacaaaattaaccaggcatccccaggactgttaattgttggggggagggcatcagaccctacttcttttggtgctcgccagtctatcttttaaaggtacaaacatatttttttacttgtttggggggccagaacaaaccaaaattcaaagtaatcctgaatagctggaacaccaaaaaattttttttaaa

SEQ ID NO: 4250 - DNA, 464 bp, Glycine max
  Clone ID: PAT_MRT3847_103844C.1
ttgacatctgtgttttcgtcacacattggctccccaaagctacaaacatgacagcctgtcacaagggcacccaactatcccccaatcatggaaggaatctactggctcacactagatcccaattccgcatacttattctacaacttatcatcctcacattttaccacccatatttttattgggtaacaaggaaatgcagccccctatatctcaccaattaccaatcaatcattagctgataatgcttcacaatccaattttttattttcttaaccatccaaggacaaacttgaaactaaatcaacactttgggcaaatacactaagcaaggaattggacaatttgaatatatttggacctaaaacaaatccattagcaaatattggggttgactttgaacccctaataggaaggaaaagaaaatggagacccccacttccacagcttttacatccactgaacta

SEQ ID NO: 4251 - DNA, 152 bp, Glycine max
  unsure (1)..(152): unsure at all n locations
  Clone ID: PAT_MRT3847_103845C.1
ccgctcaatgtaatatgagtgaaaatagcattatatatgacatattctgtataaatattaattgctccacccttactggagaaggaagacatggttataagtgtgggggaggtgatacatcttatttcantataaagatcaagcnntgattt

SEQ ID NO: 4252 - DNA, 1102 bp, Glycine max
  Clone ID: PAT_MRT3847_103846C.1
gctggcaaggaagcaattggaagctcctctagaacatttttcaagactaatagcccaggaaaaccgcttataaagccacggaaatcaccatcatctcagttagagacagattcatctgaaattagtagtgtacaggatgattcagaagtttcaaaactcgcgcctccctctgctacttttcttcttctcgtcttccttcctctcaaacggaaaacaaccgcaacagcagatttgaagggagtacgcaattgatggatggatattctggtaaaagagccattgatggggtggtagtccctagaaaggggatgggccttgcatttagagatactgctaatgctagagatcgaaatggtcaggtgtgcagccgcattacttgcagcagcagagtcaatactcctaaaggcactcaaattggttcttgtgaaaaaggtaaatctttgaaaccttcaatccaatcttcttcagctggcaaggaagcaattggaagctcctctagaacatgttccaagactagtagccctggaaaaccacctgtaaagcctcggaaatcaccatcatctcagttagagacagattcatctgaaactagtagtgtacaggatgattcagaagcttcaaaactcacctctccccctcaaaaaagtcagacagggggtcaagctgaattggaaaatacagtgtctggtaatgtaatgatggaggtaggaagctctagtatagtatccaatacaagatctcggaggaattttcatccaaattctggattacgtggccaagaaattaaaagctctggttcagtgactcgtgctggtaccagtaggtatggattgaggaacctcaaatgcaatactatttctgatgtcatccctgctggttgttcaccttcagattcaacccttaacagaaggaaggatgtcataaaaaagagaaattgtgaaggggaaggtagttccactactagagggaagaaaatgagcgggtcttcattagaagcacgaaattctggccccagaaatggcatatctatctctgatacaagaatatctaggaatactcaaagggacaggtcagacagcaacatggcaccagttagaactcg

SEQ ID NO: 4253 - DNA, 605 bp, Glycine max
  Clone ID: PAT_MRT3847_103847C.1
tctttttttttttttttttttttttttttttttttttttttttttatgggaaaaaaaatgggaaatcacttacattggatacatcaaacactaaagatcagcatacatgatcctacggggcacttgcctttcccaaactagagaacagaattcaaaatattatggaacaggggtcccttgggatcgtaacgagctacatgccacaattctagcgcagaaattgtcgggtattgccgcgaatgaaaagaatccctcttccatgaatttacaaaaaacaaagaaagtccttgatgtcatttcatgattggaataaaagccatttctttttcaaatacctcatttttgaagagctttttctgctttatcaggaaaaataagctctggtgggatctcacgaacaacacctagcatagagtcgtactcctcatctatacgtgcaaacttctttcgcagcaccttctcaaagtcaatttcatcaaagggctttgaattctcggctgcgtggacctgtgcaaggttagtataattggtggctgactgggagatgaaagctttctgttcatcagctagctttcttaagaactttgcgggattgcctgcccata

SEQ ID NO: 4254 - DNA, 343 bp, Glycine max
  Clone ID: PAT_MRT3847_103848C.1
gggggtgttaaaatttctctactaaaaaaaagcacccggcaaccccctattttcctcgggggcccatccgctttgaaaaaaaaaggccacaaggcccgaaaaaaccggggcggcgaacccacgaaacccaaaagaagagcccgcggcccaaaacgaaaaatcgcgggggccccccccccaaaacaaaaaaagacattgggggggcgagacccacgagtataaaggcaaaaacaccccgaacaaagaaaacccccaaaaaggcaccaaaaaaaaaagggggccccaaatgcccaaccgggaatcctggaaagggccccaaaaaaaaaaaaccctgaaactcccc

SEQ ID NO: 4255 - DNA, 264 bp, Glycine max
  Clone ID: PAT_MRT3847_103849C.1
cttggttcaaattgctcttgttgagagcaattctgcaagggacaatcgcataatctatcctaagcttgtgaagattgttgacctgtaatctggcactgcttggcccgcgtcagtccccttgaagttaaccatgctatgatcgttgagaagtcagttatgagaaactattttgtttacttattaatgggttcactgccatttttgtggctacctgtttctacgattatgctacaagcagctgcttttcgtttcgatgaatgtttt

SEQ ID NO: 4256 - DNA, 1595 bp, Glycine max
  unsure (1)..(1595): unsure at all n locations
  Clone ID: PAT_MRT3847_10384C.1
tatacccctgtttatgttggcaatcttgctccggaggttacttctgttgatctccatcaacattttcattctcttaatgccggaattattgaagatgttagggtgcaacgagacaaaggttttgggtttgtgagatacagtacccatgctgaagcagctcttgctatacagatgggtaatgcccgaattctatttggcaaacctatcaagtgttcatggggtagcaagcctactcctctgggaactgcctctactcctcttctgccaccttctgcaaatgtgccgggcttttctctggctggtcttgcagcatatgaacgtcaaatggctttgagtaaaatgggtggtgcacacacccttatgcatcaacaaggtcaacatgccctaaagcatgtagacatgggaatgggtgctactgggactggttttgatgcaaggttccagaatgttgcaaccacccaacacctagtgtactatcagtaaaatgtgttggtgtgcaactctctgcgataaacaagggaggattaaagtatgtaagaatggttctacaataccgattatttcttccttccctgtccatctgctatgctaacttcatcctcccatttttttcttctgtgcttgtttatgtaatactacagtttttttagccgttgcatgccttaatggtgtcttctattatttaaaaaaaaaaaaaaaaaaaaaaaaaaaaaaaaaaaaaaaaaaaaaaaaaaaaaaaaaaaaaaaaaaaaaaaaaaaaaaaaaaaaaaaaaaaaaannnccccccttttttcttttttcttggaaaaaaggcctttttttgggccccccttttttttttgggccccgcttgaaaaaaaaagagggtgagtctttctaccccgcgctctcctttacctgaaacccaaaaatgctataaaaaaaatattgatcgggattcagatgatagtacgtgcataaattgttgtgaaatttacctgatgttcaagtccactgtactcgccttccgtattttcacgaattgtgattagattgacattatcataccgagttttgtagcctggaagactgtagcaaggtcgaacattggcatacaaattgagctcttttctcagagtaagatttaatgaacgatgcccttttccaataggggtggccattggtcctttcaagccaaccccattttgccttacagattccaaactttcccatgtcagaaaactttgggttctagggtcaatttcagttcctacatagtgctcttcccattctattgggacatcagctgcttggaatatctgtttgacggattcggcgatctcggggccgatgccgtcgccggggaagagagtggcgcggatcggagtggaagcagcggaggagaaggagaaggccctagggtttgcaaggatgcgacttccgaaggttcgtctcaggagctgagaagccatggttttcaccacgcgcactttctcacgcacaacgcaggcgtaacgaagaaactaaaattattattattacaaacctggaaacgagactagaggcgcgtaatgtattgagtagaagaaggcagaacagaaatataaatgttcggt

SEQ ID NO: 4257 - DNA, 2087 bp, Glycine max
  Clone ID: PAT_MRT3847_103850C.1
ggctcgaggtgaaggcggcgagagggattgctgatccaaatatggggtttgcttgccagctgttgcagtgccagaagagtctcatgagtaccgacgtccttggggtcaagttatcacatccctggtctcagtcagcctctctaccgttgaagaaatcatcaacttcccttgccgaacggagaggtaacttgtcaaaatttttgaagttgccactaatgaatgataagacacaagtaacagataaatcgtcaacttctcatgctagtcgagaatatgacattcttgttaatgggaatgttagctatctgcaacaatccgataataaagattatttttgtaagatgatcaacgatgccgaggagggtgtttacttttgaattgctttttcagattttctgcccttaatggacatatctggcaaatttggcattaaggattgaagatggaaaactatgtgtttagctaatgaaagtggcttactgcagtgtcatgtcgcacaaacttgggtatatcactggcccagtctacaaaagattgagacatttggtgtaagtcatttggattctaacccttctgtctgcaagggagagtagttggagtgtaaggcgtcaagtttcccatggtaacatgaaagaggttgtttcggtccctcggctatcgttcccaagggtttattcggattcaatgttgtgtcttcgtacatcagcaaatgcaattttgtctccatcctcatccctgtcgtcatcttcatcatctatatcatcatcatcctcaccgtcttttgtttcgagaatttccatcctttctgattctagcattcattcaattcatttgtaagaagtgtccccagactctatccttgtgtcataaagcttctttaaccttttcccaacacctgcagctatctctttgtatggcaaattttcaggctctaatttgatcttccctgtgataaaaaaatccagcgaggaggttgcccaatgccaagtcaattgtagtagctcggctgattgtacagtgcagtgctttaccacccctcaacctggacgattatgttcaatatactcaaatttcattcactttctcatgttatttttaaaaaacatttcctttttagctatcatacatatccactctctatgccgagtctggtgtaggacattcgtgtatatgtcaacgatatctataatcaacaatccgatgttaaagatagttgtcgcgggtctaacaaccatgccaaggatggaggtgtgaattccattcaaaagtgtgagccaagcattgctgatagcatgcacctcaaggaatcatcacttagtcagtctaccacattgaagggaactaatgacagtggcttactgcagtataatgtcgcacagacttcggtatatcactggcccagtatagaaaagattgagacatttggtgcaagtcatttggattctaaatctgcttttgtcatattctctcccagtatgcatgtacatgcagggaacattttatatatttgggtagggaggtctttcagttgtgacgcttcacaggttcacttagatattgataaacaatcagatgtaggagctgtcgactggaatcaaattggatgtgatctccttgctcggtttagtttgccaaagaactcagtcatcaaggttgttaaagagaatgaggaaccctcagagttccttgctttgctgagttcattgtagttaaaactacactaggagaatccttggttcaagtagcttctttaaccttttccagcaccagcagttatccctttgtatggcaaattttcaggctctaatttgatcttccctgtgacaaaaaatccagtgaggaggttgcccaatgccaaaagtctaagtgtagctcggctgaatgtatagcgctttaccacccctcaacctagaaatttatgttcaatatactcaaatttcattcacattctcatgttatttataaaaaacaattcctttttagctatctttcctatcctctctcaatgcggaaaatggtgtagtttatttgcttatatgtgaacaatttcctgattgagaatttctaagtttgaaacaaaaaccccc

SEQ ID NO: 4258 - DNA, 896 bp, Glycine max
  Clone ID: PAT_MRT3847_103851C.1
aacccatttgcctgcaagggagagtagttggagtgtaaggcgtaaagtttcccatggtaacatgaaagaggttgtttcggtccctcggctatcgtttccaagggtttattcggattccatgttgtgtcttcgtacatcagcaaatgcaattttgtctccatcctcatccctgtcgtcatcttcatcatctatatcatcatcatcctcaccgtcttttgtttctccagattccattacttctgattctagcattcattcaaagtttttgtcagaagtgtcccctgtatcttcatctttgtctaatttttctaatttgtcaatcacatcatattctactcctaaaacagtgtctaacagtacagatgtccttggggtcaagttatcacatccctggtctcagtcagcctctttaccgttgaagaaatcatcaacttcccttgccgaacggagaggtaacttgtcaaaatttttgaagttgccactaatgaatgataagacacaagtaacagataaatcgtcaacttctcatgctagtcgagaatatgacattcttgttaatgggaatgttagctatctgcaacaatccgataataaagattatttttgtaagtctaacaaccatgccaaggatggaggtgtgaattcaattcaaaagtgtgagctggcattgtgtccaagcattgctggtagcatggacctcaaggaatttagtcagtctacattgaagcgaactaatgaaagtggcttactgcagtgtaatgtcgcacaaacttgggtatatcactggcccagcctacaaaagattgagacatttggtgcgagtcatttggattctaaagctgcttttgtcatattcttctcccctatgcatgtactcccaggaaacaatttatata

SEQ ID NO: 4259 - DNA, 731 bp, Glycine max
  Clone ID: PAT_MRT3847_103852C.1
cgactctgtcagccaggaggttcattattggaactgggaaacatcatggggttggagtgagtgaaacttgacataaaaaagacttttttatgcatagtgctctgtgttaatatgatttttttttaatatacgtgacctttttgttttatgagaattaatggtaaataatattttttatggacctaaaggtttagctttaataatcttaacttttggccgacctcttttaattgcatacactcgtacattatatgtggtaaacgaattagtaacttctactgtatcatgaatttcttgtgatcatcacttgcaaaatttaaaataggttaaatatattctttaataaacataaaacaataaattagtctctaaaattggcataattatttattttgattcctttgtaacaaaaaagagtaaatttagtttttaattttgacaaccatccattagccaatttggtcttaaatgcactttaatgttaaaggaaaaatttacttatacatagcaacgtcaacaaccaaattgattaatatttgtttaaattagaaattaaatatatgcaaaaaaactagaaattaaatttgctttatgtttttgtaactatctaaatggatgtgcatagtatcaattttaagatccaaattgttttttttttcaagtcaaatggatctcttaatttaacaaataccttatttctttttacattaacggggcatacaaatgaattc

SEQ ID NO: 4260 - DNA, 238 bp, Glycine max
  Clone ID: PAT_MRT3847_103853C.1
ataatgaaaataaaagaatgtcacagatcgaagtgaaagcaatatcttgtgggctatttcttgttttttgaggaaacttgtgattcatgtgttttcagttatgatactgtggccttttcatgtctttgagcagtgaatttgagtgatttgtgaaaatgggccacccggagaatataaatgcccttgcattttccagacaacataaaaattaaaaagttaaagtccacatgggtgacga

SEQ ID NO: 4261 - DNA, 684 bp, Glycine max
  unsure (1)..(684): unsure at all n locations
  Clone ID: PAT_MRT3847_103854C.1
attcgncacgaggaaagcaaatctgttgtggctggtggtggggctgttgaagcagctttgtctatttatctggaaaattttgcaacctctctgagctctcgggaacagttggctattgctgagtttgccaaatcacttcttgttattcccaaaactttgtctgttaatgcagcccaagatgctacagacctagtagccaaacttcgctcttatcacaactcatcccaaactaaagttgaccatgcaaacttgaaatggattggtcttgaccttactgagggagttgtcagagataacaggaaagcaggagtactagagccagccatttccaaaatcaagtctctgaaatttgcaactgaagctgctattacaattctccgcattgatgatatgatcaagctccaaccttcacctaaggaacagcaatcatacagacaggcatatgaagctggtgaactgtaattttaagcaaaactgattttgtatcttaaacaaaacaacccagtgctttacacgtgtcttatttaaatgcagtgctgacctgatgtgatttcattggtgttatatttttgttaaaaaataccaatgctattttgtgtcacatttctacttaacnnaggttaattcaacaaatgcttttattcgcaatatcattaacttgnnnnnnctgtcattcactttcgc

SEQ ID NO: 4262 - DNA, 720 bp, Glycine max
  Clone ID: PAT_MRT3847_103855C.1
atggaaagcaaagtagttgtaaatgtagaacatgataacgataaattacgagttgagctaaacgtttcgaaaagagatgactttaactatcaaatgcactttgcaataagtgaacgtgcatatgcattactaactgtaatgattggtagagcgttaatgttaccaagagggacagtattctcatgctatgaaatattggaactcattggtgatgatgtatatgcagacatctacgatgatgaagttgccgttggctactatctaagatatgcattgagttatcgtgatatatctgaaatattaaggggacgtggtgtaaacgttcatcattcaacggtctaccgttgggttcaagaatatgccccaattttatatcaaatttggaagaaaaagcataaaaaagcttattacaaatggcgtattgatgagacgtacatcaaaataaaaggaaaatggagctatttatatcgtgccattgatgcagagggacatacattagatatttggttgcgtaagcaacgagataatcattcagcatatgcgtttatcaaacgtctcattaaacaatttggtaaacctcaaaaggtaattacagatcaggcaccttcaacgaaggtagcaatggttaaagtaattaaagcttttaaacttaaacctgactgccattgtacatcgaaatatctgaataacctcattgagcaggatcaccgtcatattaaa

SEQ ID NO: 4263 - DNA, 284 bp, Glycine max
  Clone ID: PAT_MRT3847_103856C.1
ctccttttttggtggggtttttaataagtcccgagaaaaccagacaccgggcccacgccattcccagcttgaagacgtatgtcaatttaacaatacagatgacgccggcttgtgaacggagcgcctggcatcaacaccatagtttaatacacgcaaagttacaagccgttaaggccgacggaaaaggggaggtgaaacggaagcaagggttttttaaccaaaagagcgcccggccagaaagggacccaaggacgaacgccaattcagcacttcctgtggccacc

SEQ ID NO: 4264 - DNA, 392 bp, Glycine max
  Clone ID: PAT_MRT3847_103857C.1
tttttttttttttttctgccattaataaatccattcattcattcaatgtgaagacaccagttgtaacatccatgtcgtcatcaacctgctaactaaattctaatctggaactgaaaaccaactacatcaaaatattcacatggcttcaaaatctagcaacaaaatgaccttttctaaacccactacatcaattgaccctaccaattaattactacaaacaccagcaacagacacaatttaattccaaaaaaccaagttcttagaatgtttcggggacacaaataaccaaacattttgtgtgcctgacaaaaagtgccacaccaacttcccaaatggtagcgtggggggaagcatcaatggagatagagggaaggtcgacgcaccaacctttt

SEQ ID NO: 4265 - DNA, 213 bp, Glycine max
  Clone ID: PAT_MRT3847_103858C.1
gagcgtactgatgagtgtttataccatgcttgtgatatagctcatgatgcaggaagtgcaggaagacaatcattaagcggtggtacacaaaaggggccaccgttttaatcacactggctggtataagagctagctgtcattatgtcactaaactgtggatcgccagtatgtgcacgaattggtgtactacaggggcacgacttcaaaagttca

SEQ ID NO: 4266 - DNA, 682 bp, Glycine max
  Clone ID: PAT_MRT3847_103859C.1
atttattgtttttgtctacccacgcgtccgcccacgcgtccgcccacgcgtccggttctcacctctccaaaacttgtagctgaggatattattactcagcaaaaattcatggaagttccaatcaagtatccggcaaaactcacccttagggtggttcttacttgtatcatggcggccaccggtgggttgatttttggctatgaccatggtgtttcaggtggagtgacctccatggattccttcctgaagaagttcttcccatctgtatatgaaaaggagtctaacgtgaagccttcttcaaaccagtactgcaaattcaacagtcagatactgacactgtttacatcttccctttatctaagtgctcttgctgcgggtcttggggcatccagcataacccgaatgttgggaagacgtgcaactatgattatgggtggaatattctttgtggcaggtgcattactcaatggattagctgtaagcatctggatgcttattgttggcaggttgttgcttggttttggcattggttgtgccaatcagtcagttccaatctatgtgtcagagatggccccttataaataccgtggagctctaaacatgtgcttccaattgtcaatcacaataggcatctttgtgggccaatctcttcaactactactttttcaagatactgaatggt

SEQ ID NO: 4267 - DNA, 340 bp, Glycine max
  Clone ID: PAT_MRT3847_10385C.1
tttagagtgctttctgcgaaaaaaccacaaaagggaacgggtgaaattcgaccactctagggcttccttccattccttctcaacatagctagcctattcttctttaaatgaaggcctttgattcaatataacttccgattttcatcactcactattctcctaatacccgttatcttcccagcttcatattttatacctacatttcggtatgctcacctgttttcttgaccaactgccccagactgattgccattcattattacagctcacattacatttcaaaaccgctacaccatttcacctaacataaacaagatattgtgtgtcattatcatacacc

SEQ ID NO: 4268 - DNA, 169 bp, Glycine max
  unsure (1)..(169): unsure at all n locations
  Clone ID: PAT_MRT3847_103860C.1
catgtatcacttacgtaactttatctgcccattcttgcatttgagggagcttcttaaagagcttggttacagggatacccttcttaatttccgctgctgatatnctattcgcagccatatttacatttnctaggatggtggtcggaccatgtatcacttangtaattta

SEQ ID NO: 4269 - DNA, 857 bp, Glycine max
  Clone ID: PAT_MRT3847_103861C.1
ttcggctcgagcagccacattgacaaggcaaacaaggaaccttctatatcttcttcctcttcccatgtgataaacatcaaagaaatgagaaaaactttagaacgcagaggccaaggattaacaaaaaatgattctgtaagtgtttccattcgtgagacattcatacagttctgttcaacaaagataatttgtccacaggaacatcgtgctgcattagcagttaagttatatggagttcaagcagcacttttatctgctttaggcaacccttttgagaacctatcccaatccataagctcaagaaacagctcacagatactaagtttgtcgaaagcctctaccgggttcttgccagcagttttgtgtacacattaattgtggtttggtctttggcttttagagtgcctatcatctcaatgctgtgcctttctcttctgtactgtttatctgtgttggttgctgcagcatcagggtttgatgtcatgtgtggcacgtttagaatgagtggcatcttgtttgcatctttaggggttcttggctttgttatgctgcttcttgttgtgctcttgctggtgctttttgcttcctggagatgcccaaaacaagatgggggagccaagtgatgaatgcttagtgctttggcatatagggtaactacaagcttagaagttctatgtttgtagttaccttcattcggctttgtttgcacatttgtagatttaaaaacttttgtatgtttcatctaaagtctaaactgtgataattttttcctatagtatatgctacacgtggatttgctttaggggttcttggctttgttatgcgcttcttgttgtggtcttgctggtgctttttgc

SEQ ID NO: 4270 - DNA, 470 bp, Glycine max
  Clone ID: PAT_MRT3847_103862C.1
gctaattgatgttttcattcgagtatgagctagatttaatgatttctataggtaagtccatgataatataattggtgcttatgttctttatcacctttttaagaatttatttaattatttattctgatttaaatttaacagtagctataaagaaactcaactaatgatattaacttattttctatgaaaacgttgatgtattattaaaatatttttattataataaggcttgaattccaatatattgatgtatctcaaaattgtataattttatatatgtaaaaaaaattattttttaaccatacataatttttttcatataaaaaaagacatacttcatacttattaaaaaaattagttaattttattaaattgtcatttttaattgaaaaataaaccattttgttaaactatctttaattggaacttgatatcaaacctaaaaaaatatttgattttattaaatgaaa

SEQ ID NO: 4271 - DNA, 961 bp, Glycine max
  Clone ID: PAT_MRT3847_103863C.1
gaagcagttgattttccgatcagaaaatctgaatcatgtcgtggcaagcgtacgtggatgatcacctgctgtgtgaaatcgaaggtaaccacctcactcacgccgctattatcggccacgacggcagcgtttgggctcagagcgccaacttccctcagttcaaagctgaggaaataactgctatcatgaatgactttaacgagcctggatcacttgctccaactggattgtttctcgctgccaccaaatacatggtcatccagggcgagcctggtgccgtcattcgaggcaagaagggtcctggtggtgttactgtgaagaagaccggtgcggccttgatcattggcatttatgacgaaccaatggctccgggtcagtgcaacatggtagtggaaaggcttggtgattatctcattgaacagggtctctaatcctctatttatgtcttgctatcgtgcatatttcattggcttctgtacgagtttttgcatcgacctcgactgtaatgctttgattgcagtgtaataatattgttgggtgggtatcaaaagtcacggcatgtgcgtgttgccaagaaaaagtgttttggtgcttgagaaattatgactataactctctatcgttgtacttttttttgcggggtccctgtatacattagtgatttaaaattttaatgttatggtattatgtttctcacatttaaaaaaaaaaaaaaaaaaaaaaaaaaaaaaaaaaaaaaaaaaaaaaaaaaaaaaaaaaaaaaaaaaaaaaaaaaaaagaaagacattaaaaaaaaatcaaaattaataaaaacaagaaacggacgtcttaatttggggggggggtttttaaaaatccaattttttgaacccctcttttacaaagaaaaacttttttttttgggcgccaatacccattttaccggccgcccttttaaaaaacttttgttgtgaaaaacttt

SEQ ID NO: 4272 - DNA, 861 bp, Glycine max
  Clone ID: PAT_MRT3847_103864C.1
ggagcgaaaataggacaatgaaaaggagattcctgtacagtgtacagggatttataggcagagatagttgcgtaatatgaacgcagctgagaagcagttgattttccgatcagaaaatctgaatcatgtcgtggcaagcgtacgtggatgatcacctgctgtgtgaaatcgaaggtaaccacctcactcacgccgctattatcggccacgacggcagcgtttgggctcagagcgccaacttccctcaggtaacgcttctagattcgccgatccctgagagtgttgattatatactgtgcaactatgtttgattttggtgtagttcaaagctgaggaaataactgctatcatgaatgactttaacgagcctggatcacttgctccaactggattgtttctcgctgccaccaaatacatggtcatccagggcgagcctggtgccgtcattcgaggcaagaagggtcctggtggtgttactgtgaagaagaccggtgcggccttgatcattggcatttatgacgaaccaatggctccgggtcagtgcaacatggtagtggaaaggcttggtgattatctcattgaacagggtctctaatcctctatttatgtcttgctatcgtgcatatttcattggcttctgtacgagtttttgcatcgacctcgactgtaatgctttgattgcagtgtaataatattgttgggtgggtatcaaaagtcacggcatgtgcgtgttgccaagaaaaagtgttttggtgcttgagaaattatgactataactctctatcgttgtacttttttttgcggggtccctgtatacattagtgatttaaaattttaatgatatggtattatgtttctcac

SEQ ID NO: 4273 - DNA, 356 bp, Glycine max
  Clone ID: PAT_MRT3847_103865C.1
ggctcgagagaaccctgatccccctcgacatttataccctttacagataccttcgttgccattaggcaccgggctttctgtgctctctccgagctctatccaaacccttcactattacaaatcccgaaacttcttcagactactattctctccctcttatagttgtaccgaccatctgcctccaagatgccgttaagatggtgagcgccccggtcccacacaaagcataacaactagcgtccgctgctgattcgccaaagatatcatgttgataccgctcagggtgacacagccggtttttgacttgacataacgacggggcgacctggatatacttagccagccaacaggccctg

SEQ ID NO: 4274 - DNA, 195 bp, Glycine max
  unsure (1)..(195): unsure at all n locations
  Clone ID: PAT_MRT3847_103866C.1
gcgtccggtgaatataaagtactnggttggcgtctcagttaacatgttttgtgctctgtgattgcagtttgtatgaaattagcagaattgatcctgagatttattttggctggttagctgtcaaaaagactttggtcttgacgacttgcctgatcaagtagatctggaatgaataaacttaatagaagggttttc

SEQ ID NO: 4275 - DNA, 1065 bp, Glycine max
  Clone ID: PAT_MRT3847_103867C.1
agttgctagcttatcctaggcgagtaccctatatttatataattgagttttggtttatatgaccgcgatttttagtgttttttcagaattctctatctaaatgactcaactttttattcatggctttcttggttaattagaacatactcttgacgaagatgatttagctcaaacacaaagaacaaaaactatacatttcttttgatttgtctacatttcggagttttcttttttctcgcctaaacttttatcgctaactcccacaagctcagtgtcaaatatgagtgttgcaccaactagactaataaatctttctaaattagcctcatagtaaaacagttaaaccttgggtcataaaagcatattattgaggaacaaaaataagctaagatagcaaaagctcgactatccatttgttttgatttgtctacagttcgttgtttccttttccttcgcctaaacttttgtcgttcactcccacaagctcagcgtcaaatatgagtgtagcaccacctggaatagtgggtggggaaccctgctctccatagccaagttttgatggtattttcagcttacgcttctcaccaagacacattcccaataatccctggtcccaacctttgatcacttgaccagtaccaagctcaaattcaattggattatttctttcaaagctagaatcgaaaacagttccatcagtgagttttcccctatagtgtactttgactctgtcacctttgtgtgcctgaacttcacatgatactggtttatgcttcacgccaatttgcagctccgtcacatcaccagttttcttcgcagaaactaatgcagaaacgaagaggaagaagaggagaatgggaagagcgttcatgatggaatgacggaaactcatttttgtttttctttctcgaaaagtcagtcactggtttctctcacactcccccttctgttgtcttcgggcagtcgcatacatacggtcgcgtggggcgctcccccctgtcgtcttctggcaaccgtacggacgcgtgggcggtcgcgtgggcggacgagtgattggacgcgtgg

SEQ ID NO: 4276 - DNA, 719 bp, Glycine max
  unsure (1)..(719): unsure at all n locations
  Clone ID: PAT_MRT3847_103868C.1
agcgggcgcttttttcttttttttttttttactaaattagcctcatcttttaacnttgaaaccttgggtcataaaaacatatgattggggaacaaaaataagctaagacagcaaaaactcaaactatccatttcttttgatttgtctacagttcggagttttctttttcttcgcctaaacttttgtcgttcactcccacaagctcagtgtcaaatatgagtgttgcaccacctggaatagtgggtggggaaccctgatctccatagccaagtttcgctggtattttcagcttccgcttctcaccaagacacattcccaataatccctggtcccaacctttgatcacttgaccagtaccaagctcaaattcaattggattatttctttcaaagctagaatcgaaaacagttccatcagtgagttttccccgatagtgtactttgactctgtcacctttgtgtgccagaacttcacatgatgctggtttatgcttcacgccaatttgcaactccgtcacatcgccagttttcttcgcataaactaatgccgaaacgaagaggaagaagagaagaatgggaagagcgttcatgatggaataatgccggaaactcttttttgtttttctttctcgaaaagtcagtcactagtttctctcccccttctgtcgtcttctcgcagccgtacggacgcgtgggcggacgcgtgggcggacgcgtggg

SEQ ID NO: 4277 - DNA, 295 bp, Glycine max
  unsure (1)..(295): unsure at all n locations
  Clone ID: PAT_MRT3847_103869C.1
gaggcaaaaaaanccttaccanctgagtgtncattaccnnanctataaaatntatattcaaaacaaaatannnaattnaactggaaaacataagnctnaaaaantttaaaacatggatttgnatnattctgcataatttaagcannaccctcaaactcttccctaanaactnnnatnctatntttatnnacnattcnacctaaannanaaaatatttaaaaaggatcctttatacatataannnnnnaaaaattacnaaaccttntnnnncaanccttttttnnnttnctaatta

SEQ ID NO: 4278 - DNA, 671 bp, Glycine max
  unsure (1)..(671): unsure at all n locations
  Clone ID: PAT_MRT3847_10386C.1
tgttatcgattnatcttgannnggtcaagaggtagacaagcaaggggggagggaggaacaacaattcagttagagagcatgagtttctagttacaattgcagttacctggtaatcacaacacaattattgacctggattttacaatgtgcatcaataagcaatttgactaaagggggaaaaattgggctagtatgttcaccagtaatacatcttcatcctgcctattacctgacttccagaccttgaaatgtcggggaaagtagccagcatcactccaacgtttcagagaaattaaggaaaatggtccttgtacatttcccatgggatctctgtaatgccacatcaaggtatccgattgcacagaaggaaccagttttgcagtacttggtttttcattttcttcatcatcgtcatcacttagctctataacttgaatctgagatggctgtatttgtttgttggactgtgcttgagagatcttcacttcatgcaattcagctggcttagacatgtcattcttatatgcaaaatttatttgttgctctggcagctgctgaacaggtaagccatcacttagctctataacatcgagctgtgattgcagtatctgtttgttgggcagtgcttgagagatcttcacttcatgtgattcggctggcttagacatgcc

SEQ ID NO: 4279 - DNA, 150 bp, Glycine max
  Clone ID: PAT_MRT3847_103870C.1
cttcctcaagattagcacaagaaaaatttagtggaactgcaagtgaatctgaagatgacaatgagagatatgatgctgcagaggaagaaacagatgatgatgacaatgccttttttgatactcgtgatattcggtcatccagtcctttta

SEQ ID NO: 4280 - DNA, 326 bp, Glycine max
  Clone ID: PAT_MRT3847_103871C.1
ataatgctattccttctaccaccattttgtcttcttctgttttcatctgacccgaaggtatcagggtttgtagaaaagaggacggggtatttctcaagtgaatgaacgggctgagcgatgacccctgtttctcctaatttgaacctcgggggtacagggcccccctctttgctggttcaaggggttaaaattcaaaaatttctttcgtaacctgggaccctttccacccccgcttctccccctatcttttgccggcccctttttttagttccggattgtaaggtttgtttttcttaagcccaagatttcccacctcccccttttgt

SEQ ID NO: 4281 - DNA, 246 bp, Glycine max
  Clone ID: PAT_MRT3847_103872C.1
ccccccaaaacccccattatttatttattaatttattaagggccctaaacacataaaatccccgggaaccaacatgtatccgggggtttcccccattttcacctttaaaaaataggaccctcctttaccattttcaaagatggctaaatccttaccgggttaatatttcccccaaccgtggggggccttttttgggggaaaaaataaatttaggtttaatttatccggccccgggggcggccccgg

SEQ ID NO: 4282 - DNA, 469 bp, Glycine max
  unsure (1)..(469): unsure at all n locations
  Clone ID: PAT_MRT3847_103873C.1
tttcttngtttttgtattcttttcttaattttttttccttttttttttcctttaatctttaaccctattaaccaaaaaagggtaaagaataaaaaaattcttttttccatatataggaaatctatattctatatatagaaaagaaatataaaactttcctcatttaaggtgtgtgcaaaccgccanaaacccctcaaaaaccaaacccccccccagggggggggggggggggaaaaaatttccaattcctttaaaaatctaaaatccttctataaaaaaaaagattgattccaatagaataaatagagaatataagccgggagcgggaaaccaacccccatccttagcctggaaagccagggggtataaaccaccctgattcaccaatttgaattccatttaacccctctaaatcaaaacccaaccggaaacctttgggggacatcggccccctttccgaaaaaattaa

SEQ ID NO: 4283 - DNA, 383 bp, Glycine max
  Clone ID: PAT_MRT3847_103874C.1
ttcatatgcaaaaaccaaaatcaaaattggcgtctctgctctctcgtattactctactatttttattttggcacaaataatcttacatttataagtaatttttaaaataagattacatctaatgtcttaaatttaatatttacaaaaggattttggaattatcctttttgtgactggcttaggttggtggcactcagggtgttgtgagatctgacgcccacctaaataataattatgattaaattagttgtaattaatccaagtccaaatggcccgagttagatttatgaattagcatgtattttccagcagaggcatgaggcatcagacgcgttccttgacagagtcttttaaatagagtgatggttaataaaaatttcatt

SEQ ID NO: 4284 - DNA, 779 bp, Glycine max
  Clone ID: PAT_MRT3847_103875C.1
ttttttcataaacagaggggttccatttaagtcatagattcaatacaaaaaaattcaaattctagagacattgatatttcttccacacatattgtagtacttgttgagattggtagtaggaaacttctctagtttccataccattttttttaattatctatcttggcttgagcaatgagtcagacatttcgttgagggagtacgcttcacaatttcttgaagaagaatttgtcacggttgaatggtctcttcctcctgtgtagaacccgggttgacttggctcgggcaataacttttcaccattcagcattaaaactaccgaagacatgtttggcctatcttctggtctttgttgtacgcataacaaaccaatatgaatatatcttaatatttcagatggagcgactagattgtccgctgagtcatccataagttccaatggtcttttctcaatccatagtctccatgcatgtccaagaagatttagatgattgtgtgggtcacaaaatcccctgttcttccttccactgattatctccaacacaatcacaccaaagcttatgacctcaggttcccctcaataagttccttggaccccctgctcgggcgcctcctaaccttctggccccaccactctctgtgtgctttggattcatatcattatctagaagaatgttgccatccctgagaccgctgtggttgattctttatctcgagcctggatgcagttccagtcgcccgcgacctatgcctgcgttgttgtctaggcgctttgtcag

SEQ ID NO: 4285 - DNA, 455 bp, Glycine max
  Clone ID: PAT_MRT3847_103876C.1
cggctgcgagaagaccacagaggggggagcctcgaaaggtcttactttaagctatctgggtcctttctttcgatctaccgattcggcctttcagcggcggtcttgcggctccatcatcgacatcgacgctcccatttcctaaacctcaggggggctcttcttcttggtggtcccgtggttagcctttcctctctcttgctttcaggcccaaaccacagctatgatcctctttcgcggaattcggtaattccccttgttgttggatgtgtgggggactgagaaactgcatgtttggtttcgcgttttgtgggattcaggatttcgggcctgtttggattggggaagtatgaatatcacggatcctcgagagggaatagcgggctgatttttgaaattgtgaccttgattgcgtttttctttatatataattttgacggggatgtgtgtgatttttt

SEQ ID NO: 4286 - DNA, 248 bp, Glycine max
  Clone ID: PAT_MRT3847_103877C.1
cgccgccgataattaatctggccgcgaccggccagactaactcgggcgccggccgtcctttttttttttttttgcagagacactcctgaatgattagagaaaactcatattagaaaacattccacgataggataggaaaaccttaggttctccttatgcagaagatgagaagctaacctgagatggaaaatttgctcatactgctgtgcattttcctggtctggccacaagatggcaaaagcagtcca

SEQ ID NO: 4287 - DNA, 278 bp, Glycine max
  Clone ID: PAT_MRT3847_103878C.1
ttcaggtactgctttcggatgcagatacagatcgctcgtacgattcaaaccgctcgtaagtcgacaggaggtaaggcttctaggaacgaagttgcaaccaaggctgcacgtaagtctgacccaactactggtggtgtgaagaagccccaccgttagcgttctggtaccgttgatcttcgtgagattatgaaattccagaagagtaccgagcttttgatccggaagctccccttccagaggctggttcgtgaaattgctcaggacttcaagactgatct

SEQ ID NO: 4288 - DNA, 516 bp, Glycine max
  Clone ID: PAT_MRT3847_103879C.1
ggagcctgggcgaagaatatttagaatcatgaagagtgcatataatgtcgaaccagatatcaagcattatggctttatggttgatcttttgggcagagctgggctattagaagaagctgaggaaatgataaggagcatgccaatgaaggctgacattgtgatatggggaactttattagcagcatgtagaactcatggagatgtcaatataggagagagggctgcagagagtttggcagggttggcaccatcacacggtggaggtaaagttctcctatcaaacatatacgcacgatgcaggaaggtgggaggatgtatcactggttagaagagccattcagaatcagagaatggagagaatgcctgggtgcagtggtgttataaggtagctaaaggagtttcaattcgcttagattgttttgctaaatttagagatgaagatgctggtctttcatacaaaatgtttttgagaatcatgtattccgattttgtaaattattcagaaatactctttac

SEQ ID NO: 4289 - DNA, 389 bp, Glycine max
  Clone ID: PAT_MRT3847_10387C.1
gcacgaggtagacgccattgaagattaggattttcagaggaatttgaataggtgcaacacatacgaaagaacttctttcgtaagaaggaccttcttcttacggaagaacttcttctgtagactcttacggaagaactttttccataagaaggtttccaattttttttattttttaattaattttctgtataaattaagttttatttctttgttttgatttataataggtatatttagttttttaataataaaaaattatgcttgcatggttgtatgtaacaaaatttatattaaatattatttattttgtttttttatgtttaatatatttgggccaaaatatttgttagggttagggcccaaggctgagtgtgtgggtttagtttctg

SEQ ID NO: 4290 - DNA, 431 bp, Glycine max
  Clone ID: PAT_MRT3847_103880C.1
attccctgctcgaccgcactcgtcctacctttccttccttcatgtcttccactgtttctttatcactcaactataaatccatagggtaccttatctcctggtgtcatctcatatctaccaatcaattaccatatactattactttcaataaaccaaagtttatcattaattattacgactcatattgatcactactaacattcataataataattctaattttattcctctaatacactttatatctcaaacacaccataatgtaaactcttcatgctctaaactcaatataattgtaaattactaacttctctttatcataattacattcatacaatattcatccctgctactacaattctaccatgataacttctcttatcattctcacctactttattcctaatgtgtactgaactaatctatttcat

SEQ ID NO: 4291 - DNA, 995 bp, Glycine max
  Clone ID: PAT_MRT3847_103881C.1
acggctgcgagaagacgacagaaggggagattaagttgtgggactgagtggctgctattatatatttataaagacttgtgtaagtctccaacattcccatacccaccttgctctcattttttggtgttccattaattttcctttggaagaagaagctataggcgatgggaaattgccaagccatcgatgcagcaacattagtgattcagcacccgaatgggaaagtagacaagttctatgcacctttgagtgccacacatgtcatgaaaaccaaccctggtcactatgttgctcttctcatctccaccacattctgtccaaccaaggacattcaaaattgccccaacaagagtgacatcaaaaacaaaaacgccaacaacccagttcacataactcgaatcaagcttctcaagcccactgacacgcttgttcttggccaagtttatagactcatcaaaactcaagaggtcatgaagggtctgaaggaaaagcaaaaggcaaagatgaggcaaaacgtgccagagtcagctcacaagccagatttggagaaggagaaagtagcaaggaggtctgaaatggaggacaataaggtaattaccaaacccgaaagagctcgaccaaggattacagcaccaactaataatggtgccacagctaagacaagattttggcaaccctctttacaaagtatctcagaggctgccagctgatctttgttttcaatgttacccacatgtggtgtgagggacagagaagcaactgaggaaaaaaaaaaatcaccagcaaaaaaaaaaagaaaaaaaaacccatgattgcttggtcatgtgaaaattaaatatagtacactgaggttcaggggaggccagaaacaacagagatgataaaattctcctctgagttgaggcataattgtgtatagtaaagttgacatgtcctatttcttttagtgtaattagatattactctctaatgaaatcaatcttcatcatcatgcc

SEQ ID NO: 4292 - DNA, 404 bp, Glycine max
  Clone ID: PAT_MRT3847_103882C.1
gcaagcttggatccatggtagcgtgcatcatttcttgagactgacatagagatggacgtggatcattaggtggcagaaactgctgctgatacagatgcataagacaatgcaactgaccatttcatatgctatgctagagtcgatgatgaactgtatgatctagatggaaaacaggcagtgccaatatctgacggtacatcataaccaagatctttactaagggatgcagctaaggctgtacatagcatgatccagagaaatacacactccttcaactactatgtcatcgccaagggcatgaaattcgggtagatattgatttaggcttggagggatcattgagtatgcttagatgttactttagtaagtcatctaggaagcaaagcattatgcactgcagatta

SEQ ID NO: 4293 - DNA, 764 bp, Glycine max
  unsure (1)..(764): unsure at all n locations
  Clone ID: PAT_MRT3847_103883C.1
aattaaaatctcaaaaaattatcataacgaaaaggtaaacacctcaaatgttggtacccagggtacctaataagcctaaaacaataattcattataaagagacaattcaatgtaaacaaaaaattgtctcacttaagaagagtttaaccataatgtacaaattattaaatatgaaagtacaattcttaaaccctaatttgagttgttatatttgaataaagttctccaaatttgcagtcttgaatcttctgcttggtgttgccgtagcagctcggctaaaggccaatttgtcctttgtgtagctttgtgctgatcaaatataaataataaagttaacaaaaactatatcactcatttatttttatgtagttaatattaagattttgtttacatcttaagcctttcacttgatatatatgtaatataattgtttcatatatataatatttataatcctaatcataaaaacttaaagataacaatacaataatttcatcaaggacttcgatattgcctaataggcattatcgtgattcaacttttaaactagaagaatggtgcaataggtagcnnncaaggccacttaatcatagaagtttttatgaatacatatannnnnnngagtcaataaagagtnnntttaatatatttnnnttacttttgancnnnaagcattgatgagaaaaaggattggtgttagggcaagtgactatgtctcnnacatttcctcatcatttctgcanaacactatatcatgnntatca

SEQ ID NO: 4294 - DNA, 980 bp, Glycine max
  unsure (1)..(980): unsure at all n locations
  Clone ID: PAT_MRT3847_103884C.1
ncccaaacgtccgaaaaaatatctcacgcaataacaaaccctaataacaatgctgaagcatttcaacatgaacattttcttcacgttgcttatagttgtcaccttagctagtttctatgttccccatttgaagcctagtctttcaattacaatacccttctgcatggttgcaaccctagcataccaatttataatgagaacacccaacaaaatttacttggtggattttgcatgcttcaagccaagccttgaatgcctgtgctccaaggaaatgttgctcgaccgggcgaaacgcgtcggtttcctctccgacgagaactacaagcttgtgaacaagattcttgaccggtccgggttgggaccgtggacgtatgtcccggagggtctcctggagatccctcccagactaacgttggaggaggcaaggaaggagacggacacggtgctcttcggggccgtcgacgagctcttggagaaaaccggtgttgaagccaaagacattggggattcttgtggtgaattgttgcttgttcaatcccacaccatctctctctgactccattgtcaaccggtacaagcttagagggaacattttggcctataatcttagtggcatggggtgcagtgctggggttcttgctgttgactttgccaaacagctcctacaggcacacccgaactcgtacgctttggttctaagcacagaaaacgaaatatcaagcatgtactggggcaacaacccttcaatgctgctggtcaattgcctcttccgcatgggcggctctgcagccctcctatcaagccacctctccgaccgccagcgctcgaagtacgagctcttccacacgctccggacccacgttggtgccgacgacaacagctacaaatgtgtctttcaggaagaggacgatgagaacaagtaggcgtgtctctatccaaagagctcatgaacgtcgcaagggatgccttgaaagtccaca

SEQ ID NO: 4295 - DNA, 616 bp, Glycine max
  Clone ID: PAT_MRT3847_103885C.1
tagcaaaaatatctcacgcaataacataccctaacacaaacaccttcctcccttaaaaatgctgaagcatttcaatttcaacatgaacattttcttcacgttgcttatagttgtcacattagctagtttctatgttccccagttgaagcctcgtccttcaattacaatagctttttgcatggttgcaaccctagtataccaatttataatgagaacacccaacaaaatttacttggtggactttgcatgcttcaagccaagccttgcatgcctctgctccaaggaaatgttgctcgaccgagcgaatcgcgtcggcttcctctccgaggaaaattacaaacttgtgaacaagattctcgaccggtccggtctgggaccatggacctacgtcccggagggcctgctggagatccctccgagactaacatttgaggaggcgaggaaggagacggacacggtgctcttcggggctgtcgacgagctcttggaaaaaccggtggttgaagccaaagacattggggttcttgtggtgaactgttgcttgttcaaccctacaccatcgctctctgactccattgtcaaccggtacaagcttagagggaacattttgggccta

SEQ ID NO: 4296 - DNA, 568 bp, Glycine max
  Clone ID: PAT_MRT3847_103886C.1
ggaagggggggggggccaaaaaaaaaaatttttttttaagggcccaaacaaaaaaaaagggcccccccaccctttttaaaaaaggccaaaggggggggaccccttgggggttaaaacaaagggggtttaaaaataaaaaggtaaaagcgaaccctgtttatttcaaaaaaatttccccccaaaccttggccgccattataaaaagcttttttaggggggggggggggaaggaacaagggggaaaaagttccccatacaaaagttagggttccttactttttaccggggaaccaccagcaggcccaattaaaaccaaaattgctaaacccccccgctttgggggcaatctcccccccccctggttaattaggaaaggtccccccaaaaacaggaaaaaaggggatcccgcccaaaaaattgattttgggggccccaaaaattgcccggggcccatttattgcatattgcccgccccaaataggggggggccccaaatacaaaagggaccgggggggcccacccattggccatcccctggggggtggaaacccgtccccatttccttttt

SEQ ID NO: 4297 - DNA, 478 bp, Glycine max
  Clone ID: PAT_MRT3847_103887C.1
cacggctgcgagaagacgacagaaggggggggggggaaggaggttacaaaggtagtcatcgttactgacatgctggtaatcgggtaccaaccatgacaagggaggtgataagggtgttaggttgattggataacaatcaacccattatacaaaccttcggcctagcatgaacaccaaaaggctagaaatcgtgcaccaatcagcaagtgaccgagaagggtacacagttctccaacctcgagtgcataagcatgatgagacttgaagtcctttccgattgacaggtgatcaggaaaggtacacagtcttccaatctcaagtgcttaagcatgacaagccttgaagtccttgccagtcagcatgtgacacacaatagttgagattcttatgaaaaactaatttaattttcatatgtttatttattttcaatttgtattgttgtttgtcattattataatattattcattagaaatttaa

SEQ ID NO: 4298 - DNA, 217 bp, Glycine max
  Clone ID: PAT_MRT3847_103888C.1
gctcttaaagaatctcagtgctgaagagaaactcataagcatggcggtttgctagtcagtgcttgacttccttgcttctggttgtagtgttcaacgtggctcaatggcagcctctggtccctgccctgttcatatttggggactctgtggttgatctgcgaaatgattcccacctatacaccgttgttgtcgcacacttcccacattttggacgaga

SEQ ID NO: 4299 - DNA, 504 bp, Glycine max
  Clone ID: PAT_MRT3847_103889C.1
acggctgcgagaagacgacagaaggggtagcatgtgaactactttattattttccatgatgttaaattgccagttgtttttgttcaggacgagtattatgtatagtcgcacatccaaatgaacgaatatagggatcaagtgatcttggtgagcaccttgagtgttttttttctttggtccctcacaaattctgacaccctgatcatttatttggaatttttattgtagccaacaactacaaagaatcatggacgacacattgacacttgtgtgaaagtcttggatatgactggtttaaaactctcagcacttaaccaattgaagatatgccagtaatgtagaaatttccaattttctttctttcacttcatgtttaaatcttataagttccttgattgggcatttatcgaaggttctattcccactctgtccattcactagatgatttcctagttgacactttctgtttagccaccttcagcttttgactgccatgtctacaat

SEQ ID NO: 4300 - DNA, 612 bp, Glycine max
  Clone ID: PAT_MRT3847_10388C.1
gactgcacgcttataacgctaacggcgtattcatctatagccaagatctcctgaggacttgctttctccaggtacttaccaactgctggacaaggtggcttgggaggatttgaatgggattgctaatgctacttgtacctacgtgagcctggatgatgactgcctgctggagaacgcttataaaaattgaactgaatcttagcacatgctctgctgaagacactactgcttgtgccacggctagaccttcttatagatatattgacgttcttgtgtgtgtacatctggctatggatcacccagggccgggcatgccgtacatcggtccaaccgactacgaccccccgctgtattgcttggatccatgcacatagggaatatggatcttgatgagaactctcacttatgctgatgatacaatgaacaagccagcgctctgtcttttgtgatcgaaggtgcatacttgcttaatgactaggatataactcgctcatatgattgtgctctgaaataccgttcgttgccaagccgcatgctctctagctcttatgatgcgcttctgcaagagcatgttatgtagtgctagactctactatcacatcctgcgtctgc

SEQ ID NO: 4301 - DNA, 415 bp, Glycine max
  Clone ID: PAT_MRT3847_103890C.1
gcctcaacaaatcttgggacggtgttagattagcattttcttatctttgacagcaaaaaagagatgcccttgagcaagagttctgattttttttttttgtgggaaaaatttgctaccaagtggcattcctctcaaagagtgtgtgtggtgtacgtgtttgataattgatggacaattttgcaatctgggtcttttgagggaattattataagttggtggtggaattgagaattgagagagtcataagttttgattctatttttattttgaattttgatggtgtgacttttgtggagagaaatatgtgtaggtgttttatgttacaggtgggtaaggatttaatggaatttggatgcaccacatgctgttatgttcagtagctgaattgttggaggagataaatgtgctatttatt

SEQ ID NO: 4302 - DNA, 338 bp, Glycine max
  Clone ID: PAT_MRT3847_103891C.1
acggaagacgacagaagggcaagctgtacccaaaaaaaaaaaaaaaaaaaaaaaaaaaaagaggaaagaaaaaaaaaaaaaaaaaaaaacaaaaaaaaaaaaaaaaaaaaaaaaaaaaaagggggccgttttaaaggatcaaagtttatgtacgcttgaatgcgacgtaatagtttttttatagggccacttaaattaatttaattggcggtggttttaaaacgtggtatttggaaaaaccttggggttaccaaatttaatcgctttgaaggaaattcgcttttggccagttggcgtattagcaaaaaggcccgaacgaattgcctttccaaacagtt

SEQ ID NO: 4303 - DNA, 741 bp, Glycine max
  unsure (1)..(741): unsure at all n locations
  Clone ID: PAT_MRT3847_103892C.1
ctctttcgattaactttgcatctttgcaccaaccttcatggccacgaaaacgttcaccggagcattactcctccgacgttgttctcccgtcttcaaccttgaaaataagaaactttggtattcgtttttcatttttcccttttgaatccctcccctggccccttttcaaactctttttaatttgttggacctttttaattcctgccgaatttgcctttacctccattcctttttttggggatataaacctccgtggaatggattccccttttaatgatattccctccaaattggtctggtttaattttggtttctaattttctttaattaattggttccttacacgtgccaagtttttcttcttgaattcctccattcttgtaatcccacttctgccaagagggtttcgtttctaagaaaattttttaaattctaatttgtcaaatcctgtgcattgtaattccaccgatgataattacttccgtgtgtacggattttgcgtaaaacttgtgtttgtggaaaaaatctgtttgatttcttaattgacatgtggttttttttttttgaaaaaaaatgtgaaacataaaattttcattttattgcatgtgccaattgaacgatacagcctaaagaaagtcccttagtgcctgtagcatttgctttatgtttaaagaatgataccatgataaattnntgtggccaccttaactctgcttgcaaaccatattatgtgatgcagct

SEQ ID NO: 4304 - DNA, 12643 bp, Glycine max
  unsure (1)..(12643): unsure at all n locations
  Clone ID: PAT_MRT3847_103893C.1
ccacgcgtccggtcgtttctagtctatctatttctataaatggaaaattctggaaaatggaaagttgaaaaatcgttatataataatccaaaaattgcaatagaaaaagaatccagaaattgcaatagaaaagaaaaagagaggtttgagatgatttttcaatcttttatactggataatctagtattcttatgcatgaagataattaattcgatagttgtggtcggactctattatggatttctgaccacattttccatagggccctcttatctcttccttcttcgagctaggcttgtggaagaagggaccgagaagaaaatatcagcaacaactgggtttattacgggacagctcataatgttcatatcgatctattatgcgcctttgcatttagcattgggtagaccccatataataactgtcatagctctaccctatcttttatttcagttcttcggcaataatcacaaaaactttttgaattatggatacaagaatccaaattcaatacgtaattttagtattcaaagaatcttctttcataatcttatttttcagttattaaaccccttttttttaccaagttcaatattaataagattagtaaatatttatttgtttcgatgcaacaataaatttatatttttaataagtagttttattggttggataattggtcacactttttttatgaaatggattgaatttatattagtccgcatacagcaaactaattcgattaaatctaacgtacgtattcaatcaaataaatacattatgtcagaatttagaaattctatgttgaaaatctttcttgttttcttatttattacttgtttatattatttaggaagagtacccccccctttttttagtaagaaattgtcagaaattcaagaaacccatgaaatttataaaaaaggaaaaaaaatagatgtcgaaaaaaatttgcaaagagtacaaactaaacaaaaacaaaaaagatccaacaataaagagggttttctttctcttttttcgaaaaacgaaaataatttctacaaaattgacgaggagaaatataaattagggtttgttaaaaaacctctcgtaaacattcttttcaattataaacgatggaatcgtccatttcgatatataaaaaataatcgatttgaaaatgtcgtaaaaaatgaaatttcagaatttttttttcatacatgtcaaagtgatggaaaagaaagaatatcttttatgtatccaccaaatttatcaacttttcataaaatgatggaaaccaaattttatctcttcacaaaagataaaatttcctatgatgaattgtctaattattggagctatactaatgaagaaaaaagaaacaaattgagcaatgaatttgtaaatagggcaaaagtaatggataaggaattaatttctctggatatattagaaaaccgaattcgattgtctaatgatgaaactaaaacaaaatatttaactaaaatatatgatcctttcctgaacggacgctttcgtggacaaatcgaaaatgttttttcaacctcaatccaatatgaaaaaaatgaaaaaaaaaaataccattttgataaataaaattcatggtatccttatttctaataatacttataaaaaaaataatagtaattatccagaattagagaaaaaaaataaatatatttgatagaaaatctttagtaactacatttttttttttcaatctaatcagtaaattttcaaaaaaattagtatcaagcttgagttttgaagcactttctttatttccagaacatgaacaagtaaaaataaattatgaagaagaaaaaaaacaaataataaaaatattatttgatgcaattagaactgatttgaacgaaaaaacaatagtaaatggaaatagaacaaagtgtattagaataaacgaaatccgtaaaaaagttcctcgatggtcatacaaatttattgacgaattggaacaactggagggaaaaaatgaagcagagaattatcaaattcgttctagaaaagccaaacgtgtagtaattttgactaataaatctaaattttttaagaagtacgatacttataatcctacaggagatactgataacgctgaaaaaaaaaaaaatgaattggctttaatacgttattcccaacaatcggattttcggcgagacataatcaaaggatctatacgtgctcaaaggcgtaaaacagttacttggaaattttttcaaaaaagggtgcattcccccctttttttggataaaattgaaaaacctttattcttttcttttgatagtttcaaatcaatgaaaatattttttatgttcaaaatttggatgcgaaaaaaggaagaatttgaaatttctagttatacagaggaaagggcaaaagaaagttcgaaaaaagaggaggaaaaaaaaaaggaaaatgaggaaagaaaacgtatagaaatagcagaagcctgggatagcattatatttgctcaagtaataagaggtattttattaataacccaatccattcttagaaaatatattctattaccttcattgataataactaaaaatattgctcgtatactattttttcaatttcccgaatggtcggaagattttagggattggaagagagaaatgtatattaaatgcacatataatggtgttcaattatccgaaagagaatttccaaaaaaatggctaacagatggtattcagataaagatcttatttccttttcgtctcaaaccttggcacaaatctaagctacgatccaatgaaaagaaaaaggatctaatgaaaaaaaagaacttttgttttctaacagtttgggggatggaagtcgacttgcccttttctggttctccccaaaaaaatagattttcatcattttttgaccccatttttaaagaactaaaaaaaaaaaacgaaacaatttcaatttttcacttttcgagttctaaaagttttaagtgaaaaattgaaattgtttctaactatcttaatagaaaaagcaaaaaggattagcaaaagtattatcgaaagtattcttaaaagtattctcaaaagtattctaagcctaacgaaaataaaacaatttttcaaattgctatttattaaatttaaattcaaaaagatagatgaattgagcgaaaataaaaaagattcaacaatttataagaataatccaatgatttctgaaacaaccatttcaattcaatcgataaattcagtaaattgttcattgaaaaaaaaaaaaaaataaaggatcttaatgctaaaagaaaagcagttataaaaaaaattgaaaaaattaaaaaggggcttgtaatttcagagacaaatattcattcaaacaaaacaacttatgatagtaaaagggtagaattcgaaaaaaaaaaattgcagatattacaaagaagaagaaatgctcgattaactcgtaaatcacattcttttttaaaatttttcatgaaaaggatatacagagatatatttctatatatcagttgtattccgaggatcaatatacaactttttcttgaattaacaaaaaaatttttaaataaatccatttacgataatgaagcaaatgcagaaagaatttataaaacaaatcaaagtataattcgctttatttcaattttacacaaatattttcatactagaaatccgaattcacataattcttgtgacatctcctttttgtcacaagcatatgtattttttaatttattacacacccgaattattaacataaacatctataagttaagatctgtttttcaatatcatggaatttttttttttctgaaaaatgaaataaaggattctttttttggagcacaaggaatatttcattataaattaaaacataataaccctctcaattctgtaataaatcaatggacaaattggttaaaggatcattattatcaatatgacttatctaaaagtagatggtccagattagtaccacaaaaatggagaaatagaataactgaatatcgtatagctcaaaataaagatttaaccaaatgcaattcatatgaaaaaagccaattaattctttacaaagaacaacaagtaaacgcattaaaaaaaaaaattagaaaacaatatagatacgatcttttatcctataattttatcaattatgcagataagaaagactcatatatttatggatatagatccctatttcaagtaaaaaaaaaccaagtgatttcttctaattacaacacgtataaaaaagaattattggatatcatagataatctctttatcaagaattatatatcggaagatgcgattctagatatggaaaaaaatatgtatagaaagtattttgattggatgggaatcaatagagaaatactaaatcgttccatatcgaatccagaattttggttcttttcaaaatttgtgatattttatgacgcatataggggtaactcgcaggttataccaattaaattactttttttttcttctaatgtaaatcaaaatgttagtgaaaataaaaagaacattactagaaagaaaaaaaatgaatctcttgaattggagttagagactcgaaatcgggcaaaagcagaataccctgatcaacgaaatcttgaatcatctatctcaaaccaagaaaaagatattgaaaacgattatgtaggatcagacagtgaaaagaatagtaagggtataaagaaaaagaaagacaagaacaagatggaggcagaacttaatttcttactaagaaattttttgattttacatttaaattggaataatttcttaggtcaaagaatatttaacaatgtcaaagtatattgtctcctgattagattaaaaaatttaagagaaattacaatagcctctattcaaagaggagaactaggtctagatattatgatgattcaaaatcagaagaatttaattcttctaggcttaaggaaaaagaaaaataacaaatttatgaaaaaagaaatatttgttatcgaaccagttcgcctgtctagaaaaaacaataaacaattttttatgtatcaaaccataggtctttcattaattcaaaagaataaacgaaaaatttatcacaaatacccagaaaaaattcatgttaataagaaaaatttttataaatatattacaagaacaagagatcaaaaaataacagaaaaaaaagaaaaagataattctgatttacttgttcctgaaaacattttatccgctagacgtcgtagagaattgagaattctaatttgtttaaatccaaataatataaatagtatgcatagaaacacaatattttataatccaaataaagtccaaaatggttttccacttttgactaaaaaaagaaaatattttgagaaagataaaaaaaaaactaatgaatttcaaaatttttctttggccaaaatatcgattagaagatttagcttgtataaatcgatattggtttaatacccataatggaagccgtttcagtatagtaaggatacatatgtatccgcgaatgaaaattcgttaatccaaatttgtcttctatttaccatatttatatggtaaatagaagacaaattaatatctatatctatctatatagatagatatagatacataacataaataaagacacgcattatggtatggcattgatactaattcactgatatataccttagataaaaaaagaatccacaaaattatgttttttttaagtataccattttttatggtgaatctataaaaaaagtctcctttatatctatttaaattgcatggattccattttttttatttataagaattaattcgattgtaaaaaaatcaagaattcttaagtaaattaagtaaattcagatttatataaaaaattcaaaattagtgtcattactattactgatcaatcaaaatatctatcaaaagtaaaaagcgaagagaagggaaaaactttaatttttttatggtaaaaaattcaattatacctgttatttcacaagaaaaaaaagaaaaaaacccaggatcggttgaatttcaaatattcaaatttaccgatagaatacgaagacttacttcacattttgaattgcaccgaaaagactatttatctcaaagaggtttacgtaaaattttgggaaaacgacaaagattgctgtcttatttgtcaaagaaagatagaatacggtataaaaaattaataaatcagtttgatattcgagagtcacaaattcgttaaattgaagagtaattctcaattattcgatttattagatcttgaattttgatgaacttttttttttaagcgattcataaaaaaataaatcgaggaaaaacctatgaatatctcaactacaagaaaggacttcatgatagtcaatatggggcctcaccacccatcaatgcatggtgttcttagacttattgttactctagacggtgaggatgttattgattgtgaacctatattgggttatttacacagaggaatggaaaaaatagcggaaaaccgaacagttatacaatatttgccttatgtaacacgttgggactatttagctactatgttcacagaagcaataactgtaaatggaccagaacagttgggaaatattcaagtacctaaaagagccagttatatccgagtaataatgttggagttaagtcgtatagcttctcacctactatggctaggaccttttatggcagatattggtgcacaaacccccttcttctatattttcagagaaagagaattaatatatgatctatttgaagctgctacaggtatgagaatgatgcataatttttttcgtatcgggggggtagcgactgatctaccttatggttgggtagataaatgttatgatttctgcgattattttttaacaagaattgttgaatatcaaaaacttattacgcgaaatccgatttttttagaacgggttgagggggtaggtgtagttgatataaaggaagtaataaattggggtttatcaggacccatgcttcgggcttccggaatacaatgggatctccgtaaagtggataattatgaatgttacgaagaatttgattgggaagttcaatggcaaaaagaaggagattccttagctcgttatttagttcgaattggtgaaatgatggaatccataaaaattattcaacaggctttggaaggaattcccggcggaccatatgaaaatttagaaattcgctgctttgatagagaaaaagagccagaatggaatgagtttgagtatcgatttattagtaaaaaaccgtctccgacttttgaattgccaaaacaagaactttatgtaagaattgaagcccccaagggagaattgggaatttttctaataggggatcaaaatggttttccctggagatggaaaattcgtccgccaggttttatcaatttgcaaattcttcctcaattagttaaaagaatgaaattggccgatattatgacaatactaggtagcatagatattattatgggagaagttgatcgttgaaatgataatttatttaacagagatacaagatatccatttttttttcagattggaatcttttaaagagatatatggaattatatgggtatttgcccctattttgattcttatattgggaattacgataagtgtactagcaattgtatggttagaaagggaaatatccgcagggatacaacaacgtattggacctgaatacacaggtccttttggagttcttcaagctctagcagacggaacaaaattacttttcaaagagaatcttattccatctagaggagatattcgtttattcagtataggaccatctatatcagtcatatcgattataataagctatttagtaattccttttggctataactttgttttatctgatctgaatattggtgtttttttatggattgctatttcgagtattgctcccattggacttcttatgtcaggatatgggtcaaataataaatattcctttttgggtggtctacgagcagctgctcaatcgattagttatgaaataccattaactctatgtgtgttatcaatatctctacgtgcgattcgttgagacagaaattttttgatactatttgctatacccctctctttatagtactttgtagtaaagtaggaaaataaattgaatatatatctattgaatttattttttttattatttttcgcattcggattgaagaatttaatcagatagttatatgagtgcaataaaacagcttcttttgaatataatttatagaatactatattacttatagttaatagaaaagatgatgattttaaattgcagtaaaaatattgagtctcattttctatgtataagaattaagtgaaaaaaatgaattaaattataggtagaagttgttgtttttcccaaggttggttgattagtcatcctgtcttgaagcgggcgtaaaagaccaaccctttttaaattaaattttcaatatcatttgtatgaattagcatatatatattaacataaataacataaataagggattaataaaaaatgaatggatgattagaaacaccaaaatacacaaaggattagtaacgtatatttttaaaaatatccaaaagaacatttatatttatgtataatagaaaaagaatactaattggggctttccgttggtagaaaaaataaggcagtactccccagaattccgatccagagtatacttccatccaccgattaaataaataactatcagaaacgaaataatcctttaatttttggaagtccccttttattttacttacacaaaaaagactaggataagaacgaaaaaaaaagtgatcccccttttcttgtttgtcttatatccatatttatggagatagaattcatgtcataatttaaaaaatgaacatgtataattctttttcgtaatcgaaaatgatgagggagttattgataatttgaaaagagtattttatggaagaattaagttattactcaacaaatttgaatttgaattttttaaaggatgagatcaattcagaagtactttttgtattttttatttatttaaagaaatgttaaaatgtattttattttttctttattaaatgtatttattttaaaatttgtttttttagaacagacagaattcaataggtctaattcagaaccgtccgataaaatcgaatattatctaccttagagatgtatcaagggataaataatcggaccggtccttagatttttttaaggctttaagggagccgtatgaggtgaaaatctcatgtacggttctgtaatagagatggtaacagtaatgtcatcaccgactaggattatctaacagtttaagtacagttgatatagttgatgcacaatcaaaatatggtttttggggatggaatttgtggcgtcaacctatgggtttcattgtttttctaatctcgtccctagcagaatgtgaaagattaccttttgatttaccggaagcggaagaagaactagtagcgggttatcaaaccgaatactcgggtatcaaatttggtttattttatgttgcttcctatttaaacctattcatttcttccttatttgtaacagttctttactttggtggttcaaatatctctattccatacatattcgtttctgacttttttgaaataaatcaaacatatggagtttttgtaacgataattggtatctttattacactagctaaaacttatttattcttattcctttctatcgcaacaagatggactttgcctaggctaagaatagatcaattattaaatcttgggtggaaatttcttttacccatttctctcggcaatctattattaacaacttcgtctcaactgttttcactgtaaaaaaaagtggaccttatatattcataacttgtgtcaaacaagagaaagaaaaaaatattcagagatattcacgatatgttccttatggtaagtggattcataaattatagtcaacaaacagtccgagctgcaaggtacattggtcagggtttcacgattaccctatctcacgcaaataggttacccgtaactattcaatatccttatgaaaaaataatctcatcagaacgtttccgcggtcgaatacattttgaatttgataaatgcattgcttgtgaagtatgtgttcgtgtatgtcccatcgatctacctgttgttgattggaaactagaaactgatattcgaaagaaacagttgcttaattatagtattgatttcggaatctgtatattttgtggtaactgtattgaatattgtccaacaaattgtttatcaatgaccgaagaatatgaactttcaacttatgatcgccacgaattaaattataatcaaattgctttgggccgtttaccagtgtcagtaattgatgattatacaattagaacaattcaaataaaattcaattaattatttataaaattataaaattcttctaaaaactaaaataatagaatacttatataaaatataaaaagaataaaatacggatatatatatattcgtttattttgaaattcttctttcactgaaagaaaagaatgaaataacattgatcctataacaactgtacctatagcaactcacacctcttatgttaggagttggtggaattcaatgcggagataattttagtatttaataagtttttttcctggtcatatcaataaggtcatgaaatttcgatttatttatctcttattttacatagaatggatttgcccgaaccgctacatgattttcttttagtctttcttggatcgggtcttatattaggaagtctgggagtagtattatttacgaatcccattntttctgctttttcattgggcctagntcttgtttgtatatctttattctatattttatcaaactcccattttgtagctgcatcacaactacttatttatgtgggcgctataaatgttttaataatatttgctgtgatgtttatgaatggttcggaatattaccaagattttcgtctttggactgttggggatggaattactttgatggtttgtacaagtatctttgtttcactaataactactattctagatacatcatggcacgggattatttggactacaagacccaatcagattatagagcaagatttgataagtactagtcaacaaattggaattcatttatcaacagatttttttcttccatttgaactaatttcaataatccttttagttgctttgataggtgcaattgtcgtagctcgccaataagaaatttttagaactaataatataaaccaaaaccaaaattcaattttttttttttttagattttatcacatttattttggttgaattctatgtgaatgaaaacgaatatttctgtataaaatcttttttttattgcgaatactttattttgttgtagacttataatattagtcaatcaaatccgttgaattcttcttgttcatatcgaaatgaataaaaattgataaggagttggtcaatgatattcgagcatgcacttgttttgagtgcctatttattttctataggtatatatgggttgatcacgagccggaatatggttagagcccttatgtgtcttgaacttatactgaatgcagttaatataaatctcgtaaccttttctgatttttttgatagtcgacaattaaaaggaaatattttttcaatttttgttatagctattgcagctgctgaagcagctatcggaccggctattgtttcctcaatttatcgtaatagaaaatcaacccgtatcaatcaatcaaatttattgaataaataatattacccataaaaaataaaaaaaggataatttatattttgtgtgtactattaatgaattcaaattagcataagcatatatgatatataaattagaatcatgtttgcgaaaacaaagataagaaatcaaagtatcttggttctattctcttattattaattaatctataagtatattttgattatcaaaatttttataaatcattgattcatctggtatctaatatatataaattcgtttacaagtttactagattgaaaatgttgaatttttgatgttcaaggattacgatccaatgtcacattcagtaaaaatttatgatacatgtataggatgtactcaatgtgtccgagcccgcccaacggatgtattagaaatgataccttgggacggatgtaaagctaaacaaatagcttctgccccaagaacagaggactgtgttggttgtaagaggtgtgaatccgcctgtccgacagatttcttaagtgttagagtttatttatggcatgaaacaactcgaagcatgggtctagcttattgatacgtttcaaaaagaaccacacacaagtacgtttttttactggtaaaaacccgcgctcaaaataaaaaaggaaatctttttttattttgagcgcgggtttttctagtctaagtatatcttatttttatcacgaattattttccttggttaacaacagttgtaattttgccaatagtcgggggttccttaattttcttatttccccataaaggaaataaggtaattaaatggtatactatttgtatatgtcctgtcggttgttttctcccagc

SEQ ID NO: 4305 - DNA, 250 bp, Glycine max
  Clone ID: PAT_MRT3847_103894C.1
aggggcttccaaaccccatcttattttataaatggccggggctggtttttcctgaccaaatttcccttgaaattatccccaacagggagggccccatttttatctcttttaagacaatggccccctctaaaaaagaaaaaaaaggaatcccatttttgttaaaaatgcccggctgatccccaaaaaattatttaattttatggccggggtaatgggggggcccacaaatttttcctgatccgcctttttt

SEQ ID NO: 4306 - DNA, 331 bp, Glycine max
  Clone ID: PAT_MRT3847_103895C.1
cgaaccaagaactgctgagttctatcttctaagctctcttcacactttgtgcggatgccctctgatacctgcacccaaccacactgcacttctgtgctggacactgatgatgatccttttcaaaacggtgactcatactatatgtcgccagttaagatacgaaagggcgggccattccatatggactcacacgtgatcgcatatgcgacctgactagcaatctaggacacactgatgctcgccggacgctcggaatagtacccacatctgagttacttgccacacttatacaccaatgcgattcttcgatcatcatcttcatcatatgatc

SEQ ID NO: 4307 - DNA, 289 bp, Glycine max
  Clone ID: PAT_MRT3847_103896C.1
cccacgccaccgagaacacataaatttctaggaggccaagcccaagatgagccaggagcgaggaggccgtcatagcgtcgaaagctcaggcacaaaaagcgacacaacccgcggacatgaggggctgccccatctgaccaggaggcgcaaataacactatgccatcaacccggggcgctgccaggggaggaatgaaactaggccggactggaaacacaaactgcccagatacagatcggcaagaccagtcccaaagcttccgtggcccacaaaacaaacgtagcacacc

SEQ ID NO: 4308 - DNA, 374 bp, Glycine max
  Clone ID: PAT_MRT3847_103897C.1
cggggtgggcgtttttttttttttttatcggcccaaagaaaaagttgtttcacccaaaaatttaacatggcgagaaaaaaaaatatatatgggatcaagagatacatagcaaacctatataacaatcattccttaccttaggtatttcttatcgagctactagcatagggagggggaaaaaaggaaaactggacccgttacccacaaataggggggaccatggaacaaagggcatgagcctcaagggggagataggtgtttgaaaaacaaccaagggcaaaccagggcaaaaaaaaatgctccagagaacggcctcaatgaaaaagatcccgaaaaccctagaatatttgaagggccctgaattcaccagcccc

SEQ ID NO: 4309 - DNA, 572 bp, Glycine max
  Clone ID: PAT_MRT3847_103898C.1
gactttatatatatatatatatatatatttatgtctcacgctggcaaattttcttttatattcgtacattatttacttagccaagagtacatactcatgtacctgatgtacgtaccattgagtgtgtttattttaaaagaaaaattgagctagggaaatacatcttacaaatcactgtcaataatacatactcgtgtgccctacatgtgccactgtttatttttttttttcttaaaaaagtttcttacaaatcacgcagcctattattataattattaatgaagacaggtccatttattttaatattaagtattcggggtttaagtattttgaacaaaattttaggttttaattttgttgtcatatataaagtcttcggcactttcacaatcaagaaccttttcataaaatattaaatttacaaatttaaccctaaaattatgtaatatagcattatggcccataggtttaataatgatggcgatcgatcaaattttatcaatagatttggggccatgccgtgccacactgattaataagttgtatggcttatacgggtacgtaactattgg

SEQ ID NO: 4310 - DNA, 192 bp, Glycine max
  Clone ID: PAT_MRT3847_103899C.1
tttttgaatggaaatttgggatacaaaaaggtttgctttggggatgaataattattaatattaccccctgccgcacgggcgaaagtagttattattaacctttcatatacgaccccacaccaaggagccactgatatgtggtatcatttacaactttcgcacagaatttgattttataacttcaaacaaaaa

SEQ ID NO: 4311 - DNA, 244 bp, Glycine max
  Clone ID: PAT_MRT3847_10389C.1
gggaatgggaccaggtaacgagcaaggggtatacaacatggagttcttgtaaatggtatgacatggcttttaaacccaccagaacatgatctgacgttgattttagctgataatggacttgacgtaaggattgcgaacacgatacgaacctggtattgtccgcggcccattttaatggaaccgtcttagccaggcttatgggaatggcctttggaatgaactggcctccaatgatttccttgcg

SEQ ID NO: 4312 - DNA, 396 bp, Glycine max
  Clone ID: PAT_MRT3847_1038C.1
tgttttatcatgaaatccttgctatatattttggggaagctaaaaaagatattgtcgattctttatttaaaaaactcctgacaaaatacagccatggtggacaaataataaataactaattaggcgctggattattttctatcggttaaaaatctggacataacacttctaaaaattgtgactagataaaaaacaattcgcattgggaaaggtcaattatttagcccttggaattgaatccggaatccgaattctaatatgtaggttgaacaggtacaaaggttttcacaccccgtgtactcttttttggcaattctttggatcatggttgaaatgcccacaccacctaaggattttgcactgacaaaaagggcgctggagaggataaaaatgatc

SEQ ID NO: 4313 - DNA, 476 bp, Glycine max
  Clone ID: PAT_MRT3847_103900C.1
gttatcaaaggtcaaaaggtgtacttagatgatactcgtgacatgatttctactgtacatattttgtgccgtatctgctgttaaaacctgccagtacgtgtgtgattctggatcatatgacatatggctatgtatacattcatgggggtgactatacatagcctcgagactgatgacttgatcacttatgatgtgtatctgctctactattggacattgggaattgatgcatctgagagattctcgggaaggacacaatgcagttgccgctcttcattgctctgacggaccacgtgcacccgtagcggttaccgatgcgttaccaatctctctgagatgtcacaatcagtactggctcattcgactgtccgaaactgcactacatatgtgctgacatactgcagagtggacgtgctacactctagaaagacacactgagattggtccggaaagtgtaccgtttacgcattttaaat

SEQ ID NO: 4314 - DNA, 899 bp, Glycine max
  Clone ID: PAT_MRT3847_103901C.1
caaagacaatgttggattttttctcttccactagaactacatactacccttctatagttctgttgttataggagctaattaactgctccaacaaccacaaagagactgaaagaacagcaatggaagctgcattatgcagtgcacttgctctttcacccaatcaagtattcaatgcagcaaatcctggagataaaaatgttcctttgaaatatagcaaagatcggagtgttgtaatgacagtggcagccactggaatattagggaaaggtggtgggttgttggagaggccaaccatagagacaacatcacctggtcgggaatctgaatttgacttaaggaaatcgcggaaaacatccccaccttaccgagttttgctgcacaatgacaacttcaacaagcgagaatatgttgtgcaagtgttgatgaaggtgatacctggaatgacaattgataatgcggttaacatcatgcaggaggcacattataatggactagcagtggtgatagtatgtgctcaagtggatgctgaagaccactgcatgcagttaagaggaaacggccttctaagttcaattgagccagctgatggtggtggttgttgatacatagagagaccattgacatgagcttttggcctaatagtttcattggagaggtgacgtatcatatcatatcatacacatttcaattttcacagttccataatgtgcatgtttccaaccactgaagatggttgtatagaaaattattgactaggtaaggaaagtgatagtgctagttagttagtagttagtacttatacaggacataaattgctaccaaccggtagcattatttggatttaacgtgttatactatcattagtccctacatttcccccctttaatccttgcacgatc

SEQ ID NO: 4315 - DNA, 318 bp, Glycine max
  Clone ID: PAT_MRT3847_103902C.1
tggaacacaaaatactctttgtgttttataggtggagggcgggacatgcgtgtctcaccgaaggacattcacatgtggctaacgaaagcctctatgtatatagggcggggctggaccaaaagaatttttcttcaggtaattgcctaatgctgtttttttaacgtggagatattgtggtggggaactcgaatctgaagacttgaaggagacttcttcctacattaaaagttccgtgtttttctttatagcatatggaaatttggctgatgacaccatcaattttggggcttttacccacaagctggtgcaagttggaga

SEQ ID NO: 4316 - DNA, 536 bp, Glycine max
  Clone ID: PAT_MRT3847_103903C.1
gcgtaaatgtgaagcaccctatgaaatcttaaatcattgccaatgacatgaaaaagttgaacaagggttacatccaatatacttttaaaacgagtatcaacatttgtgcctgataacctttccacggaggatgtccttttgctacatatagaacgtttgaaaaattatacctcgagcgatttaaagctccctatttccactcactttatccgtttctttgctatgcaacggcccaggttcttggtctgatgtgcccgctcccattggtattccccataaccttccctataaccggttgttcatttcatcccagacacatggtccaaccgataagctaactgttctaactatacaccgctccaccaaccatcgggcagtgggaaaaaaagttatgatatgttgtggactggtgctcttaacatcaccagggtgttcatttgacctgcaattatctggcacaatcgtcctaaaaatccatcttccagacatcgtctgcggacgttgattttgaggaaattgctgcgctgtaataacat

SEQ ID NO: 4317 - DNA, 422 bp, Glycine max
  Clone ID: PAT_MRT3847_103904C.1
agctgctggctcttggggtcaacgtgactgtgtacagtgggcaagtaagtgtccctttccccaacattgatggcaggagactctaaatttgatcctacttattcacgttgttcattccaattgttttgacatagagtcttggttcaaaacagcgttgttcatcccattgtgtatgggctcaaaaagtatcattcatcccaaatttgtttgtggtgtgataaatgataacaataaacttgaaatatacatgaatgattaagattaaaagttaactaatggttaaataattacgtaaaaaggtttgtatatttatctttttaattttaaataattacatgtgttccttcatgggattattaaaatttgtgtgattattataggtggatctcatttgtgcaaccaaggggactgaagcttggctt

SEQ ID NO: 4318 - DNA, 261 bp, Glycine max
  Clone ID: PAT_MRT3847_103905C.1
gaaaacccggatgcgcgcacgcgtccgcccacgcgtcctcacacattgaaatttattttccatgtaaattatatcaaaatattgcgggttctacaagccggtgtgtctgttgctacacataattttcaccattattgagaaatgacgcgttgatgctactgatcatctttttgacatgactgcccacacatttgtttgttcgtctatccaactatcatgtatatttatctgcagaatccttatatttgttttataattatg

SEQ ID NO: 4319 - DNA, 864 bp, Glycine max
  Clone ID: PAT_MRT3847_103906C.1
agctcggcattcggctcgagctcgagccgctcgagccgattcggctcgagccactcctatcgtgctcccatcaatgacgctagctgacaacaacgttaccggtctcatcgaatgcggagatgactgggaattgatcgtccacgatgctcgctttggtaaaacgagactctccgaatcaattgcaaattatgttgctttaacccctaccgaaacaaaggagggagcatcgatatttggatccaaaaaagacactatgtttgaagtggatgctaaaactggagcgcttgttcgaacgcactatgatcttgataatgcttctaatgtggtgttgagtggtgatgatcggctgcagcgtgttacaactacaaagaataatgagcttgttgatcctgcacagctggactcacctgagtttttgctcaagataactaggtctgattatgttttgaaatctcttggtaaagcaggaatagttttgtggactatgaacgtggcagaatttaaggctagattaatttgccaacataatgaaaatccttctggaagggattcgtttgatgcagaggatgggtatgttgtagaccgtggcttagattttgctatgccgtatgcatgttgggacatgaaactgaatgaagtctaccgccaacgcaagaattttctgttacatcctgctgaccctggaagattgtctggtatttatcaagagaatattatgctcccattccatacttcagagctgatgcttccatcacaacctgatatggatggatttatccttggtcagggcggtaatatgatgctacctttgcccatatcaaattctttgccctctttgcaacaaaaactcgatttctgtgagag

SEQ ID NO: 4320 - DNA, 458 bp, Glycine max
  Clone ID: PAT_MRT3847_103907C.1
agagatagatcacatccacaggagaaagacatacagagaggtttggaaatcctgatcttcacgcgcctgaaaattggatatgaacctgacacgagctttgttctccatgaagtagtggagcatcacaagaaaattttcctattccatcacagtgctaaactggcagcaacttatgggatactgatgaccaagcctggaaaggcccattcggattgtaaagaatatccttctttgtggggactgccatgcattcttaaaatatgcatctattgtcacaaagagggatatatttctgagagattcttctggatttcattgtttctccaatggccagtgctcgtgtaaagactgctggtgaaacgctggttcatccaactggtcatcatcattcatgccaatgatgtttgctgaataattttttttagttatagttataggatagcaatgttacataagag

SEQ ID NO: 4321 - DNA, 278 bp, Glycine max
  Clone ID: PAT_MRT3847_103908C.1
ggcgactggagcggctggagctcgagcttaataggtttgagcggctagagttaattatttggggctagtctggaacttataataatgtgcacatggatagcccggaaatccaagatcaaattgaaaaattcgcaggaggtgggaggaaagaaaggccgatctaagctttgtgggatggggagtctggaggcggatatttcaatacaaagcactatgctgttcctatagcaaaaacagggactgttgctcataatagagattaaaacacagaacagaaa

SEQ ID NO: 4322 - DNA, 436 bp, Glycine max
  Clone ID: PAT_MRT3847_103909C.1
tgacatcactccgcaagagttcagcaagaagtactggcaagctcacatagatgtgtcgcaggagatcacagtggccaacaagaaaatgaagaatgaacaatattcttgagaccatccacctgcatcatgggatggcatgaaaaaaggtgtcatgacccaagtaaagtaccaagggggctgcagaagccagtgaagatgtagctgccacgtgaaccagagaagcagacatgcactagacgcaggagacgtggagagcctgtgtgaacaagaactgcgagactgagtggaaggaagcgaaggatgatacgatggatagcactatcaatatgacgagtaggttatagaacatgatgagatagccgctgatgatgaggatgctcacgtagctaacgacggtagatgcgaaatcagtaggcatcacgtacaaggatacgat

SEQ ID NO: 4323 - DNA, 275 bp, Glycine max
  Clone ID: PAT_MRT3847_10390C.1
gagacagctttcacctagactcccctctgtggtttattcaacacaatctacctcgcaatcaatgacgaacggaagccaaacaactcctactgcatgaaccaggagtgcttgcagcacacactccatacagtctgccaattcatgtacggcggggacagccttaatgatcaaggatggcacccatctgaccgaaaacagaccggtatctgagggcagaccaagcaacgatttctcatacaggtgggaaccacccacaaaattgagttggtgctccc

SEQ ID NO: 4324 - DNA, 585 bp, Glycine max
  Clone ID: PAT_MRT3847_103910C.1
ctctattccttggtgatttttcaagaaactcattgggggtgttgtttagatattagggggggctaattaagaagcaacgatgagcagcgatttgtaccgattcgcagtatcatcccacttcagtagttttccaaaatcgttctccctccgtaagaaagttccatggtggtaccagatcctggacccgcggtcgaggttcgtggcgcgatggaaccgcacgttcctctacgtgtgcatcgtggctctcttcctggaccctctctacttctacttccccatcaccggggacaaggcctgcatgcagaccgacattgtcctcggcgtcttcgtcacgttctcccgcaccatcgctgacctcttcttcctcttccacatggtcctcaagttccggacagcttttgtctctcccctctccagcgtctacggccgcaaggacctcgtcaccgatcctcgccagatcgcttcgcgctacctccgctccgatttcgccattgatctcttcgccacccttcctctgcctcatcgattcagcggcagtacgagtgttggataataacatgcaagaaggagatgaacagaacgcac

SEQ ID NO: 4325 - DNA, 430 bp, Glycine max
  Clone ID: PAT_MRT3847_103911C.1
gccccccaaaactactgatttgaacttttgccccaaatgagttcccccccttgaaaagaaagttcgggttttataaaacaatggcaccaaacaaaggcggcttttggtgggggttcaacaccttacctttttaaacagccgtttttgttgggggttcaattttttttaattttgaccaaaatggggagccgtttttgttgagggtggaaacccttccgaaacccaaaaagctctttgggaaaaatagttatggggggttttaaaagttccagccgccccagaattttttttggtaaccgaggcaacaacaatagggggtgttcctgccactggagcacctgatttggggaaatttgggaaatgattttttttctccccagacttaaaagttttaacccctgaattaggggttggaaaaaacccaattttt

SEQ ID NO: 4326 - DNA, 181 bp, Glycine max
  Clone ID: PAT_MRT3847_103912C.1
gctcgaggcttaatcctgccagggaggccttttaatagtctggaaacctattgggaaaataccatatattgcccatctgggcatcttgggtgatttctatcgggacactgaatggattgtgaccagtgggaagttggaggacagacctattaggataagttgcctgcagctggagcagtgg

SEQ ID NO: 4327 - DNA, 116 bp, Glycine max
  unsure (1)..(116): unsure at all n locations
  Clone ID: PAT_MRT3847_103913C.1
aaataaacaaatatgcattgaggagctattggctaatgtgtcaaagtgaagcaataatcaagtaaactgaagaagtaggtaagaagacaaagaagtatgagagacagtgaganaaa

SEQ ID NO: 4328 - DNA, 1204 bp, Glycine max
  Clone ID: PAT_MRT3847_103914C.1
gcatatagttttcctcctagctagatacatgatcaagtcctcctccatggcttcaattgccaaaatgcttgaaggcaaagtggcgataatcacaggaggagcaagtggcattggtgccgccaccgccaagctattcgtccaacacggcgccaaagtaatcattgccgacgtgcaagacgagttaggccagttccactgcaaaaccctcggcacaacaaacattcactacgtccactgcgacgtaaccagcgactccgacgtcaaaaacgtggtcgaatttgccgtgtccaagtatggcaagctcgacataatgtacaacaacgccggcatctccggagactcaaatcgctccataacgacatccgacaacgaaggctttaagaatgttttcggggttaacgtgtacggagctttcttgggcgccaagcatgccgctagggtcatgatccccgcaaagagaggggttattctcttcacctcaagcgttgcttcgcttctcggcggcgaaacaacgcacgcttacgctgtttcgaagcacgcggtggtggggctaatgaagaacctgtgcgtggaacttggggaacatgggatcagagtgaattgcgtttgtccaggtggaattcccactccgatgctcaacaatgcgttgaagatgaacaagaaagagacgcaggaagtgctgtgtaaggttgcggtgttgaaaggaacggttcttgaagccgaggacatagccaaagctgcagtttatttgtgcagcgacgaggccaagtttgtgagcggagttaactttgtcttggacggaggttatagcatcaccaataattctttcacttctgcgctcaacgctctcatcaacaacaaccatgcttagtaatggctagctatatatccattcccgcattttctgcccagttccatgtgctgaaataattaagctacactatctactttctctgtatttttgtggtctttctgcaagatcgatcaggatggaacacttaattaccacagtttccccctctcatgcaacaatgtagtaccaactagctagttctttttcctaagtgaaaatgtgtgttatgtgatgtataatgatctatgttgatgttgtattcacaaaaataaaataacaataatcaatccgatcgagtgaaaatgtgtgttatgtgatgtataataacattaattatttgtgaatatgatt

SEQ ID NO: 4329 - DNA, 625 bp, Glycine max
  Clone ID: PAT_MRT3847_103915C.1
aatcctatcacgccttctgtttctcaaatctctccttctgcaattttcttctcttccttcagcatcttcttccaaaattatgagttttttttatcgttcatctcataggtttttgtaggccgaagatgaagagctttgtatattctgacacctcttgtatgagatggatctttcattaaaggtttcatctttgagcacagaaagcaactctctgagtcctacactaccaggggagaggtgacgccgacgtcgatgtagatgatggatgaggcctgtgctggggacgttgacgcggatgctcatgacctggaagcagaggaagagatcctgggcctcgaggccgtagattgcgtcgattttctggggagtacagtccttatggccagcctgtgctcgttcaattttaaaaaaatcacgtcaataataaaagcccgttgtgaatcctggtcacttgaattttccttttttttataaaaaaaaaacagactaaatccagatcttttcacgatgtactgtaaaattgtattttttttaatagtgatgagttgtatagttgggtatgtaaatgtatgtaatcattatttttggacccttttgaatatcatgaaatacagtttgtattgtt

SEQ ID NO: 4330 - DNA, 783 bp, Glycine max
  unsure (1)..(783): unsure at all n locations
  Clone ID: PAT_MRT3847_103916C.1
agaannnnnagatgcttgtagtaatactcacttcatactagtacctctcttgttgtttttttttttacctctttttttatatttcctttttcgtatgatataggtttacacaaaacattactactattcttagcgaggttggttcactacctgctaacgagctgaccgtgtctgaccttctgttctgcgttattcggcatcaagatgaatttactactatcggaacatgattctttacagttaaaattttaactacagtcatctgaatttttgtaaatattctttaattttcaaattcaaaatagtgcgtgtgtgaatataaatttcaataatgtggctaatttaaatatgtattttaataatgttgaataatttaaaattgaatgtatctaaatttaagacaaactaactttagctgtcattcaccatgagaagaaacgttgtcatctctgataacaagggacaacgtagaggatcgtatttattaattagttatggaaaaatgttaaatgtacaccgtgtataaaatgacagggataatcggagaaagagataaaagaaagaaagaaaaaaaagaatgattagcagaaatgatatgtcttctgtacataagnnnaaaaggaaaaatgatgcgttaagaagtaaacttttttaaaaaataaactaagataaaaaaaagagaaannnattgaatgtatgaatacaataatnnntatacatggttaattaattatgatnnnnnnngatatgattannntagcnnnatttattatacatnnnant

SEQ ID NO: 4331 - DNA, 2058 bp, Glycine max
  Clone ID: PAT_MRT3847_103917C.1
gccttctgtttctccaaatcgctccttctgcaattttcttctcttccttcagcatcttcttccaaaattatgagttttttttatcgttcatctcataggtttttgtaggccgaagatgaagagctttgtatattctgacacctcttgtatgagatggatctttcattaaaggtttcatctttgagcacagaaagcaactctctgagtcctacactaccagggttccgattccttacattcgttatttcaatttctttgatttaatttaaattctattcgaataacgatttattcctagcctaatattgcaattctttgcacatctaattggtatgtcaaagaatctatcgttaggccatatgaaatttatttttaacatgtatgtgtataatgatatgtgtacgtgttgtctatctttagctccgagtatcctttttcttgatagggtttttcggtgacaagatagataaaattcttttaattttttattaaattatttattatatatttttataatgctataatttgatctaggttttctagataaatatatgggtattgaatatatgatgttgaatgatgtgaaatcagacggattcccactgatattatttgtatatgattacacaaccagctactactgacaacatcatgttcatgctctttgttttgtagattcttagtgttttaagtttcatctgctgtgtagatatgttttaaaatagttttttaatgttaacaatggccggtgatgctagaaaatatttgctactcttgatggcaatcgcccatttgatgagtctcttccaccaagatctctgaggcttctttttcaatttttgatatattatttttggcatggtttcacttttatgattatgtaattgaggcttatgatatgtgtatagaatgcttcactatctggtctatgtggattttcagttcccatttgactcgttcccttgaagcgaaattatttgtgttgcttttttcttatcactcttgcaaccttttcattgttgctttgggagaacaaagaagcagctaaattcttttttacaagagtagattttttttctatcataatttttggattttttttttcaagaaacatacaaaaataaaattatatacccaaatgtaactcacctaattttaaaaaacatacaactttattgtgcataatgtaaatttgggttggggatccaaatttttaccgtgttttcaattttttttcaaaaaccttttgagattttgggtccccaacccgaattctcaacagcttacggcgaagcattcgttcggtgttttcaacagggagaggtgacgccgacgtcgatgtagatgatggatgaggcctgtgctggggacgttgacgcggatgctcatgacctggaagcagaggaagagatcctgggcctcgaggccgtagattgcgtcgattttctggggagtacagtccttatggccagcctgtgctcgttcaattttaaaaaaatcacgtcaataataaaagcccgttgtgaatcctggtcacttgaattttccttttttttataaaaaaaaaacagactaaatccagatcttttcacgatgtactgtaaaattgtatttttttaaatagtgatgagttgtatagttgggtatgtaaatgtatgtaatcattatttttggacccttttgaatatcatgaaatacagtttgtattgttaagttaatttttaagctttattatattacaatcgcgtcttatctttgacatgtcgttcccttgaagctaaatttggtgtgtttcttttgttttgtgacactcttgcagccttatttctttgatgctttaggagaacagatgattaactaaattttttcaaggattatttattttcttgataaaaaaagtccttatgtttttcagttggcatggcttgagtctctgcagacagggtgatgtttagtgtaagttcttaaagtaatggactcttgtcttttgttatcggatctttagattatactgcacaattatagatgaaaaatttgaataaaataacttgttttggt

SEQ ID NO: 4332 - DNA, 607 bp, Glycine max
  Clone ID: PAT_MRT3847_103918C.1
cggtggatatcatctttgtagatattttttctccccacgtttgcgatagagataacccacccatgcatgcttccatttccatgtaccccacattatgaattattaattaattggtgccataaattgcatatcgtggatgcaagaataatacgaaacccacatcatgagcacactttgtatggcggaaaatatgaaggaggtggaagttgaagatggatatgtcttgaaagaagagatccatctcacggtgctaaaaacctctctgttcttcgcgggcgatggcttcagcgtctacgattgcaaaggtcaactcgtgttcagagttgactcttatggacccgacactcgcgacatagacgaactcgttctcatggatcctaacggacgttgcctcctcaccgttcgtcgaaagcggccgagtttgcatcaacggtgggaaggtttcaaaggggagagaatggacggtgataaacccatcttcagcgtgaggagagcgtcgatcataggacggtcgcgtgcgagtttgacggtggagatgtacgataaccccggtgaggaagtccagatcgaggggtgcttctcgcagcgttgctgcacgggtttcaat

SEQ ID NO: 4333 - DNA, 1200 bp, Glycine max
  Clone ID: PAT_MRT3847_103919C.1
ggctcgagaattaattggaggcataatttgtttatcatggatgatgatagaatggtgagactaatatggctttggctttagccacataaaatattgtgttacaaataggaaacgaaacccacatcacaatccaattccatgaccctttgtatggctgcagaaaatatgagcgaggtggaagaggagcatggatatgtcttcaaagaagagatccatctcacggtgttcaaaacttctctgttcttcgcgggcgatggcttcaccgtctacgattgcaaaggtcaacttgtgttcagagttgactcttatgggcccgacacccgcgacagagacgaactcgttctcatggatcctaacggacgttgtctcctcaccgttcgtcgaaagaggccgagtttgcatcaacggtgggaaggcttcaaaggggagagaatggacggtgataaacccatcttcagcgtgaggagagcgtcgatcataggacggtcgcgtgcgagtttgacggtggagatgtacgacaacccaggtgaggagtaccagatcgatgggtgcttctcgcagcgttgctgcacggttttcaatgtgacgaaggaatcggtggctgagattcgtcgtaaagtggaccccaccaccagcgtcgtgcttgggaaggaagtgttctccctttgcgttaagcctggttttgatgcggcttttgccatggggtttgtgcttgtcctagatcagatcaacggtgaggattacgttgatgatcgtgctaccacggagcctgcggtgcaccccgccacagaagattagaagggaatagagtgcatttccagatttttcttcaatcacactggcatgatgggtggctttatttaatttaactcactaatccttgggatttggattgtccctcacaaagggaacctctgccccttcttttctgggtcatgctcatgcccttgaaagaataaacttttcaattcccaatgcgattgtgtaaattttacatcaagcataaaaatatcagttgagctttcctactttcagccgattagccctttttatctgtgccttgtcttcattacttgtgatgcttttatatggcatgatatgagcacaatttatattttcattagcttataaatttcgtagttattataattaatgtatttagatagtatttatattcactattttcttttttatcatatc

SEQ ID NO: 4334 - DNA, 555 bp, Glycine max
  Clone ID: PAT_MRT3847_10391C.1
gcaccagaactccgccatggcgccgccatggccgccatttaacaacactggaccatggtggaattgggtggtatcgccgtgctggattgtggaatctgttggagcagatgaccccactgtccctcaaaaaccctatttctccctgattgggaaccatttcagatgacctagtgaatgaaaaattgaatgttgccaactgagattctaggtctggttgtgaccaattttggaaagaaaaaaaaccttgaggcttcatttcatgtgacatcaattcaatccaattcttctaagttttcaatcttgttcaaactcatctagtcctgtctgttatttgatctcgtttcgaagtcatgtctttgttatttttttcggagctttcttttgaagttctttggtctgttcgtgttctagagcatccttctgatctattagttctctgcctgctatgtgcaagccatggctgtctgaagaagcttgcattttttttgtttctgaaacctaagaaatgggttttttaattaaaataaacacttgaggatcttcggactgaaattt

SEQ ID NO: 4335 - DNA, 444 bp, Glycine max
  Clone ID: PAT_MRT3847_103920C.1
ctcgagccgaatcggctcgagcagtccctctgagttcttccacctcaccaccaagagcggctgggagttgaggaactagatttgtcgtctacacttcatgcgacactatcttccttgattcacgcgctacgttgcgcgcacatactcaacggatgccacaagcctccagagagcaatgcgcacacgagccgaaaagcatacaccacacaccactttctaaaaagaccttcgaggtcatgacacgattactgcgcacgggttagacggagtttgaggacttgttttgggagcataccacatctgcatttttgcattacgaacggatggtgaaagagagagcattcttgggggaagcatgaaaagcttttgtttttggcatgcgtgcatccggtgaacgcagaactgcgtgccggcgattatagagatatacacaccacacgatgt

SEQ ID NO: 4336 - DNA, 519 bp, Glycine max
  Clone ID: PAT_MRT3847_103921C.1
ccgcctggctacgtcggccatgaagagggtgggcagctgactgaacaagtgaggaggaggccgtacagcgtgatcctgttcgacgaggtcgagaaggcccatgtcgccgtgttcaacacccttctccaggtcctcgacgacggcaggctgacggatgggcaaggcaggacggtggacttcaggaacactgtgatcatcatgacatcgaacctcggcgccgagcacctcctcgctgggatggtgggcaagaactccatgaaggtcgctcgcgatctggtcatgcaggaggtgaggaggcacttccgccctgagctgctgaaccgtctcgacgagatcgtgatcttcgatcctctgtcccacgagcagctgaggaaggtcgctcgccttcagatgaacgatgtggccgtccgtcttgccgaaaggagcatcgctctggctgtgaccgacgccgcattggacatgatcttgtctctctcttacgatccggtgtatggcgcgcggccaatcatgaggtggatc

SEQ ID NO: 4337 - DNA, 277 bp, Glycine max
  Clone ID: PAT_MRT3847_103922C.1
cccacaaactcacagtcttagtccttagttgggttctcggactttgaaagactagaggctgtctctctgtttagatccgcacacaaaagagaagcaggttgatgcgctctacttggatgtctgtagtggtatcactcttacacgcacgcaagagtgcaggcctatatagattatgtgagatgggacgagacaaagcacagtatggagcatacgttatgcgagacctcccgagtgtccgcttgtgacagtgatcaatatctaatggaacgatcagata

SEQ ID NO: 4338 - DNA, 768 bp, Glycine max
  unsure (1)..(768): unsure at all n locations
  Clone ID: PAT_MRT3847_103923C.1
ccacgcgtccgcgcgattgtggaagaaggcggaattgctgctcttgtggaagctattgaggatgggtctgtgaaagggaaggaattcgcggttttgacccttcttcagctctgtgttgatagtgtcataaacagagggtttcttgttagagagggtgggattcctcctctcgttgctctttctcagactgggagtgctcgagctaagcacaaggttagtcatactctaatcaaacctctattcgatcatactaacaaacctcatatcattattttttctaatcgacaaatgttaatggttagtttttgttagcaggatggatagaatccaagaacccatgaccttttcctccttcttaatcaaccaaaccttatatctcccctaatcctatcattatgatatacagatagcatgattgttaacataaatttaggtgaattttcacttgtttgattttaagttgacaaattgattctaggtcagagttgattntgagttgacgcaactagttttattgtattacataaaaaatttagctgagatttgctactaacttgcttttagaaagaaaaaaaccatacatanaatggttntacttcaaaattaattctgcaaaatgaattttattcagaatcatttttgcaaatgctcacccatgctatggatcattgggagaaggnanaaattgntgctttgaaagtaataatagtacttttgagttgtcccaactgaaatctaggcatacgctcagacacatactaaaatact

SEQ ID NO: 4339 - DNA, 232 bp, Glycine max
  Clone ID: PAT_MRT3847_103924C.1
atttacaccaaggaggcctaccctgttagtgtaaatgattcagttctgaaggatgagaaaaaggggttgttttggtattttgcaacgaggtcccatattttacatggtgggtcagcccataaggactgcataaatgggattcatataggaggagagacttgcagtttcaactgggcagtaggattttttttcaggggggaaaaacaacgcgaaaggcttttgtcaaaaatat

SEQ ID NO: 4340 - DNA, 323 bp, Glycine max
  Clone ID: PAT_MRT3847_103925C.1
agggggaaatttttttttttttaaatgaaccccaacaaaaaaatcttttttttttttgcttttacaagggcaacaatggttgttttggaaaaaaaaaaaaattatcctaacggacaagaaatttttgggcatgcatgcatgggggcatgctttttaaccttttaaaaaaagggggggagaaaaaaaaaacccaccgcccccacaattaagggtaaccaatttgggtaaaaagggctaccaactttgcagtttagggccccggaatttcggggcaatctactagcggggggtccctttcttgggtttaagaagagacccttttt

SEQ ID NO: 4341 - DNA, 726 bp, Glycine max
  unsure (1)..(726): unsure at all n locations
  Clone ID: PAT_MRT3847_103926C.1
ccacgcgtccggttttccttatttttcatggcttattcatctcataaactcttcttccttctgtttgcaattttcttctcacacgctagtgctgtaaactcttccgatgcttccacaacaattcacaccaatctctcttccataaaatctttctgcacaaccacagcttacccagaagtttgtttcaactcattgaagctatccatctcaataaacataagtccaaacataatcaactacctctgtcagtccctccaagtagcaatatctgaaaccacaaagctctcaaatctcttccacaacgttggacactcaaaaaacatcatagagaagcaaagagggtcagttcaagactgcagggaactccatcaatccacattggcttctttgaaaaaatcactatcagggatccgttcttccaactccaagaacatagttgatgcaagaagctacctcagtgcagccttaacaaacaaaaacacatgtctagaaggcctagattctgcttcaggaacaatgaagccatctctggtgaaatctgtgatcaacacttacaagcatgtaagtaactcactttcaatgctccctaagccagagatggggactcccaaagtgaaaaagaataataaccagcctttgaagaatgctccaaagtgggtataaagcagtgaccaaaggctcttccaagactcagatggggaaagattatgacccanatgaaatgct

SEQ ID NO: 4342 - DNA, 167 bp, Glycine max
  Clone ID: PAT_MRT3847_103927C.1
gcgggacccctttgtgggcataaacgaaccccttggtgggccaggtctttatttcaaaaacctaactcaattgttgggggttcacaaaaacaacaagtgggccaataataaaagccttttgcttaagaaaccccgcaaaaataaactttttgccgagaaatttaaaa

SEQ ID NO: 4343 - DNA, 259 bp, Glycine max
  unsure (1)..(259): unsure at all n locations
  Clone ID: PAT_MRT3847_103928C.1
cgaagctcggaattcggctcggcgccgagaccggctnngtcncttcgactctgcattcttcttccttgattcttgaacggcaatgtggaaaaagagcctgtgattttacaacttccgagggtggcgccgtctcctccggcacctcctcccatggctgcgtctaaggctgctccgcctcctccgccaccgccgccgaaggggagtaggcaggtttcggctaatgtgaggaagattccgcgagtgttggagctctccccct

SEQ ID NO: 4344 - DNA, 402 bp, Glycine max
  Clone ID: PAT_MRT3847_103929C.1
ataaataacaagtcctttataaattattaggtatgaactatgaagagtttgattttacaaaattttcaagcacacgagagggaggacagatttccagacacactaaaacagcccggccatcctctctagtccaaacaaaaacatcaatgggtgggaacatgaatatataaatagaaaagaaaattgagcaaaaataacaaaaataaaaagagagggtatatgtatccatataatgatgatgggaaacaaaaacaaaataaaaataaacaaatataaagtaaaagaccatctttcactcaactcagcattccttgattggttgaaccattttttttttttcatttgggttttctcatccccttgtcttctttgtcaggttcaaaccttgggaggtttagtaat

SEQ ID NO: 4345 - DNA, 376 bp, Glycine max
  Clone ID: PAT_MRT3847_10392C.1
cttgagcatgttgttgttattgctactttcgtgaggaaaaatcctatgtgaagggaaaaagatcggacaatgacctcttatttcgaagggactatcctaaagataccaactgagacagagtgagcaaatactccacaattaataggaggtcaaacgccatgcgaatacacgaccttaacacggagccttggcaaaaaagtaacaggcaagacggcgtctgaggattttatgtgcctgacttgatcacctcagaagacaggtgctcaacctaacactggcagtgtgacgaatctggttactcgctatgaacctttgacagtgccagcacggttggccgcaccacctgactggctttgacatggattacgggtgtgct

SEQ ID NO: 4346 - DNA, 226 bp, Glycine max
  Clone ID: PAT_MRT3847_103930C.1
ccattaggaattgcagagtgagcgctcacctgaaagcatgacgaacagcgctacagggctgtactgcataaccacagagattggaaactacatggggacattgctgaagacatatgagcataagaactctggcgaggagaataactggctgccggaaaggaacctacaaatgggaggaaagaactactattaatatctagttacggggacacaacgcgagaatctg

SEQ ID NO: 4347 - DNA, 668 bp, Glycine max
  Clone ID: PAT_MRT3847_103931C.1
gtcattgaccatgttgtcacagataaaaggaaaactccgctacttaaagggtggggttcaatctaagcaaaaactgcaattcgaaagtccaactagttcttcattcacacgagagacaactgcaacgccaaactctacagaagagaaggatgcacttttatctaaaagtgacgacgaaacatgcccaatttgccaagaaaagctgggcaaacagaaaatggtttttcaatgtgggcatgttacatgctgtaaatgtaagaattatatgaggaaactttatattatcattctttagttgtgttatagatttaataaaagtcatttgtcttcacctagcaacttaagcttttaggagaattagttcttgacatggttttagagaatcttgatcaagtaatgtagagtttgatccttgttcatttttctaaataaaacgttgtactttacatggtaaatacgagtcaagctcaaattagagggtggttatgtttgaaagggcatgttagagatgtaatgaagccattcaaatgtcattatgtaaaagcttaagattttaagagttagtcctcgataagttgttttgagtcctatatgtacttcagtctgtgttaccagacatatagttgctgctgtattgtatagcccttctgtcgtcttctcgcagccgt

SEQ ID NO: 4348 - DNA, 354 bp, Glycine max
  Clone ID: PAT_MRT3847_103932C.1
cccacgcgtccgaaaaaaaaaaaaaaaaaaaaaaaaaaaaaaaaaaaaaaaaaaaggaaaaaaaaaaaaaaaaaaaaaaaaaaaaaaaaaaaaaaaaaaaaaaaaaaaaaaaaaaaaaaataaaagggggggcctttttaaaggatccaattttacttccccttgttttcaaatgtattagctttttttttgggtcacttaaattaatttaactggccgtggttttaaaaattcttgattggaaaaaccttggtgttaccaatttaaatccctttttagaaaattccctttttgccaattgggttaataccaaaaggccttccacaaattgcctttccaaaaatttggaaagct

SEQ ID NO: 4349 - DNA, 447 bp, Glycine max
  Clone ID: PAT_MRT3847_103933C.1
ggctcgaggcggccactcaaatccagcaatggcctacacggaacagggcgttgcaggagaccaagctgacccgagctcagcgaaaaatgcagctgggactacaacatatgctagagaaaatggaacaagagtccggcaggacaaatgggatgaccagcccgatactgctcacagtattaagcagctagtgagttccggtgccgacactggcacagaacttaggtagctgcggagctctgatgggagccgcatttcacgtgcagcaaagcttgccagtgctgctgactggagtgagaatcaagacagaagaacggcaactagacctgtgtgctggctgacccctgtatctactatgatgaatgatgcatgtgatgctaacgaagctttgcttggtgttgactaatgtaagggcccacaaacggctgactagcgatgcaagactaatga

SEQ ID NO: 4350 - DNA, 380 bp, Glycine max
  Clone ID: PAT_MRT3847_103934C.1
tcggtttttaccacttgaaggcagctaaggggcatgggggagaatacgatctgatgattagctaactggtgagcgtactgccagaaccaggagcagacagaacggagacatggcagatccttccattcactgccaggcgagggagcacgaagcatgcacctgtcgaatgtaggattgaccgagaaattacagaacagacccaggatgatggcacattcgctgttcacgaacctgattgcgaaaaaccaaatctagcaaaagcttgctgtatacgaccattcaggctctggaaggatcggatatggattgcgtatcccaagggcaggaccatgaacaagtatacccagaacggtgctacaccatatcatactcacctacat

SEQ ID NO: 4351 - DNA, 300 bp, Glycine max
  Clone ID: PAT_MRT3847_103935C.1
acctcatccaacttgatcagattaacccctcaccattgtttgttgatctctccatcccaagctatagacacctcctctttgttcatatctgattctaagaagatgggtggagacgaatttgctgcgatggagaactctgggcaagggaaaaggctgtagaagaaggagaattaccaccttgagaatgaccactccttgcccacatattagacagacaacgagatcactgtcatgcactatgcatccaaatggcccatcaggcaagaaatgtacgagcgcatataccatacacacctaaac

SEQ ID NO: 4352 - DNA, 466 bp, Glycine max
  Clone ID: PAT_MRT3847_103936C.1
agtattaaatttaaaaagcaaaaatttaaatttaaaataaaccaatctttatactaaagcgaccattccccaacccttaaaaaaaaaaaaaaaaaaaaaaccaaccggggccttaacccccccaaaaaaagcccaaaacccttaaccttgggaaagggaaaaaaaaaaccactccattttaaggaggggggggaaaaaaaaaaaaccaaagggccggaaaccccccccaaacaaaaaacaaaagttttaaggtccccgtaaaaagtaaaaaataatcccaaaaaaagggcaatctttgctagaaattggctcccccaacaccaaactcccaattgcaggggttgcaggaaaaggtgggcccaaatttgaagccatggttttaaaggggaaaacccatttcaatcccctaaaatggaacctaaaaagggcccccccccaaaaccaagggctgggggggggggggccc

SEQ ID NO: 4353 - DNA, 720 bp, Glycine max
  Clone ID: PAT_MRT3847_103937C.1
aattcggcaccagaataacatgagtgtggagcaaaaacaacgataaggaaatttgacagattataaaggtgaagaaagacaagagaaaagggaggatccatggccacaagggaaggtaccctgcaaatcgcaaagaagaaagtccctctcattcctcttctgtctattctctgcttcatttccattttcttccttctctcccagttcaaatctacctccacctcccaccactcccttcccacgttccaaatcgagaaacacgaataccaccgcggttcctgcgactactccgacggaacatggatccacgacccctcgaggactccgaggtacgacaatacctgcaaggagatcttcaagggctggaactgcctctccgcccacaaatccaacgccccacatctctccacgtggcgctggcagccccgcctctgcgatctcccccagttcgaccccgctgagttcctccgcactcacacccacaccaacattgggtttgtcggggactcgctcaacaggaacatgtttgtgtctctcttctgctctctcaagagtgtctccgatggacagatcaagaagtggcgacctgctggcgctgaccgtggattcacctttctcgcttacaatctcaccatcgcttatcaccgtaccaatcttctcgctcgttttggtagctgggcagctactgataaacggggtgccttggaaactcttggattc

SEQ ID NO: 4354 - DNA, 407 bp, Glycine max
  Clone ID: PAT_MRT3847_103938C.1
gtgacatgcacccctcccgtacctcagcacggaattcgagctgaatgaacattacttaccctaatcaacacccaaaccccggttggtctaaatcgtcttggaaaatgactgatcctcaagacaagtccatgcttcactcttaaccacaaccagctgaaccaacaccaacctcatcatcctcaacgccttgtaacacaaccacctctctaccaccctaggctgcttgctcctaccaagattgaaccataacccagagcaaatatgcctccctggtactatccacaaacttaccccaaaccgtatgttgctaacattcacacacaactaaccgtatcgcctgatgatcatcatctcccaaggactaggagcacttaaagttgcaagctcatcataaactaaaacgcatg

SEQ ID NO: 4355 - DNA, 214 bp, Glycine max
  Clone ID: PAT_MRT3847_103939C.1
gattgatgtggtttggaacgatcgattggggaagaaggtgctcgtgaattgcatcgacgatgataccatcggcgacctgaagaatctggtggcagctcatactgtcacacgagtcgacgggatcctctttcaaaaatgttacaccgtctacaaggatcacatcactatcaaggattacgagattcatgactgtatgggtctcgctctctactac

SEQ ID NO: 4356 - DNA, 911 bp, Glycine max
  Clone ID: PAT_MRT3847_10393C.1
tctcgacacaaatcccccccgtttccgtatctctccgaaatttctgttagattgtttctgttctgagggggaggaaaaaaatttagatccgcccagtgacattcccgttttcggctctctccgaaatttcttagattgcttctgtgtcagagaaatcagtgcaacaaaaatggacgacaccgaaaccaaaggaagaatcgaagagactgtgcgtaggattttgcaagaatcggacatggacgaggttactgagtctaagattcgaaaacaggcctccgaacaccttggcctcgacctgtctcagccttatttcaaagcctttgtcaaacaggtcgtgaaggcttttctccaagaagaagaacaacgacagaaacaacaacaacaagatgaagatgaagaagaagaactaggaggagcttccaagggcaaggagtacgatgatgaaggcgatctcatcatctgcaggctttcagataagagaagggtgacgattcaggatttcagagggaaaacattggtctccattcgggagtattataaaaaggatggcaaggaacttcctacttccaaaggaataagtttgacagaagagcagtggtcagcctttaagaaaaatgtgcctgccatagaaaaagccattaagaaaatggagtcaagttgacacatggctttgcttgtttctttttgttgaatatatcctgcaccgcaccatggtgtctctttgatattggaccattttgttaaaggacttggagtcactgtttaagtgttttgcaacctgagtgcctaaagccatttcaggaagactaaactgaatgccagtaactttaaaaactcaatacatttaattctgttatttccttgcttacgtgcatgttgttggatgataatattaaaaaaagaaataaaaa

SEQ ID NO: 4357 - DNA, 501 bp, Glycine max
  Clone ID: PAT_MRT3847_103940C.1
gtttattagtaaacccaaaaaatgagaaattgtgggtcgatggtttctcaccctattctactttttttcctaatctcctgacaactgccaaaaaacgaattgttatcctctaattaaccgaattgcttttgtaatttttggactccagtacaatttttggcaaatttattgcccgaaaatgacaaagttgtataagtgtaggactttgctacatatgtccacgggttgagtgctttttaatcaattagagcccattaggaaaatttgtcaaacttgaaccagtctatactagttattacctctggatacttgcctgcccagttggaacatttgtgaagagtaatattagttttgctctagccaagtaatattagtttcctgccaagagttttaggactcatgaaccaactcccgcaagtccataactaatttttagtatagcttctaaacaaataaatacaaacaattgaagataattggcagaagaaattaaagaaagaa

SEQ ID NO: 4358 - DNA, 398 bp, Glycine max
  Clone ID: PAT_MRT3847_103941C.1
attcccaccgcaacccacccatctcatctacccctgctcacactcaccattctttattacatctatttcactaatggtgggaagataacatcaaacatttgccataacattccaattcaatcctactcttaacttttccatctcaacctctataacttctattcactttcttacactttttctaattccaacttataaccgactctcactttgtctccaattattatacccattacttcatactctaaaccctacataaacatctcttcttaattctaaaactctttctttcactcctcaaaccttacatttatgatcttcctttgaacaccaattacccctaaaagcatattacttctaaatatctaaaccctacctatcaatacatctctacacac

SEQ ID NO: 4359 - DNA, 276 bp, Glycine max
  Clone ID: PAT_MRT3847_103942C.1
ggtgagcagaattaaaaaaaatcattccaacattccaaaatttaatccaggggcgttgcggacatcgacaaaggtatctcatggtttgctaaatcaagcttcagctaatcccccttctcgggatagaagctgcctgaaatcttcaagccccaccaaaagcaacccccaatcatctaccatatctgcaccttttagattcagaagtgaggaaagagcagttaaacgcaaagagttcttgcagaggatggatgaaactaaatccaaggaataagacaa

SEQ ID NO: 4360 - DNA, 522 bp, Glycine max
  unsure (1)..(522): unsure at all n locations
  Clone ID: PAT_MRT3847_103943C.1
atggacaagaaaaanttgttgncnncatttatataaatcaatgcacaaattattattactntaaaacaacaaccataaanataantacatnnacaccatacacnaaatattacatggaccaccaattaaaatgaaggacaagagcttaacaaactcaataaccacaaaaacaaaatngangaaaaaaataaaaaacaaaaaaaaaaactaaatnaactcaaaaaaaaccaacaccnnacaaaaaaaaaaaaacccataaaaaaaaaaaaaaaaacccttaaaaaaaaaanaaataaaaaaaaaacaaaacaactatacataanacaaagaaataaacaaaaaaaaaaaaaaaaaaaaaaaaccaccacctataccaaccccagccccagaccaaaaaacctccccccaaaacacccccccaacaacaccaaaccaccccccttatacccaacacccgccaccaacacaaaaaacaaccccgaaacccaatcccccacaccccaaccaacacccaccaccccc

SEQ ID NO: 4361 - DNA, 794 bp, Glycine max
  unsure (1)..(794): unsure at all n locations
  Clone ID: PAT_MRT3847_103944C.1
cttgatgcctgcattcaaaacaagaaacgtgatgattcaatacagtgccaaagtcaattcagtgcatgtctgatttcactttgagtcctctaagatcatgtcaaatactaattaacgtgattttagataaatgttcacttgatttcatgtttaagatttgattttggattcaaaattagttttgattcgaagcaattttagataacttttaaattggataaaaaaatgtatactaaattttattattaacaattaattttcgaaaattcattgaaacgcatacttagtaattaccacactacaaatccacggtagaaaggccccatcaaattataaggtggtgagtgatgacacattttgcagttaaccaaagatgataatacattgttaggaatagaaatctccaaggaaagtcaaagtagaatacatacaaaaacatagctatagcttggcttacttattaataaagtcaaggaaggggggagaggaaccaagtatacatcacaaccacctcttcatctgctccactctttcctttctcattagcatattatcttctccaccttcctctttcaactgctataactacaaggaggatcttgttgttgttctaacctaataataaatatggttgagttagccatgtcaaagacaatgatggaggaagtagtaatgacaacttcttggtcagagggttcagaggatgatgaccttgtgagagagcttttggatgatgggtctccccttcttattganacccccacacaacaacaaagcctcttcaagtgatgacc

SEQ ID NO: 4362 - DNA, 640 bp, Glycine max
  unsure (1)..(640): unsure at all n locations
  Clone ID: PAT_MRT3847_103945C.1
aaactttccagccttcttcttcatccggtgtctctattttttttatagaaatcacagtatggcaaatgagggatcatcaaatcctcccagcagtgatgttggatggatatattatactcgaggacaaggaagtgttgtactcaaaagaagaagttgaagggcatgccctattactagacaatgaggattatgattatattcgggaagaggcacagcagaatgatagatgttttcttgatgcttttagcttttttttattatatgtcttattgggacttatttagctaattaacttttaacttattttgattatgtgcctcactaggacttgtttagctaattagctttcaactgtttttagtattttttgactatattggcttgaataatttaacttatgagataatattatgttaatgtttggccagcttatttttatttgcatatagcatgcttttttttatatacatatttaaattgtcttctgatactatcatcttattttaatcctttataattttattttcttaatttacattcaaacaaatacaaggttaaaaaaggttaggaggagaaaaaaatanatagattatatttnttttatttattagaattatagaaaatagagaatattttttta

SEQ ID NO: 4363 - DNA, 3099 bp, Glycine max
  Clone ID: PAT_MRT3847_103946C.1
ttgaaaactcctcctcatcctcacccccaggaggtatggggaagatagaaaaaaacaaaaacaccttattgacaccaccttttctatcatccttcaagtcatcatctttgatgatgcccatcctcctggtcattctcttggccttgttttctccttcattaggccttcctttagcatctttccaaccaaaagacaatttcctcattgattgtggtgctgaaaacacagccactctccctgatggaagacatttcaaatcagaccctcaatccagatccttcttgcaagccgatgatgagtacaaagtctcagcaaatgatgtgaatttgccttcacctgtttactcaaatgcaaggatcttcattcaggaagccaagtactccttccatttggttcaaccaggtttccattggatccggcttcacttctaccccatcaagaacaacatctttgatcttcagaaggcaactttttctgtctacacagacacctatgtgctcctccacagcttcaatgtgaacaacactgacaagccaatcatgaaggagtacctaatcaatgcaactgagccacaattgaccatgtccttcattcccttgaagaattcagctgcattcatcaatgccatagaggttgtctcagctcctgataacctgatattcgacaccggagccggccttttccccgttggcgagatcggaggcctgaccacttatggcttccagcctgtttacagggtgaacaatggagggcctctgatcacctcatcaaatgacacccttggaaggacttgggaatctgatgagcatttcctcacaaacaagaacttggccaagagtgcctcggtggcaacctctgctgttaagttccctcaagacaatccttccatctctcccatgattgcaccacaaactgtgtatgcctctgccactgagatgggtgatgctggtgtcaatcagccaaatttcaatgtgtcatggaaatttgatgtggacacctcttttggctaccttgttaggctgcacttctgtgacattgttagcaaaggcctcaatgagctctacttcaatgtttatgttaatgggaaagtggcaatcaataacttggatttatcagccatcactggtgccttgtcaacaccatactacaaagacattgtggtgaatgcaacattgatgtctgaggggctaacggttcaggttggtccagcaaatgctgatggtggaaatgccaatgcaattatgaatggcatagaggtcttgaagatgagcaactctgtcaacagtttggatggggaatttggtgttgatggaagaagtgttagtggttctaaccgcggcacggtggcagcggttggatttgccatgatgtttggagcatttgtgggtcttggtgccatggtgatcaagtggcacaagaggcctcaagactggcaaaagaggaatagtttctcttcatggttgcttcctctgcacgccggtgacaccagcttcatgagcaagaactcaatgggaaagagcaacttcttctcctcgtcgatgggattaggccggtacttctccttcgcggaacttcaggaagcaaccaagaactttgactccaagaacataattggtgttggtggatttgggaatgtgtatttgggtgtgattgatgaggggactcaagtggcagtgaagagaggaaaccctcaatcagaacaaggcatcacagagttccaaacagaaatccaaatgctttcaaagctaaggcacaggcacttggtgtccttgattggatactgtgatgagaatgatgagatgatcttggtttatgagtacatgcctaatggtcacttcagagaccatctttatggaaagaacttgcctgctctctcatggaagcaaaggctagatatctgcattggatcggcccgcggacttcactaccttcacaccggaacagctcaaggcataattcaccgtgatgtcaagaccaccaacatcttgcttgatgagaatttcacagccaaggtttctgattttggtctttcaaaggatgcaccaatggggcagggtcatgttagcactgctgtcaagggtagctttggttatcttgaccctgagtacttcaggaggcagcaactgactgaaaagtctgatgtgtactcatttggggtggttctgcttgaggcactctgtgcaagaccagccatcaaccctcagttgccccgtgaacaagttaacttggccgattgggcgatgcaatggaagaggaagggccttcttgacaagatcattgaccctctcttagttggttgcatcaatcctgaatccatgaagaagtttgctgaggctgctgagaagtgtttggctgatcatggtgtggataggccttcaatgggggatgttttgtggaacttggagtatgctttgcagcttcaagaggccttcacacaaggaaagcctgaggatgagtccaagtcagcatcagcagctgttcctacttcaccaacacctcctactccttccgatgatcgcccggcagctccggctgtgcctgcacgtccggaagcagcgaataatgcttcatcagaagtgaattctattgatgaccattctggaactgcaatgtttgctcagtttagcaatctcaatggtaggtgaaggcctaatttggtttcatgaatggaaggaatcatcacctggacagctacaaacaaatttgatcatgtctagggagatcttatagtaactttctcaaggcttggaccaaaatgtttcatgtgtaatgatgtgatgctgtatgctgactgctgtttctcttctaggtactcttgtctttctgtattgtgtgtgggggtactattttgcatgatagcaaaaaaaaaaaaggtgtcaaatttgtcatgtgattaagttgttggttgtaagtatgcatgcattcagcagtaccatcaatcatttatggttttatatttatgaattgttgtatattgttatgtaatttttagggtgagggtaattgtagaagcaagttcaaagaaactggctaccgacaggtagtgaatttcacttgtaatcgaccactatattagcaagagttttcttgtcctttcac

SEQ ID NO: 4364 - DNA, 1710 bp, Glycine max
  Clone ID: PAT_MRT3847_103947C.1
cttgaagatgagcagctctgtgaacagtttggatggagaatttggtgttgatggaagaagtgttaatggttctaaccgcggcacggtggcagccgttggatttgccatgatgtttggagcctttgtgggtcttggtgctatggtgatcaagtggcacaagaggcctcaggactggcaaaagaggaacagcttctcctcatggttgcttcctctgcacgctggtgacacaagcttcatgagcaagaactcaatgggaaagagcaacttcttctcctcgtcgatgggattaggccggtacttctccttcgcggaacttcaggaagcaaccaagaactttgactccaagaacatcattggtgttggtggatttggcaatgtgtatttgggtgtgattgatgaggggactcaagtggcagtcaagagaggaaaccctcaatcagaacaaggcatcacagagttccaaactgaaatccaaatgctgtctaagctcaggcacaggcacttggtgtccttgattggatactgtgatgagaatgatgagatgatcctggtttatgagtacatgcctaatggccacttcagagaccatctttatggaaagaacttacctgctctctcatggaagcaaagactagatatctgtattggatcagctcgcggtcttcactaccttcacaccggcacagctcaaggcatcattcaccgcgatgtcaagaccaccaacatcttgcttgatgagaatttcacagccaaggtttctgattttggtctttcaaaggatgcaccaatggggcagggtcatgttagcactgctgtgaagggtagctttggttatcttgaccctgagtacttcaggaggcagcaactgactgaaaagtctgatgtgtactcatttggggtggttctgcttgaggcactctgtgcaagaccagccatcaaccctcagttgccccgcgaacaagtaaacttggctgattgggcgatgcaatggaagaggaagggccttcttgacaagatcattgaccctctcctagttggttgcatcaatcctgaatccatgaagaagtttgctgaggctgctgagaagtgtttggcagatcatggtgtggataggccttcaatgggagatgttttgtggaacttggagtatgctttgcagcttcaagaggccttcacacaaggaaaggctgaggatgagactaagtcatcatcagcagtccctactgcagctgttcctacttcacctgccccaccaacacctcccatttcttctgatgaccgcccggctgcgcctgctcgtccggaagtgaataataatacttcatcggatgtgcattctattgatgaccattctggaactgcaatgtttgctcagtttagcaatctcaatggcaggtgaaggcctaatttggtttcatgaatggagcaaccatcacctggacagctacaaatttgatcatgtctaggaagatgttatagtagctttctgaaggcttggaccaaaaatttcctgtgtaatggtgtgatactgtatgctgtttctcttctagatactcttgtctttctgtattgtgttggggtactattttgcatgatagcaaaaagaaaaggtgtcaaaatatgtaatgtgattaagttgttggtttgtaagtatacatgcattcaacagtaccattaatcacatatggtattatattaatgaattgttgt

SEQ ID NO: 4365 - DNA, 261 bp, Glycine max
  Clone ID: PAT_MRT3847_103948C.1
acattttagggtaatattcccgcgattgatgaatcacacgacatatacattaaacacatgattacgaaaactctggttttcgcagcttacagtatcttctcactgctggccgaattatagattcgtgaagcagaatcattcccagcgcgagttaacgtctcgagattaggcccaatccatgtcaatgcacgctactacctccctcgataacatcgatgatgaattccattctcgcttgcatcaccacagcatccgtctcac

SEQ ID NO: 4366 - DNA, 310 bp, Glycine max
  Clone ID: PAT_MRT3847_103949C.1
cacccgaccattcaaagattatcagttaacaactttattgtgctcaatcacatttgacttcagggcattctgcatgactacgcccaacttataaaagagacgagagagccttctaaccccaaatacatccgccatacattcaagaaacacttgagtatctattacggatgacatacaaaatgttgcatatacccttcttgcccctatgtgatgtacctcatgcaacaaatctgattgaagcacatatttcatcccatatcgtaattagggagcttcgaataccacggattaaccgttaactcgcattata

SEQ ID NO: 4367 - DNA, 1576 bp, Glycine max
  Clone ID: PAT_MRT3847_10394C.1
cgaccccgtgtttttttttattcctttcttccatcttcttctcttttcacgtcattatcctaaacttgcagattttcacatcccaagcaacatgaaaggggggttcatgtttctgccgatgctactttgtggcacctggcatgtttccttcttcattacttggcgatccatagcattttgttgcctcatcaatattctgtagtacttagaccgtacatttaattaatggcacaggtattatacactcgttccaataaggaataatgcaagaaagcgggagatacagaaaacccggagagcagcacttcgacatctcttcacaagaaactcacttgtctttcatagaattggaagcagaaactgaatcagagatcaattttacctgccaagtaccaagagtgtattgctagactgccaaacgacattatattggcaagggaagataatccatgaatcataccaaacttcttattcatggctgcaagctttgggtttgactttgcaacttctacattttttgaccacccaacttcttcccctatattattttctctctccactttatgcctctgcttcatcatctcaatggtcatgggtgtaaagacaaacaagttggtaagattgaacgcaaaggaagagagcaaaaacccaagttggtatctctcagtggtggaggaagttttccacgggtgaaggtagccaaaggaagccaccgatacggcgcagcagacacccaccatcgagaaatacgccggaaacatcttgctttgcaggttcccaaactgatgccgcggcagatttttaaacatgatgatgccgccgatgaatgttacccacagagcggcgccgaaggcggtggagaagcagaggaggtgagcgagtttgaggtaggtggaaagtgtggttgattttgaccccagtgtctccggtgagaatatcactccgatggctaagaaagccacggcagttatgaaccgactaagccaacccatagaagaagattagatcacacagtgagtaaataggaaaggtgatgttctgcttcaggagatataaagcaaacgaagctcgagccgattcggctcgagtttgaggcggattacccctagaacaagagtcatgttccttagcccattttaccccatgagaagtgatgacttctcttcactctgtgggcctgtgattgatgatgtcaagttggtgagcctgcgtaaaccatgatgctatagggtgtgaggctaatccatcgaagtattatatatatatatatatgggttcagagcactagcctttgattttatatagttaggagaataattaagaatgtttattaaatttctgtctttttttctcaaaaggcctgaaaggtaatgagtttgattttcattttaatatgaaaaaaaaaaaagtgtgtataacaagtatcatctatatatgacgtatagtatatatacgctggcgtgtttctataaatcctttcatgtactttgaataaatgatgcgaaagaaatatagattattcccaaaaaaaaggacgacaggccgactagctgagctagtcagctcgtcaatccat

SEQ ID NO: 4368 - DNA, 843 bp, Glycine max
  Clone ID: PAT_MRT3847_103950C.1
ctttcttaaattctagaatttttgtaagaaataagaaacaagatatgcatatatagatggatagtgactttctcattgagagataaagacttatcattttctgcatccattttgtatatatatcatctgcattgcgtaatgccaaaattcctgcccttgcattgtgtggcaactatttcagttgaattttctcatatttgaaaatttattgtgcaaggcactgaccacgttattgcttgtgctgtttttctctatacatgtccttctaaaagtgaggttaatttcatttctaatagtgaagggtggttaaagcttgtggtgtatgtgtaaggcacccatgtttgttgcttgtggaatttctctatatgtttgctttagaatgaataatctggagttgaatttggaatatttaaagtttcctactgaaaagttgtgcctaaaaaaattaaactgtgctttttatctttgaaactcaatgtattttgtcgttttctttgtttggcatgtttttccatggactgcttccggaaattccttgtttaatgtcacccatctttttacttctcctttgaacatgcagcatcatatcagaatcctcaaggggcacagaacgagcatgatccaaataatacaactatttttgtcggcaatttggatcctaacgtcacggatgaccatttgagacaagtttttgggcattatggagagttagttcatgtgaagattccagctggcaagcgatgtggatttgtccaatttgcggaccggagctgtgcggaagaggcactgcgggttttgaatggcacacttctaggcggacaaaatgttaggctttcatggggg

SEQ ID NO: 4369 - DNA, 314 bp, Glycine max
  Clone ID: PAT_MRT3847_103951C.1
tggacgcttttctctctcttctttttattaacccctcaccccaaaacgcaaacttaatatgggtaaaaatattaaagatcaaatccgttctattgaaaaatcccatgagatagtcccttccaaaaatacagaaatacgaatctccagacttgaaagctcatttcgtcacccaaaactcctaaccagccttacttccgtttgctaatctccgaacaaaatcttaaagctaacataagtgaaatttatactctgtgacaggatactccaaacacaacatctttatcctgaacactcactgtacactgcagaaaaag

SEQ ID NO: 4370 - DNA, 287 bp, Glycine max
  unsure (1)..(287): unsure at all n locations
  Clone ID: PAT_MRT3847_103952C.1
gtngcangcacgcgtacgtaagctcggaattcggctcgaggtttcttagtgtctccntttattataggcattatgtgtactttagtgattgtagaacttgaattgctctagaatgtgaattaatttgtgttttattccttttgagttgcttgtaaagagtctcctatgaggaattctcttttcaaaatttaatattgtgtggtttctccctggctttagtaaaagattaattagaggacttactctgctagtgtctaacttaaactctaagtttatctttgacatng

SEQ ID NO: 4371 - DNA, 554 bp, Glycine max
  Clone ID: PAT_MRT3847_103953C.1
cccacgcgtccgcttacctctctccctctctttctgttatcaattttcgttttaatttctctacgactggggtcgatctccgatcactctgggtctatcgtgggggacttgcgtcgcactcgcatgactcattttactgcgaggtacggaatccgtgaaatatccggcgaggtaagattccgttgaaattttactttggtccgaggggcagggtgtaattaggatcgatttggcttcagatctgggaattagtgtttagttttggttgcgggtgatgttaattttggtggaggggctttggtagatggaatccggggtgagatcggctggttctggggttgaggtgaagagcatacactcatctggctgtgtaatcgagcaacggaccgggcctgaggcgagtgctgacccctagcacctcttgcactctctatgaatgcaacaaatggccagacatccgcgagtgtgggacctgaagtgatgttggatcatgcgacgagcagctgatgcctcctggctgaagggctgtttccgcaaccattccagttttgcag

SEQ ID NO: 4372 - DNA, 295 bp, Glycine max
  Clone ID: PAT_MRT3847_103954C.1
accagaaacaaaggggcaggaattagggggcttaaccgatggccatggggctgccaccagcgtgaggaccaacaatttcgttggttttgttgtgggggaccaaaccaaaggggggatttcagttctggggttggggggggtgattagggcaaagcagcagggggttgctggggggaattactccataccatgggaggcaaaagatggtttgattaaaaatgagtttgaaccgaaggtttgggtgagggaatggttgacctccaaggggtggctggaattcaagccagccaatgtt

SEQ ID NO: 4373 - DNA, 383 bp, Glycine max
  Clone ID: PAT_MRT3847_103955C.1
caggatttctcactcacaaattaaggtttaatgcaaaggatgatgatgccggcttgaaaagtgattctgtctctgcgaagaaaaaatcactgactttctcatcatcatgtcattcatgatataaacaccttgactctcactcatcagtgcccacattgtcggatactggtaaagcgtcatgctcgactgctcaggaatagaccacatgagcatcttcagggctacatcacaaccatactgcgactcttcagagcactccaagtgccactatgagggatccagcacaagtcaagcttctggagaagacagtgaagtgattttatacccacacgaccattcgatggagaccttcgaaaggggtcacaaaatcttggatatctgag

SEQ ID NO: 4374 - DNA, 516 bp, Glycine max
  Clone ID: PAT_MRT3847_103956C.1
accagtaattcttttacccatccgaatatgttgatgatggcactattgcttctgattaaagctctgtgaaacctatggttttcgtgctttccctgtatacttctgaggaaagtgctgaacacgctatgtggtgatcgccgtcataatgtgagcgggctactttgtctggatcataaggctgatgatgactcttaagggtatcaaggggtatattgatgagcagtattctcattctcattgtcaccaatctcaccgaccctgctattgtctgaggaaggataacaaccagtcttcctgctgatggaggtggaccatcacatggatgatggtcatttgatggctccctagaactgtgctgtgagcggtatcaaccttgttgtgtcgtcccatgatacgtatacggtgatgagacagatgatgaatgccttcattaatcatggatctagaatggagcttgatagtattcatatagagctgcatgctactgatcctactgagatgggtcttgatgtgttc

SEQ ID NO: 4375 - DNA, 368 bp, Glycine max
  Clone ID: PAT_MRT3847_103957C.1
ggaacactaaatgatttcaaagcatctttaataccggatatatatactcatgggctagtttttttttaataaaaaattgaaagggaaaaaatattttgcttgtatttccttaggaactgacctcctaatcaatcattgccaaagaaaaaaaaaaaagaaaaattgccccctggaaaaaagaaaatatatccccaggccttttttccacctattgactcaacatgcaaaggtggagggccgtttgctaaactggttgcccatttgcaaatttgtgggtaatgggaaacccttatcttttggctaggaaccagaatgggttccttagctcaatttcagacatattcaagtccctgtttcaaggaaaaaca

SEQ ID NO: 4376 - DNA, 188 bp, Glycine max
  Clone ID: PAT_MRT3847_103958C.1
aattgaataaaacatagggagagaggagagataattcagaattgacctaaggtatacctgatttctcttacaattcggaattaacttttaagaagacaaacaggcggcttgattttactgtcctgtcttgagaaatataaggtgagatagtggagtggccatgatctagtttcaccaatttcccccct

SEQ ID NO: 4377 - DNA, 357 bp, Glycine max
  Clone ID: PAT_MRT3847_103959C.1
ttcgtttatttggataaacctgtgatcatagggggtcgtaccttaaaaccggaaacaaaggcaatctgatacttggttccaggaatctatgaatttcttcctacttttttgagtacgattgcttaagggaaagataatcactctctgcgctggccacagacttagggaatcattctcttttccattcttagctgatttgctgaacactctgctatatgatataggacttcgtgtcagatttaaacttcttctggtcctttgtgagttgtatgcatagttgcacgttcaagctgattgaatcttggattagtgctcccactctcctatctggtataggactacgtgggtagacttttc

SEQ ID NO: 4378 - DNA, 1040 bp, Glycine max
  Clone ID: PAT_MRT3847_10395C.1
cccacgcgttcgcccacgcgtccgcggacgcgtgggcaaagaggaggatcccgcgtgtggcccgcttgttgactcggttgctctcaggactctctaccctcctagagctactaaccagaacatactaaagaatggtggatttgaagaaggaccctatgtgttccccaactcatcttggggagtgatcatccccccaaacattgaggatgaccactctcccctcccagggtggatggtggagtccctaaaggcagtgaagtacatagactcaggccacttctcagtacctcaaggcaagagagcagtggagctaatagcaggcaaagagagtgccattgcccaagtagctagaaccatccctggcaaaacctatgtgctctcattctctgttggggatgcaagcaactcatgtgaagggtccatgattgtggaagcctttgcaggaaaagacaccatcaaggtgccctatgagtccaaaggcaaaggagggttcaaacgtgcagcactcaagtttgtggctgttacccctagaacaagaatcatgttccttagcacattctacaccatgagaagtgatgacttttcttcactctgtgggcctgtgattgatgatgtcaagttggtgagcctgcgtaaaccatgatgagggaatttgggcttgctagggtgtgaggctaatgaatcaaagtattatatatatgggttctgagcctttgattttatatatagttaggagaataattaagaatgcttcttattttctattttttttctttagaggcttgagaggtaacgagtttgatttcatttaaatatgaaaaaaataagtgtgtataacaagtatcatctatagacgtatagtatatatacggtggcgtgtttctataactcctttcatgtactttgaataaatggtgcgaaacaaatatagattattcacaactttgcttttatgctataaaaaatgttttactttaattaattgtcaatttgtcgtcgtcgttgttgatgttaaattataatgtggaaattttttaact

SEQ ID NO: 4379 - DNA, 253 bp, Glycine max
  Clone ID: PAT_MRT3847_103960C.1
tctttttttttttttttttttcggggggggactctttttatagagatgtggggaaactgtttttgcaaacaaagaaaaacttaaatttttctaggtttttcatttctcaagcaatcgaattacttggtcctttgtgctaactttacttatgaattctttttttgcggatccttccactgtttcttttctcaaaataaagaaccaaaaaattcgggtattattaaaagccttattgttaaaatgctcatttttt

SEQ ID NO: 4380 - DNA, 498 bp, Glycine max
  Clone ID: PAT_MRT3847_103961C.1
aattaaaaattattttattttggaaaggcatataactgcaacaaggagacccattctgcatactcaaaatcaaagcccaagctaaaatggctctcttactttacaggcccttagctagttattacattcacatacgtttgttggcaacaaagcaaagatgatgctccttgcggcgagcaatttcaggcatcccctcagtgattatgtgctcaagtttaatcccttgatgcatttcccattggaaagaattaaaaaggttcgcagctttgagtaccactgaggcaatatccagagatattcctgggcaaatcctgcgccctgcaccggacggactgaactcaaactcttgccccttaaaaagcatctaatagctcaaaaacctctctggataaaactctcttggcattctgcaagcctcaaagtacctctgaatagaccaaccatctacatacactattgtattgcgttggatttcacacccttctattgagaaacttc

SEQ ID NO: 4381 - DNA, 851 bp, Glycine max
  Clone ID: PAT_MRT3847_103962C.1
gttacctgtagaaggtggagccacctctttaaaacgaaatctgacagtgaggtaataaaaatttaaaaactagcaaaataatgaatgctgcaattataacctgtaaaggtgctaagtttgaagtagctgccgttgaagtcattacttggagaatacaactaggagtactggatattgttatgagatttgcatagtgagaaggggggggggggtgttaactttcaaggccaattttttggggtcaaagctgcaacagctcttggggtgaaaggtattagaggacatgactgaggagctggtagtttcggaagatctatacgacagaggagcctattcttgcttggccgagagaagccattatatgatagggtgtactttagagagtaaagtgtaattagtaagttatagtaactgttgatgagaaaacagagttaattcttatgtgttcatgatttgttattcatgtgcttgtattttgtaaaaatctcaaccatttgatttttccatcaacaatcataaacctgatactttattcatccaaattcaccatgggtgggggtgtatgcaaatgaatttactgtgattgctgccactgagggctggtatctttactctaactttacttataaagacaacgataaattctctagtccagcaatatgatttagctcttttatttgacatttcagaattcagatctgaattatttgtttataaagtaggtgctaaccactcttttgtttcctggaaaatgaagtgtgcttttccggtgactgcttttgtgttacactgttactacttactagacgtggctccaattcacataaagctagtttgctcaaaattttacc

SEQ ID NO: 4382 - DNA, 734 bp, Glycine max
  Clone ID: PAT_MRT3847_103963C.1
ccacgcgtccgaattgacgttctgagagaatgagaggtggaccacaaaagacacacgttgactagtcttcaaaactacagtatatgtacatccgcggctactcgtactgtacctgagtgagagagcgcaatgtttggacttacgtcttacagtatttttgcctttacctcgttttttggtttttatttttaacttttcagccgttgcccactcgcccactctcatggccaccgatcaaatcaccgcgttggcgcccccggagagaggcgccggaggcaaactccgcaatctgccgccgagaaagccgcctcctagcccttacgcgcgtccgccggaggccacgcgccgccgttggatttcgaagcttgtcgatcctgcctaccgcctcatcaccggcggagccactcgtattctcccctcatttttctctgccaccgcagccgcgcctcctccctctcttctcccttgccctacctctgccgccggagatcaagataaatggcagattgctgaccgtcatcaagattatttgcgcagaagtgatatacatcttttggcatccaagtcatctgaaatggctagtactgatgacatcagtggtaaactgaaaagcagttcagacttggttatgtccagacaagataaacaagtagataaatctgataaaaatgggctttctgatattgagcagctggtgcaagggaagaaattctctagagatgaatttgatcgtt

SEQ ID NO: 4383 - DNA, 402 bp, Glycine max
  Clone ID: PAT_MRT3847_103964C.1
cccactcgtccgcccacgcgtccgtcgagtagaccacagaagggatccctatacaatcaagctttgagttaacttgagccttccacattgtcttatcttcctctcttccaaattgtcttctttgttccatggaaaatgttccaagtgaatcatcaactccaagtgcttcaatcaattgatcaacccaaataaagtacccacaatatccaacttcatcctgaaaagccccaaatagaaaccctaaatcaaaacccccaatgtgaaatcaaaaccctaaatcaataaatgtgaaatatacataccttattaattgaacaagtgaaaaacgcccttcctctgttaatatttgttccagcaacacgcctaacagcccttctaccacaaccacaaaaaagaacaact

SEQ ID NO: 4384 - DNA, 471 bp, Glycine max
  Clone ID: PAT_MRT3847_103965C.1
ccgggaaaatggccatttactcatgaagtttcaatgctttgacaagacttcatttatccaatttagagtgcaagcagctcatgtgcccaaatcaagtaccttatttactgtttggagaatgccatatggaatataagttccaatcaagaagagcagatggtttggcttattgattttcaagggtggagcacagcatgcttatcgttgaagatcgtccgagatactgctcaaatcctgcaggctcattaccctgagaggttgggccttgcaatcttttacaatccaccaaaagtgtttgagtcattttggacggtatgaaatcacaatatctcctgtcttcatcattgtctccttttcattgggaaggaagtgggaggattttgtgagatgagagacttgtatatgtaatgatattggcttactaatgttgtctgatattgattatgaatggatagggaaaaagtttgtctc

SEQ ID NO: 4385 - DNA, 447 bp, Glycine max
  Clone ID: PAT_MRT3847_103966C.1
aaaggagagacccccgcggggaccgggccggaaaacccggggcgacccacgcggccggataagtaaagccaccacacacaacaagaggggggaaaaaaagagagcggcaccgcacacaaccaaccacgaacaacaccaaaacgcgacagaccaacaaactccgccacgaaccgcacagacaacaacacgcagccccataccccacatggccagaaccgcaacaacgaggcccgggaagaccagcggccaaccgaggaggaaggaggccatggtataagcgcacgaggccaagcagacgcgcggcggagacgcggacaaagagggcacaaacaatccaacacaagcacatacagacaggaacgagcaggcgacggccaagaaggcaacatggaaggcacaggcgaaggaccacaaccatgcgacaccaacggaagaaaccgaccgggc

SEQ ID NO: 4386 - DNA, 180 bp, Glycine max
  Clone ID: PAT_MRT3847_103967C.1
aagttggaaaccctccactcctagctactacaccagcgcgtgccttcactctctcctcccttttcaaattcgctttcacaccttcaacttcaagctcaactcgaagccactccacagagagaaccaagaacagaaaagctgagaactttggcacaaaaccaacaaggccaccttcaaatc

SEQ ID NO: 4387 - DNA, 186 bp, Glycine max
  Clone ID: PAT_MRT3847_103968C.1
cttacgcgtggggtaattgagttcgaaggataagatggatctaatcttttagctgtttcaaggtttttgtgttcttattgcaatggttctatggtgtcttcactttgcgatgttcgtatcaaatgatgctatttgctttatcaggtgttcagcacaacgaaaaaccaccaaatcacccttaaaact

SEQ ID NO: 4388 - DNA, 475 bp, Glycine max
  Clone ID: PAT_MRT3847_103969C.1
caaatttggatacggacatgcgacctggcgatgaagcgcggtcaaaagatgaagagcaggatagtgctcatttggccatctgtggatggcatatctgccttccctactcaccatcactccagggctgtgagacaggcccgtgttgtttatccggcttgaacataggcccgaatagagagaatggtgcacctccaatcataggaccatgatgttgatcttacattccctacttctctggccgacctatcacttttagagagggaaagcgctcatgtgctgctatagggctacgatcgacggattcagcgctaccacctttccactgaatgttgcgacttggagggcccatgtgtgatagatcggctatacagcacaagactttcaacgttgggggcttttatccctgagggggatctaagcacagatcactactacgacacattggatgccttcctatatgtactgatagacactg

SEQ ID NO: 4389 - DNA, 479 bp, Glycine max
  Clone ID: PAT_MRT3847_10396C.1
gtgttaataaaatgttgatctagcatttacaggcccattttatctgccaacaggtgtggccaatataaccgttaaataaataaacaaatactcatcagtaaaaaataaaggtaagaaaatcccggatcccgtgtattgagcaaagctcggtaaattgttagtatttccttctccatgacgtccacttgagcttaagctggtaccacaaaggaggtattcccagcacccctcttgttagctttgagtcaaacacatcaaattggacctttcttagggaatccaagagaacctgagcaggcactgctggaaggagcactggaagagcctcaggaggtacaccttcggttaacttccgggccttctctaagtgtgcattggctactgatgccatttcataaactgcttcacaaaggccttcgcgagaatccacccatctctcttctccacctccctgcttaactattaacccatgcttggat

SEQ ID NO: 4390 - DNA, 864 bp, Glycine max
  Clone ID: PAT_MRT3847_103970C.1
gcaaccttaagcattcaaaagatgagatgccccctcctgcttctcttctaggcaaaaaaggccatcacatgggtgatttcattcctccagaagaacttgaaaagttcttggctacctgtaatgatgctgcagcgcagaaagctgctatggaggccgcagagagggctaagattcaggctgataatgtaggccacaggctcctgtcaaaaatgggttggaaagaaggtgagggtctgggtggatccaggaagggtattgcggatcctatcatggccggtaatgttaagaagaataacctgggggttggggctcaggaacctggagaggtgagtgctgaggatgacatatatgagcagtacaaaaagcggatgatgcttggctaccgttacagacccaatcccctgaacaatcctcgcaaggcttattactgaacttgacattgggtgctttgtgcaactcttcaggaaaagttaacttttacaaagtgggatgaactggtgtgttgatagtagggtttttattgtgtgctgcagtgcttgtagtcttttgaaactaagatttgggggagaaaagagggggaaggggtaatgttcacttcaatcgcatttttatccgccaaagaataatgggtttttggttatttttacttgtcagagcttttggaacatgttttttgtatcgcaagcatattatgaagtggtacagggatattatggtgtatatggtttgtttaatccgggaaacctagtcttggatattgataataaatggggaacttggctttattgtttgaagattaaaaaaaaaaaaaagggcgcattaagatgttttatcaaatgtaatacaagatgataaataaaaaaa

SEQ ID NO: 4391 - DNA, 1803 bp, Glycine max
  Clone ID: PAT_MRT3847_103971C.1
cccacgcgtccggaaaagaacagaataggtgttgtggtggagtaagaatcgaattcgaaggaagagaggtggtagggtttgtgatatagcgatgagtgagagtaacgggaacagcaggaggcgaaatgttgaagatcaagatctgggactgtacttcttggaggcgtgcaggggtagggagatgaaagaggaagaggaagaggaagaggcacccagggagctcaacaccattaacagctctggtggtttcgtcgtggtttccacggacaagttgtcggtaaagtacaccagcgtcaaccttcacggccacgacgtcggtgtcattcaggccaacaagcctgctcctaccaagcgcctcatgtactatttcgagattcatgtcaaggatgccggcgttaagggccagatagccattggattcacctccgagaccttcaagatgcaaagacaaccagcgtgggaggccaatagctgctgcgatcacggcgatgatggtctgctctaccgtggacatggcaaggggggagagccgtttggcccaacctatacatccggagacgtagttggtgccggaattaactatgctgcccaggaattttttttcactaagaatggccatgttgtcggctctgtttacaaagacatgaaaggccccctttttccaaccgttgctgttcacagccaaaacgaagaggtgcatgtcaactttgggcagaaaccatttacttttgacctaaaggaatttgaaacacaagaaagaatgaagcagcaactgaaaatagaagaaatttctgtgccaccaaatgtcagttacggaattgtccgctcctacctgctacactatggctatgaagatacattgaattcatttgatgtggctagtaaaagtactgttcctcctatatacatagctcaagaaagtggaattgatgagcaggaaataacatatgccttgaatcatagaaagactttacgacagctaatcaggaatggggacattgatgttgcatttggtaaattacgtgaatggtatccacagattgttgaggacaatacatcagctacatgttttctgcttcattgtcaaaaatttatcgaattagttcgggttggagcacttgaagaggctgtcaaatatggaaggatggaattgtcaagtttttatgacttgcctgtgtttaaggatttagttcaggactgtgttgctttgctggcatatgaacggcctctggaatcctccgtaggttatcttctaaaagactcgcagcgtgaagttgtagctgacacagtaaatgccatgatattgtccgcaaatcctaatatgaaagattcaaaacattgcttgcactcctatcttgagaggttacttagacagcttactgcttgctgcttagagaggcgatccctgaatggagagcagggagaagctttccaacttcagagagtgcttagcagtagtagaagaggctagtgctaggtgatatgtctattgatcttcttacgccgctgtttatattgccccaggatttgtaacattgccaagtgcaaaattgatcttagcgtctcgtatatactgtagagtccccgtatatttacttgatgcatgcttattcatttctttgtcaagaagggggagagggtgtctctacattcaagtttgtaacctcgtcatcattaaaacaatagaaatgaaaaaatgaaccaagcaatagtgtaaatgactttgtgccgttagcctgtcctgaatttgattattgtgaatttgtgattcaatgaaataatgtggaaatgatagttacatct

SEQ ID NO: 4392 - DNA, 696 bp, Glycine max
  unsure (1)..(696): unsure at all n locations
  Clone ID: PAT_MRT3847_103972C.1
cccgcgtccgtagcgacggggcctagcccttaataacaggagagggtgatggctgtaatatgaagagaagaaaagaaaaggtgttgttgtggagtaggaatttgaaagaatcgaattcgaaggaatagaggtgatagggtttgtgattctgatatagcgatgagtgagagtaacgggaacagcaggaggcgaaatgttgaagatcaagatctgggactgtacttcttggaggcgtgtagggagatgaaagagaaagaggaagaggaagaagaagaagaggaggaggaggcacccagggagctcaacaccattaacagctctggtggtttcgtggtggtgtccacggacaagttgtcggtaaagtacaccagcgtcaaccttcacggccacgacgtcggtgtcattcaggccaacaagcctgctcctaccaagcgcctcatgtattatttcgagattcatgtcaaggatgccggcgttaagggccagatagcaattggattcacctgcgagaccttcaagatgcgaagacaaccagggtgggaggccaatagctgcggctatcacggcgatgatggtctgctctacgtggacatgcaagggggaggcgcctcctatctcgaacgagtgtcggatacttgctgcagattttactaatgcagtgtgttgtacnactaagcccttcactgtgtcacaaca

SEQ ID NO: 4393 - DNA, 622 bp, Glycine max
  Clone ID: PAT_MRT3847_103973C.1
caagtttttatgacttgcctgtgtttaaggatttagttcaggactgtgttgctttgctggcatatgaacggcttctggaatcctccgtaggttatcttctaaaagactctcagcgtgaagttgtagctgacacagtaaatgccatgatattgtccacaaatcttaatatgaaagattcaaaacattgtttgcactcttatcttgagaggttacttagacagcttactgcttgctgcttagtgaggcgatccctgaatggagagcagggagaagctttccaacttcagagagtgcttagcagtagtagaagaggctagtgctagatgatatgtgtatcgatcttcttatgctactgttcatatgtctattgatttcttacgccgctgttcatagtgccccaggatttgtaacattgccaagtgcaaaattgatcttagcgtctctcgtatactgtagagtccccctatatttacttgatgcatgcttattcatttcctgtcaagatgggggagaggtgtctctacattcaagtttgtaacctcgtcatcattaaaacaatggaaatggaaaaatgaaccaagcaatgatttcaagttaaagggaggggaggagaggaggggaa

SEQ ID NO: 4394 - DNA, 551 bp, Glycine max
  unsure (1)..(551): unsure at all n locations
  Clone ID: PAT_MRT3847_103974C.1
tgtagcagtaccgcctgcttgggggggggggggggtgggtgtcatcccaaatggccctggttagcgacgtgtttccgaccatgtcctaaggggagtagtgggactgagtaacagcggcgtaaataagagattagtggctaggcgttaaagtgtaagattaagactactaagacctgtaaaagtaccggggggaagggtaaacgacgtacccgggccaagcgttgcacctggttaaaggtttggagaactaccaggggtaaggacgcccctagcttaggggttgggcgaactgccaggttgtggtaggccttgtggttatgtattataattccccctgctggtataggggcccggtgtaagtgggcccctggtttaggtattagttgttgtagtcgtttaagtggtgccggggcggcttgtgccagtagtgagtgttgtaacggtaggcgtttagttggtaacgggtgtactggtggtagtaataagggttaacccgctaggtgtagtttacgtagtgcctgggatgctatgncacgtgccaaggggtgtgt

SEQ ID NO: 4395 - DNA, 369 bp, Glycine max
  Clone ID: PAT_MRT3847_103975C.1
gtgtacaagtgcaataaaatttcaccaaaaaacacataaccaacccccataaacatcatgttttattttttctccccctcccccccatccccaaacatcctgatagcacacaaaaaaaaacaagccccctcccccccttcctccccttttcaaaaatttatttaaaacaaaaaaaacaaaaaaaaattcctcttctttttttaacaaaaactaagcctatcaaccccaatgttacttttcaattttccactcctccttccaactccccaatatattttcaactacccctcgttaacctacacacacctccccctttgcaatgtttttttatcaaaaatccaaccatcactctgactctaacttttcttt

SEQ ID NO: 4396 - DNA, 424 bp, Glycine max
  Clone ID: PAT_MRT3847_103976C.1
gcaccaggttttttttttttttttttttttttaggctaaaaggccatcgaacatgtattattatttgaatataaacgtacacaattacaaactctaaacgagtttttttttttttgttgttgttgttgttacaaactccacaagtttgtttccaaaaaaaaaaaaaaaaaaaaaaaaaaaaaaaaaaaaaaaaaaaaaaaaaaaaaaaaaaaaaaaaaacttaaggggggccccgggccccaattcgccttatattaattggtttaaccccccctcactacccctgttttaaaaacgtgagaactgaaaaaaccctaagtttccccaattaagtcggttagcaccatatccccctttcgccctttggcgtattagcgaaaaagcccacgacggtccccttgcccaccattgcaacagtcttaat

SEQ ID NO: 4397 - DNA, 261 bp, Glycine max
  unsure (1)..(261): unsure at all n locations
  Clone ID: PAT_MRT3847_103977C.1
cgccagagacagaaaggcngaacaagggcacgcaagaaaagagaaaaaagagaacagcgcgcgacccaaaaccgaagggagaaaccccccaaaggagagcgaagaaaaggagcggaagcggcacagagcgagcaggcgaagacgagcgaggccaaaaagagcaaggaaggaaagaacgccgccaccacggaagacacccgagaaagcaacagcaccaggggcagaaagaagaagcaaaaaaaagagggggggggccagcac

SEQ ID NO: 4398 - DNA, 272 bp, Glycine max
  Clone ID: PAT_MRT3847_103978C.1
gactctcaaaagtcaaacctcatcttctggcttctgaaatgcaaattttttaaccaaattagctctctgattcaccatacacctgtctgttcaccccttctctttctcatcccctgattcctcattttctctttcttccctcaccaaccaccatccgcctctttttcatgactttgatgccctctaaattcactctgctaaaaaattggattatggctgaccctctcgtatatattttaaccctttgagggttgacgatcctatttctttgc

SEQ ID NO: 4399 - DNA, 422 bp, Glycine max
  Clone ID: PAT_MRT3847_103979C.1
ggggggttttttttttttttttttttttttttttttttttttttttttttttttttttttaaatggcaacaagggcccatgggattgattccctatccaaagttaaaaaaagatcaacaagatacaaattccctcacatacataaaaaaaatttggggggggggggggacacaaatacccttattaaacaagtccaaaattaaattagtaaaaaaaatgacaaaggacagagaggataaccccaaatccataacttcaatcaaaaacaacaatccagggcacagaaacagcacaatccagcacaacatcccttccaaaagccatcacccctaaaaaaggttttgattggaacattttgttgggaaggaacatcatcctttgggggataacccacagggggggggggagctgctgggttgctc

SEQ ID NO: 4400 - DNA, 1773 bp, Glycine max
  Clone ID: PAT_MRT3847_10397C.1
ccggtccggaatttccggaattcccccacgcgtccgccgcgtccgttttctttctcctttcttccatcttcttcccttttcacgtcattatcctaaaaacttgcagattttcacatcccaaacaacatgaagggaaggttcatgtttctgtcggtgctcctttgtgccacttttcatgtctccttctctattatcgacggtttagttgccaacggcaactttgagttgggtccaaagccctccgccctaaaaggaacagtggtggtgggcgggagccactcgatcccagaatgggagatctccggctttgtggagtacataaaatccggccaaaagcaaggggacatgttgctcgtcgtcccagagggtgcctacgcggtgcgcctagggaacgaggcctccatcaagcagagaatcaaggtgatcaagggcatgtactactccatcaccttcatggtggctcgcacgtgtgcacaagaggagaggctcaacatttccgtcactcctgattggggtgtgattcctattcagactttgtacacgagcagtggttgggatcccattgcgttcgggtttaaggcagagagtgaaacggtggagatgctgattcataaccctggaaaagaggaggatcccgcgtgtggcccgcttgttgattccgttgctctcaggactctctaccctcccaaagctactaaccagaatatactaaagaatggtggatttgaagaaggaccctatgtgttccccaactcatcttggggagtgatcatccccccaaacattgaggatgaccactctcccctcccagggtggatggtggagtccctaaaggcagtgaagtacatagactcaggccacttctcagtacctcaaggcaagagagcagtggagctaatagcaggcaaagagagtgccattgcccaagttgctagaaccatccctggcaaaacctatgtgctctcattctctgttggggatgctagcaactcatgtgaagggtccatgattgtggaagcctttgcaggcaaagacaccatcaaggtgccctatgagtccaaaggcaatggagggttcaagcgtgctgcactcaagtttgtggcggttacccctagaacaagagtcatgttccttagcacattctacaccatgagaagtgatgacttctcttcactctgtgggcctgtgattgatgatgtcaagttggtgagcctgcgtaaaccatgatgctaactagggtgtgaggctaatcaatcgaagtattatatatatatatatatatatatatatatatatatatatatatatatatatatatatatatatatatatatatatatatgggttcagagctagcctttgattttatatagttaggagaataattaagaatgtttcttaataatttctgtctttttttctcaagaggcctgagaggtaatgagtttgattttcattttaatatgagaaaaaaaaaagtcttagtataacagaagatcatctaatatatagacgtaaggctatattgataaagaacaaggctgtatcaacggcggttttggagaccatgattggtgaacaagctgtttcccctgacttaaaacgcagtttggcttttccattgccaaagggaattaaccccggccttaaagttttaaaaattaaaaggatccaccttacccttttccaaaaatcctggttttcccccttccttcctggcgcctggcaaggaatttctactggtttaattaaaaaaaaaaattaggttcggtt

SEQ ID NO: 4401 - DNA, 179 bp, Glycine max
  Clone ID: PAT_MRT3847_103980C.1
gggttgcttcaatggccttaatgaggccgaacctgttaataaaatcaaccgtcccggttgtaatgcttgtggtgttggttttttacggttggataatggcggttttaataagtccggcctttaaccttaaggccaaatcttcctattttttgaaccgctcccccaacttcctttaaggt

SEQ ID NO: 4402 - DNA, 1221 bp, Glycine max
  Clone ID: PAT_MRT3847_103981C.1
aaaataaatgaagagaaaaaggagggtaaggaggtgacaaaagaaaaagactaaagagcaaaagtaccttattttagctgggcatgattctaaactgatccgaaaccaacgaaaaaaagcggaagatcatgcaaacttgcacttaaaagctggtttttgcctcattctcttccttctgttagtccacgcttcatgctattgcttcctatctctttctcatgaccccttcatggagtcctcgcacaccaacaccactttgctcaccaatctactagtcttcaacaacaccctccaaccagagttaatgaggagtgtgcatgtgtaccgccgaggggatggagagaaaagggaagttgagagagagtttgtgttttcagagagcggctcctatggggaaatgcaggctaccccaattcctggattggtaaaatctcgtgtttctgaagtgtgtgaagggcaccgaaatggagtgtggctttgtgtctttgcgttccatgccgatcacactcctcaattttgccgcattccaccggttttgttggtcacaagaaacccaaagcttaagatgattccaaacttgcttgatgatctccatgtgatatacaagttggaccggaaggaggaagacagtgatatagcacaagactatacaggggaagaaaggcaaggaaacagcaacaattgccaaccatcatggaaagtctttcctgttcttgatcaggatctcaattgtcttccttatgaagacgacgagtctgagtcactggacaatgagacagatgttgaaagctcaccaggttcagagtcaatgctctcagttatctaacagacataacctatttaacaataaatgataaacacagtttgttctgcagcttagctactatatggacatattcaatcttttggtgaaacctatctgttacaatatctcccaagttttgactgtgatgactatattgttgttgtaacttaattctacagttctgaatgtagaaaagttctgaaatgctaatcaaatacaggaatcctctttgatgactgacacaaaaatggaacttcttttttaggttttaaaacttctgattattccctctttttaaaggattgatattattaactccaatcctgtataccatgttgttctcaattttgaatgttatcaattattatcctttttattccagcagttcagtcttagcagtatacaatttatttatt

SEQ ID NO: 4403 - DNA, 200 bp, Glycine max
  Clone ID: PAT_MRT3847_103982C.1
gacatcaaaagtcgttggcttttttggtagcaaacttatataacgcgccgggcccgtatatttaggaagtactctaacaaagaccatgtttaaacaaaacctaaaggaaatatcaaagttaaaaacgcattaacggatgaggagagtctaaatggcttaagagaaaggcgcggactttcaagggctatgcgtcttgtttg

SEQ ID NO: 4404 - DNA, 498 bp, Glycine max
  Clone ID: PAT_MRT3847_103983C.1
gagaaccttcacatccataaaaggcatatatggtatcacagaaggaaccgagagggaagcaaaactaaaattggtctcagtcacatatgtgctttaccaattctttctcccattccttttgcttcaattctttgtgcctactactaaggctcggggtatagctcggttggattgaggaggatgcaagagttgttgtaaatcccttaatattcattttcgatttccacgaataaaatatactatttgtgcccacttcttgttccatctcgtcacattcatccaacctattttccaattcaagatgactcaacaaccagactttagttggatggttcccattgaagtgatgctgggctcactctaccacggacaagtccaagcctgcagcatctcaagcgtcacagacgagcttcgaggcccaaacaaagcagctttcaagccaaaggaagtctccataggacccttacacagagcaaccacgaggcacgtgcaactaat

SEQ ID NO: 4405 - DNA, 242 bp, Glycine max
  Clone ID: PAT_MRT3847_103984C.1
ctctagccgagagacgctcgagtgcgccgaggccttgtcgttgggaagaattgttgcgcctgggctcttattcagggcagctgatgtatgtctgtttcctgccttcgccttttctttctgcctccttccgtttgttatacttatcattcttccttccttaatccgggggggggtggcttttgcctttcctctgtttgttcgatgttgcgcgtgtgtcatacggcttttttttcgtgtttgcc

SEQ ID NO: 4406 - DNA, 489 bp, Glycine max
  Clone ID: PAT_MRT3847_103985C.1
aattcggctcgagaataaattcaagcatataatgagggagctccagggggctataattattggctccgctttccaaactttacttggatatactggacttatgtggctggtagtaaggctgatcaatcctgtattatatccccaactattgctgcagttggactttcattctacagttatggcttcccattagttggtacatgtattgagatcggtgcagtacaaatattagtggttattggtttttctctttatcttcgtaagatatctgttcttggacatcgcatttttctaatatatgcagttcctctgggtctggcaattacatgggcatttgctttcttgctgactgaagcaggagtttacagctacaaagggtgtgatgtaaatatacctgcctcaaatatggtttcagagcactgcagaaagcatttttcaaggatgaggcactgtcgggttgtacttttcaagcattgaaatcctctacat

SEQ ID NO: 4407 - DNA, 289 bp, Glycine max
  Clone ID: PAT_MRT3847_103986C.1
ggcagagctcagaaaactcaccaccctcaaaactattgatgaaggagaaagtagcaagctgcagaggacgttgtcgatgccgtcgacaccaacaaccccgatgactgcgacgagctcaacgagaccgggatcgatccgtaaagctgacaacgtgtggaggatcgtcttccatactgggaacgactccgccacaaagaccatcggtgctcagatgttggacaaacctcttcccagcactcccactgactatgagtggctgcgcagagcggagaccacaagcatgcaccgt

SEQ ID NO: 4408 - DNA, 652 bp, Glycine max
  unsure (1)..(652): unsure at all n locations
  Clone ID: PAT_MRT3847_103987C.1
catatacctactagaaaggtcttgtactcctgctgtgctacattagcatgggtgcatgctctcttgttcataaacaccttttactaaccaagctgatgttactaacataacacttaaaccaaccactattgcatctttattcgcttaattaataagatcctggcctatttgttgtgcttttcttacatgaacagtggaggaatgaatacacacacattagaggattaaataaatggattgtttattgcttgattgtgatcacattcggcataattctaaataagggggtgtaaaaaatagttagaactttacagaaccataggaattattgtaactagcagtatctaattggtagaaatgaaccactactgttaaacatggtgaatcatacgtacgtgcagtactatcagagaatctgatctagatcttgctgtactactgtgaaagccaactgacatgaatcagaacttgtgtgagcccactttaatgagactacctctactaggcagactaatacacagtgttcatggtggtaatatatacggatactatgtcgcagagcgaaataaattccatatactgtgccattccatgctctatgggcaaacaatacttnctaggactagagaagggtcttggaagttctggtgag

SEQ ID NO: 4409 - DNA, 713 bp, Glycine max
  Clone ID: PAT_MRT3847_103988C.1
gtgaaatgcgtagagatcggaaagagagcttcaggtcagagagagtgagagacggcaaagacggaggagaggtcgcaaacgcaaaaatggtgaagtttctgaaaccaaacaaggccgtcattgtccttcagggacgctacgccggcaagaaagccgtgatcgttcgaaccttcgacgaaggaactcgcgagcgcccctacggccactgtttggtggcggggataaagaagtaccctgcgaaggtgatcaagaaggactcggcgaagaagacggcgaagaagtcgcgcgtgaaggcgttcgtgaagctcgtcaactaccagcacctcatgcccacgcgctacacgcttgacgtggacttgaaggacgcggttaaccccgacgttctcaacgcgaaggataagaaggtcactgctctcaaggagaccaagaagcgcctcgaggagaggttcaaaaccgggaagaaccggtggttcttcaccaagctcaggttctgagcggtaatcttatcgagttttgttattcgaatgcttttggatcttgctttaattgatactttataatgctgtgttgagattagattttggaatttttggttaaattttggtcatattggatgattaaggtggtttattgagatgatatgataggttaatgttgtttaaaattggttgctgaattggagcgattatagattaagcgtgtttgtgattgtg

SEQ ID NO: 4410 - DNA, 283 bp, Glycine max
  Clone ID: PAT_MRT3847_103989C.1
tctagagcggccgcccttttttttttttttttttcagcgttctgctaaaatcaccttaactaaaaaccatgcggatcaggaataatttttactaacgctattccaaacccacactaaaagaaagggagggcgggagaacacatacaactcacgggtgctacaaatgaggaaagatgtatgtgcccttctcacacaattgacctgcacctatcagaaccttgttagccgtaaagcggtaggatttgaaaggacaatatgaaagggcatgggctgcgcggcactt

SEQ ID NO: 4411 - DNA, 1559 bp, Glycine max
  Clone ID: PAT_MRT3847_10398C.1
aggaataacaattcacccaatattggaaattatagtactaaagttcacacgcagttttagttgctccgcgattccaattacaactgaatcaacactttgtttatatgtaaaatcctacggctgccaaataaacaaataaaactggcgcacgatcacgaagacctccattacatttagagagattaaaatatgattttcatcctctaacatgtaatgtagctttgctcctgcattttaaagaaaacacaaaatgcaaaaacttacaataaaacaatttctgttaacaaacatgtcaagagtattaatgaaatgttgctaactatagtaaggaacaatacaatggacgatgctagctaactctagaaaacaaccgtgtcaagcatcattcccaaagtctgaacaatgtttgatgacatcaaattggaaacatgctcttcaaggtgcttcttagcatcttgcctccccacatttgcaattgcaagtttttctggtggcagttcatcttcctcctgcactgccttgttgtacttggctgctaaacttagcatctcctgaacagtctgttcattagttttagaatgtgaatcaaaatgcctgagtgtcaaaccatcagtccacttctttttgtgaaggttaagcaacatcttctcttcaagttcattctttctgtaattaattgctatggagtaataatgtctattcaagccatggatcagagcttggatagatggcttgtttagatggcccaggttggaagttgtctgtcgtggttcctgacctagcatcatagtttgtggattaatcagccggaaagcatcaattaccactttgcctttcacactctgaatggggtccaccaccacagccactgcccgttgatttaaagcctcaaaactctgttgcgtattaatgtccactccagaaagccaacacccaaatccaggatgcgagtgataccaccccacaaccatctccggccttccagtttgcttcaacatatcaagcatattagtctgaaaaacatgatcaacagcttcaacgctaacaccggtcccactctgaggcatcgcaaacacatccacaacgcgaacggtgtactcatccacgaactcccccaacatcagacccatcacttccatgggtaccccagctcttccgtgtttgagcattttgagaagggcgagggaggagatgtagacctgctcggaggaatcgagggtgggggaatccggtgggggatggcccagcgctccacctgcacccgcgaacatcctctgaagcctctccatgcccgacatcacaaaacctaatcttttgttttcttttgtttcacgaaaagaaaccggacgcgtgggaccggcccgacatgaaaacctaatttcagttttcttttgtttcacgaaaagaatgaagaaagattgtgtgctccctctgttctgttgtgctcttgttaatgttgcagggaactgggcagagaaagaacccatgcctcgcttatggctcccgtaaaaggttaaaaacaacgtggcagacgttgacctcgagccgccttccgccct

SEQ ID NO: 4412 - DNA, 472 bp, Glycine max
  Clone ID: PAT_MRT3847_103990C.1
caggacctggtcagagagcatcccagatccattaaagattggattcattgacttggagaaaagtacatttctcagggatcagctagaatctggacttgcctaactcacatttcattttttttgttgttgttgttgtttttataatttcaacttttattttagatgtaggggtacatgtgcagtcatcattctactgtaaggaagaggtttccctttatcatcaacttctaacggaacatgcacgctggtttgcagatcccttgcagtgactctacagctcccaggaatctgacgttcacaagctccgtctccaggcttctccatactgccgtgtgtcccatgaggctggcccatctggactgcaccagggagctcccttgatccttggctttctgagatgggatctcactatgttgcccaagctggtcttgaacttctggattcaaatgatttgattttgctgccttggact

SEQ ID NO: 4413 - DNA, 276 bp, Glycine max
  Clone ID: PAT_MRT3847_103991C.1
ggctcgaggtctcagccatgcctgactatgataatcttcacgcgagaacagccacacaggcaaagacactaagagatgcgttcgacgtgataagagtcggtgcgggcgggagtggccaaagggcatcgggcctggcccacgtcactggcctgcacggaatggctatcagagttgacgacgctgaccctgcagctctttacaacgcctattgttacctcttgttctacgtcaaccgagtcgtttgcgaacaccgcatctggtcatggacagggtgct

SEQ ID NO: 4414 - DNA, 676 bp, Glycine max
  Clone ID: PAT_MRT3847_103992C.1
actgaacactatcttgctctttaaaatattccagcatatagtattgatattaggagatattacaacaaaaacatattgatttaaaatgaaataaaatgagcactgccttatttactcattcatctgcttgtgtttcatgcaggaaagatatgtcacccattttaggaaactgcatctgctatacatgccagaatcatactaaagcatacatcaatcacctatttaatgttcatgaaatgctggcacagattctgttagaaatgtatgaatttcttcacttaaaattaatgaagaatgcttttacaaataactaatacttatattaataaagcatgcaagtattaatttatactgaattttgcagccataatacacaccactacttgacgttctttcatgtaataagagaatcaataaaggatggaaggtttgagaaatttagacagacattcatcgagagcaggcgtgcccatcaggaaagggaagctgtttgtgcttgaggtcatataagcttaggtgtattcatctgggttttaacttggatttctatgaagcgcgaaccaagtattgtacaaaaagacttcaattttagttgtgtaaactggttcgtttaaatgccaatagatacaatttatttgattgcaaaaaaaaaaaaaaaaaaaaaaataaaacagcg

SEQ ID NO: 4415 - DNA, 229 bp, Glycine max
  Clone ID: PAT_MRT3847_103993C.1
atgttagggtttttttttttcgttttctttttttttttaatattataggatgtacctaaaaacaaggaaaccaagggttctgatttgaaggaaaaaccaaaaatacgctatccaaccggaatccaaagaagcacgacttgaacaagatacaaacaacaccaaaccacccccctcaggtgtccccatggcacccaaacctgcacggaaacgaaatcgacgccaaatacac

SEQ ID NO: 4416 - DNA, 657 bp, Glycine max
  unsure (1)..(657): unsure at all n locations
  Clone ID: PAT_MRT3847_103994C.1
ctttggcaaaaccgcacctacgatcgcttaaagcttcatctcccaaaacagttttgtcaattaccaaacttccctttccctgaggacttccctgaataccccacaaagtttcagttcataagctaccttgaaagctatgcaaagcacttcaacatttccccacagttcaatgaaacagtgcagtctgcaaagtatgatgagacctttggcctctggagggtcaaaaccatcaggaagatcaagaagttaggagaagcctcttcaggttgttgtggtgctgttgagtgtgaagttgagtacatttgcaggtggcttgtcgtcgccaccggcgaaaactcggagaaagtggtgcctgagtttgaagggttgggagagtcttggtggccatgttatgcatgcttgtgactataaatctggggagggatatggtgggcaaaaagtgcttgttgttgggtgtggaaattcaggcatggaggtctcactggatctttgtaaccacaatgctaacccatcaatggtggttagaagctcagttcatgtgttgccaagagaagcttttgggaaatctacctttgagcttgctgtgatgttaatgaaacggnttcctctatggatggttgataagatattgctggttctggcacgtttgattttggg

SEQ ID NO: 4417 - DNA, 295 bp, Glycine max
  Clone ID: PAT_MRT3847_103995C.1
tcttcctgatacttctatatcgccagctgccacactatcatcttattttttatattttttagttttgttttttttcatttatttattatacttttttatctatttttttctttttctctatatttttttctttattcttattatttattttcttacacattttctacttgtaactctattttataccaatctttactattatctaaataatttatttaattaaatcctgaaatctattctaaatccctcattatacaaaaaaaaaagctctaccgctcatataaatccaatctta

SEQ ID NO: 4418 - DNA, 591 bp, Glycine max
  unsure (1)..(591): unsure at all n locations
  Clone ID: PAT_MRT3847_103996C.1
ngtaatcagcttcattaagacgangnnnctaagggccctttcactggtttaatttccaagtctccttctcttcaacagataagtactcctggatcagtctcatcttcaccaaattcagttaaagtggacaacttgccatctgtcaaaaaagaaaacatggatggttctggtgggactcgacgtttgatggtgaatgttattgagccacagtttaatcttcactctgaggatgcaaatggtagatttttgcttgctgctgtaagtggccgagttttagcccggtcatttcattcaatccttcatgttggttatgagatgattgagcaagtacttgctactaaagatgtacaaattaacgaataccaacctgaaatgacatggaaaagaatggaattctctgttatgttggaggatgtgcaggctcatgttgcaccaacagatgttgatccaggagctggattgcagtggcttccaaaaattctcaaaagctctccaaaaatattgcgtacaggtgctcttcttgaaagagtttttatgccttgtgatatgtactttcggtatacaaggcacaaagggggcactccagaactg

SEQ ID NO: 4419 - DNA, 397 bp, Glycine max
  Clone ID: PAT_MRT3847_103997C.1
tctgaatataccgatgaacacgcgatcataggctgccgcaccttaaaaccggaaacaaacgccttggttacttgatttcaagaatttctcacttccttcttacttctgagtgttcgatggcttaagggaaagaaaatcactctgtgagctggtcacagacttattgaatcatgctcttttccactcttaggtgatctgctgaacactctactatgggatataggactccgtgaaacgatttaaacttcttctgtctctttctcagttatatgtataattacacggtcgagactggtgaaatcggggattagtgctcccactctgctataggcgttaggacttcgtgggtagactttaggatttatcttccttctttcactctattcttctcactgat

SEQ ID NO: 4420 - DNA, 512 bp, Glycine max
  Clone ID: PAT_MRT3847_103998C.1
cccacgcgtccgtagttttggaaacagagggattgaggatgagcatgaaggtgagaaagttggaaacggaaatccaaaaacaatgcctccagcaagtgtaatgacgaggcttattttgatcatggtgtggaggaaacatatcagaaaccccaacacctactccagcctaatcggcctaacttggtcactcatttcattcaggtcttttccttcttctgacttcgagagctcgagctggagtattattattcaacattcttttctttttattttattgatcgtgtaggtggaacgtaaaaatgccagccataattgccaagtctatttcgatattgtcagatgcagggcttgggatggccatgtttagtcttggtaagtactgcatagagtatagacatacatcttccttcttgtctttgaaaatactacatactgctttaactgggaaaccataaattaattaattatataaagtgggaaggaattaacttgttctgacctttgttttgctt

SEQ ID NO: 4421 - DNA, 1018 bp, Glycine max
  Clone ID: PAT_MRT3847_103999C.1
aaagcttacgagacttttgcaatctctcaaatttaaaacaataaggtttcttagaagaccaatggatggatgtatctgccttagttgttcacatctttcgagatttaacttcttcaaaagatttaggtcctctacaaaatgtggcaagtcagtgagacttttacaccctcccaattctaatgaaggagtaagctttcttagacgacccgaggatgagggtagctgttttagtagttcacatcgtctcagatctaaaatttcaagctttagggcctgttcaaaatgtggtaactcgacaagactgttgcagcctcttaaattcagataggtaagatttctaggaaaaccaacggatggatggaaccgcttgagtcgttcacatctttcgagatttagccaataaagatttagggcctcaccaaaattgggcacctcgattagatatttgcagtaagagacattcaaacgtctcaaattgggtatcggctgtgtgctgtcccataaatgttggatgctactccaagaaagatccaactcaaaaagattgtgtggttgaaaacattgaggtagagagttaaagggatagcattgccaaataagatatcctaattcattggaaagataattcaggtttcctgaaaaaaaatccttcttcgtatatgtgcaaagctcctcttcctcatccccatacaaactatcatactcgggaagcttaagcaacttaaggtttttcatttttgatagagcatcaactctcattattgtattaaaaaacatccatgatttatcatcaacaactatggcttccaaattttttgcttccatattggtcgacataactttggagagatcttcacactcccagagtctactccactttcttggctctttaggtgatttttctcgaacaatacacttgcctaaatctctgagcaagctatgcatataaatcctcccatcaaaaatggttatgagtgatttatcaacaagaatttggagggccatttcaggattaaat

SEQ ID NO: 4422 - DNA, 255 bp, Glycine max
  Clone ID: PAT_MRT3847_10399C.1
ggaaggctgcccgccgcgtttcttaatatccggaacgtgctcggtgacaaatttgaaacgtaaacactacgggcacaaccttatatgttaccaatggcgaacaacgatggttcatagataacaaactgccctggagcttatcctattgatacatgcccccctttctttacaaatgctcgaaagcagattgcgccctgggccttaacagaacagtccctgcccttcacttgatccccacctttctgattgtagggg

SEQ ID NO: 4423 - DNA, 412 bp, Glycine max
  Clone ID: PAT_MRT3847_1039C.1
aacaacaacaagacatcctcgtactacaacaacaaccaatggaatccaaatccaaaattcaactctttttcctcacccttttcctcttcactctcaccctccatgcagaaactcttggaacttacatagttcagctacaccctcatggcataaccagcacttccttcacctccaggctcaaatggcacctttcattcatccaacaaaccatttcctctgacgaggacccttctttgcgccttctgtactcgtaccggtcggccatggacggtttcgcagctcagctaactgagtctgagcttgagtacttaaaaaacttgcctgatgttatctcaattaggcctgacagaaagctccagcttcagaccacttactcttacaagttcttggggctcaaccctgctagagaaaa

SEQ ID NO: 4424 - DNA, 500 bp, Glycine max
  Clone ID: PAT_MRT3847_103C.1
aattcggctcgagtacggctgcgagaagacgacagaagggcactattatatattaatgtattttatgaagggagtatataaatttcataggcttgcttgattgaataaaatttcatagggttgcttgattgaataaaatgtatggatgttataaattttttgggtatcgtgttcaatttttatagataaaaaatattaatgtagttttatcatgaattttaataatctttatctgcggtttttaatatacaaggggtctaaacgtgttgcatctgttgaaagtttgaaactgtgttgcgccacttaattaagtttctacagtgttaaaatttctccgcagtcggttgcacttgttcaggcttcagattctattaggaaataattatgagcctacttcatttattgcttaatcatttaaaggtaatctgacactgcgaactaaaattttggtctcctaatttatggttacacggcttactataatgatttaagaatattaa

SEQ ID NO: 4425 - DNA, 394 bp, Glycine max
  Clone ID: PAT_MRT3847_104000C.1
ggcggattcttctcgggaggagaacgttttcatggcgaaattggcggagcacgccgaccgttacgaggagatggttgagttcatggagaaggttgcaaagactgtggaggttgaggagttgacggtggaggacaggaatctcctctacgcggcttacaaaaacgcgatcgctgcgaggagggctttgccgacgaccacttcctctattgatcgtaaggaggagaccccgtgcgctgaggaccacttggccatggttgaggaaccctccggcacattggctgcgtacatccctgcgatctgtcgggtgagataataactccgatcatacagccttataccttccgcttcatctgcccccagctccaccttttaggttaagattgatggtgattac

SEQ ID NO: 4426 - DNA, 263 bp, Glycine max
  unsure (1)..(263): unsure at all n locations
  Clone ID: PAT_MRT3847_104001C.1
gggaggtgttcaatttggaagcaacagctaaggctttttccattgaggtgctctttttgggctcccgaaacagagaattagaaattcacacataggtcatgctcatagatagatactacatggtggggattggaaatagaaagaatgaaaagaggaacatgaacagggtctctgaatctaatccatttcctcttctcctcctctcgctttcgcctttctaatcaactttcatggccgnaaacgtgtcgtttgtcctctagaac

SEQ ID NO: 4427 - DNA, 341 bp, Glycine max
  Clone ID: PAT_MRT3847_104002C.1
cccacgcgtacggacgcatcagggcacttcacaagggttgctagaattagccaagctaggcggctatgacaccgttagcataatcctgcatgtacactgtcaataacaatgccaagcatattcgcacgccaaaggcacatagtgtgtacattcaatatccctcacaggcgacactaccgccttatccggcggaactcaggaagacgtcacgggagatggctaagaaacagaacagttcgtcatacctcgagtggttgtctgtactgcaccacatagtgtcggcatcaacttcagggatcatgcacccaacatgccaaatggcatgccaggtaatgatccat

SEQ ID NO: 4428 - DNA, 452 bp, Glycine max
  Clone ID: PAT_MRT3847_104003C.1
gcctttgagaatagagtgatcataagaagagagagtatatctggattctgcgaagaaagcagccggcaagctaagaagggagcgtaatgggcgaagcattgtttgaccttgaacaagttctcatgtccaagaaggaaatattgacacctcaggaggcggatattcttctatcatgcaaatctaaatctttgagagatttcactgctggtgcacttgctgcgggcacagctgcatgggctgcaacttggaaactcagtaaaccatttcgaatcaacctttcggcaggagctggtgctttctgtggactgtggatgttaagtagatccttgtattcttgtgcagatcagattcttacaatggatggtagtatattacaaaaggagttagcgaatataatggtgaccaagtaccagagtgatccttcgctgatgcagcttatatctaagcatttc

SEQ ID NO: 4429 - DNA, 375 bp, Glycine max
  Clone ID: PAT_MRT3847_104004C.1
accaggtggaaccttagggtagaagacgccgaaaaaaatggggaaaggagtggttacagtggtgtcttctggaagacccgcgaagacttcttccggaacttccggaagaaggtgttctggaaactttccggaagaaggattcttccgaaagtaaccaaaggtcatctagaagaacacttcttccggaaagcttccaaaacaccttattccggcaactttccggaagaagtagttcttccggaaaatttccggaataagggttcttccggatgacctttgagtgttccggaagaactttccagaagaatcacttcttccaaaaattttcaggaagaactactttttccggaagtttgttttttttgactatagggt

SEQ ID NO: 4430 - DNA, 360 bp, Glycine max
  Clone ID: PAT_MRT3847_104005C.1
gggtagagatgcttacaatatcaagctgacaagtccgttattcaaaccaccaaactgcgtaaatggaaacaccgacgggccatgcgataaaattcatggcgcggacgccgatatgctatttgcaggcctatatcttcgtgctgtgagcgtacgaggcataaaaggttcacttcctcctcatggagctgttcagtgtgatgagaatacaccagatggaaggaagcttacatctgcattttacaactactttgttgtcagactgttatgtggagcatcaattgcagaaactcaagtggaatggattgaatacaacaagggattgaagtggtgtgataaagaatcaagtgcatcaatcacctc

SEQ ID NO: 4431 - DNA, 294 bp, Glycine max
  unsure (1)..(294): unsure at all n locations
  Clone ID: PAT_MRT3847_104006C.1
caacacgcagcgaacgnaagcacgnaattcagcacgagccaccacgcnntacacaccananacacaananaacananggnaaccacaaacngaananacncaacnacnncacaacaaaacannaaccacanaaaannnaaancnnnnaacaaanaacacncaannaacanncncannnaaannnaaaaannncnnccncannnaacaaacaaanaaancnnnnaanntnncnnnncnncannnnanncnnnanannnnnnccnaaaaannccncaaacnanncanancannnna

SEQ ID NO: 4432 - DNA, 308 bp, Glycine max
  unsure (1)..(308): unsure at all n locations
  Clone ID: PAT_MRT3847_104007C.1
ctgtcacttctgtttccttcttctcttcgatcacttccacttctttctttccttcggtcacttccacttccttcttctcttcnggcactacaacttccttcttctcttctactatcacttccgcttccttcttctctgccgacactacaacttccttcttctctncngncactnccccttccttcttctctactgacactgctgnttcctncttctctnctgaaannacaanttccnccttctctgcagancactaccacttcctccttctntnctatgaatncaggttccttcttctntgctggaga

SEQ ID NO: 4433 - DNA, 753 bp, Glycine max
  unsure (1)..(753): unsure at all n locations
  Clone ID: PAT_MRT3847_104008C.1
caacttccataagaagaaactaaattatacaataatcgaaatccctcatgaccgctaggaccgaaccaagacggcgtgtcgtgcagtgcctgtctccgagaccaacgaaacgcagcacccgttgcatctctctcttaatcctctttctctttctttgaaagcaacaaccaaagaagaaactaaattatacaataatcgaaatccctctacacagaaccaaaaccctcattacatccgatcgatcaattttctccattttgcgaccaatttcccctctttccatcggattaaattcggaagaagaaaagcggaacccgcgaatcgatggatctcgggttcgaggcgaggattggaggggcgtggaggtggggcccgtgatgggattgaaatcggttggattgattggaagaagaagcactttcgcagtggtggtggtggtgatgagaagaagaaaagaaggaggggcaataatggaagtcgaattggggaaagtgaatctttctctcacttgaatttgggggcggctttctctctcgctcgctctttctttgttgtttctttttgttaactttttgtttgtggatcatggatggggtcgcacgtgcggnggaggagcaggctcagtcatcatcatcatcatcggacttgcctncggggtgggcgtccccgcggctttcgtgttctctccttgcaagcctaaggccgaagaaaaaagatgcttctgctgctgagaagaagccgcacagcaaccgt

SEQ ID NO: 4434 - DNA, 553 bp, Glycine max
  Clone ID: PAT_MRT3847_104009C.1
cccacttgtgttataaaaaaaaaaaaaaaaaaaaaaaaaaaaaaaaaaaaaaaaaaaaaaaaaaaaaaaaaaaaaaaaaaataaaaaaaaaaaaaaaaaataataaataaataaataaaaaaaaaaaataaaataataagaataaaaaaaaaaaaaaaaataaaaagggggattagtttttaaagaaactagttttatggctttgtattatgagtgaaaatattttttttataggtgattaaattaaatttttatgccgattttttaaaatcgtggagatggaaaaaaccagggttttgacaatttaattgtttttgaaaaaattctctttttggcattttggattaaaaaaaaaagggccgaacatatccgcttttcaaaaatttgacaaaatttaatgggaaatgggaccccccttttattggggtattaaatgggggggggggggtggtttacccaaatttagacctttaattttgtaaggcttttaatcccagattttttatttttttcctttttttttaaaaaaaattttaggggttttttccctgaa

SEQ ID NO: 4435 - DNA, 405 bp, Glycine max
  Clone ID: PAT_MRT3847_10400C.1
cttgtcttttttttttttttttttttttttttttttttttttttttttttttattttttttttttttttttttttattgtacagagccaaattccaggcttacaaaccggggaatccgaattaaaagatctcatgaagggtaacctaaagcaaattcaggggggggtgttttaaaaggtcataatggggaaaacctggggggtccccaaataaaatggcacgagacatatgcccattgtgccaagtggggaaagaacgaaaagggcctgaccgatggcccttaccaaaaggagcgcaaactgaatgggaaaggggaccccccttgtgcaggctgcttaaacgcggccgaggggggggtaacctccggcaggaacgctgcaatagccggggtcttaaagcccgtta

SEQ ID NO: 4436 - DNA, 332 bp, Glycine max
  Clone ID: PAT_MRT3847_104010C.1
atttggactacaaacattaaatataatatttggttttttgcttcctattaacagtgttcattgctggctgaagccatatcacaggtacatcaagaacttaaagccagagagaaatctcaagcccaggtgattatttaaatagaaaccaagtcatgcactgcatggcaatgttttttttaacaagggaccctatacattggtggttggagcaattagctcgatcatataggcccggtgtgcactggactgtactctctaaggttgtgttagtacactgacatttttgacaacaacaaaaatctttaatggtggcttttttggaacatattttc

SEQ ID NO: 4437 - DNA, 217 bp, Glycine max
  Clone ID: PAT_MRT3847_104011C.1
cggctcgagaagaaaaactagctgtctaggttgaaaagctgggaaaggattcactaattaactttgacgaaacaagggtgaacttaaaaataataggtgccgtctatcacttattattcataattgtatcatatgcagcatttaatgtaaaaatgaccaaggatgcacgtgacgaaaaaaacgtaatccagggtattaatatctattaagctcatgg

SEQ ID NO: 4438 - DNA, 257 bp, Glycine max
  Clone ID: PAT_MRT3847_104012C.1
aacactaccgatttgcttggttacaacctaaaactaccgatttgctgctacaaacgggggtatttggctctcataaactggcttggatgggcgcacagatgatactgacagtaaaaattcatgttaaacaaaattaattgcaacattatgctgattataaagtaacctatcattggttcccaaaaatcgtttggatcctgccatacccggttggccattattagtaaactagccttcaaacgggttttgtgtaaagg

SEQ ID NO: 4439 - DNA, 347 bp, Glycine max
  Clone ID: PAT_MRT3847_104013C.1
gaatgttggttggaaatttaagtataactaccgaatggacgggacgagcactgacagatgtcaactcgcgctgaacttttccttccgttcaatcgccgccatgctcatcctctccgtcacagtcacctcaaccgatcatgttctaaacgtctcgctctcaggacatctggagatgattcaacattctatagcttcaacattttgtgagtatagtctgcgcagatgtaaaatggacttgcctaaacgtgatacacatctgactgttgctgtgacgaatatacattgagagatctgcacaatgattataaactcatggtgccaacctctgttggaagctcttcattttc

SEQ ID NO: 4440 - DNA, 241 bp, Glycine max
  Clone ID: PAT_MRT3847_104014C.1
ctagcatgtcgcacatcacgctggaatcttgtgacaactgcaacaaatgcagacactcaagcaactcgcttcgtcaaacgcaacatcgcactacgaacaacccatcataggtggcgccatcccgtagatgactaatgagtaatagtgcactaatacgaggcggatgtctcatgtgcgtcgcttcgcagatctacggcagcacattcctactcatcctaaccgtgatcatcatcattggcat

SEQ ID NO: 4441 - DNA, 332 bp, Glycine max
  Clone ID: PAT_MRT3847_104015C.1
gtgcattattattgtgtttttttaacaacaaaatgcgcgtccgagcccaaccacgtaacaccttggttagacattgggctcaaaccagccggcgccttatccagaaggtgatttataacacgccgctataaaaaaaattgatgcaagaaattctcgtgtcgaccaaaaagtagggaacccacctgcacccctctctggatggccaccacaagctcccctggcttgggcagctcctccccttttggtctaaactgcctttggccaaggctaaaataaataaaatattcctagacattcctttctttttggctgaaggagtcccccctgggcct

SEQ ID NO: 4442 - DNA, 323 bp, Glycine max
  Clone ID: PAT_MRT3847_104016C.1
gtttaacactaagttgcaaggcagcggacttcgttccagggcttgatatcggcctcactgttgcggcggtgttggatttatcaaggctcggtacacaccaccagccctagaacatgcgctgatgtgtcttacctgtcctacactatatatcactcgtaagcatatgctgatcaagaacttgacatggttgtgaacgttaggcatgacctaatgacgaaatctagagagattgcattccattgtgctcatgctgccactgtcatgtacgcttaattcatgcatagtgatcggaatctgtggtgaatatggtgacagtttgggca

SEQ ID NO: 4443 - DNA, 409 bp, Glycine max
  Clone ID: PAT_MRT3847_104017C.1
ggcgagctcacgtctactcggccgcggccgctttttttttttttttttttttttgggggagaataaaacccaaaaatttgaatcttaagattttgaattaagatgtgatatcagattcacttatatgattgctcatacctccctcagatgcacaacaatttcgtggtgaagactgaaaaattgacaagaaccttaaggttttggacgtagcattcatccactggttaccctcatcaaaatatttgtgtcgtgtcatagcatagcagcttacaagaaatagaaggcaatgaatactttgcttttcatcgacatcctagttcaactctccattcatcaccgatggtcttatttgagcatagtttctggagatcaatgtaaccaatgatagtgtcctcgaaaacggcattgt

SEQ ID NO: 4444 - DNA, 489 bp, Glycine max
  Clone ID: PAT_MRT3847_104018C.1
tacggctgcgagaagacgacagaagggtgagcacagtctcattctagctcaaattatacttcaaaaggacattaaaagccatggctaaataagaagcttaaattcaacctatattttcggtttaaatacataagtttaaacatttaagttaaattttatgattaaccgatataatctaattagagatataaaatttaacctttttgggtaaaaaaactaatataatcgaattattatcgagtttggcatccaaatttataaacttctctctgtatccctttttatatgcatagaaaagctcagccttgatcagaatgaattgttcctatcaaagtcaacgcgagagtaaatacacatggatacatgtttattttatttgtctttaatatttaatgagaaaacattaataaaattataatttaaaaattttcaaataaaatttaatagtaacatctaaatgaaaccgcatatttaagaaacttaaaattt

SEQ ID NO: 4445 - DNA, 292 bp, Glycine max
  unsure (1)..(292): unsure at all n locations
  Clone ID: PAT_MRT3847_104019C.1
ggggcccacccaggcttgctcaaatacatcctttttcttaatatttctcttctcactctcacaattcaaactcttgcaccttgttttttattaaatgatccccaccaacactnctatcccaaccaataaatctcacttgttcaccacctatcaccaccaacatactacattcttcacttcacttttctaaagccataaaactctcacaaataattcccatcttcttttcaaatctcatctgtctcaaattcctccaaccccaaaccatacacctcaaatctaatctaccttt

SEQ ID NO: 4446 - DNA, 189 bp, Glycine max
  Clone ID: PAT_MRT3847_10401C.1
aacctcagttttcgtctacgcaccgctattatattgatatataatataacaatagtatttctttatatttcttcttttcgaggcaatttttctcggtgaaatagaaggatttgaaataatgcaaattgctgtatatcaacttggatgttgggtcataatcgttgccttagtgtagcgatccaaggaatt

SEQ ID NO: 4447 - DNA, 511 bp, Glycine max
  Clone ID: PAT_MRT3847_104020C.1
gcctatcgaccgaaactggagaatacctccccagattgctacttacgatcctgacactcggcgagctacgaatccccctacccaatgtacggcatgaacttcttcccttcacacccccaccggctggcccttggacgcttcaaggcagaatactccaaccgagttgaaatcctcattcttggatcccgacactctgtacataaacccgaaccctagtgtattctttgagcacccttactctagacacagctcatgtgccacccccgtaataccgcctaatcctcctgcaaccttctggacaactgctgggagtaccatcggctcagggaagaccaatactaattcttggggggcgcctgccttctcaaccacctggaggacccctttctttgggtccccctaaacttcttccggcgggaacaatattaaccgcaaccgtatggccacctccagcatgtggaccaactgagccattgggtacatggaacgcaccctcggatgaaacccaact

SEQ ID NO: 4448 - DNA, 547 bp, Glycine max
  unsure (1)..(547): unsure at all n locations
  Clone ID: PAT_MRT3847_104021C.1
ctcgagccgttgaaagcgtgagaatgccggtgaagaagtattacctgcgattactgcgacaagctattccaagacacaccagcagatcggaaacgacacgttcagggcattcaacaccaccaagccaaagctcgctggtacgattccttcaaacaacaacaaatccctccgattcccaatcgacccctttgctttcacttcgtcaacacgggattttgccgctacggcgactcttgcaaatatctccatcccgttcccaacaacaatgtccagcagccgccaatcgtaaccacaccgtcgccttcaccagcagcaaggggaggcaaatggagtttatggacctattcatcgaaagcactcttagtttttgtcaacatcttatctttttcatctttatttctaagttgaattttaatatatttttgtagaaaatatgtttaattaatcatgatacccttcgagtgaatgacatcttgtattcaactaagtttatagcacattttcactgtcaggttntacgttagtatctagagaagttatcgaacaa

SEQ ID NO: 4449 - DNA, 662 bp, Glycine max
  Clone ID: PAT_MRT3847_104022C.1
ctaagatatctctgatatatatagtttctgtgtctgatcccgtttttaattcgggttaagattgaaagcgtgagaatgccggtgaagaagtattactgcgattactgcgacaagctattccaagacacaccagcagatcggaaacgacacgttcagggcattcaacaccaccaagccaaagctcgctgggattttgccgctacggcgactcttgcaaatatctccatcccgttcccaacaacaatgtccagcagccgccaatcgtaaccacaccgtcgccttcaccagggagtgtggtaggagtgtcattcggcaatcttcccccctccctgcagcctccgcctgacggcgtatatctccaccttccctttctcgactggggatagatttgtaattctacccacttctcataactgcatctccgtgtctgtgttctgttcaatcatttcttaatttaaccttttagttcttctaattttcattgtgtggctggattctagtgatttcttatgacctagctccaccgtattatttggagttttcttatatctacccaacgcttaacttatgattaaatccaaaatctatcttattgtaatacagtatgataatagactgctgagtttgctttaacacatacatttataagcatttttcacctg

SEQ ID NO: 4450 - DNA, 514 bp, Glycine max
  unsure (1)..(514): unsure at all n locations
  Clone ID: PAT_MRT3847_104023C.1
tgtttttaaggttgctgttgcatnntacataataggcacattggtgtggaatgtcttttcaactggggagaaagttcttgactgaagatgacatgtcaaggaaggtcagcctatatagccatggaaatatagaaacagatggaacactaatcagatgaccaaagatgtcttggaagattaaaccccctcaaaaaagtagaaaaaagagacaccatggaagttttcaccttaaaccatggccattatagaaaagggtcttcaagaaatcttggattaattttgtaccttttccgcaacaataaaagtgagtttgtctctaaaaatagcaagtaaaagtatatctacccatagatttcagtaagttaggtttacaatacactttcaattaagttaatattagatacatttttacttgcttactttatctaagcatactcaagctcaatatacatgttacttgagaacactacatcatacgccaagatggaaattagattgttcagcgttttcatta

SEQ ID NO: 4451 - DNA, 1338 bp, Glycine max
  Clone ID: PAT_MRT3847_104024C.1
ctcttccaataaatacatacatataagaaaggaaaaatccactaacagcagcaagcttatctctgcagcattgaacaccaattaaacaccaaactgcagaagagaaaatcaattgaacgtcaatgggcgaggaagagaaaaaatcagaagaaagcaaagaggagaacaaaaaagcagaggaagaagaaaagaagaaagaggagagaaaaactaatcaaaagatgacaaaaaatctaaggagaaagttgcgccgtcagaaatcgtgcttaaagtgttcatgcattgtgaaggttgtgctcgcaaggttcgtcgctccctcaaaggattcccaggggtcgaagatatactcacagattgcaagtctcacaaggtggttgtgaaaggagaaaaagcggatccgctgaaggttctagagagagtacagaggaaaagccatagaaaggttgaacttctctctccgattccaaagccacccgcggaggaggcgaaaaaaccccaggaggaagaaaagcccaaaccagaggagaataaacaagagcctcaggttataacggttgttcttaaagttcacatgcattgcgaagcttgcgcccaggaaatcaagagacgcatcgagaaaatgaaaggggtggaatcagcggaaccggatctaaagaaatcggaggtgagcgtgaagggggtgttcgagacagcgaagttggtagagcacgtgtacaagaggacagggaagcatgcagtgatagtgaaggaagagccagagaagagagaagaagaagaagaagaagaagcaaaagaagagaagaaagcagaggaagaagttgagaagaagactgagaaggggagtggtgagggagaagaaaacaaggagaaaaagggagagggtgaagccaaagcagaagaggaatccaaagaagaaaccgcagtgttggagctgaaaaagagtgagtattattacaacccaccaccgaggtatggcatggagttctatgcctcctaccctggaccatcgtacccgcctcagatcttcagtgatgagaaccccaatgcctgttctgtcatgtaaaaatggtggaatgtcaggggtaatactggaactttgggggaattatggaatttgagtgagtgattgattggcattgcctcctgagatagatgtgccctactccttcttcttctgtacttttcccctaatatcaaaaagttaaatgaaatctacagataagctgtagagttttgtaatgcctctacttttttcctaaattgttgttaatatgtatatggaaatataagtgaaagtaattacagttcttaaaaaaaaaaaaaaaaaaaaaagcgaca

SEQ ID NO: 4452 - DNA, 839 bp, Glycine max
  Clone ID: PAT_MRT3847_104025C.1
tgctaagatatctctgatatatatagtttctgtgtctgatcccgggtttaattcgggttaagattgaaagcgtgagaatgccggtgaagaagtattactgcgattactgcgacaagctattccaagacacaccagcagatcggaaacgacacgttcagggcattcaacaccaccaagccaaagctcgctggtacgattccttcaaacaacaacaaatccctccgattcccaatcgacccctttgctttcacttcgtcaacacgggattttgccgctacggcgactcttgcaaatatctccatcccgttcccaacaacaatgtccagcagccgccaatcgtaaccacaccgtcgccttcaccagggagtgtggtaggagtgtcattcggcaatcttcccccctccctgcagcctccgcctgacggcgtatatctccaccttccctttctcgactggggatagatttgtaattctacccacttctcataactgcatctccgtgtctgtgttctgttcaatcatttcttaatttaaccttttagttcttctaattttcattgtgtggctggattctagtgatttcttatgacctagctccaccgtattatttggagttttcttatatctacccaacgcttaacttatgattaaatccaaaatctatcttattgtaatacatatgataatagactgcttgcttcagcaaggggaggcaaatggagtttatggacctattcatcgaaagcactcttagtttttgacaacatcggatctttttcatctttattgctaaagtgaattttaatatatgttctgaaaaaatatgtttaattaatcatg

SEQ ID NO: 4453 - DNA, 199 bp, Glycine max
  Clone ID: PAT_MRT3847_104026C.1
acacagtctttctatctctccctatcgcatctgtgatacgtttcgcaggcctgctcagctctagaactgacacgtccatgggcaaggtctctggtctcgctaatctactcagatcatgttagatttggctgacactgctgagagtactgctgaagcgacaggctcggattgcgatgctccttacatgactcatatccag

SEQ ID NO: 4454 - DNA, 420 bp, Glycine max
  Clone ID: PAT_MRT3847_104027C.1
aaaaaatctgcggaacaacgtgtaaactgtaaaatacatccaatgagtgggttaggtatcctgatgagcttttcttaattttgctcgttctctcccttttcaacctttttctccgtcagctttttttgcttttgaaaagtgcatcagacgtttagctcatttcattattgaaatttcatttcattttcatgtaagaagatctgttatcttggaattatttctaattgttttgaggctctaaaatttaaagtaaacacgaagagcccttttgaggaaagaaaataatttttgatgttttccattcgcggatctattcttgggtagttgggggtattataagagaatgcatcagcctataaagtataaacgctactttcgattttggttaaatttatgagataatcgatataatatagttat

SEQ ID NO: 4455 - DNA, 2594 bp, Glycine max
  Clone ID: PAT_MRT3847_104028C.1
attctctctgtctctctctctctctcatccaccagctggtgatattgatgtccatggctccatccataaatactactaagtgaaccacaccatgcagattccaactccaaccttggaataaaaggtgaaaaaaaacagcaactttaacctaagacaagagagtagtatctaggaagtttcaccttccttggagattccaactcacatcaaaatttgaggaagatctcaaccacttcactttccaagaggaggtgaggcatcatggctcaaaatggaagtggggatagagtagtggtggacaatggttttgaatccattgatgatgcatacgatcatgaacacaagctgagtcaaaagggtagcaccaaggtcaaggaggaagaggtttctgtggagagggtgttccagcaccttctggtgccatcatggaggaaccaattgacagtgagagcctttgtggtcagctttgcactcagcatactcttcagcttcattgtgatgaagctcaacctcaccactggtattattccttcactcaatgtctctgctggccttctggggttcttctttgtgaagacatggaccaagttcttggagaaatctaacatgttgaggcaacccttcacaaggcaagagaacactgtcatccaaacctgtgttgttgcatcctctggcatagcctttagcggagggttttggaagttatctctttggaatgagtgaagaaatagccaagcaatcctcagaccccagtcattttaaggacccaaaattagggtggataataggttttctctttgtggttagctttctcggcctattctcagttgtacctctacgaaagattatggtcattgacttcaaattgacatatccaagtggtactgcaactgcacatctcatcaacagcttccacactcctcaaggagctaaactagcaaagaagcaagtgaaaatgttgggaaaattcttcagtttgagttttttttggggcttctttcaatggttctacactgctactgaccagtgtggatttcaagccttcccttcattggggcttaaagcatatgaaaacaagttcttttttgattttgctgcaatctatgttggagttggaatgatatgcccatatatcataaatatatcagtgcttcttggaggaattatttcttggggaataatgtggcctctcataaaaaccaaagagggtgattggtatgataagggccttggtgagggcaaccttcatggcatacaaggttatagggtatttatagccattgccttgatactaggagatggtttatataacttcataaaggtgcttactcataccctttggggattgtatcatcaaatccgggaaaaacaaagggagaatgtccttcctgttgcagatcaagactccccctcaaattctcatctatcttatgatgaccagcgccgcacccaactcttccttaaagatcaaattcccacatggtttgcaatttctggttatgttgctattgctgccatctctactgccactctgccacacatcttccccgaactaaaatggtattacataattgtcatctacctaattgctcccaccttagcattttgcaatgcttatggttgtggactaacagattggtcccttgcttccacctatggaaagctagccatctttacaattggagcatgggccggttcatcaaacggtggagttctcgctggcctagcagcctgtggggtgatgatgaacattgtttccacggcctcagacctgatgcaagattttaagactggctaccttacattggcttcgccacgctccatgtttgtgagccaaataattggcacaacaatgggttgcataatttctccttgtgtattttggattttctacaaagcttttcctgaccttgggagaagtacaagtgaatatcctgccccatatgcaattatataccgtaacatggctatattgggggtacaaggttttggccatctaccaaaaaactgcctcttgctttgttacatattctttgctgctgccgtcgcaataaacttgattaaagatttccttggcaagagagggaggttcataccacttccaatggccatggcaatacctttctatatagggccatactttgccattgatatgtgtgttggaagtctgatattgtatgtgtgggagaggattaacaaggctaaggcagatgcttttgcaccagctgtagcttctggtttgatatgtggcgatggaatatggactcttcctgcttcaatacttgctcttgctggagttaagccaccaatttgtatgaagttcttgtcaagagcagcaaatgcgagggtcgatactttattagggaattaaggtcaggtttgaattggatcttgtgaaaagttactgccttgtaaatctgtgaaacatcacttaaatctgtggttttaagcttttgctgccatagtagaactagacaacatagaaggaaaaactattttgtattatatatcagaaaggaagtaaatgttttatgtttagattgcattgtgtttcaaaaaaaaaaaaaaaaaaaaaaaaacttggcttcgagggc

SEQ ID NO: 4456 - DNA, 517 bp, Glycine max
  Clone ID: PAT_MRT3847_104029C.1
ctcattacttggctttcggatccagacaagcatatatagggatacgttgcaagccgccatactcagccaccaccgtattgcacgagatgacgttatccacccctaccagaaatcacacatcgacaccccatagacacgatgattctgaccttccaacggctggatgtcaatgaatacaaaaggcagttatattcaccgtactgctctactgtgatgacgactaagtacttgatttaaaacacactctttgtatagagcactgttcatttcactgtctagcaggaagggtggacaccgattccaacaacgacgttaatgattgaagcagcgacactagcgacaactttattgatgcttaagcaaaacacctaacttgaaactgccatcgttacaggcgtaccacgatgatgatcatcctagcttcagggaggagaacaatgcttacgacatgactatgttctacgagggccacatcacatatctcgccgacgaccagaagacggatctcgccgaagga

SEQ ID NO: 4457 - DNA, 207 bp, Glycine max
  Clone ID: PAT_MRT3847_10402C.1
cttgactgcacgtgcacgcgtgcgtggactgtatcatcggcgcgccccccttttttttggattaatgaaacatcctgggcaagcttcgcgtggtcgcttataatccagatttaccttgactatgaaatcaaatgcccccgatgtccctgttaatcattactccgatcccaaggccaccacattgggatcagaatcctggggggttat

SEQ ID NO: 4458 - DNA, 1147 bp, Glycine max
  Clone ID: PAT_MRT3847_104030C.1
tgtagaggctttcaaaataatgaccgaaagtgagccttacacatgctaatttcgaatctacatccctcaataatcagcagtctttgtatgttggactgtaatcttgtgttcagttatcacattcaaaacatgagaaaatgatcatcatcttctttggctttgccaaaaccaagtcaaaaacatgggcctaaacttggaagcaaatgttcctgggatacattgtcaggaaaaattacaatatacacattcctgtcaaaagcctccacaagttttcaaaattttcttcatgggtaagttgtatgtactacacaggcgaatctaactttgagacacaatttaaccttgcatgttgatccaccagcaacaccactactactaataagaagactcaaatcaacttcaagtgggtctccaactattaacagcaggaatgtctggcctacagggcatcatctgaggtacaccatgtcctgctattggagcaacaggtaggttgcctgaaattggtcgctgaaaacctacagtgcttactggcggcctttcaagtgacggccgaaaatggccttcttgcccatagggtggaccaggacatgaagaaggatttctccctctccatacaccatgttgattgtttgttttaaattcacttgatgacactctccattgctcatcagcaacaaattgtcttcggccatctggaagggatggtaaagggaagggaggatggaatgaatgtggaagatgctgctgaactgtaggatttgaatatgagtatagatttggtggattttggggtggggcaggatgtgcgtgcctctgagcaaatgggggattaccctgctgaaattgatggttaggttgaggaacttgagcatttaggtacatgtcattctgtccgtattctaattgccttgaagggttaaaaccagaaggttcctgggagctgcagcctgcggttggagcataagcagttggctgtggaaatacttcattcttgacaactgcattattgtgacctccgggaaaagaattcccaaccattggaactatttggttaccattagtagtgccactaaagtcatgaggtacactctgctgataacccaactgtggggaagactgatgtgatgactgaggtggcactggt

SEQ ID NO: 4459 - DNA, 158 bp, Glycine max
  Clone ID: PAT_MRT3847_104031C.1
acgtttaagtatgggagatgctcacatttcgtgaatgtggatacgggtagttgatgcatccagtgcctacaaaaaacgtggtatggaaggaaactcaccaaggaaagggcaacctggatcgtacctgtgagaatagaacatctataagaaatactgac

SEQ ID NO: 4460 - DNA, 259 bp, Glycine max
  unsure (1)..(259): unsure at all n locations
  Clone ID: PAT_MRT3847_104032C.1
caggtactgcgtttcggaagcagacacagatggctcgtacgaagcaaaccgctncgtaagtccacaggaggaaaggctcctaggaagcagcttgcaaccaaggctgcactaagtctgcaccaactactggtggtgtgaagaagccccaccgttatcgtcctggtaccgtngctcttcgtgaattaggaattnccagangantcccgagnttntantcggaaagcnccttncnnaggggtgntnngnaatntccccaggt

SEQ ID NO: 4461 - DNA, 135 bp, Glycine max
  Clone ID: PAT_MRT3847_104033C.1
ggaggatgaagatggtgaagaactgcttccaagggaacgagttggtggaggcgctgcttcagaacttccactgcgcgcgtaacgaggccgttgatatcgggaaacaattatccaagaagcacttcatccatcatg

SEQ ID NO: 4462 - DNA, 1214 bp, Glycine max
  Clone ID: PAT_MRT3847_104034C.1
gtggctggtcggattccgaaaatcagccagctactagctacccggagttcagggaaatggagcgtagggcgcagatattttcgccgagtggaacagaggggaacttgagagtttcttgattgaaattaccgccgatatttttaaagtgaaagatgaagatggtgaagggtttttggtggataagattttggataagactgggatgaaggggaccgggaaatggacggtgcagcaggcggcagagctttcgatagccgcgcccacgattgcggcgtcgttggattgccggtacttgagtgggttgaaggaggagagggagagtgccgcggcggtgctgaaggaagcggggttgagtgatgaattggggagggttaatgtgagtggggtggataagaagaggttgattgatgatgtgaggcaggctttgtatgcttccaagatttgtagctatgctcaggggatgaatttgttgagggctaagagcaatgagaaagggtggaacttgaatttgggggaattggctaggatttggaagggagggtgcatcataagggcggtgttcttggacagaatcaagaaggcctatcagaggaaccctaatttggctagcttgatagtggacccggagttcgccagggaaatggtgcagaggcaggctgcgtggaggagggttgtggggttggcggtttcagctgggattagtactcccggaatgtgtgccagtcttgcttactttgatacctatcggagggcaaggcttccggcaaaccttgttcaggctcagagggacttgtttggggcgcatacttatgagagggttgatcgccccggggcttttcataccgagtggacgaaactcgctcgcaatagtggggctggagttggtgcactcaattgattgattttgggttttggttgtttgtttaatggtcgtgcattgcagtgcagcatttgagttgtaattgtttgtttctttgaggatctttggtagggagagagcagctattgttttcttgctataactgtttttaatcttaataaaacaaaggcatgtcatttggcttccactggcttttgcttaagtagagtacaggttgttgatgctctcatctcgtctgtatttgtttccaattagagttataattgcatttttggatttgattcctctaaagtgaggaaggttaaaataagtaatctagttttgttggttggtc

SEQ ID NO: 4463 - DNA, 2243 bp, Glycine max
  Clone ID: PAT_MRT3847_104035C.1
agagagagagagagagagagagagagattttcaaactcataacaacaactccttctgttcacaaactcatcttcaattccttttctgatctacgcaaggttaaggttaattttatctatctacttggacatgaacgaaatcgatgttccttcgttctttctctgccccatttcgctagatatcatgaaggatccagtgacggtctcaacgggcatcacctacgaccgtgaaagcatcgaaacctggctgttctcgaagaaaaacacgacatgccccattaccaaactgcccttgatagattacgattggtattgccaggatgtgtgccagtcttgcggacattaagacgatcagaggtcaaggctgccgggatacgttttccacccacattgggagttatgctcaggcgaagattcgtgtgggtggaaagcgtaaggactaagcatggcacgtggacttatggggcttgcctgagagtggcaggggtggggccatcaaaagggtcgtgttggtggctgggtgtaagaaggatgatcgggggaacccttgtttcgcgagtttgatagtggacgcggagtttgcaaggcaaaatataccactcttcaattcacaaaaaaacacacaaacctcttcagttcacaaaccacacaacctcttctaatattcgttttctgatctacgcaaggttaaggttaatttgcttctatctacatggacattaacgagatcgatgttccttcattctttctctgccccatttcgttagaaatcatgaaggatccagtgacggtctcaacaggcatcacctacgaccgtgaaagcatcgaaacatggctgttctcgaagaaaaacacgacatgccccatgaccaaacagcccttgatagattacaccgatctcacaccaaaccacacccttcggagactcatccaagcgtggtgtaccatgaacacttctcacggcatcgaaaggatcccaacccccaaaccccccattaacaaaaatcaaatttcgaagcttctcaaagacgcttctcattcccctctcacatgcctcagaagactcaaatccatctcttccggaagcgaaacaaataagcggtgcatggaggcttctggtgttgttgagtttctagcatcaattgtaatcaacaccaaccgcaacattgattcttcacatgaggctgactcaaacgacggatctggattcgagttgaaaacagagtgcatgcgatgaagcgttgagtttgcttcataatcttcatttatccgaacaagggttgaagactctcttaagcttcagaaacggcgagtttattgagtctttaacaagagtcatgcaaaaggggttctttgaatcacgcgcttatgctgtgttcttgttgaaatctatttccgaagtggctgaaccagtgcaactattgcatctaagacaagaactttttgtcgaactggtacaagtcctgaaggatcaaatttcacagaagacatcaaaggcgacccttcaaaccctgatccaattctctccttgggggaggaacaggatcagagctgtggaagcaggtaccgttcctgttttgattgagcttcttctcgattgcaaggagagaaagccttgcgagatgatgctggtgttgttggaaattctatgccagtgtgctgagggaagagcagaacttttgaatcatgcagcaggtcttgccattgtgtccaaaaagattctaagggtttcgactttggcgaatgatagagctgttaagattcttctgtctgtttcgagattctctgcgactccacatgttgttcaagaaatgcttaaacttggtgtggtcgcgaaattgtgcttggtgcttcaggtggatagtggaaacagggctaaggaaaaagctagagagattctcaaattgcatgctcgggcgtggaggaattctccatgcataccgaacaatttgcttaattcatacccgaactatgtgtgaaatgatacgagaattttgaatggtgcctcttttagaaattttaatgtacataaattatttggaaaggacacagttaggtgtaagttataaatatgagcagcaactatatatattgattgccccacaaaaagcataggtgggtagtgagatttcaggttttgatttgtatttcctgacaattgtgtaatggatttttgttttgctataagctgacacagaaatgagaagaagaaagggttaatcaatcatgatttaattttattcc

SEQ ID NO: 4464 - DNA, 1812 bp, Glycine max
  Clone ID: PAT_MRT3847_104036C.1
cccacgcgtccgctctacctcccactctcacaatccctctctctctttctatcttcactccggctattacttattagcataactctcttttgctctgccttcccgccaaaacccttctctgtgatcaccaaggattcaaggttgagcgttgaattcttgaaccttgttgttgttgttgttgttgatgtgagtggagtgagatttcacttgaagcgcatccaaagttggccatattctcttctctctttctctctctctcttggaatatatctctagagacgaaaagcaaaagttgttacccataaaacatcttggtttttctttctgcttcaccaccaccaaaagtgtttccaaacgtctcaattccccccagcatatacatctacttgtccacttttcccccataccctctaaattcttctcttactctttaaaccccacccttcatgcactccagccaacaccatcacacaacaaccttccctcttccctctctcactcaaacaaaaacatccttaaccactccaaaaacactcttttaggcatgtccgtacacgcaaaactgaagcaccaccccatgaacctagcatccccaagttcccattttgaggacgacccaccatgcaaaaccaagaccaaaacccaaaggaggctccttcggatcataatcaccgaccatgacgccaccgattctgactcctccgacgaagaacaacagcagcagcaacaaaaaacaagaagagtgaacagagaaatcacccaaatcaacatgcaacttcctctatcacataatagttccttttccccttcatcttcttattactcttcagcttccacctcatcggaacaaaacctaaagtgcaagagacccaacaaaaagccgccaccttcctccgccgaggcccgccgccgcaacaagttccgcggcgtccggcagcggccgtgggggcggtgggcggccgagatccgcgaccccacccgccggaaacgcctctggctcggaaccttcgacacggcggaggaagccgccacggagtacgacagagccgccgtcaaactcaagggccccaacgccgtcaccaacttccccctcgcgccggaggctacggcgcagtctccaccgctcgccgcggacaacctcagctccgacggcggcgcgtcgtactcggacctagtggcctcgccgacgtccgtcttggcctacgagtgcgactcgacgccgttcgacggtttccgttatctcgacgttgacgcgttcgggttccacatcgacgcgccgttaagtttgccggaagttaacgttaacgttgcgctgacgtgtcatcacgggaagaagcaggaggaggcgtttgatgaattcgatctggacgagttcatgacgtggccttactagtgataaaaatctcagggacagtttggtaaattacaccctgtttgcattgcggaagtgtgagttggaaatcccgaaattgcccccctccccctctcgttgtccaagtttgaaattttgtcgtactcgttggagctttggaagagtgtagagttgttggtacaaaattttatgtagtcgcattttactaccacctgaaacggcgattctttgtgtcgtatttggtagagtttaatttgtagttattatcatgaaaagaagaaaaaaaaaatgaagtgtcaaaactagtgagtgagaaaaggagaaaaggaaagatggtgttatttgagaaggaaggactatattgtaatttcggtatataaattttgataattatttaaagaaactttggtattgtctatatatagatcatgggttaactt

SEQ ID NO: 4465 - DNA, 585 bp, Glycine max
  Clone ID: PAT_MRT3847_104037C.1
gggctaccgtacgtccgtaaacaaggagtaacacaccaatgcaagcgaagctataacatgcatcatgaaggatctgagtgctttaaacggactaaagcactgcagaaccgctgttaacttggacatactacgatggctggccataggtaaaatataccaattctaaacaagacctcacagattcttgctgccgaggggcactacgcctccttatataaacagcctcaaactcaatgacctcatgcccaaaacccagacactcatagaaccattcatgactctccaagacattcccctcggcaaacatacaacacctaccactaagtacccagagcacactggatattctgctcgacacaatctgaccgccacgagaaagcactggaacgtccactatacgacgggtctaatccgctgaaaacgtgaaaccctgactgggtttagaatcaaagccaacctgttcgaatcataccaactgacaacagcgtcaacaatccttgtgctcactaccacagtactccagatggaacactgattgtggctattcaccgaaggccacaatgacgggacactcgctggggagca

SEQ ID NO: 4466 - DNA, 539 bp, Glycine max
  Clone ID: PAT_MRT3847_104038C.1
ggtttggatgtcaaagcaagcttaaatcgctacatctaaaaggaagtgccattgagagattacctgcatctatcaacaatcttacacaactgctacatctagaggtaagtcgttgcaggaagcttcaaacaatagcagagcttcccatgttccttgaaactctagatgtctatttttgcacttcacttcggactctacaagagcttccccctttccttaaaactctaaatgtcaaagattgcaaatcacttcagactctagcagagctacccctttcccttaaaactctaaatgtcaaagaatgcaaatcacttcagacactacccaagcttcccccgctccttgaaactctatatgtccgaaaatgcacatcacttcagactctgccagagcttccctgtttcgttaaaactttatatgccatatactgcacatcattgaagactgtattgttcccttcaactgctgttgaacaattaaaggaaaacaggacacgggttctgttcttgaattgcttgaagttggatgaacattctcta

SEQ ID NO: 4467 - DNA, 229 bp, Glycine max
  Clone ID: PAT_MRT3847_104039C.1
actccaaccctgactctgtttgaatcattgcccacagtcacgtctatcattggagccgcggactcaatgagcagcccgggggatctgacagcatccttatcattgatgccaccgactgcacctaacagtttgacgccatccattctaacacatcaaaaccattgcctgtatattacagtatcgaggcgctggtctccactggctacacctcagactcatcgaccaacaa

SEQ ID NO: 4468 - DNA, 439 bp, Glycine max
  unsure (1)..(439): unsure at all n locations
  Clone ID: PAT_MRT3847_10403C.1
ataaaaccanngnaaaaaacaacacggccgccaattttacatctttaacaaaacctaccttacactcaaataatcctacaaactttttcttttaaatacacaaacgtattaataaattactgtactcaatacaacatccaaataaaaagtaattctcttttgaaattttcacaatttcttttttcaatatccatctttttcatatactacataacacaattaaacatatgattcaaaattaattttcactaaataatcttcaacctttccttttaaatactcacaatactatactccatacatacctgacttctcatccaaaatattagcattattctctcaacttcatttaaatcaactctgactatatggactaatcgacatcttaaaactatcgcgttattttctaaacttctgtctaattctacatccgattata

SEQ ID NO: 4469 - DNA, 446 bp, Glycine max
  unsure (1)..(446): unsure at all n locations
  Clone ID: PAT_MRT3847_104040C.1
tcggaattcggctcgagtgaagacattattcccattgatgctgtggcatacagcacgtcgcggtcatataattttcaatacgggcgggtttagatgagaatatgtataataatcaatcaagctattaacaccttcaaactacggaattgtggcgttgctgagcattggaggattagttgctgtccagttattgtcctcgcaattatttcacctcatgctttgctctcttggccgttgtatattgtagtggggctgtgtctttgtaacaggaattatgtagatgcgtcaatttaatgcaattttacaaaatcatttcttagtgctgctgagcagctgtgcttggtgttgtcacgatagctcgtttcaagaaatnttggcagttttcattnttataggacaccatagtaaatgtcctagaaattggtcttccatcatttggcttggca

SEQ ID NO: 4470 - DNA, 549 bp, Glycine max
  Clone ID: PAT_MRT3847_104041C.1
aaaaaaacacaaaggcctccaattgttctggggtcataataataccccaaaaataaatttgaaaatggggagtaacaaagcttggggagacacagttaaccgaagcttctaaaaacaggggacaaagcaaacaagtgggataacttgggggcaaaagttgtccccttttaagcaaacaaaaaaaacagaccctcaactaacaaaagctaataaccccaaatcaagatggccctaagggaaataaaatttttatcaaaacttatttgccctggcccttttttttttatatgcttttcaaatttagggtatgggtgaaggggcctcacttggccatcatgactttgaccaactcctcatagttgatctggccatcaccatcgacgtgggcctcgcggatcattttataaacctcctcattgggcagcttttccccaaaatttttcatgacatgggggggctcacctgcaaagatgaaaccattctgatccttgttgaacacccggaaagcctccttaagcccctccttggagggggggtttttcattttgc

SEQ ID NO: 4471 - DNA, 202 bp, Glycine max
  Clone ID: PAT_MRT3847_104042C.1
acccaaacaagacatctttgactgtgctaatcggtgaaataaacaaatgggatcgacgcaaaacctccagcttttactaccagatatccacgggctccgtatctagggagaacacactactcttccacttgaatgacacctacccctagtataacttccgctcactctgtatgcctgaccaaactactctagagtacacatt

SEQ ID NO: 4472 - DNA, 1060 bp, Glycine max
  Clone ID: PAT_MRT3847_104043C.1
gaaatagaggaacgaattttattttattttcaaaatatttgattgaaatttaaattgaaaagacgggagaataaaatctatcaagatgaggttttgagttgattaattcttgttgataattatcttctcatgttactatgttagcctctagtgttggagaagctgataactcttttctatgtaatttaggggatgttccttctatgggaacaagttgtgggatggccaccaatccgttctttcagaaagaactcaatggccactcagccacaaaagaatgatgataatgcagaagccaagtcggtatgcctttatgtgaaggtcagcatggatggtgctccatacttgaggaaagttgacctcaaaaactttggcacttacatggaactgtcttcagcactggaaaagatgtttagttgttttacaatcagtcaatgtggttcccatggagtttgtggtcgagataagttgactgaaaatagattgatggatctcctccatggttcagaatatgtgctcacctatgaagacaaggatggtgattggatgcttgttggtgatgttccatgggagatgttcaccgactcttgcaagaggttgaggataatgaagagttctgaagcaattggactagcaccaagagccatggaaaaatgcaaaagtcgcaactagcaagatggtgttgatacagaaagatgaattattattattacctttaaacacgtacatcatacaagagtccagaggcaagtgcagggcacaagctggggcttttcttgcttgaatatgtatgatataatcctacatatgggatccaagtatcctagactttttagtaggcaagatatgtttgttgtagacatttaaggtttcttaggcttgtttcccctcacttctcttcaatcactgtcactgtggacttcataagactgaagctacgtcgttactatgtaaattttgtaacttaagtctcatatatagattagtttgagatggttaattagagaatattaaaaaaaaaaaaaaaataaattaaaaaacaataaaaaaagaaaagagg

SEQ ID NO: 4473 - DNA, 281 bp, Glycine max
  Clone ID: PAT_MRT3847_104044C.1
gctttctctagatttgcctgaccaggcttgttgcggggatgctggaacaccttctggcgttgcaaatgacagcgacatctctttaccggcggcggacgcccttaccggggttactcaggacatgacagactactagtacaacaaccgttggatgtctacccatatacaaggtgctctacaacctcctcgggtggggcggtccttaccttgttgaaatcaccgtcgggaacatatacgcgcgcccacacggatacaatacactgcctgtaccaagagatcga

SEQ ID NO: 4474 - DNA, 346 bp, Glycine max
  Clone ID: PAT_MRT3847_104045C.1
atacaaaaattcttgacacacgggggtaattttttacttcacagtaagggaccgtacaaaaaggactcaatcaatcctataaaattttctgtttatcttcccaagccagtgtttacaatatgaagcacccattctcacttaatttgcaccgtgtaacttataggaaccagactttatatccgggggaaaaaatatccctgggaaacccctccagggtgggcatacaagatcagccactgcccgctctaggaagcttttgacttccaaaaggacagaggagagccgggtcctggcccataactgtgggagtgactgattgtaaaaaggctgctaatggctgtccagc

SEQ ID NO: 4475 - DNA, 251 bp, Glycine max
  unsure (1)..(251): unsure at all n locations
  Clone ID: PAT_MRT3847_104046C.1
tgtgtatgttaggagcaaaggttgtaattattgatgtacgtgcagttaagagttttatntagactggttngatttatnttgatgttaggtaaagtattttttaattttagaggttatgaagttactaatataantatggtgtgtttgatttataggagagaaatagagtgaagagaaataaagttgagtttaatgaagtgtgagtaatattgttaatggtataaaggatattatttataatatgttatttt

SEQ ID NO: 4476 - DNA, 662 bp, Glycine max
  Clone ID: PAT_MRT3847_104047C.1
cggtccggattcccgggtcgacccacgcgtccggactacttctgttgctgacctggttttggtacgtttccctcttcttcttgtaaagttgttactgtttcccgagtttttctccctgctttttgctgaattggtggaaaaatcttggaccgtttggtttctgagattttaaaaaaaggttgagggttgagagcttctgatcagagttggtaacctgggttgtgcaggttcttatgttcaaatccttttctttgcttttcctgctttgttttgaatttgtgctttcttcctcattatgtcttcattcattggcttcttcaaacttgtcccatgtgttgtaaactctgaggtttgatatctgaatgagactaatttttaaggttttttttttatatttaatctagtaatttttctctgactacattctgcctctgtaatctgtaatcatcatcacctttcgttgtttccaaattcctaagattgttgttgttattgttacatgggatttatgttgcaagaagaagggtcgtcttctgtaaattcttcacccctgcagttcttctccatgatgttactttcacctagcttaggttctcccaacaatcttttgtttagagaaatgaaatccctggaaaggggtttgtccttggttcatttgtggc

SEQ ID NO: 4477 - DNA, 1268 bp, Glycine max
  unsure (1)..(1268): unsure at all n locations
  Clone ID: PAT_MRT3847_104048C.1
tgattttaacctctcaacttaaaacccttgttgtggtttactggggccggcgaaacggaattcctctgtggtagttggaaggtcgcaccgtgccactattgcaccaatctgcctcgtcatcggagtggattcacagctccctagacctcgatcttgatctcgacgcaccttgccgtccctcgcagtagctgaacctcacagaagaagcctccttcaccggcaacgccagtggacccccagaaaccgtcgtcggcagcgtttcggacgacgaaaattgcatgcttctggccgcctatccctggacgacggcgacgcatttgggattgaagactgacgccgtcttctcggcctctgaaaacaggttataatttcaataggaattcagatcttataatcctcagtttgatcctatgaacgagagacacttgaagaaaagaatcaaaagattgaaagacatggttgagccagataaaaattgcgagactagggttgaagatgttgcttggctttgctccctttcagagtctgagattgacatgctgattagcttgaaactgttgatcattcagcgtgaaaaaaggatgagatgttacgtgctttctcaccaaattcaaccttaaaatgattcgagccattgcacttgttttgatgggccatctgaaggaagagataaaagattcatcacttatccccaatatggttaaatctacttcttttttagatgcttgcaacctattgaaatgtagcaatgaggttgatgcaaatattgatgagctaagtacaagtcttggtgctgatatagaaacttttcttagaagtcctccaacatccaaacaaaagaagcagaaagttggaagccgagaatgaaaggtttgcagttattggaggatctaaaatttctagcttatccttatggcaacacctttactttggctgtggaaactctcatttatagtttctttctcattgccgaattttcatgcaagttatttattattaaggttgcttatagttttttattgacaacattctatttgcgtagctaagaaattagttggagcaaatacctcggttatatttagaaaattgtcgcaagaatgtgtagcaagcaaatccccattttgtctagggaattttacattactttaatagttttgtttttatagaaacccaagttaatgagaggtggaactttttttttctttctaaaatatcanntaaaattgttgtccttagttttatagttcaagacaattattgtaacataa

SEQ ID NO: 4478 - DNA, 385 bp, Glycine max
  unsure (1)..(385): unsure at all n locations
  Clone ID: PAT_MRT3847_104049C.1
ccttaaccccgnaattcggctcgagccgagatgcgggtcacggcgccccgaaccctcctcctgctgctctggggggcagtggccctgaccgagacctgggccggctcccactccatgaggtatttctacaccgccatgtcccggcccggccgcggggagccccgcttcatcaccgtgggctacgtggacgacacgctgttcgtgaggttcgacagcgacgccacgagtccgaggaaggagccgcgggcgccatggatagagcaggaggggccggagtattgggaccgggagacacagatcttcaagaccaacacacagacttaccgagagaacctgcgcaccgcgctccgttactacaaccagagcgaggcccggtctcacatca

SEQ ID NO: 4479 - DNA, 327 bp, Glycine max
  Clone ID: PAT_MRT3847_10404C.1
gggcattgctttgttgtgtactcaagcatcggctgcaatgaggccagccatgtctgaaggagtaagcctactcagtagcaatgacttacttgaacatatgagaccatcgatgcctatcttttttgagtcaaatttaaagccccgcaatgatatctctgcttcaactagttcctctatgactaacactactacctcaaattctataatacctgctcgatgattgagtatatgatctaaaaataaatttttgtccagttcattatcaaagatgggtataattatttgtaaatcttacttatttttatgaaaaagttacattgacattcc

SEQ ID NO: 4480 - DNA, 694 bp, Glycine max
  Clone ID: PAT_MRT3847_104050C.1
attcccgggtcgacccacgcgtccgctagccacttcacacatgacacataaaaacaacacaagaagaaggaaccaaactacatgcttcttcaatagcaaaagcacatgaagactaataacaacgtttctggggagaggaaatcgcggaagagacgcaacggtggaagtgattatgtggaagacacacttgaaaagtggaaggagtacaacaggcagcaacaacttggctctagagaaaatggggtggaagtgattcacaaagctcccgcaaaagggtcgagaaaagggtgcatgagaggaaagggagggcctcagaactccgattgcaagttcagaggtgtgaggcagaggatttggggtaaatgggttgctgagattcgcgaacctatcaatggcaagcttgttggtgagaaagcaaataggctttggcttggtactttctccactgcacttgaggctgctcttgcttatgatgaagcggctaaggccttgtatggcccttgtgcccgttttgaatttttccgagtcaatagactctaatggatcatcatcttctagtggaagtgataaaaaatcaccaagtggttcttcggagaatggtggtgatgttgcaatagctgaggagttggaggtgaaccatcgtcggtgtcatgaagacagaccaagattttctaaggttggtgtcttgagaaag

SEQ ID NO: 4481 - DNA, 186 bp, Glycine max
  Clone ID: PAT_MRT3847_104051C.1
agggaagaagactccgcagacacctaaaccagctattgagagctcaactttaccactctgggtccattgagtcacggacttcactatagaacttggatgtctctgcaggactaggagccatcacagaagtcttggacgggagcagcatccggcgacattgtttgagatgcggcattgtgagagatg

SEQ ID NO: 4482 - DNA, 157 bp, Glycine max
  unsure (1)..(157): unsure at all n locations
  Clone ID: PAT_MRT3847_104052C.1
agtcttcgaaggaactggtgccttgttactctgtactcncacaggggactgtgcaaccggtgacggaatggatgccttgtcaccttgtaatgatgacataggagctttgtcaccctgtgcagcaacgcaagcattgcctccttgtgaggattgtgca

SEQ ID NO: 4483 - DNA, 274 bp, Glycine max
  Clone ID: PAT_MRT3847_104053C.1
cctcgtgccgaattcggccgaggctttggggtcactctaagtggcagaaagattgcacccagataacactaattgatgatttgtcccattatggttagcttttatttgggtggccatgacttttattgttgagattgtagaatatctctggtcatgtatatgagtgattattaggtggtcatataccatcatatgttcatggttttgatcaatttctgtgacatatatttaagtttcttaattttcaaaaagtgaattagtaacaaaaaaaaaa

SEQ ID NO: 4484 - DNA, 319 bp, Glycine max
  Clone ID: PAT_MRT3847_104054C.1
accaggggtctcccctatggctaatttaacggttgttcccacttttaactcctcattaattattattatggacatcttgtaaccacatttcctagagaatcattatagcttcaagagggggtttacatgtgatcgatactggatatatagatcatcaaaatcatgtgtcgatcggcggacaacttatatgataccgagtttttcggccttgaatgcatgactatggataaatagtatgtatcaataacataatatgtttaacattttattttttattttcatgatgaatgttatattttgtatgaggtggtgcaggttt

SEQ ID NO: 4485 - DNA, 1469 bp, Glycine max
  Clone ID: PAT_MRT3847_104055C.1
gtgtgtgtgtgagaagagatgggaagagctccttgttgtgacaaggccaatgtaaagaaagggccatggagtcctgaagaagatgaaaagctaagagagtacatagagaaacatggaactggagggaactggattgctctcccacaaaaagctggtttgaaaagatgtgggaagagttgtagactcagatggcttaattatctcagaccaaaccttaagcatggggagttttctgaaggtgaagatagaataatctgcactctctttgctagcattggaagcaggtggtcaataatagcatctcagttgccaggaaggactgacaatgatatcaagaactattggaacaccaagcttaagaaaaaaatgatgggagtggaaatgaaccccttcagcactgaagaaacctcaccaagttaacctttcatccatgcttcaaaactcaacaccatcatcacccttcacctcattatccttcaaaaacaaccacaacaactcttactactaccaaccccatttgccctttacaggctccgagtccatgacatattcaagtcttctcagtgacaattattccacttttgagagccttcagaattaccaagttagtagtgtctttatggaaacaagttgcagctcttcttcagatggaagctgcaacaacaatcagatcaatcatgtcaaggaagcagaacttggatatgttggtgatggaacttttggtgaccagataataggtcgtctaagttacctcaatagtggggtggaagatcaagataccctaaagttggtgccctccaatgctggtagggttagtggggtgacagatgaagaaactagattatggggagaaagtccattagagtatggtctagaagaaattaaacagctaataagcaatagtagttgcaacaactttatgcttgatgacagcaagactggggaaatggtcatgtactactgatgctgatgctgacttgttaaaatcaagaacatttgaagggcatgggttgaagttagaacagtttcagatttgatttggtggacttggagtgttgtggggggaaaggtagtgttttaattggtccacttactttttttacagtacatgttggaagtttcagttgtattgtatcatttacttggtgcaggtattattaaccccaccataataacataaccatggtggatgtgtccaaaaacaaatgaatcagaaaggaaatgaggaagccttgtaaagtagagcacctctgaatccttcttccaccaggtttagaaagaggattgcagcagcaatccactactattatttaaatactttattatgtaacagttttgcttccaatcatgcacctaaaagcacctttaattttgcttaacgattatggttttattattgtttccccaatgtagatcgtacacgtatctatttcctccatacaaattttatttcacttagttaatttgtc

SEQ ID NO: 4486 - DNA, 197 bp, Glycine max
  unsure (1)..(197): unsure at all n locations
  Clone ID: PAT_MRT3847_104056C.1
tttttatcaaagcatcaaaccatctcaagttgatgatcccatatattgcataaattcatactgttcaacttcaatgtttcaagtatagcggtcnccacctattaaattatacaatatgataaaaataaaacacaatgcaaatccatacaataatatatggtttctctctggagtactctacaattataaaggaccga

SEQ ID NO: 4487 - DNA, 459 bp, Glycine max
  Clone ID: PAT_MRT3847_104057C.1
tccagaagaccaccgaagggggagaacctctgccaaaagattaagggtgaataattagcagcttcttctaattcccgtgtccgtgtgggtgtttgaatctggtgaaagatggcaattggtccaatcaaccaaggggatgccaacgggttcaacccctttgcttcgtggggtcaattcgtggatttttcttttccttctttcattttcgggttttttcccgggttggaattcggattccgattccgatcattcctgaacacacctgtggactggaaggagacttccaaaacgcacctgtggaaactggtgctttccggcttcttcaaccaagacctgctggttgaacttcaaaaacaaaaggtgcttcaagtcaacgtggagaacggcaacttcctcaccaaggttaaaggccccgaccaccggtacctaaaacaacttaaaagccacatgccttaccgg

SEQ ID NO: 4488 - DNA, 444 bp, Glycine max
  Clone ID: PAT_MRT3847_104058C.1
cggcacgggcccttttttttgggttttttttgttttttttattttttctctttttttctttttatttttttcttttttaaaaaaacaatattttaaccttaaagttctaaatcattatgggagagccgggcataaccaattatttaaaaagattgttttaaatgacggggggccaaaacctaaaggggggggggatgggaaacgggggagcgataaaggcaatcggcccagggcccataaagggggggcggatggcttttattacccccccacacagcccgggggcactggaatccatttccaaacgcattgggccaaacccaatctccttttttcatcggggggggggactaaggggaggccagctcatcccttaaagaagaagaaggggggtccccaccccggggcggggcctccctgggggcctgggccggccccggggag

SEQ ID NO: 4489 - DNA, 693 bp, Glycine max
  Clone ID: PAT_MRT3847_104059C.1
acaaaaccataaaaacctttctttttgcactctgcattttctccattttccgctacctcaattgtttttaattgttcacgctttctcgtttcgcgagaaagggaaagttgaacgagcaatgaatgccagagcacgcaccactcttcactcaatgaaacctcctttaaatgaaaccaaagggaagatggaaactggaggagggaagagagcaatgggtggtggccacaagaacgggcgtcgatccaatcgagaaaggaaaatggctttgatccaagatgtagataagctgaagaggaaactcagacatgaagagaatgttcatagagctttagaaagagcattcactaggcctttgggatctctacctcgtcttcctccttatcttcctccatatacattggagcttttggctgaagtagcagtgttggaagaggaggtggtaagacttgaagagcaggttgtgaattttagacaaggcttatatcaggaagctgtgtacatttcctcaaagaggaatgcagagaatttgaatgaccctattgaccaaaacaccataaggagttccaagcatcagagatcaaaatccatgtctcaaagtgagttcaattcaaactttgatgatgggtaggccgcagccttctctgccagaagtgcttccagcagaaagctaatgttctctgatgctgtcaatga

SEQ ID NO: 4490 - DNA, 1833 bp, Glycine max
  Clone ID: PAT_MRT3847_10405C.1
ttcccatcccatcattattagctggctctataaccttcttctcaatactcctccactctctttatattctcctcaaaagtctcactcttttttctcacttctatattccataattaatccttcttttgtttctttctctccttcaatctcaagtctcaaaccatggcgtttagaggaggcactatgttgatattaacaatgatggcattacttgagattcagatatgctcatcggagataaaccgtggaaactttccaaatggcttcgtatttggcactgcctcttcagcttttcagtatgaaggggcagtgaaagaagacggaaggggaccctctgtgtgggacactttttcacatacttttggcaaaataattgatttcagcaatgctgatgttgcggtggatcagtaccaccgatacgaagaagatatacaactgatgaaggacatgggaatggatgcctatagattttccatttcttggtctcggatttttcccaatggatatggccaaatcaatcaggcaggagttgatcattataataaactcatcaacgcgttactagccaaaggaattgaaccatatgtgactctctatcactgggacctgcctcaagccttggaaaacaagtacagtggatggctaaacgcttcaatcataatggactttgcaacttatgctgagacatgctttcagaaatttggggatagggtgaagcattggatcacattcaatgagccacatacatttgccacccaaggatatgatgttggtctacaagcgcctggtcgatgctccattctccttcacctgttttgtagagcggggaactctgctactgaaccttacattgttgcacacaatgtcctactctctcatgcaacagtagcagatatttataggaaaaaatataagaaaatacagggaggatcactaggggtagcttttgatgtcatttggtatgagccactaacaaataccaaagaagacattgatgcagctcaaagagctcaagattttcagctgggctggtttcttgatcctttgatgtttggggattatccaagctcaatgaggactagagtaggaagcaggctaccgaaattttcgcaatcagaagctgctcttgttaagggttcattagattttgttggaatcaatcattacaccacattttatgcaaaagacaattctactaatttaattggaaccctgctccatgattccattgcagactctggtgccgttacccttccattcaatggtactaaagctatttcggaaagggcaagttctatatggctgtatattgtgccacaaagcatgaaaagcttaatgatctatatcaaacaaaagtatggaaaccctcctgtctatattacagaaaatgggatggatgatccaaatagtatatttatctccattaaggatgctctaaaggatgaaaaacggatcagataccacactggctatttatcttacttgttggcttctatcaaagatggttgcaatgtgaaaggttattttgtgtggtcactattggataactgggagtggtcagctggatacacgtctagatttggtctatattttgttgactacaaagacaacctgaagagatatcccaaacaatcagtggaatggttcaagaacttcttgaaacctactaaataactatgaaaaatatgtgcaagattgtgtttggaatcatagaaattgtatttgattagatttgaattgaattatatgattcaaaaaattaatttacatgttggaaacttataataaaaattaagatttgaaattgatttgtgaatcaacttttacagttgg

SEQ ID NO: 4491 - DNA, 797 bp, Glycine max
  unsure (1)..(797): unsure at all n locations
  Clone ID: PAT_MRT3847_104060C.1
ccacgcgtccggtaagtaacccattttttttttttctgaagcagaattgttcacgctttctcgtttcgcgagaaagggaaagttgaacgagcaatgaatgccagagcacgcaccactcttcactcaatgaaacctcctttaaatgaaaccaaagtaacttcttcttcttcttcttctacatttttttttttaattttgaaaaacagaagaagcttgactttgaagcataaactaagagctgcataaagtttaaaggggaagatggaaactggaggagggaagagagcagtgggtggtggccacaagaacgggcgtcgatccaatcgagaaaggaaaatggctttgatccaagatgtagataagctgaagaggaaactcagacatgaagagaatgttcatagagctttagaaagagcattcactaggcctttgggatctctacctcgtcttcctccttatcttcctccatatacattggagcttttggctgaagtagcagtgttggaagaggaggtggtaagacttgaagagcaggttgtgaattttagacaaggcttatatcaggaagctgtgtacatttcctcaaagaggaatgcagagaatttgaatgaccctattgaccaaaacaccataaggagttccaagcatcagagatcaaaatccatgtctcaaagtgagttcaattcaactntgatgatgggtaggccgcagccttctcttgccagaagtgcttncagcagaaagctaatgttctctgatgctgtcaatgaccacacccgtgaactagtccatgggaa

SEQ ID NO: 4492 - DNA, 390 bp, Glycine max
  Clone ID: PAT_MRT3847_104061C.1
atgaatccagccatttgctcttaaataaaaatttccaggaaaaaagaaaaagaaaaagtggaagtcctatcttagctccaaacagaaatgggagcagctgtgacttttgagttaagtgtactagaactagaacagaatcccataagttatgcttactttttccaactgaaatctgagctgaaagaacccaccttagggcaaccggggttcacatggataaacctatatgttgaaattggaccggtcctcggatcatatgcctgaacttttctccacatcgtgttctatccagccaacattgagctccagagcatatcccccttctggttataagaagcggtctgggagcctggagagagctatggactgaaggtgtcacgagggcatatt

SEQ ID NO: 4493 - DNA, 300 bp, Glycine max
  Clone ID: PAT_MRT3847_104062C.1
cacgcaaatggtgcttggagggtcattagtgacattgcgactggtcatacgtgcactgtacatgtataccgagagacggaggattccactgctcataaagcggaatacagtgcagtatcggctattggtccactgcgatggtgtggcaatggatgaacattattaaccttgaggagatattgaccgacagcatctttcagcaagaaagaacagctccacatactgctatgatcttactcttgcactcgacactgacttgagacagtcatgggcaatccaacaggcaggatttcgaagagc

SEQ ID NO: 4494 - DNA, 339 bp, Glycine max
  Clone ID: PAT_MRT3847_104063C.1
tgtcagcaaaaactattaataaagattaattttgagaaccacgtggtggggcctaaaagtgttgttggtggttctttttcctggtgggggtacaagttgcacccttggacctgacctctttaaaaagtgtccagtcttaaagtattattgatattaagttttcaaacccatcctgggatctctgcatgtgcacaccctcaatgcttcctaaatgcacctgtgaagatattaggctgaattcatgccactcagattgtaagagctgtatgtgcacacgctcacagccaggacagtgtctttgtcttgacaccaacgacttttgctacaaaccttgcaagt

SEQ ID NO: 4495 - DNA, 338 bp, Glycine max
  Clone ID: PAT_MRT3847_104064C.1
ggctcgagacggatccattctggggccccaccatgccaagccttgctcgtgtcctgacatccacatactttcttctcgtatcttgacaacgtgctcgactaaatggccgacaggacacttacttcggctcccgtcatagacggagaatgggtctgtctacgagacaatagaactgctgaatcacatgagagatatgaggctgacatcaggagtggctcgagacccgacttatggggatggctgctgctgcccagtcatatgactacactgatcactggatcttggtggaaggagatcatctgcagccgtatgacatgggggcctacaatgtgactgca

SEQ ID NO: 4496 - DNA, 205 bp, Glycine max
  Clone ID: PAT_MRT3847_104065C.1
ggctcgagccagaattcacatgtgcttgtgtcaccaacaacatctcagaattcacatatgttcatgtcaccaacatctcaacccataacccgaaaaaattcaaatggaaggttgaactgtctatgctcacccaccacacatgctggttcctttagatgtcgacaccatcgatcttctggaattcgtcggggcaaaatccgtgggt

SEQ ID NO: 4497 - DNA, 266 bp, Glycine max
  Clone ID: PAT_MRT3847_104066C.1
gtttacgatgctatcattatttgtgagaatgaaatgaaatataaattcatcggagatgcaatgccttgtggttgttagttaggggttttcgagaaactcgtctctgtatttatgtcgttgttcgagttgctattgaatactagtataaacggttaggaccaattgtggcgatgtttcttcaagtgcgattcagacgtcttgagtgaattgaattgaacattgcttcgaaatgtacaacgtaatttgtagtgaattgaattagtgtt

SEQ ID NO: 4498 - DNA, 373 bp, Glycine max
  Clone ID: PAT_MRT3847_104067C.1
ggttggaacctttgggctggttagtgcggttgctgctgcgagcgaagagataagaaggggacctctaacctaacctcgccgacttccggccctttaaagaaggagaaaacaaaaagtaacgggcagttccgaagtggaaagaataatagcaggaccggtagtaagagatttcctaaggacctctcttttacatattcataactcaagaaatataggtttcgacgacgcccatacaaaagcctgtcatcgcggaacccgttacctcgactcttattagaccaaaaacgactccggtacgcttaatcactttacggctttaggatacgaagcggccggcgaggcatcggatgcggggctagatgccagtaggcct

SEQ ID NO: 4499 - DNA, 153 bp, Glycine max
  unsure (1)..(153): unsure at all n locations
  Clone ID: PAT_MRT3847_104068C.1
ggatgcagatagagatgcatagcaattcccangtcctaaatgtttaaaactaatttcgaattcgtccatcgtccaattcttctcgtcttgaaaatcaatttctccgggaaaactttgatcggtataacaattggccttgaggtggattctccg

SEQ ID NO: 4500 - DNA, 372 bp, Glycine max
  unsure (1)..(372): unsure at all n locations
  Clone ID: PAT_MRT3847_104069C.1
ctcgagctggaggcatatattatacaacctcctatcaaatattcaacatagggatatcctcacatttttcttcaattatggctcggccaaatagacactggtgatgctctaaattcaatanatatggacctggtaatccagaattttttaatgacctccttgggaatcttcattttgtaaatgctttgcgatcctggattttactaatatgcacaacacactataacacgcacatacacttattttttacaactctcccctatatcagagtccttgccttctttgtttatatgaaaatatcgtttctcaactaaaagtttttgtgtactattagaacctggcattaaatattcacttagcttttcacaaaaa

SEQ ID NO: 4501 - DNA, 327 bp, Glycine max
  Clone ID: PAT_MRT3847_10406C.1
aaaaaaaaattacccctggcttgaaaatggggtttgttttaatttaagaccaaacaaagcccctggggattccacccttggacttccgaaaactttattttttgggacgatttggcccccttgccaacgagtcaacaattttcaggttttaacttttttttagaggaaaagaacccttttgctttccaaagttcaattaaagatgggttttcttttttttcatctttgggaaattttgcccaaaaagcaaaacattgtctaaattttatggggaagtccaagttgcttaatttcaagggcggcttttttttggggggcaaactccaa

SEQ ID NO: 4502 - DNA, 382 bp, Glycine max
  unsure (1)..(382): unsure at all n locations
  Clone ID: PAT_MRT3847_104070C.1
ggagcggccagagctnnttttcacgagagcctctaattggggaaacccctttgatgggagcccctccttgactaaggccccttcctgacgaacttattttactgaagttcttgttccacttaaaggctggagctgctagcttgcttgttttgcaagggttttggcagctcaagggtcctagcccctttgatgctctccaggatgtgactctatcggggtggaaccttcacagggatcctgcgtccccactgattcagcttccctctttcagcagatttgctttctaaggttatctgacctcaaatcttaactggcccccgtgctattaacgttccccgtgagttgacttcaaccatgtgttggatccaggctgcttcaagcc

SEQ ID NO: 4503 - DNA, 581 bp, Glycine max
  Clone ID: PAT_MRT3847_104071C.1
ggaaaaaggaggggaaaacctttaatcattcacaaataggggccaggcgggaaagggcattcggttttcaaagaaaaaccaaataaaagagggtccataagggctattcaaacaggggcgggcccgggagttgaaggagggacccggttttcaacgggaatttcagcaaccccaaacaatatagcccggaattcatccccgggcagggcccccttccccaaaaggacttcaacaatcttggcaacccccccacgggggtcccttaaaggggcaagggcaattccaaaggccccatcggaaaccccctggagggcagcatcgaggtcttcggcaagcctctctgacatggagtcccttgccatcattctaaagaagacccccccactttgggcgggggctcccataggggcccagggcccaatatcaaaccttccaaagggggttcccatcggttttgccaaaccggggatttgctgaaaatcaccagctgccccagggggaacttcaggcccaccaaaaataatttttttggcagcccttccacctagtcccccaacaattcttgcaaaaagttgttgttg

SEQ ID NO: 4504 - DNA, 382 bp, Glycine max
  Clone ID: PAT_MRT3847_104072C.1
gttagatatatatagctacacattacaaaagtagtgaaatcaaagggcgagcagagtgaggaaatatggaggaagtgcagagagaaagagtatcggcatggaattcatacagtccatgccatttcatggaacaagttgtgaaagctttctctaattgcctgggtctttatacaacttctacgaaagatggaggagtcacatccacgacatcacgagcaatgaggaggccaccaaaaccaccattaagcgcaggacgtacccaaatcaaccttttatcgtcttagaaattaaaagaactcgcctagcttagacatcattaattgtaattttgtacattgccacttagtttcattagatcaaacaaaggtcttagttcgttaaa

SEQ ID NO: 4505 - DNA, 389 bp, Glycine max
  Clone ID: PAT_MRT3847_104073C.1
ctgtacgcgtgggtggctgcaaacagctgatgtgcctaccatagcacagattgaagagccccattcaatgcagaggatgatgaaggctccggactcaaacgataatattgatctactgttgagcattgattggatggggatacaaggagcaagtatagctttgacaaacaagactgcttttgatgataagctatgtgttggctaacacacaggaatcctttgatggaaattttaacagtggattcttggttaccaaagcttgagaattgtctgtatgctggaaggcaattaccttcagaagctgtcgttgtaaatgatacatgtgataggggtcgtggaggagatctaccccaatgctgagggtgatcattctcatcacaaggatgagg

SEQ ID NO: 4506 - DNA, 489 bp, Glycine max
  Clone ID: PAT_MRT3847_104074C.1
acggctgcgagaagacgacagaagggggtgttgtgccttttcactactactttgttcggtagctacttcgcttctaccctccattccattctctgaagtgcaggaacaatgtctgagaaaatcacagctgaaaaccttttaaacacccttgtggaaacacttactgagaagcaaaaatctggatcattttttgaagaagacaagtcaagctcagtgagctaccaattcaacagactgtttggacgccagaaacctgtgcaccatattttagggggtggaaaatctgctgatgtcttgttatggaggaacaagaagatctctgctagcgttttatcggcagcaacagctatatgggtgctttttgaatggcttaattataatttcataactattttattctttgttgtggctcttggtatgcttggacagtttctttggacaaatgtttctggcttgtttagcaggaagccatctaaagttccccgtttt

SEQ ID NO: 4507 - DNA, 368 bp, Glycine max
  Clone ID: PAT_MRT3847_104075C.1
gggaccaaaactaccttttattaaaattcgatgaatggctaaaggaaaccaaagggggaaaaaaaaaacgctaaactatgccctttttttttttttcccttctttgggggggaaaaaaaaaacagctttggggtaactggtgattccctgcaaaaaaggggggggggggttagggctccttggggaaaaaaaacaaaactctgggggctgggcatcggattttcatttcattgggaaaacccctcctaaatcatgtatttccggcaggtgggagctttacataggcccgggactttgttttcccttggctcaacaggaacaaacaaggggttatacgttaacttatcaccgggaaccccgtttgtctt

SEQ ID NO: 4508 - DNA, 1516 bp, Glycine max
  Clone ID: PAT_MRT3847_104076C.1
gttgaattgtgcctatataaacagtaccgaaacctcaaagaaagcacacaacatgaaaaatgaatttacaaagaaattcaaaagcaaagcaagaatcatgaattccaatatttgcaattggaaacaaaatcaggttcttcccacagaggaagcaacggggggatgacacttacctctcagcattgacactgcacataatccgaatttttcaggcaactgtgaacgctgctgtgcttctgaattcgtttgatatcatagccaaagcagctagttcacatttgtccggtttggaaaagttactctcttctcaattgctccattcgcaccacttaagatggtgtgagagagagactctatgctctctcaccaattggtcaatactttgcctctgacgacgatggaggctctttgggtcctctctcaagcttatttcatcgtggatattttcacgtcttgaaggacgtaaaggatgcaattatggaccctaacaacaacgaccatttccaaaatgtccacggaatgcctccttatcaatatatgaagacagacgaagaacttaataaactatttaacaaagcattggcccaaactggccctcctgcaatgaaaatgctccttaaactatacaaaggatttgagcaagtatcaacattggttgatgttggaggtggagtaggcgagaccctaaaacagattatctttgagtacccttcaatcaaaggaattaattttgatttgcctcaagtggtacaagatgcaccaccctatccagggatagaacatgttgaaggagatatgtttgaaagtgttccaaagggtgatgccattttactaaagcttgtatgtcacaattggttagacgaagactgtgtaaagtttttaaggaattgccacaaagctttgccacaacatgggaaggtgattgttatagactatataattccagaagttccggattcaagcaaaatttctatgcaaacttgtgttgctgatagtctcatgtttttagtgacaagtggaaaggaaagaactgagaaagaatttgagagcttgtgcaggaattctggattttctagatttcatgttgcatgtagagattcaccgtcggttctttcagtgatagaattttataaataaaattaggatcaatcccataataaataaggtctaaaataaaatttgataaagttatatgttggccttttttacctacatatgtggtcatattatttttgttgatgatagacttaaaatttaagctttaattactttattcttcgttgagaataaaatttatgttatagcttagaattgggacgtgttagcaattttcatattgttgaaggaacgataactaccgaatcataaaaggaaataatgtctaatctatgaagaatctattttatagatgatgattgtgtcttccttagagtttccacttcgatcatctatttttctaatgattccactcttcttttataatttgaattgatgtaatttgttcttttccggtgag

SEQ ID NO: 4509 - DNA, 636 bp, Glycine max
  Clone ID: PAT_MRT3847_104077C.1
gtgaattgtgcctatataaacagtaccgaaacctcaaagaaagcacacatggctagaagtgaatttacaaagaaattcaaaagcaaagcaagaatcatgaattccaatatttgcaattggaaacaaaatcaggttcttcccacagaggaagcaaagggggatgacacttacctctcagctttgacactatgcttcagccgaattttccctgcaatcttgaacgctgctgttgatctgaatttgtttgatatcatagccaaggcagagagttcatctttgtcagcctcggaaattgcttctttgctgcttccaaatccacaccctcaattggctaataggcttgaacgcatattgcctgtgttggcaagttactctcttctcaattgctccattcgcaccaatgaagatggtgtgagagagagactctatgctctctcaccaattggtcaatactttgcgtgtgacaacgatggaggctctttgggtcctctctcaagcttatttcatcgtggatattttcacgtcttgaaggatgtaaaggatgcaattatggaccctaacaacaacgaccatttccaaaatgtccatggaatgcctgcttatcaatatatgaagacagacgaagaaccttataac

SEQ ID NO: 4510 - DNA, 645 bp, Glycine max
  unsure (1)..(645): unsure at all n locations
  Clone ID: PAT_MRT3847_104078C.1
gatatgtttgaaagtgttcccaagggtgatgccattttacttaagcttgtatgtcacaattggttagacgaagactgtgtaaagtttttaaggaattgccacaaagctttgccacaacatgggaaggtgattgttatagactatataattccagaagttccggattcaagcaaaatttctatgcaaacttgtgttgctgatagtctcatgtttttagtaacaagtggaaaggaaagaactgagaaagaatttgagagcttgtgcaggaattctggattttctggatttcatgttgcatgtagagactcaccgtcggttctatcagtggtggaattttataaataaaatttatgctattacttgtgaaggatgatgacgagcatcataaataaaatcagttcttgaaggatgatgacgagcatcataattaaaatcacttatcatatttatgctatatatcacttagaatttggatatgttagcaattttcataatgttgaaggaagaatattgtaccaaatcataaaaggaaataatgtctaatgattctaatctatgaagaatctattttattgaaaaaaaaaaaggacctttgttggaanagcaattcaaggctcctaatttgagcaatgatggattgaagcc

SEQ ID NO: 4511 - DNA, 292 bp, Glycine max
  Clone ID: PAT_MRT3847_104079C.1
caggatcaggcgcccgcccacgcggccgtgcggcggggagatgacgacagcagggcctagctcgaaggagcacacacagcactggaggcgtggaaagctgcagccactgaggaccctcttaagatgagaacaagaaggataggtcccaaagtgagagcttacaaaggagtctgctgagctgcaaacccacaagatgaaacggatggagcatcaccaggattcccagagggcgcaccaggtatagatcctaaccatgcagatctgaaaggaacaattgggaaagagctctgtc

SEQ ID NO: 4512 - DNA, 604 bp, Glycine max
  Clone ID: PAT_MRT3847_10407C.1
gggtataacactagataatatgttgaaaagtacattgattactcctcttcattcaagaacttgactaaaaaaagcctgatttcaaaattcaatatctttaaaaatgaaaaattctgcaatctcatgctagggtaataaccatattgatgtaactcaattgattaaacagggtttggggaattattggaaacctaaacctcttgatatctgggattgatttatacagataaaaaaaatattaatgtaactcaattacacgtccactgctattgcgatttggcatcagagttcaaactgttgtaaaagacacaaaccacaacacagtgtaaaacctgcaaaaatgggcctagattttgccttatcctatagaaaattggtcttgaaatctccatagggaagtgatattatttgtcgaaactgttaaaatgttcatgaactaactaatcgcatgtcctcttctttattaccattgacctatgtttacacgctgcaacatgcattattgagctgacaaggaccgttttatttataagcctataaaccccaacaaaaacttatagactcattttttattatccctgacactgagcctttatgggaatta

SEQ ID NO: 4513 - DNA, 446 bp, Glycine max
  Clone ID: PAT_MRT3847_104080C.1
gaggaacacaggttctgcgtgagctactgcccgacagttgtggtatcggcctgagcaagggtgtcaatgttcatctggcgtgcaaacatccatgccaataggatcacataaacatctaggaagtgaagacaatgtccaagtcaagtcaagtcaaaggctctctcgttgggaggggcacggaacgtccccaagttgcaagaaggggctctttcatgtatggaggggcagagataatggtcaccagacgcaatgcggctgtgaatcatcgagagtcaagcttcccaaccttattgcctctcgtgcaacttgagagcgatcctgctgatgtgatggtagtaactagcgccttgatggcgttacctgcatatagtgttcaccctaaactcagtttgacagaatctgaaatgacctgcctgacagtattgtatggttctgcaggagcttta

SEQ ID NO: 4514 - DNA, 282 bp, Glycine max
  Clone ID: PAT_MRT3847_104081C.1
atcttcaaatttggacatgcaacccatcattttgacccaatcggaacagtaaaagggctaagatgttcatgggacattggacattgccacttcattacaccggaaactcttgagagaagattaattaaagaaattaaagatttcaacgaccgattaaaaaagggggttcatttgaaaatatatacaaggtattttgcacctatagattctgctttggttacagagagattgaactttgccttccttagcttttcctgagcctcatattaccagcctgtttat

SEQ ID NO: 4515 - DNA, 390 bp, Glycine max
  unsure (1)..(390): unsure at all n locations
  Clone ID: PAT_MRT3847_104082C.1
ggttactaccaatttaaagaaagagcgttacactccgaacaacactccctttctgagtttgtggaagatgccattgccatgacatgaagaccaaacccattattgccttagccttcttcttcttgtgctcaacctgaaagcaaaagaaacagatctgagataatgggttgttttcttcattgctttggttcctccaaaagcacaaaacctatgcgcaaggcacaacatcaccaccatcgaattgctagagacaggttggagaaagttgttccttgtggtatgtttcaccttccaatgatgtgattttgggagtgtantgtgttggggtgcattttttgattcttttgtgaatttgatagtgtttgttgtttgcttttcctttgtaatatg

SEQ ID NO: 4516 - DNA, 217 bp, Glycine max
  Clone ID: PAT_MRT3847_104083C.1
atcaatcaataccttacttcttccctcaattattcttactccattttcacccgggctttctgggtaattcattaatgccgaaaaacacacattgtacttccatccttatacatcatcagtaccacttactcttgacttggaggcaccaacataatctcttcaagattattaccaaagatcaaggtaaaaccaccactccctcttatatcgcattcac

SEQ ID NO: 4517 - DNA, 300 bp, Glycine max
  unsure (1)..(300): unsure at all n locations
  Clone ID: PAT_MRT3847_104084C.1
gntgaagnagngtaggnagganggaatnngggtngagattngnanacngttanatangntggagaagaaaannatagggangactgnngnagaggagagtngaaggagagtntgtagtgggagagngagannggngaggaanangcganttnggnntaatgngggatnaaaggangaagacnngannaatgnnaaatgcaangaagtgnaggtagtgaattgtnggggnanaaggacggnatgaatgatangttagatggatngagagntaganaaaaatngaaaggaagggaannntng

SEQ ID NO: 4518 - DNA, 485 bp, Glycine max
  Clone ID: PAT_MRT3847_104085C.1
tacggctgcgagaagacgacagaagggggctacttccaatttgaagaaagagctttgcactctgaagtctaaacactccctctgcgtttgtggatgatgccattgccatgacatgaagaccttattgccttagccttcttcttgtgctcaacaatgggttgttttcttcattgctttggttcctccaagagcacaaaacctaggcgcaaggcacaccatcaccatcgactcgctagagacaggttagagcaatgctctattcaggattactccgaaacggtggtaattggcactgcatcacaagaagtccaggctaaacctttggagcagataaacgtgagccccaaaaagaaagtaacttttgatgtcaatgtgaaaacgtacgagcctgatgaagttgctgatttccaacttgagaaaagtgaagagggtggagaggaaagtgctttggttgaaaagttaagccgaacaaagtcttactctga

SEQ ID NO: 4519 - DNA, 1748 bp, Glycine max
  Clone ID: PAT_MRT3847_104086C.1
atgaatgtgaataaagtcatcttgaagtttgtaactagagacccgagtgccttgggtttcataggaagagttgggagatatttgggctatggccactgggaagacggttatgtgttcgctgagccagttgcgtccgctaacatgcgcatcgacgtcagcgtcacgattagtgccccagccacccgacctcatcaagtgggtaaccagagaaggtggcttcgtgcaccgcgccgtcaagataacacaactcgactcctccaacggactgggcctggtggccaaggaagaaattccacgtggcagtgatcttattgtgctgccgcaccatcttcccttgcgcttcacctctctccaacaagacccttctctgctccatcacttggcgcgccaagtccctgaggaactatgggcaatgaagctgggtttgaagcttctgcaagaaagggcaaaagttggatcgttctggtggccatatataagtaatcttccagaaacatacaccgtgcctattttcttttccggggaggacataaagaacttgcactatgctcctattcttcatcaggtaaacaaaaggtgtcgatttcttcttgattttgagcgagaagtcaagcgtactttggtaagtcttacacaagataagcatccttttggtggtcaagaagtagatgcatcttctcttggatgggcaatgtcagcagtatcatctagagcgtttcgattgtatggtgaaaaggatcccaatgggatacgcattgacataccaatgatgctccccctaattgatatgtgcaatcatagtttcaatccgaatgctagaattgttcaagaacaagataccagtaactcaaggatgcaagtgaaggttgtggccgagacagcaatcaaagaagatgatcctctgttactttgctatggatgtttaaacaatgatcttttccttcttgattatggatttgtgatgcactcaaacccttatgattgtattgagctcaaatatgatggtgctcttttggatgctgcaagcacggcagctggagtttcttcaccaaacttctcagcacctgttccatggcaggaactgatcttatctcagctgaatctagctggagaaactgcagatctcaaggtgagcttaggtggtcaagaaacagtagaggcccgcttgttggctgcattgagggtacttctttcaagtaatgtggaaactgtgcagaagtatgacctcagcacactccagtctttagatgccgaggctcctctaggtgttgcaaatgagatagctgtgtttcgcaccctaattgctttgtgtgtcattgcactgggacactttcccaccaaaataatggatgatgaatcactgttgaagcagggtgcttcaggttcaaccgagttagctattcagtacagaatccaaaagaaatctgtgattatagacgtaatgagaaatatctcaaggaggttaaagcttctatcatcaaaggaaacagcaaccgcagaaggctaagttatagttaacaattagtaattatttgcttgctgtcatgaatctccttccttcgacattttattctccatcttactggagagtataattttgattgaaattacctgtgttttcaccatttggcaatcttctattgaactataaacagtgatatattttttttcagttggtcattatgaaaacttcataatttaacttgtataactcgtattattttcataatttattctcggaattttat

SEQ ID NO: 4520 - DNA, 829 bp, Glycine max
  Clone ID: PAT_MRT3847_104087C.1
acggctgcggaagacgacagaagggggttactaccaatttaaagaaagagcgttacactccgaagtcaacactccctttctgagtttgtggaagatgccattgccatgacatgaagaccaaacccattattgccttagccttcttcttcttgtgctcaacctgaaagcaaaagaaacagatctgagataatgggttgttttcttcattgctttggttcctccaaaagcacaaaacctaggcgcaaggcacaacatcaccaccatcgaattgctagagacaggttggagcaacctacggcgtgttgttctgttcaggattactccgaaacagtggtacttggcactgcatcacaagaagtccaggctaaacctttggagcagataaacgtgagccctaaaaagaaagtaacttttgatgtcaatgtgaaaacgtacgagcccgagcctgatgaagttgctgattaccaacttgtgagaagtgaagagggtagagaggaaagtgcttttgttgaaaagttaagccaaacaaagtcttactctgaagtaagttcggtgacttcagcgaggtcttaccctacaaaccataggtaccacagttgcacgtgtagtgatgatgaagatggagcaatggagtattgggatagtgatgttactgatgaggatgaggatgatgatgatgatggtgatagtgacatgggagaagagtatgatgaagtggaagaattttgagatttgtactcaagggtctagtggttgtgtggtatgtttcaccttccaatgatgtgattttgggagtgtattgggttgggctgcattttttgattctttt

SEQ ID NO: 4521 - DNA, 229 bp, Glycine max
  Clone ID: PAT_MRT3847_104088C.1
aaacatatatttaacacttttcataatcgaataaataatacgggcataagggccaacttgtgtacattatcaggtctatctattatcatatacaatattaaacaatgacaattacataacccaccattaaacgacttatacataagaactcaccctaaaagatcattgtttataaccacattcaacaccttccaactatttacactctacacctgattgcagctcaact

SEQ ID NO: 4522 - DNA, 657 bp, Glycine max
  Clone ID: PAT_MRT3847_104089C.1
ctgcccagctcgaggggctcatgggccacaaagcggtttgtttcgttgcgcctttgatctctgtccccgctgcgtctctcgtaatcatgcctaagcaaatccacgagataattgacatcacatttcgttgcgcctctgttctctgtcactgctgcgtctctcgtaaccatgcctaagcaaatccacgagattaaggatttccttctcactgctagaaggaaggacgcaaggtcggtgaagatcaagaggagcagagatgtggttaagttcaaggtcagatgctcgaagtacctctacacactttgtgtgtttgacccagagaaagctgataaattgaagcaatctcttcctccaggtttgagtgttcaagacctgtaaaggtacagggcgagagaccaagaagaagcaattcattgattcttctgaacttcgtttctctgtagttgaaacttgagattcttttcagtttcttttatttttagatcattgctaggacatggttgttttcatctgttttggaaaatgatacttgaatttatgtctaatggattattctagcgctgtggaactatatacacgaatttattgtatgttttaattttaattggtgttttcagtcaggctacaagcctacaattatcagaatagcgaaaagta

SEQ ID NO: 4523 - DNA, 711 bp, Glycine max
  Clone ID: PAT_MRT3847_10408C.1
ggcacgagggcaaagttggtatttgcttcaacaaaaaaaacagaaagagaaatctaatcagagagagacaacaacacaagaacatgggtagagctccatgctgtgacaaggccaacgtgaagaaaggaccatggtctccggttggggatgctgcactctgggccgtctttgaatcgtcgggtactgctggcctttgggttgctctccctcagttcgctgggctcaagagatgtggaaagagttgcagacttaggtggttaaattacttgaggcctaatatcaaacatggtggatttactgaagaagaagacaacatcatctgcagcctgtacattagcattggaagcaggtggtccataattgctgctcagttacctggaaggacagataacgacatcaagaactattggaacactagattgaagaagaaactgctcgggaggcgcaaacaatctaacttaagcgcaaaagacacaaacaatggaatagaggagaattcttattcaaatgccctaagctcttcagctcttgaaagactccaactgcacatgcaacttcaaagccttcaaaaccctttctctttctacaacaacccggcgctgtggcccaagttgcatcctttccaagaaaagatgatccagagcctgcagtctttgaatgatggctctagccctgtgatgcaaaatgctttgcctaattcccacatgtcga

SEQ ID NO: 4524 - DNA, 614 bp, Glycine max
  unsure (1)..(614): unsure at all n locations
  Clone ID: PAT_MRT3847_104090C.1
tgggcggccgtcctttttttttttatttgaggtctaacaaaactgtcaaatgcatgcgatcctagtgcacgatctgcgacaagacacattttgtacgactagggccacgctacttgcaaataccgtagaatgtgcgattttatatcgattattcatagacaactgctggttattctactgattcgcaaattttgaccccgactaatcatccgttgccggaaactattatttaccaacctgttctccgtgaactaccccgtccaccggggggagggtttaaggggaccttaagggggggaatttgggggaaaacaatctctttcgggtttatattgggggggaacaaaggttttttaaagaaaaaaaacccgggggggggttttttttgttggggaaaaaaactgggggggggggggccttcctttttttttaaaaaaaaaaggngggcacttgttttttttttcctccccccaaaaaaaaatttttggtttttaaaaagggggtgctccacaaaaagttttttttcttttctccacgaaaaataattttttttttttattaaaaaaccccccccgcccggggaaattttacaaggaacacgttttttttttttt

SEQ ID NO: 4525 - DNA, 460 bp, Glycine max
  Clone ID: PAT_MRT3847_104091C.1
gactttcttaattatctgatcaccaactgataccatcgcaatgcgagccggtgcgggcatggtatgataattcaatgaactgaaatccatggctgggttgcctaccagaaaaaccaacattgccattaccttaattgctagcatcggtgcaagagaacagtgcatgcagttgtggtcaacacttgacaagaagaaattagagactatactctacttgacagacctgaactatatgaaactgaaaaaggaagtggagtaccttatctggtaaggatggattgctttcttggaattcgagttgaagcacagcttcgtttaccgtaagcacaacacatcacctgaatactatgctagactgtactgtactataccaaagctaactatgctaggttgcactgatgcttttcatgtgatgaaggagctgaaagagactaagattgcataccctaacggcttgatt

SEQ ID NO: 4526 - DNA, 430 bp, Glycine max
  Clone ID: PAT_MRT3847_104092C.1
ttttttttttttatttttttttttttttttttttttttatttttttttttttttttttttttttttttttttttttttttttttttttttttttttggggccaaccaaaaaagccgggggggcccctttatttccttttttacggggcacccattttccggaaaaggggcccctccctttttccaaacaacttaggtcccaaacctgtttaaagggggaagaaacccccccctcctgggttttatttaaaacaaaccctggaccccccatactaggggaaaaaagggcccccttcttaaaacaaataaatttaacaaaccggggccggaacacagaaaaaaaaaacccccccgatattttccaagaggccctccccgtttttctaggggggattggcgcaaaagaagaaaaaaacacgggcgagcggttt

SEQ ID NO: 4527 - DNA, 438 bp, Glycine max
  Clone ID: PAT_MRT3847_104093C.1
tttttgcaaaacaacttcagacctgaatattaaataataatttacaaatagaaatatgtagaatgatattatggaatttatgtaatttcagttttctatgatatatgtgcatggaatttacgaaccattaatgttcagtttgtaaaacttaagtttgacttatttaaataattgagtcaaatccaaagctttagtttgtttatttaatttatttaacaagtcgaactcaatagtttactaataacttaactcatttaagtccctagttgtaaacccattgatacctaagttcaattttttagaataaaaaagaaagaaaaattcaacttcaatcctctggctttttactaaattatactaacacatgcttagtttgttttttattcattttaataataagaaggaaccgagtggaaatcatgtcatttctttcaagct

SEQ ID NO: 4528 - DNA, 244 bp, Glycine max
  Clone ID: PAT_MRT3847_104094C.1
tttgtccgtttacgcgtgcggcgaggatcttagcaggacgtgcacgtggtgacccaatctcggctggctcatctggccatagggaacgatcactagatagccgtgcagcctgccatacaggctttatatgaaggccgaaggtacacctcggggcgaacatggactcttggaccgagcccatttgcagataagagacatcgtggaacaaggtcagcagcagtcaggtgaaattataagacgggaa

SEQ ID NO: 4529 - DNA, 828 bp, Glycine max
  Clone ID: PAT_MRT3847_104095C.1
aatgtggcggcaaaaatttctacaaggtaaattttgcattgaatgtgcctcaattcagcagccaattcaattagttacagggttcattgtcaaaatcatagttattaccctgtctcccccaaatttatagtttacttaaaaattaccagtaattgaccaaaacaaaaaatcataatgcacttctttaccatcacttgcattcacttggatgtttaaatataccaaatctacatagaaagggcaacaaaaaaaaagacaaaattacttcggatcgctgcaaccctcttcatagaaaaaaactgagcaaaagtaacccgttaatccaaccatctcacaaagaatatttgaactcaaaatttcaagcaccagtctttggtttcgatttttgtttctttgcatccaatgatgacaagcccttgcccaaaccaaccggagcttgttcctgttgttgcacaggagttgtttggcctttcttggtatcaattagatcacttggaggaatgtcatttgcttccttctttactcgatctgcatttccattgtccacagcatctgaagtcacacctggatttataatattcagaagttgggtaaggggaggcaaggcttggactggtacaccatggggacgtatcatcaggccccttgctgcagcctttctcctgacttcagcagctgcacgtgcagccctttcatcaattccccttcctctgggcagtgcctcacccattactgcagcattgagagatttgttagcagatgcacctgaacttccagatcccccagcaactgcggcagcttggaatgcatgtatcaaatcagggtgag

SEQ ID NO: 4530 - DNA, 469 bp, Glycine max
  Clone ID: PAT_MRT3847_104096C.1
atttttcaataagatgggaaatgttcagacttcctcaattgccaaccaattgttgccatttgagtcgtatattgtcgagattcccgagctcaaatatgtggcaagtttgggcgccacgcggttcatgaaagtggcccgggttgagcacttcagcaagggcccactggtggtcaaagtgttcgtcatcattgatcaacaagtggcggtggagccgtaccgggaccaactgttgcagatcagccgacggctcatcaaacacccaaattttgcaccggtcaaccgagtgtttctcacttctcgtgccgccattctgtgccgacctttctacaagtcgacactgtacgaccggctcagcacgcggccctatttgacgggcattgagaagcgatggatcgcatttcaactgctcaaggcattggctcaattacgcattgcaatggtacgccatggagacataaaacctcaaaat

SEQ ID NO: 4531 - DNA, 712 bp, Glycine max
  Clone ID: PAT_MRT3847_104097C.1
ggttgcagttgcagctctgttggtaggatagagaatctcttacttcattcaattcagtttcaatgtctatctctccctccctcactcctcttctctgaactcaaccatgtctttttctcctctccactcaccacttcattttccccagcgcccacttttcacttccattcgccccattccaaaccgaacattcatctccaacccccgccgaacgccacgaaccccactctcactcgctcctatcaccttcgccgccaagtccacaccctccccgaacgacgacgttttgttcaaacgcctcgttcgcgcgctgttctgcttcgccgttggtttctccgcgctcggcgcattccgcgctcctcctcctgcattcgcaattgccgctccatggacttattggggaaagagaggcgccgagaaagagagagccaagagtcatcagtactcagactgcaccgataggctgcttgagacggtgtcgtttctgctgaaaaccgtggacgaggttcgggaaggcaatggtgaggtgaacgaggtggaggcggcgctggaggccgtgaaatcgaagaaggaagagttgcggaaagagattaacgggaggctttacccggcgctgaagaggttgaggagggaaaggaaggcgctgtggaaacggtccggggagatcgtcggcgagatattgaaagcgacggcggagtacgagaagttgaag

SEQ ID NO: 4532 - DNA, 438 bp, Glycine max
  Clone ID: PAT_MRT3847_104098C.1
gggtcgacgcacgcgtccgatatttataacccaaatattcatcaactggatgaatggataagtaaattgtggtatactcctattactcagttattaaaaagaataaggaagacttatgtaagattgcccaagatttgatgttcagtgaaaacaagaaaatcagagaataatgcataatcatattctaaaataaaaaatgtacatatttatgtggtgtagaggttatagaaaaagagaactgtgattgtagtggggcaagttatagcaaatgggtttgtgggcaccttatctataccataattcaatgcaaacataaatgttcttaaaatgctggcatgtcttcataacctaaagactctggggtactatttctaaatgtatgtctagtaatgctgaaattaagagtgctgaatttaaaagcagtgccttttatagata

SEQ ID NO: 4533 - DNA, 450 bp, Glycine max
  Clone ID: PAT_MRT3847_104099C.1
tgcggagacagaaggccgcctaccggggaggccggaggccggctagtcgcggactcgggcgaacccaccctcgcgatctgtcaagtctgtccccaggggaggtccccctttcgggaggaagtttttaaggggatttctcaaaatcacccccgcgcttccttcactccttccttagagccggagcgcgcagggaccatgtcggcggagaccgcgagcggccccacagaggaccaggtggaaatcctggagtacaacttcaacaaggtcgacaagcacccggattccaccacgctgtgcctcatcgcggccgaggcaggcctttccgaggaggagacccagaaatggtttaagcagcgcctggcaaagtggcggcgctcagaaggcctgccctcagagtgcagatccgtcacagactaaggagatggcaggcattgacagcttcactccatg

SEQ ID NO: 4534 - DNA, 500 bp, Glycine max
  Clone ID: PAT_MRT3847_10409C.1
gggttggtaaatctttttttttttttttttccataaattatgccgaaaaatgttatttgaggagcatcaacataatgctctgacacactaataggcaaataatctaaaaatgtctggaatttacattatgctgtatatcattttcgtcatttcctccttagacagattcctgatagggctgaatactgttctgaatggctcccataatcttaataactatgtacatgggtataataattccgctagcctttaatataattacagttagtagggtaaatgggtaatcttccgttccatatgggagcaagctattgcaagtgatcgacagcaagacgcgcttctgtcagcggcagaactgcattcagagtaatcgctttccatttccactccttaaaccataatctctattctggcgttggacggttcttcctcctccctaatggacatgtgttaatcatttatctaagacttcttgggcggaggagctgtatatccgggtt

SEQ ID NO: 4535 - DNA, 292 bp, Glycine max
  Clone ID: PAT_MRT3847_1040C.1
attaagcacatgttatcaaaaccgggttggacaataaaataggaaagtgggctttatcattaacataatattctttaacatacaatccttttaaatcttttaagtttcatattgtcgctcattttatttgaaatcattcatttatctaaattcttctacattatttctatacaaacccttttattttttatttttattcatctaaacacaaacatataactgtaattgtaaatttaaatatttcccccaattaatttccaactaatattaaatataaaattaaaatgctttt

SEQ ID NO: 4536 - DNA, 763 bp, Glycine max
  Clone ID: PAT_MRT3847_104100C.1
gcgcgtcccggcagggagcacagctcatcctgtgctgataacatcgagaagtgttcagtgcctggtaaagtacatagaccttgcttcacttggaactcggccttgatttctgccgttggtcataatcagcagagttctctctaaacctttgacatggagacgtccagctccatgtctgtggagacgactaggtctgtgcaggtggacgaatggcagaagaattactgtgtggttacatccagcatatgtacaccaaagcagaaggccgatgcataccgtgcactactactgcatattcagtatgcatatgccaactccgagatctctcaggtctttgctaccaacctgttcaaaaggtatacagaaaaatactctgcaattattgattctgacaatgttgtaactggcttgaataactatgcagagagcatttttgctttggcaggatctcgacaggctgacagtaacaagtggcagtctggattgtcaatagataatgttttcaaaatgagttgtgtacaggagatgatgcaggctggcaagaaatttgaagagtctctgttggaacctgctgatgcatcagtagtcctgtgtaaagagcccaccgcctttgaggttcctcagcttagtgtttgtggaggttctgaagacgctgacatattatccagttcacgtcatgacacagataagacccaagccattccagggagcagtctgagatgctccccttttcagagtgctcggctgcctaaagaaactaata

SEQ ID NO: 4537 - DNA, 187 bp, Glycine max
  Clone ID: PAT_MRT3847_104101C.1
accttatcatctcaaaatctcttcttcaataattcctttctcttttccttcttgatattttaaacacgctaaaacctaatagatccttcttaaatgttacccacaatcattcacctcttcctttccctaaacaccttcccatatgttcatttccacccaccattacgaactattgactactacctca

SEQ ID NO: 4538 - DNA, 340 bp, Glycine max
  Clone ID: PAT_MRT3847_104102C.1
gagatataaacttgatgaagttaccaggccggactaaatggctcatcacccaacacttatataaccttgaccgggtttgcataatgcctgcaaaacaaagcgagcctggagatgagaaagcgcgcccccagaaagtggaccaaagaaaattgtcaagaggatacggcatgcacatacccaaatgatacctgataggggcaaatggtgacgcgagacaaatatctaatgagatgccagagcctgagccagaaaagtaaagtgtaccccggtgagagacatagggcaggctttaagcccatgactagcaagtttgcaccaacgacaaataacacattaccat

SEQ ID NO: 4539 - DNA, 1346 bp, Glycine max
  Clone ID: PAT_MRT3847_104103C.1
cagtttttctaagtttgcatgtaatgcgcataccatttgtgacagtgagttgagacctgtgggaacaggattgtatcctgttatttccatcatcaatcacagctgtttgcccaattctgtgttggtttttgagggaagctcagctttggtacgtgcggtgcagcatataccctcaggtactgaggtgctgataagttacatagagactgctgaaagcactatgactcgacagaaggctctcaaagagcagtacctattcacttgtacatgtcctcgctgttctaaagtgggtcagtatgatgatatccaagaaagtgcaattctagaaggatacaaatgcaaaagtgaaaaatgtggtggtttcttgcttcgtacaactgatgggaaaggattccaatgccaaggttgtggactaattagggacaaggaggagataaagagaattacaactgaaattaaattgctatctgaagatgcttctaagccctctgccacttgcaattatcaagaagctatttccatatataaaaggattgagaagctgcaaacagaactctttcatcctttatcaatcaacttgatgcatactagggagaagattttgaagtcactaatggagctggaacactggacagaagctttagcatattgcaaattgaccataccattctatcaaagagtgtatccagctgttcaccctctgcctggcttgcaatattatacttgtggaaaactagaatggtatcttggagacacagaggaagctgttaaatcactgaccaaggccgtggatatactacggattactcatggcacaaatacacctttcatgaaggacctcttgatgaagttggaagaagcccgtactgaagcttcttacaaattttcctctaaagagtagtagaatggcacaaatacaccttttaataaggacctcttgatgatgaagttggaagaagcccgtgcctaagcatcttacaaattgtgctctatagagtagtagaatacaagttgatgattacagttgctctgctgtttgtagaagctagtcattaaaactgaatcacacaaaaaggattaataggtgttttcattagtgcttgcctagttgctcagtgagtcgcatgaatctcaatcggatgaattgctaacggccaaagagatggatgggaattatgggacaatttactttctattggtaggaagggtgcctcttttttttccgcttttttatatctttttgccaacgtgaatgttttaaacctgaaaagatacatgaaccatatttttttagaaaaatctacacgcatgatttgtttaaaaaaaaaaaaaaaaaaaaaaaaaac

SEQ ID NO: 4540 - DNA, 522 bp, Glycine max
  Clone ID: PAT_MRT3847_104104C.1
gctacacttatggtgcctgctctaggctgatactcatgactaccaatcctgataatgcagtatagtagtatatccagctgtgccttatcagatgcggaaggcctcattctaggcaggggactattgacagaatgctcatgatgtgacagactatgaagccatgacgatgagattcagaggatgcagcagctagagtaccactaccaatggtgagtagtgctcaagggaaagatctcgcactggttaaagttaatgtagcatgtgcatgttgtaggctagacatcaagatacactgcagctgcattgatggaatctggcctagcataaagactgcagggctaatagtaagagtattatagtactgatgtcttatgctagctatgacgttaatcagccccaagagaaagattcagaagaaggatatcttctcctttgatattaaatctcgctctagataggaagcaggctggctctacaaaagcacagtttggctagaggaataagccttcaatctgatataaa

SEQ ID NO: 4541 - DNA, 761 bp, Glycine max
  Clone ID: PAT_MRT3847_104105C.1
ccacgctggcacttggcaggctttcatcttccttcaacaagcctttacgtcctctcttcaatgctggctcagtttactacaagtcctctttgcctgctgaagctgcgtacgacaatgagaaaagctgtgatacgggactggaactgataccctccgagaatttcacttctgtctctgtaatgcaagctattggctctatcattactaacactcggaatgaaggatatcccggtgcaagatattatgggggaaatgagtatattgacatggcagaaacactatgtcaaaaacgtgccttggaagcatttcggttggatccggctaaatggggagtgaacgtgcagcctctgtctggttcttctgccaattttcaagtttacactgcattgctaaaacctcatgatagaatcatgggacttgatctaccacatggagggcatctttctcatggataccagactgacaccaataaggtatctgcagtctccttattttttgagacaatgccatatagactgaacgaaaacacgggacacattgactatgatcagttggagagtacggcgaaactcttcaggccaaaattaatagttgctggagctacagcttatgcacgtctgtatgattatgcacgcattcgcaagggtgtgtgataaacagaaagctgtgctgttggcagatatggcacacatcagtggattagttgcagctggtgttatcccttcaccttttgattatgcagatgtagtgactaccacaac

SEQ ID NO: 4542 - DNA, 735 bp, Glycine max
  Clone ID: PAT_MRT3847_104106C.1
ccacgcgtccgccaacgcgtggggcaatggcgcttggcaggctttcatcttccattgataagcctttacgtcctctcttcaatgctggttccctttactacaagtcctctttgcctgctgaagctgcgtacgacaatgagaaaagctgtgatacgttgaatgctccacttgaggttgttgatcctgagattgctgatataattgagcttgaaaaagctagacaatggaagggactggaactgataccctccgagaatttcacttctgtctctgtaatgcaagctattggctctatcattactaacacacggaatgaaggatatcccggtgcaagatattatgggggaaatgagtatattgacatggcagaaacactatgtcaaaaacgtgccttggaagcatttcggttggatccggctaaatggggagtgaacgtgcagcctctgtctggttcttctgccaattttcaagtttacactgcattgctaaaacctcatgatagaatcatgggacttgatctaccacatggagggcatctttctcatggataccagactgacaccaataaggtatctgcagtctccttattttttgagacaatgccatatagactgaacgaaaacacgggacacattgactatgatcagttggagagtacggcgaaactcttcaggccaaaattaatagttgctggagctacagcttatgcacgtctgtatgattatgcacgcattc

SEQ ID NO: 4543 - DNA, 277 bp, Glycine max
  Clone ID: PAT_MRT3847_104107C.1
gaagtttgatttgtgtgcagtggttgttgatgcatttgttgatgtggcggaagtgtggcctatggctgatgctgtgacatgctccccaacatagtggattgcttgtattccagtaattgcttactgagctgaaccttatactgcttgttgaactaaactgaagcttctaattccatgcttatgtggctacctcaataacgctagctggaagcagtatgttaactcttctaatgcccgaaataccgttgcttattgtgggattccctttccaacttgt

SEQ ID NO: 4544 - DNA, 117 bp, Glycine max
  Clone ID: PAT_MRT3847_104108C.1
caaaaaccaaagtgagagaggaaatgatgaagccatcgatgctcagatctcttcactcttccgccaccctgggcgcctcccacgtctcccggcgtggctacacctccgagccggtgg

SEQ ID NO: 4545 - DNA, 418 bp, Glycine max
  Clone ID: PAT_MRT3847_104109C.1
agtggtagagcgtcagtcagcttcaccgacattaagtcggaacagacaatcgtgttacacagctacttgccaattcacacgctcgagaagtgctactacgaagactcggtccatggcaaggagaatgtgccgacccagtcctcgacctctcgccgcagctcgatgatctcaaccacttcctcgccctccttcacgtactccttgaacgccgctacgctccctgggttcttgcggccgttcttctcggctgtctccttagccttggcgtccagggtcttggtgatgttgacagctctgtccacgatgtccgcgacgcgcttgaagtcgccagtctggaagccacgcgttgtcattgctggcgtgcccatgcgcaggccacctggcttcaaggcgctcttatcgccaggcactgtattct

SEQ ID NO: 4546 - DNA, 928 bp, Glycine max
  Clone ID: PAT_MRT3847_10410C.1
tacgcccacgcgtccgcccacgcgtccgtacggctgcgagaagacgacagaagggggagaaagagaaagcatagaaaggaaacgaaaaaacagagtacccgacagaatttgaaaacaaaggctgaaatttgaagaaactgagatcattgggtgtgaaatatatggcagaggttgtcctgctagtcgatgatttgaaattactttctgcgagtcctcgttgtagaatttgtcatgaagaagagtttgaaagcgtagaaaccttggaagcaccttgtgcttgttctgggaccgttaagtttgctcatagagattgcatacagagatggtgcaacgaaaaaggaaatacaacctgtgaaatatgtctccagcaatatgaacccggatatacagctcctccgccaaagaagtctaagataaatgatgaaacaatgtccattagggaggaggaagaaccgtcaaacgcaagaatagagattatggttgaaggagtggaaatggaaagcgattactccgaatgcagctctgccgctgacagaagcgggtcttgctgtcgatcacttgcaatagcttttacactagtcttacttgtaagacatcttttcccagtgcttacaaatggaacggaagattacccatttacactacttactgtaattatactaaaggctagcggaattattataccaatgtacatagttattaagattctcggagctattcagagttgtattcagcactataaggatgctgactatgatacatcaatgtctgaggaagatgacgaagatgagatacatcataatgtaaatccaagacatttatagattatttgcttactagtgtatcagagcattatgatgatgctcgtcaaataacattttgtggcataatttatgataatggaattcagatcgaaaaaaaaaaaaaa

SEQ ID NO: 4547 - DNA, 932 bp, Glycine max
  unsure (1)..(932): unsure at all n locations
  Clone ID: PAT_MRT3847_104110C.1
caaatactacgggaggacaaatttataacaccttttctttaatatttaaacacatacgcacgctatcttcttctagactcttccactgtcacttgctgtcgtacggcttctcactgggaggacaataatatggggaaatcagggggtagaagaaagaagggtggttccaacgccaaccaaggtggtggcgttgataattcgggttcaggtgcggcagccccaacggctaacggtggggtggaggtgaagaaggcgaatgagctgaaagaagaagggaataggaggtttcagaataaggactatgcgggcgctcttgagcagtacgagagtgctcttcgtttaacccccaaaacgcaccctgacagagccgttttccatagcaacagggctgcgtgtttgatgcagatgaagcccattgattatgaggctgtcattgccgagtgcaccatggcgctccaggtccagccacgctttgtccgggcacttctccgccgggcacgggcgttcgaggcccttggaaagtatgaaatgtctgtgcaagatgtacagttcttgctggcagctgatcctagcaatcgcgacgcattggagattgcccagagattgaggactgcatttggggtcgcgccaggaggcccagcaggacctccatagtcgcccctccccagctgcccttggtgcttcggctgtccgtggtgcccctattgctggattagggccttgtttgccggctcggcctgtggcaaagaagggagcgcattcggcagttggatctgntgtgtcgcccaataatacaaaccagacaagtcacagccagttttaccaactgaaaatggttctgacaccaagtcccagttgccaaaactggtattgaagtcttcaaaaggttctgcaaagccaccctaccctaaaaaggaagatcacaaggaact

SEQ ID NO: 4548 - DNA, 305 bp, Glycine max
  Clone ID: PAT_MRT3847_104111C.1
aatacttttccatatgggtacttcgaaagttctcagcattgttttcttcgtgctattgggcgtaggcatatgctccgctgcaagaacactcctcaccattggtggaggtgtgcatggtgagataggtgttggtgttggtgtaggaggttatggtggtggtggaggttcaggtggaggtggaggaagtggaggcgcgggagggcatggtgtaggtagcgacggaggagcagcggttggcggatacgggggaggcggtggtggaggaagtggaggtggtggtggtgctggaggtgttgatgggggtg

SEQ ID NO: 4549 - DNA, 695 bp, Glycine max
  unsure (1)..(695): unsure at all n locations
  Clone ID: PAT_MRT3847_104112C.1
gttgcgcgtagggaggacaataatatggggaaatcagggggtagaagaaagaagggtggttcgaactcaaaccaaggtggtgcggttgataattcgggttcaggtgcagcagcagccccaacggctaacggtggggtggaggtgttggattcgtcgatatttttgaagaaggcgaatgagctgaaagaagaagggaataagaggtttcagaacaaggactatgcgggtgctcttgaacagtacgagagtgctcttcgtttaatccccaaaacgcaccctgacagagccgttttccacagcaacagggccgcgtgtttgatgcagatgaagcccattgattatgaagctgtcattgtggagtgcaccatggcgcttcaggtccagccacgctttgtccgggcacttctccgccgggctcgggcgttcgaggccgttggaaagtatgaaatggctgtgcaagatgtgcagttcttgctggcagctgatcctggtaaccgcgatgccttggagattgcccagagattgaggactgcattggggccacgccaagaggcccagcaggacctccacagtcgcccctccccggctgcacttggcgcttcggctgtccgtggtgcccctattgctggattagggccttgtttgccagctcggcctgtgggaaagaagggagcaattcggtggntggatctgtt

SEQ ID NO: 4550 - DNA, 292 bp, Glycine max
  Clone ID: PAT_MRT3847_104113C.1
tcgttgaattccaactccacttaatcaagagatatggaggcttaaatgttgagatgtgaatcgcaattatttgagttctcatatagcctatcctgtaaccctaggatatgagatcggaattcctagtcgtattacaactccacatgatcaagaaatatggatgccatactgtccatatattaattggaatctatactttcacatattaagcctatcctgaagccgggcgaactgcgactagagtgcttggcgacccgggaattaaatacggacctgtaccttcaggcctacc

SEQ ID NO: 4551 - DNA, 268 bp, Glycine max
  unsure (1)..(268): unsure at all n locations
  Clone ID: PAT_MRT3847_104114C.1
cctnggctcccgtgaaantcttcctccngcaggccaganctcccagnaanagtccctcttgcggctaaacnggcagancccacccttaanccctcttggaaancctaacccgctcctccgtcctccccnggcaanaggccncngcgatccacgtcctcctcaccaccgctcgacnccngcngnngtccttcctcaancctctcctctccccccaanccaactcctccctccggtccctcctcctctcctccctcccggganagcccct

SEQ ID NO: 4552 - DNA, 366 bp, Glycine max
  Clone ID: PAT_MRT3847_104115C.1
gttgttagaacttataatgtcaaaaaagaaaagggcttgaatggaaactactttgaactagtatctaggacctgtgctctcattaaccagaaatgtcatgaaaaaaacaaccgatatgcaaaagtttgtcgatggaccaaatgagggcgagaaagccacaatccaggcagaggagaggatgaaaacatttgccaagattgttgccttgtagacccttaaagaccactaagaaacactcggcttccgggatcataacatgacaattctggataacgatatcacctgacctatagacaagtctatggaagtagccatccaagacccattattatctgacctcgacgacttagcaaccagacgcgtggg

SEQ ID NO: 4553 - DNA, 2185 bp, Glycine max
  Clone ID: PAT_MRT3847_104116C.1
gcttgtgtgtatatgcatggacattgctattgttttaagtgtttggattttagggtttgggaagtacgtctggtccggaattcccgagtcgacccacgcgtccggcaagaaccaacaacaccaacagtttggtgccggctcggcagaaatcaatgaaacatcacagttcgaatgcatcttctaatggtggccacgcgcaacactctgtgccccaggtctcgatagctgcaactgggtcccggaactcctctccaaaggaccacacacaaagaagtggatttgcgtctaatgatcatccacagcagcgtaattcgtttagaaatcgtaatggtggtcaacaccagcgaggagatggttctcaccatcacaactatgggaacaggcgtgatcaggagtggaataataatcgaagttttggcagtagagatacacatgtgccaccaagagttgctcctagatttatacggccacctccacctccacctcctaattctgctcagttttttcatccatcaccaatgcggccttttggtagtcccattggtttccatgaactagcacctcctctggtatttgttgcagctccacctccacccccggattcactgagaggtgttccttttgtgcctcctatgccacatcatcccctgttctttacaggtccagaccctcagttgcacagtaagatagtcaaccaggtcgactactattttagtaatgagaatttagttaaagatgcattcttgaggcagaacatggatgaccagggctgggttcccataaaattaattgcaggcttcaacaaagttatgcatttgactgacaatatccaggttatattagatgctattcaaacttcatctgttgttgaagtgcagggtgacaaaataaggagacaaaatgattggaggagatggattatgcatcctcctgttcaattttctaatgctacaaccataggagtgttgaatcctgacaagctggcagaacaagtacagaatattgctctggagacaagtaactatgatggtgcaggaggactggatgttcagccagatacttcacaacatagatctacatttggggatttgcagcagctctccactagtcaagttggtattcaaggctcagatcacttcattccagcaagaaattagagctgtagatgtgctttagcactatgttttttggagagctctcaagagggacacgggaagcaggtatctaagaatggtctcagttttttttctcatggcacaatgggaaatgatatgcctcgaagcatatttagtaaggataaaacatgattgagaaacggaaggaaaatacctagtataaaacagaaagaaaaaaaaaagaaaaagaaaaaagagaggatcaaatggtaacggccccctcccccctctcaccagaagtacagaaaaggctttttctttttttcctttatgtttatttttggctgtggagctagttagcacgactcttgtgaatactctttttatgggtataatgtcctcactcttacgggggaattatgatttgcttcaatatgggggaacttttgtccttgtttcccgtctgcccctctgctgtttttaaaaatctttggggtcagcttcccaccagttttaggagcatgtgttatattagttcatgtcatgggtgttgaatgtgtttgatagctacctgctgccactgaaggaagagcaaatatatagctttctgctgctgctggagctttaaagtgtgattgtttgactttgatgtcacttgcaagccattatatctcccgttacgtcatacatatctggtattacattgatatttatatctttcgtttgttgaaactcgcgaaaattctgaagccataagtggtccctatggggtcattaagactaattatacaggttacagctgtataagtggatattcctgtctatttggacctgaagttgcatggaattatatttgactattccataacgccgccgccgcctcatcttccctttcatacccggtgttgatgtagttagtttattatgacctttggtgttacgggcatagtcatttttattgattaacatgctggttaattttgattgtgtacaaaaaaaaaaaaaaaaaaaaaaaaaaaaaaaaaaaaaaaaaaaaaaaaaaaaaaaaaaaaaaaaaaaaaaaaaaaaaa

SEQ ID NO: 4554 - DNA, 668 bp, Glycine max
  Clone ID: PAT_MRT3847_104117C.1
accaggttgactacttttttagtaatgaaaatttagttaaagatacattcttgcggcagaacatggatgcccagggctgggttcccataaaattaattgcaggcttcaacaaagttatgcatttgactgacaatatccaagttatattagatgctattcgaacttcatctgttgttgaagtgcagggtgacaaaataaggagacgaaatgattggaggagatggatcatgcatcctcctgttcagttttctaatgctacaaccattggagtgttgaatcctgacatgctggcagaacaagtacacaatattgctctggagacaagtgactatgatggtgcaggaggaccggatgttctaccagatacttcacgacatagatctacatttagggatttgcagctttccactagcgagggtcctggtcctggtcaagttggtattcaagaggctcagatcactccattccaggaagaaattagagctgtaaatgtgctttagcactatgtttttttggagagctctcaagagggacacgggaagcaggtatctaagaatggtctcggtttttttcttatggtacaatgggaaatgatatctctcgaggcatatttaggaaggataaaacatgatggagaaacggaaggaaaagacctagtataaaacaga

SEQ ID NO: 4555 - DNA, 832 bp, Glycine max
  Clone ID: PAT_MRT3847_104118C.1
atcttggttttatatagttagaactttgctaacttccaatagcaaggaatattagcatagattgagattaagaattctgagtaataacctaacgaatctttttgataattgcagttgttgttgactgtgaaaatgttgggctacttggtctgacgcatatagggagccgaagagtagtgcaaatatcatgtggtttgttttgaaatttggagctttttttgcatcaattcccctaccgatatttgctggcatctactgtgttttatttggtattgtggctgctactgggatttcttttatacaatttgcaaataccaattccataagaaatatctatgttctgggcctaaccttgttccttgcgatatcaataccacaatattttgtcatgaacaccgcaccagatggtcatggtccagttagaacagatggtggatggtttaatgacattttgaacaccatattctcttctgccccaactgtggctataattgttgggactcttattgacaacacacttgaaggcaaacaaacagctgtggacagaggacttccatggtggggtcctttccagaataggaagggagatgttagaaacgacgagttctaccgtcttcctctcaggataaacgagtacatgcccaccagatttctctaaagtactctaataaaagatatgggaacttaaccccttctgtgagcttaattcttaaattttcatgtaaaatgaaatgaccttgtaaaaatatggataaacaaaattttcatcattggccagccagcagccaaattttaccttgtataaatggattgacatagtaattctttggat

SEQ ID NO: 4556 - DNA, 319 bp, Glycine max
  Clone ID: PAT_MRT3847_104119C.1
gggtttgtttttttttttttttttttttttttttttttatttattttttttttttttttttttgttttaaggcaaaaggcgaaggagttttttttatactaaacaaaaatttttagggcctcaacatttgggtacagggattttctccctccagggggggggttaccaaacccaaaagccacctgtgtaaatcattagaaaaaaagatgggtgtggtaataaaagctttaaacactggaagtggttatttccaaaccgggggggacttcttgcccaaaatcaaaaagcaaggggtgacaatgttttttagcagggaagc

SEQ ID NO: 4557 - DNA, 381 bp, Glycine max
  Clone ID: PAT_MRT3847_10411C.1
aataacattcgaagagtttaaagctgatgttttaaaattggacactaaactatacgattgtgaagtttggtagggggggggagcgtatgatgtagattgaaatgaaaccatggattacattgaatagataactgctaccatgcacatgaatagaatggatagagaggatcacctatataaagcctctgaatattttgacaatgataagagcgggtacattacaatggaagagttggaatctgcccttaagaaatataatatgggtgatgagaaaacaattaaggagatcattgctgaagttgatacacacaatgatggaagaattaactatgatgagtttgtagccatgatgaggaaatggatacccagcataacgcacat

SEQ ID NO: 4558 - DNA, 490 bp, Glycine max
  Clone ID: PAT_MRT3847_104120C.1
atcttggttttatatagttagaactttgctaacttccaatagcaaggaatattagcatagattgagattaagaattctgagtaataacctaactaatctttttgataattgcagtgaaaatgttgggctacttggtctgacgcatatagggagccgaagagtagtgcaaatatcatgtggttatatgatcttcttctctatttttggtactctattccaactgaaacacatgtgggcagattttccttccagtttttaaattcctgctgtaattattttactgtctctttcagggaaatttggagctttttttgcatcaattcccctaccgatatttgctgccatctactgtgttttatttggtattgtgggtaggtgctgctgctattattgcatagattacaataattttgaccaatagatgcaagcctttttattttggtggtgatttttttgcagctgctactgggatttcttttatacaatttgc

SEQ ID NO: 4559 - DNA, 405 bp, Glycine max
  Clone ID: PAT_MRT3847_104121C.1
agatggtatgcgccatttctcccttgctaccaacgacactttaaacatcctggatgtgtcttcaaacttctctcccttctacttctagggtttcgcttctgcaacggacgaccttcttcaactcatcaaaggtgaagttttttttcttcttctttatctcactttgccttcgacacacacaccttgtgccctctaccctcaattttcccattttcttcagaattttccccctcttaatttcctttctctttgtctattcaattttatttctcgaaattccccccccccccccccttttgtgtcgattgccagccattttacccccaaaatgcttgaatttcataacccattattactcaattattttcatgtttttttcttaaaagtattttttgattttatgat

SEQ ID NO: 4560 - DNA, 2276 bp, Glycine max
  unsure (1)..(2276): unsure at all n locations
  Clone ID: PAT_MRT3847_104122C.1
aattcggctcaatcaactctttactttcctacttaattatctatgttctccgcttaatctttcgaaatgagaaataaattcctctctattttgtaatgatcactgtactttactgtcactttccattgataacagagcgagccaaccattctgacatatcgttctttgcatcctcttcagttccctgcttttcaatactcaacacaaaagctctcttttttttcaaacactcttcgagaaaaatcagatgggtgaagagcaccacaaccatccaccgccaccggttcaggcacctccggcaggtccaccaccgccaaatctagcactttctagaggccccgtttggcatccagctgaacaactctcgcagcttcactattgcatccactcaaatccttcatggccggtggcaattctactgggttttcagcactacattgtgatgcttggaacaacggttctgattgcaaccacactggttcctgcaatgggtggggaccatggtgacaaggctcgtgtgattcagtcattgttgtttatgtctgggttgaacacactgcttcagacttggtttgggtcgaggcttccaacggtgatgggtggatcatttgcttttttgcttccagttttgtccataatcaatgattacacagacaggacattcccttctgagcatgagaggtttatctacacaatcagaacaattcaaggatcccttattgtttcttctttcgtcaatatcttccttgggtttagtaagacgtggggaaatttgacaaggttgtttagtcccataatcattgtacctttggtatgtgtggcgggtcttggcttgtttgccaggggctttccattggtagcaaactgtgtgcagattggattacctatgctcattctactggtcataatacaacagtatttgaagaggcttcatcatgctgctcttcaagtacttgagaggtttgctttacttctctgcattgctgtcatctgggcatttgctgctatccttactgtggctggtgcatacaatactgctaaatcacagacccaagtgagctgtcgcacagatcgctcgtaccttatgtcttctgctccttggattaaagttccgtatccgttccagtggggtacccccatattcagagctagtcacgtctttgggatgatgggggcagcacttgtctcttctgctgagtcaactggtgctttctttgctgcagccaggctttctggtgcaacaccaccgcctgcacatgtgctcagccgaagcatcgggatgcagggcattggtatgctgcttgaaggcatatttggttccattgttggtaccactgtatctgttgaaaatgttggcctacttggtctgacacacatagggagccgaagagtagtgcaaatatcatgtggttttatgatcttcttctctatttttgggaaatttggagccttttttgcatcgattcccctaccgatatttgctgccatatactgtgttttatttggtatcgtggctgctactgggatttcttttatacagtttgcaaataccaattccataagaaatatctatgttctgggcctaaccttgttccttgcgatatcaataccacaatattttgtcatgaacactgcaccggatggtcatggtccagttagaacaggtggtggatggtttaatgacattttgaacaccatattctcttctgccccaactgtggctataattgttgggactcttgttgacaacacacttgaaggcaaacaaacagctgtggacagaggacttccatggtggggtcctttccagaataggaagggagatgttagaaatgatgagttttaccgtcttcctctccggataaatgagtacatgcccaccagatttctctaaagtactctaatatatgctacctgtacttaaccccttctgcgaacttaattaaattctcatgtacaatgaaatgaccctgtaaaatatggatagacaaattttcatcattggccagccagcagccaaattttaccttgtataaatggattgacatagtaattctttggatgaattgctctctaaagatgccgaaattactcttaggtagattattttaaaatatactcctttttttgagataaatgagttgctgtttaggtttagtccttttgaatataaattcatgagttgcagtttaggtctacttaagacatggaatagactatagagcatacgattgtcagtatcaggattattaattttttctagnnnggcancaggg

SEQ ID NO: 4561 - DNA, 347 bp, Glycine max
  Clone ID: PAT_MRT3847_104123C.1
ggctcgagcttctactttcacctaaaccaagcacttgttgatgtagcttcggagcccactactgagaagccgattctcgttcttggtatcaatcacttaagttattttgggatcatgttggagcatgttttggctaaaatcatttcacgcaacaacagactgatatatctctaagaaggaacttagcaaaacaaaatgcataaatgtttaattttttcttaggataaattacgctgacacttcctgagatttttttaaattgcacataatctccctgcttttttaatttttacaacagccttccttttttttcaaacagataaaggggtgtagtgtaatatataaag

SEQ ID NO: 4562 - DNA, 295 bp, Glycine max
  Clone ID: PAT_MRT3847_104124C.1
caactatttaacaaagcaatactgtgtataggaatggctttggacagcatggtcttaatcttcagtgaaagtacggatcgtacggcaaaaaaaaaaaaaaaaaaaaaaaaaaaaaaaaaaaaaaataaaaaaaaaaaaaaaaaaaaaaaactaaagacaatgagccgaaaaccatggtcaaccttcatgctgcccctccagttaagttagcttagggcgttttataagaaattttgtaactcagatctttctgctgctgatcttatttctcctgggaaggaaaactgtttttgaa

SEQ ID NO: 4563 - DNA, 204 bp, Glycine max
  Clone ID: PAT_MRT3847_104125C.1
tatcgagatacctaaacactctcataaaaaagactattgtagcttttttcatcccaaccggctcccaacctgcccagaacactgatcttcccagctcaccgccagtctcactcactcaccaagccttcttctacgtctacaagagccactcgcattctctcaagatttcaatacattcttcccactccaacaaccgcatatcct

SEQ ID NO: 4564 - DNA, 2106 bp, Glycine max
  Clone ID: PAT_MRT3847_104126C.1
cttcccttttttcctctaccaaattaacttcatcctcatacgaataataacaaataaataaaaggagggaaaaagaaaaacaaaaaaaatctaatatttattttgcttccgcgaccaacagttttgtgcttgaagcctttccagtgtgcagctgcagccggttcaatgattcaaaattgtcaagttgtttgttttggagcaatcatcattgtccaaattgcaattttttcagaaggatagcaagaatttgggaagtttctgaagcaatagggagtagtggacacagtttaggatcattgttataataggcgaaattgatggtaatcgtacatagtggctaggaaaggatataatggctactgctgcagtaattggactcagtggaggaaagaggctcttgagttcatcataccattactctgatattatagaaaagctttcttatggcagtgattttggatccacacactatcaaattgttcctacaaagtctttaatagctgccaagaagtcatccaactacactccaacttttccagcatcgaaccagcagaatcagtccattaaggctcttaaggagcatgttgatgatgcccctaccattgcggattcatggtttcagagttgcaactctaacgacttagaggtggaaagctctgaaatgggttattctgtggaggctcttcttttgctgcagaagtcaatgctggaaaagcaatggaacctttcttttgaaagggaagtgctaaccgaacattctagtaagggaaaaaaatgtaagaaagtggcggtgacttgttctggggtgtctgcaaggcaaagaagaatgaataccaagaggaagactgcgattaaaacttgtggtgctatgcagctgaagtccaaaatcagtccagagctgcttcaacaccgtttgaagggctatgtgaaaggcatagtgagtgaggaattgctctctcatgcagaagttgtaaacctatcagagagaataaaagttgggctttccttagaggagcataaatccagacttaaggaaagactaggatgtgaaccctctgatgatcaaatggcaatttcattgaagatttctcgaactgaactacgagcaagaatgatagagtgcactctggcaagagaaaagttggctatgagcaatgttcgcttagttatgtctattgctcaaaaatatgataacctgggtgcagaaatgggcgatcttgttcagggtggcttgattggactactgcgtggtattgaaaagtttgattcttcaaaagggtttaagatttcaacttatgtttattggtggatacgtcagggagtttcaagagctttagttgagaactcaagaacattaagattgcctgctcatttgcatgagagactatctctaatccgcaatgcaaagtttagactagaagagagaggcattactccaactattgataggattgcaaaataccttaacatgtctcaaaagaaagtcagaaatgctactgaggcaatcagcaaaactatctcgcttgatagagaagcattcccctctctgaatggtatacaaggagaaactcatcatagttatattgcggataatcgagtggagaacatcccatggaatggagtagacgagtgggcactaaaggatgaagtgaacagactcattaatgtgacccttgtggaacgagagagagaaattattcgactttattatggactggaaaaagaaggtcttacatgggaagacataagcaaacggataggtttgtcaagagaaagagtaaggcaagttggacttgttgcattggagaaactaaaacatgctgcgaggaagagacaaatggaagccatgctattgaaacattaaatttggactcatcatagaaatatgttacaatgtatatatacagagaggaagtatgtacctagaaatttgacttcccgattcaaaaagaggacaatcatataagggaacattgaagatttgtaaatccctttaaatatggtgttagtaccaataaatatgggtaatttttgttttaatactccaaaaataaaaaaattacttttaaaaaaaaaaaaaaaaaaaaaaaaaaaaaaaaaaaaaaa

SEQ ID NO: 4565 - DNA, 252 bp, Glycine max
  Clone ID: PAT_MRT3847_104127C.1
ccgctcgagccgctcgagatcaccctctccctcccttgcacaaacccctacttgctctattcttctccaaaacgattcagattcaacactcaatcagcacaactttccccttgctgctcctaacctctccaatccccaccactgcccaaaaccaccggagtcatcgacatcggcgcgggccttgccggactcgccgacggcacccacctgaactcccagaacattccctttctcctcctggaaagcctcgac

SEQ ID NO: 4566 - DNA, 1108 bp, Glycine max
  Clone ID: PAT_MRT3847_104128C.1
aggggctaatataatatttacgatttttttatgggcagtttacaataaaggggttcaaatagggcaaattttcaagatcataaacgtcttgaaatactatcaaccccgatctggcaattattccatctaaataacgattgaaattagctgacgttacctacaactacaaactattgtgaattcttgaaatactagttcgcccaaagcatctatgaccgagtaacaaaatcaaatgttgatcaaaagctcgaacaagcaacaaacgactaattagcaaattgcaacaggaaaaattgtcagccttcaagatcatcatcgtcttgtaatactatcattcacgctctagcaattattccattcaaacaacacaagaaattagctgacgacaactaatagttcaaactattgcgacattctcaaacaaaaacttgtccttgtgaatagaaaaaacattaataccataggttgtacaaaaggtccatgccaagtaaaatgggcattaatcagattgcaggaagttgatcccccaaacttaaggattgaattcaaagcaattgaaatccttccacaaaaggccaacacagcatggtagtcaacacatccgaatgcactcttgctgctaatttcagtaacggtgtctacttcggtcccgatctctcccataatctctatctcgatcaacataatcccaatctcggtctcttcccctctccctattccaactgctaggcctctctttttcgcttcgctctctgttcctgctctccccatcattgcgctcccttcctctgtctctactttctctagcatccctgtctatccctagttcctcgacctcccaaccagcacgccctgaaccaggaagcccacgtgcagcttcagcttgctgtgttttggcacggaattttttcttaagatttccaaattcatcatacaactccccatcatcttcagcttcccttctgtcgtcttctcgcacttgccgaattcctcttcatcaagctctttgtaacctccacctcgtcctcctcttacaccaccctcattatgcccaggcttatttgtgttgcagatattgcatttagtccgctttgcccaattgatattc

SEQ ID NO: 4567 - DNA, 374 bp, Glycine max
  unsure (1)..(374): unsure at all n locations
  Clone ID: PAT_MRT3847_104129C.1
cattatcatctctcatcagcatctctttcctttccagttttttctctctctttctgacctgggttttcctggactctagttgttgtttgaaggatgttgtgacaatctaattgtgttttacttgatctgcagactggggacctaagattgatgtcgttggattttgtttccttgaccttgcttcaaattatgtaccaccaaaatcgctagtagattggcttgaagagggagaaaaacctatttatgttggatttggtagccttcctttacaagaaccagagaaaataacacgaattataattcaagcactggaagaaacagggcagagaggtatcatcaacacaggctgnggtggtcttgggctttggcagaac

SEQ ID NO: 4568 - DNA, 696 bp, Glycine max
  Clone ID: PAT_MRT3847_10412C.1
aaaacacaatacacaaattgatttatgagaaacgtatgcatcattctacaaattgcataacataatccttacaaataattggttggccatgactcaacactcgagtacctagtacctagcttcctatgcagttggtccatttcattctcaatttacatgtgccatacgactaggcctatataaaatgaccgaaaatttcaatttacaggtagtataatgacttaatcatttgaccgcaagcaagaatgatattccaaactagaagcattcggccatgaattgcttcttaagaccttcgtttgaatggaccattttagggccaattcatcaaactacgacatatatgaatcacagggtccagattgaggcagggaaaatagggagatccataatttatgttcatccacaaaatcatgcttcaacaatagctgcagcttcttcatcagtagaatcaactgttgcaattttttctgtaacattgtcattagtagaatcaactgttgcaatttcttcggtaacatatccattaattacatccgactcttgcatcttttctgtctcagcattaagaagcttctccctgagcttcatttcaagttcttctaatgcacttcgattctcggccagaaaattctttagggcatccttaccacggaaacctatgttcgttatagtaaaacatggcaccagcctttg

SEQ ID NO: 4569 - DNA, 345 bp, Glycine max
  Clone ID: PAT_MRT3847_104130C.1
aaaaaaccaacatttaatggaatcattcccaaaaaaaaaatgcatgaaaaggaccaggttttaagttgccaaggactagatgggttaaaaaatttttgaaaacttggatccccaaaaaaaccaccccctaagcccgggagacccagtaaattttacattaggaagggaagggtttccttccaaaaaattattcaaaaaactttttaaaacaattatttgaaggacaaaattacattgggtttaaaaggataacccctgaagccattaatggggaaacttttacggggcaggttttaaatccggagtaaaaacaaccggaagctatcgaggcctcaactatttttt

SEQ ID NO: 4570 - DNA, 367 bp, Glycine max
  Clone ID: PAT_MRT3847_104131C.1
ggactgaggggtttaagagcataagtggcttgtgcggttgagctgaacactcagttgttgaaccatgctttctcgcactcgcacctttcctctcatttccctcgcttccaaagtgtgtgcccctccactggaagccctctactccacccacattgtcggcgacaagcccgttctggttcgggattttattcattctgcactctaccatccgttacatggctacttctcccaaagatcgcggttcgttggagttcttcctaatgctattaagttcaaccaacttcaaggccggaaagcttatatgaagtacttggataatatttacaagcagagtgacatatcatggtttacaccagtgggacttttt

SEQ ID NO: 4571 - DNA, 356 bp, Glycine max
  Clone ID: PAT_MRT3847_104132C.1
tgccctgcttgtcaaatgtccttattatttgtgaataaaaaatttctctctaaaatgtcacgcagttgcttttaaggacgtagcaggtgacattttagagagaaattttttattcaccgataatatttgccctgcttgtcaaatgtccttattacttgtgtttaataatggttcatccgtgtcaattgctaaagctaatcttgatgaaagttttgtctatttatgcatgtcgttttgctgacttattagaaattgtgaacaaattttttttgttgagtttccttagacaagtggcttaggaccagtccaaacagtattaacatatatgtgcctgttaattgttactacaaaatttt

SEQ ID NO: 4572 - DNA, 170 bp, Glycine max
  Clone ID: PAT_MRT3847_104133C.1
gacatactcctccaaattctaatgcaaacccttcactactccaaattcgaggacttcagcatagtccatcttttcccacaacggtggcccgattctaagcctctaatgctcaggcacttgggaatgatcacctgcagtttgcaatggttgttcgttatagagtgttgtga

SEQ ID NO: 4573 - DNA, 449 bp, Glycine max
  Clone ID: PAT_MRT3847_104134C.1
aggtgtggaaaattcaactttgctttacattcattcacaatccgtgcctacatccagtccccaagcaaccaacgggtcttgatatttttttcaaccttgtaaaaacctttacaagtcaaagatccacaagggatgtacccttccttgttctctttgaacaaccaagtggatgtacactctacttgaactgatccacaagagatgtatccctctcttgtttctcaatataacacccccaagtagatgtaccttctacttgtgttacaaaggatgtaccctccaatgtgttaagacaaagaattctcagacggttagttctttgaatctttgtaaggggaaacaaaagatatctcaggcggctagtcctttaaaatcttttatttaaggggaaggaaagaatcaaaagaattcttaggcggctagtcctttgaattctctttgaagagaga

SEQ ID NO: 4574 - DNA, 1176 bp, Glycine max
  Clone ID: PAT_MRT3847_104135C.1
agacatctcagagatcagcaacaccaacacttagatcatcaaccccatcaagggcatttggagcatctgctcctcctactagaccttcatcagtatcgaaagcacgccctggccctttagttgctaagaaccacgcgtccgcacgcggcagctctccctcggtgagatctagaccatgggaaccctcacaaatccctggtttctcacttgatgcccctccaaatttgaagacatcattgtcagatagaccagcttcagccactaggactaggcctggtgcactgaattctagatcatcttctgttgatgccagcagcaatgcaaaatctagaaggcaggcaagtaccccttccaaaggaaggactaccacagggttggtccacaataatcacacctctatgcaagttttgagtagagctcgtttcactgatggtgatgatgaaagcccagttgtgattggacccacgcgtccggaaagagtagtgaacatgaggaaactggcccccccaaaacatgaagaccatcattcttctcgtgacaattcttatggaaaatcttcttctggtagctctggatttggaactacactttcaaagaagtctttggatatggcaatgagacatatggacataaggcgaagcatccaaggtaatctgcggcctcttgtgacaagcattccagcttcctctatgtacagtgtgagatcaggtagttcctcaaagagcaggacagtgagtgcttctgattctccacttgccacaagcagcactaccagctctgaaccaagtgttaataccaactccatgtcttatgatggaagtggggctgaagaaaatgattttgcatgtgagaagggaaactcttgatgggaatcatcaatccatgatgggctaggcatgatcatcatcactgctcttgccacttttgccactttatttgtatgtggtacaacaaacagcacccatatgttcatgtgataccatgtttccaaatagagtgctagtgaagaaagtttgtagtatagtggtgcattgcctctgtgcctgctagagttgtgatacaatagaagtgtgcctcgagacattttatgagctttatttaagcatgtttgtgtcacgaggattgtttgtaccgaaccttaaactaccaattgacaatctcgttcaatttttactt

SEQ ID NO: 4575 - DNA, 529 bp, Glycine max
  Clone ID: PAT_MRT3847_104136C.1
tgacaagcattccagcttcctctatgtacagtgtgagatcaggtagttcctcaaagagcaggacagtgagtgcttctgattctccacttgccacaagcagcactaccagctctgaaccaagtgttaataccaactccatgtcttatgatggaagtggggttgaagaaaatgattttgcatgtgagaggggaaactcttgatgggagtcatcaatccatgatgggcaaagcatgatcatcatcactgctcttgccactttatttgtatgtggtacaacaaacagcacacgcacacacacacgtgtgtgtgtatatatatatattcatgtgataccatgtttccaaatagatgtgctagtgaagaaagtttgtagtatagtggtgcattgtctctgtgcctactagagttgtgatacaatagaagtgtgcctcgagacatattatgagctttatttaagcgtgtttgtgtcacgaggattgtttgtaccgaaccttaaactaccaattgacaatctcgttcaatttttgca

SEQ ID NO: 4576 - DNA, 408 bp, Glycine max
  unsure (1)..(408): unsure at all n locations
  Clone ID: PAT_MRT3847_104137C.1
taagcaaaagttcagtgtcgagagtaactcttcatacatatggcaaagtacactgctgctttgttgcttttggttctccttgttgtggcaattctgaatggttctgacgcttcaaggagaagactcccagagaaagatgatcttgtgtacgaatcccaaatntttggatntattccaattnttcttcattggaaattttgtttgcttcatccattgctttgtctttggaggcccaaagatcatcatgttagtgctgaaattgaaaccctagcattgcccgactattcatgacaaagatggagcatgtgtttcatagatatcaccgcgttcgaaagtgatgtcaatatatatatatatatatatatatatatatatatatatatatataaataaataaattatatgaca

SEQ ID NO: 4577 - DNA, 167 bp, Glycine max
  Clone ID: PAT_MRT3847_104138C.1
cttatttgttttcttttttatttttatatatatctaagtgtacacgggcggctggcaataataaacgaacaaaacacatggtctaaagacataacctatcgacctccaaaaatttaaaactatttagtgcacttcaatggggagatgaattctcggtttggaatttt

SEQ ID NO: 4578 - DNA, 291 bp, Glycine max
  Clone ID: PAT_MRT3847_104139C.1
tgttgttcaaaaataaatatatatatatatataaatatatctatatatctatatatatatatacacatacacaaaccacaatataacaatatctaactcttcaactttactatcattacactctctaacaaaaatacatacatataaaaccactaaccaaaatcatactccattcaattcataaaccttccttaagatcactcatctactctcaagaccttatctctcatcccaacggctatcccttaagcccaaacctaagggtcctctaactaaccctctttctccatc

SEQ ID NO: 4579 - DNA, 271 bp, Glycine max
  Clone ID: PAT_MRT3847_10413C.1
cggagtgaataagccacacaggttcaggcctggaaccatggccctgaaggagatcaagaagtaccagaagagcacggagcttctgatccgaaagcttccgtttcagtatttggctcgtgaaatcgcttaagacttcaaaacggatctgatgttacagagcagctccgttgctgcgctccaggaagccgctgatgctgacttggttggtctctgtgaagacactaacctatgtgatatcatcccttagagggttacagttatgcccacggat

SEQ ID NO: 4580 - DNA, 431 bp, Glycine max
  Clone ID: PAT_MRT3847_104140C.1
tttgggttttttttttactaattatttacactttttaactaccctgtacagattgaatccacccagcgggaatagtcatttcaactaccaccccctaactgggaagccaggaacagttcacttacccatcttggccgggaatgcatgcctgtggagggtctatatagacatgaggggattagccagtaaggaacaccttccctccctaggtgccatacctaattatgaccagcagcgaataacggtgaactacacaaaaggctcggggtatcaccataccttctctggggaacaaaagagcaggcctccagcccatgcctaggatcatgcttttgcccttgattgggaagagttccaaggggaacattacaccagctcatatccgtgggaaacccaagccaacggggcggaaaccactcggactattgggg

SEQ ID NO: 4581 - DNA, 220 bp, Glycine max
  Clone ID: PAT_MRT3847_104141C.1
ggcgttgcgtgtaaagggaatgcctatgcaattattgtcatgttgcataatgtgagatgcgtcttttatgtttatgaaacatgacaataattgcataggcgttgcgtgtaaagggaatgggtcctccaaaactgaacgaaaattcatggagtatattcaccttcattttggtgtagttctagtcacggatgaatcggatcacatgctgctattctatctc

SEQ ID NO: 4582 - DNA, 632 bp, Glycine max
  unsure (1)..(632): unsure at all n locations
  Clone ID: PAT_MRT3847_104142C.1
cgaagagaaggactgcgaggaggctcgggggatggaaacgcgggcgagtccgcggcagctcagcacctgtcagagagccaattccttgggtgacttgtatgctcagaaaaactctggagtgacagcaaacggggggccggggagcaaatttgcaggctactgtcggaatttggtgtctgatattcccaatcttgcaaaccataagatgccaccagctgctgctgaagagactcctccgtacagtaattataacacacttccctgtaggaaatctcactgtctctctgaaggtgccaccaacccacaaattagccatagcaacagcatgcaaggcagaagagctaaaacaactcaggtaaagtgattgaaatttgtttcaatattttgggaatggtgcatgactctttaagtgcatgactttgctcttagaagatttccatcttttaatcgggttttaccctgtttgcctggtagttgctgcagctggtgctgttttgggaggatttctctctcttctgctttgcccctcttagagttctgtggttaaggggtggggattaagggaagtgtgtggngggagtggccatgtgataggagtggggaaaaagctagtaagttcatattgggaaact

SEQ ID NO: 4583 - DNA, 722 bp, Glycine max
  Clone ID: PAT_MRT3847_104143C.1
ccacgcgtcggtatgcatccatgtgtgaagtagattgttaaacattattggtatatcttatttgcactgtcacttcaacataattttgtgttgtgtgttctatcacttgaatctgaaggaaactatgagattgtttgaaaacttgcttgggagtgagcatgtcatccatatcatatatagaaacagtgaaacaatatacaatgggtttcccataattagggaaagaataaaagatctgcaagattttcagcctaattggctaattatgtacagaaaataaaggggaattaattactatgaaatcaaatattgtagcacaatctcagcttatatctgaaaatctcaatgcaatgctatcataacctcaacaatcctattgtaatctcaatattcccccccaactcgatgcttataattcatattcatctatcttgatacatatgatatcctctgtccacaaagagatttagtgaagatctgctggttaatcaatagaatagaaccaacaaattgtgtagtgacagtcaatctaaatgcacatgtgcaaggatgcctgattatcacctatggtattcatagggcctactttacaaaatttagctcttggaagagttgcttcagccctatgagttcacatgtgatgagggccatggcttagtatacctttgaatagatggctacaacattatgctttttactcttccatgaagtgaaattacatc

SEQ ID NO: 4584 - DNA, 1972 bp, Glycine max
  Clone ID: PAT_MRT3847_104144C.1
agaaggatggccgggtcgtccttgcgtccagaaaataggaagcaaatcataactcaacatttagctatagatctctcttctctttctttcccgtttctccaaatccttcttcaaacactttccctcattcaatctttcgcagtgttttctgtcgatcgatctttctcccattcttttccgcctctactctttctcatgtagtggctcttttcaatcagttaccgccatagttttcgtttttctttttttccattttttcttaaagtaatggcctcttttcgacggactctgtcgccggcgtatcccgatcgccagtaccttaacggttcgttttcagtctcctccccgtcgcacaagcttccgtcctcaaacgcaaagtactcctcgccgctgccggagcttgtggcggcgttccttcgcctcgccggcggggtgttcacgcgccggcacggtcggaaggggcagtggaggcgcgtggtggtcaggtgcgtgctgtgcttcttcgttgggttcttgctaggcatgttcccgttcggccacgtgtcggaggacgttcgctcgcacgaaatctcgtttgagatgaagccgccgccgctgccgcgcgccgcgaacaacgcgcagcagctgctcctcgaagatcgcgtgcttcggaatcgcgtggagagggagggtttggtgatcgatccggtgagtttaagcgcggagtgggagaggcggagtgagaggttcgatttcacgccgaggaagccgctgattgtggtgacgccgacatacgaccgcgcgtttcaggcgtatttcctgaaccggctggggcaggtgctgcggctggtgccgccgccggtggtgtggattgtagtggagatgaaggcggcgtcgatggagacagcggaggtactgaggaagacgggcgtgatgtacaggcatttggtgtgcaataggaattcgacggatgtgaaggacagaggggttcaccagaggaacacggcgttggaacacattgagcgtcataggcttgatggaattgtttactttgcggatgatgataatgtgtattctctcgagttgtttgacgccttgagagatatcagaatccgctttggcacttggcctgttgccatgcttgcgccaagcaaaaacaaggccattttggagggtcctgtatgcaatgcaagccaagtgattggatggcatacaaatgagaaaagtaaaagacttcgtagattccatgttgatatgtctggatttgcattcaacagcacaatcttgtgggatccaaaacgatggcgacgcccttcttcaaatcccgtacgacagttagacacagtgaaggagggttttcaagagaccacctttatagaacaattggtggaagatgaaagtcaaatggaaggttcacctcctggttgttcaaaaatattgaattggcatctccatttggctgctaataatatagtttacccaaaaggttgggtgcttcagaaaaacctagatgctgtcatacctgtcaagtaatcctccaccaattttattgtgtgtgatagtttgcccatatttggtattggttcatcactgaatagatggatgcatgagttagccaccattggcactaatgcattgtgttggcggacaagacaggaacaggttattgattttgttcccaaagtctcttgcacaaaaatatttgcaagggaaaatttttgctgttgtatagtatgctgccttatttctttgagagaaatagatcctcctagaagaacaaaaaaccgttttaatcaacttgtttgattttcaacattatatacagttatgtataggtggatgtttcatctgggggctaatttgatgttaagcaatattgtttctgatttaggccatacatcaaaattttctgagtgtaatttctcaaatgtactccactgttaatatttctttttattctttcaattgatggaactcttcccagtacttgctt

SEQ ID NO: 4585 - DNA, 259 bp, Glycine max
  Clone ID: PAT_MRT3847_104145C.1
cgctcgaagcaccagtctcaccgcacgaatatctcgttgattggagcgatccgagattaactctgtaaacatgttggattaccaggacctcacgacaggccatgaacttctcgctgactccttccgttacaaggaaattgcagaatggaatgctgtgaggagctcagcggaactcgggcgctaacagcgagcacgtgatgcagacattggtgcaaacccttctgctgcagatttagaagaagatgagcgcgatgatgct

SEQ ID NO: 4586 - DNA, 459 bp, Glycine max
  unsure (1)..(459): unsure at all n locations
  Clone ID: PAT_MRT3847_104146C.1
cgtcattcgttcacatcatcacctcaacactccaatctttcatatccttttctttcacaatgctccatcaattcacactgttccctccgattttttgcgggggaaacaacccccnccctttctctttttcccgaaattcttccctcccttacctgaagtcctttaagtttattaaacaagcatccttaatacaatccaacaattaacattgtgtttttaaccaaacaattgatccttccaaacataaggcaactacttcttattgttgtcctgctcaaaaaagtgttctctatgaaaaatcctccaatgtgatatataacataccatcatttaaaactttttcaagccaatcattttcatttgtggtatcaaaaatttacacttgcatcaatttttctattttttcacaaaattcaacttctttcacactttatttattcctttcttagaagttaattt

SEQ ID NO: 4587 - DNA, 728 bp, Glycine max
  Clone ID: PAT_MRT3847_104147C.1
cggctcgtgagaaattaaaaacacccattttcttcttctttcgataataaaaaaatgctcttacgtggcgccatctccacccctctcccgccctccctccgcctccgcgcatcacccgccgcgcgcagaaccgtcgccgtcgcttcctcctcccccagcggcggcggcgattacccgctctcggtctccgacacggcgctggagtcgcgcggcttctcgctccggcgtggcgcggaggggctggacctggagttgctcaactccgtgttcgcggcggtggggttcccgcggcgggacccggagaagatccgcgtggcgctggagcacacggaggcggtgctgtgggtggagcaccgcaagacgcggcggccggtggcgttcgcgagggccaccggcgacggcgtcttcaacgccatcatatgggacgtcgtggtggacccctccttccaggggatcgggcttgggaaggccgttatcgagaggctgctcagggagcttcggggaaagggaatttccaatattgccctctattcggagcctcgcgttttgggcttttatcgtcctttgggatttgttgctgacccggatgggatcaggggaatggtgtactccaggaaacaaaagaaaaaataggataactcttcattttctttctctattttttttaatttatttattgattatatgaaagtagagtaccaagtttaatttccatgcattatgttaaa

SEQ ID NO: 4588 - DNA, 1329 bp, Glycine max
  unsure (1)..(1329): unsure at all n locations
  Clone ID: PAT_MRT3847_104148C.1
ggaaccggcttaatctttctttacaattccttctctcaataattctcctctgtttttcacaaagcaacatggctgcatacagagaacccatgaacatgaacatgagcgacagagccccggtttctccgcagcaaccacactctccgtggcattccccggttccgtacttgttcggagggttagcggcgatgttgggtctcatagccttcgctctattgatccttgcatgttcctactggaagctctcagggtacctcgaagggaacggggaaacagaacgggacctagaagctggcgaaacggagcaggaccagaaacctgcgaaaccatacgaggagaagatcttggtgatcatggccgggcaagagaagccaacattcttagcaactccgagtgtttcgagttgcagcactagcaggtcctcttccttcggcgacaacaccagcacgtgcacctgcgaggagaaccgaaaatcgcttgaaatggcacaggctgggactgggaccaccgaaaccgcacactcctcgtcggattagaacccttgatcgggccaaacatggccacctgttggggggttttgttttgtagccaggttgctttcgtgaaaaagcaaagctcgtgacacccgggtgtctctctaggttgcatgttcaacaattggtggtgatatgggaattctcttttcttttttcttttcttcttcttctctttcagttctcgtctgtacattattccgggaatgtaaattctttgaggtggaattgagcccttgctgtttcacaaatcacaattttgttttttttttttttggtttatgttttcttcctttttactagatgagatttgaaaacctggaacaaaaaccgaggggagaaaacagaaagaaaaaaatgggggacagagagaatttaacactcagagtagtttttctgattgattttaacacgtggagaggtggtagatgttgtggtgtcgtgttaaggagaaggtaacgtgtacaagcgagtgtgggaaagtggttttatttatgtgtgatgtgtctgatgcggcgagaagaagctgtgattcaatcaatgcagtggctgcactgtttgttcctctagccactcgcctaattagcttcagtttagttccttctatttattcattcaatgcagtggctgcactgctcctcgtgccactcgcctaattagcttcagtttagttccttccttttggagtattactcgtattctctttttttgggttttnnngtttgtgctgacgacatgcgttctnnattcnngncatcnnaacggcccctgcaaannctcgaacggccccnncana

SEQ ID NO: 4589 - DNA, 929 bp, Glycine max
  Clone ID: PAT_MRT3847_104149C.1
aattcccggctcgacccacgcgtccgcccacgcgtccgcccacgcgtccgtacggctgcgagaagacgacagaaggggaacccaattaatctttgttttcaattccttatctcaataattctctttctccttcttctataactctcctctgtttactctgtttttttcacaaaacaacatggctgcatacagagaacccatgaacatgaacatgagcgacagagccccggtttctccgcagcaaccacactcgccgtggcattctccggttccgtaccttttcggtggtttagcagcgatgttgggtctcatagccttcgctctgttgatccttgcatgttcctattggaagctctccgggtacctcgaagggaacggggaaacagaacgggacctggaagctggcgaaacggaacaggaccagaaacctgcgaaaccgtacgaggagaagatcttggtgatcatggccgggcaagagaagccaacattcttggcaactccgagcgtgtcttcgagttgcagcactagcaggacctcttcgttcggcgacaacactagcacatgcacctgcgaggagaaccgaaaatcgcttgaaatggccgtcaaagagggaagcgctgccgggactgggaccaccgaaaccgcacacacctcatcagatcagaacctttgaaacatagtcacatgttgggggttttgttttgtagttaggttgctttcgtgaaaaagcaaagctcgtgacacctgggtgtctctctaggttgcatgttcaacaattggtgctgatatggggattctcttctcttctcttctctttttattttttcttttttctttttccttcttcttcttctctttcgattctcgtctatacattatttcgggaatgtaaattctttgaggtggaattgagacatttgctgtttcac

SEQ ID NO: 4590 - DNA, 342 bp, Glycine max
  Clone ID: PAT_MRT3847_10414C.1
caaaaaaggaaggggtccatatccccctggggaaaaaaaaagggccccctaaagaccttatttgggggggcccaaagacccaaccctttttccccaaaataccgttaggggtgggaatttatgggggggaattacatattttgggccttgaaaactaatgaggaccccttttcaatttgcacacgtatttttcattcaaaaagttaaaaggccccctccctttgttgttggtatatgggtgtgtatatccatatatatctaggggaaaaaaaggaaaataaaaatggggggccataaaaactccaaattggggggtttgccccctttattttaaacccctgg

SEQ ID NO: 4591 - DNA, 1873 bp, Glycine max
  Clone ID: PAT_MRT3847_104150C.1
aaacaaagcagcaggagatgagtggctacgtctgtctgaaactctcgccacctccaacttgcctctccaaacatcctcgtcttcccattcccttggttcgcaacactctcctcggcgctgctctctccttcgggcttgtcttctccttcccctctgtccaacctaccccttcatgacacttcaatgtgcaatggttctatcagggcctaatccaatctgtatttgagcttgatgatggatctggtgtggttatcactgttgggaagtatgtaaccccaaatcacaaggaccgccacggctgggccctggaccctggcctcctgaagcggccagcttgggtgggcatctcccgtcagcctagatcatgcgcgctccccctcctcggacgaagccgccccttcggggccccgccgcattctcgcgctctcgcccctgctgtgttctccaagctggcgaggtatctcctcgctggaagctgctttgtatatctcaagaatttcaagttaatatagatatatgcctgaatggtctgcctagccttcttggctacaatggcatttaattcaacatacattggcctaacacccatgttggccgtcgattacttggagccgttccgttcatcagcatttgaagtatcatccctgttgcaaggccctaatggaacatctgtgactattcaggtcaagcatggcaactgtggacccgttgaatcaatagaagtccagcggcaacttgttgctcgtaccccagtcttttatcggctggaacaattggacaatggtgttacttctgttgggtatatacgcctcaaagagttcaatgcattggccagaaaagacttggtcattgcaatgaaacgacttcaagacatgggtgcctcatatttcatattggatctcagagacaatcttggtgggctagtacaggccggaattgaaattgcaaagcttttcctaaatgaaggagacacggtgatctacactgttggaagagatcctcagttacagaaagctattgttacagatacttcaccattgattcaagctcctattgttattttagtaaatgacaaaactgctagtgcaagtgaaatagttgcttctgcacttcatgataattgtagagctgttcttgttggaaaacgcacatatggcaagggtctaatccaatctgtatttgagcttgatgatggatctggtgtggttatcactgttgggaagtatgtaacaccaaatcacaaggacataaacggcaatggaatagagcctgacttccagaaacttccagcatgggatgatatcagccgacatcttaaaaaatgcagtatgtcacaacagggataaagcagtctctttggtattccgatgcaatctattgctttggacttatcattttaattgaaacttttgatgaatctgctcgctggaagctgctttgtatatctcaagaatttcaagttaatatagatatatgcctgaatggtctgcctagccttcttggctacaatggcatttaattcaacatacattggcctaacacccaagattggcttggaatatttgtaaccgttccattcaagatgaagtgtatagtggatacgacatgagaagaaatgaccctaggaagcatgcaagagtttttattcaagcagccagttcagaacagaagtgactagggtttaatgcatactaacatatagaagctttgttgtacatttttatgaaccttttgatactatgttccttttttacctcgcaccacatcctccccaatattaatgtgtatcagacgtattagtttattgttcaagtgcttggaaaaaatgccactttattggtaaagaattcattacatattgacaatgacgaaa

SEQ ID NO: 4592 - DNA, 370 bp, Glycine max
  Clone ID: PAT_MRT3847_104151C.1
aaaaaaaagttcatcagctgaaaatggaaaccgtaaaaaggttaggaactgatagtttaccctaattaaaactaaatgttttgtgatggaaaaccaggtcgaagacaaaaaaacaacactaacgactaactctagattctagaaaacttgagcatttgcagtggcatgccacttgacggccaacgaagagcctctgtaaataatgtcttggtaaaaagtaaggcgtgattaatgagagccgagaagttgaaagccaccacacgaatcaacttcaataactatgtgatgaaatattcaaaccacgggcaagggtaatcccctataggggagttcccaaaaaccagtattggtcggtgatcatgcacccaag

SEQ ID NO: 4593 - DNA, 2391 bp, Glycine max
  Clone ID: PAT_MRT3847_104152C.1
ataactttgcataggtaggcgcttacatcacagaaatactttatcaaaatgatagcattttaataaacaagagcatttgagaattgaaaatagtgtctgttattcgaccaatctaaatccaaatggcatcccaagaacctcagcttcactttgttctgtttcctctcatgtccccaggccacttgctccccatgacagaccttgcaacaatattagcacagcataacatcattgttaccgtagtcacaaccccacataacgcttctcgtttatcagaaacctttagtcgtgcttcagactcagggcttaacctcagattagttcaactccaatttccatcccaagatgctggatttccagaagggtgtgagaattttgacatgcttccttcaatgggtatgggtttgaatttcttccttgctgcaaacaactttctacatgaaccagcagagaaagtgtttgaagagttaacaccaaaaccaaactgcataatctctgatgtgggtttggcatacacagcccacatcgccaccaaattcaacatccccagaatttctttctacggagttagctgcttctgtctctcgtggcagcaaaagttggtcacttctaatcttctcgagagcatagaaacagattcagagtactttctgatacctgacatccctgacaaaattgagatcaccaaagaacagacgtcaagaccaatgcatgaaaactggagcgagtttgtcgacaaaatggcggcggcggaagcggttacttatggcgtggtcgtgaattcttttgaggagttggagccagcatatgcaggggatttcaagaagatcagaaacgataaagtgtggtgtgttggccctgtttcactcagaaacaggaatcaattggacaaggctcagagagggaacaaggcctcaagtgatgcgcacagttgcatgaagtggcttgatttacaaaagccaaattcagtagtttacgtgtgccttggaagtatatgcaatttaattccgttgcagttgatagagcttggtttggccttagaagcatctgaaaaaccattcatttgggttatcagggagagaaatcaaacagaagagttgaacaagcggattaacgaatcagggtttgaagagaggacaaagggagtgggtcttttgattcggggttgggctcctcaggtactaatactatcacaccctgcaattggagggttcttaacacactgtggttggaactctaccatcgaagcaatatgtgctggaatgccaatgcttacgtggccgttgtttggggatcaattcttcaatgagaagttcattgtgcaggtactaagaattggagtgagagttggggtggaaactcctgtgaactggggcaatgaagagaaaagtggggtcttggtgaagaaacaacatgttttgaaggctatacaagtcttaatggatgagggaaatgaaagggaagagagaagaaaaagggctagagagcttgcggagatggctaagaaagctgtagaaggaggatcttctcacttcaacgtaacccagctaatacaagatatcatgcaacagtccaacaaagactagtactaacgatcatcttcggttatcaaaggcatattaatatatatacactatttcagaagaagttcctaattagcttgcagagggttgtaacatatactgtgtggcaagcctgtgaaggctcgaggaagaagagtatcctgtgtaaactcgagtgattactgtaataaattaatcctactggaaacaaagaatggatataatcatatagactaaggatttgagggtgaaatataccttgagctaattgaagttttaattttatatgtttgatatcaagtttaagcaaggccaccttgaaggactagggaggcaagaaacaaatttaatattttctgtgttagatgtggcatctgaatcagcaattggttgttgctaaaatggtgttgctttcttgtgaaatatacatatcctctatccatgggagaatgatcaacaattgatactggtggagcatggtatatgactttccctatgctaatgctcaaaagaatcaacatatattggctcaagttgaactaatactcctacaaccatatgagcatctgatctagcatcttgttcattatccaaagaagcttcaaccgctaccactttccttgttttgagttgatacgtcttcatcttctatgattttaaaatctcagtttcccagagcgtgtggataaacttttatttagaagtagtattaagagtagggattgcatgactaccttgtctgttagttaacattagatcttccctttgtgcttataatattaaaatgtattttatattacatcgagtaatatttagcaacgcattaccc

SEQ ID NO: 4594 - DNA, 414 bp, Glycine max
  Clone ID: PAT_MRT3847_104153C.1
gatattgcggacggaactttagctcaggcgggcgcacagggtgacggaccttaaaaccggtcgctaatggaatcgaagcttgattccaagggtctctccttctttgcgtactactttgtgtgcgactgattaggggaatgatagctactctctgagctggccacagactttgtgaatcactgtcttttccactgttagacactttgctgaacactctactacttgatgtaagacttaaagtcagattgaaacttcttcagtcttttgctcagttctatgttcaagctcaagatcaagctgatgaaatctgggattagtacttccactctagtatctggtgtaggaactcgtgggtagacttccttatttgtactctctctttcacactgttcttcatagtgatccagagtggcg

SEQ ID NO: 4595 - DNA, 214 bp, Glycine max
  Clone ID: PAT_MRT3847_104154C.1
ctcgtgcatatatttatttctaacccaaaacaattaacctgttgagaccattcattaatctaacactttaaattaaacagcccacatccaaacatgcttttgctcaacaaaaagatcatgcataggcaaaaaaaatctagcatgagctgttattgcctattcttcaaaggacacaccaactgccccaaaagaatttttttttttgaaagaaaaa

SEQ ID NO: 4596 - DNA, 203 bp, Glycine max
  Clone ID: PAT_MRT3847_104155C.1
taatagaaaaagaccccatttctagcgacccataaacaacgggggcgagtcaccaatcaacaaaacccaccccaaaatctaaccacggaaaactctatccttcaattccacagtccccacgtaacaaacagaaaaaccttgcacttcatccaaatacacaatagacaatacaccccccattcccacatcaacgtaaaatcaaa

SEQ ID NO: 4597 - DNA, 391 bp, Glycine max
  unsure (1)..(391): unsure at all n locations
  Clone ID: PAT_MRT3847_104156C.1
cgtggtaccaaagtacgcagagcnaccccgaccgtaaatgttcacggactcgaccagctcactagtgctcgggcgacctctatctcttcattcactcttttttgtttctgaaccaaaccaaaacatatggggggggaccttatacattactaagctggcatgacattatgcagcaccactaaaacagggtaccgaaccacggaacatctaattataatggcgctttttgctgccactgaacagccattgatgagcttaaacaatgctatacaaacactactcctgcattggcacatactagagcaccagtcccagatgagctaaaatagatacacgctcacttcttcacactcagagagcctatcatcacaagccttataaatacagacta

SEQ ID NO: 4598 - DNA, 495 bp, Glycine max
  Clone ID: PAT_MRT3847_104157C.1
gtaacaatggcctattgttattaatactgcaccacaaccaaaaagaccggaattgaagttcatgaactcaagaaggggtgtcgaatcccccctctcaagtatttatctatatgacacacctgctagagctgctgcatgcagttctaattctattattaattagtatacgttgcgcataacaggatatttaatacatgaatatgctcatacgtaagtcaaggaggagttcctcgttgacgctttggatttaccaccaataaagccttcgttgccatggccctggaagttgccactattatttattgccggaccaccaccgtaattgttggtggcgacctgagtgttaccctcaccagaatatgcatccactgttgggcttaacgcctgtgatgttcttaaacccatggccgagggtggtgtatgagttcactttaccttcggatttttgggctgcttgctcagcctctattagcggaagaagggttctcatttgac

SEQ ID NO: 4599 - DNA, 280 bp, Glycine max
  unsure (1)..(280): unsure at all n locations
  Clone ID: PAT_MRT3847_104158C.1
ccgcacgtntccctatacaccataatgctccatgcttacgcacagaaccacagactccgcgaagtatcgacctctttcgtagaattcccttcaaggacgtcgtttcctggaactccatcatcaaggggtgtcttcattgcggcgatatcgtcaccgcccgaaagctgttcgacgaaatgccccgccgaaccgtcgtgtcgtggaccacctcgtcgacgggttactgcgcttgggaattgttcaagaggctgaaaccttgttctgggnnatggaacctatg

SEQ ID NO: 4600 - DNA, 552 bp, Glycine max
  Clone ID: PAT_MRT3847_104159C.1
agctcttattcggctcgagaacctgttctctctgccggtgtgttttgctaacaggatccaaacaagcacagtgtgcctttttcaaattatctgggttctctcaactcgcaatggctaaccaagatgtcgacggcggatcctctctctgcaggggactacgatgatcctgcttcaacaccacagagagaagcttcagaactaacacaagggtgcatccacagggcttggaaaggagagcacatagccccaatgctataacattacataacactgctcactgtgaaagcctacaagagccagaactacgatacacattccatcaatgaatgttgacaaagcagatcttgttgctgatgtgctcatcaagaacccaaatccggtgccgatccctctgattgacatagattactcaggtgacagcgatagccgaagctagattccggatgacacctgatgcgaggaccatccatgcacatggagagcaaacaggtaaaattcctgccacttggccctatgatgacattaagccaactaatgcttatcttaaaacct

SEQ ID NO: 4601 - DNA, 494 bp, Glycine max
  Clone ID: PAT_MRT3847_10415C.1
ttttttttttttttttttttcccaggcaaatccaaaatcatgatgcgttaattccatgctatcaaatcttcggccaatatccgggtaaccacgtgtttcagaagtttaaaacgctttgattcatgtgcaaaataacaattagggtgttcttttaagctaatcaaaaacaactgctaagagatgcttctgaaaattttttccacccaagaccgtggggtcccttatttaaggaacccaagcttaactaatctaagttttttgtttaccatgcgtgtgaccttaacccacaggcaaatttccatcttaggaaaatcatttggcacacatgtttcgaaaaatatactacccgtttgcatcgtaagaagaaaacccctgctctcagttatagcttcagccatagcatcttattaattgttgcgaccaatgccctttatgaaacagatctgtgctttttcccttgcagacatatcataaacctcatgatctgttccttc

SEQ ID NO: 4602 - DNA, 346 bp, Glycine max
  Clone ID: PAT_MRT3847_104160C.1
ttgaaagtcgatcaattcatcacaggcgaggtcccatgaccggtaaccagtttcgcttcttcttggcctgcgatatcagtgcatcctgccaccttacgagtccagcgccttggaggcaatttggcccttccgaataccaaaccacccgagttataaactaatgtgcccacagagaataggacacaagagttgcttgtggagtgtgcttcgtacattgagggtgcaccgcctggccctccaatgagaacatggtctgagtcctgacgaccatcacagtgaaggaatgagctcatcacttcgacatctaaatatcgtgacttaactgcccagtcgcacctcacgttca

SEQ ID NO: 4603 - DNA, 264 bp, Glycine max
  Clone ID: PAT_MRT3847_104161C.1
ctcctttccactatcttgtgccccattcaccttactataccaataacttgcagataaccagatctctcccttccttaaatgttagctcctatctctgtcggtgctcgtttgtgccactgctcatatctccttctctattatcgttggtatcgttgccaacggcctctttcagctggggcttgagacgactgctgctattcgaacatttgtgattgtctcgaatctgtctgtgtcagcatagcagaattctgggtctttggaatc

SEQ ID NO: 4604 - DNA, 470 bp, Glycine max
  Clone ID: PAT_MRT3847_104162C.1
aaaaatcaatatgaatttaattgcagtaaaattacacattacaaaaataaatacaaatctcatctgcatactttgtctagtcattccataagaaatgtgtcagaactaaaagcatttcgtatcacatagccatgcatctctttcccataatggagtactgttaaatttgcagaagcagagagagcataagataggctcacagaatcaaacttggctcctctcattcccatttgactaaaaagatcaatggccatttctggtttcccattctgtgagaagcttgaaatcattgagttccaacaaacactatctctttcgaacattcttctgacaaattcataagcaagatccagtcttccacattgtggatacatataagtgatggcagatccacattaactttactttcccaatccttttttagaatggcacaatgcaacttttccctaatttcagagcagcaaaagcct

SEQ ID NO: 4605 - DNA, 386 bp, Glycine max
  unsure (1)..(386): unsure at all n locations
  Clone ID: PAT_MRT3847_104163C.1
aaaaaagntgnttgannagnaagtanaaanagancggattaaangggttaaaaagnnnttaanngngggaaaaaaannacgggggaaaataagggaangaatgaaanttngtantngaaanagnaatgnactntnnagcactatnaaagaaannagctaanaatgnnannnnaannngatannanaagcgngatangganangatagnagagagnaaaangaaagnatancnncngnatnnnnanggagntanggggagnnngaagagatacgantanagngaangananggggnggnnacnnaagtagnanttagngaggaannnaaannaanaanggtngtggntgganggannangtgaangnanntaaggnaagaggtaagt

SEQ ID NO: 4606 - DNA, 412 bp, Glycine max
  Clone ID: PAT_MRT3847_104164C.1
gggttcataacaaagcattttccattatacattcctttttatggaaattcggttacaatctcattgaataacctttataccaattggatttggtgcaacttaggaagcccaaacctttttgatgaaagtccggtccacatgtgtgaaacccacattttttaaacccacgacaaacagggttaaccatgtttttgttatatccggagaccccactgggtattttccttagccattggggcaaaaacgtttgcagccttggtttttttttctagttcgctaacttccttttatttggggggtttaaagcaccccctttggaagtcttgattttataaacttacatatatatataaacaaaaaatatcgggtcccatgtcctaacccatgggtttccgaatcccggtccgggctt

SEQ ID NO: 4607 - DNA, 459 bp, Glycine max
  Clone ID: PAT_MRT3847_104165C.1
aatcttttttttttttttttttttttttttttttttttttttttttttttttttttttttttttttttttggggaaaaagctgttttaaaaaccaagccttgaaaacattaccactttaatttgggggccccaattttccttcctcttaggggggggttaaaaatatttttgggtctttttcaattggaaacacgaacttagccgaaccattttaagaacaaacgggtttttttttaaaacatagcccggccaattcgggggtataaaatggggcaaaaaccatgtaaacaagttttttcctggacataaacatggccctaactcctggttaaacaaagggaaagaagggctaatgctttgcccaaaaactattcacttttgggtgtaaacgggacgggtttataaaacatttcccggaaggagcccggggttaaattaaggggcccttttaaaagcta

SEQ ID NO: 4608 - DNA, 272 bp, Glycine max
  Clone ID: PAT_MRT3847_104166C.1
aaccccacagaccttcctattttttcactgactacattttcgaatcaaaaatattctgtttccataagctactactctccttcaatatatacccttaattacataaagaactaagatcttattcaatactatctctatcaaaaccccactcttgatctattatagtctcacccatataacaaatttgactgtacaatatctcctcttcccgcataaaatactttttgccataaaatatcttaatcaatcaatcacacatacaaccttaaatt

SEQ ID NO: 4609 - DNA, 205 bp, Glycine max
  Clone ID: PAT_MRT3847_104167C.1
tgacgacgacagcacgcgcacggcagcgcggaaaccctagagcggccggcccaataaaaaaaaggccgcgggttatttttaaaacccagggcgcgagcccgggcggagcgggggggggggcaaaaacgaaggaaagggcccaaaccccaaggcgggcagggaaactgaaaaactcaaacctttaccaacaaaacaaaagacggga

SEQ ID NO: 4610 - DNA, 252 bp, Glycine max
  Clone ID: PAT_MRT3847_104168C.1
ctagactctagttatatcgattagctattaagttggatatatataggatgttctcaaatgcattagcagtaactgtgatctcctcagttgcttggattggatatgaggtatattacaggctacagatctttcaatgagcgctggcaaagtgcttagatcatcaatgcattctgggaattctagcattgcattactctgtgtatatgctatcctgggcccatccaagctctcaaagtagcaattcgagcatgg

SEQ ID NO: 4611 - DNA, 443 bp, Glycine max
  Clone ID: PAT_MRT3847_104169C.1
tttaattgcttctagtactgtagactacagaagggataccatataagcacaagtatttaagatttagggagaaacaatgaaatgtaggccaacacatccataattttttttaaaaaaataacattaatatcaattaaaccttctagaatcatatgtcaaaaaaacccttctagatcataaagccaacattttattgactttcaattttaacctattaagatatcaaattcttgttaagagtgggatagaaatgtttacgcacagcagttttttaatacaaaagaatgagcttataatcaatgccaaggatccgattttctattagttcttttaataagtaacaattaaagttccatcagagttacaataagtaaatttgtaagagactttataaacgaattgctaaaaaagaatttaagcaatttgggatttttgattatttt

SEQ ID NO: 4612 - DNA, 902 bp, Glycine max
  unsure (1)..(902): unsure at all n locations
  Clone ID: PAT_MRT3847_10416C.1
tgttttgggagtggggggacatngtcacaggaacagatggatgagttggctttgggtttggaattgagtggtcataggtttttgtgggtattgaggccaccaagtagtgtggctaatgctgcttatcttggtggtgctaatgatgatggtgttgaccctttgaagtttttgccatctgggttcttggagaggaccaaggggcagggcttggttgtgcctttgtgggcaccccaggttcaggtgcttggtcacaggtcagttggggggttcttgagtcactgtgggtggaattcgacgctcgagagtgtgctgcagggtgtgcctctgatcgcgtggcccctgtttgcagagcagaggatgaacgcaattctgctttgtgaggggctcaaagtgggactgtggcctagagtgaatgaaaatggcttggtggaaagaggggagatcgctaaggttataaagtgtctgatgggtggggaagaagggggcgaattgcgccgaagaatgacggaattgaaagaggctgccactaatgcaatcaaagaaaacgggtcttctacgaaggcccttgctcaggcagtactcaagtggaaaaaattggcataggaaaacatgttttatagaaagattttgtcaggatctttgtttttgaattctgcttcgcaatgattgtcaatcctcttgtgaaaccttggcacaagtgggtaataaatgtgattttctgatctagaatgtggtcatcatgagaatttgcaattttaagcttatacttaagcattcttatatgggattttatagagagttggcttgagttggtcttatcttcaatatgagcatccattattggatttgcatactagtgtgtttggtgggtgcctatgaatatatgattatttttacatact

SEQ ID NO: 4613 - DNA, 505 bp, Glycine max
  Clone ID: PAT_MRT3847_104170C.1
ttttgtaaaacaatcaatagaaatctttctttattggtttcacttgtctgtcaaactataatagcataagtgaactaactgctatctggaccaatttctaacttcgtaatcaatttccactatctgaaatacaactactgctacaagtaaatcctcaatctcatctcctaaactctaaccccactctataaacatgtatttcatattattgttggtgcacacatttagtatttgcgtgccgttgagtttgggaaatctatatgtcacggaacatctcagtgggttgcttgatcacactatcacttccatattctaactatttcgggtcttctgcacaggtttttgctcgcttgcaatttagacaatgtcctttgcaagttctaaagctggcagcacaaaatgactaactatttgtatcttatgttattaatttgctaaatacattcagtgattattaattaaattggcgaataaagtgaataaacgatacaaaccggacgcgtgg

SEQ ID NO: 4614 - DNA, 183 bp, Glycine max
  Clone ID: PAT_MRT3847_104171C.1
gtaaaagaaaacctcccctcatgattgggttttcttaaaagatcagacaacaaagggtctgataaaacgctgcgcttagcttacacaggaaagcatgaatttcatcaccttaacctagtttggccaggacttcgtgcagagaagatacagtcgcagcattgttctgctctggtgctgggctga

SEQ ID NO: 4615 - DNA, 531 bp, Glycine max
  Clone ID: PAT_MRT3847_104172C.1
ctcagtcttctcttagtattcaaccttgaaatgtagttttacttgttaccacatgttgtacttatactttagaacttcaaagggcatatcaatgcaatcaagaacatagaaacaattaaaccttagcatccaaaaaaagcttgtcacgtggagggacagatccaaaaatgcatcaaggagggagctacattcttttacacaattatttaaatattaattttttaataagtaattatttaatcgataataattttcacataaatatttactattaatgttatgaatgaaattagacataagatctattataagtataaaattatcaaatcctcaagtattttcttattattttttcccactaatatttttttatgtaatttttctttttttatatatgaagtaagtgttgattgagggagggctagggtctctatctgcctcccttttgaatccacccttggtcacgtgatagtttttaattaaaaatttaagtaaatatataaatcaaagtgtaagtttttttattaagag

SEQ ID NO: 4616 - DNA, 639 bp, Glycine max
  Clone ID: PAT_MRT3847_104173C.1
tcgcacactcatcctactttctcttcttcttccacctcctcctccaccactcgccttcagccaccacctctccctcctatgttgtgtcgtttgaaccgcggggataactgcgatttcgatctccaccccaatcacagttgtgattattgtgactgtgatagggacttcaagcgttgccacaaccctagccgctactctcccttgtcattgccgcgctggtcacctccgtagtacaagcgattccatagaggcagcccccgtggtgggggatatgaaccaatgatgggtttggctatgattattctagtggttatgaatggcgagcgggcggaaggattggttatgctgatgagaagtcttatggcacgcttgcacaccgatctactaggggatatcataatgggatttctggtgtgttaataattgttaatcactatgggtttttcttatatagtgtaaatgacatatatcgttagctttaattcctcttttattctgtgattaatgaatgcttatataatatagagtgttgtatccttgtggcatacatgttttgatagacttaagatagagtttggtaatgagatgcaatgtgtgaaatggaacctagttatcaattttgtatccttctcttgaaag

SEQ ID NO: 4617 - DNA, 1117 bp, Glycine max
  Clone ID: PAT_MRT3847_104174C.1
tgcatctctatcttagttgcaacttgctagtcccactaagtttactactattacctgccattcaaatcaaattcattagccaccttgcagatcagcacttcatggctactacagaccctgagaacaaatcaccaactctgccgctgcctccagccgaagtggattactctaaagttgatgtgatcctaagatttctgttgctggcagcatcggtggtggcgcttgcagtgattgtctccagtgatcaaacagagcaagtgctcttccaagatgtgcttctaccgcagccagccaagttcaaatactcaccagcttttgtatattttgtggctgcattcagtgtttctggcctttatgctcttgtttctgctcttgcatctatctctgtcatcccaggattcaaactgctttatcttctgggatgcactgatattggggataacagcctcagcaacaggagcagcaggaagtgtggcatatattggtttaaagggcaacagtccatgtgggttggattaaagtttgcaacatctacgacaagttctgtaggcatctagctggctccatagcagtggctttgtttggcagcattgtgactgtccttctcatctggctttcagctttcaccattcacagtcgagttcccaaatagatggaaggaatatggaccattcagcatacatatgcactcaaatccagattcacattgttcacaaaatcagtcaagttaatgttcatatattgacatggataccttttgttgttgtgagtgtttcttcaaaggtgttgattatgtgtaatgaagtatgttaactacactctgtatgaacattctttccaacagtctttgttattgaatgaaattcatgagtcttactaaatgatgtaggtccattccttatttagtgagtttcatatgaatttcaccaaataataaagaatatattgttgaaaagtttgtgtcaagtaatgtgatactagcatttgttatgtgtaaactatatcctccatagatcccagttgtaatttgcattctgtttgtgctaaaaatgatttgtaatgatcctgctccctcaaaaatgaaaataaaaatatttttaattaattagagaagaac

SEQ ID NO: 4618 - DNA, 272 bp, Glycine max
  Clone ID: PAT_MRT3847_104175C.1
acgcgatgaatgccgaggcggcgccaaggacaaggagggacaaacaaccaggcagggggcggaaacacgcgagagagaagccacagccgagtacctaccgaagcataacgcagacacatatccaaaagacaatgacgggagcccaccacgcgacatccgtgagtcaaactggccccgcatgcagcatgcggggggagaagcaaacagacagaccgcacgcccgccagcagcagcaactggccaacacaaccatttacccaaatccctaaagg

SEQ ID NO: 4619 - DNA, 174 bp, Glycine max
  Clone ID: PAT_MRT3847_104176C.1
tcttctcttgaatcttgaaatcaaacttctcttgattcttgaatcttcttgatttcttctcatgaaacttgaaattaatcttgattttgaacttgttgactcaatcttgaaatcattctcttgggctttttgtcatcatcaaaactacttgaatcaacttgattcatcatcaca

SEQ ID NO: 4620 - DNA, 348 bp, Glycine max
  Clone ID: PAT_MRT3847_104177C.1
aagtctaattaaaatttatgtactgtcatttaaagagaaccaaaattttgctacattttgattgccttcaaccaaatatccatgctactgggatgaaaggagtagttgccatatacaacaaatagaagtccaaaactaagcaaaaaatctgaaacaaaacatagaatcatttggcaggattaggtacatttcattgaaaacttattgctacctacatgcgaacaaacagaaactgaatatctgtaccaaaatggtatcgtgaccaaaaaactataacataacttggagcttcttaaacattaagaggcttaacctctgcatctaccacataggctgaccatgtttcag

SEQ ID NO: 4621 - DNA, 984 bp, Glycine max
  Clone ID: PAT_MRT3847_104178C.1
cgacccacgcgtcctcacttgtcactcgtcactctgccacttcttcgtcggtgtcaaactcacacaaactcagcattcaaaaccctcttcctgcgccaccgccggaaaatggaggcggtgggttcgagactcagccgcgcctcctcccgctacggcgcccccaccgtgttcagcggccccgtcagaaagtggaagaagaagtgggtccacgtcaccccctcttccttacccaacaacagctctcactctcacactaacaactccaccaccaccagcagcgcttcctctcgcctcctccttcgccgttggactcccgccaccgtcgacgacgccgccggagccgtctccgacgagcctccccgaagaaagttccgttacacccctgttgttgtcctagaagaacagaaaaagatgaatgttgtgaaggctgaacatgaacccacaattgagactgaccaattggctgctaggaagacaaatgtgactcatgagatgcagggaaaactgaacatgaatgaaatgttggaggaaaccaaggattcaaacattggtaatttagatcttggttcagacttccaaagcaacaccggtggaaacagccagaacagtgatgctcaattggaaaatagtatgtaatgggtggtccatgaacttggtatctgtaagtaggaaatcaagctgttaggcagtgaagtgttcattcaagaaatactaagctagtatatattacctgttatcaccgtacatcttaccattctatattgacttataatgtagttagccataatcttgtgtatagttagcacttaactagtgctgcctataggaatgataagtaactagttttgatcagcataggataatcagttgtattttgtgatggaacatatgcatgatgtgatgctactaaggagctgagtatatatttttaaatataaaagctcaatatgctcccaaaatctgaatgcttgaatgtttcatttc

SEQ ID NO: 4622 - DNA, 239 bp, Glycine max
  Clone ID: PAT_MRT3847_104179C.1
tctgaccaagactacgctctagatccatcccacttcgagctcccgtcacagtcactcgtaaatgtgctccccatggcgaggatcaatgtttacaagctgcagcaaatcaccaaggctgatctgttcaatcagctgatagacctcaaggccgaacttgccctacttcatattgccaccgtcaacggctgtgcacctaacaagctctctcacatcaatgtcgtgacgttgaacattgccca

SEQ ID NO: 4623 - DNA, 474 bp, Glycine max
  Clone ID: PAT_MRT3847_10417C.1
ctcattattctcagccttgtcgcattctctttcctctcaggtaatttcaaaacccacaatttttatttttaaaaacgcaaatttaaaaataaaattccttttttttaaacacttgtgcggtttctgaacttgcagacgtacaatcagcatcgttcaagattgtgaacaagtgccgccacacgatatggccaggattactctccggcgccacatcaccgccgcttcccaccactggattcaccctcgagagcggcaaatcaaggattgtaaaaatcccgaagtcttggtcgggtcggatatgggcacggaccctctgcggccaagactctgacggaaaattctcttgcgccaccgccgactgcggctccggcaaagtacagtgcgttggcggggccaaacctccggcgacattggcggaattcactctcaacggtgccgacgggttggacttctacgacgtgagtttggtcgacg

SEQ ID NO: 4624 - DNA, 420 bp, Glycine max
  Clone ID: PAT_MRT3847_104180C.1
aacaaacgaactttaaaatctataaaaaaaaaaagaaaaaaaaagggccggccgaccgtaaaaaatccaagcaaacgaacacaagcctaccaacgaaaaaaaccaatcaatagggacaacaaaaaggggaggccctgcacgaggtccaaacctcagcacggcggggaaaaccgtgaagtcccaaaatgaggcgcccaaacagcacatccccgggccgccggttgaaccaccaggcagggagaaaccccggggtagccccaccgaacagtcctgcgaccagaccggcaaatggcacgcggcgtgaatcgcaacaagaacccccccgggcgcgttgcaaacacgcaggccgaccgaaagggtaaagggcccccccccgccaggggcctcctaaaaaccgggagggaggtgggggccacgccc

SEQ ID NO: 4625 - DNA, 293 bp, Glycine max
  Clone ID: PAT_MRT3847_104181C.1
gccacacgtgcggctgaaagagactccttcttgtcaatcactgtgacaaaaaaaactgtacactgactctgctatagctgtgactccactcaccctgtacaagtcgttatatcgaacatggaaactgttacttctaatgatccacaggctgatgaattcaaactgcttgtcgatgaagcattgaccgttggcgaattctacctagccattgatctatatacacatgccattctcctgctcagtcgaaacgccattgactcttctattctggcctttgctcatctttaccttga

SEQ ID NO: 4626 - DNA, 813 bp, Glycine max
  Clone ID: PAT_MRT3847_104182C.1
cccgcgtccgctcttctgtactttcctcgtgttctctctctctctctcaaacacacacacacacacttcacgaactccatcactccaacaacacacagattctatctcctctctctctctctctgacacacacacacacacacactctgtttccattttatctctttgggccattcattctcgcaagtaactcttgtttgttttattaaatggctgagactcgccggcgaagatgaagttttccggcaaggggagttttccggtgggcattgctttgaggagcgtgaacaacccttcgccggactcagatcttgaaccggcgaagccatttctgcggcggaatccgagaactccggggacacggttgaggagacacggtggcaaacggagcagacccgaaacccctcttttgaagtggaagatccatgacgatccacttgaagacgaccagaagtcttccgtcgctgggtcccgccggagaacgtgccggagcgccaagaagcaagccgaagtcgctgtgtcggcgaggagactcgccgccgggctgttacggttgcatctaccggagacggccacgggtgatggccggaaggggttggaacataagcatggaattggtcacccagggctccagtttcttggtcatcctaatggcatgacccatggttctgatctgaagaagaattcatctcaaagtccccgttccatatttggtacaaggaatggacacttctgtgagcctgaaagtttccagcttcccaacaatgaaatggagggtgcaacaaaagggatcctttatgttcaaaaacatca

SEQ ID NO: 4627 - DNA, 404 bp, Glycine max
  Clone ID: PAT_MRT3847_104183C.1
aaaataacacacacttgacacatcattaccacatttacaagaggtgtggaaattttcaaatagacggagcttatctaacaagagggacatgtctaatttcctttatcgaattccacacacgagccaactagagaaaacccccattcccgatcatgccaaggattccgcattttcagaaaatctggcagtaacctgtggcacagaaaaagctggcgtaacagcattcccagcaatttcaaaatcttgagaaattcccaggggaatatcaaaaactgtagactggttgggattgtcaataaggaaactcaagtgccataaagtttgatttgcccacatccaactccacatttcaaaaccgttattaggaccacatacctttattgggaagatcaattcccaggaat

SEQ ID NO: 4628 - DNA, 612 bp, Glycine max
  Clone ID: PAT_MRT3847_104184C.1
aacctggagtctgctgtgacgaccgaccagacaattccacagctcaatctcctaggccgcgctcgcccttttttttttttttttccacttataaacaaaaatgatacaggagatcaaccaaaggattttctaactttacaaatacattcgtgtaagctgttagtgatctgaattttgaataactaagaatttaattaaaacagttatagtataagagttttttacactaatatccaatcataaattgtcaaatataataacattattggcttacagaaattaaattactttaaaagtcatctatacggggatttttattagttgatgtgaaaatttttacaccaacagaatatgaaaattaaacataagatagattttattcaataaataaagttgaaggaagctcaacgactacgtgaattttttggaattttttggacttttccccgtgaaattacaacttgatatttactgagcagaataacgtttcctacacaggatgtagcactgatttcctacacaaatgtttcgttcacatgcattcaaaaatttcactatagagaagataaagaatggagagaaaatatagcacatgtgtaaagtctactcatc

SEQ ID NO: 4629 - DNA, 426 bp, Glycine max
  Clone ID: PAT_MRT3847_104185C.1
cttcttcaccaaatggggtggctgcaatcccttgtctctccactgaagaagttctggctccgcttgaattcaactcaaaagaagagaagagggatttacattctgtatgaagatgtcaagtcttgcccctatgaagacgtgcacgtcctctggtcaatactagtggaatcacattcaccttctttgccatccaaaaaatgaaggccttgggcacaatacagacttgagcagtggctactaataatgtacataaaaatatatatttataatgcccataccatagagtgttttatcttacttttacttttttttttcttttttaacttttgtagcaccagagcatatagagtgacactaagtttttgcttttgaagcaccttcgaagacgttcttatataataatccattattccatttatctttaaa

SEQ ID NO: 4630 - DNA, 334 bp, Glycine max
  Clone ID: PAT_MRT3847_104186C.1
ttgcttcctcagttctctggttgtttttttgtgcaagctggccaaatattggattaatgctcccactttgctatctggtataggactttgtgcgtagactttactatttctgagctacctttcactctcttcatctgactgatccgcattggcgatcagagtggtcttatttgagagacacttgggcgttgatgcatatgcttgctgcaatgattaactctggggacaacaggctcactgtgaaaacaatatttacttgcagagattgggacatctagggtgcttattatacaatagcaactcatgatagaaacttcctaccgtattacatttg

SEQ ID NO: 4631 - DNA, 152 bp, Glycine max
  Clone ID: PAT_MRT3847_104187C.1
gattaaaatgcagcaatgatgccagtttgaatagtcctgagtcttttcaagatcgtttatggacttcagattccatgttaaagtgagcacgtggtcctgtaaaattttctaacattttcttgtcagagagaaaaaaaaacgaagacacgaac

SEQ ID NO: 4632 - DNA, 366 bp, Glycine max
  Clone ID: PAT_MRT3847_104188C.1
gccgatgggcggagaacacgactgaaccgcagagcagagatgtgagaatgatgatcataaagaggccagctcattagctgaacattcatgagccagatgattgaatacaacagacaagacacttatgtgacgaagccaatgatgaaaccagacaacatattgacgcatcagccaaatgaatatgcctgtgcactctacattggaagtcatgactgcacccactacatctgaagtgctgatcagctgctccaaagatacataccaaggacttgccggcgatctcttaaaatctctcgaaatatcgcggatgctccgacaaggtacctatagaagaccattgtaatcttaatgaaaaggagactgaat

SEQ ID NO: 4633 - DNA, 399 bp, Glycine max
  Clone ID: PAT_MRT3847_104189C.1
ctcacttacgccgccacttcggcaactttacttgcccacaatggcggttaactcaaaatgtagtaaaatactctttaccttctgcttgctacgggcatccaaactggctctcttagggacccttctttatcggctcttaaaaatagaaagagtggtgcgattgtcaaggacgtccacacttgtcagggagctcagctacataacctaccaaaactaactgcacatcttgtacattgaggggccagaaggaacgcgaacaattgctctgcgctgagaagacctgatcagagtctacagactctcctgctgttgccaagagtacaccaaagaggttgattacattgaggaagggcttaggtgcgataactggggctagctctggactaggcctggccactg

SEQ ID NO: 4634 - DNA, 689 bp, Glycine max
  Clone ID: PAT_MRT3847_10418C.1
aacacggataatttattttagcatttcgtgtaccggtagtcgaagaaggtatcgtgcccttaagcattctcgttataatatacaatacaatgatgagcagctagcagcactaaatggctgatccagagagcaagatggctgaagcattcgccttagcaatcttgagtgtttttggatttagaaatggtatcagtctcctgtaagcatgtacacatccatccatgttagatgaacaaagaacctggaaaggataagccttctaaaaaattgctattaattatggcattactggctgatacaatcaaggcggtgcaccaagcgattcaacagatattttgactcacggtgtctaccttttccgagtaaagatttaaaaacacgaaggtaggcaaaacgggactgcggacttcccttactccatgccttcaggaattttacagcatctactacggacccaaactttgaaatatactacacaaaggggttcactgaatggagtaaatgtgtgtgaaatcatcaaacaccaaaggtcaagtgcctcctcaaatttcccaatttccaataggttatcaatcagtttcagatatgtattttgcgtcggagatttgccatgctttcatagcaatctttacaagcaacaagtaaccatcatctattctcttttgactaagagaaccagacgcgtagaa

SEQ ID NO: 4635 - DNA, 215 bp, Glycine max
  unsure (1)..(215): unsure at all n locations
  Clone ID: PAT_MRT3847_104190C.1
ccgacactttagcacagtgggctctggaagcttccactgcaangnaacccnatgctaccattgtccnaatcgcggggtnacgcnttattnnagatgtgggtcgnatcgnaccggattcgtaaccgttagntanaaggtcaangtccatcntatantgcnggntngaacacgtgtgnanggtcgattatagaacttgaaaatggncaatagtcacg

SEQ ID NO: 4636 - DNA, 676 bp, Glycine max
  Clone ID: PAT_MRT3847_104191C.1
ttttttttttttttttttttttttttttttttttttttttttttattttttttttttttttatattattataaaattttttttttttttttttggtttttattttttattctggaaaaaaaaaaaaaaaaaaaaacccgaaaaaaaattggaaaaatcaaaagccgggggggggagccaaaaaaaacggaaaaaaaaaaaagtggggcaccccccgcccagggggggagcaaaaaaaaattggcagcgtgtctgggaaaaaaaacacatttacaaaaaaggggcctataaaaaaggggggatgctgggggaaaaaggggattccgggaaaaaattgggtccccccaacagaccacacagaaaaaaggcccggaaataaaagggggaaaagcgggggggcctgaaaaggggaaaaacccaaataattgggtgaccccccacccccccgttaaaggggggaaatgctttgggccccaatggtaaaaaaaacccccccccggggcggaaaggggtttatggtattgggccccaggggttttttttttttgaaaagagaaacggccacagggttgttaccacaaacgaaggggccctggaaaagaaaagggaaaaagggggggccacgagggtggacccccccacaagaaagaaaaacaatctttctatgacggtggggg

SEQ ID NO: 4637 - DNA, 117 bp, Glycine max
  Clone ID: PAT_MRT3847_104192C.1
ggctcgagcgcaggcactacttgattttgtttatatagtgatcgcacggtaagatgtggacggggatcttcgtggtcactgcctggaagaataatataattgcggataacatactta

SEQ ID NO: 4638 - DNA, 251 bp, Glycine max
  Clone ID: PAT_MRT3847_104193C.1
ctcgagccggctaaaatgagtcataaactcataatctataaatcattgtaaagactcagcccatatggatgacaacatcactggaggagcttgtttttgtgcttctagtgctaaagcctaaagagcctaagcttgtttctttgtttcctccgggtgaaggttttctcaaggcccactgttactgcaatgataagtgaagattaaaataaattttaagaaaaatgtttattttaaatgagagaattatatat

SEQ ID NO: 4639 - DNA, 262 bp, Glycine max
  Clone ID: PAT_MRT3847_104194C.1
gttgagctatgctcctatgtaagacatctgtattagttgatggttaggggtctcattaatgagtaatttacattattatccaaaattgaacaagtgaaaaattaacaaacgattgtagagaggaggggttgggggaatgaatgtcgataaccactgcaagtctgcaacccattcaaaacaaacatcgcagacctaagtttctgctgtgagaaccgaagccatggttggtggcggttcagatctgagtttttgctgccaagat

SEQ ID NO: 4640 - DNA, 817 bp, Glycine max
  Clone ID: PAT_MRT3847_104195C.1
ttttttttttttttttattggtctgaagtagaccatgattgttatttgttctcttttatactgtgttaatagtaatcttactgccacaattccctatccaagaaagtagaaatttaaatagtccaatgttgacaaatttgtgtcaatactgttattatggtatggcctaaataagagaaataaaagaagacattaacaaaaaaatatacgtggttacttaggtgggtgaactggattggccatctgagctcaagctgcgtctccttttcttactcttctgcctaagtatctctttgatttctttttctttcttatccacaaaataaatcaagtccctgaagctagtagtgcttctgaaaagccttttacctttagtaggcctatttggtgaagtttcctcgtcgtcttgctcgggttctgggctgaattttgtgtattgacatagcactctaatggagaatgcaaccaaagcaaggagacatgcaatgccacatataagaaagagaccccagaagctactcagagatagtttatttaaatcagcatcattatctggtgcagaacaatcatgtttcaaaagccatttatcatggatcttttgcaggtcaccattctccgagagttgaagaatggcggttgacatttcaacagcaaggggagagtctctctggaatgcgaatccccaaccacttttagtgaactcctgcccaacggttctgaccttacagttggtacttgacattaatatttcaatataaagaagctcatcaacaacggccacaacccctccatcttatagtcctttctcgctcgagcc

SEQ ID NO: 4641 - DNA, 326 bp, Glycine max
  unsure (1)..(326): unsure at all n locations
  Clone ID: PAT_MRT3847_104196C.1
gggggcgagaagacgaagaaggagaagaagaagaaggagctgggccatgagcatggcctnacaccagcancancagtgacagtgattaaactgctgcatcacctatatatttaaaaggtttatgggaccatagtagcgagggctgtgccttaatttctctctctctctctctctctctctctctctctctctctttttcctttttccctatcttggnatgtatgggtgagtgattttttctttagtgagaaattgtgcgtgtatctggttgctaattcgagtgctattagtctgcgccttggttggtttgtncccccgctncttgg

SEQ ID NO: 4642 - DNA, 190 bp, Glycine max
  Clone ID: PAT_MRT3847_104197C.1
tcacagcgtaactcaggtcccattgtttggattgcccacccactaaactgaggaatcacactcaggaacggaatcacatcgcatctccaactgcttcgaactcagtttataggagtggatttgggcacagtcatcaatcttaggatctcgcggtgactgacttgtcttctacattggataacttggagga

SEQ ID NO: 4643 - DNA, 476 bp, Glycine max
  Clone ID: PAT_MRT3847_104198C.1
ggctcgaggtcgttgaagaggtgaaagtggatttttaactggtgctcttgggcatatatcgtggtgcctcggtgtttaatcaataatgatgccactgaatcgatagggaataccccaatggcttatctgtgcctcattgtgggtgggtgtgtagcccgtattgctgctaaactggagctctttcaagtcgtgctgttgcgacacatatatgaatggtctgagcatgattgaagatgctgagataaaaggccttattatcacctggaaagacttgctctggatgggtctactaatgaaaacaccggcctaggattggcctttatagcgctcattggagggttatgaactccacgtgactatgccgtcttacgtgagtctcgagagaatagaaatgctgcgagcctctgctgcgaggactatcttacaaacgctgccaaaagaattgatggcgccattctgagagcaaacgacctctt

SEQ ID NO: 4644 - DNA, 3305 bp, Glycine max
  unsure (1)..(3305): unsure at all n locations
  Clone ID: PAT_MRT3847_104199C.1
cttttctcctctctctcacttgcgttattaagggttttnagttagaccagtggccggggccagtggcgccccagcaggcgcccgggcttcagtggcggggcagggatacagtgtgggcataaaattttcgaagttgaagcgagaacttgccatttcaagggttttagggttagggttttctcaaattgcaaggacatgggtttcaaccttcaaccatatgggattcaatccatgctcaaggaaggccataagcacctttctggcctcgacgaagcggttctcaagaacatcgacgcttgcaaacaactttccactattactcgaacttccctcggtcccaatggaatgaataagatggttataaatcacttggacaagctttttgtcacgaacgatgctgggacaattgtgaatgaacttgaagttcagcatcctgctgccaaggttttggttttggctgggaaggctcaacaagaggagattggggatggagctaatttaactatttcatttgctggggaactcctcggaagtgtgctttttaactttaaaagccagggtagctggttcctgcggtggaacattgaccatttgaaaatagttgtacaattaagccttccattatttggaaaaaaaaaaaaagggggtcttctgattctttgaagcgaagaaaaatgccagaaggccctccaccaaaagattttctgttaaaggagacccaacccccaccttggaggggggaaaggtctctggggacaagctcactagcaccttatgaacctaattgaacaaatgccagtatctctattgtgagggttgtgaaggctaaggacttgccagcaaaggatgtcactggcagttgtgacccttatactgaagtcaagctggggaactacaaaggcactactcggcacttcgagaagaagtctaatcctgaatggaatcaggtttttgctttctccaaagaccgcattcaggcctccatactggaagtcactgtgaaggacaaggatgtcgtgaaggatgacttcattggtcgtgtcttgtttgacctcaatgagatcccgaagcgtgttccaccggacagtcctttggcaccgcagtggtataggctggaagacagaaagggtgacaaagcgaagggggagctaatgctggctgtttggatgggtacacaagctgatgaggcgtttcccgaagcgtggcactcagatgctgcaacagttagcgggactgatgctcttgcaaacattagatcaaaggtatatctatctcctaagctttggtatttgagggttaatataatagaggcacaagacttgcagccaagtgataagggtagataccctgaagtttttgtgaaggctactctgggaaatcagaccttgaggactagaatctctcagagcaggaccatcaatccaatgtggaacgaggatttgatgtttgtggctgctgaaccatttgaggagcctctgattctgagtgtggaagacagagttgcacctaacaaagaggagtcgctggggaggtgtgcaattcctttgcagatggtggatcggagactggatcaaaagcctgttaatactaagtggtataatattgaaaagcacattgttattatggaaggggaaaagaagaaggaaatcaagttctcaagcaagattcatatgaggatctgtctggaaggcggttatcatgttttagacgaatcaactcattacagcagtgatcttcgcccaactgcgaaacagctgtggaagtccagtattggagttcttgaactgggtatattgagtgctcatggtttgatgccgatgaaaacaaaacatggtttggggacaactgatgcttattgtgtagcgaaatatgggcagaactgggtgcagaacaggacaattattgacagctttgacccgggtggcccacgcgtccgtttgggaggtttttgatccttgcactgtcattacaattggtgtatttgataactgtcatttgcatggtggtgataagcctggaggggcaaaagattccaaaattgggaaggtaagaattcgtctttctaccctcgagactgaccgtgtctatacacattcctatccacttctagttcttcatccaaatggtgtgaagaaaatgggtgaaatccacttggctgttaggtttacttgttcttctttgcttaatatgatgcacatgtattcactacctttgttgccaaagatgcattatattcacccactaactgtcagccagcttgataatctgaggcatcaagctactcagattgtttcaatgagactgagtcgtgccgagccaccgctgagaaaggagatagtggaatatatgctagatgtgggttcccacatgtggagtatgagaagaagcaaggcgaactttttcaggattatgggagttttgggtggattaattgctgtaggaaaatggtttgaccagatttgcaactggaaaaatccaatcacaacagttctgatccatatcctgttcataatattggtcatgtaccctgagcttatcttaccaacaatcttcctttacctcttcttgatcggagtttggtactacagatggaggccaaggcacccacctcacatggacactcgcctctcccatgcagattctgcgcatcctgatgaactggatgaagagtttgacacattcccaaccaccaggccttcagacatcgtgaggatgcgatacgaccgacttagaagcattgctgggaggatacagactgtggttggtgatttggccactcaaggggagaggctgcagtctttgctcagctggagagatccaagagccactgccctctttgtgattttctgtctggttgctgccattgtactctatgtcactcctttccaaattgtcgcacttttcactggaatctatgtgttgagacacccgaggttccgccacaagcttccttcggtgcctctgaatttcttcaggaggctgcctgcaagaactgattgcatgctttgagtcatggatagtgcacaaactacaaaaggagcagcttgctttgctttcattgttcagcaccagattttgtggatttgcattttcattatgtcataggattttctgttttgaatttcatggtttaatttgtaattttgtaggctgtgagttgaaattaagttatgttttaatcaatttcatctttaattagatgtagtaaagtttctcaatgggagtttgaactttaccccccaacaatggctattgatattgagcttaagtgattactgaattctgattggggagggaccggaaaa

SEQ ID NO: 4645 - DNA, 280 bp, Glycine max
  Clone ID: PAT_MRT3847_10419C.1
ctcagagtttaggcccctatttataactactgccatgcaaggcaaccactgttgtgaccatttcttcacacgagtatagaatttgctgaaagctaggaagcgtatatcgatcctgatattctggctcttccgagttatttggcatccaatcatatagtactatagttctagccgattctgatattatagacaacttgcgatcttgattatcacatgccactgaggcatcaccttggcgtgtgcatttcattatctagctggaccagctaactacggcacg

SEQ ID NO: 4646 - DNA, 1374 bp, Glycine max
  Clone ID: PAT_MRT3847_1041C.1
gagaaactggttgagcccggaaaaaacaataacaaaacaaaacgtggaggataaaaaagagagaaggatcgcttaaacgttttgggggtgttgttgaagatgttggtagcaaatagctttgatctatggcgaaaggacggttttttctctgcggcggaagaggtgcaggaatcagctgatataatggaatctgcatacagggcatggttgagagagaagagagaaaggtcaactcctgaggaattaaatgaactatgcagagagctgcaaactgctttaggtaccgcaaaatggcagttggaagaatttgataaagccgtcaggctaagctaccgacatcacggtgatgacaatacatccactaggcataggcagtttatttctgccattgaaagccaaattacccaggttgaagcagcactgagggaatcttacattgaggaaggtaagcaaccacttcggtgggtaaaccttgatgaagaagagcgagatgatctggctgcctttctatctggaacttgtcagaccacacaaagcactaacgatgactgcatggaggtgaaacaagccaagaaagaagataagattgtagatataaacactttccgcaaccgggatatatctgctagtgaaaagtcttctaaggatgtcatttctgttaacaaggatacagattatgtgatagaaataaagcagatgctgtttctagaagtaatgatgatttagtttctcaaacagatagaacaactagtacaaggaagacatggagtccgcctaattatggtgctttaaaaattgtaattgctgatgaaggtgagcagagagataaacccacacggactgttgatgccacccctaaagaaaaagggttcagaaatctattttggaaacaaaagtttgaagattatcctcaggccacgcgagtagttcgtatgttcaatcagcgttttgggggcattggtatatgccagagccagaggcagtttcaaagtcccttgcacttgcgatatggctgttctgttcaagttacacttgctctaatgttgaccatttttctcattgttccctttgtactttattcaacttgagttaaacagctgcttcgatcaatctgttcgagagggctttaattggtcatatgagatctcagccactgccttcaagtattggtgggacaagttagctaaagggacaatgagtgccaacttctattttgtcgttgttgagttacctatgtgagtgtggatactgataggataaccaacctcttcgtcctacaggaacacctgtctattttagtttcatagggctgttaaatgtatatacattcatccaatatttaatgcaagttccgctttatttggttgcaacact

SEQ ID NO: 4647 - DNA, 415 bp, Glycine max
  Clone ID: PAT_MRT3847_104200C.1
cgggcgagttgtgtttggatttggaacttggggagcttccctctgggtgggtgccttaggctgcataggtgccgaactagaggcgttcccggtatgagccgagaagctcgggtgatgttgcgcgtactgatgggtaccatgaggtgtctgcgggggtttgacccacgcgggtgttgaagagacggcatgggcatctccttccttccttgtgccaatttaatgcactagctaccaaatgctactagtcccttttggtggcattctatgatattatgtttttatgtattttggtgtatcactccttgggccttgtttgcctttaatgagagtggcttattaatatcaatatatcacctaccaaacttattgctagcaaaaaaaaaaaaaaaagaacatagaactacaactttagata

SEQ ID NO: 4648 - DNA, 1500 bp, Glycine max
  Clone ID: PAT_MRT3847_104201C.1
ggattatattaatataaagtttttgaacttggaagcaatcgaaacagagtcacgaaagccaaaacagcacgaatacagacacttcacacacatccacgataatcagtaaggcaggtatcatatcaccctgtattaatttgccttctttttcttcacacatgctaacagctcaagtttctgaactacagggccatcgaaacacagacacttcaaacaccaacaataatgatttaactttgaagacacagctacaatttttgaaaacaaaagatggtaaggggacaactgatgcttattgtgtagcgaaatatgggcagaagtgggtgcggacaaggacaatcattgacagctttgcaccccggtggaatgagcagtatacttgggaggtttttgatccttgcactgtcattacaattggtgtatttgataactgtcatttgcatggtggtgataagcctggaggctcaaaagattccaaaattgggaaggtaagaattcgtctttccacccttgagactgatcgtgtttatacacattcctatccacttctagttcttaatccaaatggggtgaagaaaatgggtgaaatccacttggctgtaaggtttacatgttcttctttgcttaatatgatgcacatgtattcactacctttgttgcctaagatgcattatattcacccactaactgttagccaggttggaagtttgaagaagggagctactcagattgtttcgatgagactgagtcgtgctgagccacccttgagaaaggagatagtggaatatatgctggatgtgggttcccacatgtggagtatgagaagaagcaaggccaactttttcaggattatgggggttttgggtggattaattgctgtaggaaaatggtttgaccagatttgcaactggaaaaatccaatcacgacggtgctgatccatatcctgttcataatattggtcatgtaccctgagcttatcttacccacaatcttcctttacctctttttgattggagtttggtactacagatggagaccaaggcacccccctcacatggacactcgcctctctcatgcggattctgcgcaccctgatgaactagatgaagagttcgacacattcccaaccaccagggcttcggacattgtgaggatgcgatatgaccgacttagaagcattgctgggaggatacagactgtggttggtgatttggccactcaaggggagaggctgcagtctttgctcagctggagagatccaagagccactgccctctttgtgattttctgtctggttgctgcaattgtactgtatgtcaccccattccaaattgtggcccttttcactggaatttatgtgttgagacacccgaggttccgccacaagcttccttcagtgcctctgaatttcttccggaggctgcctgcaagaactgattgcatgctctgagtcatggatagtgcacaaactactgagggagcagcttgctttgctttca

SEQ ID NO: 4649 - DNA, 490 bp, Glycine max
  Clone ID: PAT_MRT3847_104202C.1
aataaaaatcagtcttttaaaagattaaatccaaatttaaccatatttacagaataaaaaatcacatttcaccctagtataaccctctcatcaattaattaaggcatgaaaaaaaagtatatttgaattttgtttatgaaactaaaaaagaatgagaaatgctaggacactctttagtctttacgcttgaagagcagcgaaacgagtctcgagcagatcgtagggagcccacaatgcgtccaaagggcaaggcctgccggcgtcaagcctggcccacggcttccctttgccactccaatgcagcaggctcacgggcccggggtgaaggtctcggcaaagcccgcggaagttatctccgccgagcccgtgctggttccaccggtggtccaccgccgcaattctcccggcgaacaccagcaggaacggcggcagtgagccgagctcgtagatccgcatcctcttctgcagctccatccactcctcgatctcg

SEQ ID NO: 4650 - DNA, 715 bp, Glycine max
  Clone ID: PAT_MRT3847_104203C.1
gccccttttccttagatccacccagaagagacgcacactctgatgcctctaaaaataagagaatagcctgttcccaggcccaagtgggaaagaaagtaagcatttctttcgccagccagtgtcttaagctcttagattcaatcaggaaagatgcaaacgatgcttcttaaaatagaaaatttctcaagtccctaaccctgatcaaaacaatacatcttggttgttcaaagggaaataaattagaatgagaaattacatacccaaatcagtgttgattccactgtaatgcagctagatgctatgacattctagtttgaaacctagattctagacaccaagtgtcaacttcatgtatgatttatgatgataaataattttgccttgtggcttgaagccaaaaaaaaaaaaaaaaaaaaaaaaaaaaaaaaaaaaaaaaaaaaaaaaaaaaaaaaccgggcggccaataaaaaaagaatcaaaaataccatacacaaacatacaaaaaaaaaaactattaaaaaatgcaaaaaaaaaagcgactttctgggggggggggctataggggggccccagtttaaccccccggcgtaacccaatttaatgtttttttagggcatccctctttcccttgttgggcccatatttaaaagggccaccctgggaaacctctcttatacccccatatataaaatgtggaattacacccccctttttg

SEQ ID NO: 4651 - DNA, 568 bp, Glycine max
  Clone ID: PAT_MRT3847_104204C.1
ggctcgagaaataaatcaaagaacatttacaatttagaagcgcaaaatgaagagtgcgatttgtgggagaatcctctctcccaaccacgtcttcaaaccaggttcttctccctgatttcgatttcgatttctttggcacttcgacactggtttcttctgctttctgatgagaatttttttttttaacgaattaaattctttaagtgttctttagtttctggtgtttagaggagttggggtttggttattatttgttggggttctcattgtgttctttagtttaccctaaaattgaaaattttcaatttttttcttgaatttgttgactggtgtgaatgttttggcaatcagaagtagttcacgagcttcaattctttgattaagttacaatctttgggaattgggttagcataatgtgtttgatttcatacctcttggtcttccctttctagaattgcggtgtagttctattttatggtttttgctctggtctatttcttcaagaattttttgttcttagagaagtgtacctgattgggaagattgatttttagtttccctgctgaac

SEQ ID NO: 4652 - DNA, 241 bp, Glycine max
  Clone ID: PAT_MRT3847_104205C.1
ggccgccctcgccctttttttttttttttgacatggcagctaagttttattgaggggggcacttttcaagtgacatacatacgatcatgtgctcctgtcaactaccactaacaacagttggggccaggaaaatttgagctcttggtcttgttggaaacttgattacatttctaatgcagttgctatttcctcaaaacgaacaactggttagatatccacttgtatagttgggagaggactc

SEQ ID NO: 4653 - DNA, 266 bp, Glycine max
  unsure (1)..(266): unsure at all n locations
  Clone ID: PAT_MRT3847_104206C.1
gcgagagcgccagcacccccncaccaaccgtcgggcactgtgcaaagaaccgcacgcagggtgacccgagtcggggaaccattccagccgcaaagagaaacaaacgcccccctggcagagactcgagaccagaagtcggggcgactaacgaaagagccaagagagtgcagagagctagagaacacaccactcgcaggagtgtgactcaagcgacagaggagcggcgcgagccaaatccgaagaggacaagaaatgaagaggacgcg

SEQ ID NO: 4654 - DNA, 393 bp, Glycine max
  Clone ID: PAT_MRT3847_104207C.1
cccagaaaaagttttaaatattataggcggagattcataattcagattagccgaactttatacagaggcgcccatttcccaacctttaaaaaaaaaaaaaaggaggccccctggggcttaacacccccatcaaaggtccaaaacacttgaacttggtgaaggggaaaacatgaccccttttttttagggggggtggttaaacaaaaaacaccggggggcccgaaaaccttcacagacataatacaaaagtttttagctccccataaagagggaatcattattccaaataaggggctatttttggtggaagcttgctctcccaacacctcactttcaagggcaggggttgcaggaacaatttggtccaaatttgcagccatggttttcaggggg

SEQ ID NO: 4655 - DNA, 263 bp, Glycine max
  Clone ID: PAT_MRT3847_104208C.1
ttgactccagatcatgaactcaacaagaatccaaggatatcagacacaataccagatacggtaatcggactcactgggttttcaactactggatgcgatacggaagcagctcgatatattgatgagtgccaaccgtatcggcgaagtccgagtcgtcaatcgcaagtgactacgatcgtgacggctgtcgtctctacctcgacggtctctggactcacgaactctcccaggtcctgaaaatggatataggccctggcactaag

SEQ ID NO: 4656 - DNA, 503 bp, Glycine max
  unsure (1)..(503): unsure at all n locations
  Clone ID: PAT_MRT3847_104209C.1
catgttttttggttttttaggttcagaggtttttgttttagtttttgttttgttgtatgacaaaggagagatcaatcaccattgagaatctcattccatagtgaatgctacatagctgaaaatgagtcaaccaacaagctaaaatcttaaaaactcatataagagctaatgttaccaccaggcaccagcaattgcaacattttttggtttcctctttggtgcggtttcatggctgaggaacataataatcgaagataattctccactgcgtgtcatagtcatccaagactctcttcaattacttgggaatgggaccattccttgcatcacccttttgcttggtggtaacctcactcaaggcttgaaatcatcaaatgtcaaaccgctgaccctgatcagcatcatcatagctccacttttcttactacctgcaatactactcaatgaagaaaaaattcccgaagggtcccattnagccgcaggctccgctgccggaagcgagg

SEQ ID NO: 4657 - DNA, 361 bp, Glycine max
  Clone ID: PAT_MRT3847_10420C.1
aaaaaaaaaaaatgggagaaggggccttcctttttatattttttttttcacatgggctcatcataacagggtcatgatcatcatggggcatcatcacaatcacattttttttatcttccccggtggggggccctcatacgaaaaaaggcctcgaagcaaacaaacccgcccccgtttttggccactcccttttttatgcgccgggcctcctttaacgggccccgttcgggcccgggggctttgaaaaccctaaacagctcctccgccgaaatcctcccggctggatccggggagaacacctcgaaggcttttttgagcccggcgggatccgacccagtttcgagaccccccccggcggagc

SEQ ID NO: 4658 - DNA, 623 bp, Glycine max
  Clone ID: PAT_MRT3847_104210C.1
gcaacttctaataatcaagctatgacacctgctcaatctttatgtgtaaacatacatttcagtccattatctcacccacaccgaaatacaataataattttaatgacagaagaagcacttccttttatcgatttcaaggtccatagttaaatggggaataaactcaaactcataaattcatgatgaagcagaggaagcagaactatcaaaagttgttcctacatgctgaataacaaatccgtagatctttctcttcaatttctcaatcttttctgtaagtgagtcatcccctttggaaaccacacggtccagccatgcatttacacgcttcaagtgtgacaaaacaacagcaatggagccaccatccaggggcaatgcttttttcccatcagctgtacactctccaaacactttgaatcctgcatcaagggactcttccacaaaacgtagaaaccacatttgcatttcagacagcaaatttgctccaagctccactgtctctttcattccactacctcctgtccacacaccagtactcagactggactgtggtgatgaacgaaccttaaggttcttagctgcaccgagagactgtctttttgataaggctttttgcagtgtcg

SEQ ID NO: 4659 - DNA, 847 bp, Glycine max
  unsure (1)..(847): unsure at all n locations
  Clone ID: PAT_MRT3847_104211C.1
aattgggggaggataaagcattgagcaagtatggcgtccgaaatgggtgcttctctctttttcttgtatgggttgtcgtttcgcgatctcgcacgtccgctttgtttctctctctctctctctctcaagcttttccctgcacaccacagcagaagagaaagaaagaaaagaagacccatcccacccaaccaccctctttttcccttcaaccaccgccttcactcccctcgttaacctaacctaaccctaattcttcgtcttcaccgtccataaccccaaaccctagcccctctttcatgattttttagggttatggaaggcaacaacaacaacaacaacaacaacgctgacgtgttcagaccttctgtggggccctcctcctcgccgaactcgaggagatactcggggattttatcggcgtcgaacctcattcaggcaccgctatcggcgctgctggaatattccggcatccttccgtcacggtcgtccaaccaacacagccagcccagctccgacgccgccaacaatgacggcgaggtttcgattaggatcatcggcccggcggaacaggagcagagggaggaacaacagctgcagcagacccctcctcccggattggtcgtcggactctcgcattcccagaacgacaccgttttggcatcggggtcgccgcgcggcgacgccgagggcgcggcggngaccgagggcgccgccgctggaggggacggtgcagggagggattcatcttaccagagatatgacattcagcatgccgncaggtggattgagcaggttttgccgttttcgttgcttctggtggtggttttcattaggcagcatttgcaag

SEQ ID NO: 4660 - DNA, 809 bp, Glycine max
  unsure (1)..(809): unsure at all n locations
  Clone ID: PAT_MRT3847_104212C.1
ttctaanctcaggttaggggaatcaaaagaactatcaaatgangacagtgacttgactctctctctctatccttttccgccgttcctaaccctacaagcttcgtctcgtaaagaaaattccaaagctcaacagagaaaatgaggacagtgctttcgcgcttgatccagggggggccttccatttccaggctcaatgccacggcagtgtcaatcagcgggagaaatctgtggacagattctaacaaagttgctcaaccctttaaagttgaagaagccgagactgtaaatgtgccttcaccacccacggaactttttctctctgtactcaaactcacttccccacttatttatacaatgtcggcttacaaagaccaggatacccgtcttcatggcatcaaaactaagattcgtgtcgtccccaatttccccaaatccggaattgaagctcgaggttttatttttggtcctcccattgcgctggctataggagcaaagtttgtaccattgaggaaaccaaagaagttgcctggaaaagttatttctcaagaatatattctggaatatggaagggactgtcttgagatgcatgttggagctgttgaacctggtgagcgtgctttagtggttgatgatttgattgcaacaggtggaacactctgtgcagctatggacttgttaggctgctcaggccccgagatctttttctgttgttcatatgttcacaagtctagctcttgtcagcggngattagtttccctgagatcgactcctatttatgattntggcatgaaaggaaaaacctaatggaa

SEQ ID NO: 4661 - DNA, 2500 bp, Glycine max
  Clone ID: PAT_MRT3847_104213C.1
accaggtttcgtgttttgtgtaggcgtataagaattgaagctgttttgttgggagttgggattaggtgcatcaattgactgtggcattatagcatattaagagaaagcaacaaaatgtggaggctgaagatagcagatggtggaaaagacccatacattttcagcacaaacaattttgtaggaagacagacatgggagtttgatcctgaggcaggaactccagaggaacgagctcaagttgaagcagctcgtcaaaatttttataacaatcgcttcaaggtcaaggcatgtggtgatctcctttggcgttttcagattctgagagaaaaaaacttcaaacaatcaatacctagtgtgaagatagaagatggagaagaaataacatacgaaaaagtcataagcacgttgagaagagccgcacaccacctatcagcattgcagaccagtgatggccattggcctgcacaaattgcaggtcctctgttttttctgcctcctttggttttttgtatgtacattacagggcatcttgatttggtattcccagaagagtatcgaaaagagattctccgttacatatactatcaccagaatgaagatggaggatggggactacacatagagggtcatagcaccatgtttggtactacactaaactatatatgtatgcgaattcttggagaagggcctaatggaggtcatgaaaatgcatgtgctagaggaaaaaagtggattcatgatcatggtggtgtaacacacatcccttcatgggggaaaacttggctttcgatacttggtgtatttgattggtgtggaagcaacccaatgcccccagagttttggattattccttcgtttcttcctatgcatccaggtttgtgggtccaatcacaccactcatcttacaattgagagaagagctctttactcagccttatgaaaaagttaattggaaaaaagtgcgtcatcaatgtgcaaaggaagatctttattatcctcattctttgatacaagacctagtatgggacagtctatacatgtttactgagccactacttacttgttggcctttcaacaaactaattagagaaaaggcccttcaagtaacaatgaaccatattcattacgaagatgagaatagtcgatacataactattgggtgtgtggaaaaggttctatgtatgcttgcttgttgggttgaagatccacagggagatgcctttaagaagcatcttgcaagggtctcagattacttatgggtttctgaagatggaatgaccatgcaaagttttggtagtcaagaatgggatgctggttttgcagttcaagctttgcttgcaactaagctaattgacgaaattggccattcacttgcaaaagggcatgatttcatcaagaagtctcaggtgagagacaacccttcaggagattttaagagtatgtatcgtcatattactaaagggtcttggacattctcagatcaagaccatggatggcaagtttctgattgcactgcagaaggtttaaagtgttgtcttcttctatcaaagttgtcaccagagattgtgggagaaaaagtgaaacctgaaagattttatgattcagtcaatatcttgttgtcacttcagagtaaaaaaggtggtatagcagcatgggaaccaataggagctcaagaatggttggaattactcaatcccactgaattttttgaggacattgtaattgagcatgaatatgttgagtgcactggatctgcaattcaagctttagttttgttccagaagctatatccagagcataggaagacagagattaagaatttcattgtcaatgcagttcaattccttgaagatacacaaacaaccaatggttcatggtatggatgttggggagtttgctacacttatggctcttggtttgcacttggtggtctagcagctgccggtaagacttacactaattgtaatgccattcgcaaggctgtgaaatttctacttacaacacagagagaggatggtgggtggggagagagttatctttcaagcccaaaaaagatatacatacctcttgaaggaagtcgatcaaacgttgtacaaacagcatgggctcttatgggtctaatttatgctggacagtcagagagagaccttactcctcttcatcaagctgcaaagttgctcattaattcccagttggaagaaggtgattggccccaacaggaaatcactggagtattcttgaaaaactgcatgatgcattacccaatgtatagaaatatttttccaatgtgggctctagctgaatatcgtaggcgagttccattgccatccactgaaggttaattttgaaaaggtgtgtgcataaaagggcaaagacatatcaatgaggaatggggcaagaagcacccattgtctcttacttggactctattgatctgtaattttgaagcttgctttttattataaaataaaaaattatttacgcacacaactgggttgaa

SEQ ID NO: 4662 - DNA, 935 bp, Glycine max
  Clone ID: PAT_MRT3847_104214C.1
gtatgtaaactaattaagtaacctaaagttacatagttgtctaacatcctatgtgtgatttataaattgtagataagactgtgccaactgcatgcaaagcgccttgaatgtaagagcttccaatgatcctccagtagccaaagatataattttattcgaaaaagagatgagaagatgagcccaaagagtgggtcatacaaatgcattaatttgatttgatcgttcctactacaagctagaattgtaatcagaatgggaaagcacccactgaaagacacatcatctcccaaatctacatcttaatattcttttgcccacttcttcataatcatatatccacatattccaccaacacgcacaagggcttcccgttcaaacgttcacgacccttcaattctggtaattcaattacacatgcacactccactacttctgctcccacacgttctaacaagtccatagcggcacagagtgttccgccagttgcaatcaaatcatcaacagctccaacatgcatctcaagacagtcccttccatattccagaatatattcttgagaaataacttttccaggcaacttctttggtttcctcaatggtacaaactttgctcctatagccagcgcaatggggggaccaaaaataaaacctcgagcttcaattcctgcaacaacagaaatgtttttgcccttgtaccgctccacgaacaaatctattgagtccttaaatgctttgggatcaagcaatagagtagtaatgtctaggaacataagaccggatttggggaaattggggacgacacgaatcttagttttgatgccatgaagacggggatcctggtctttgtaagccgacattgtataaataagtgggaaagtgagtttgagtacggttcagagagaagaagatgaagaatgggaaaggaagcaataaaag

SEQ ID NO: 4663 - DNA, 1090 bp, Glycine max
  Clone ID: PAT_MRT3847_104215C.1
atattcggctcgggaagaaaaaaaggttcatagttgatatctccagcggaacgatgaagtttgaagatttggcagaaggatgcatggcaaaaatactgtcctacaccactcgtgcggatgtatgcaggctttctctggtttccaaagcctttcattccgcggctgaagccaacactgtgtgggattgctttctcccctctgatttgtcctctatcatctccccttcttcttccgttcctccctttcgctctattaaggatctctatctctatctctccgatcgtcccaccatcatcgatcaaggtataaagagttttcaattggagaagcggactgggaacaagtgttacatgctttccgctagagatctgagcattatatggggtgacactactcattattgggagtggacaaccctaccagagtccaggttcgaagaagttgctaggcttcgagctgtgtgttggtttgacattactgggaggatgaacacccgcgttttgtcgccaaatactaattatgcagcttttcttgtgttcaagatgatcgatgccggtggatttcactacgatcctgcggtgttatcagtaggtattttgggaggcaatagcagtaccaaaaatgtttgtttggatcccaacttagtagataatcgacttgatgatagattccatggactccaacgtccaactgtgaggagcgatgggtggctggagattgagatgggtgagttcttcaatccaggcctagaagaagatgagttgcagattaaagtctcggagacaacaagtaattggtggaagcgcggtttcattcttgaaggaatagaagttaggcctaaacatgtttgatccatcaaattaatatacttaacttaggcctatcaaagatatgtatggaatggaagggtgatctttgccaagaatggagggagaaaccggaaacatttgttcttttcttttgttttatttttcttcttttttcattgatcatttctattttgtttttgcatttaggtataatgaactgattgcttgtattgtttcctcattaaatgtagggtttgagtagtttaaaattcaaaaaaaaa

SEQ ID NO: 4664 - DNA, 751 bp, Glycine max
  Clone ID: PAT_MRT3847_104216C.1
ggataacgagatattattattgttttccaaacagtaacattcttaactgacgtcgcctctctaattatctctttcaccccctttcaattatttttatttctatgtaaattttgtataccaataatttaacaaatactacatcaattatagaatgaaaacttttcaaacagtttttttttttttgggggtatgtgcttgtgaaaaaagaaaaagagaaaagtctgcgtatctaactacgcccatcttcaatttcatcctttgttgacattctttgcgaaaccaaaagcgtttccctagataactgtatctgtaactgtcaaccgtatgtgattcttctggcggtgactcccatgaaattcttattttaagaattgttttttttttactgtgccactattgtaatgtcatggcagtaataataactcgttgctaatttatattccaataggtggatatggcacccttgaagaactactggaaattatcacctgggctcaactaggtatccatgataaaccggtaagatttcgaaaaccaaaaaactccctttctttttaatcaactgaatttttaaaagaaattattcgcttttttaattactgataaatagacattattagcaaattttttttgtttgaggaagtcaaagaaaaagacataatcagggtgtttagggttcaaaagagagaagttgattaatgattatttttagaagttgaatgctgaccaatgatcaaacaatattggttaa

SEQ ID NO: 4665 - DNA, 227 bp, Glycine max
  Clone ID: PAT_MRT3847_104217C.1
gggttctataaaaaaaaaacaaattttttacaatcacgaaaaaaaaaaaactcagcttttaccaactgggaacctcgggcaggctcttttatcccaattgaaaccttcatcaaactcttctaatttctagcaaaaataccaacaggatcgtcaggtatgcaaaaaaatttaagaaatcctgtaagggtttaaaacactggaagcagaacccaatatggtattaccac

SEQ ID NO: 4666 - DNA, 336 bp, Glycine max
  Clone ID: PAT_MRT3847_104218C.1
ggatatccatgtctacttcaaagagcgtcagcgggtctagtgaagctgacaatcaactgggacgggggccttggactgtgggagacgatcacttgctataccaatatattgttaaggatgggggaggccgctcgattatgctctctaaacacacacgattgaagagaactgggacaagtagcaggtcatggcggctaaattttctaatgccagcaatgaaacggagcaatttgaccccacaggagcagcttataattcttgaactccactcaaagttgggaaacaggttcttatcttgggcattacattcttgagccacacaggctttatcgctat

SEQ ID NO: 4667 - DNA, 366 bp, Glycine max
  Clone ID: PAT_MRT3847_104219C.1
gttgctctcacgcgggcatgccacgtttgaaacacatgcacttgctgctgacattcgctgtttctccttcgcacgggagtcctccgaccgttccttaaatcaaacggtctttggcgtcatcgagtcgagagaagttaggccggggctccggcttgttgtccaggatcttctcgatcttttagagcaccttcggtgtaagcttgggcaggacgtcaagggccttcaagttgacgacaattagatccggcttggttgcgccaagaatacaaggtggaaacgttcttgttgaccagggttcaagccaaagccaagtgcgtagtcttggcaccgagctcctactgaaccttgtgcaaatgcctttacctt

SEQ ID NO: 4668 - DNA, 830 bp, Glycine max
  Clone ID: PAT_MRT3847_10421C.1
atgtagtcttctttatggagctgaagacccttctattgtaggaatgatgttggatagtgccttttcaaacttatatgatctcatgatggagcctgtcgatgtttataaaatttggctgcctaaattcactgtaattcctctctcactcactttctctctttggatgccaacaccctttgtagtaaatgctcactcaaaagaggaaaaaaaggactgtgtatggttccttccaaacaatcatgtagtgatatgaacctgtaggttgtagtgcatgactgcatgtagtaaaatgggggtgcatcattagtcagagttgttcagacagctaaagtctttaaaaatattgcattgttatgaatgcatctattttaatgagatttgagcttttgtaatagcttcttgaggtgagtgctactctggtttcctttatttgttgcatattcattgaatatagggaaggttctctgatgtagtttttatccctaaaattgatttagttgtttctagttattttggttttacggaaaaaaaatttatatattctgtttcattatctacctttttcatgaaagccggaagcttatccaaaatgtacaaggtgtgagggtgtgtagcaactggattaccttttttttggatgaaaagtgattaataacgtaaccatcatatcctcccccttaattttaagcccgttgttatcaactcgtgatttttatgtaacaaaagtatttccataattattatttgccttatcgtgaaactactatcatcttgtaattgctcttctgattatatatatttgcataaaaaaaaaatgtttagagttttag

SEQ ID NO: 4669 - DNA, 415 bp, Glycine max
  Clone ID: PAT_MRT3847_104220C.1
cgcaaacgcgtccccttacccctttcttctccgaaaccgttgccagaatcgagatcactttgtgatctgcgatacatgacagcgtgcctctagatccacaattgccgacgctagatatccaccgtcgagaaacgacttgcctgggcacctgtactgcctggatcacggcttcgaacccgatgggcatataccaagggaccagacaattgccggtagcgatgatgcttacagtacttgcttcaaccacactgcggctggagagcacctgccacttacaaggttggaggatcttgagcccactgttattgatgaggtgagcaccgaaacgaaccgccaggcttgccacccctaccatctcatactccgaaaagagaatgcccacaacagctatttccttcgccattataccattagg

SEQ ID NO: 4670 - DNA, 347 bp, Glycine max
  unsure (1)..(347): unsure at all n locations
  Clone ID: PAT_MRT3847_104221C.1
ggtattttagtagaataaagaacctaaggagtcgggagaagaacatacctcctggcccttcgtcttcactgggtctaaaatagtgcagcctcaaaattcactcaagaaaatgaagaatatcttgcttccagtgaaggcaactaataaagcataccagtgctggatacaaccttgacattccaacaaaaccaggtaatgggtctctaaccatctatatcctcaacaaattcatataccattctgatgtattgctttccttgaaagttaatgcatgcttcttatcttctgtctagctaaaaaaaaaaaaaaaaaaaaaaaaaaannnnnnaaaaatttaaaaaaaaaaa

SEQ ID NO: 4671 - DNA, 484 bp, Glycine max
  Clone ID: PAT_MRT3847_104222C.1
atttacattgaccttggagggattttcttagttcaggtatactcttgaagcgcaagaccattcctcttccctccaattttgtagggttcatatgccagcttttaattatttagttactttaatttagagaaataaagaaaaactaaaaagaaacatgaggcaaggcaattatgagcacttactcatagaatcccttttagttagcaagtaaaataaaattcttaggaaattatgagcacttactcatagaatccctttaaggtagcaagtaaaataatatttttagaaaatcatcagttgtgatggtgttgcttaacatccatccagactacatattacacaagctgctataaggtatttttaatcaagagaatcattgagtcacatctgtataaaggcttacttgttataataaacctcaaacttggcgtgtgtaaaggatggacactataaaaaatttttttctaggaaccaaataattttt

SEQ ID NO: 4672 - DNA, 513 bp, Glycine max
  Clone ID: PAT_MRT3847_104223C.1
agggaatccgacaatcttgtgtggagttggaaatatatcaaagcgcaagatatgattacaagcaacctatggataaacttttttttctttctttatttcctgcaattgtatccaatttctgtcaaggttgaaaatctggaccacctacatttgtttaaaatccatctattaaactatttattgctttttccacattaaagggcttcttaccatcccaatagatagaaacaaatatgcatacttgagggacggttagcatggcagacactagggtgaattctagctttggttgaaacaaaatctggatgaaacctgtatttagggttacttttttattatcttatgaaaaagtgaatgttcttgtttttgaaccgtgatgcgacccgctttttgaccaaataactggctaatatggatgccttagtggtagagttctaagattggggatcttggatgaattggaaataaccggatgataacgacattaaccttttgcgtcattataggggactc

SEQ ID NO: 4673 - DNA, 246 bp, Glycine max
  Clone ID: PAT_MRT3847_104224C.1
atagaagtcccattaaccattaatcatagtagcaaaccaaatctgcggccgcaattagggatcaggttaacataggctgaactcgttcggacctttacagagaacctataacatattgcctttgcttgcattacatacttataagtaggcaataatcacaggacgttgcaacaatgatgagtgcaagttaaatcaaccaggagaatgcggaggtcagtagccattcgctagtagggggccacaaat

SEQ ID NO: 4674 - DNA, 247 bp, Glycine max
  Clone ID: PAT_MRT3847_104225C.1
ctctacaagtctttccttgactattaaattcctatgatcgcattcttcttcgctcattcctgtgtgctgacatcatccccaacgtcgtcacaaggttataactcgtgtggtggtgttcctagggtcagcagttgaattgggtatgatactgtgtaatcacgagtcttccacggttgtactccatgtgcgagggccgttagagaacgacattacaaatgcgtttttgtcagttctataagtatttaaa

SEQ ID NO: 4675 - DNA, 449 bp, Glycine max
  Clone ID: PAT_MRT3847_104226C.1
gcacgagtttcaatggatcccctaactgttaggctaaagtacgtatgctttgttctcatatagttggaagtgcaaattataattttagttgagataaggaatctaactttccttttctcaaatcaatgccagtatcaattattctggctaaaatacatatcctttgtgcttggtacaagctaattgattattgtaaataaatctcaggaatgtaagtttccatcaaatcaatcctattctcaattagacttatagtaattgtcatttttttgagttcttcataatcttttgttctctgtcaaaataagtgtggtacttcaagtcctgctgatttcacaaacaattatatgcaaatatttttctgtcctattaaatgtacttttggatttttgttgtttataaatgattgaattcagttatgatagaacttgggggtagttaaagaaagt

SEQ ID NO: 4676 - DNA, 189 bp, Glycine max
  Clone ID: PAT_MRT3847_104227C.1
tggacctaagacattgagaatgctaaaaatgttacacgctagagccatgacaacttctagccacttggacagctcttttacctgggggttagaagtatttacttgccgagtttgctttgcctccaattcaagagtggaagaaagatcccctctgaataacatactcgttagcatttccaaaagcagcct

SEQ ID NO: 4677 - DNA, 674 bp, Glycine max
  Clone ID: PAT_MRT3847_104228C.1
aaccttgagaccttcacctcttcacttaggctagtcactgccaacccatacactaccttccccgcagacacagctgtaccaattgccggccaaaattctcattggatgagatccttccagacccaatgcaatgaggcctgatccaaaacgggcttcttccaagttccatccccttgttctgaaaaaaatccagttctaaaccctcttaccctcttcatcttgaggaaccattccccatcatttggcagcaagcatttcgtactagtggaacatttcatctccccacaaatctcaatctttgtgattacttcttcgggcctgatatcccaactggtatgggattctcccagcttccaaatctgtcatcaaggggctctcaaccactccaattactgaggaaaggttggcttcgaatttgtcacagttttcagtgtgaaaagcaaaacaacaaaaaaaaaaaaaacactggctttgaatccgttgacaagacaagcaatattgtgaatgccaatggagaaggtggccatgttttaaaaactgttttccaaattttatcataaacaattttttccctcttttccactcttaaaaacagtttttaaaattatttttttacaaaaaaagttttataaaacaaaattctaagacccacatatttttttttctggattatg

SEQ ID NO: 4678 - DNA, 357 bp, Glycine max
  unsure (1)..(357): unsure at all n locations
  Clone ID: PAT_MRT3847_104229C.1
cccaaacagattcactccgttgtcgtcagctacaacaataacagcatgaacaagttggtactcgcgtgtgttctcttaattgctttcacatatggagcgtatggcacatcatccatcaagtttgttaacaactgttctgctggagtgaatgtgtattctacaaccaataaccaggcctctgtctccgtgtgcggtaccatcgctcatggtggaagctgtgttaagtcctacgcctctggagctatcaacttcaaangtggacctgctggcaaaaccttgtttgagatctctcccaacagctggaacaacctcgacttctatgatctcagtgtaattgttggatttgactctactatg

SEQ ID NO: 4679 - DNA, 507 bp, Glycine max
  unsure (1)..(507): unsure at all n locations
  Clone ID: PAT_MRT3847_10422C.1
gctcggaattcggctcgaggcctgatcaatctgtatcaagtaagattgttcgacgcctgactatttatctgatgattntagnggaagtatatgaagcttacccattcggtcaattcttatcatgacaggaaagtatgaaaaattatctcaagcacaatcagcttttgaacaccttaaggcagctctgtcctcagctccggtactcaccttaccaaattttcagttcccattcacggtggagacggacgcctccgacgtcggaatgggtgcagttctttcttaatgcggccaccctattgcgtatttcaacaaacctttcagccctaagcttctccgcgcctccacatacattcgagagctgttcacaatcactgccgcaattaaaaaatggaaccaataccttctcggtcaacgcttcacgattttgactgaccatcgcagcctcaaggaactcctcacccaagttatacagacgtcggaacagcacatgtacttagctcgcctcat

SEQ ID NO: 4680 - DNA, 385 bp, Glycine max
  unsure (1)..(385): unsure at all n locations
  Clone ID: PAT_MRT3847_104230C.1
cactagagctgctaaatgacaagtcacacatcaagaaattaccaatatcaaaaattgcagttggacaataaaatagaagttttaaaagttgaactttgaatgataactgtcttatctaatgccaatgaagactatcagaatgcatttttcataccttgatatgactgaagaatcttgtgttgtttaccagtcatgtaatcaaattggggtttccttcggcgttcattgtgtcctgctagacgcctgcgacaactgcgcttaccatcatcgaactcgacaagcaaatggaacctaatttaataacaaaacaaatggtgtaattcaatacataagtaataatcaggttcactntgcnnaananaaaannnnannnaaaaaaaaaaaa

SEQ ID NO: 4681 - DNA, 279 bp, Glycine max
  Clone ID: PAT_MRT3847_104231C.1
ttttttttttttttttttttttttttttttttttttttttttttttacattaaaaggcagcttttatttaacaaattcaatccataattttgtttttcgcaaaaaacaaagggcagattgaattttccttttgatggggaaaaacaatttttattccgggtaaccaacttgcgcccaaaatttacgaaattgcccagacaagggatccgaagggaacatgtccgtttcatttccgggtttagaaaccccccaaaagcaatataccacaaaccaaacttt

SEQ ID NO: 4682 - DNA, 135 bp, Glycine max
  Clone ID: PAT_MRT3847_104232C.1
gttatatatgaaaaaaaaaaaaaaaaggaagcggacgatatgcaggcgctatacatgatccaagcttacttacacgtgcatgctacgttatagctctaccatagtgtaacctaaagtcaattcactgaccacctg

SEQ ID NO: 4683 - DNA, 347 bp, Glycine max
  Clone ID: PAT_MRT3847_104233C.1
cggacgcgtgggtgctccgaaacccttttcgattaattcgcggcaggaacgtacgaactttgactatttcgtggaatcatgggcaggtctccaccgccgttttcagatattggcaaaaaggccagagacctcttaaccaaagactacaactttgatcacaagtttaccctgttgctgccgaactccgatggaatgggactaactgcaaccggtttgaagcgggatcaaatttttattggtgatatcaagaccctgtacaagagtgggaagacaaccggcgatgtgaaaattgatacggattcaaacgtttctacaaaaatgaccgtgactgatattttaccaactac

SEQ ID NO: 4684 - DNA, 615 bp, Glycine max
  Clone ID: PAT_MRT3847_104234C.1
tccgatccctgcgtgtcttagtcttaattaagactctcacccttcttagtctctctttgaaaatgaagacctcatatgcaacattgtgcatcatgcttactttgcttcttctaggtcagagtgagttgttgtgtatggcagcagtgacgtgtaacgcgttgcagctgagtgcatgtgccagcgccatcacgtcctcaactcctccttcagctctttgctgtagcaaactgaaggaacaaaggccttgcctttgccagtatttgaaagaccccaacctcaagaagcttgttaactctcctaatgctaggatggtagctaatgcatgtggttccccattccccacctgctagaaagaattcagtatttcactagtctctctcaatccaaccactatataggagcatcttatgtgttttttctgtgtaatgtactctgttttgcttgggatcatcaagtgggacaggtcctctgcttgtccctcagtggtgtggtcgtgctacaacgatgtgtgtcccttgttggagaatttgatcttgtaccactttttgcatctattaatgaatatgtatgtggtttttgctgattctgagcgctcagcttttaaaaactagttct

SEQ ID NO: 4685 - DNA, 712 bp, Glycine max
  Clone ID: PAT_MRT3847_104235C.1
gagtaagtgagggccaattcagccaggttttgctgtacgagatggatgcaatacgacgcgcttgtgcctcactacaagaagactatatgccccgtgttacttttgtggtggtccagaaaagacaccacacaaggttatttcctgcagaacacggaagtcgtgatcagacagataaaagtggaaatatattgccagggactgtcgtggacactcaaatatgccaccctcgggagtttgatttttacctcaacagtcatgctggaatacaaggaactagtcgaccaacacattatcatgtgctgttcgatgaaaataacttcactgctgacgagttgcaaatgcttacaaataacttgacttatacgtatgcaaggtgtactcgatcagtctcaatagttccgcctgcatattatgcacatttggctgccttcagggctcgctattacatggaaggtgaaacatcagattctggttctgcaagtggaggccggactgctaactttgaggctggatgacggatgggaatttaatctttactataatcctgcatttgaagtttcagatagtttacaacttaaacaacattttagggaagaattgtaaggaataagcggtaaacagagcgttgtgggtagaaaagttgagcaataggaaattatggtcaacttgtaggaaaggcaatgttccgtcagcttgttatattaatttattt

SEQ ID NO: 4686 - DNA, 472 bp, Glycine max
  Clone ID: PAT_MRT3847_104236C.1
aaacggagaatgaaataatcgtagttctggtcataagatctattatttatctcgtctctgaaaagagatattacactaggcctgctaatacttcaaaacaacaacttttcgtcatgcactctccatctactgacggaggaggacaccgcggtagcgcatgtcaccagcagcgagcttctcgacggcctggttgcagccctcctcggtgagagggaacttctcgatgatcggggcgatcttgtggtgggcggagaactcgagcatgcggttctggatgtacctggaggcgacgagggaagcctggacggtgagaccgttgacgaggaagtccatgtaggggatggagaagtcaccgccggcgacggagagagggaagatggtggcgcaaggagcgagggtggggatgatgagcttccagtcgggctggacggaggtggtgacgaggagggcgttgatgggacgctcagtcttg

SEQ ID NO: 4687 - DNA, 619 bp, Glycine max
  unsure (1)..(619): unsure at all n locations
  Clone ID: PAT_MRT3847_104237C.1
gtaaaagatctataacttttatttattgtttatagtaactatttaaaaacaaagaccataatgcaaatttcagtctattgttatgaagctacccggaagatgcccatatggatgtcataaaaaagatgtccagtaagctacgatctactaccatatggaactctatatcctttccatgaaaaatctcttcaatgattattattcttggtgcatcatactataaaagggtgagaatacatttaacaaattggggaatggggaaatgtatataccaaaggtaaggcccaaaccaggaaaccaatattaataaaacaataacaaaatcttatcctactaagtgagattagttacatggatcacactcatcatttggtttcgttaggaaaccagtactagataacagtaaaaatttggtggctggagagataattttgaatcttgaagccattaaactggcaacttgaagtcaaaataaggcccatcatgctcgtgcacaacatcgaacctaaagatagatgctcangacaagaaacaataccacgaaaaactgtattttcatgggcaattgacatncaacatatttatagaaaatacttatatttgcattttcattggataa

SEQ ID NO: 4688 - DNA, 313 bp, Glycine max
  Clone ID: PAT_MRT3847_104238C.1
acggaaaaacacgtagttgagaactccgtagaatgcaatggcttcgttaatcgatctcctggccaggtgataccaccgtcaaccgtgccggtgccggcatggatgctccattcaccggccttaaatccatggctggcttacctacgaggtagacctacaatgacattacctccattggttgcaactgctgaagagtacaatgcatgcaggtgtggccaccaattggctagaagaagtacgagactctgtcctacttgccagacctcgatgatgcctaattgtcataggaagtcgaataccttctaatgaaagg

SEQ ID NO: 4689 - DNA, 284 bp, Glycine max
  Clone ID: PAT_MRT3847_104239C.1
cttgaagataagtttaaaagcaataatttagagagagagcaggagcagcttgaccgcatcgtgaaggaatctggaggaaagctgaccaggcggcttgtgaacagtcagtgcgaatttgaaagaagaaaaccagatggaacaacgacgttgggacttctccatcctgtggatcccattgtaggagagccaggctactgccctgtgagactgggaatgacaactggaagacttcagtctggagtgaatactttgcaggggttcaaagaggataaaaggaacaaagt

SEQ ID NO: 4690 - DNA, 176 bp, Glycine max
  unsure (1)..(176): unsure at all n locations
  Clone ID: PAT_MRT3847_10423C.1
aaagcccatgaaagagtcacttagtggatataagaataaaacattaaaggaagctattcataggattacaaagatttcatcaaactacagaatataaatcttaacttttacccctaaagatattcaattgttnnttctaaacaatgataaccaactaagaaaggtttgaattgaaa

SEQ ID NO: 4691 - DNA, 631 bp, Glycine max
  unsure (1)..(631): unsure at all n locations
  Clone ID: PAT_MRT3847_104240C.1
aacacacaagacttcgatattctactttcacagttaagaaacatcgaattcaaaggaaggagtaacttgtccttaagtcaacgtacaggttactcatgcgactcagaagaatgaaaaaataaagatgtttgggacaaagcccagaaaaataatttggtacttcaacttagaaccacgtgtaatatgaaccatcctactgagaagaaaacaaaagaaaggaaaggaacatgacaacgaacagaagtgacataactaaagaactaataaataataagctcatgtcagaaatctgcaaagacggtgaaaagatcaccattgatgtaatcattgtcgaccaaactcaccaagaagtagcttgtaccctgagggtgatgcatcctcttgaccaaatttcaaatgcctcatccttccatacattgaagctgacaggatcaacaatggttggttgaattatctncttagctgggaagacaccccatgtcacagcattaacatcagtttgacccacattagatttccagctcccgtctntattcacagccatataagttaaagatgttcgatccttgcatttatcaacaagtgcattcagcttttccttagagcaagaagactctacatatggccttct

SEQ ID NO: 4692 - DNA, 341 bp, Glycine max
  unsure (1)..(341): unsure at all n locations
  Clone ID: PAT_MRT3847_104241C.1
gaattcgagctctgtacccggggatcctctagagtcgacctgcaggagttttggttcaacataaatgttaataacaaactttttatttagaggaatgttaataacatagtattcaaatacagcttttattaaagatataaaagaaagtaagttccactcataatttagttaacatttctgatcgtctaattattttgattcatagtgagaattataataactgagcatcctgctcaaccaaatggatatgatgatgataatataccaaatatatcacaacacagaaatgcaatgtttgagtttnggacacgnttgtagattggtaccaaacattgttgata

SEQ ID NO: 4693 - DNA, 2541 bp, Glycine max
  unsure (1)..(2541): unsure at all n locations
  Clone ID: PAT_MRT3847_104242C.1
atggttatcttcaaaaaaggggcccccctctcccntcttcttttcttttttcttcccccccttttctttttttttttatttattttcttttttttttttttttattttttntttttttttttttttttttttttttttttttttttttttttttttttttttttttttttttttttttttttttttttttttctactttcacagttaagaaacatcgaattcaaaggaaggagtaacttgtccttaagtcaacgtacaggttactcatgcgactcagaagaatgaaaaaataaagatgtttgggacaaagcccagaaaaataatttggtacttcaacttagaaccacgtgtaatatgaaccatcctactgagaagaaaacaaaagaaaggaaaggaacatgacaacgaacagaagtgacataactaaagaactaataaataataagctcatgtcagaaatctgcaaagacggtgaaaagatcaccattgatgtaatcattgtcgaccaaactcaccaagaagtagctgcccccaacctcttcaaccaatttcctggatgcatcaccctcagggtacaagcttgcccatcctcttgaccaaatttcaaatgcctcatccttccatacattgaagctgacaggatcaacaatggttggttgaattatctccttagctgggaagacaccccatgtcacagcattaacatcagtttgacccacattagatttccagctcccgtctttattcacagccatataagttaaagatgttcgatccttgcatttatcaacaagtgcatccagcttttccttagagcagaagaactctacatatgccttctggtaaacatacccgcctggtccaccccagccaacagtaggagaatctgacttttccccattgacagctggctggctattgatggtgaggaagccctttgtgttaatcttttccagcagctcatttattatctttgtctctggctgaagaccatctagttctgaccaaggattgcttctcaactttccaagacaatacagtctaaacctctcatatatatcttcaatgcttttcaagggaactgcccattcttcaacaagcttcttgtcccgtgcacgtggccgcatgaactgataatcagataatgcaccatatgatggattacaggaatcaccccaacgcccgtgtgggtattgatcccatcctattgtccttgatatgtagctttttggacgatttgcccaaaagattggacggacatcttctttaacacggaaaacatttgcagggcgtctccaaggtaaggacctagaaactttggtctcttcaattaggccaaggttcattagtatcgctaatgccgatttctccatatttagtgtataaagatgcaatgtattaattccatgagctaaaatctttttgcacatttcagttcccaggtgaattccataagccttgacagcttcttcgttgtccttgataggctctaaagcagccataatgtcagctggtatctttgttttgcaaaacccagtcatgcggataaagcccttgtaattattaatgggcataattccaggtacaatagggcacgttattccaatttggcgacagtcgttcacaaatttgaggaatatatccgtatcataaaataactgagtgacaatcagatctgctccagcatcaaccttgctcttcaagtaagcaagatcattttgataaccctccggtgtagccaacccatcactttctataacatccggatgtgcctctggataaccagcgattgtaatgccaaagtagtcaccatatttagctctgatatgttgcaccaagtcgcgtgcgcaggcaaagccgccttcgacctggacgaatttgtcctgaccatgaggcggatcaccacgaagtgcaagcacattttggaggccattggatttgatggtgtggagagcatggtcaatcttttcgacaggcatgttggtgcaggtgaggtgcatcatggtctccacacagacaatgttctgcatcttgttggcaatttccaatgtaagatcagccgttgtccctccagcgccccaagtgatgtcgcaaaaaagaggggttgtgagccaccatgcggtccatcctctcaaacagattgtccacaccatcctcagtcttgggggggaagaactcaaatgagaacaccaccctgtttggatcagcagaagctgcgcgaattttctcaatgatcttcattttttatctttgtccctgaggccaagccaaccaaagcagtaagtagatcagctagatccaacactcaatcctaaaacaaacttattcatacaacaacagcaacaacaacaacaattgtgtatgtatccgttgacattcaatagccgaattaggaaaagagttataagttctggatgagaattgtgaaccctaacattaagaacggaaggggaaacgaaaactcgaaagaaataagagcaatagtcgtaccttgtgaggtgaggtaaggtaaggtagacagagatacacactcgagccgaa

SEQ ID NO: 4694 - DNA, 680 bp, Glycine max
  unsure (1)..(680): unsure at all n locations
  Clone ID: PAT_MRT3847_104243C.1
ggatgaatgtctgcgagaagaatacagcacgggaggaaagaaagcagagggataggaagaagggcagggataggaagaaggaaaaatggaaaagtatttcggaaacgcttatcgtggcgacccgggagtgccccattcggacccggatcgcttcgtcaacatatgggtcggatccgctgccttcgctgttctcacatatttcaatccctacatgtggcagctctctaatcagttcaattggcatgacaaagcaatgctatatgagcaatatcactggaaacaggcaaggaagaagaatcagccatatgagttcatgtggaacaagacctgggacaagaaccaccgggaacattactactacaactggcctatttactttccttaggccacttctatttcatttcttgcatactttgtcctatctttattttggttgcaaacctggatcaattgatgccccctcccccctacccggatcacatgcttttctctgatcacttgaaaaacaaatacaaggattcaattgttgtgatgaaacgagtaactatgtgtttggaaatgatttggtgacacagttttaaatcaagtatttaaatttgtcaagaagcaaaacttcgttttcagttttcaatgtctttcagggcttggcnttnntnggttggntttggtgtgggggnggg

SEQ ID NO: 4695 - DNA, 253 bp, Glycine max
  Clone ID: PAT_MRT3847_104244C.1
tttccgaaagaacgatgattccctgatttttttgacacatgggaaacgttcttccaacaaaggaacaccgcccaaatctgatgcaaataccctggtcattaaacctttataaaaggtgcaactaagctatttggccggtggcgcttaaaagctgagattatcgaggccctgctgcgttcataggaagagaggacccagctaccaagtgtacgttgccgggctcggtgaggcgataaaataggcctggaaagct

SEQ ID NO: 4696 - DNA, 375 bp, Glycine max
  unsure (1)..(375): unsure at all n locations
  Clone ID: PAT_MRT3847_104245C.1
ccacgcaacacnccaccggggcagaagcaggggcganncccnaacccnccacaaanccccnnnncanncggggcaggggcnccaaggagggcncngcagaggancncggagcccccgagncangggagggcgcngannnggacgagnccangaaccgcaagaaccncagggggggggccaacaacgaggcnaagcaaccncaccagcgncncgccgannanaaggacgaggangcnccggngccgccgccnccnncgnccagnggcgacgaggnnnccgangacgccancaancaggnagaacaggnccnncgcgaagccaagcagaacccgcgcgaacggcggccaancgggagganggagcaagangangaga

SEQ ID NO: 4697 - DNA, 1306 bp, Glycine max
  Clone ID: PAT_MRT3847_104246C.1
ggctcgagtcaacatatggggctgcccattatattctctggtatcatagccctgtgtttgattgtgtcctcattggtacttgaaccggtttgaacattcactcaaacaagatgggtcactgagctgattgagcacttgaacttggtgaagaaaaggaccttacaatcaatccaaagttgcattccagatgggagttattggacaacaattggacatcgattttgtgatttccaccggcgacaatttttatcacagtggcttgacaggcatagatgatccagtatttgatagtgcttctagcttgcaaaagcaatggctttgtgtattgggaaaccaagacctacactgctattagcttgcaaaagcaagggttctgtgtttaaagatacacaggatataggggtaatgttgaggcataattgagtcctgtcctcataaatcgtttttctttgtagatactactccgtttgtggacaaatacttcatagaacctaaggaccatgtttatgattggagtggcatattgccccggaaacaatacatttccaacctactcaaggatgtggatttagctttacaacaatcaaatgcaaaatggaagattgtggtgggtcaccatacaattagaagtgccggcgtgcacggtaatacggatgagcttgtaaagcagcttctcccaattcttgaggcaaacaacattgatctttacataaatggacacgatcactgcctacaacacataagcagttttgacagtgcaattcaatttttgacttgcgggggagggtcaaaggcgtggaggggtgttgtgaactggtggaagccagaagagatgaagttctactacgatggccaaggagtcatgtctgtgaaggtcactgaaactgaaattgacatagtattctatgatgtctatggccatgttctacacaaatggaacacatccaaacagcttcacgcaagttggtgaacaagttcaagatcgaatccaaggcatttaattatgaaacaagaaaagaaagaaaaaataaatctcggggacaagaaacaaaagtgcatacaagataggaaaaaacaattgagccctatcatctccccatctggtttggcttcatattttacactatgcaattgactaaaatctgttgtataatagtatctacggaaaaaattctctccatttctttcatttttatgattttgaaaaaataaataatgatattttctatttaatatgtattatgtcgatctattttatttatttctccaaaactttagtaatgaaaaaatggagaggccggaaaga

SEQ ID NO: 4698 - DNA, 639 bp, Glycine max
  unsure (1)..(639): unsure at all n locations
  Clone ID: PAT_MRT3847_104247C.1
ttctttcttncccggcggccctttcttcctccttcctcattcttccgcgagtccctttgcttctccgacacgaggtggttgtgcttctccagcgcgagctactgcttctccctccttcgagtgcgcttcttccattcttccacgaggttctgctcttctgttcttcatcaaggtaaggtctattgtcccttttcttgtttnnnattgcttccattgttgcttccagaagaagcattcagtaggatccaataaaaaaaaattgttaactccatgcattgaaatgggcacagttcagaggatgatgcnnnagaactgaaacattaaaaaaaaaaagagttgtaatattcataatacaattgatgtaccatgtcacatcattattaaatgatgttaaaaatcatgttaaaaaattaaatttataatatcaaaattaaagatttttttaaaagattaatgttggattatgtaatatggactagcataacactannacaaaaatgttattttacgacacagattgaagatagttctagaaaattgatatcgtaaacaatacgttagtattttttaaaataatcacaacttttcatcttgaaaacatttgttcaatgacagttttattaaaaccatcatgtaaat

SEQ ID NO: 4699 - DNA, 171 bp, Glycine max
  Clone ID: PAT_MRT3847_104248C.1
gcccgaggcagcactattgcttaacctggggcgtaattcaaggcttccacggacgttttctctataccttcacaaggaggacctttcgtggtacaaaagcttcggagacgtatctgataccgcggccaatatgacagttccttcaccaagggtaactatggcgcccaagga

SEQ ID NO: 4700 - DNA, 266 bp, Glycine max
  unsure (1)..(266): unsure at all n locations
  Clone ID: PAT_MRT3847_104249C.1
cttatgatctcccgatttacaatccatactctcctttccgatcttgagtaagatctcgattttgcactacccatgggtaggactataggagtctaatgtacatttggggagcttttatgggagatggcttttcatagtcagttgaaggataataatgctggtcctttctctttgtatgactgattaaatgaaatttncgtatggtttttatttttaacatggaagaatcatcttgtaggaatttcctgtgaaattaggctgcataa

SEQ ID NO: 4701 - DNA, 493 bp, Glycine max
  Clone ID: PAT_MRT3847_10424C.1
aattcggctcgagagttgctctcagtttcattgagccgtattcctgtctgttctatccttcatttcaatcttcaaccacgaacccaaccctagcggcaagcccgtttctaagcctcgccggcgcacaaccctggcccctttctcaatctcgccggcccactccctctctgaatctcgacggcgtaaccgtagttggagttgtttgaacggagacacgtgcagagttggagccgttcgtcgagttcagagttttgtattatatggatgcaagaagtgcatgtcgttcttccattagaagaagtgatactgaaatgcaacatctaataaagcttcttgaacgggatcaatatatttattggcatagattaaaggataaagacgtggtacgtgatatcttttggtgtcaccctgatacagtgaagttagtcaatgcatgtaatttggtattttttatagacagtacctacaaaacaaacaggtacaaactcccact

SEQ ID NO: 4702 - DNA, 407 bp, Glycine max
  Clone ID: PAT_MRT3847_104250C.1
ggactatagtcagactatcaattccgctaactgcaacccatcttcagaggccgatctttctatagcgactctacgcatgaaccttaagctcattgttgtacatactagactatggctatgatcttacatttacgggctctcttggcttcttttactattcctgtgctgatcaatgcgactactgggcatcctctaatcactgcaactatcacatctacgaactcacttgcagatactcgcattcataaccaccaattgactatgggctagacaaactcctctcgatatacaacggactgctagaataagcttcgacctagaaggctctgcaacctataactctcgacatacttgattgctaatatgcttggaatgacctatgatcaaccaatctacctcaacttaaa

SEQ ID NO: 4703 - DNA, 286 bp, Glycine max
  unsure (1)..(286): unsure at all n locations
  Clone ID: PAT_MRT3847_104251C.1
gctgggaatctcagaactgtgtacttccagctgggttgaggaaggcagagaggctaagggatgctccncagagggaacgtactgcccttgtttcataaatcaccctggccggaaaaaatgagccccaccggaaccttgcaaaactttccctttgtgtttgtctgctcgttgatattccagctcactatgcaagttgtgaggacaagaggccagaggccaaggacccaggaggctccggcaggacgttccgtagctgtgcctcatccctggccctgagttcgataaa

SEQ ID NO: 4704 - DNA, 593 bp, Glycine max
  Clone ID: PAT_MRT3847_104252C.1
ggcatgcgacggctgaagaagacgacagaaggggaactcaaacagggaggatcatttctgatcgatttattgcttacgatttggaatagtgacaagtaaagacaaatcacaactcacggtcatccaattccaagaatagagctttacgaggcagcggcttcaaaaggaggggaatattcagaggaaaagaaagagtagttgttgaacaacaagagctttcctcattcttagcttatctcacaaggaaggtacgtaagatccttaacacccttaccgcggttacttgccgcctcaatccattgctgaaatgaatgctcataaataaatatatttgcaggctacgaatctctgctcctagatttttgtttcttaattatcaatctagtctctaaattatattaaaagatttaatttgattccaaatttttaaataatttaatttaatttctatattattttaaaatagattaatttgaccatttttgtccaattgtgattagtataacaaatttcagcggcttttatttatgaacagtggaattattatatttattattagtttaaaaaataaaacaattttcaattctttttct

SEQ ID NO: 4705 - DNA, 375 bp, Glycine max
  Clone ID: PAT_MRT3847_104253C.1
tgttaacggttctgcggagtggttttgttcggaactctgatcgtggaatgttagggattttacgagatggagagcccatgggagaggaaatgtgattcgccgcttcagccgtcgacgtccgccacagttctgtctgcaccgccgccggagacggtaactcgacgtgctcttctgttttgcttttgtttgagctatttctttcggtgactgtgattacttgtgcgtttcgtgaatgctcttatgtaaatgtaaatgcgtcgtgtaatcgtttgttagtttgttttgatatatcgcgttgttatgcagtgtactgttgcattgttcgtcggcgttgacaacgtaacatttacgtaattttattattttaccattttt

SEQ ID NO: 4706 - DNA, 381 bp, Glycine max
  Clone ID: PAT_MRT3847_104254C.1
gggatcatacatagtattgttggtgggttgcaaaaatgcttggggctcttctccatattatcataacggagagggacaatggtgttcatgcacaagaatgtcttttacgttaatagcgctaccagcgttgaaggaattattggtcaatttctcgacttactctgctcaacactcgatacttttactgccttcttggtccgatccgcgtttctccatcttattagtgctactaaagctcttgcctacggatattggaaacttgcctaggctaccttttttgaaggtatcattactttattgccaactgtgggagcataccaatttgcattcaaaattaattctaactggtatgatccgagttattattcatagagcatttta

SEQ ID NO: 4707 - DNA, 317 bp, Glycine max
  unsure (1)..(317): unsure at all n locations
  Clone ID: PAT_MRT3847_104255C.1
angcacgcgtacgtaagctcggaattcggctcgagnnggntgngagaagacgacagnagggggcncaantnattttnttnatcgngatnacnagnnnnnntntgntnacaatgnnggncngtgttttcctcgtnagctacnntntgggtagcatnncaangcnatgngtacgatatgttcncnctcnnnntnganacnggctaggntgcccggantcnggngnngaantgcgcangnngganntttnctgngnacncacacaanatcntngggttctanaccanacnngagcatgcnntganncgacannggnntnc

SEQ ID NO: 4708 - DNA, 346 bp, Glycine max
  Clone ID: PAT_MRT3847_104256C.1
ttgtttttttttttttttttttttttggtttggggttttttttttttttttttttttttttttgaaaaaaaaaaatccaaatttttttcgcaaaaaaatagacttgtttgcattaaaaatgctaacaactttcacccccttaacccccgggagccctggttggcatttaaacccattcggttaagggatttaattttgaatttggccaaattctctaaaactttcccaaattaaaaatcccctcagggaaaggcaaaaaaaaaaaaacaaacatgcattttacccttttcccccctttggggggttggggggccatttttccggggactaaagggcccccttccaa

SEQ ID NO: 4709 - DNA, 435 bp, Glycine max
  Clone ID: PAT_MRT3847_104257C.1
ccctaaaaagggaaacctttttaaattaaaccccccccgggggtccccccggaatttccgccccggcccctgggggggacccagttttccctatggggggccctattaaacctgggcggaatccgggccaaagcttttccccggggaaaattgttttcccctccaaattccccccaaaatacaacccggaaccttaaggggaaaaccccggggcccccaaaggggggcccacccccctttattggggttcccccccctgccccttttccagcgggaaaccctgttggccccctttttttaaagaatccccccccccccggggaagggcgctttgttttttgcccccccgggtgtttttttttttcccccgggaaacggccacccgttggttccccttccccccctgcccctaaaaaaattcaaaaagcccccccc

SEQ ID NO: 4710 - DNA, 260 bp, Glycine max
  Clone ID: PAT_MRT3847_104258C.1
ctcatacctaactattcctacctaaacgaaactctgtttgacattgattgcgtgccgaggattggaggatatttaacggaagaagagcgaatcgtggctgcaatcaacggccgcgctcctagatcagcgcgactgatgctcgatggaaaacacattgatggatatatctagtagatcgggattggttgctaatttgaagccgtcgaaagtgtaccatctagcgggttcagtgtttggttgagctggattgttccaagatt

SEQ ID NO: 4711 - DNA, 177 bp, Glycine max
  Clone ID: PAT_MRT3847_104259C.1
ctcactatcatcatacgctacctttagccaccgctgctgtggtgctggacatgcatggtaatcctctgcggaaacggctggcgatatgacatctctcatgttgccaccctacttgaggaagccgtggtgcaatagcactagctgcaactggaaatgaaacactccctgtaactgtcc

SEQ ID NO: 4712 - DNA, 363 bp, Glycine max
  Clone ID: PAT_MRT3847_10425C.1
cgcctggctcgacccactcgtacagtcgtagattcaaagcgcagataccagtgcaggtgctaacccttataaggagccactcgtcctggtgcaattgaacaatcatggagtgacgcagttactcaaactattcgcactgcaaccatagtcaactatatggcacatgcataagcacctgttgctggtgcaaatagagattggcgtgaagctaatccaccaccactaccatccctgatattgctattgaattgactctgtccaaacaactggctgggaataaactcacgattttcgatgctatgatcttgcactgtgcttaaactgaattgtcctgcctagaagtaaactatggctcagagtttt

SEQ ID NO: 4713 - DNA, 161 bp, Glycine max
  Clone ID: PAT_MRT3847_104260C.1
ggaacacaggaatcccgtagaggtaccctgttaagaacatactctaacgaggcaccaatatgattggggttgaacaaacgaataaccatacatttgagtcacctaaaaagcttgtgaaatcccgcttattttttcggacttaaaagtacgcttcttttttt

SEQ ID NO: 4714 - DNA, 568 bp, Glycine max
  Clone ID: PAT_MRT3847_104261C.1
tttggttttttgcgtggaacatttttttttatcaacaacaaaattataactctcttctatttgctgtgcccttaaacacttacttacctgaaacaatttgaaatgaggaaactacttattcatccgaccaattattggccaacagtgaactttgttcaagtgaaaatgaaactaggagactacctagttgacaacataatgaaccctggttgcgagactttataactgaccaccttaagccggggtaataggcagcctgaagcttagccactgacagatcaaatataccttgaaatcccatcagttttctctcttccatcttgggttcggcggcccaagctaagaatgacacagcatgcttccccatttcagcttctgaaacaggagtaccatgttcatattacacagctccataattaaccagttcatgcagtggaattgctccaccaggaaagtgggattataaggaagtccctctcttatggaaacaccagggggtgggtcacgataaccaggcgggaagggctaaaacatactgctaaccatggggacgggctccctaaacaag

SEQ ID NO: 4715 - DNA, 1208 bp, Glycine max
  Clone ID: PAT_MRT3847_104262C.1
aattcggctcgaggaaccatctaaggaaacagtgaaacgagagtcagaagctgagaaaccttcagaggaaactcatatcagtgaaccagttaagggaaaccgagaaactagagtcagagactgagaaaccttcagtggaaactcatatcagtgaagcagctaagaaactgtgaaactagaatcaaaagctgagaaaccttcagaggaaactcatatcaatgaaccagacaagaaaacggtgatagttgagtcagaagctaagaaaccttctgaggaaactcatatcaatgaaccagttaaggaaacagtgatagtagaagctgggaaaccttcagaggaaactcatatcaatgaaccagctaaggaaacagtgatagtagagtcagaagctcagaaacctttagaggaaactcatatcaatgaaccagctaagaaaacagtgaaaccagattcagaagctgagaaaccttcagaggtaaacaatgaaagcagcaagccactgaacgaagaatttgtacaggccatggagatactttcagaggaaacacaaagcaatggactcatcaaactcaaagaagtgcctattgaaccatcagaagaaggtaagccaagtggggaatcagagaggaatgcttcagaaactgaaaaacctgaaacttccattgtgactgaggtggctcctatgcctgaggagagagtaattgaagaaattccaactgatgcaaagtctgtagagaaggtaacaaaggaagctgcatcaagcacagaagagacaagccataatggggtggagaatgcacctaaggttgttgatgctggaactgagattcactaagacctcaaatctgaatgagaaccatcaacaatttgaaacattgcagagtttcagattgttcttcggttcatcccatccgaatcattgtgtgatatttcccaactacattttcgtcgtgttatttttttatatatatatatatatatatttagtttgaagaaccgaatttttgttcttgtcaagtcacttatttttctatcctatcattgctagttatctgtattggtaggtctaattcaccaatgtaaattgtaattttgttgtgatctctggtctgcgagtgggaaattccaaggacctcaatcttttgtgcaaaaaaaaaaaaaaaaaaagggcgagggcggccgctgaaccgggcccacgcacgcgtgca

SEQ ID NO: 4716 - DNA, 268 bp, Glycine max
  Clone ID: PAT_MRT3847_104263C.1
gacggaccaactggctagcacattctgtggagagcattcgattttcgagagcgttctgacttcccctagcgcattctatccaagcattacgaacaatgcagttattgatttgccttttgggggactgatggccctaatggccgttctgaacaacatgtgactgctaatatgttgctgatgacatctaacattgacccgcccgacaccatgaaaaccatgcttgaatatgacaacctaatgttctattgtatggtcttacctcacaact

SEQ ID NO: 4717 - DNA, 374 bp, Glycine max
  Clone ID: PAT_MRT3847_104264C.1
gcttcctgatttgtatttgcacagtccagaggaagcgggccaattgagacggaaagctctctctcgcatggaatggctgcaaaaagctgctgtgcctaccatagcacagtttgaagagttccattccatgcagaggaggatgcatgctcctgattcaaatgacaatatcgatctactgttatgcactgatacgtctgattgacaatgagcaggtgaagccatagcaaacaatgacagtctttgatgataagctcgcgttggctaacacacaatgaagactgtgatggaaattatccagaccatacttggataccaatgttcgtgactagagtgcttcctgttagtcaatctccttcagaagctaggcttgtaaa

SEQ ID NO: 4718 - DNA, 199 bp, Glycine max
  unsure (1)..(199): unsure at all n locations
  Clone ID: PAT_MRT3847_104265C.1
attccatcttcctctttatctttcgcttggtctacttttttaatcctaccaccaatggcacttcatgatctacccttcacacccatgaacaccattgcgctgtgcatgattctccgcgccccactgtccaccccttnccactctgccctgacttgnacttgccacaagctcaaccccacctactacaactgccccagcc

SEQ ID NO: 4719 - DNA, 257 bp, Glycine max
  Clone ID: PAT_MRT3847_104266C.1
tgtagtaactagtaactctcactagagctgcaggaagttcaaaatgctgggatactctgattttatttgaaactagactcactaaggactagaaccttctaaactataacttataaccagtctagcacgatccatcttgacaactctaaaaacagagtacaggattacagtgtcatagtacgctgacgcacacaactttaagtataccattatcggaaagtccttcgcttccacggtttctctgataagaaactaga

SEQ ID NO: 4720 - DNA, 413 bp, Glycine max
  Clone ID: PAT_MRT3847_104267C.1
accaggtgaacttggaacccaaggctttgaggagttaaaaatgggattcgaatgtatggggggtactataccatacaatgaccctctccaagaacacgatggcatatatgctatcaagtatgcgttcactaacgtaatcacattatttgatactgcggatgtctatggagccaatgctaacgtactattagttggaaaggcttagaaacagctgcccagaaaaaagattcagatcgccacaaaatttgtgattacttcacgaggattttctgatatgaaaatcaagggttacactgtatatgtgccatcatgcttgtaagctagcttgaaacgtcttaatgttgaatacattgatctctattatcatcacagattggacacatctgtacctatagagtaaacaatgggtgaac

SEQ ID NO: 4721 - DNA, 234 bp, Glycine max
  Clone ID: PAT_MRT3847_104268C.1
attttgccaacatgttggctcgaaagggggtcttatgggtatgaaaactgctttaagaattgcgggggatgagaagaacactttttatgacccaaatcagggcctgggcgaatgttgccataaatgaaggcgggatatcagctaaagcattaatgcacacttaaaggtttggaaaacaacaccggcaaatttggtacaccaaccgggttggccaccagcaatcttttcgaacgg

SEQ ID NO: 4722 - DNA, 717 bp, Glycine max
  Clone ID: PAT_MRT3847_104269C.1
ggctcgagcattgaagctaattttttctctctttctattttccttctctcaatcattctctgctccttttcactctctggggtcagggccaatcatcgccaagctcatgctctgcaccctttctctccctctaaagattctccatttttctctgcttccatcacaaacactgcatcaacacacacatacacactcttgttttcttcactgtttttttttttttaaatttattattgcaacacgtttctctccaatttgttgcaaacccttttggttttaggtgccaaaggaccaaaacgtccttgaagcctgaagcccctcctctctctcttagggttttctcaccctttttcagaagggtgatgcaatgaggcagtcttttgatccttcatctttgggtccttccaagattccatctataaaaatacctggaaaagcagggaatggtgcatgggaggctttgtctggatctgattcctaccatgcttcgtctgatgctagcctcttttctagctcattacctgttcgtccgcatgaaaaattgaacttgaatgaaactgcaaatggttatcaatctattgatgacatctcatctggttttaagaagctccatcaagatgcagatggaaatggttcacttgaagatggtgatactcatgcaattggacctgcccttcctgatgatgaggaggagcttttagctggtgtaacgggtga

SEQ ID NO: 4723 - DNA, 281 bp, Glycine max
  Clone ID: PAT_MRT3847_10426C.1
gcccccattaaaccggaacttggatttatttttggatgaatgcacttacgggtaacacccctttgaaaccaaaattaccaggggttcctgcaggaccacaaggttgcatatcccataattatctaggcttccatagggagcattaaaaacgacaaagtaaaattcggcgctaatggttcctttaactaaaaagccccaccaatacttgaaggcagaggttgcactctcctaagaccaatgaaagcccttttgaaaaattgcacaaaacagccgattaactt

SEQ ID NO: 4724 - DNA, 1580 bp, Glycine max
  Clone ID: PAT_MRT3847_104270C.1
aaaggggtcaaaacggcaatttatgaaaaatgaagacagaagggcctggcgaaactctggtattgactggcagtggagagagagtgttagcaccaaaaatgtcgaagttaatcttcgtgttccttgcactaattcctcttctctgcacctccttctccgccagagaaaccctcagatcggcgcatcctcgttttgctcgatgacttcgccatcaaatcctctcactctctcttcttcaactccctcaaatctcgcggcttcgatctccaattccacctcgcacgacgaccccaaaattgcgctccagagatacggccagtacctctacgacgccctaattctcttttcccccaccattgaacgttttggaggatccattgacgcggctgcaattttggattttgttgattcgggtcatgatttgatcgttgctgctgatagcaatgcatctgatttaatcagggaaatagccaccgagtgtggagtggactttgatgaggatcctgctgctgtggttgtggatcattcggcatatgcagtcgagatcatacattgattgctagtgatgattttatcaagtactgacgtcatatttggaagcaaaaaaattgaggctccagtacttttccaggggattgggcattcactaaatcctaccaatagcctggtgttgaaagttctctctgcatctccttcagccttttctgctaacccaaaatctaaagtgacaagtcctccatcactcactggaacttcaatctcattagtttcaattatacaggcaagaaataatgcccggatattgatctctggctcattgagcttgttcagcaaccgatttttcaggtcaggtgtgcagaaggctgggagtccaaccaaacatgagaagtcaggtaatgagcagttcttgaatgaacttagcaaatggattttccatgaacgaggtcacctcaaggcggtgaatgtgcaacaccacaaagttggggaagctaatgaaccagccatctatcggatcaatgataatttggaatactctgttgaagtttatgagtggtctgggacagcatgggaaccttacgtagctgatgatgttcaagtgcaattttacatgatgagcccctatgtcttgaagactttatcaactgatggcaagggccgttatttcacatcatttaaggttccagatgtctatggggttttccaattcaaagttgagtacgaaaaacttggatatacaagcttatctttatcaaagcagattcctgttcgtccctttagacacaatgaatatgaaagatttataccagcagcctatccctattatggagcatcattttcaatgatggtgggtttcttcatcttcactgcagttcatctatacagcaagtagatgtaaacctttgctttaagatactgtagtttgtagtgcggggttgaacttattttgagatcgaaaattttgatttggcaatgatactaactgacgtttctaatttattatagatgcattactttttccctttaaaacaaacgttaaaaagccgcaagcgttatgctctagaggatcttggcttgcgtac

SEQ ID NO: 4725 - DNA, 377 bp, Glycine max
  Clone ID: PAT_MRT3847_104271C.1
taggagtcctcggaagctctaaagttattaaccctctacacaattttactatgagtttctttccttttcttgcttacatcaaatggtatcatgcaaaattatttatatcattatgaaatatgttaagaaggagcaacaggctcctgaaatagtagtatagatatataatagtactaacaaagatttcaaattgtatgttttttgagaaatgtgacagtattcttccgtttttcttcaatttcaattttaacacgtactaatgtgcttaattttctcaaaatgctgctttgaaattctctccattacaaacatgagagtttccttttaagtattctcagtaatgttgacattagctactacaacaatttcctagctag

SEQ ID NO: 4726 - DNA, 177 bp, Glycine max
  Clone ID: PAT_MRT3847_104272C.1
aagggaggaagcaaccaaaaggaggaagcccccccgggccgctaaataacccgaaccctatattttacaaggcccgaatacacagccgggccaagtccacactaacgcaaaagttttacaaaacacaaccattatatgccccaaaacaccacatcccataaaatagggacacccaaa

SEQ ID NO: 4727 - DNA, 370 bp, Glycine max
  Clone ID: PAT_MRT3847_104273C.1
gacctcacggagttgcagaaagaaaagaccatcaaagtgtcacttaagccttatacggtttagggtttcacgattttgacccaaccttggacgcatcgaaaccttaagtttcggatcaagactgagcaatctggtggctagaacctttgatcttagagagtcaagcatcatgtctgaattacacgatcatgttactactgccttcgatccttttgctgatgcaaatgctgatgactcgactgctgaatcaaaggagtatgttcatattcgcgtacagaatccaaatggaaggaaaagcctgacaaccgggcaaggattgcaaaaagaattcagctatgacacgatacttctagatgttaagaaagagttc

SEQ ID NO: 4728 - DNA, 471 bp, Glycine max
  unsure (1)..(471): unsure at all n locations
  Clone ID: PAT_MRT3847_104274C.1
anagtctagngcgtgaatgnngtgagagagangtntanagatatagtgcgtctaggntgngagnnntnatgnnnnctgcatgagcanaagnnnntcgtgagtcangngaacgnnacgtgntacggannggnggtgtgtantgtntngtngnnggnagcgngtanggtgangttgagtgntgtgtgaganaacnnnnttgtngctganagatggtnnagngaggtgggantgtgatngtganantatggngtngtgnagatggagtcgggatgtgnganngtgnancngngngtgacacagtntgagngnntggtntgnnntanangnggngtnngganagngtganngnnangtgnangcccnagagnaaggnaggaagaggngtgaganatagnnnngagngtgnagncgagnngncngagagnaanggagagangagtnaagatggngtngnnngnaggagnagngcnc

SEQ ID NO: 4729 - DNA, 310 bp, Glycine max
  Clone ID: PAT_MRT3847_104275C.1
aaactcgtccttatatacatgcttccagtctcccaatcaccaaaaccaaaccaaaaaaaaatggaaactcttgtgccaaaattcttcttattattcctcttcgttacctcttcggctacttcatcatcttccgcaagtggagccccaagatccgacccgaagcctccagctgtttcattttcatcttccacggcactccggcgacgctcctcgccgccgctgcaatcctctccgccgcagaccgaggcttcgccgccgaaaacacgaaattccagagcctcgtgctggacttcagcgtcgcctacttcgc

SEQ ID NO: 4730 - DNA, 577 bp, Glycine max
  Clone ID: PAT_MRT3847_104276C.1
gaaatgtgtccccagttatggctgggaactcatcaaacagtgtgaaggaagagaatatggaagacatagagaggcatcagattgagatggatgagggagagtttagtgatggactcccttataagcctagtttgatggatcagagtactaataaccaacaatctgaggacttctttgctgagttgggagaaatagaagctgacccacttgaccttttgttcacacaaggttttggtggtgctgatgatcaaagggaatccaaggccttagatccatttcatctctttgactggtcaggagacaacaacaccaacaccaacacaagtagttcatttgaagaacctaataataagagaaggttataacaagacctagaaaaaaaaaaggcatgcagcacctccctcacaaaagaccttaatattacgatgatcatgcttttaagttttatttggtggtgcaaatatcattcaaggtcatgttatgctcttttttcttattatttggtttgaaaaaatctgtcatgttgggggaggggtgggagaaaaaaaatggaatttccacctttttttggttacta

SEQ ID NO: 4731 - DNA, 390 bp, Glycine max
  Clone ID: PAT_MRT3847_104277C.1
ttaatttaatttcattttcattttttcccttcaaaggaagactggcaaaactttcaggaccgagtgttaaatgcctaacttttccaccaaaaaactaaaaactttgtcggactctcaggagccgcacacaaaattttaattcaatctgtgaaaactactaaaacgcttattctaaccgccacttatatatgttgaatctccaaaaaaaatcagagcggggtgagttttttccctttgaaaaataaaccttgtggagagccttggggtttggttcacctaatttccttttgaaggcccttggggtatttgcttccaccctattcattttataaatagaaaccctttcaaacctttgaaagctctgattggttaaacccttttactcatatt

SEQ ID NO: 4732 - DNA, 242 bp, Glycine max
  Clone ID: PAT_MRT3847_104278C.1
cttacacctacacctagactaaccctcccatcatatctagtctacattctacctattcctatctatctgtacatagcagtggataaatagagagatacacagtcacacacacaacacaaaacgcaattggactgtgtctgctcttctccacagacaagctttctccaccacctctctagggcacctcagctatcaatttgcgcttaagaatattaagtctacagttgttctgtagaaaacga

SEQ ID NO: 4733 - DNA, 604 bp, Glycine max
  unsure (1)..(604): unsure at all n locations
  Clone ID: PAT_MRT3847_104279C.1
ccacgcgtccgataaaatttagtctctaaaagtgtaaaacatgcaacaaatatatccagccgttaacttccatttgccatcgttaataaaatagcttaggtgacacatagggacaaatttattattgaaatgattgctaacgtggtcatgctgattagattggacaaaaatgccaataagatactatttttgaacgtaaatgtcaataatttgttgttggacgaaaatgtcaatattttttattggaggaaaatgttagtaatattttttggatctaaacgtcagtacattccatttgatcaaaatgtcaataagttatcattattggaagaaaatttcagttattttttattggacctaaatatcaatatgtttttattagactaatttgttagacctgaaattttattttatttaagggtaaaatataattttaagataaattttcgtcatttttatcattaaaagaataacattgcattaatcacttaaaaaatatattggcaaacaaaatactaatgataatattgattatcaatcataatttgtctatcccaatagaaattatccannnnnnnnnnnnnnnnnnnnnnnnnnnnnnnnn

SEQ ID NO: 4734 - DNA, 432 bp, Glycine max
  Clone ID: PAT_MRT3847_10427C.1
aaaaacaaaaatagcatggattaaaaatacaggccgggatttggggagggataaaaaaaagggtggggaaaacataaattcggggagggaaaaagggttccctcccttttaaaaaaaacaggtctttggaactgggagcggggggggggaaactagcccccacggaaaaacaaagcaaagctttgaaagaataaaatatatttccccccacaaaagagggctagatccaaatataaggagaggtaacaaaagtggcttgggaggttacattccactttcgggggaaattcccaaaaggcaaaaaggaccccaaaaaaacaaacagaacccccacatatccgcagcaccggccttttaattcagaggacgattatccaaattgccaattaccttaggaaacgatttggggaagattcttcccccaagtcatca

SEQ ID NO: 4735 - DNA, 144 bp, Glycine max
  unsure (1)..(144): unsure at all n locations
  Clone ID: PAT_MRT3847_104280C.1
ttgacttccantatagtntgtnancatccttgtcttcagtttcntcaattggtgaacctttacaacctaattatatagcaagacattagttatanaactcaatngcnaaccttgtgagtcttgagcaattgtnacaattagaaa

SEQ ID NO: 4736 - DNA, 816 bp, Glycine max
  Clone ID: PAT_MRT3847_104281C.1
attcccgggtgccacccacgcgtccgggtagcttctataaacgtaaagctaccacccttggattttatagagaacttgctataaatgaaaaattgcccttttcaagtgatttctcgatcgtttacataatttgaattctgggcacatttatatttatagaaaggaagagtacttgtacaagtttaaatagagacggccggggccatggtgctaatcaagaacactgcttgtgttgtgcttgtatttctttctgctgcctggctatccactgctcgcatgaaccctaaaagtgttgctgttagtgaaatttcatatataaaggcaacgattgcatttagtgttccaaaaagtactacggtgaaaagcctggctgcaattgatgaaggtaacttgaacaaactaagtgagaagcttcttatgagcaaatctgggaaggttatctctgctcccaatattaaagccaaaagaaataatgctagaagctgtttgtctgatgaggttaatggggatccgttggcttttactgctgattatcgtcgaccagtccatcacccacctaagaataacaaatgaactcttaatagttcatcctcttaatatatggaagatatttgagtgcttttgttttgtttatcttatcctttatatatgttgcttaaattaatatatatatatgtatgtatatgtgtgtgtgtgaaattataatgaatgccttctatcggggaagttaatatataggttatataagtgtttcttgtcatcgatcaatctactgtaaatatgttgaatgagtaaagttataaagaagtattttcg

SEQ ID NO: 4737 - DNA, 303 bp, Glycine max
  Clone ID: PAT_MRT3847_104282C.1
ggaacaagaaggcgagagcgcgcgaagcagccataggagaaacaccagaggcccagcatgagaacagccaccagacacagagcccgcagcacaacgcccggaaacccagagccagaccaggccccggaacacggaagcccagcagaggcaacagagcagccgccacccgtagcgccagccaaagaagacagagacagagcaccgagcctcaaagaagccaaaaacgagaaagagaggagaacgaaccagaaggaagagagggagaagcaagacagcagaaagaagacacaaagaggaacagag

SEQ ID NO: 4738 - DNA, 333 bp, Glycine max
  Clone ID: PAT_MRT3847_104283C.1
agaaaaaaaaaaaaaaaaaaaaaaaaaaaaaaaaaaaaaaaaaaagaaaaaagggcagcagctcaaaaggttccatacttaagtaagcgggcagccgatctaaaggatcatccataatgtcacataaattcaattcaatgagccctccttttatgacatcgaaattgagatcactgtgccatattatttacattattcgccttgcaaaaaatctgcctttcgccatcttaattactatgcagcagagcctcatttctcgaccttccgaacaattgtacaggctgaatgggatcgcccatccaacctgttacgaagcattaatcgcgaatggta

SEQ ID NO: 4739 - DNA, 460 bp, Glycine max
  Clone ID: PAT_MRT3847_104284C.1
ggaacaaaatgaaaaagtttttatgccccccaaaaggaaaatgggggcttttaactcaaatgtaaacaagcgttggaattccccttaggtaactttaatttgcccaaaaataatccgaattttaaataattcacccattaccaatttttccaggaaaaaatcccagctttaatttttacccacgacgatttttccagggccaattaaaattgtttttcaaaacgtggggccccgacaaaatcaacaaaaattaagccgggcctgggttttttggtttggcagtctccattggttcaacaaatgctggggggggggctggattaacattgccccctgcctttttattaggcctgggattaggattctcctcaggggggtgttgttgctgctgcttggggcttcccaccacccttaggaggggggggtgctggggcttttgggggacctggcttgggggggg

SEQ ID NO: 4740 - DNA, 243 bp, Glycine max
  Clone ID: PAT_MRT3847_104285C.1
gtccgctcgagctgaggccgtctctctgtggctccatgatcatcaatctagccgttgagagaattgcagactctagtgccctctaaagtagagattgagtatgtgcgagtcgatgacctcattaccgtgacgagatagccgatgatccacttggcgctattcactaggataggctcaggggtattctgaatctggtaaaaggtgctagtctcactatcgtcaactgtgggacggctcttgaac

SEQ ID NO: 4741 - DNA, 688 bp, Glycine max
  Clone ID: PAT_MRT3847_104286C.1
ggggggttttttttttttttttttttttttttttttttttttttttttttttttttttttttttgttttttttttttttttttttatctttttttgttttttttttttaaaaggagagaccgacaaacttttaaaaaaacaacaaagggggggccgtgggggaaaaaaaaactgctccttttgggggggggggccccggccctttggggggggacccacccggaaaattttgggctggggcccccccggggggggggcccgggatcgggggggattaacgcccacatgggggggggggcccccgggcccgaggggcaaaaaacttggggggggggggaggggcccccgtactaacccggggggggcaggggggggaaaacccacagggccttttaaaaaaccgggccacggaccaaaaccccctagaacaaaaagcaaaaggggaggcgcaacgtgcaggccgcgccaaaaggggggctccccccaagggggggggggggaggaataaaccgggcacaacacgccggttctctggaacactgagccaccctcctgtggggggtttttgggggggcacccctcgtttcgcacaggctgttgactttttaaaaccccccgggcccgcccctaaaaataacccgggcccctgagttgacaaaaaaagttacataggggggggggggggggg

SEQ ID NO: 4742 - DNA, 264 bp, Glycine max
  Clone ID: PAT_MRT3847_104287C.1
attctcttctctctctactctctcacttcctaaaacatttttttttctactcgccgccgatcagccacgtcactctccggcgacacccttctctttttcgatttgttccttcctccaaattgcaagatattttctttgttttattgtaaaaagaattgtgtggtggttatcgcgcggtttcgatttggataataagcgtcgtctgcgcttctctgccggaagaagcgggtggtatgtgctttctgttaatgcggccagaactga

SEQ ID NO: 4743 - DNA, 429 bp, Glycine max
  Clone ID: PAT_MRT3847_104288C.1
gatacatcgaattgtgacctctccgatgctacaacgagcttatgttggcatgcaatgcttctggggcgtggagtcgtcttttgccagcatggccggtgttctgcatacgcgggtcggctacgcgggtggcacttccccggcgccaacttatgccaacatcggcgaccacaccgaggtcaccgaactccagttcgacccctcctgttgctcttatgagctaattttggattggtttttcgaccaccacgacccaactcaacggcataaaaaacagtacgcttcggccatcctttgggtggacgaatcgcagcaccaaacggcggagaaggcaatggaaaaagcgaacgcaaaatacggaggacgagtgcagacttacctgaagaaattggaccagtttcatcaagctgaggattatcaccagaaatattg

SEQ ID NO: 4744 - DNA, 309 bp, Glycine max
  Clone ID: PAT_MRT3847_104289C.1
aaaaaaaaaaaaacatacaaaaaaaaaaaaaaagctataaacaaaaaaataaaaaaaaagaaaaaaaggacgaacagatatataagatgctagcttaaattctgcatgcatgcgacattccatggtacaagcataccgaaaagttacctctccgaatgaaaaactggctttggtgcgcgttctttgggggtaaaattgccctgcctttaagcttgctgtggaagctcacatcatccgatcctttaataccattcctggagagtgcgttgaaccgacaaaggactacatcaatggcgaacaacttatatc

SEQ ID NO: 4745 - DNA, 265 bp, Glycine max
  unsure (1)..(265): unsure at all n locations
  Clone ID: PAT_MRT3847_10428C.1
acttgaacgaaatctgtaagggtcagagntcccatggacccgccaccatgattggtcttctggaatcgtcacgctgttcaatctgtcgtattccaaggtgattactctggctactacttccacatagcatactatccccatcaattccctcntgnnanattatccaantatgatnaaacttcactgttgctagaagaagctggtgctgttgtgtcagtcttgcttggttatgctccttcttccacccttccagctgccagctcat

SEQ ID NO: 4746 - DNA, 149 bp, Glycine max
  Clone ID: PAT_MRT3847_104290C.1
tacagttgtgagaagacgactgaagggggctgctaaaacaattaataaagatgaggggagtcatcaacatgggggtgcttaaggcgagcctaaagattattttactttttggagcatcaactgctcgcatagaactgcccttgttaaaa

SEQ ID NO: 4747 - DNA, 364 bp, Glycine max
  Clone ID: PAT_MRT3847_104291C.1
gaaacccatccacccaaaaggagtagggggggaaaactagttttttttgcttaaatccatcacagggctaaaatataaattaacttttttaaaagggaatttttccaagaggaagaggttatgtttcgaccaacttaaatatttttacaatgcaaaagctacaaaaatacccggggcagtaaaaatctaccctcctaagtaaataacaggacaggtttcatatggcaagcttgcttgcccctgggttctatgcattttttgaaccatgggaattttttcaacttttaacaatcgggggcacatgacttgacttaaaagaaaaaaatgacccctttatgtttccacatataaaccattattcctg

SEQ ID NO: 4748 - DNA, 231 bp, Glycine max
  Clone ID: PAT_MRT3847_104292C.1
ggtgtaggtttttttgcttgctaattggaaaggggggggaacaaacccactgccaagtatacaggggaaaaaatcgcggcccaagaagggggggggagacctggcaacccgggaccggtcccgggaaggaaacaacctttccggagagcgagccagtttaaagctaggggagaccagggaaatggggggaaaccgggggaaatagggatcggctgacaaaaacggggagca

SEQ ID NO: 4749 - DNA, 333 bp, Glycine max
  Clone ID: PAT_MRT3847_104293C.1
aaaatgttaatgggggggtttataaaagaattgggggggtataaaccacccaaggagttaagacgaaaggaacaagttcaaccctatgaagggaattaggtagaaaacacatggaaggaaaaccatacacagaagaagatttccgtgaaattcattattacacaaaattttttttgtttatgttaattttccccccctctaggagttcagtggtgggaaagctgctcgcgggttgtggctttataaagacaaccttttctaacaaggacagtgatttcaccaccgtttagaggctccggcccaattgaaatcagtggttggtctaggtgcagc

SEQ ID NO: 4750 - DNA, 2140 bp, Glycine max
  Clone ID: PAT_MRT3847_104294C.1
ctcgagccgcttgttaacatggtggcccctgaaattaaggcgcgttcatagtttgtcattactcactattactacagcgttttatttcacacttcacatacatcttcactgatgtgcattgtgtgacacttttcccaaattcataaacttttcaacaccccgcatcagatcttgatcccaaaccaattcaagtaggcaacaagcaacatgtgtacgatgaaacccactttaagattcatcttggtccttctcacccttctcttggtgctgaggtttaacgttgcctcagaggttgaggatgagttggaggaattgttagcagtggatgaggaagtagagcaagaagcggaaaagggtggcgagaagttatccgaagcagaggttttgagcaaagcccaaaggatcgtaattgagctcaacaacgacaacacagagagggttgttaatgggaacgagttcgttcttgttctggggtatgcaccttggtgtccaaggagtgctgagctcatgccccattttgcagaggctgcaacttctctcaaggaattgggaagccctcttgttttggccaaacttgatgctgacaggtattccaagccagcttctttccttggagtcaaaggcttccccactctgcttctctttgtcaacggcacctctcagccctactcaggtggtttcgcagcagatgatatagtgatatgggcacaaaaaaagactagtactcctgttattcggataggttcagtgacagaagcagaaaagtttctgagaaagtatcaaacattccttattggtcggtttgataaatttgagggacctgattatgaagaatttgtgagtgctgcacagtctgataatgaaatccactgtgttgaaacaaatcaggtagagcttgctcaagttctttatccagatatcaagcctactgatcaatttcttggaattgtcaagagcgaacccgaaagatacactgcatatgatggagctttcacaatgaataaaatactggaatttgtagactacaacaagtttccattagttacaaagctgactgaaatgaattctatcagagtctactccagccccatcaagcttcaggttttagtctttgcaaacattgatgacttcaagaatcttcttgaaactcttcaagatgttgcaaaaacattcaagtcaaagataatgtttatatatgtggatattaatgatgagaaccttgcaaagcccttcttaacattgtttggtcttgaagaatcaaaaaatactgtggtcgccgcatttgataatgcaatgagctcaaaatatttgttggagacaaaaccaacacaaagcaatattgaagagttctgcaataaccttgtgcaagggtctttgtcaccttacttcaagtcacagccaattccagataatacagaatcaagtgtccatgttattgtcgggaaaacatttgatgatgaaatcttgagcagcgagaaggatgtgctcttggaggtatttacgccttggtgcatcaactgtgaggccactagcaagcaagtagagaagttggcaaagcactacaaaggatcaagtaatctaatatttgcaaggatagatgcttcagcaaatgaacatccaaaactgcaagtgaatgactaccccacgcttctactttacagagcagacgataaggcaaatccgatcaaactttccacaaaatctagtttgaaagagttggctgcatccattaacaaatatgtaaaagtcaagaatcaagtcgtcaaagatgagttatagaacatatcaaaaagttttgggagaaaaacacttaaccatgaagaaagtaaaacattatggaaagaaacaaatattatgttgtcttgcgtaagcattttctaatttttattaacctttcccctgccattttatggtggtccaaatatgagttagtctattattatttgagttagcttactgctaaattgcgaaagctagtcaaattataacatgtaatgaactacagaacatacttgatacaccaaacattgtaccgatcaacactttccatttgcatctcatagaaacctgcaaattgcaggcttaaagttgatgcattgacacatatcaaactcaagcttttataattagaaaaaaacaa

SEQ ID NO: 4751 - DNA, 249 bp, Glycine max
  Clone ID: PAT_MRT3847_104295C.1
caccggacgaatatcttgttgcttggagcgatccgcgaaagactctgcaaacatgttggtttacctggacctgcttacaggtgatgagcatctctatgactccttccggtcaaggaaattgagaatggaatgctgtgggaagatgacgggatgtggcttggtaatggagcaggtgatgatacattggtggaacccttctgctcagggtgagggagaagatgagctagctgatgatgcaacgtgttaagg

SEQ ID NO: 4752 - DNA, 623 bp, Glycine max
  Clone ID: PAT_MRT3847_104296C.1
cacgcgtccgcctttgcttaatatttcaggtgaatgactaccccacgcttctactttacagagcagacgataaggcaaatccggtaattacttctcaggactctaattttggcgacagaaattcggtttatgtaattaccactctactataacaaaacacttttttttttatgcagatcaaactttccacaaaatctagtttgaaagagttggctgcatccattaacaaatatgtaaaagtcaagaatcaagtcgtcaaagatgagttatagaacatatcaaaaagttttgggagaaaaacacttaaccatgaagaaagtaaaacattatggaaagaaacaaatattatgttgtcttgcgtaagcattttctaatttttattaacctttcccctgccattttatggtggtccaaatatgagttagtctattattatttgagttagcttactgctaaattgcgaaagctagtcaaattataacatgtaatgaactacagaacatacttgatacaccaaacattgtaccgatcaacactttccatttgcatctcatagaaacctgcaaatcacaggcttaaagttgatgcattgacacatatcaaactcaagcttttataattcg

SEQ ID NO: 4753 - DNA, 1896 bp, Glycine max
  Clone ID: PAT_MRT3847_104297C.1
acggctgcgagaagacgacagaagggggattgcagcgtcactgttagttattgtatcctagaggaccctatcttctcccacccccttcctatattacataaccttgcatttcattgcatgcccttcttcttgttctgatcttttggggtgtgcgtgtgtgtgaggttgattgattgattgtttgtttgttccttcatcaacacaatgaagatatctgatgagaacagttctaaaccaatcaaccctacaagttttcaaggagggatagaatgtgtggggaacagaaagatggggcagaacagaagggctttaagcgtgatcaatcaggatctggtggcggaagggagaccttacccttgtgttgttaacaagagggcattggcagaaaaacacaatgtttgtgagaagaagcaggcggatccggggcatcgacccatcacaaggaggtttgctgcacaaattgctagcacacagaaaaatcgtgcagagggaaccaagaagtcaaacttggggaattcaaattcgaatggatttggagagcacatatttgtcgatgaagaacacaagtcaacaacggatgaccagccagtgccaatgtctttagagaagacagagccaatgcatagtgaatcagatcagatggaggaagttgagatggaggatataatcgaagaagagactgttttggacattgatacctgtgatgcaaacaaccctcttgcagtcgtagactatattgaagatctttatgcccactacagaaaattggagggtactagctgtgtctcgtcggattatatggcacaacaatctgacattaatgaaaggatgagggctatactgattgactggcttattgaggtgcacgacaaatttgacctcttgcacgagacattgtttctcacagtcaatcttatagatcgatttttggcaaagcagacagtggcaagaaagaagcttcagttggttggtctagttgccatgcttttggcatgcaagtatgaagaagtttctgtacctgtggtgggggatctaattctcatatcagacaaagcatacacaaggaaggaagttctggaaatggagaagttgatggtgaacacattgcagttcaacatgtctgtgccaacagcatacgtttttatgaaaaggttcctaaaggcagctcaagcagacagaaagcttgagttattggctttcttcctggtagagctatctcttgtggaatatgagatgctgaagttccctccatctttgctagcagcagctgctgtctacacagcccaatgcacaatttatggtttcaaacaatggagcaaaacatgtgaatggcactcaaattactcagaagatcagctattagagtgctcaacattaatggccgcttttcatcagaaggctggaaatggaaaactaactggggtacataggaagtactgctcatctaaatttagctatactgcaaaatgtgaaccagcacgttttcttctggagaacccattgtagcagggccatgtacagccactaacaacatcatgatcatgaatgatacatatgactttccatgcacatttgagcaacttgggttgcacttatattgttcagagaggattatgaaaatcctctgctgtgttggtttttttcttaaatatttattgttctacttttgttattttttccaccctttctttttcttttctgttatgttctaactgaacaggaacatacttcgtccattcgagtctgtatttctcttgttcccattggaaacgatggcatagaaacaatttcattcattcaataagtatttgatttgatttgatttttgcttttatgtttaccacatggagaaccgaccttcgtgctgaaaaaattgttcggagagtgttttgattt

SEQ ID NO: 4754 - DNA, 649 bp, Glycine max
  unsure (1)..(649): unsure at all n locations
  Clone ID: PAT_MRT3847_104298C.1
gtccggnaatttcccgggctcgacccacgcgtccgggcgtgcagaaaacacaatgtttgtgagaagaagcaggcggatccggggcatcgacccatcacaaggtgagaggttgccaccctttttgtttgatttggtgaaaaaagtgaaactaagtatttgaattttaaaattgtgaaagtgcatttcactttgtattgcccactgtttttcttagaatggaggaaatggaaaaatgaaattttattttacaagtttcaatgtaacggattgttcatcttgttgatttgcttttaggaggtttgctgcacaaattgctagcacacagaaaaatcgtgcagagggaaccaagaagtcaaacttggggaattcaaattcgaatggatttggagagcacatatttgtcgatgaagaacacaagtcaacaacggatgaccagccagtgccaatgtctttagagaagacagagccaatgcatagtgaatcagatcagatggaggaagttgagatggaggatataatcgaagaagagactgttttggacattgatacctgtgatgcaaacaaccctcttgcagtcgtagactatattgaagatctttatgcccactacagaaaattggagttgtcagagtactgcatctgaagtccc

SEQ ID NO: 4755 - DNA, 240 bp, Glycine max
  unsure (1)..(240): unsure at all n locations
  Clone ID: PAT_MRT3847_104299C.1
gcacaaagcaaagctcatccntganttaaaanatggcagcagcntcttnnatggctgctnctcatccccatccttggtctgggaaggccgngaanctnggcccatcagncccagaagtgggaagggtgnaccatgatgaanaccgtnaccaagcaggtctccttcaggaagcncatngtacggncccggnnccnnnnangagnttggggncctttncttgggggnccccctccaaaaaag

SEQ ID NO: 4756 - DNA, 739 bp, Glycine max
  Clone ID: PAT_MRT3847_10429C.1
gtggcatttatttcccctgtattgctatcaagtaccaccaccgatcctcagaacagaaaccctaagcataatcactgattactctctttcggcgacatcaacactgagtgaagaagaagaagaaggagaatcatcgttccctcttttctcgatacaccaaattgctgaagcagaagttccgaattccgtctctctctctctcaaattgtcctcttaacttcgccatgtcgggtcgaggaggaggaagggatcggtttaggagggattatccttcaaggcatgaggataatagggggaatgggattagtggacgtgacaaccgcaacagcaacagcaacaaccctccttccaggcatctttgggttgggaatctatcccacaatattgtagaggaagaacttgctcaccatttcttgaggtacggaccactggagaatgtggcattccaacccggccgcagctatgctttcataaatttcagaatggatgaggatgctattgatgccttgagagcactgcaaggctttcctcttgctggcaacccacttagaatcgagtttgcaaaggcgatcagtgttgcccaccttttactgcttgttacttttccagctgattatatgaatctaccgcagaagttcaattcagttcagttctatttatttaatccaggccatagtattggctttgaaatagatcaacataatttgcacagaaaaaaaatgatggaatactacacact

SEQ ID NO: 4757 - DNA, 774 bp, Glycine max
  Clone ID: PAT_MRT3847_1042C.1
cccacgcgtccgcggacgcgtgaaggcttctttctctctcttcttcccttgctctgtgtcgccgtaacacaaaaaagggaagagagagaaagaaccacccacccaacagcttttgttcttaacaagacaaagcttcgcgtgtgtttgggtttcttttcatccttccagcttggaaggattgaagtttctgtctttttctgatctccgcgtgcgtggtttggttttgttgttgaagatgttggtagctaatagctttgatctatggcgaaaggacgcttttttctctgcggcggaagaggtgcaggaatcagctgatataatggaatctgcatacagggcatggttgagagagaagagagaaaggtcaactcctgaggaattaaatgaactatgtagagagctgcaaactgctttaggtaccgcaaaatggcagttggaagaatttgataaagccgtcaggctaagctaccgacctcacagtgatgacaatacatccactaggcataggcagtttatttctgccattgaaagccaaattacccaggttgaagcagcactgagggaatcttacattgaggaaggtaagcaaccacttcggtgggtaaatcttgatgaagaagagcgagatgatctggctgcctttctatctggaacttgtcagaccacacaaagcactaacgatgaatacatggaggtgaaacaagccaagaaagaagataagattgtagatatatacactttccgcaaccgggatatatctgctagtgaaaagtc

SEQ ID NO: 4758 - DNA, 281 bp, Glycine max
  Clone ID: PAT_MRT3847_104300C.1
cactatgcacagaaaaggggagaacgattggccacaggaaatgctaagcacaataaacatacaacggtctacgaaagtgcatggtccaagtgatctagttatattaatgtacacatagttatttttaacattatcgaattcatatgtaactggtctcatttatcgtctatccggatgaaatgccgttcaattaaaaagtgcattcttggttgtaaagatcgcacattagagtaaaagctattgtaaaggaagatgtatatgcgttgattgtaaaagtgcct

SEQ ID NO: 4759 - DNA, 597 bp, Glycine max
  Clone ID: PAT_MRT3847_104301C.1
tgctgaagttccctccatctttgctagcagcatctgctgtctacacagcccaatgcacaatttatggtttcaaacaatggaacaaaacatgtgaatggcactccaattactcagaagatcagctattagagtgctcaacattaatggctgattttcatcagaaggctgggaatgggaaactaactggggtacataggaagtactgctcatctaaatttagctatactgcaaaatgtgaaccaccacgttttcttctggagaaaccattgtagcaggccatgtacgtacagccactaacaacaccatgatatcatacatatgacttttcataattgggggcccacatgtgagagcaacttgggttgcacatatattgttcagaggattttcataatcctctgatgtttttttttttctctgaagagtatttattgttctgttatttttccacctttttttcttttctgttatgttctaactgaacagaacatacttcgtccatttgagtttgtatttctcttgttcccattgaacaaaataattgaaacgatggcatagaaataatttcattcattcaagaagatttaaatttttttc

SEQ ID NO: 4760 - DNA, 295 bp, Glycine max
  unsure (1)..(295): unsure at all n locations
  Clone ID: PAT_MRT3847_104302C.1
cgtacgtaagctcggaattcggctcgaggtcactgctctgnnncancgnnnntnngngtgtngnncagaancngancgtnnnctcctccattggcanncatngnaanntcanatgancactnagatncnntntgttgcggacgnactgttctntaccncnctgggcgaggttctgacacntgaattggcggaggacgntnactcnggcgtctnngttagggttncgccngtagcgcaccgagatcatcatcaganccacnagagcccgagccgtctaantgacaacggatggtga

SEQ ID NO: 4761 - DNA, 403 bp, Glycine max
  Clone ID: PAT_MRT3847_104303C.1
ttttcttttacgtgacccaatcgacggtcctggaattgcccataaccccccgccacgtcagaatctccggcgaaagccaccgcgtcttcgccacctccgacctacgccccgcgggatccttctggatctacgttgtccccctcgaaaccaccaacaatgagaacctcgaagccctttactgacaagtaaactaaactaaactcaaccattttctgaaattgaattacacaaactattattgaaatactcaagcacatacaaacacctttagttccaacttagttaacatgctattttgcaataagcacgggatgcttattataggggtcaccctctcatagatgacgacatttttgatagagtagagctaaggctgagatggtttggttaaagtcagttgtca

SEQ ID NO: 4762 - DNA, 185 bp, Glycine max
  Clone ID: PAT_MRT3847_104304C.1
tattgattagttctaagccatgaacctgcatgtgaagtccgagaacaaaaacgcgcctaccattgatgttgaagtctcttgaagcatatacaaattgggagctgtggggttaagaacaccatacataagtggaggtggctaccctatgctttaggaatttttttatgactaaaaaacctgagggc

SEQ ID NO: 4763 - DNA, 231 bp, Glycine max
  unsure (1)..(231): unsure at all n locations
  Clone ID: PAT_MRT3847_104305C.1
gaangagnggagtttttttttttaaangggggacaaaaaacacatgatactgcaacattatattaaataagggatgggccagggtcaaccatattattaaataatagtccataaaacatgcccagattaaaacattccccctttttaattaagaggcttgcttagaaaaaaaccttgctaggcggaggattgaacctaagcatcatactctaggaaagatttgcctgcaaa

SEQ ID NO: 4764 - DNA, 430 bp, Glycine max
  Clone ID: PAT_MRT3847_104306C.1
ttctcccgtacagattcccgagtagcgtctacatttcagtatgcctggcgaatcaaaaggcctcatcaactacctacatgcccagaacatcgcacagaacatctttttgcttctaaaaaaacaacagacgatggcgcttatggtgaaactgatagttataatgaatgatgtggtgcataattcggtccctatttcattcacttctaaatttaatgatgaaaattgtgcagccaaatgttcaaacatataatgtaattagcaggcacacaatcgggtacacaagcctatacagaagctctccttaatgccattcatcttaccaataaacttaattgctaaattgacagacaagataccctgcaatatacgctgtcccactggcattccctcgatgcttgctggatgacttatcggatgatacaggtgcaat

SEQ ID NO: 4765 - DNA, 229 bp, Glycine max
  Clone ID: PAT_MRT3847_104307C.1
cggcattcggctcggctcgagccgaacggctcgagtacggctgcgagcagacgacagaagggaagtacttgttagagtgtgcggagcgcgtgcttcataggaacaatggaactaatggaatatgataaaacgacactatgcggaagcaggaacgagagcacgcacatacctgctaaaaagggcatccagccgcgccaacaaaaaggggcaggacaaaaaagaaaagcgg

SEQ ID NO: 4766 - DNA, 273 bp, Glycine max
  Clone ID: PAT_MRT3847_104308C.1
aaaaacccaaagggggccaaaaataaaaaaatttttaaaaaagggcccacccccccccccaattttcaccaaaaaaacccaaaccccccagggggccacccccattcaagccccgccccaaaattctcagggcccttttaaaaacggccccttaaaaaatggtaaaaggcccaaaccgggaaagaagtttttttttttcccaaccccccacatctttttttcacaaaactaaaacccaaggtaaaaccccttcgggcggcaaaaaaacttttt

SEQ ID NO: 4767 - DNA, 249 bp, Glycine max
  Clone ID: PAT_MRT3847_104309C.1
gcactcgttcgggcgatttacagcctcctcgctcaactatcgcttctacttctatgaacatctcttggactttgagtcatccttcactggtatccagccctcacagtctatactctaaaagatatcatatgacttcgaactagacttcccaatatagctgtctaaacttcacatctacccttgcaaactcatagatactgccattcactctattatcgacaacttcaacaacattgacttctacaagat

SEQ ID NO: 4768 - DNA, 380 bp, Glycine max
  Clone ID: PAT_MRT3847_10430C.1
cttatgaatttctctccctccttttaataaaaggaggctcttgcagtccttattgaaagcaacgaatacaaccacccttaccgcatgctaaattttcattccaaacacaaaaacagccttgaggctctgcatacaaatagcaaatctagtacccactgggatctacttacttattcacggatacacaaaaacaggcgacttgttcttctatgcgtcgaaagcataacgggcttggaaactgcacatccttaactagtgcaagcacgcaaaaaaagcatgatgcctcttcatgattgagagcactcactgattaacgggcactggatctggaactttaccaccagtcccatggttgggaacctcaaaaccactgtttggga

SEQ ID NO: 4769 - DNA, 1407 bp, Glycine max
  Clone ID: PAT_MRT3847_104310C.1
gcattgaggcaagtagaaaattgacccgcccaagtggggattcaagtcgggtaccgaacgtgcgactataaagggaatgaacgtggacaccccacgctttcttcacggcaacagaagaataatcaaatttctcagatctatccgacgtcgtcgcagatccaccaaccgttatggctgccttcagcggtgatgaaacggctccgtttttcggcttccttggagccgcagctgccctcgtcttctcctgtactccttccactctcttcaattcccccaatcacttccattagatccgtatttaccgtttcattatttatgtaatccgttcctaaaattgacttttaatccaatttcatgttccactgctcagaaccgtatatgattttaggtgttgaatttggaaccattgatgttggagattcaattagttactgcaaatcgttaagtttgatatatgaaatctgaaatttgattgatctgtgtctgtgaggaaatcggaataatttcactcatgtgaaagtgattgatcgatcgaatcttaatcttagggttgtttgaagtgataaaatctgtgaggaatttcatttgtatttgaactgttgataggtatgggagctgcctatggcacagcaaagagtggtgtgggcgtggcttccatgggtgtgatgagacctgagctggtgatgaagtctattgtccctgttgtcatggctggagttttgggtatttatggccttattattgctgttattatcagtaccggtattaatccaaaggccaaatcttattacctctttgatggttatgcacatctctcctctggtcttgcctgtggcttggctggcctttctgctggcatggctattggtattgtcggtgatgctggtgttagagccaatgcacagcagccaaaactttttgttggaatgattctcatcctcatttttgctgaagctcttgccctttatggtctaatcgttggtattatcctgtcttctcgtgctggccagtctagagctgactaagaaaggagttgtgctgcaaaatattctttgaccacccatctgttttaacctctttttagagggggtgagggaggtaattattagtttttccgagcttagcaatgttcaggcagcattttcaggctttagcaattgtgtgaaagttcaatttaccatttgtggtgtttgtttgtgtaattaggtttatgtttacttaataaagcttcttaagcttcctctttttgtttttttactttattgattgtattttgccatatcttctgacctttatatatattttttgggctgctgaaactggtgcatgtaatgatttgatttggctagcaatgcaacgtatttcatgggtctttccatgttggatgttggtaacaaaaaaaaaaaa

SEQ ID NO: 4770 - DNA, 994 bp, Glycine max
  Clone ID: PAT_MRT3847_104311C.1
tacggctgcgagaagacgacagaaggggacggcaacagaagaataatcgagacacagatcatagtgatcattttttaatttctcagatttatccgacgtcgctgcagatccaccaaccgttatggctgccttcagcggtgatgaaacggcaccgtttttcggcttccttggcgccgcagctgccctcgtcttctcctgtatgggagctgcctatggcacagcgaagagtggcgtgggcgtggcttccatgggtgtaatgagacctgagctggtgatgaagtcgattgttcctgttgtcatggctggagttttgggcatttatggccttattattgctgttattatcagtaccggtattaatccaaaggccaaatcctattacctctttgatggttatgcacatctctcttctggtcttgcctgtggcttggctggcctttctgctggcatggctattggtattgttggtgatgccggtgttagagccaatgcacaacaaccaaaactttttgttggaatgattctcatcctcatttttgctgaagcacttgccctttatggtctcattgttggtattatcctgtcttctcgtgctggccagtctagagccgactaagaaaggagttgtgctgcaaaatattctttgaccacccatctgttttaacctccttttaaagggggtgagggaggtaattattagttgttccgagcttagcgatgttcaggcagcattttcaggatttagcaatggtgtgaaagttcaattcgccatttgtggtgtttgtttgtataattaggtttatgtttacttaataaagcttcttaagcttcctcttttttatactttattgattgtattttgccatatcatccgacttttatatgtattttttgggctgctgaaactggtgcatgtaatgatttggctagcaatgcagtgtatttcatgggtcttttcatgttggatattggtaaaaaaaaaaaaaaaaaaacc

SEQ ID NO: 4771 - DNA, 1262 bp, Glycine max
  Clone ID: PAT_MRT3847_104312C.1
gggacgcgtgggcggacgcgtggctggaacgtggaactgcggaaaccggaatatctcacttctcagatcagatcaatccgacgtcgttgcagttataatggctccattcagcggcgatgagacggcaccgtttttcggcttccttggagccgcagctgccctcgtcttctcctgtatgggagctgcctatggcacagcgaagagtggcgtgggcgtggcttcgatgggtgtgatgagaccggagctggtgatgaagtctattgtccctgttgttatggctggagttttgggtatttatggccttattattgctgttattatcagtactggcattaatcccaaggccaaatcttattacctctttgatggttatgcacatctctcctctggtcttgcctgtgggctggctggtctctctgctggcatggctattggtattgttggtgatgctggtgttaggtataattcttctcttctgccttgccttagtatcttatctgtaattaaacttgatacttactgatttgatcactgtttttactcacatgatttgctatgctttcaaccaatggacatgtgatccttgatggttaattttatacagggatatagtttttataatgatattcctaataaaattcttattttgaagaagtttgaacattgatggttaattttatacagggatatagtttttataatgatattcctaataaaattcttattttgaagaagtttgaacaatttatcttcttccgcagagccaatgcacagcagccaaagctttttgttggaatgattcttattctcatttttgctgaagctcttgctctctatggtctcattgttggtattatcctgtcttcacgtgctggtcagtctagagctgattaagaaagatgtggctgcaaaatattctttgatctaccatctgttttaaccttcttcttattgtgaaggcaaggggggtaaattgttagttgtgaggttaatgatgttgggataccacttgcaaggtttaacaaatgtgaaagcagttgctgcatcagtcatttttgtgtttgtataagtagtctttctttgcttaataaagctttttaagcttctttttccctatgtgccatataattcttaatcttcccttttttggctgctgccattgtaatttatatgtattaatgggtcttttagtattggatgctggtgtagcttaaacgttgccttgtgttctcaataaaagagcattttgagtattctaaaaa

SEQ ID NO: 4772 - DNA, 355 bp, Glycine max
  Clone ID: PAT_MRT3847_104313C.1
acatagaaaacactgcacaaaggttattaaccattgaacacactcacgactgatctgcttttgaaacatagaaacacatacacaaaatgtatacatccgcctgatccactgcgcatctcatgtaatagaaagcacctaaacctattaatacacagcattcactatgtgaacgcctcattagtatgtactattataaccaaatacatatcccataatctactggcaaattgtattcacctgcctgttttttaaatggtgcctagatggaaactccagcatatctagtgaagtgagacgtgcacaaacacaaagcgtgacatcaaaacttccatatcctcggactatcctagactga

SEQ ID NO: 4773 - DNA, 487 bp, Glycine max
  Clone ID: PAT_MRT3847_104314C.1
gtctacagacaggctggggaaggaagtttatttattcctgcctgctgctgtctttctgcccgtgattaatgaggtacttatttctcttgaagagtgtacgacagacattgagcgagctatagttgcgaacaattttttttgtgtgtctgtgcactacctgtatgtgaatgaaattgattgtgatttggtggggctacatgttcttgatgttctgaagggtcatccgcgcttgcgcttcattcatgggcggatcgttttatacatccgacctgtgattgactgggataagggaatggctgtcactttcttacttgagtcgcttgggctaaacgattgggttgacgtgctttctatatatattgtggttgatctgactgacgaacatgcttttcttgttttgagagaggtaaatgtagtgtatgcgatcttgctgtcttcgccacccaaagaaaccaacgcaatttactctctgcgcgatccgtcgcaa

SEQ ID NO: 4774 - DNA, 272 bp, Glycine max
  Clone ID: PAT_MRT3847_104315C.1
aactaaaaaggcaaaacattttcattccgaactgaaacttctgcaatcaccatattcacgataatacgaagaaaagcacaaattcattggccagaaagctgacacaaattttccatatagaaactaaatacactactaatccaggaaacggcacctaactagccaacattccaaaatttcgaaaattcaaaacataaacataggaaaagactgttccccaatcattgtttctaaaaacacaaagggaaataaatatttaagtgtgattttaa

SEQ ID NO: 4775 - DNA, 527 bp, Glycine max
  Clone ID: PAT_MRT3847_104316C.1
gcccctcagagacccagccacttccatctccaccttctctggcgccaaaccagctagcatctttcttcacaccaccctcccacacatctcctctggccatcatcttgtagatctgaagaagccttaacacagatttcttttcccaatgttggacttcgattgaaacagatatgagcagactcccctgttctgacggtcaatcttgcacaccttcacttttggcttcggtggctgcagaggcatagggcagtcggcggaagtttcaccatttttgtgatgcgatttgcgatggtttgcggtctccttcacggttcatagtgggatttactgggtttgcgatgagtttttgttgttcgcaatggtgatatggttttgttcgccttggatttggttggaatgaggcgtcgggatgagttgaagggggtggccggcagcagtggcacatgatggtccgcgttcacatgcaagggaagctttcgcagtggttcgtcattatcctttgggaatgaatttcgcgatgctcccgg

SEQ ID NO: 4776 - DNA, 363 bp, Glycine max
  Clone ID: PAT_MRT3847_104317C.1
tattttcatttccccccctctagtagtcaggggggggaagctgctcgggggtgtggctgataaagacaacctctttaacaagggcagcgattccaccaccgattagaggccccgcccacttgatccagtgggttggtgcaggtccaggtcacgacagtagggccaaatgttacagcggggtttatgggcgctccagaagaggccccacccaacaaaatgtttgcgccgacaatgaaaccaatggcgatgggagcaataattcccaaatttcccttttttggggtaatgggagttgcgttagtcccgttacaccagaccgaaggttattacgatcttcaacaccaagggtttgtcaacttcaac

SEQ ID NO: 4777 - DNA, 452 bp, Glycine max
  Clone ID: PAT_MRT3847_104318C.1
cattttcaggcccacattcaccgtgtcacactgttcccttatctcaaattcaactactagtaattgcttacacataataaacctgtgaattgtaacctgtaggctcaatttcattggcaagaggcatatagaattatcctcaaagaatagccaagaggggtcttaatttggcacaacttggaagtgctaccaattgagtttgagacaccactgtgtctgtgattttgaggtttagaatgtctgctgctgtgtctgcaaccaaggatgttcccttcattgctcatctggaggaagatatcaaaaacaaaggaagcaacaaggttgttggggaagcagaccggcttccttacaatgatgatgccgaatgaactgattcagagacagaggaagaccccaagttggaattggatcttggtcctcagttttccctcagggaacagcttgagaaagat

SEQ ID NO: 4778 - DNA, 291 bp, Glycine max
  Clone ID: PAT_MRT3847_104319C.1
cggtgccccgggggacacaaacaacactttcggcgagaaaaaggggaaaagcgcctcgcaaaaaattataaaccctttgctcttttaacccccccctgaaacccctatgaggggtatttttgtgtaccccgaatacaactcttgatttgagggctcttctcaaaaaagacctttctttccatactctgcaaacacatgatttgacacctatatatatgtcaaagggggggtatccctctcgaacactcatgccctttacaaattcccccccacggcccttatatttaaatt

SEQ ID NO: 4779 - DNA, 423 bp, Glycine max
  Clone ID: PAT_MRT3847_10431C.1
aagaaaacaactaaataaaaacaataattatattgatcaactaaatgtggcatatgaaaatttcattctatacttgtaaagagccgaaaataatataacattaaaaaaagaagatgtagaagaataaacagaatcatacaaaatacacgaaataaaaattaaaaatgctgtggacaacacaatgataaatggaacaccagaagctatgcggcagcatacattagataaaacattaatcgaatggagatttacaaagctaatgaccaatttatgtataacaaacgatgaagcaagaaataggacaaaagaaaagtagaaaatagaacacaaagacggaaatacaaaagaaccaaataaatgggagaaaagaagacgagatagataaaaaaataataataaagggaacaaaaaaatgaaacaaag

(The sequence listing continues in the following parts.)

What is claimed is:

1) A recombinant DNA construct comprising a polynucleotide selected from the group consisting of a polynucleotide comprising a nucleic acid sequence selected from the group consisting of SEQ ID NO: 1 through SEQ ID NO: 142,842.

2) A recombinant DNA construct comprising a polynucleotide selected from the group consisting of a polynucleotide encoding a polypeptide having an amino acid sequence selected from the group consisting of SEQ ID NO: 142,843 through SEQ ID NO: 285,684.

3) A method of producing a plant having an improved property, wherein said method comprises transforming a plant with a recombinant construct comprising a promoter region functional in a plant cell operably joined to a polynucleotide comprising coding sequence for a polypeptide associated with said property, and growing said transformed plant, wherein said polypeptide is selected from the group consisting of:
a) a polypeptide useful for improving plant cold tolerance, wherein said polypeptide comprises a sequence identified as such in Table 1;
b) a polypeptide useful for manipulating growth rate in plant cells by modification of the cell cycle pathway, wherein said polypeptide comprises a sequence identified as such in Table 1;
c) a polypeptide useful for improving plant drought tolerance, wherein said polypeptide comprises a sequence identified as such in Table 1;
d) a polypeptide useful for providing increased resistance to plant disease, wherein said polypeptide comprises a sequence identified as such in Table 1;
e) a polypeptide useful for galactomannan production, wherein said polynucleotide comprises a sequence identified as such identified as such in Table 1;
f) a polypeptide useful for production of plant growth regulators, wherein said polypeptide comprises a sequence identified as such in Table 1;
g) a polypeptide useful for improving plant heat tolerance, wherein said polypeptide comprises a sequence identified as such in Table 1;
h) a polypeptide useful for improving plant tolerance to herbicides, wherein said polypeptide comprises a sequence identified as such in Table 1;
i) a polypeptide useful for increasing the rate of homologous recombination in plants, wherein said polypeptide comprises a sequence identified as such in Table 1;
j) a polypeptide useful for lignin production, wherein said polypeptide comprises a sequence identified as such in Table 1;
k) a polypeptide useful for improving plant tolerance to extreme osmotic conditions, wherein said polypeptide comprises a sequence identified as such in Table 1;
l) a polypeptide useful for improving plant tolerance to pathogens or pests, wherein said polypeptide comprises a sequence identified as such in Table 1;
m) a polypeptide useful for yield improvement by modification of photosynthesis, wherein said polynucleotide comprises a sequence identified as such in Table 1;
n) a polypeptide useful for modifying seed oil yield and/or content, wherein said polypeptide comprises a sequence identified as such in Table 1;
o) a polypeptide useful for modifying seed protein yield and/or content, wherein said polypeptide comprises a sequence identified as such in Table 1;
p) a polypeptide encoding a plant transcription factor, wherein said polypeptide comprises a sequence identified as such in Table 1;
q) a polypeptide useful for yield improvement by modification of carbohydrate use and/or uptake, wherein said polypeptide comprises a sequence identified as such in Table 1;
r) a polypeptide useful for yield improvement by modification of nitrogen use and/or uptake, wherein said polypeptide comprises a sequence identified as such in Table 1;
s) a polypeptide useful for yield improvement by modification of phosphorus use and/or uptake, wherein said polypeptide comprises a sequence identified as such in Table 1; and
t) a polypeptide useful for yield improvement by providing improved plant growth and development under at least one stress condition, wherein said polypeptide comprises a sequence identified as such in Table 1.
